United States Patent Application Publication US 2021/0199660 A1 - sequence listing, part 58

SEQ ID NO: 833673 - DNA, 120 bp, Artificial Sequence
  ENSG00000259287_3 (sequence is synthesized)
tcacgaagatctggcctgacgggactccccctccccacctccaacctgatcctgctgctggctgtccgcaaagaacctccgactggcttgctgaaataaatcaagtgcttaatcccggtc

SEQ ID NO: 833674 - DNA, 120 bp, Artificial Sequence
  ENSG00000259289_0 (sequence is synthesized)
gggagaaagaactccagtggctgccaagagcccctgccagatgctcctccccaccaccctggcatcttgtgcatagtagatctcgggaaatgcctccatcatgactgctattggaaagga

SEQ ID NO: 833675 - DNA, 120 bp, Artificial Sequence
  ENSG00000259289_1 (sequence is synthesized)
ggaaaggaaggccaatctcctgtttgttgcccagagtgctggctgtgagtcacctggagtttcctagaggtgggatttcgccaggttgcccatgctggtcttgaactcctggactcaagt

SEQ ID NO: 833676 - DNA, 120 bp, Artificial Sequence
  ENSG00000259289_2 (sequence is synthesized)
gcggcctggtaaagaggtgtggccagaggacagcatggagcacagccaggagaaactgttctgggtgaagagccagatctgctctggaatgcagcaaagagctccttcctgctttctcag

SEQ ID NO: 833677 - DNA, 120 bp, Artificial Sequence
  ENSG00000259289_3 (sequence is synthesized)
cccctgcagcagctcctgcttcactccaagaaaatgccagccccctaagaacctgtccctttggaacagtggatccaaaagctgacccaagagaccttgaacttaacacctctgtgtcat

SEQ ID NO: 833678 - DNA, 120 bp, Artificial Sequence
  ENSG00000259289_4 (sequence is synthesized)
gggctccttaatgatagaaagaagattgctttagaagactggtttgcaaaccagtctgctgggcactagaagccttgggaagatttgaaaaataaatcttattggcctcaccatttcaca

SEQ ID NO: 833679 - DNA, 120 bp, Artificial Sequence
  ENSG00000267769_0 (sequence is synthesized)
ccatctgtgcctcattggtcacagcttcgtttgctgagcacctactgtgtgccaggaccctgctgggagctggtcggctcgcttggtttactcctcctaacaagctgccagggaggcctc

SEQ ID NO: 833680 - DNA, 120 bp, Artificial Sequence
  ENSG00000267769_1 (sequence is synthesized)
accatcccattcctaaacccaagagggacaggaagtccgggcgatgtgccccatgccacgccaccctcgtggcgggaccctggggagagcggacagcagaaccagcctcgccctggccac

SEQ ID NO: 833681 - DNA, 120 bp, Artificial Sequence
  ENSG00000267769_2 (sequence is synthesized)
gaagagctcatggactcgtggctccaccctgttgagccctacaccaaggagagttccgtaacccacgtggcacagtgacctggcagagaagcctcgcagagaagccctttctcccaacct

SEQ ID NO: 833682 - DNA, 120 bp, Artificial Sequence
  ENSG00000267769_3 (sequence is synthesized)
gctcggacgcgtctgtctcacccgtctcctctcaggcccctcccatgaacttacgggctgtgtcaatttctgtgccgtaggtctattaaaaccttctgggaggccaggctctcagttcaa

SEQ ID NO: 833683 - DNA, 120 bp, Artificial Sequence
  ENSG00000267762_0 (sequence is synthesized)
catccttggcacccctatacctgagcctgccctcatctgaccctctcttcttcaccagccccatcgcaagtatacccagctttatcctccacatcaggggctgaggtgacaacatgtcgg

SEQ ID NO: 833684 - DNA, 120 bp, Artificial Sequence
  ENSG00000267762_1 (sequence is synthesized)
tctgcacgcagggaacaaactcctctccctgtcggcctctgcccagcacgctgtggatggttcatctgccacacacacaaagcagtgcgctggaaggaaagatctggaacactgagccca

SEQ ID NO: 833685 - DNA, 120 bp, Artificial Sequence
  ENSG00000267762_2 (sequence is synthesized)
gggcttcgccccatccagggccacttggataccatggattgagatggcagggccacagaacgcaatccacctggaccctggagtccccaaggagctaccctggagaccagctggaccctc

SEQ ID NO: 833686 - DNA, 120 bp, Artificial Sequence
  ENSG00000267760_0 (sequence is synthesized)
agcagagagaggcagcgcagaggctggagccgacttcccctcaccacagatctgggtcaactctaaggagcactttgtccagcaaaagggaaacctggcttgttccctcgagcctggaat

SEQ ID NO: 833687 - DNA, 120 bp, Artificial Sequence
  ENSG00000267760_1 (sequence is synthesized)
ggacatggaaagggtgtctttttggcagaagcaaggatctccagatggtttcgaaacagaatttacccagcaccagaccctcctgggccagtcacatggcctttgagtgaccaggatctt

SEQ ID NO: 833688 - DNA, 120 bp, Artificial Sequence
  ENSG00000267760_2 (sequence is synthesized)
cccacagggccatggatctctcaactgagctgagctaagcttcctccactgatccccccagtctgctgtgtgcagggagcaacatagaaacatcccccaagacagctcttcaaacaacgc

SEQ ID NO: 833689 - DNA, 120 bp, Artificial Sequence
  ENSG00000267760_3 (sequence is synthesized)
aacatagaaacatcccccaagacagctcttcaaacaacgcattactgcttatggattattattattattatcattattattaattattttttgatggagtttcactcttgttgcccaggc

SEQ ID NO: 833690 - DNA, 120 bp, Artificial Sequence
  ENSG00000267761_0 (sequence is synthesized)
gaaggtacttgcttctcctttgccttgtgccgtgattgagcagacaattgagaggcctggctcatggatgggtttgaaccacctcaggactgaagatgagcggctcagtttcactaacaa

SEQ ID NO: 833691 - DNA, 120 bp, Artificial Sequence
  ENSG00000267761_1 (sequence is synthesized)
caagaacagtgacaaattccctgcccggcccaagctctgtggtccttatgcaggaccttcccctaggatactgttctctgtgcaggagcctgagcctttctgccacccgacagtgactgc

SEQ ID NO: 833692 - DNA, 120 bp, Artificial Sequence
  ENSG00000267761_2 (sequence is synthesized)
acagaacgggggctgtgtgggctgagggcacagaatgtttctccagccaccgcaggaagcagcaagaataccgaatcctggttgcctctgacaatttttcctcttttttttttttttttt

SEQ ID NO: 833693 - DNA, 120 bp, Artificial Sequence
  ENSG00000267761_3 (sequence is synthesized)
gagatccctatgccaagccctcaaagcagccccgactttccgtgcaataaagcagcagtgagaaaggctcagagtaattaagtggctgacgcacagaagaagccgttacaaagaattgac

SEQ ID NO: 833694 - DNA, 120 bp, Artificial Sequence
  ENSG00000267761_4 (sequence is synthesized)
taaattgcccattcattagcagctcggcatggaaggagaattacaaatagacggcggagcccgcagtaattcaatctaaccttgtacttacagaaaacaatgagataatgaacagaaaaa

SEQ ID NO: 833695 - DNA, 87 bp, Artificial Sequence
  ENSG00000267761_5 (sequence is synthesized)
cactttaaaatggaagcaccaacgctggcatcagcagagtccttcaaagaatttgattcagtggaggccaactcaacaaaatagaaa

SEQ ID NO: 833696 - DNA, 120 bp, Artificial Sequence
  ENSG00000267761_6 (sequence is synthesized)
tgtggtccttatgcaggtagagtcctcatgctgaatgtttgcaagctgactcttcaataagaccgtgagctccttgagaaaggaattgggtctctgtgcagtgtatcacatctacctcaa

SEQ ID NO: 833697 - DNA, 120 bp, Artificial Sequence
  ENSG00000267761_7 (sequence is synthesized)
ggagcagctttgaaaatgtggttggacgaaaatgaaatttcagatgtgtgtgtctcagcattgatttttctatttgtaataacacaccctggcatatctcctttgatatcaagaggataa

SEQ ID NO: 833698 - DNA, 120 bp, Artificial Sequence
  ENSG00000267761_8 (sequence is synthesized)
aatgtccctaacagcatgctcttcattctgggatgccagtggcacccctgtcccagatgtgacaaccaaaaatgatgtcagacattgctgaattgtcccctggaggaggagaaaaatcaa

SEQ ID NO: 833699 - DNA, 120 bp, Artificial Sequence
  ENSG00000267761_9 (sequence is synthesized)
cccctttgagaactgctgggcagctctaaaggtcatccctaagttcagggtgaggagatgacctacccttctgccccgcaacgccatcctacatctgaaattcttcttaagggcatggtg

SEQ ID NO: 833700 - DNA, 120 bp, Artificial Sequence
  ENSG00000267766_0 (sequence is synthesized)
gccataggcaaaaaagtagcttagggtcaccgcagtcagtgtggagaagggaattttggggggaaatctggacagacgaatttgaccaatctatgaggctaattatagaaaaaaacacaa

SEQ ID NO: 833701 - DNA, 120 bp, Artificial Sequence
  ENSG00000267767_0 (sequence is synthesized)
agtcaccgcagtttctggagccattcacccacaggctcgcatcacggtggcttcaagttggtggtgcgtcccttgggccctcacccgccggactcctactttcaaatcttaagccccaca

SEQ ID NO: 833702 - DNA, 120 bp, Artificial Sequence
  ENSG00000267767_1 (sequence is synthesized)
ttgtgggaacctgttcaggtcacttcagtctaggccctggtgtttaggctgggggaagcgggagagctcatgggtgatgaagccgtttctgaaagccagtgtggttcctgtggccacaaa

SEQ ID NO: 833703 - DNA, 120 bp, Artificial Sequence
  ENSG00000267767_2 (sequence is synthesized)
actgcagtgtgatgctgagaacttttcactgatggcctcaatggggtatcttcttccaaaattggaactgagctacctgatggaaaatgagcaagattattgtgtggtgaagagaggcct

SEQ ID NO: 833704 - DNA, 120 bp, Artificial Sequence
  ENSG00000267767_3 (sequence is synthesized)
ctcataaagttcctgtccagatgtgccttctctctggatccacatttcttctctcatcacagatctttcacctggtatcactttttgtcatccttaaatagaattttctttaagaatttc

SEQ ID NO: 833705 - DNA, 120 bp, Artificial Sequence
  ENSG00000267767_4 (sequence is synthesized)
gtcagcagcactgggtcagccggtgaacgggtgtgcagcgtcctcagcgccgcagcagtcagcacctgtgggtgctctagctctttccctcggggtcaccggaggcagagcctcccctac

SEQ ID NO: 833706 - DNA, 120 bp, Artificial Sequence
  ENSG00000267767_5 (sequence is synthesized)
gcggagtagaggagcagctcacatggcagccgccacagaggacaccagatcatgccaacacccccacaactcctgcccgcctgcaggcagctctgggctcaggacaccgcctgcaagaac

SEQ ID NO: 833707 - DNA, 120 bp, Artificial Sequence
  ENSG00000267767_6 (sequence is synthesized)
ctttatagcgcagctctccaaaccttggaggcgaggacattctatgtgcccgccctggaaaggcctgaacctataacatctgggctgtgatggtttctgaggtggacaccaggaccaaca

SEQ ID NO: 833708 - DNA, 120 bp, Artificial Sequence
  ENSG00000267767_7 (sequence is synthesized)
cttgtcagcatggcacaatcaggcatttctcttctaagtaggatgtgcagccaaaaactcagctgtctgtgagctgtcttctcccaggaacgaggacataagatgtacatcaggttttga

SEQ ID NO: 833709 - DNA, 120 bp, Artificial Sequence
  ENSG00000267767_8 (sequence is synthesized)
tattagagtaatactggccttatagaatgagttacgaaaagttgcccctttctccactttctgaaagagtttgtgtaacacaggtctgaactgcacagatccacttacatgtggattttc

SEQ ID NO: 833710 - DNA, 120 bp, Artificial Sequence
  ENSG00000267767_9 (sequence is synthesized)
ttccactgcggcctctcctgagacagcaagaccaacccctccttttcatcctcctcctcctcctcagcctactcaacatgaaaatgacaaggatgaaacctttatgatgatccactcatc

SEQ ID NO: 833711 - DNA, 120 bp, Artificial Sequence
  ENSG00000267767_10 (sequence is synthesized)
cattttcttttctctagcttattgtgaacatcttaggctagtgtgtcgacttctgacttggctcatctgaacccaagtccttggacacattcacaaacaccccagggtcttgggcttcca

SEQ ID NO: 833712 - DNA, 120 bp, Artificial Sequence
  ENSG00000267767_11 (sequence is synthesized)
gtttgtgctagaaggacaaagggcaggtgaagcttgtttgccgtaactagaaggagcagaaactgctcccagcagaacaagatcaaatcatggggaacagtggtcacctgccatttctag

SEQ ID NO: 833713 - DNA, 120 bp, Artificial Sequence
  ENSG00000267767_12 (sequence is synthesized)
cttacatgagaagaaaacaaatagggtgatgctgcatgcttctgtccccaaagaatccctgtgcaggtgccgagggtgccccaaagacgaggctgtgcttgccgtgcccaccacagaagc

SEQ ID NO: 833714 - DNA, 120 bp, Artificial Sequence
  ENSG00000267767_13 (sequence is synthesized)
acatttgacctgatcaaaagcaggtggaaaaggtcctgaagcacagatattttctcagtgatgttgttttctccaaaatgaaagagggaaggtaccctggcttaggcccctggtgttctg

SEQ ID NO: 833715 - DNA, 120 bp, Artificial Sequence
  ENSG00000267767_14 (sequence is synthesized)
attgaaggtgagaatggaagtatcttcttcaacatgttctcccatctgactgcaacaagtgtgctccagccaccagtgtcccagttgctctgaatgatggtgagaagggtacccaaacac

SEQ ID NO: 833716 - DNA, 120 bp, Artificial Sequence
  ENSG00000267767_15 (sequence is synthesized)
ttgaatggtactgtaccctctacttgccatctgaatcctcacttgtggaacccaggcactctggctgtattcgcgagtaagcataggtgtgggactgtgtcctgccattgcaccatcttt

SEQ ID NO: 833717 - DNA, 120 bp, Artificial Sequence
  ENSG00000267767_16 (sequence is synthesized)
aatctggacttgtggacctcaggctctctgactattcatggacagaagtttctgcaggcacaggtggggtgctgtttcctcccattgtacacctgaattcaggacttgtggaccccaggt

SEQ ID NO: 833718 - DNA, 120 bp, Artificial Sequence
  ENSG00000267767_17 (sequence is synthesized)
gttctggctgtgttcatgaacagaagtgtcccccccaaacaaacccatatatggtgccatctcctcccattacaggtatggtgccatctcctcccattgcaggcattgcactgcctatac

SEQ ID NO: 833719 - DNA, 120 bp, Artificial Sequence
  ENSG00000267767_18 (sequence is synthesized)
tctggacttatggccctcacatgctctgattgtattcataaacagtagtttcttcagtcacagatatggcaccagcccctccaacagaaacagatgtgctcaagctgagtggtccaaagg

SEQ ID NO: 833720 - DNA, 120 bp, Artificial Sequence
  ENSG00000267767_19 (sequence is synthesized)
cgtttgacagaagtcatgaacagaagtatcttggggcacatgtttcttctctgttgtgcaggcttctccagcagtaacaggtttgcccaggccatatgggccccaagcgctctgaccaga

SEQ ID NO: 833721 - DNA, 120 bp, Artificial Sequence
  ENSG00000267767_20 (sequence is synthesized)
cacaagaagagaagacttgcagtcacaggtagtgtgttgtcccctgctactgcaacataggtgcttggaaaggtgcaacagggtgctctgcttgtggtggaaacataaaggcctccaagc

SEQ ID NO: 833722 - DNA, 120 bp, Artificial Sequence
  ENSG00000267764_0 (sequence is synthesized)
gaaggcggctagagatagaaaaccacccagctctgcatcctgagacaaagaagcctttccctgggctcatatgatagaggaggattgcaagctcttcgctgaaggatcacaacttatatc

SEQ ID NO: 833723 - DNA, 120 bp, Artificial Sequence
  ENSG00000267764_1 (sequence is synthesized)
cctccttctggtactactaggaaacttcgcagttcaataagaagcattgtctcaaactaaatcattgcttgttgaatgagcacagactccgagcaacatgcagccggggttccatgacag

SEQ ID NO: 833724 - DNA, 120 bp, Artificial Sequence
  ENSG00000267764_2 (sequence is synthesized)
atgagacctagcctgtccccaggtagcaacgaaagactgaaatgatttaaaagcaaccaagaaagggtcacaaggcattaatacagccacctggcaaagagcatatctggagacagacgt

SEQ ID NO: 833725 - DNA, 120 bp, Artificial Sequence
  ENSG00000267764_3 (sequence is synthesized)
gtaagaggaatgaatccaggcagggtgaggaggcggtgggaagtgagcccggccctgaaggtgggcaagagccaggcaagaagaggagaaagattgttctcatggtgggaggaatgcaag

SEQ ID NO: 833726 - DNA, 120 bp, Artificial Sequence
  ENSG00000267764_4 (sequence is synthesized)
gccacctatggaaatacaagtggagcagtttggctggagaaaggggttgtgtttgcttatggaggccttggatgccccgttgggagaatggacctcactttctggggctgactgtgttgc

SEQ ID NO: 833727 - DNA, 120 bp, Artificial Sequence
  ENSG00000267764_5 (sequence is synthesized)
gattttttttctcttgagccatgcctggaacacggtttgtattcaacagcaacacacaaactgacagttccctgcaaggctgtcatatgccacttgcttcacagaaacacctcgcttatt

SEQ ID NO: 833728 - DNA, 120 bp, Artificial Sequence
  ENSG00000267764_6 (sequence is synthesized)
ttaagcctgaaaacaaagccacaggatgagtattattctcattcctatgctacagataagaaaatcgaggtttcaaaagacggaagaatgaggttaaagtcccacggctagtaagtggca

SEQ ID NO: 833729 - DNA, 120 bp, Artificial Sequence
  ENSG00000267765_0 (sequence is synthesized)
ttggtctctgtgtacaaaacaaaaggaggggggcaggggacagccatcaagccctcttgagcctccagctgagtggaagcaaatggaagatcttcagggcaggggggaggctgggggata

SEQ ID NO: 833730 - DNA, 120 bp, Artificial Sequence
  ENSG00000267765_1 (sequence is synthesized)
gggtttagcagcctcctccccccataccctctgcagccctgcactcccacacatctgtccctgctgatagtgtctattggaagggaggcagttaatctcccctacactctgttgttaatc

SEQ ID NO: 833731 - DNA, 120 bp, Artificial Sequence
  ENSG00000267765_2 (sequence is synthesized)
ttagtactttcccaaactcaatcctaaacctcagcatcttccacaacctaagtcaacccaagacaccaatccagctccaaccctagcctcaatccaactcggcccccaaaacctgcacca

SEQ ID NO: 833732 - DNA, 120 bp, Artificial Sequence
  ENSG00000267765_3 (sequence is synthesized)
tccccaaatacaggccttgcacccaacctcagccagtgctagcaccatcaccagctccatgtccagccttagcatcagtcaggggcaccagctcctgcttggatccctgccacaaaaccc

SEQ ID NO: 833733 - DNA, 120 bp, Artificial Sequence
  ENSG00000267765_4 (sequence is synthesized)
agccccagccacaaaccccagccctagccacaaaccccaccccttggccagctccaaagtccagccttaagccctggcaaaaccttaatcctagtatcggtcaccagtatacacttatcc

SEQ ID NO: 833734 - DNA, 120 bp, Artificial Sequence
  ENSG00000263657_0 (sequence is synthesized)
aaactttctgagcgttcgcggaggcggagggcgcgcggcggactcacagctggttgatggcgttctgcgagatgaccgcgttggcggagaaggtcttgctgtctccaggttggagtgcga

SEQ ID NO: 833735 - DNA, 120 bp, Artificial Sequence
  ENSG00000263657_1 (sequence is synthesized)
ttctcctgcctcagcttcccaagtagcagggattacaagcgcgcgcctccaggcccaggtatctacccaggagtccagaagtggaattgctggatcatatgatcatattctatttttaat

SEQ ID NO: 833736 - DNA, 120 bp, Artificial Sequence
  ENSG00000263657_2 (sequence is synthesized)
ccaatagtgcacaaggcttccaatttctccatatcctcaccaacgctttatgttgatagtggccatcctaatgggtatgaggtagtatctcaccgtggtttcaatttgcatttccttaat

SEQ ID NO: 833737 - DNA, 88 bp, Artificial Sequence
  ENSG00000263657_3 (sequence is synthesized)
gattagtgattttgatactgttacccaggctggagtgcagtggaaccttcttagctcaccacagcctttaattcctggactcaagcag

SEQ ID NO: 833738 - DNA, 120 bp, Artificial Sequence
  ENSG00000263655_0 (sequence is synthesized)
acggtttgagagctgagcagttcttccagcctggcccagggtctctcatatgcctgtggccatctggttgctcggcaggggttggatcatctcaggcagctcctcagtaacatgtctgga

SEQ ID NO: 833739 - DNA, 120 bp, Artificial Sequence
  ENSG00000263655_1 (sequence is synthesized)
gtatctacaccctttcttcacatttataggcaacagaaagaaattcttcacaggaaatgacttgaatttaatttgccatggacttcttcagctggataccagaaatccattcgttctgta

SEQ ID NO: 833740 - DNA, 120 bp, Artificial Sequence
  ENSG00000263655_2 (sequence is synthesized)
gagcacctgaaagtgctgaggcccaataatgagggcagaacacttggcttcagagagtacacagcatctggcagagaaagaaatataccacaaatggggcgtttcggaggttaaggaaaa

SEQ ID NO: 833741 - DNA, 120 bp, Artificial Sequence
  ENSG00000263655_3 (sequence is synthesized)
ttccctctccccgcacactgggggcactgaagaaatgaagaacacgatgcatccactctgaagcagagattcagaaaaaagctaaaggagttgacttgcttgagtgtatgcccctgggag

SEQ ID NO: 833742 - DNA, 120 bp, Artificial Sequence
  ENSG00000286547_0 (sequence is synthesized)
agtgtcccactggccatctttgatgaccaggtgtgtagcaggttcgagcccggcttggaagttgtttctactatgagccaggcactgcctgagcacctgggtcccaccagtgaacaaata

SEQ ID NO: 833743 - DNA, 120 bp, Artificial Sequence
  ENSG00000286547_1 (sequence is synthesized)
gacgacagtccccgccccgggggactagccttttcctagcaggacacagaaccccaaacactcacagaataaagagcttcctggctcgaggccttcacccactcagcctcagcttccacg

SEQ ID NO: 833744 - DNA, 120 bp, Artificial Sequence
  ENSG00000286547_2 (sequence is synthesized)
tctgtaaatggggatatcacagctgcgttacaggactgtcattagactttgtcgataagctgaacacatagagagctcagcacacaaagagcttatacacgctcaatatccgtgcctggc

SEQ ID NO: 833745 - DNA, 120 bp, Artificial Sequence
  ENSG00000286547_3 (sequence is synthesized)
tgtgcgccaggttccagccgtctagtgtccgggatgaagcagcacatgtcatcattgctgcacccaagatggcaggacgtctcgcggccacgacatcccctctatggccgcacagtctga

SEQ ID NO: 833746 - DNA, 120 bp, Artificial Sequence
  ENSG00000286547_4 (sequence is synthesized)
gtggagcacgctggagaggaagagtggggaatgaggcaggtctagcctgctccagcccagctggacccagccagggcgtctgcagggaaccccagactgaaggctcctggactctggcct

SEQ ID NO: 833747 - DNA, 120 bp, Artificial Sequence
  ENSG00000286547_5 (sequence is synthesized)
catccctgccaggaaaggggtggaggccagaccacagggttgggcccttctgaagcgggcactcaaaaggaagagacggctgtgcctcgtttgtcaaatgaaatcaattactaacccaca

SEQ ID NO: 833748 - DNA, 77 bp, Artificial Sequence
  ENSG00000286546_0 (sequence is synthesized)
gttttgtctgcggctaatcctgctacgtttcttggttccctgacggggaaacgaggtaactgatggacagccgaggc

SEQ ID NO: 833749 - DNA, 120 bp, Artificial Sequence
  ENSG00000286546_1 (sequence is synthesized)
ccctgacggggaaacgaggtaactgatggacagccgaggcagccccttaggcggcttaggcctgccctgtggagcatcctgcgggggactccggccagcctgagtgacaggatccaaaga

SEQ ID NO: 833750 - DNA, 120 bp, Artificial Sequence
  ENSG00000286546_2 (sequence is synthesized)
gcactcccgggtaggaaattgccccagtggaacgccttgccagagcagcgcatagcaggcccccgtggaggattaacacagtggctgaacactgggaaggaactggcacttggagtccgg

SEQ ID NO: 833751 - DNA, 120 bp, Artificial Sequence
  ENSG00000286546_3 (sequence is synthesized)
acatctgaaacttgctttggcttctcgattggttctgaactcccaggaaggtgaaaaagcagcgtcattacttagcaccggaagccccggcactcaacagggatactgtgcagtcctgca

SEQ ID NO: 833752 - DNA, 120 bp, Artificial Sequence
  ENSG00000286546_4 (sequence is synthesized)
tgtgagcagctcaagagttcttttcaagtgagacctgctgctaggagagaagtaagctgacagcacccagcaaccacactgttgagaacccctgtggcatcatgttcctgctgaggccgg

SEQ ID NO: 833753 - DNA, 120 bp, Artificial Sequence
  ENSG00000286546_5 (sequence is synthesized)
ccactttcttgccaaactacttgcagccagtgactgagcatgggaaagcgagaccctagagcccagctattcctgcccagtgcaggactcctccagacttccagactgcactgcagactg

SEQ ID NO: 833754 - DNA, 120 bp, Artificial Sequence
  ENSG00000286546_6 (sequence is synthesized)
aggcacttcctagctgagcctccttcttttcttctctcctttcagctgctcctgctccattgcccatttctctcacctttatcctgcacttctgcttccatcttggcatcttcttccctc

SEQ ID NO: 833755 - DNA, 120 bp, Artificial Sequence
  ENSG00000286546_7 (sequence is synthesized)
aagacccaacctgacaccatcagtattattacactcttcatttcccagtggaggaggtggggatccaggcaagaaagacaaagcgtaaatatgctccctttaaaattttgtactgctcta

SEQ ID NO: 833756 - DNA, 120 bp, Artificial Sequence
  ENSG00000286546_8 (sequence is synthesized)
tcgcttctgggtctttgggctaagatcaagtgtaaaagtttgtactactcttaggtttgaggttcacatgaaaagaacatctcatcaacatttcaaaagaaaatttgaatgaattgtatg

SEQ ID NO: 833757 - DNA, 120 bp, Artificial Sequence
  ENSG00000286546_9 (sequence is synthesized)
agagagaccgtgtcatttattcataaaactgagtccagtgggacctgcccattcaatgcaaaaatgcaaaggtatgtaggatcttagaaaatgaaagacaatgctaaagacaggaaccat

SEQ ID NO: 833758 - DNA, 120 bp, Artificial Sequence
  ENSG00000286546_10 (sequence is synthesized)
ttccagcatctgttgttgaggtccgaatctggaaagactcagaatgtatttatcagaaaaacaatttccccagtaagacaatagctgcaaagctggtcatcacatgcaaatcttgacctt

SEQ ID NO: 833759 - DNA, 120 bp, Artificial Sequence
  ENSG00000286546_11 (sequence is synthesized)
cacttttgcacaattttggaacatgtaactggtaagcactacctacaattttttgctttgcagacatggaaaatacaacatactgacaaaatggacttttaaaatttgggttttacctta

SEQ ID NO: 833760 - DNA, 120 bp, Artificial Sequence
  ENSG00000286546_12 (sequence is synthesized)
acaaaataaacttgagtctgattcttcatcttcaaacatattagaaagggataaaagaatttctctgtgatattttaacccttaggaatatctgaacatgagtgtgtttgtacacataat

SEQ ID NO: 833761 - DNA, 120 bp, Artificial Sequence
  ENSG00000286546_13 (sequence is synthesized)
ttaaaaattaaatatgtttcttttcatggcataattttctaaaggaaggagggacaggacttaccctcgctagagtctttcgaacattctggcttctttgctttgctctttttgtagggt

SEQ ID NO: 833762 - DNA, 120 bp, Artificial Sequence
  ENSG00000286546_14 (sequence is synthesized)
ggagagaggccttttggctctaacccctctggaatcacgaagatttaatattctcatttaaatatttaccagtagggttcaaaattatgtgaaatttaaaaatgttttcttcttagtaaa

SEQ ID NO: 833763 - DNA, 120 bp, Artificial Sequence
  ENSG00000286546_15 (sequence is synthesized)
cctacacacacgctgaatcttaattgcagtttcatctgtcatcatggctgagcgaaattctggcaaggacttgtggttctccaacctacatagacttaaacttaaggcttaagctaaaac

SEQ ID NO: 833764 - DNA, 120 bp, Artificial Sequence
  ENSG00000286546_16 (sequence is synthesized)
atttttgtagataacattagtgattcacacaaatgtaaaatcttacacatgtgcttttataaatttagaaattctccataagggaaccctgttaatattttttcctccaagagtgttcga

SEQ ID NO: 833765 - DNA, 120 bp, Artificial Sequence
  ENSG00000286546_17 (sequence is synthesized)
tttcaatcttcatagattaattgacaattgtcattgtgcaatttcatcttactcagtcctgaacgcagggctagaggaatggagaaaggaatggggctagaaattaccctgcttctattt

SEQ ID NO: 833766 - DNA, 120 bp, Artificial Sequence
  ENSG00000286546_18 (sequence is synthesized)
aacaaactgtttttagtaatccagattctaaacaacttctgtatgtcccagttaaattactgtgcttcctattttcctcaatgtccctctaagtctatccttgggggcaaataaattaaa

SEQ ID NO: 833767 - DNA, 67 bp, Artificial Sequence
  ENSG00000286545_0 (sequence is synthesized)
caccctattggccaggctggtcctgaactccatgagccaccatgcccggcaacagtttacttctgat

SEQ ID NO: 833768 - DNA, 120 bp, Artificial Sequence
  ENSG00000286545_1 (sequence is synthesized)
agccatgagccaccatgcccggcaacagtttacttctgatggttaacttcaaagttaggagttgttccaccagaggattgattataagcctagaaaatgaacttgctccctgcttaaaga

SEQ ID NO: 833769 - DNA, 120 bp, Artificial Sequence
  ENSG00000286545_2 (sequence is synthesized)
atccaaacaagctgaggaagtttcttgatctgacaatggcctcaattataccttatcttccctacaccagacaagactatcaaccaattatcttcaggccaccaaacttcttgtctctag

SEQ ID NO: 833770 - DNA, 120 bp, Artificial Sequence
  ENSG00000286545_3 (sequence is synthesized)
gtcttcaagaaagagtgccttttccccattaacaccatagaataaacttgtaaatgtaacttctggactgatagatcaggggttggcaaattttcagcttcaccacctgtttctgtaaat

SEQ ID NO: 833771 - DNA, 120 bp, Artificial Sequence
  ENSG00000286545_4 (sequence is synthesized)
acagttttactgtaacaccaattacatccattcatttacatattgtcttagttgtgacagagacaacatggcctacaaaggtgaaaagattcactaactgatcctttatgaaaaggttgg

SEQ ID NO: 833772 - DNA, 120 bp, Artificial Sequence
  ENSG00000286545_5 (sequence is synthesized)
ccgactcctgtgatagattatgtttaccttggttttggcctttaattttatttagtaggcatgggggaaccaaaaagattattcagtatgcagcagctcctatgaagtttagcttaatca

SEQ ID NO: 833773 - DNA, 120 bp, Artificial Sequence
  ENSG00000286545_6 (sequence is synthesized)
aatacatagaggtgagattttcttcagtgcatctgaatcaaaatattaaaatgatccaaatgagtgattaagttccctctgtctgcacaaaacacataggcctacagtattgaagcagac

SEQ ID NO: 833774 - DNA, 120 bp, Artificial Sequence
  ENSG00000286545_7 (sequence is synthesized)
tccttttacgacaagtaataatacgttggacttacattaaatgaagacatgaaacaatctggcaacattaataaagccaggacaatcatcaattttgctgttttattatacagtagggat

SEQ ID NO: 833775 - DNA, 120 bp, Artificial Sequence
  ENSG00000286545_8 (sequence is synthesized)
aaatattactaatgattcttttcagagggcattgaaatatataaaatacaaataattgaatacttttcttcacttagctagctataaactcattgcttcagtttgttgttttttgtataa

SEQ ID NO: 833776 - DNA, 120 bp, Artificial Sequence
  ENSG00000286545_9 (sequence is synthesized)
tttaaaaagcatacgaacatgattacatcccctttctccttttgtaagagtctaaataactttttttattcaagatggtttactgaactagtatggcctccagaaacctccaaaattaaa

SEQ ID NO: 833777 - DNA, 120 bp, Artificial Sequence
  ENSG00000286545_10 (sequence is synthesized)
gtgtgtgtgtgtgtgtgcgcgtgtgtatgtgtgttgtgttttgtgtgtgtgtgtgtgtgtgtatgggaggcatgaagtgcattcatcaggaattaagagtcaaatttctgatagacaaaa

SEQ ID NO: 833778 - DNA, 120 bp, Artificial Sequence
  ENSG00000286545_11 (sequence is synthesized)
ttaagagtcaaatttctgatagacaaaaaggaagttatgctctaaagggtgggcttaggtacagtgtgagaaatggggctataaatgagaatgaattaaaattctacaaaaaacagacaa

SEQ ID NO: 833779 - DNA, 120 bp, Artificial Sequence
  ENSG00000286545_12 (sequence is synthesized)
agctgttacaacaaattctctctgccctctccctctccagaacacaaccacccaggtactttccctaggaaaaaaagagaaggctgttatccaaagaaatggaatagaatgtctggtaaa

SEQ ID NO: 833780 - DNA, 120 bp, Artificial Sequence
  ENSG00000286545_13 (sequence is synthesized)
agctaagatgtgggtactacgaccacccacatggaggtactaaatcttccatgggctggcatttgggagcaacccctactagaaaaatactccatcctactcaccataaagcaggggttc

SEQ ID NO: 833781 - DNA, 120 bp, Artificial Sequence
  ENSG00000286545_14 (sequence is synthesized)
tcaccctgctgtccagagacccccccctcaagggcctatggattgaattcagaaaattcagtgaacttgaattcagaaaattcagtgaacttgaatgagaagaaaaccacatattatttt

SEQ ID NO: 833782 - DNA, 120 bp, Artificial Sequence
  ENSG00000286545_15 (sequence is synthesized)
tatagcagtatcagcagtgcctgtgactgtcactaacacaaatcacagatattttcatgtatcacattatagttgttgcagatctcaaaataccttttatgttcatgaccactgcaaaat

SEQ ID NO: 833783 - DNA, 120 bp, Artificial Sequence
  ENSG00000286545_16 (sequence is synthesized)
tagaatcagactaactgctctgctaggtcttaatattcagtgtattaataaagaacatattactctatagcatttgtttttaatattttgataaactgtatttcaatcaaatcaatttcc

SEQ ID NO: 833784 - DNA, 120 bp, Artificial Sequence
  ENSG00000286545_17 (sequence is synthesized)
tttgtaatcaaacattttattttatacacttaaaaaacttgaaaaggggtccataggcttcaccagactgctaaagggggtgcatggcacaaagtggactgagaattgttacactgctgg

SEQ ID NO: 833785 - DNA, 120 bp, Artificial Sequence
  ENSG00000286545_18 (sequence is synthesized)
aaaacctcctatccacacagcctactcactcaccacccagtcaggcttcctatttagagaaaaggcctttagagacacagacttaccaacacatcagcagaggacatctattaactctct

SEQ ID NO: 833786 - DNA, 120 bp, Artificial Sequence
  ENSG00000286545_19 (sequence is synthesized)
gggcctttcttaaatgaatggacaacaaaggaatacaaaagcatgtgacaaaaatctagagctggagtcagtgaactacaacccaagggcaaaatccgctctgccacctgtgtttgtaag

SEQ ID NO: 833787 - DNA, 120 bp, Artificial Sequence
  ENSG00000286545_20 (sequence is synthesized)
cacccacaagctaagaatgaactttacatattttttcatggttgaaacaaaagaaatcaaaagaatatttcatgacacttgaaaactatataaaatttaaatttcagagtccataaatac

SEQ ID NO: 833788 - DNA, 120 bp, Artificial Sequence
  ENSG00000286545_21 (sequence is synthesized)
aattttattggaacataggcatactcattcatttatatattatatggcctgcttctttgctacaacagcagagctgagtagctgcaagagaccttcatggcattctcatcacttcgtaga

SEQ ID NO: 833789 - DNA, 120 bp, Artificial Sequence
  ENSG00000286545_22 (sequence is synthesized)
gatgctcagttataaattgacaacattttgagtgcttcattgagtacctcatgctatttaattttttttccagagcatacttaccacatcaaaacacaaaaagcaaacttcaaatgtcaa

SEQ ID NO: 833790 - DNA, 120 bp, Artificial Sequence
  ENSG00000286545_23 (sequence is synthesized)
gtatttaaaggcgcagtgaattgtggattattatactgtcaagtcagacggcaaatcactgtggttattatgtaacaatactacagtagtgctaaaagaaaacaatgtatgttgacatta

SEQ ID NO: 833791 - DNA, 120 bp, Artificial Sequence
  ENSG00000286545_24 (sequence is synthesized)
cagtattaagcattcaccacaatattcccaactcacaagagagtaacagaaaaattagaaaattttactccagctctcttctgattaaaattattcttttttaaaattagacaatttaaa

SEQ ID NO: 833792 - DNA, 120 bp, Artificial Sequence
  ENSG00000286545_25 (sequence is synthesized)
ataaatgatcacatccacagatctttccaaaaataaaacaaaaacaagactataatcaaagtaagtttcatttgtagccaaagaaagcttataatgagttaattaaatcatgattgatta

SEQ ID NO: 833793 - DNA, 120 bp, Artificial Sequence
  ENSG00000286545_26 (sequence is synthesized)
cagcaaagaaatctgtccagagaaaataaagttcttaagacaagtggccttttggcaagaacagctgctcaaagatatgaggaaactggagcttcatcagacaatttaaaaccagaaaat

SEQ ID NO: 833794 - DNA, 120 bp, Artificial Sequence
  ENSG00000286545_27 (sequence is synthesized)
gcttactgatccctgatctccagaacataacaaaaaagcaagaaaataactgaaaaacagatccagaagaagcaactatcatttgagaaaaagaactcgaaaatttaaaaatacacaaag

SEQ ID NO: 833795 - DNA, 120 bp, Artificial Sequence
  ENSG00000286545_28 (sequence is synthesized)
atattcaaaaacaatgttagaaagctatcaaaacaagaataagatcttagttaaattgtaatttatgaaataatgataaatagaaacagaggaaatatcttgggatataaagaaaaaaga

SEQ ID NO: 833796 - DNA, 120 bp, Artificial Sequence
  ENSG00000286545_29 (sequence is synthesized)
aaagaaaaaagataaaaaataagagatatgtctcatataaaaggatatgaataaataatctcaccacaatagcactaagcagaatgaatgaaaaaagattcacaatcgcatagaattaag

SEQ ID NO: 833797 - DNA, 120 bp, Artificial Sequence
  ENSG00000286545_30 (sequence is synthesized)
aatgccaagaatgaagagaagagccttaaagcttccagagaaaacaggatacttacaaagatattagaatgaaattggtaaatttcacctttgtaacactggatagtagaagacaatgga

SEQ ID NO: 833798 - DNA, 120 bp, Artificial Sequence
  ENSG00000286545_31 (sequence is synthesized)
gcagtaacctcaaacttaattctatttcagccaaactatcaacaatgaggtaaattcaagatattttcagaaatgttaacaagaactcaaaaatctgtcttccatgcatccctacatatg

SEQ ID NO: 833799 - DNA, 120 bp, Artificial Sequence
  ENSG00000286544_0 (sequence is synthesized)
gaacagtgtcttacacataacaggtgctttaagagctctgggatgagcaactttctgtatccctgatggaaatgcttacagagtccattctgctgtctgcttccttttgggtcaagtggc

SEQ ID NO: 833800 - DNA, 120 bp, Artificial Sequence
  ENSG00000286544_1 (sequence is synthesized)
gtccgtcgggcagctgcacattggatgatacttcctagagtgcgtcggtgtcctgctgctaggaaaggtgccctgttgtttggagctgggagaaaacagcaagaaatgagttctaaggat

SEQ ID NO: 833801 - DNA, 120 bp, Artificial Sequence
  ENSG00000286544_2 (sequence is synthesized)
tttggtgatgtcgatgctgctggtctggggacaatacttggagaagcactggagtacagctgacccttaacatgggttggaactgtgcaggtccacctatatctggattttcttctgcct

SEQ ID NO: 833802 - DNA, 120 bp, Artificial Sequence
  ENSG00000286544_3 (sequence is synthesized)
ctgccacttctgagacagcaagatcaactcctcctcttcttcctactcaacataaggacgacgaggatgatgatgttccatttctacttaatgaattgtaaatatagtttctcctttgtg

SEQ ID NO: 833803 - DNA, 90 bp, Artificial Sequence
  ENSG00000286544_4 (sequence is synthesized)
tactgagtgtcaacttgattggatggaaggacgtgaagtatgttcctatgcgtgtctgtgagagtggactgggaaaggcagacccaccct

SEQ ID NO: 833804 - DNA, 120 bp, Artificial Sequence
  ENSG00000286544_5 (sequence is synthesized)
cagacccacccttaatctgggtggatgcaatctaatcggctgccagtgcagcaagaataaaagcaggcacaataatgtgaagagtagactagcctagcctcccagcctacatctttctcc

SEQ ID NO: 833805 - DNA, 82 bp, Artificial Sequence
  ENSG00000286544_6 (sequence is synthesized)
ttcctcagcctgcagatggcctgttgtggaaccttgtgataatgtgagtcagtattccttaataaactcccctttatatata

SEQ ID NO: 833806 - DNA, 120 bp, Artificial Sequence
  ENSG00000286544_7 (sequence is synthesized)
ctattagttctgtccctctagagaaccccaactaatacatccttcttatgattttcttaataacattttctttcctctggctttattgtaagaatacagtatataattcatatagcacac

SEQ ID NO: 833807 - DNA, 120 bp, Artificial Sequence
  ENSG00000286544_8 (sequence is synthesized)
ctttattgtaagaatacagtatataattcatatagcacacaaaatatacgttcattgacagtttgtgttatcagtaaggcttctggccaacagtaggctattaatagttaagtttttgaa

SEQ ID NO: 833808 - DNA, 120 bp, Artificial Sequence
  ENSG00000286544_9 (sequence is synthesized)
ggggtcaaaagttatacgtggacttttgactgcatagaggttggtgcccctaacccctgtgttgttcaagggtcagctgcagcaaaagcatcaattaagagagaaacttaaagctctact

SEQ ID NO: 833809 - DNA, 120 bp, Artificial Sequence
  ENSG00000286544_10 (sequence is synthesized)
cctgcctctttttcgattttctagctgagtaatcttgagcaaagattcagtttcttcccatgcaaaatgaggagactggcctaaagtaggccttttcaactactgtctcctgacagccct

SEQ ID NO: 833810 - DNA, 120 bp, Artificial Sequence
  ENSG00000286544_11 (sequence is synthesized)
cggggagctgatctgggccttgagccgatagccttctaccctaagcaacctccttcatttatctcagcgtgccttataaatattgtcattttctatgtgtgtatgacccaaaaaggactg

SEQ ID NO: 833811 - DNA, 120 bp, Artificial Sequence
  ENSG00000286544_12 (sequence is synthesized)
ggaaatgttgcacctgaaaactgctgaggcccttttagctctaaattattataggtttacaagttttgataaacgcctccatctcaattatactcatcatcgcctgctggctatggctgt

SEQ ID NO: 833812 - DNA, 120 bp, Artificial Sequence
  ENSG00000286544_13 (sequence is synthesized)
taacttacatcacgcatatgtggtgcttgcatgtctttcttataaatcacattctttggatgttttcctacctcattgattactttttctcagattgagatgggttgcctgatagcctcc

SEQ ID NO: 833813 - DNA, 120 bp, Artificial Sequence
  ENSG00000286544_14 (sequence is synthesized)
ctaaagcacatggacttggtgttcatttagtcattcaacactcggcacttcccgatgctggaggctgcatgggatttatcccttcttccctttaataacactgtattatccaacagtcat

SEQ ID NO: 833814 - DNA, 120 bp, Artificial Sequence
  ENSG00000286544_15 (sequence is synthesized)
gcggctgtattaccttctccacctgctcctgctcttctctgctccaacagagagaaaaattagaggcagctgtaaagagacaagacatcctcttttcctctattcatagtttttcctgat

SEQ ID NO: 833815 - DNA, 120 bp, Artificial Sequence
  ENSG00000286543_0 (sequence is synthesized)
gcgggctgaaaggctcctcaagcgcggtcagagtgggctgaggccgaagaggcgccgagagccagcgagggatgccagcaagctgtcacctctcagaaatacaggaagaacatcaataat

SEQ ID NO: 833816 - DNA, 120 bp, Artificial Sequence
  ENSG00000286543_1 (sequence is synthesized)
cctctcagaaatacaggaagaacatcaataatgttcgaagttataaaactccatgttctccagcttttggacccttggacttacacccatggtatgccaggggctcttgggcctttggcc

SEQ ID NO: 833817 - DNA, 120 bp, Artificial Sequence
  ENSG00000286543_2 (sequence is synthesized)
catttgaggttttgggactcagactggcttgcttgctactcggcttgaagatggcttatcgtgggacctcactttgtaatgacacagtgaaaaggcaccattaaggaaccagaaagcagg

SEQ ID NO: 833818 - DNA, 120 bp, Artificial Sequence
  ENSG00000286543_3 (sequence is synthesized)
ccttcatcagacctacagtctgtcggcaccttgattttggacttcccagcctccaaaactatgagaaataaatttatgttgtttataatctacctagtttatgatattttgttacagagc

SEQ ID NO: 833819 - DNA, 120 bp, Artificial Sequence
  ENSG00000286543_4 (sequence is synthesized)
caaagcaggctaagactgcagtttctagaattttataaaaatggaatattatagtatatattcctttgtgtctgatttttctaacttagcataataatttttaaaatctttcatgctttt

SEQ ID NO: 833820 - DNA, 120 bp, Artificial Sequence
  ENSG00000286543_5 (sequence is synthesized)
gtatgtgtcattggtgtattacttgtattactgagtacacttctattcacccgttggttggatttgattcaaattcccgtctactgtaaatcaagttctgatgaataaccggctccaaat

SEQ ID NO: 833821 - DNA, 120 bp, Artificial Sequence
  ENSG00000286543_6 (sequence is synthesized)
ctacgtgggaatatatgatctcctctgtcttggtggaatacttaggcatggaatgtcaaagttagagtgtatatttatatttgaatctttaatgaactgctgcatacttttccagagtgg

SEQ ID NO: 833822 - DNA, 120 bp, Artificial Sequence
  ENSG00000286543_7 (sequence is synthesized)
tgtaattccattttacaatctcgcctcagctgtgtaggaattacggttgttcttcattgttgttaacacttgatattgtcatgtttttgttgttctttttggcacttttgaagggcataa

SEQ ID NO: 833823 - DNA, 120 bp, Artificial Sequence
  ENSG00000286543_8 (sequence is synthesized)
aaatggcatcctattgttttctcttaaattttaataattaatgatgttttcacataggcttagttatccattagtcttattttataaaatactattttgtgaattttttggggtagtaga

SEQ ID NO: 833824 - DNA, 120 bp, Artificial Sequence
  ENSG00000286543_9 (sequence is synthesized)
gtattatatataagatttttaaacatattctgaatacaataacttattcagatgtaagtggtgctacatgtttgctaattctgtggtttgccttattttcttaactatgtattttttaga

SEQ ID NO: 833825 - DNA, 120 bp, Artificial Sequence
  ENSG00000286543_10 (sequence is synthesized)
tagaaaaagcatattttttaaatttttattttattgtttattttttgttttcatgaaattgtctgataatgaaaactgtgaaaaaaaatatttgttttttaagctatccagtgagtggta

SEQ ID NO: 833826 - DNA, 120 bp, Artificial Sequence
  ENSG00000286543_11 (sequence is synthesized)
atggcagcttctactaaagtaatttaatatattttaaagttatttgtgtatatcttgtttttttaattgatcaaaataatcagtgcttctttagtactgtttgttttgttaatcatagag

SEQ ID NO: 833827 - DNA, 120 bp, Artificial Sequence
  ENSG00000286543_12 (sequence is synthesized)
tttactattagggtcaatgaatgttagcaggaaaagaaattaggattattattttatgtttaaattaaaattaatatgtttaatatgtttaaatgcctaacattcaagaaatagatacca

SEQ ID NO: 833828 - DNA, 120 bp, Artificial Sequence
  ENSG00000286543_13 (sequence is synthesized)
atcaacttaaaatttaacaaggcacattaatttcccttggctggggaaaggctcatttaatgtgctaggggacaatcataatgagtcataagttatcttcagtaattaagatcataggta

SEQ ID NO: 833829 - DNA, 120 bp, Artificial Sequence
  ENSG00000286543_14 (sequence is synthesized)
acaacaaagataataaccttataatatttaatagaaagtatgcaagcattggctttttattctctatcatgtcattcattaacaggaaccacttacttattttttcttagtggtatatcc

SEQ ID NO: 833830 - DNA, 120 bp, Artificial Sequence
  ENSG00000286543_15 (sequence is synthesized)
tagatgtttgcattttgtattgcatattcaagtaaatgatattatttatagtgtagacttttgtttatgattgccccatttgagaacacacatttttagtaaaatatgaaacaaatttgt

SEQ ID NO: 833831 - DNA, 120 bp, Artificial Sequence
  ENSG00000286543_16 (sequence is synthesized)
ttaaaccacttgaagcctgggaatttcttcagctctggaatcagaaaaccaaatgtaacattctagagagactttagtgtatttatttgtaagagttatatagccaattgatatggttta

SEQ ID NO: 833832 - DNA, 120 bp, Artificial Sequence
  ENSG00000286543_17 (sequence is synthesized)
gctctgtgtccccacccaaatcttatctcaaattgtaatccccatgatccccacatgtgaagggagggactaggtgagaagtggttggatcatgggggcagattcccccatgttgttctt

SEQ ID NO: 833833 - DNA, 120 bp, Artificial Sequence
  ENSG00000286543_18 (sequence is synthesized)
atgatagtgagttcttataagatttgatggttatttaaggcagttttccctgctcttgcttgctgtctttcgtctgccaccatgtaagatgtgcctctttagccttcggccatgattgta

SEQ ID NO: 833834 - DNA, 120 bp, Artificial Sequence
  ENSG00000286543_19 (sequence is synthesized)
agtttcctgaggtctcctcagccatgcggaactataagataattaaaccttctttgtttataatctttatagtagtgtgagaatggactaatacaccaattaaacgatattacaaacaat

SEQ ID NO: 833835 - DNA, 120 bp, Artificial Sequence
  ENSG00000286543_20 (sequence is synthesized)
agtccaagttatataatattgtgttgtttgtgacaaaacagtttttggggatcgatatttcatgttctttataaaatggttttataagttatcattctttttctatgcctggaaatagtt

SEQ ID NO: 833836 - DNA, 120 bp, Artificial Sequence
  ENSG00000286543_21 (sequence is synthesized)
aatagcactgcgattatcatattttaaaagatttaatagaatttccatgtgagacaaccttgctgaaagtaatatttgtgggagatttttcattgtgttctctatttaatgtattatgta

SEQ ID NO: 833837 - DNA, 120 bp, Artificial Sequence
  ENSG00000286543_22 (sequence is synthesized)
tagttggcttaaattatttctcaagttagcttagtgttttgaatttttaaaatttgtaaaaacataaaattctcttacttgagctttacaaatgtatttacaaagaggtgtgtaaaattc

SEQ ID NO: 833838 - DNA, 120 bp, Artificial Sequence
  ENSG00000286542_0 (sequence is synthesized)
ttcctgaggcctccctagaagccaagcagatgcccgcaccatgcttcctgtatagcccatagaactgtctcaatcttaacttccagtttaatggaatctttgttgtgtctgctggtggca

SEQ ID NO: 833839 - DNA, 120 bp, Artificial Sequence
  ENSG00000286542_1 (sequence is synthesized)
aactaagacctctaggccagcagaacctaatgtgggagcaagatgcaaaaattttgctagtggatcaccaggggtgatgacagcaagaccccccgcaagacagcaagacccaactctctt

SEQ ID NO: 833840 - DNA, 120 bp, Artificial Sequence
  ENSG00000286542_2 (sequence is synthesized)
aagacccaactctcttctttctcttcctcctcatcctactcaacatgaagatgacaaggatgaagaccttcatgatggtccacttcacttaatgaatagtaaatagtaaattttctcttc

SEQ ID NO: 833841 - DNA, 120 bp, Artificial Sequence
  ENSG00000286542_3 (sequence is synthesized)
catgatgtttgaaataatattttcttttctctagcttattttattgtaacaatacagtatactatacacacacaaaatatgtgttaatcaactgtttatgttattggtaaggcttatggt

SEQ ID NO: 833842 - DNA, 120 bp, Artificial Sequence
  ENSG00000286542_4 (sequence is synthesized)
taacagtgggctcttaatagctacactgtggtggagtcaaaagttatatacagggtctcgactgtctgggggttcggtgcccctaatctctgcattgttcaagggacaaccacagtgtta

SEQ ID NO: 833843 - DNA, 120 bp, Artificial Sequence
  ENSG00000286542_5 (sequence is synthesized)
tttctgttagacatgtgtcagcaccctatgctgttactgtgacttgctatttttttaaatctcccttgtaactgtaggataactctctgtataactctagtgaatccccagtaagtgcaa

SEQ ID NO: 833844 - DNA, 120 bp, Artificial Sequence
  ENSG00000286541_0 (sequence is synthesized)
acacacttagagtgagaatgatgaaggggcaggagggaaaaattcggctgcaatcaaaatgaaccagccacggaggctgtacgtgtttctcagatttcaagtagttctaatcctgaggag

SEQ ID NO: 833845 - DNA, 120 bp, Artificial Sequence
  ENSG00000286541_1 (sequence is synthesized)
taagatgacgcctagactagttgtattgcccttcatctctccgtttcttggtcaccagttgagtacaaactctctggttttaaaatgttatctatgtaaattcttctgccacagctggac

SEQ ID NO: 833846 - DNA, 120 bp, Artificial Sequence
  ENSG00000286541_2 (sequence is synthesized)
aagatgcattcaagagtttttctgtttcctgtgtggtgaagcagctttcccctaacgactatttcccatcagtaccacaaagacctaccttcttaaccactgtttcaacggtttcttacc

SEQ ID NO: 833847 - DNA, 120 bp, Artificial Sequence
  ENSG00000286541_3 (sequence is synthesized)
acttccacctttctgtagaacatttcatttggaaggagagtcacaaatacttgttcactgggctgttcagactgataacgtctcttgggacttgaacattgatgcacaattctcatctgg

SEQ ID NO: 833848 - DNA, 120 bp, Artificial Sequence
  ENSG00000286541_4 (sequence is synthesized)
aaaaaaaattcaactgtcaaacattggcaaagaataccagaaatgaaaacaaactcttttctgtcttagtgtcaccataagataatttgttttgctctcttagagaataaaattctttac

SEQ ID NO: 833849 - DNA, 120 bp, Artificial Sequence
  ENSG00000286541_5 (sequence is synthesized)
cttttttctaaaaatcaaagtaaaaacatttcattatttgtctattttgcttactttagcaaaaattttaatacatttggattctaagcatgtgttttactgataaatgcattaaattgt

SEQ ID NO: 833850 - DNA, 120 bp, Artificial Sequence
  ENSG00000286541_6 (sequence is synthesized)
ttctagtactttattctaatacaataaataatgtcaagacttttctttacatgttcaagatttttcatctaaaaaaagacccatgttaattattaactgcagaaacaaattataagtatt

SEQ ID NO: 833851 - DNA, 120 bp, Artificial Sequence
  ENSG00000286541_7 (sequence is synthesized)
ttataaaagtttaactgtcatttgtatattatatcttgatcttttcattcatttttattttctggatttatggtctttgttcttatggttttcattctgttatatgtttccaagatattt

SEQ ID NO: 833852 - DNA, 120 bp, Artificial Sequence
  ENSG00000286541_8 (sequence is synthesized)
tcaaatagagttttaactgagtgatgctagattagaacattttctagttcaaaatatttgatgattcaataacataaattatgttatggctcaaaattacccctcccctcaataagcaca

SEQ ID NO: 833853 - DNA, 120 bp, Artificial Sequence
  ENSG00000286541_9 (sequence is synthesized)
cactgataagcaatgacatgtgtggaataaaaatgacaagaaagtatggctctgtctcaacaaaaggcagaactgacagctaatgtttgttattgctctaagcaccagaaagtgtgtact

SEQ ID NO: 833854 - DNA, 120 bp, Artificial Sequence
  ENSG00000286541_10 (sequence is synthesized)
aaagaatactaggtttttagactgtgaataggtgttccacatacaactacagacatgccaatatctactggaataaattggataatttcttgctgaaataaagttaagttggtatcttta

SEQ ID NO: 833855 - DNA, 120 bp, Artificial Sequence
  ENSG00000226403_0 (sequence is synthesized)
agacatgctggctgctcatttgataatctgtgttttgctcagtacaaaaggttgctggctaagttttgtgagcccctctaacgtcaggctggcagtatcttgggttcaattaacaagaaa

SEQ ID NO: 833856 - DNA, 120 bp, Artificial Sequence
  ENSG00000226403_1 (sequence is synthesized)
gtctacagtaacattttgtcaatggggaaggacttgaattcacagaactgtctcggaaagccctggaaaaacaggacaaagaaacctgtgtgaattttcagcttttcaccttctctgatt

SEQ ID NO: 833857 - DNA, 120 bp, Artificial Sequence
  ENSG00000226403_2 (sequence is synthesized)
ttatttcttcctcactcttcctttgacagtcctcgcagtccgcctgagagagtagagaagaccccctcccagaaccttcctgtaaggtctccccgctgacttcctgtagtggatgtgact

SEQ ID NO: 833858 - DNA, 120 bp, Artificial Sequence
  ENSG00000226403_3 (sequence is synthesized)
gtgtgccaggtgcctgccgaagacccctgtcactgactgtgccctttgggaaagagtcaacaatggcctcctcctatggctgacttcgttcatgttcaggctctccagcttgctagtgag

SEQ ID NO: 833859 - DNA, 120 bp, Artificial Sequence
  ENSG00000226403_4 (sequence is synthesized)
taagcagttttccttccttcaaaataaaaaactagcagtccttagggaggacagttttttccttccttttcctattctggctccaacagctgtctcaacacagcccgagatggggagcag

SEQ ID NO: 833860 - DNA, 120 bp, Artificial Sequence
  ENSG00000226403_5 (sequence is synthesized)
cctggcttccaccggcaatagctgtattgtgggagtgtgaaagagaagccaccttttcctccctctgcccaagccacctggcccctttgtcctttctcctcctcgtcctctgaggtatga

SEQ ID NO: 833861 - DNA, 120 bp, Artificial Sequence
  ENSG00000226403_6 (sequence is synthesized)
gtggctgtgactgtatgacataggaactatgaagcggggtgaggggacggtttggtgcgtaaatcctcacgcaggtggcggttattgtctgtgtggaggaaataagcccggttcttcctg

SEQ ID NO: 833862 - DNA, 120 bp, Artificial Sequence
  ENSG00000226403_7 (sequence is synthesized)
ggactgctttcatttccctctagcttccagagggtaaaatgaaccttaatggaggttggggggtggcacgcacaaagtcctgggttgagggggcagtggtcagaaagttccctagggtaa

SEQ ID NO: 833863 - DNA, 120 bp, Artificial Sequence
  ENSG00000286549_0 (sequence is synthesized)
cacccttgcggggcgggaaccgtcgacctagaagaaaaaaaaagctgaggcaaacttgatataagtagagaggttatttgggccaagtttgaagattgcaacccgggagcatagcttcaa

SEQ ID NO: 833864 - DNA, 120 bp, Artificial Sequence
  ENSG00000286549_1 (sequence is synthesized)
gttgccctgaacataggatttgcaacagtgacaaaggtgaggccagagaagtgacaagacagatgccagtccagcaggtgggcatgtccagaaagtgcagcctcaggacacggtctggga

SEQ ID NO: 833865 - DNA, 120 bp, Artificial Sequence
  ENSG00000286549_2 (sequence is synthesized)
tggaggcatgtgacccctggaggacaagcatgaaacgccatagggctcccccaggtgctggaattatggcaccttgcagcttcttctccacgagttttaacaagcatgcgtacttttgta

SEQ ID NO: 833866 - DNA, 120 bp, Artificial Sequence
  ENSG00000286549_3 (sequence is synthesized)
agtggtgagtgtaacggaggttcacagatgcactccgctttggaaaccagtgcactcttgcccaggcccggtgagactctgaggacgatgtgtctaacctctgtgtctaacgggggtgtg

SEQ ID NO: 833867 - DNA, 120 bp, Artificial Sequence
  ENSG00000286548_0 (sequence is synthesized)
gttagagccgtaaatttggacacgttgaatagagatttgctgaagccaaggcagtggattaaggaaaaaaagggctcaaaaactgaagagctataatatttagaaattaagaagtaggaa

SEQ ID NO: 833868 - DNA, 120 bp, Artificial Sequence
  ENSG00000286548_1 (sequence is synthesized)
gaattcagaaaaggaaattgaaaaagaatggccaatgagatagagaaaaacaaagactgtgtgctagataagcagcccgaaatatgaaatgcctgaagaaggaagggatgcttatctttg

SEQ ID NO: 833869 - DNA, 120 bp, Artificial Sequence
  ENSG00000286548_2 (sequence is synthesized)
tagtattgctgagacataacataagatgagaatggagaatcgacaatttgacatatcgacatggagcagttgccatggacacctggtttcaggttatgttacctgagtatgcctagatac

SEQ ID NO: 833870 - DNA, 120 bp, Artificial Sequence
  ENSG00000286548_3 (sequence is synthesized)
acttggcatgcaaccacggtggaacctaagtacttggaccaaggagcagggctgatttaagaaggagacacctcagggcttaatctgtgatctgatcacatccagccctgacatcacctc

SEQ ID NO: 833871 - DNA, 120 bp, Artificial Sequence
  ENSG00000286548_4 (sequence is synthesized)
atggcacgatgcagtcagatcttacctcattatccgctgtctataaaacctgccccaacccccagatctgagagacaaatttgaacatttctcccatctacttcctagtcgactaaaaat

SEQ ID NO: 833872 - DNA, 120 bp, Artificial Sequence
  ENSG00000286548_5 (sequence is synthesized)
aaacctttccctctaaaaaatccttgtgcttccttgtttggctttccattgcaatcaggcaaacggcctgcattggtttaggtaactgacactcccaagactcaaggagctgccgtgcag

SEQ ID NO: 833873 - DNA, 120 bp, Artificial Sequence
  ENSG00000286548_6 (sequence is synthesized)
cactattttgaaagcccagcccccatcagactgtatcttgctctggggcgaacagccccatcatctccacgtccctggaaccctgcggacatctcttcatttccacccagagggctgcaa

SEQ ID NO: 833874 - DNA, 120 bp, Artificial Sequence
  ENSG00000286548_7 (sequence is synthesized)
ctttgtcccgtgggctgaatccagtggtgcagtaaggaacagcagtgcaccacaccagggaggctgcccccaggacaaagggagcctaaatgcacactcctcagtttctgaaagccactt

SEQ ID NO: 833875 - DNA, 120 bp, Artificial Sequence
  ENSG00000286548_8 (sequence is synthesized)
ccaatggtcctggagctggtctacccagacactgttctgtgtcctgaggacaggctctcacaccacccaccatgcaaacatgctgcccagggcctggggatcatgctgcctcaactgtag

SEQ ID NO: 833876 - DNA, 120 bp, Artificial Sequence
  ENSG00000286548_9 (sequence is synthesized)
ctgtgggcatgtgcatgcaacatcaggaagtctgacagcaggcccaggtcacctgccactgggacccaagcatgccatccaggggcctggtgatttcctggccccactcaccatagcctg

SEQ ID NO: 833877 - DNA, 120 bp, Artificial Sequence
  ENSG00000286548_10 (sequence is synthesized)
cacacttgcacaccattggagggtctaagggcaggaaagcaacatgcctccctggagagagcttgattctattctggcatatgctagagaaaagtactaaaccaagtcagatgctttgga

SEQ ID NO: 833878 - DNA, 120 bp, Artificial Sequence
  ENSG00000286548_11 (sequence is synthesized)
atgtggtctaaatattaatgctaccaaactggggaggaagtaactcagttttgctgatttttcattttcttatgctttattggttaacaaagaaaccattatttgcttttgaaggcagag

SEQ ID NO: 833879 - DNA, 120 bp, Artificial Sequence
  ENSG00000286548_12 (sequence is synthesized)
ttattattttctaccatgaagttacttcaactcataaaaatgtattttatttacacctttgtagcaatggagcttggaagaaaatataaagcttacctacatgaacatttcatctagtat

SEQ ID NO: 833880 - DNA, 120 bp, Artificial Sequence
  ENSG00000286548_13 (sequence is synthesized)
tctgtggtctcacctggtcttctatgaagtttcagttcaagtgaggaaacagcaccatgctctattatgaaaggaggcatttgccatgtgattggatcagaggtagctcaaggtaataaa

SEQ ID NO: 833881 - DNA, 120 bp, Artificial Sequence
  ENSG00000286548_14 (sequence is synthesized)
aggcctcaaagcaattagaaaagacagaattattaatgtggatttaatggcattaactgcttccctccttttttctcactgtgttattttgaataaccacatagttttttcaagattcta

SEQ ID NO: 833882 - DNA, 120 bp, Artificial Sequence
  ENSG00000286548_15 (sequence is synthesized)
atatatataatctaatccatatgatttttgtacgtgtgagttacacaaggccggtatataaaactttgaccaatgtgtctgtaaatcagagttctgcaaactatggcttatgggtgccac

SEQ ID NO: 833883 - DNA, 120 bp, Artificial Sequence
  ENSG00000286548_16 (sequence is synthesized)
ggggcaaaacagagcgaccaaatgggggcaccctcaggggagttgcgctcatctggagcgagacgccagcctgggaaagcggaacccctttcccgccccgccccgaggactcacgctcag

SEQ ID NO: 833884 - DNA, 120 bp, Artificial Sequence
  ENSG00000286548_17 (sequence is synthesized)
gtgcaacgccgagactcccgggggaaagagaggtgaccgtctcggcgcgaccgcccacacctcttgctccaaatgaccccagcacacaggagaggtcctctcagcgtgggactccgtctc

SEQ ID NO: 833885 - DNA, 120 bp, Artificial Sequence
  ENSG00000286548_18 (sequence is synthesized)
tcccgaaggcagggagcacaacgaagcggccactcgtctctgcagccgcgctaccggcccgcagcctggctcgcaggtgagatgtgacttttgccttccaccacgactgtgcccggtctt

SEQ ID NO: 833886 - DNA, 120 bp, Artificial Sequence
  ENSG00000286548_19 (sequence is synthesized)
ccacgactgtgcccggtcttgggtatgtctttatcagcagcaggacaatggactcctacagtaaattggtaccagtagagtgggcgctgctgaaaagatacccaaaaatgtgaaagtgac

SEQ ID NO: 833887 - DNA, 72 bp, Artificial Sequence
  ENSG00000286548_20 (sequence is synthesized)
tgcaaaatgctgataatgacatggacaatgaaatccaggttaatatggtctctgatggagatgaagaacttg

SEQ ID NO: 833888 - DNA, 70 bp, Artificial Sequence
  ENSG00000286548_21 (sequence is synthesized)
tggctttgtgcaaaatgctgataatgacatggacaatgaaatccaggttaatatggtctcttagcaaaga

SEQ ID NO: 833889 - DNA, 84 bp, Artificial Sequence
  ENSG00000286548_22 (sequence is synthesized)
actcaagaggtgacttgagtgctgttaaaggcatacagttttaaaagggaaacagtataaaagttcagaaaatttgcagcctga

SEQ ID NO: 833890 - DNA, 120 bp, Artificial Sequence
  ENSG00000286548_23 (sequence is synthesized)
agacaatgggaaaaatgtctccagggcatgttagaggttttcacggcagctccttccatcacaggcctggaagcctaaaaggtaaaagtggtttcttgggccaggcccagggtccctctg

SEQ ID NO: 833891 - DNA, 86 bp, Artificial Sequence
  ENSG00000286548_24 (sequence is synthesized)
tctgctgtgtgcagtctagggacttgatgccctgcatcccagctgctccagctgtgactaaaaggagccaaggtacagctcagtcc

SEQ ID NO: 833892 - DNA, 73 bp, Artificial Sequence
  ENSG00000286548_25 (sequence is synthesized)
agggcagtgtggaagggaaatgtgggatcagagcccccacacagaatccctgctgggacactgcctagtggag

SEQ ID NO: 833893 - DNA, 120 bp, Artificial Sequence
  ENSG00000286548_26 (sequence is synthesized)
tccagaccccagaatagtagatccactgatatcttgcaccatgcacctggaaaacctgcagaagtcaatgccagcctgtgaaagcagccagtagggaggctgtaccatgcaaagccacag

SEQ ID NO: 833894 - DNA, 78 bp, Artificial Sequence
  ENSG00000286548_27 (sequence is synthesized)
acaggggtggagctgcccaagaccatggaaatccggagatcattctcgagttttaagatttgactgccctgctggatt

SEQ ID NO: 833895 - DNA, 120 bp, Artificial Sequence
  ENSG00000286548_28 (sequence is synthesized)
tgaggcttcttcagccacgtggaactgtctgctgtggtttgctggggtgctactcctgaccctagttgccttagtttttcccgtacctgggggtatcaccagtgaaggctgtaaaaaggc

SEQ ID NO: 833896 - DNA, 120 bp, Artificial Sequence
  ENSG00000286548_29 (sequence is synthesized)
aaagatggcagcctgccccttcctctggaagctctgttccaggtgccgtggaagtgtggcctgcagaacaatgctgctcagctccctggattctgaccacttcctagggttgccatggac

SEQ ID NO: 833897 - DNA, 61 bp, Artificial Sequence
  ENSG00000286548_30 (sequence is synthesized)
taggtgagacttgcctttctccttctgccatgattgtgaggcttcttcagccacgtggaac

SEQ ID NO: 833898 - DNA, 120 bp, Artificial Sequence
  ENSG00000286548_31 (sequence is synthesized)
gctgctctgccaagactccacatagctcagtgtgttggacctaaggccctggtggtatgggctcacaaagggaatctactgatccatggattacaaagatccatgggagaagcctggttt

SEQ ID NO: 833899 - DNA, 120 bp, Artificial Sequence
  ENSG00000286548_32 (sequence is synthesized)
cctggggttgcacaatcactcatggcttcccttggctagggatgggggttcccttggcaagaacctgggtatttcatttgaaggtgctgtattcactcaccttttttgttactctctgtg

SEQ ID NO: 833900 - DNA, 120 bp, Artificial Sequence
  ENSG00000286548_33 (sequence is synthesized)
agtgctgtggaccacagttgcttctaattggccatcttggaccctccctgatgttctaccttccaaatctttaaaaacaattttcttaaccatattcatcatggttttttaaaaagtaca

SEQ ID NO: 833901 - DNA, 120 bp, Artificial Sequence
  ENSG00000286548_34 (sequence is synthesized)
tgtttagtaaccattatttgtatctcatgtgggtctactttcttattttgcgtatgtgtcttgcctcatgatatgtcttattactttcaattattggtcattcaaaattgtatttgaaaa

SEQ ID NO: 833902 - DNA, 120 bp, Artificial Sequence
  ENSG00000286548_35 (sequence is synthesized)
ttatagagattgttagaagtttagaatgatgtcatgttcttctagaaatgatttatgtttacaaatccagatatatattcaggaattagtgtattaagctgaatatcagtccctgcaaag

SEQ ID NO: 833903 - DNA, 120 bp, Artificial Sequence
  ENSG00000286548_36 (sequence is synthesized)
ccctgtcaatttctagtattaccttcctcctactgtagtgccctttagggttctaacaaaagacctgtagtccatcaggatcctcaatccttggcaggtcttgaaccccaattttgtcct

SEQ ID NO: 833904 - DNA, 120 bp, Artificial Sequence
  ENSG00000286548_37 (sequence is synthesized)
actaactatgaaatctgtttacatccttgcttagcttgtgtctcctggaattggcagatatccctaggggaaaatcagcctgaggtacctggtttaactctgggtttctcccagaatttg

SEQ ID NO: 833905 - DNA, 120 bp, Artificial Sequence
  ENSG00000286548_38 (sequence is synthesized)
gccacctaatttttctctatatttttagtccttagatgctgtgagatccatgtttgcataagctttttcacttctttttatctgttctcagtggaatgattggtctgattactttgccat

SEQ ID NO: 833906 - DNA, 120 bp, Artificial Sequence
  ENSG00000286548_39 (sequence is synthesized)
tactagatgagtgtgttttacttttttattgaatgtccaaaatatggtatactctctataaaaaatccatatttatacctattctgattttgaataagggaagactattgaatgaattaa

SEQ ID NO: 833907 - DNA, 120 bp, Artificial Sequence
  ENSG00000286548_40 (sequence is synthesized)
tgaaatatgggggtttcacgttttatttctctggacaatgttttatttacttaattaaagacctctgttttgtgtataatgctctgcaaacaaacattttagttgtacaggtatgtttta

SEQ ID NO: 833908 - DNA, 120 bp, Artificial Sequence
  ENSG00000286548_41 (sequence is synthesized)
atttttcctattctatttgtagttcaagacttgacaaaaatgttattttcaccatgagcctttttttgatatctccaggcaaaatagttgttttctctttaggatctccatatttatttt

SEQ ID NO: 833909 - DNA, 120 bp, Artificial Sequence
  ENSG00000286548_42 (sequence is synthesized)
acagtcttaaaatcactgtaaccatctatgtggtttatatctgttttatttctgctatacaattaagcttaggaagaagaaattgtgtattaccaaaatatacacattccaaaataccta

SEQ ID NO: 833910 - DNA, 120 bp, Artificial Sequence
  ENSG00000286548_43 (sequence is synthesized)
acttttttttttgcatagaatgagaacttagtatatatttggaaaataaatagatggatgaatgaataataaataaagatgctggagtgcagtgaaaggaatgttaattggaataagaag

SEQ ID NO: 833911 - DNA, 120 bp, Artificial Sequence
  ENSG00000286548_44 (sequence is synthesized)
aggtaggtttacttgttgtctctgcctttgggcaagtgttttaacgttttctcagtgcccttatttgtgaaactgaagtaaatggctacctcaaggagtgttgatctctgcccgtggaca

SEQ ID NO: 833912 - DNA, 120 bp, Artificial Sequence
  ENSG00000286548_45 (sequence is synthesized)
agtattttaaatgttttctgtgtctttatttgtaaaatgcgaacaaatgactacctcaaggagatctgaaacttaaaaacataagtgcacatttatcttaatgtgcattgtagaataata

SEQ ID NO: 833913 - DNA, 120 bp, Artificial Sequence
  ENSG00000286548_46 (sequence is synthesized)
tacaaatataaggcagccacttatattttaaaaacctgtggtggtaggggtggggaatatatgcctgtaaaggcataaaatatcttgagaagagtacataagcaactgtaggcagagaaa

SEQ ID NO: 833914 - DNA, 120 bp, Artificial Sequence
  ENSG00000286548_47 (sequence is synthesized)
ctggatagagggaagacaggttagaaatttgactttttatgttatataccttttgaattttgaaccacatgcttatgttaactactaaagataaaacaaattggaatttaagaaaaatat

SEQ ID NO: 833915 - DNA, 120 bp, Artificial Sequence
  ENSG00000227757_0 (sequence is synthesized)
gggaggccgggccgaggtcgcgccccaggcccaggcccgccctcacttggagaattgcgcctgcacggcggccaggcccaggctggccgggaccaggtgcgggaacttgcacacggcgca

SEQ ID NO: 833916 - DNA, 120 bp, Artificial Sequence
  ENSG00000227757_1 (sequence is synthesized)
ggtgcagaggccggggccgcctgcgccgccgccggggagagcgaactggccgcacggcggctcgtccagcgccagcgacagatgaagagaaaactgagccataggatgaagagaaaactg

SEQ ID NO: 833917 - DNA, 120 bp, Artificial Sequence
  ENSG00000227757_2 (sequence is synthesized)
agtgctaccatttcttgaaaggagattaggaagcagccctgggaaaccctggtacctctgtggaaatcggcactctccatttccctgctgaactgtcagtgttgccgtgctgttggtggt

SEQ ID NO: 833918 - DNA, 120 bp, Artificial Sequence
  ENSG00000227757_3 (sequence is synthesized)
cttggaccaccgagatcatattaataccaacaacaagccagcaactcagagggctgccatttgcttctccaaacccattcttcacttacctctgctctgttctgtgtcctttatctgcat

SEQ ID NO: 833919 - DNA, 120 bp, Artificial Sequence
  ENSG00000227757_4 (sequence is synthesized)
gggttatagcaacaggttccctactctctggctcctggctatgtctgaccaatggcagaatgaccaatgatttagagaatcaacctgggacagggccatataagactataaaacaggctg

SEQ ID NO: 833920 - DNA, 120 bp, Artificial Sequence
  ENSG00000227751_0 (sequence is synthesized)
gacagtagacaatgttgttgtttatttaaaatgtttactccaagaaatatatatataaaaaaaataataagacaattacagcactaaaccaggcaccttcgaccaaatcacaacctcctc

SEQ ID NO: 833921 - DNA, 120 bp, Artificial Sequence
  ENSG00000227751_1 (sequence is synthesized)
agggtcagcgccaagcacattcccaaccgggcaactgtgtacctttctctaggagtgcctgggctgcattccaggaaagagacctgtccagggaaacggatcaggctgtcgcatggaagc

SEQ ID NO: 833922 - DNA, 120 bp, Artificial Sequence
  ENSG00000213888_0 (sequence is synthesized)
agcgcactcgcaggtcgagcgggcgtcgtccacccttcggagccccgctttcatgcgtgaaattcccagaagtcgcctgcgaccgcctccctgcttcaaacaccagagagggcccggggt

SEQ ID NO: 833923 - DNA, 120 bp, Artificial Sequence
  ENSG00000213888_1 (sequence is synthesized)
cctggccggagacaggccgaacctccggagctgcttctgcacccggtacattgatcgatctgatgggctgcgcgcccggaagagctggagagatgaagccagcgtccagcttctccccca

SEQ ID NO: 833924 - DNA, 120 bp, Artificial Sequence
  ENSG00000213888_2 (sequence is synthesized)
caccagctccgggaggcgacaatatgagggcgatggacggggcagggacccccggaagccccagcaatcctcagggaagtgggggtgccggaggagtcggggacaccctcaggcctctcc

SEQ ID NO: 833925 - DNA, 120 bp, Artificial Sequence
  ENSG00000213888_3 (sequence is synthesized)
aagcccggagcatccccagcgcccgcagccctgtgagacgccgggtgctctggtaatgggccctgccgccaggcctcggcgctttgtccccggcccgcccggggatgctaccacgctaga

SEQ ID NO: 833926 - DNA, 120 bp, Artificial Sequence
  ENSG00000213888_4 (sequence is synthesized)
gcgggcgggaagttcccacagttgcaaagaggcagcgaagtatgtgttccaaactttccacggttccaaactgagcgcttccattaagagaagcggtgtgcgggggaaaagcattctggg

SEQ ID NO: 833927 - DNA, 120 bp, Artificial Sequence
  ENSG00000213888_5 (sequence is synthesized)
tattagcatgcaaatgaacgggcccggcttccaactccgctcgggattcccaccgctgcgcgccgagctcgcgcccagccacgcgcgccctgaggcttccgggcgttgccctggcggatg

SEQ ID NO: 833928 - DNA, 120 bp, Artificial Sequence
  ENSG00000213888_6 (sequence is synthesized)
ctgccttctggtttcgtgtcctggtgcttagtcacttggcctccctgagattcagttaaactgtttcttaacctgtgcacagggacagcagcacctgtcctgcacacctccgctctaggg

SEQ ID NO: 833929 - DNA, 120 bp, Artificial Sequence
  ENSG00000213888_7 (sequence is synthesized)
catagtacatgccaaactcctgttggagagaatgaattagaggcatgaagaaagttccctggacacgaagccaggagatctgtgttctaagcccagactcactgtcaccttaggctagtg

SEQ ID NO: 833930 - DNA, 120 bp, Artificial Sequence
  ENSG00000213888_8 (sequence is synthesized)
cctccctctctgagccacagctttcttgggcggattttgggaactggcacgttttatttttgagagagctgctgggaacatccacagagaaagagaaaggggccgggcgcggtggctcac

SEQ ID NO: 833931 - DNA, 120 bp, Artificial Sequence
  ENSG00000280870_0 (sequence is synthesized)
gcagattgaagcagcttcatctcattcctggttcatcctgattccctcagtggcttgctcctgcattagtaatgtaaaactggcccaaaagggtttaaaattgtcagaagttgatcttga

SEQ ID NO: 833932 - DNA, 120 bp, Artificial Sequence
  ENSG00000280870_1 (sequence is synthesized)
tcagttcaaatattttttgacaaagaaaatcagttctggtcagttcaaatctattttgaccagtttaaaccaattctgcagaactcgagcctgtggtcggtaaacccaggaagatggctg

SEQ ID NO: 833933 - DNA, 120 bp, Artificial Sequence
  ENSG00000280870_2 (sequence is synthesized)
agaatcctggaagacttcaagaagaaggtggaattcaaacggagtcctgaagaataggatgggccgcaaaggagattcttccaagatttcagaagttggaagggaagcagaatccatttg

SEQ ID NO: 833934 - DNA, 120 bp, Artificial Sequence
  ENSG00000280870_3 (sequence is synthesized)
ataacacaaacacattgttgcttatctgttgactcaacttgggatgaagaagcagttgagccagttgtgtgtgtagagctcaaggacaaaggtccttagcttctgcagaatactatcatc

SEQ ID NO: 833935 - DNA, 120 bp, Artificial Sequence
  ENSG00000280870_4 (sequence is synthesized)
acggagtcctgaagaataggtggtgaggtctctcaaccttcagatgggttcagaggtgctgtccaggattcagggtcttgcaaagagatacgtaaatagaatgctccacaatatgtgaag

SEQ ID NO: 833936 - DNA, 120 bp, Artificial Sequence
  ENSG00000280870_5 (sequence is synthesized)
tatgctgtggacttcaagcacttgaatcagatgtagagacattatatggactgcttgagtagcccccacaactgtgtaagccaaatccctgtaacaagtatttatccgtccatccattca

SEQ ID NO: 833937 - DNA, 120 bp, Artificial Sequence
  ENSG00000280870_6 (sequence is synthesized)
aaagaaaagaggtttaattgactcataggtccacaggatgtatagaaggcatggctggggaagcctcaggaaatgtacagtcatagctgaaggtgaagaagaagcaagacatgtcttcac

SEQ ID NO: 833938 - DNA, 120 bp, Artificial Sequence
  ENSG00000280870_7 (sequence is synthesized)
agaagaagcaagacatgtcttcacaaggccaacaggagagagacagtgagtgaaaggggaagtgctacacactttcaaacagacctcatgagaactctgtcatgagactgcactaggggg

SEQ ID NO: 833939 - DNA, 120 bp, Artificial Sequence
  ENSG00000280870_8 (sequence is synthesized)
atggtgctaaaccattagaaaccagccccatgattcagtcaccccccaccatgccctacctccaacaattgggatcacaatacaacatgagattttggtaggaacacagacaaaccatat

SEQ ID NO: 833940 - DNA, 120 bp, Artificial Sequence
  ENSG00000280870_9 (sequence is synthesized)
cactatgtatctatctttcactggttctacttctcaggctggacactgactgatataggagttattctgaagccaggccctttcctctgtgtactgtcctttttttgttctgggcctgcc

SEQ ID NO: 833941 - DNA, 120 bp, Artificial Sequence
  ENSG00000280870_10 (sequence is synthesized)
ttcaccccctcatttccccagtgaccatagccagtaggtgtattaaacatggtttcaaaaattgcctatattttatgatgctttgaccttttggggccttgatggatgaggagagacttc

SEQ ID NO: 833942 - DNA, 120 bp, Artificial Sequence
  ENSG00000280870_11 (sequence is synthesized)
ccttcccagggctagctaattcctagagatagaaaacaactgccatctgagcacacctgtcatatgcaaacaaaccaacccagagcccatgcctgctaactatctaatttattgagtcac

SEQ ID NO: 833943 - DNA, 120 bp, Artificial Sequence
  ENSG00000280870_12 (sequence is synthesized)
tatcctcctgtcttagtattatcccaggaccaggcactaggcaaccaggggtagtacctacagctctgagcctactgacattgtttaaactactcaatcctaagttacttcccttgaact

SEQ ID NO: 833944 - DNA, 120 bp, Artificial Sequence
  ENSG00000280870_13 (sequence is synthesized)
gccttgtctttgtcatggaagccacaacatagtcctgtacctgtgctttcccctggctgcttctgcctcctaatagaacctcgtgcttcctcatgtggctctgtgaggagcatcgtcccc

SEQ ID NO: 833945 - DNA, 120 bp, Artificial Sequence
  ENSG00000280870_14 (sequence is synthesized)
tgctgttctcctaacagtgactatagaaaagttattaaaaagaaaaaatcatgaagaaaagaaacagaaagtagatcatggaatctgtctgatcttcttttcctatgtaatcaagaaagc

SEQ ID NO: 833946 - DNA, 120 bp, Artificial Sequence
  ENSG00000280870_15 (sequence is synthesized)
cacaactatgactgcactgggtgagacctgaagcaaacacagcattaggtctaattcaaggccttctgtaaccactccttggctgctgcctatgtttactcaaggccctggagcttacaa

SEQ ID NO: 833947 - DNA, 120 bp, Artificial Sequence
  ENSG00000280870_16 (sequence is synthesized)
tcagcaagtgggaatgcaagtcacacctgttttattctcttcaaggtggtgaggtctctcaaccttcagatgggttcagaggtgctgtccaggattcagggtcttgcaaagagatacgta

SEQ ID NO: 833948 - DNA, 120 bp, Artificial Sequence
  ENSG00000280870_17 (sequence is synthesized)
agcaaggaatcagcaatgtgaaaatggactaatacaatggcgttggtttctaatggtttaacactatcaccctgagtgctgttctcctaacagtgactgggaatggaaaagtcttctgga

SEQ ID NO: 833949 - DNA, 120 bp, Artificial Sequence
  ENSG00000280870_18 (sequence is synthesized)
tgcacatcttcctggagtctgactcagctggggataaaaagaagcaaaagaaatgcatagggaggagagaaaaaagaaggaatgcaagacaggaataataaacaagaaccaggaaagaaa

SEQ ID NO: 833950 - DNA, 120 bp, Artificial Sequence
  ENSG00000280870_19 (sequence is synthesized)
agataagcaaagtgaagaggagaagaaatgagaaaagagtagagtgaagcagaaggcaaaaagaaaaagaagaaagaatagtagctgagaaggggtttaaccaaggtgtcactaggcaca

SEQ ID NO: 833951 - DNA, 120 bp, Artificial Sequence
  ENSG00000280870_20 (sequence is synthesized)
gtgctgctaatatccactgttcactcatgatacctcctcccattacaaaagccttgtgacctggaacttgacttcagaaaacagctaataaataaacaatcccaaaccaagagatgatca

SEQ ID NO: 833952 - DNA, 120 bp, Artificial Sequence
  ENSG00000280870_21 (sequence is synthesized)
acagaaatatctttttaatccttcccagcaaaagaaatgtcattttttcttctgttcttcaagaggtaaacaagtcttgtttcctagaaacagttgggaatgtaaggaggaatattatct

SEQ ID NO: 833953 - DNA, 120 bp, Artificial Sequence
  ENSG00000280870_22 (sequence is synthesized)
gttcttgccagcccctaagtttattccagggatccaatttcctttttccatcataccggttctttagacaaccaatttgcagatacaaaactccacacccatcagatatgtgccaaagta

SEQ ID NO: 833954 - DNA, 120 bp, Artificial Sequence
  ENSG00000280870_23 (sequence is synthesized)
ggtggccccacctaaatacttttatacaaaagaacaactaatttctacaagtttttttttaagaaaaatactgtaaacatctgcatagacactcactgtcttaccttggcttttatatgt

SEQ ID NO: 833955 - DNA, 120 bp, Artificial Sequence
  ENSG00000280870_24 (sequence is synthesized)
ttgattcctggttctgctgtactcattcctcctctcccaatatcttttatagctgttacatttctactctaaacccttgtaccctcaactgtctatagcctccagccatctctctccagc

SEQ ID NO: 833956 - DNA, 120 bp, Artificial Sequence
  ENSG00000280870_25 (sequence is synthesized)
ttctcatcacatggctccagtgggaaaagtaaattataaaggaaatcattagtcaagtaaccctagaaagaatcactcagcaaaccatctgcttttttctaccttgaggaatctgtcctt

SEQ ID NO: 833957 - DNA, 120 bp, Artificial Sequence
  ENSG00000280870_26 (sequence is synthesized)
atttaaactctatcagagatcaaattgtaccaagacatacagttagatagaagaaataaaacctagcatttgattaatcagtaggatgactttagttaacattaatctactgtacatttc

SEQ ID NO: 833958 - DNA, 120 bp, Artificial Sequence
  ENSG00000280870_27 (sequence is synthesized)
aaaatggctagaagggaatcatttaaatgcttttagcataaagaaaagagagagatgttcaagctgatggatgtattaatcagttttcacactgctaataaagacctacctgagactggg

SEQ ID NO: 833959 - DNA, 120 bp, Artificial Sequence
  ENSG00000280870_28 (sequence is synthesized)
ttccacatggctggagaggcctcacagtcatggcagaaggtggaaagaacatattacatggtgagagaagagaagttgcatgaaagaacttctctttataaaaccatcagatctcatgag

SEQ ID NO: 833960 - DNA, 68 bp, Artificial Sequence
  ENSG00000280870_29 (sequence is synthesized)
ggggtcccttatatcaatggacatctcaattactctgatttgatattatattaatgtattgtcacatt

SEQ ID NO: 833961 - DNA, 120 bp, Artificial Sequence
  ENSG00000182352_0 (sequence is synthesized)
ggcccttgttcactagaagcaaggagctccctgaccccttctttcaaaacagatctctttgtctttgtcttcatttctgcattcgtcccccctttgttcaatcccctagcaaccaacagc

SEQ ID NO: 833962 - DNA, 120 bp, Artificial Sequence
  ENSG00000182352_1 (sequence is synthesized)
gacaagtggtggccgggacaggaacgtgagcaaagaaggtctgctggagcagagaaagagaaactgacaagacgaacgagaaaccctggaacaagtctgccggcagccaataaaagggtc

SEQ ID NO: 833963 - DNA, 120 bp, Artificial Sequence
  ENSG00000182352_2 (sequence is synthesized)
gagctccacaacccaaggaattcctggaacagaaattggactccatgcccaaatctgctttctatggcatctgaagggaactaagaaactacacacgacctcctggggaaagatgggtat

SEQ ID NO: 833964 - DNA, 120 bp, Artificial Sequence
  ENSG00000182352_3 (sequence is synthesized)
aggggcttcatttgttcactctgaaaaaagttctacatcagaatggaaagacaacaattaagcatctaacacagaacctgtcagataacaaaaacttgattgctatttaatgaatatggg

SEQ ID NO: 833965 - DNA, 120 bp, Artificial Sequence
  ENSG00000182352_4 (sequence is synthesized)
catggatggatgaattggcgctgtcattttccctgacatgtctccttcctgagaacagagcgtctctgtctccaagccagccgctgtcattccagtgccttaaagctccagccacactca

SEQ ID NO: 833966 - DNA, 120 bp, Artificial Sequence
  ENSG00000182352_5 (sequence is synthesized)
tctccttggtgatcacaggtgtctggtgcccttcagggacttgaatccaagctcggaagtcaacaccgcaaacctactcgaatctccttcaagtctcttgctcacttcctgttacatctg

SEQ ID NO: 833967 - DNA, 120 bp, Artificial Sequence
  ENSG00000182352_6 (sequence is synthesized)
tagctacttctctttttacatattaggagaaaagaggtgtcattctttgaaaagactaaggtacagtgtatgttgcaaggtgtgcccaaacttttgtgcatgtggaaaagaaaatgtgtc

SEQ ID NO: 833968 - DNA, 120 bp, Artificial Sequence
  ENSG00000182352_7 (sequence is synthesized)
cgggactggtcaggtttgcacgggagtgcacgtaggagccaaggagcaggaggagccaggaggaacccaagcattgaggagctgcgggatctactgcctggaggagaggacggacaaggc

SEQ ID NO: 833969 - DNA, 120 bp, Artificial Sequence
  ENSG00000182352_8 (sequence is synthesized)
cagccatgaggagtgcagggagaggagcactttgggaagaccacagtgcacaggactcacacccagccttgctggagaaagcccatgccccaggcttcttccaggcagccccactgtaag

SEQ ID NO: 833970 - DNA, 120 bp, Artificial Sequence
  ENSG00000182352_9 (sequence is synthesized)
acatctcattgcctcttcctgccctgggctgtctgacccactgccccttcccccaggaacacttccactgggatcatgagtcactctgaagccactctgaaatcactctgaagccaaagc

SEQ ID NO: 833971 - DNA, 120 bp, Artificial Sequence
  ENSG00000182352_10 (sequence is synthesized)
tgggctcagtggggaaggtcaggaatggagaaattgccttttctcgttagcctcctcttgccctgatttcatcctccctatccctgcacactttcccctggctgctgttgtaatctactt

SEQ ID NO: 833972 - DNA, 120 bp, Artificial Sequence
  ENSG00000182352_11 (sequence is synthesized)
ttctctccctttccctcctgaatcgattcattttttctctcctgttttatattttccatatctgtgggctttgttctacatttggggagctttttatattgtttatttcatgcttgtact

SEQ ID NO: 833973 - DNA, 120 bp, Artificial Sequence
  ENSG00000182352_12 (sequence is synthesized)
ttcccttccaatccttggatcaaatattgattttagagactgtatttttatttcgaaaagtttttttggttctttgattactgatgttttcaaactctcttctgttccttgaactatatc

SEQ ID NO: 833974 - DNA, 120 bp, Artificial Sequence
  ENSG00000182352_13 (sequence is synthesized)
cctccactcagtggtcacatctttgttttgttgtctgcttcttctatattatgagccttcctcaagtgtctgctgattcttggttatccaatcatagttgagaacaagataaagtgtagc

SEQ ID NO: 833975 - DNA, 88 bp, Artificial Sequence
  ENSG00000182352_14 (sequence is synthesized)
tggttatccaatcatagttgagaacaagataaagtgtagctaactgagacctcagagtatgtaggagtaaatagtatataaaatagct

SEQ ID NO: 833976 - DNA, 120 bp, Artificial Sequence
  ENSG00000182352_15 (sequence is synthesized)
acctgggaggtggagattgcagtgagcccagattgcaccactgctctctagcctgggcaaaaaaactagttccaaaaaagacacttgtacacgcatgtttatagcagcacaatttgcgat

SEQ ID NO: 833977 - DNA, 120 bp, Artificial Sequence
  ENSG00000182352_16 (sequence is synthesized)
gcatgtttatagcagcacaatttgcgattgaaaacatagggaaccagcctaaatgcccatcaagcaatgagtggataaagacaatgcggtgtacatatacaccatggaatactattcagc

SEQ ID NO: 833978 - DNA, 120 bp, Artificial Sequence
  ENSG00000182352_17 (sequence is synthesized)
acagcaacctggatggagttggagatcattattctaagtgaaataactcaggaatggagaaccaaatattgtacatcctcacttataagtgggagctgcgctatgaagatacaaaggcac

SEQ ID NO: 833979 - DNA, 120 bp, Artificial Sequence
  ENSG00000182352_18 (sequence is synthesized)
aagaatgatacaatggattttggggacttaggggaaaggatgcaggggatgagggataaaaaaccatacattgggtacagtgtacactgctccagtgaagggtgcaccaaaatctcagaa

SEQ ID NO: 833980 - DNA, 120 bp, Artificial Sequence
  ENSG00000182352_19 (sequence is synthesized)
gtcactgctaaagaccttatccttgtaaccaaaagccatctgctccccaaaaactattgaaataaaataaaatataaaaagaaagagaaagaaaagaaaatagttccaatttatcatgcc

SEQ ID NO: 833981 - DNA, 79 bp, Artificial Sequence
  ENSG00000280878_0 (sequence is synthesized)
cccagcactttgggaggctgaggcggtaggattgcttgagcacaggggtttgagaccagcctggacaacatagcaagat

SEQ ID NO: 833982 - DNA, 120 bp, Artificial Sequence
  ENSG00000280878_1 (sequence is synthesized)
aaaaaactaagaagaagccaggcatggtgatgcaaacctgtagtcctaactacttgggaggccgaggcaggaggatagcttgagcccagtagttcgaggctgcagtgagctatgatcatg

SEQ ID NO: 833983 - DNA, 120 bp, Artificial Sequence
  ENSG00000280878_2 (sequence is synthesized)
tggtgacacagtaacaccttgtctctaaagttaagaaataaaaataaaatttggggattcaatccagtatctatgtgggacaaaacaaagtttagattcctacctcacaccatacacaca

SEQ ID NO: 833984 - DNA, 120 bp, Artificial Sequence
  ENSG00000280878_3 (sequence is synthesized)
cataaaatacacactatagaagcattacaaaaaaactgtaagatcacattttggtaaatctagagtagagtagaaatgcaatgcaacagctataaagaaaaggactacatacatatctca

SEQ ID NO: 833985 - DNA, 120 bp, Artificial Sequence
  ENSG00000280878_4 (sequence is synthesized)
attatgtacaacaacaaaaatagagtttgaaaacaacagattggaacaaaaaaatttgcaacacacattgtcaataaagaattagtgtccaaaatttataggcaatttcataagaaaaca

SEQ ID NO: 833986 - DNA, 120 bp, Artificial Sequence
  ENSG00000280878_5 (sequence is synthesized)
gtaataatcctctttttaaaataggaggatgtggataggcaatttacacaaagagaaacccgcacaaagtagctaagaggatacccaaccttgctagtccctgcactaagggctaccacc

SEQ ID NO: 833987 - DNA, 120 bp, Artificial Sequence
  ENSG00000280878_6 (sequence is synthesized)
tccaactggctgtggggaagaaagaaggaagaggcaatcacaaagtcttggacttgaactcttttaggagaattgcaaaacagtgatgaaggaaaagaacttcagtgggttaaaaggagg

SEQ ID NO: 833988 - DNA, 120 bp, Artificial Sequence
  ENSG00000286090_0 (sequence is synthesized)
tgagattcaggagcacttcagcggggtggtgctggctcaaggtctcccacgagaccgcaggcatggtgtgggtcaggctgagggcctaagggtgacttccaggccggctctgcctcacct

SEQ ID NO: 833989 - DNA, 120 bp, Artificial Sequence
  ENSG00000286090_1 (sequence is synthesized)
ggggtctcaaagggctgcccctctgccctcaggacacagtgctatcttactccagaatgggagatcagaccacacaaggcggaagctgcaatgtccttaataccatcattctgcattacc

SEQ ID NO: 833990 - DNA, 63 bp, Artificial Sequence
  ENSG00000286090_2 (sequence is synthesized)
ggaagctgcaatgtccttaataccatcattctgcattacctgtggtaacacaggtcctctctg

SEQ ID NO: 833991 - DNA, 120 bp, Artificial Sequence
  ENSG00000286090_3 (sequence is synthesized)
caggtggaggagggagcggaaggtctccagcgatttccttccccgtcgatcctacaccacgcgcatgaacatgcttgcatcctcaattccgggcttccagagactggcctgatgtaccac

SEQ ID NO: 833992 - DNA, 120 bp, Artificial Sequence
  ENSG00000286090_4 (sequence is synthesized)
caaacaaaaccagagagagacaagggccactgccacttgtggacctgaggcacgcggggagattgcacgcagcttgcaaatcccacaaaacacgtaattaaatcgctaaacctgtgaggc

SEQ ID NO: 833993 - DNA, 120 bp, Artificial Sequence
  ENSG00000286090_5 (sequence is synthesized)
tcaacaatcttaaatgggtctgactcatcctggtgcctgtttgcagcatcatagcagaaaatgtacttgaggaaacagaaaaaaagactgagaacaaaataaaatgtcagtgaaatgaaa

SEQ ID NO: 833994 - DNA, 120 bp, Artificial Sequence
  ENSG00000286093_0 (sequence is synthesized)
ttgttctcttttcctttttttttttttgctcgtttattgattcattcatttaatccattgttgtagacttacagacaggtggaagccagcagaccagagccctctgttcataacctggag

SEQ ID NO: 833995 - DNA, 120 bp, Artificial Sequence
  ENSG00000286093_1 (sequence is synthesized)
accctccaagcagctagctggagagcctcagagaagtgcttgcttgggcatttctcttgggtaagcgaattttttttttttttttggacaagctctcactctatcacccaggaaggcatg

SEQ ID NO: 833996 - DNA, 61 bp, Artificial Sequence
  ENSG00000286093_2 (sequence is synthesized)
gttcactgcaacctctgtgcacaaccatgcccggctaacttttgtatttttggtagagatg

SEQ ID NO: 833997 - DNA, 80 bp, Artificial Sequence
  ENSG00000286093_3 (sequence is synthesized)
agtctcaaactcctgagttcaagcaagtgagccactgtgcctggccagatgagagaattctatctgccaagcagctaggc

SEQ ID NO: 833998 - DNA, 120 bp, Artificial Sequence
  ENSG00000286093_4 (sequence is synthesized)
gtgcctctgctcttcttgcttttcctgtattatctgtcatttcaatcatatgtagtgaataattatttattatattttcattgttagggaggtaccacccgagtagattttaggtaggaa

SEQ ID NO: 833999 - DNA, 120 bp, Artificial Sequence
  ENSG00000286093_5 (sequence is synthesized)
aactgccccactctgcagagtgaactggaagtggcttaagagctttgtgattttcttctgagacaaggtggcttagggtggcgagatttacaaatacaacagaaaaatagagtcgtatca

SEQ ID NO: 834000 - DNA, 120 bp, Artificial Sequence
  ENSG00000286093_6 (sequence is synthesized)
ttcactgtccaattacagagactcggaaagtggatatgtgttgtgcacacgctcagtcaacagtcagccctgattcagggattatgggcaatgcttaacggttaggaactcttcctctca

SEQ ID NO: 834001 - DNA, 120 bp, Artificial Sequence
  ENSG00000286093_7 (sequence is synthesized)
tccaagtcctatagctttttgttgttgttgttgttgttggggagagagccttgctctgtcacccaggctatataagcatggcaccaattatctccttggcttctggtgagggtttcaaga

SEQ ID NO: 834002 - DNA, 120 bp, Artificial Sequence
  ENSG00000286093_8 (sequence is synthesized)
agcttacaatcatggtagaaggcaaaatgggggcaggtatgtcagtcatgtggtgagagcaggagaaagagggcagcatttgtataatattaaatctaatattaaatctttggtgagcat

SEQ ID NO: 834003 - DNA, 120 bp, Artificial Sequence
  ENSG00000286092_0 (sequence is synthesized)
aagtaatgaaagacttcctcccgaataaacaaacagaggagcccgcaactgaatggcttcagttacacaacgataattgttttagaagagttatcaagagctccagcctacttcacaggg

SEQ ID NO: 834004 - DNA, 120 bp, Artificial Sequence
  ENSG00000286092_1 (sequence is synthesized)
tgaggaacgaattcaccgaggatgctaataagcagcacaggatttgtactgggcactctcaagaaacagttaagatacaacttgacatgaaactgctcaacctggtacttcccactagct

SEQ ID NO: 834005 - DNA, 120 bp, Artificial Sequence
  ENSG00000286092_2 (sequence is synthesized)
gtcaccacggaagtcaccacctgcccccctttcccttgcaagggttactaacagtgatcccatctggtcaccacaaagtcagtaggaaactcaggctgaagacacactgaaaacctagca

SEQ ID NO: 834006 - DNA, 120 bp, Artificial Sequence
  ENSG00000286092_3 (sequence is synthesized)
ccacacaagagctcatcgcagcaaccttagttttacttccttctggaaaaagatgaacagcactttcttctcctttcactgacattcagttgaaaaggatcccaggtacactctatgact

SEQ ID NO: 834007 - DNA, 120 bp, Artificial Sequence
  ENSG00000286092_4 (sequence is synthesized)
ggaggtagtggcgcttattgaaactggaaccttcatagtgattagtacgtttgctcaaacctgtaagactgaagtgtgataagtgtcttggcttgagtactaaccggaaggaaaacatct

SEQ ID NO: 834008 - DNA, 120 bp, Artificial Sequence
  ENSG00000286092_5 (sequence is synthesized)
acaactgcagaagtggctccaggaaccaggaaccgccctgcatcttacctgcaccctcgcctgtcactcaggagtctctccatgactttgcaactgccttatggggctgatctggtatta

SEQ ID NO: 834009 - DNA, 120 bp, Artificial Sequence
  ENSG00000286092_6 (sequence is synthesized)
gatatctgatatcaatggatatcagatctcgggtagggctgatcccttttgaaattaaggacaccttaggaagattaagggaaacagtcaggagatgaaagtggtggccaggaaataaaa

SEQ ID NO: 834010 - DNA, 120 bp, Artificial Sequence
  ENSG00000286092_7 (sequence is synthesized)
tgttcgcctgagtggatttcaattcagtcagtaagtacttgcttcacggtctcccttccacaccctgttctttgccttcttagcacttatcacagctcataatcagagtgtgtttaatct

SEQ ID NO: 834011 - DNA, 120 bp, Artificial Sequence
  ENSG00000286092_8 (sequence is synthesized)
gtctcctcccacactggaagctccaggaacacagggactgtgtctgccttgctcaccaccgagtctccagcaccaaaaacagtgcctgaacatagcgggcagtcaagaaaagcttgtctg

SEQ ID NO: 834012 - DNA, 120 bp, Artificial Sequence
  ENSG00000286092_9 (sequence is synthesized)
ttcattcaacaaatgcctatcgatgccaatgactgccaaggactgcgttaaggtacttactctcagaggttgacagtccttggtggagacaaacaataaacaagtaaatggacaaacaaa

SEQ ID NO: 834013 - DNA, 120 bp, Artificial Sequence
  ENSG00000286097_0 (sequence is synthesized)
agatcagctgacatcaataatcctaggtctgagctcgctgaagtgctgcagctcttctctctcttctctccttttcgtcacccacagcctggctaacaaggagcatgtttcagccgtgtt

SEQ ID NO: 834014 - DNA, 120 bp, Artificial Sequence
  ENSG00000286097_1 (sequence is synthesized)
tgtgttactgatctttcagtcccaccattcggcaggtccaggaagaatgagtgttttttagttctccttgcaaagatcttcagatatattcctaggtacttcactgtttttttggctatg

SEQ ID NO: 834015 - DNA, 120 bp, Artificial Sequence
  ENSG00000286097_2 (sequence is synthesized)
agtccaaagaattgcatgaactagattctgctgatgtttgcaagattgaagttctctaatcctacaaacaaatagtcattcactgtgaaagactcactatggggaggttatgaggtgaca

SEQ ID NO: 834016 - DNA, 120 bp, Artificial Sequence
  ENSG00000286097_3 (sequence is synthesized)
tgaagatattgtagcccttagaccaattatgaaatgttaaataaacacacttcttgtattatcctccatgacagaagatccaatccatccttctagatgtgtgatctcttggggtgggac

SEQ ID NO: 834017 - DNA, 120 bp, Artificial Sequence
  ENSG00000286097_4 (sequence is synthesized)
aggaatctggcatgatcaacaaaatactgctctaaacattttcatgttattgtttctgccttgtctttggggcaacctccaatggctaggttacaagtttactctattacttcttatcat

SEQ ID NO: 834018 - DNA, 120 bp, Artificial Sequence
  ENSG00000286097_5 (sequence is synthesized)
aacagcaggacacttgcatagtgcaaagtaaagacacatacatagctgaaggcttgggctttaaacatgtaatcaagtaaattgttggtgctcacaaacaatttatttggctttcatgac

SEQ ID NO: 834019 - DNA, 120 bp, Artificial Sequence
  ENSG00000286097_6 (sequence is synthesized)
aattaatgtaaatgtaaaatcaatcataacaatcttatttaaataaaatgtgtatattccaatatcagaacttcacatggaaaaatcatgagggtcacaagagtataatttttgtactga

SEQ ID NO: 834020 - DNA, 120 bp, Artificial Sequence
  ENSG00000286097_7 (sequence is synthesized)
aaagctgtaaaaatagcagaaataaaatatcactttttccttgcacaacttaattattaaatagaatatatgggaagcagatgtattgcaatatctcctcataaatattgttctctttta

SEQ ID NO: 834021 - DNA, 120 bp, Artificial Sequence
  ENSG00000286097_8 (sequence is synthesized)
ctcagcctcagtgtctgatatgagaagtaattggtgtattaagtcatgggaatctcaattcacatacattacgttaatttctactgaacttatgtcatgctttagatcacttatttattg

SEQ ID NO: 834022 - DNA, 120 bp, Artificial Sequence
  ENSG00000286097_9 (sequence is synthesized)
tggttctgataaaaattctattcattcattttgtaacgttacatacataatactagctgcctttcctcgagtacctaatatgtgccaagtacattgttaaatttgaatattttataatat

SEQ ID NO: 834023 - DNA, 120 bp, Artificial Sequence
  ENSG00000286097_10 (sequence is synthesized)
aatatctaaaaatacttaaaatccctattttatgggtgaagcaggtgaacatggagaggtaaagattgtctcatatcttactaccaagaaatggtacaatcaggatgtgaaggcacatga

SEQ ID NO: 834024 - DNA, 120 bp, Artificial Sequence
  ENSG00000286097_11 (sequence is synthesized)
caaattcttagccttcagtcattgcactgtgctgtttcctatttcaggtatgtcaaatacaaaggaaggaattcttgtcaaattctcttatatgaatattttataaaccttatacataaa

SEQ ID NO: 834025 - DNA, 120 bp, Artificial Sequence
  ENSG00000286097_12 (sequence is synthesized)
aggactatcgttgttcctttgaaatattctactgttcctctgtgaaggacttcacattatatgtgtgtgtgaattgaaagcaaagaggaaaaaatcacctttcaatctaccagaaatatg

SEQ ID NO: 834026 - DNA, 120 bp, Artificial Sequence
  ENSG00000286097_13 (sequence is synthesized)
atggaacaatgtgcgtgtgtatgtgtgtctcttcctcaaacatactgtgttatctattttattatccgtctgtaaaaattattaaaatatgtgattctattcatcatgataaatttaagc

SEQ ID NO: 834027 - DNA, 120 bp, Artificial Sequence
  ENSG00000286097_14 (sequence is synthesized)
ataggagaaaagtaaagtcttatttaaagtaatggaacttattctgtacacaatagaaaaatctattttaaaaatcacttgtgaatctacagtagatgtgatgatataatgttataagtt

SEQ ID NO: 834028 - DNA, 81 bp, Artificial Sequence
  ENSG00000286099_0 (sequence is synthesized)
ccgctcccgcttctcccaccacacttccctgcaagctgagagaagcggctctggccttgggcagcccagaaaggggctccc

SEQ ID NO: 834029 - DNA, 81 bp, Artificial Sequence
  ENSG00000286099_1 (sequence is synthesized)
aactatttactcagaatgagtgaagagacagtcttgctctgttgcccaggccggagtggagtggcacagtcataattccct

SEQ ID NO: 834030 - DNA, 120 bp, Artificial Sequence
  ENSG00000286099_2 (sequence is synthesized)
ttgcccaggccggagtggagtggcacagtcataattccctgtacccttgaaatcctgagctcaagccatctccataccttagcctcccaagtggctactacaggactgactgatagtatt

SEQ ID NO: 834031 - DNA, 120 bp, Artificial Sequence
  ENSG00000286099_3 (sequence is synthesized)
ttcctttggaagatccttttatattctgtctctatgaaagaagtgttttcaatgaaataagatatttattccaaatcaatcctgcaccagaagctccatttctgcattcgcttccagaaa

SEQ ID NO: 834032 - DNA, 120 bp, Artificial Sequence
  ENSG00000286099_4 (sequence is synthesized)
acacagcagccgtatgtgaatttgggagtggtcccacgaaccggttatgagacgaggttttggagctggatcacacctgacacaactggcattgaaaaccttattaccaagagcctctgg

SEQ ID NO: 834033 - DNA, 120 bp, Artificial Sequence
  ENSG00000286099_5 (sequence is synthesized)
tgctatgaagaaatacccaagactgggtactttctcaactttcaaattgagctgttcagaatgtgtgaaacaattttaagatgaagtcaaagatacttgaagcagaagctgtatctgagg

SEQ ID NO: 834034 - DNA, 120 bp, Artificial Sequence
  ENSG00000286099_6 (sequence is synthesized)
atctgaggaagctgtatataaacccaatttaaagcaagatgagaactcagcacaggcactgcagccacggaggtttccagatagaaaaattgacacccctgagatcccataacattttgg

SEQ ID NO: 834035 - DNA, 120 bp, Artificial Sequence
  ENSG00000286099_7 (sequence is synthesized)
ggactcatctgggatctgcggaaggagcttgactcttttcattggcaataaatggcgccccaacatggggactcagagaagactcaggagccccaagcagttgtccgaaatcagagctaa

SEQ ID NO: 834036 - DNA, 120 bp, Artificial Sequence
  ENSG00000286099_8 (sequence is synthesized)
ggtaccagccagggttaattgaagactcaccaagttcaagcttctcctttggtggaactgctgagattgaagaacacttgaaaattatcaagaatgtactgcggagtattgaaattgcaa

SEQ ID NO: 834037 - DNA, 120 bp, Artificial Sequence
  ENSG00000286099_9 (sequence is synthesized)
gttatcatcaaaggaagcttactcttatttgtggaaaacaaacacagaaaaaagaagaaggaaggaaggaaggaatcataccttccctgtttcaaataacaagcatcaagcatcgtgata

SEQ ID NO: 834038 - DNA, 120 bp, Artificial Sequence
  ENSG00000286099_10 (sequence is synthesized)
atgtggacactaaggagcaacaatttctctaaagataagaataaagatagacttttagactacgagatgggcctgaaaaaatatctgatcaagctactcagttttacagatgaagaaggt

SEQ ID NO: 834039 - DNA, 120 bp, Artificial Sequence
  ENSG00000286099_11 (sequence is synthesized)
gaagcctgggaaaacctaaagaacctatataaggttctcagatagacaccatgttatctgcttgaatgaagaaaatttggtaacatgtttgctgatcttaatctactatacattttttta

SEQ ID NO: 834040 - DNA, 120 bp, Artificial Sequence
  ENSG00000286099_12 (sequence is synthesized)
gcttgtcaacttgaacaagtttctcaattatttcctcatctattttttctgataaacttaaccaaatcttgtaaaatgaatgttttgaaaacgtatatcttaaaggagcattttctaatt

SEQ ID NO: 834041 - DNA, 120 bp, Artificial Sequence
  ENSG00000286099_13 (sequence is synthesized)
taatattgatgttttattatttattgaatcaaggaagttatgcatattttgcataaatatgtgctaccttatgtatgataatatttttctccacagtcacatattaatctgtcctgacat

SEQ ID NO: 834042 - DNA, 120 bp, Artificial Sequence
  ENSG00000286099_14 (sequence is synthesized)
ctgtcctgacatttttctataataaacatcattatctgagacagaaatgacaggaaaaatttatccattttaatgatatctaattaaaatttgtgtctaaccttaattgaaatatatata

SEQ ID NO: 834043 - DNA, 120 bp, Artificial Sequence
  ENSG00000286099_15 (sequence is synthesized)
agtaaaaaaggaaagtcaattgatgatgcattaagtgtcagcattattacatagagattggaagacattaggtacaaatgtgaatctgcaagagtaccatttgtatattgctaattactt

SEQ ID NO: 834044 - DNA, 120 bp, Artificial Sequence
  ENSG00000286099_16 (sequence is synthesized)
gatactgtgtctttttaagaaagctgttactctttattcactctagagcatttcagacaattaattaggcattcattaatagatgattaaacattttgtctctacattgcttgaaaggag

SEQ ID NO: 834045 - DNA, 120 bp, Artificial Sequence
  ENSG00000286099_17 (sequence is synthesized)
ttgtaaattacatcttgcccatgttgctaatttgctgtccagcaaacagacttgcctgtggaaattttgtaaatcaagcttatgatatattggccatagattgtttgtcttccaattcct

SEQ ID NO: 834046 - DNA, 120 bp, Artificial Sequence
  ENSG00000286099_18 (sequence is synthesized)
cttagctgttgataatgcaaatcaagccacatgaatgataacctgatagaagacactgctttgaaaagctatactcacattaatacaaactgttcagaattgttatgtggaacatttctc

SEQ ID NO: 834047 - DNA, 120 bp, Artificial Sequence
  ENSG00000286099_19 (sequence is synthesized)
tctataattgagaagataaacatggcaaataatatgctgcttcatcaagttttgcatgtgaatcattcccaaagtgaactttgaaaagagctccataaattccatcagaaaacaatgaaa

SEQ ID NO: 834048 - DNA, 120 bp, Artificial Sequence
  ENSG00000286099_20 (sequence is synthesized)
agcaaataaatatcaggtataaaaactcatattgataaaaaccaaactttacttaacgttacagaagtccaaatgattttatcaagataatatgtgatttaatatgtgaatctataataa

SEQ ID NO: 834049 - DNA, 120 bp, Artificial Sequence
  ENSG00000286099_21 (sequence is synthesized)
aatctataataaagaattctgaggctgagtgtggtggctcatgtctgtaatcccagctctttgggagaccaaggcgggtggatcgcctgacattaggagttcgagaccaacctggccaac

SEQ ID NO: 834050 - DNA, 71 bp, Artificial Sequence
  ENSG00000286099_22 (sequence is synthesized)
ctaagaatacaaaaattaagcatgagaactgctggaacctggaggctgcagtaagctgagatcgtgccatt

SEQ ID NO: 834051 - DNA, 74 bp, Artificial Sequence
  ENSG00000286099_23 (sequence is synthesized)
cagtatggtcacacaagtttctagaaaaccaacttatttctgagatagcccagaggtgacatacactgactaac

SEQ ID NO: 834052 - DNA, 120 bp, Artificial Sequence
  ENSG00000286099_24 (sequence is synthesized)
tatttctgagatagcccagaggtgacatacactgactaacccactgagagtatgttttattctttgctgaactactagaacctagactagagcctcacatgcaaaaagcattcagtaaaa

SEQ ID NO: 834053 - DNA, 120 bp, Artificial Sequence
  ENSG00000286099_25 (sequence is synthesized)
attgtgtttacagaaaattactataggacaataattatgtcttataagtgggtttgtttaaagggtttatcatttattctaagtcacacattttactcagaaatactagctttgtcctgg

SEQ ID NO: 834054 - DNA, 120 bp, Artificial Sequence
  ENSG00000286099_26 (sequence is synthesized)
aaagttcaattaaatagagaaaaggaacaagaacatacattcaagccaaaataagcaaagctttgcctcaagaagggttgatggaaaaaacagaaaacagaaagcactacagtttaatga

SEQ ID NO: 834055 - DNA, 120 bp, Artificial Sequence
  ENSG00000286099_27 (sequence is synthesized)
gttacagactgctcagcagaaaagacaacatagacatataatacaggtctttctgctaatatattcctttctttgcttaaaactaagtacagatattactttggaaccctttgaatgtgg

SEQ ID NO: 834056 - DNA, 120 bp, Artificial Sequence
  ENSG00000286099_28 (sequence is synthesized)
gaaattagtttcctcctcagcattgtcctctactacttttcggagtataatgtgtatgacattctctcagtaaaattttgatacacttgatagttgaaggttaaagaagagtagaaatca

SEQ ID NO: 834057 - DNA, 120 bp, Artificial Sequence
  ENSG00000286099_29 (sequence is synthesized)
tcttaacaccttactaatgggaaattttttcataggaatacacataatttccagaaagttacctttttatagagggcatcatgcataataacaccttttggctcaaaatagaaattattt

SEQ ID NO: 834058 - DNA, 120 bp, Artificial Sequence
  ENSG00000286099_30 (sequence is synthesized)
ttaagcttatacttttgccatacgttagagcaactactgatttagattgttctgttttactgttctagaatcattccacacttgcctcttggcatccataatcagaaaagtaaatcaaga

SEQ ID NO: 834059 - DNA, 120 bp, Artificial Sequence
  ENSG00000286099_31 (sequence is synthesized)
aataaactataaactgatcaatgttttattattttccttatagccttttattttaccatgaggagtttctgtatgtaaggcactttagaatatgaatgattttcatggcatacacataag

SEQ ID NO: 834060 - DNA, 120 bp, Artificial Sequence
  ENSG00000286099_32 (sequence is synthesized)
ggactattaaaaacaactgacatgtttttggtaaagtatttgactgtttattcttcatgtaactgaaaatattcagcattgaaagagtttgcatttcatgatggctacaaagttgaaatt

SEQ ID NO: 834061 - DNA, 120 bp, Artificial Sequence
  ENSG00000286099_33 (sequence is synthesized)
tacattctggtttcttaaaggcaggaactacattctgcaaagggcaaatttcaaaagacaaaacttaatccttatactagcaaaagtttgattagataagttctacatacttagctgctt

SEQ ID NO: 834062 - DNA, 120 bp, Artificial Sequence
  ENSG00000286099_34 (sequence is synthesized)
atataaatacaggtggctgaggctgaaaatgaatgccccaggaagaagtaaatcaattttacaaaaattatcaaatggcataatgatgggcacacaatgccctccacccacagctgttct

SEQ ID NO: 834063 - DNA, 120 bp, Artificial Sequence
  ENSG00000286099_35 (sequence is synthesized)
tgcatttctaacataaaaggcagcacaagacagaagggaaacactgacaaatagattggttctgccatttccttagcattatgtgccctgtcactttttgaatttcttagataagatgca

SEQ ID NO: 834064 - DNA, 120 bp, Artificial Sequence
  ENSG00000286099_36 (sequence is synthesized)
atttctctttagtttttaatgcccttttagatattttttgttacaggattcgttaccatgaatccaagggactttattttggcactttgacagaaaggattggactgcttaaacaagaac

SEQ ID NO: 834065 - DNA, 120 bp, Artificial Sequence
  ENSG00000286099_37 (sequence is synthesized)
taataaatagcttccatttcctacatgaaaaaagtaatacatgtttatgctgtttcctggattgcacatgtaactggcagcaagaaacaccctcggaatagtaatcataaaatatccttg

SEQ ID NO: 834066 - DNA, 120 bp, Artificial Sequence
  ENSG00000286099_38 (sequence is synthesized)
tttattccaaagcataactatagaaatgtgtgacaatctgaatttcttttgtatgccaaaatatgctgagaaagtactaatgaatgctgtgccattctaattttgtattaatgaaataat

SEQ ID NO: 834067 - DNA, 120 bp, Artificial Sequence
  ENSG00000286099_39 (sequence is synthesized)
ttattattttttcagttttaattaaaattggctttgcatcaaactgtgcttatcacattgatcacatgataaaaagggaattttgtcatttatcaataaaaatgattatgtgtattatct

SEQ ID NO: 834068 - DNA, 120 bp, Artificial Sequence
  ENSG00000286099_40 (sequence is synthesized)
acttacagaagagtggagcagatggagtctgtctttgcaaagctttctctgactctggaatccataatggtcacccggatgcaaattgacctgtcgttctagggtagggttatgcaagtt

SEQ ID NO: 834069 - DNA, 120 bp, Artificial Sequence
  ENSG00000286099_41 (sequence is synthesized)
caggagaagtttggtggttgcaggctcacaactcttttacattcaaggtttaacctgctgattgggaagaatttttatgaaaagctgtgtgcttcctgataagaaaaaaggctttcctgt

SEQ ID NO: 834070 - DNA, 120 bp, Artificial Sequence
  ENSG00000242828_0 (sequence is synthesized)
gtggaggctaaggagatttataatctgccatctgcaacctggagactaaggagagccagtggaattgtgccagttgaagttcaaaagcatgagaaccagaagaactgatgatgtgaacag

SEQ ID NO: 834071 - DNA, 120 bp, Artificial Sequence
  ENSG00000242828_1 (sequence is synthesized)
catggcttactgtagccttgaccttgagggcttaagcaatcctgccacctcagcctgcctagtactgggactacagaaacatcaaatatattcagctcccgtctctcttcaaccatgtaa

SEQ ID NO: 834072 - DNA, 120 bp, Artificial Sequence
  ENSG00000242828_2 (sequence is synthesized)
aattatttcaacaactatcagctattgaaggtgaaactggcatgtctgtttgttcttctcttcctggtgtcaaagactcttaaagcatgcatataaaatatgaaagtaaataaaacgtaa

SEQ ID NO: 834073 - DNA, 120 bp, Artificial Sequence
  ENSG00000244791_0 (sequence is synthesized)
gcacttactccattctgccgccctgtgaagagggtgcctgcttttcctttgccttctgccatgattgaaaccacacattcaaaataatgctaacctgtcaagttattgatctgcactgta

SEQ ID NO: 834074 - DNA, 120 bp, Artificial Sequence
  ENSG00000244791_1 (sequence is synthesized)
catatttcctggtcataggcagcttccacacaagaacatctggatgcaaattaaagaattcaattactcaagcctaagtgatagaggagacctcggctactctgcctgagcacatcactg

SEQ ID NO: 834075 - DNA, 120 bp, Artificial Sequence
  ENSG00000244791_2 (sequence is synthesized)
ctggatctcaaaatctgcaagaacttcctagggcttcaggaactttcatgtgcataccagtcacctgggaatcttgttacgatgcatattctttttcagtaagcccaaattctgcaattc

SEQ ID NO: 834076 - DNA, 120 bp, Artificial Sequence
  ENSG00000244791_3 (sequence is synthesized)
ttataaggtcttaggggacatgatgtttgcttctagtggtccatggtctactcctgaaggtccaccatgcccagcttcatctccccaccctctggaaactctcctgtacccaagccactt

SEQ ID NO: 834077 - DNA, 120 bp, Artificial Sequence
  ENSG00000244791_4 (sequence is synthesized)
gctctcttctaaataggcattgtgttcccatgttcccatgtgtctgcctctttcaacttctcctctaaaaattctccatgacccccaagcataagcctccagcagcaagctcaaaaatgc

SEQ ID NO: 834078 - DNA, 120 bp, Artificial Sequence
  ENSG00000244791_5 (sequence is synthesized)
ctctgaggattctgatgaacacagttcttgccctcttcacttttccaatctggttgcaggcacagcgggggacagcaggagtgcaacacagtaacttaatataatatggagctgctatta

SEQ ID NO: 834079 - DNA, 120 bp, Artificial Sequence
  ENSG00000244791_6 (sequence is synthesized)
tggagggaaacattcactgctctgaaaggactcaacagctgagtcttaaagaaggattttacaagattgacaaagaaatgggttatctccagataggaaggaaaaatcacaaggaatagt

SEQ ID NO: 834080 - DNA, 120 bp, Artificial Sequence
  ENSG00000244791_7 (sequence is synthesized)
acagcaaggaaagaggaaacagcactggacttggggaaaagggaaatccttgagatgttgctaaggcataaagagcaagacagagagtgtcagaagatgacactgacgtcacctgactcc

SEQ ID NO: 834081 - DNA, 120 bp, Artificial Sequence
  ENSG00000244791_8 (sequence is synthesized)
tgctgctgagcttctctgacattttctcaagggctcaaggcttggataccctctgatatggtttatctgtgtccccgcccaaatctcaccttggtttgtaatcatctccatgtgtcaaga

SEQ ID NO: 834082 - DNA, 85 bp, Artificial Sequence
  ENSG00000244791_9 (sequence is synthesized)
ataattgaatcatgggggcagtttcccacatactgttcacatggtagtaaataagtctcatgagcggctctttttgcctgccacc

SEQ ID NO: 834083 - DNA, 120 bp, Artificial Sequence
  ENSG00000244791_10 (sequence is synthesized)
ctttttgcctgccaccatggaagacacccctttgcccttcctttattttctgccacaattgtgaggcctccctagctatgtggaattgtgagtgcattaaacctctttcctttacaaaat

SEQ ID NO: 834084 - DNA, 72 bp, Artificial Sequence
  ENSG00000244791_11 (sequence is synthesized)
tgcttgatgtggaactgaaaccacacattcaaaataatgctaacctgtcaagttattgatctgcactgtaca

SEQ ID NO: 834085 - DNA, 120 bp, Artificial Sequence
  ENSG00000260239_0 (sequence is synthesized)
gcaatgtgattgatagtgagtgtcacggaggactttccatctgtccctctgtcatcctcagtattgattccacccctgggctgagggcaagtggtggcagcaggcacagcgtcccctcca

SEQ ID NO: 834086 - DNA, 120 bp, Artificial Sequence
  ENSG00000260239_1 (sequence is synthesized)
gacacagctgtgtcattggcatggcttctgagatgtggtggaaggacaggactaagacacaagagctattcaggatcccacagcatccggatgtcttcggacttatggccagtgaagaac

SEQ ID NO: 834087 - DNA, 120 bp, Artificial Sequence
  ENSG00000260239_2 (sequence is synthesized)
atgaagagaagggcagagctgagtcagagtcagcatgtcagctggaggaagtcatctgacattttatgatgtgtattcacatctgaagggaacaatgggagtgagtgcagcaaccacgaa

SEQ ID NO: 834088 - DNA, 120 bp, Artificial Sequence
  ENSG00000260239_3 (sequence is synthesized)
aacatgccccatggaaactggctggtcagaagacggtatttaccaagtctcttcccaaaatacttgcaaatgcacataatctcaaagtgtttttgagggctcttccgatctaaaattggt

SEQ ID NO: 834089 - DNA, 120 bp, Artificial Sequence
  ENSG00000260239_4 (sequence is synthesized)
cctagtgacaaggggtgtttggggaaatcaaagggctggcttaactatgtagacctaggtctggtcttatttctggcccatacgatcatcatgaccttggacaaatgaaacttcctgggc

SEQ ID NO: 834090 - DNA, 120 bp, Artificial Sequence
  ENSG00000260239_5 (sequence is synthesized)
ctcaagttccttgtatcagaaaggatggcattcagctgcgtacaacagaaaaccaaatcacagtggcttatccaagaaaagttcaatttttctcaaaactacagcgtcctgggctgatgc

SEQ ID NO: 834091 - DNA, 120 bp, Artificial Sequence
  ENSG00000260239_6 (sequence is synthesized)
ggcagccccaggacgacctcagcatctcactcctcctttctttactcggccccatcctcaggctgtgactttcatcctcaggtttgtcatcttttggtggtaagatggttgctctacctc

SEQ ID NO: 834092 - DNA, 120 bp, Artificial Sequence
  ENSG00000260239_7 (sequence is synthesized)
aagctcacaaaaagaaatgggggaaagcaggaaagaagaaaatctgcttccccagagactctgaggctgcacttgcacatcttatggatccaaactgtgtcccatggctgcccctagatg

SEQ ID NO: 834093 - DNA, 120 bp, Artificial Sequence
  ENSG00000260239_8 (sequence is synthesized)
caaggggcctggggaaatgagcggattcatcaggtacactgcaaccgtacatgaaaggaaagttctgtcaataaagaagagcgaaatctacatttggtcaggaaacagcattgcctgcaa

SEQ ID NO: 834094 - DNA, 120 bp, Artificial Sequence
  ENSG00000260239_9 (sequence is synthesized)
tgcggatgcaatcctgaatctatgaacacgattggcagaacaataaatattgattgtcttggccactcaccaaataaagtgctcctgggaaggctgagatctaatgcaaagcagcagctt

SEQ ID NO: 834095 - DNA, 120 bp, Artificial Sequence
  ENSG00000260239_10 (sequence is synthesized)
gactttctcactccctggcaacaatgccaagcaagagaaagcgatgggtaaggcctggctcaagagtctcactgcaacctgcactgtagattctacctgctaatttcctcagccttctct

SEQ ID NO: 834096 - DNA, 120 bp, Artificial Sequence
  ENSG00000260239_11 (sequence is synthesized)
ctacctgctaatttcctcagccttctctggttttgggcttcagaatgccctaactctgggcccggcgcggtggctcacgcctgtaaacccatcactttgggaggccaaggcgggtggatc

SEQ ID NO: 834097 - DNA, 68 bp, Artificial Sequence
  ENSG00000260239_12 (sequence is synthesized)
atacaaaaattagctgggcatggtggcttgtgcttgtaatccagctacttggaaggctgaggctggag

SEQ ID NO: 834098 - DNA, 70 bp, Artificial Sequence
  ENSG00000260239_13 (sequence is synthesized)
ctaagtctactctggaccatgagcaaggataatctgtcttagaggagagaaggtgaggttatgattccag

SEQ ID NO: 834099 - DNA, 120 bp, Artificial Sequence
  ENSG00000260239_14 (sequence is synthesized)
aatctgtcttagaggagagaaggtgaggttatgattccagagcatttggtgacccaggaagtagacctgcctcctcctatctgtccacagagcagtcctaggggcaataggccatgagaa

SEQ ID NO: 834100 - DNA, 120 bp, Artificial Sequence
  ENSG00000260239_15 (sequence is synthesized)
gatcatgccaggcagtccatttctatattaccatgtaaacaaaaactcagctgtgaaccctggaacgttcgtattctgcagctgccagtgtaaactggtacaggcctcttgaagaacagt

SEQ ID NO: 834101 - DNA, 120 bp, Artificial Sequence
  ENSG00000260239_16 (sequence is synthesized)
ggggaaaggcactctgaaagcatccacgcctccatacctgctgatccagggctctgattttccttctgggaaccaagcctaggagaatgattcaagctgcagaaaacctttctccactaa

SEQ ID NO: 834102 - DNA, 120 bp, Artificial Sequence
  ENSG00000260239_17 (sequence is synthesized)
gatgtttgctgtggcattcagtataatagcacaccagagaaacaatctaaagattcatcagtaggagaatatctaagtaaattatggtacatacactcaataaaatgttatatgactact

SEQ ID NO: 834103 - DNA, 120 bp, Artificial Sequence
  ENSG00000254559_0 (sequence is synthesized)
cccctgatgagcttgccatggcagccaaggacactggtgccggaggaacgacaggggcctgcaaagggacatccgaggagggggaagcaagctgggagcaagaccagcccagctaggttt

SEQ ID NO: 834104 - DNA, 120 bp, Artificial Sequence
  ENSG00000254559_1 (sequence is synthesized)
cagggcaacagcaaagccccagagacatggaggcagatgagtcaaccttgctgggtgagaagtgagcttgcactgcatagggcaagaagaaggtggaccccactcctccaggaggctgac

SEQ ID NO: 834105 - DNA, 120 bp, Artificial Sequence
  ENSG00000254559_2 (sequence is synthesized)
ggaggaggggaggggaagggtgagcaaagtggggctgcaggcatcaggctgtggctgatctgtggtcagcctggagctcagaggcagttctggattgacaggacatatggtgtggccaca

SEQ ID NO: 834106 - DNA, 120 bp, Artificial Sequence
  ENSG00000254559_3 (sequence is synthesized)
attagacccacggccatgccacatagaagcttccggttgtcttgtccggaccttgccattgtggaaaagcgcttcacgctccctgtaagcaggctggtcatgcttgtgaaatccgagtcc

SEQ ID NO: 834107 - DNA, 80 bp, Artificial Sequence
  ENSG00000260231_0 (sequence is synthesized)
ccccgctcctctccgcgacggccgggcggagggagctgttgaagggcacgcaggcggctgcgggggcggagggagctgag

SEQ ID NO: 834108 - DNA, 120 bp, Artificial Sequence
  ENSG00000260231_1 (sequence is synthesized)
cgcgcggccgcagccggaggaggacggcgggagcgtgcgaggagctggctcggttatttcggagcgagagccgaggccgggggaagttcctgcggagtgctcaagggcagaagaggtgcc

SEQ ID NO: 834109 - DNA, 120 bp, Artificial Sequence
  ENSG00000260231_2 (sequence is synthesized)
gcgtcccgaagaggggaagcggagaagtttgctgctgcccgggtcgcctcgcgacgctgagagaatcgcccagccctccgcagccgcccagcgagaaccggagctgcggccccgcaccgg

SEQ ID NO: 834110 - DNA, 120 bp, Artificial Sequence
  ENSG00000260231_3 (sequence is synthesized)
cgtgagtccagctgagctgacacgccgagccggttgtgcctttccgagggaggaatgtgccgtggaatccaaactttggaaaacgtcccacccgaattcccagcgagcagcaaggagacc

SEQ ID NO: 834111 - DNA, 120 bp, Artificial Sequence
  ENSG00000260231_4 (sequence is synthesized)
agagcgtcgatggagccaccgttagttgcgggagggctgtccccaagaggaattcatcactgtcgtccgctgggagggaccaaccttgaaatggggttggtggagagagggatagagaag

SEQ ID NO: 834112 - DNA, 120 bp, Artificial Sequence
  ENSG00000260231_5 (sequence is synthesized)
agccggcgtgcttataaataacaaaacttagctatgaacccttccgattcccaagtggggaagatggggtaaaattctaagtgacttctcgctccgaagagggataccacaaaaagcgga

SEQ ID NO: 834113 - DNA, 120 bp, Artificial Sequence
  ENSG00000260231_6 (sequence is synthesized)
gcgcagggtacttggcgtataataagccatcaataatttatgggtgaaattgagagccaaatataagatgataaactgaagaataaaaacagctgacaaatactgtatagaaaagattgc

SEQ ID NO: 834114 - DNA, 120 bp, Artificial Sequence
  ENSG00000260231_7 (sequence is synthesized)
gttggaatcataactgtggattggaagtgatgttaaggattattggattgagtatttgtagctgaatttctgctggcatttctatcagtggggaaagccctcacagctccataggtaatt

SEQ ID NO: 834115 - DNA, 120 bp, Artificial Sequence
  ENSG00000260231_8 (sequence is synthesized)
aggtaatttttgttaggggaggaagaagtgttgttctgtcacccacccccaggcaaagagtcgctgatctaattctccatttctttctttctttcctttctttccttccttccttccttc

SEQ ID NO: 834116 - DNA, 120 bp, Artificial Sequence
  ENSG00000260231_9 (sequence is synthesized)
cttccttccttccttccctccctccctttcctttcctttcctttcctttctttcctttctttctttgaaacggagtttcgttcttgttgcccgcgctggagtgcagtgcagtgctgtgat

SEQ ID NO: 834117 - DNA, 120 bp, Artificial Sequence
  ENSG00000260231_10 (sequence is synthesized)
ctgggattacaggcgtgagccaccaagtcctgcctaatctcctttttatagttgaggaaagctagtaacttgactgaagtctcatatattagagctgtaactgaagtttttaagtgtctc

SEQ ID NO: 834118 - DNA, 120 bp, Artificial Sequence
  ENSG00000260231_11 (sequence is synthesized)
gtaactgaagtttttaagtgtctcaattctgcaactattcgtttttctatcacatcactgtttggcatatatatagcgggaaaaggaaaggctggaaattagttgaccacacactgatta

SEQ ID NO: 834119 - DNA, 120 bp, Artificial Sequence
  ENSG00000260231_12 (sequence is synthesized)
agcttgaaacatatttctactggagaaaaaaaggtactgtaattttggcataggcatcacatattgctggagtggaaagacccatgcactcaggtcctgctttctataatctgtgacctc

SEQ ID NO: 834120 - DNA, 120 bp, Artificial Sequence
  ENSG00000260231_13 (sequence is synthesized)
gggccagtcactccatttctcctgaactagatcactgatgatctgttgaaagaaaaaatatggctagtaatgccttaattatctcacagaggttttacatggagcaaaaagacaatgtat

SEQ ID NO: 834121 - DNA, 120 bp, Artificial Sequence
  ENSG00000260231_14 (sequence is synthesized)
ttttaaatgtactttgttgaaggtgtgtgttgtcgagacaatacagcagtgaagagaaggcatgcaaagctgtcttgttggagtctggctaaagagcaccaaagcagcctgttgtgggat

SEQ ID NO: 834122 - DNA, 120 bp, Artificial Sequence
  ENSG00000260231_15 (sequence is synthesized)
gtcctctgggggccacctggacttgctatgttaacatggagggactaggcaggggtatgaagaaggaagcccagcagagcaggaggcagcagcaacaatgagagattggttatccatatg

SEQ ID NO: 834123 - DNA, 86 bp, Artificial Sequence
  ENSG00000260231_16 (sequence is synthesized)
taatccccaatgttggaggtggggatcttatgaatggtttagtaccatccactttgtattgtccccgtggtaatgagtgagttctt

SEQ ID NO: 834124 - DNA, 120 bp, Artificial Sequence
  ENSG00000260231_17 (sequence is synthesized)
atccactttgtattgtccccgtggtaatgagtgagttcttaagaaatctggtcattgaaaaatatgtggcacctcctccctctctcttttgctcctgccccggctatatgatgcaatttg

SEQ ID NO: 834125 - DNA, 65 bp, Artificial Sequence
  ENSG00000260231_18 (sequence is synthesized)
tctctcttttgctcctgccccggctatatgatgcaatttgtcttcagccatgattgtaagtttcc

SEQ ID NO: 834126 - DNA, 120 bp, Artificial Sequence
  ENSG00000260233_0 (sequence is synthesized)
ccgacgcgcgaggcctcgggaggagcgtctccttggtaactctcctccggtcgcaagacctggaagtggcctcagggggtcgcccttcctgtccgtcgtggatgaaggggaccacttggc

SEQ ID NO: 834127 - DNA, 120 bp, Artificial Sequence
  ENSG00000260233_1 (sequence is synthesized)
ttcagaaatccccgctggcctccgcctcccctggggtttccctttcggcgcaggcggggcagcggcgtcatcacaaccatcgccaccccagtaatcacagcgagcggccctttgcgcacg

SEQ ID NO: 834128 - DNA, 120 bp, Artificial Sequence
  ENSG00000260233_2 (sequence is synthesized)
aggcctcagtacttctcacttcgcccggcaaggctggccaggaggggtgcattctccctttccgcgtatttcaagaccactccccttctgcatgctcggtgtcccagtctgtctcctcgc

SEQ ID NO: 834129 - DNA, 120 bp, Artificial Sequence
  ENSG00000260233_3 (sequence is synthesized)
tgcctcccgaggcctggaactgaagcaaagttcgccccgaagccgaccgttctttgaagttgaaatcctcaaaaagcctgcagactgaatagcgctgtactgggcacgcgcattgcgctt

SEQ ID NO: 834130 - DNA, 120 bp, Artificial Sequence
  ENSG00000260233_4 (sequence is synthesized)
ccagccgcccttgggtgctgcgtgctgggccgggtcgggttggggccttcctacatactcttgcgaccattaggctcttcttgggtgagttgcaagttaaaattaccagggctctctgaa

SEQ ID NO: 834131 - DNA, 120 bp, Artificial Sequence
  ENSG00000260233_5 (sequence is synthesized)
cccgttccatagctgccgcggatcagggcggacgtgacgccttagcgtggtcctcagacctcgctgtgcccggggtggggcgtgtcggctgctaccgagaacctgctcgggggacgcgtc

SEQ ID NO: 834132 - DNA, 120 bp, Artificial Sequence
  ENSG00000260233_6 (sequence is synthesized)
agagaagccagacagggcaggcaggggtcctcagatgtgcagtctgcagggcctgaggttgtacaccagggcagtggaaaagcagctaggacttggactttcacagttacatcgacattc

SEQ ID NO: 834133 - DNA, 120 bp, Artificial Sequence
  ENSG00000260233_7 (sequence is synthesized)
cccctcaatctgacctgaagtcccttcctcctggccccctcttccttccacgtagaacccctggaactgtcattcttgctgcctcctgcttacgtggagagccctgtgtccctttcacat

SEQ ID NO: 834134 - DNA, 120 bp, Artificial Sequence
  ENSG00000260233_8 (sequence is synthesized)
ctccatctaccagtcaggctcttgggcagcagcgtacctgacttagggcctgtaccacaagtcgtttctatcaggctgaatagagccaccgttttttgtgtgtttgtttggtttggtttg

SEQ ID NO: 834135 - DNA, 120 bp, Artificial Sequence
  ENSG00000260233_9 (sequence is synthesized)
cctagcctgaggctgactagaggaactgtctctgaaccatctcttggactccagcctgtatgcacagacccccaggttattaccgtctccagctcccagccctaccctgaattcctcagt

SEQ ID NO: 834136 - DNA, 120 bp, Artificial Sequence
  ENSG00000260233_10 (sequence is synthesized)
gcgccgactatgtcaccatcatggccaatatccactcaactgtctattctgcctcgcacctacaaagagccttacatgagtcctctcacttaatctctccaatttactcctcatgacaac

SEQ ID NO: 834137 - DNA, 120 bp, Artificial Sequence
  ENSG00000260233_11 (sequence is synthesized)
cttacatatccccacataagcaggaaactgaataattattttaaaatacagtgtcgttcttgtactaaaaaccatctggctgcccgatactgtggctcacgcctgtaaccccagcacatt

SEQ ID NO: 834138 - DNA, 62 bp, Artificial Sequence
  ENSG00000260233_12 (sequence is synthesized)
tgcccgatactgtggctcacgcctgtaaccccagcacattgggaggccgaggcgggcagatg

SEQ ID NO: 834139 - DNA, 120 bp, Artificial Sequence
  ENSG00000260232_0 (sequence is synthesized)
gttctgtgacccatgttttggtgaagtaatgatgacacagggataccctgcctcatgaacgctggtgtgacttctctcttctgttcttaccactggacatgatggcttgatgaagtcagg

SEQ ID NO: 834140 - DNA, 120 bp, Artificial Sequence
  ENSG00000260232_1 (sequence is synthesized)
ccacctcgctcttctatgctctcagttccatcttctcaactcggaaagcctgccaagccggaggaactttctactccagcagcaacagggagcagatcaggagcctgtatagacatccct

SEQ ID NO: 834141 - DNA, 120 bp, Artificial Sequence
  ENSG00000260232_2 (sequence is synthesized)
tggtcacctcctccagaccatcccattaagcatgggaacacagaaggtacagctgagttcagagcctctcttttggatctgcctgtctagcagctaccctttggggaccatgcgggaatt

SEQ ID NO: 834142 - DNA, 120 bp, Artificial Sequence
  ENSG00000260232_3 (sequence is synthesized)
cagctgttttgtacaaagatcgagttagttcagcagtcattcttcttactgaacaatgatacaatgcccacaaaccttgcttgtaataatttcttcttggtttttgttttggcatgcaaa

SEQ ID NO: 834143 - DNA, 120 bp, Artificial Sequence
  ENSG00000260232_4 (sequence is synthesized)
tgcttttaacatttgtgtataaatttattttttggcatcatctacaacccaaatgtgtgtttttgtattgtgtattaatgcctttcatcctacctttaacaatgcatttacaatcatttt

SEQ ID NO: 834144 - DNA, 120 bp, Artificial Sequence
  ENSG00000260232_5 (sequence is synthesized)
ttcctccagaccacgcccaccgatgccggcagcagctggtgcagcggagctcagatcctctctgtggggtctgcaccggcaagggcagctgctccctgcctttcctcaggagtcagtgga

SEQ ID NO: 834145 - DNA, 120 bp, Artificial Sequence
  ENSG00000260232_6 (sequence is synthesized)
gctcccctttaccttctgctattgagtggaagcagcctgaggccctcaaaagatgcagatgccggcaccgtgtttcttgcacagcctgcagaatcataagcctatttgtccttactatac

SEQ ID NO: 834146 - DNA, 120 bp, Artificial Sequence
  ENSG00000260232_7 (sequence is synthesized)
cttccagtaaaatgttaaaaatagaagtggcaagagtggacaactttcaagtaaattatgatgttatgtttagacatatgcaccagtgaatcctaacaacaaacacatgagcttggaagg

SEQ ID NO: 834147 - DNA, 120 bp, Artificial Sequence
  ENSG00000260232_8 (sequence is synthesized)
ggatccttttccaagtgagccttcagttgagagcccagccctggccatcatctaatctggattcctggcccagagaaactgaagcaaatcctaggaacaatcacgtgagcttggaaggag

SEQ ID NO: 834148 - DNA, 120 bp, Artificial Sequence
  ENSG00000260232_9 (sequence is synthesized)
acctttccccagctgagcctcagcctgggccatcacctgcatctggactgaagacccaaagaaactactccatcaggaattgtttgagaccatgcattatgtggacactcatatcgtgga

SEQ ID NO: 834149 - DNA, 120 bp, Artificial Sequence
  ENSG00000260232_10 (sequence is synthesized)
attatattgccaattggcattcctaaagcttctacgctagcaggtttggagtaattcaccagtgaagtcttctcaacctgggcaatcatgtgagcttggaagatgatgcatccccatctc

SEQ ID NO: 834150 - DNA, 120 bp, Artificial Sequence
  ENSG00000260232_11 (sequence is synthesized)
atctttcaggtgaaacctcagccttggccatcacctacatctggatttctgacccagagaaactgctggagtacagtggcatgatttcagcttaccgcaaactctgcctcctggattcaa

SEQ ID NO: 834151 - DNA, 84 bp, Artificial Sequence
  ENSG00000260232_12 (sequence is synthesized)
cctgtcttggcttccatgctatgaggtcttgttcctttggccaggctggagtgcagtggcacagtcatcactcactgtagcttc

SEQ ID NO: 834152 - DNA, 120 bp, Artificial Sequence
  ENSG00000260232_13 (sequence is synthesized)
gctggagtgcagtggcacagtcatcactcactgtagcttcaaacacctgggttccagcattcatcccacttcagcctcccgtgtagccgggactacagatccctaccttttttgttggag

SEQ ID NO: 834153 - DNA, 120 bp, Artificial Sequence
  ENSG00000260232_14 (sequence is synthesized)
aatgaaatttaaaatgaagatttgggcactcattggttgtacacattgttactggtgaacgtgttgattggaggccttcctagctaacagagcaaagagtaaatatacacatatgtttac

SEQ ID NO: 834154 - DNA, 120 bp, Artificial Sequence
  ENSG00000260232_15 (sequence is synthesized)
aaatttctacaagtctccatatgtatctgcattaaattaaacatgaattcctgcagcgtcctcagtcccacacgatcttattcagcaccatgtgaatctgtctacccatctcactaatct

SEQ ID NO: 834155 - DNA, 120 bp, Artificial Sequence
  ENSG00000260232_16 (sequence is synthesized)
atatgtagcctaccactgtaatatttaaccacctgaaaatgcaggcatagtggtttcagaataagaaacacacaaccccatgagaaacacccttaccacctgtttatgtataccaactgc

SEQ ID NO: 834156 - DNA, 120 bp, Artificial Sequence
  ENSG00000260232_17 (sequence is synthesized)
ttatgtataaatcctttagcctttagacagaatctgcacttattatgcaagttgcttaggaaggcttatttttccccttccttcagtggattatttcatagatttgtataaagtattttc

SEQ ID NO: 834157 - DNA, 120 bp, Artificial Sequence
  ENSG00000260232_18 (sequence is synthesized)
tctgcatttcttcctggactgttcctatctactaaataagttattttgttaatttacatacttttagcttcactctttgtgttataaagttttctgggagttgaaaaactgtacctttta

SEQ ID NO: 834158 - DNA, 120 bp, Artificial Sequence
  ENSG00000260232_19 (sequence is synthesized)
tccacgttacagtagcatacataataatatacaaagagaaattttctatctttacagatttgtctttcctttttgctgagacccgggtaaccaataaactctttactgtctttatactta

SEQ ID NO: 834159 - DNA, 120 bp, Artificial Sequence
  ENSG00000260232_20 (sequence is synthesized)
aggcctacaaggaaagcgagggctgaggaaggacggcgggaggactgcagagggaggcaggcagagtgagggcggcaggcagacagcaggagaagcaaatcctaggaacaatcacgtgag

SEQ ID NO: 834160 - DNA, 120 bp, Artificial Sequence
  ENSG00000260232_21 (sequence is synthesized)
gaacctgcagtccagttatcacaaaaaaatggaaaacatgaaagctagaatttttgtagggattgtattgaatctgcatatacatttggaaagtataagcatcttggtttggagtaattc

SEQ ID NO: 834161 - DNA, 120 bp, Artificial Sequence
  ENSG00000260232_22 (sequence is synthesized)
cagaccacgcccaccgatgccggcagcagctggtgcagcggagctcagatcctctctgtggggtctgcaccggcaagggcagctgctccctgcctttcctcaggagtcagtggagatgaa

SEQ ID NO: 834162 - DNA, 120 bp, Artificial Sequence
  ENSG00000260232_23 (sequence is synthesized)
ttttctctgattgtcagatgttcacaaaggctttaacttgtatgaatgaactccgagaccacctttctgaatgcacagacctgccacgttgttgctgtctctgactctcttctaatgtac

SEQ ID NO: 834163 - DNA, 120 bp, Artificial Sequence
  ENSG00000260232_24 (sequence is synthesized)
tttgcatatgaagagaaagctggttatcctgactagtaaagaagggattattgaacctgaaactgtgaagagacacaaaagcaacaagaggacagaaacaattcagggcttcaataagca

SEQ ID NO: 834164 - DNA, 120 bp, Artificial Sequence
  ENSG00000260232_25 (sequence is synthesized)
gagtacaatctatttagtgactgcaatgtggaaatctctaatgtcagcaagactgtgttgagaggaacacattttcttgtgagtgagcattcctagaggatgagtatcttagagactcaa

SEQ ID NO: 834165 - DNA, 120 bp, Artificial Sequence
  ENSG00000260232_26 (sequence is synthesized)
cggcatatgtctgctatgcaagtaatgagtcctccatctaatggtgtacaaactattctggaaggatctgttcaggatttatgaggtgttagcaacctacagagcaagaacactgatact

SEQ ID NO: 834166 - DNA, 120 bp, Artificial Sequence
  ENSG00000260232_27 (sequence is synthesized)
ttttggttactccaaattattatttataaaatattattataacttggtgtttgttttgccaggtaagacttcagtcaggggctctgaggtcggtactgtatccagggaatttaaagtcca

SEQ ID NO: 834167 - DNA, 120 bp, Artificial Sequence
  ENSG00000260232_28 (sequence is synthesized)
gatcttagtttaaaaaaaatggcctgtcatcttcactctattattgaattagagcctgacatcattaattttaattttactgaatataaatagcaaccctatattctatgcatactgttt

SEQ ID NO: 834168 - DNA, 120 bp, Artificial Sequence
  ENSG00000260232_29 (sequence is synthesized)
gttacgcattctctcttttatcgttttctggaaatgttctctaaaatacctctagttggaaagaagaggaacaaagatttttctggaaaccacaagacaaaatatgctgagaacatcatt

SEQ ID NO: 834169 - DNA, 120 bp, Artificial Sequence
  ENSG00000260232_30 (sequence is synthesized)
gtgaataagagatgtgactattgccattatatgattcagtttgtcctggtttttaaaggttaaaaattactaatttttgtagacagagcattgagagatcgattttctggacaggaattt

SEQ ID NO: 834170 - DNA, 120 bp, Artificial Sequence
  ENSG00000260232_31 (sequence is synthesized)
tgttaatatgcatgtttgtttttctcttaccccaaagttagaaacattggctggactttctgattcattccaagtagttcttctaaaagtattcatgacatatctctgtacagatggctt

SEQ ID NO: 834171 - DNA, 120 bp, Artificial Sequence
  ENSG00000260232_32 (sequence is synthesized)
ggatttctgacccagagaaactagaaagcaggaggttattcgaggatgctgggctcccctcacaaatctgtttctcaaagtattgcagaaaggtgtgtcttctggacactcccagagtag

SEQ ID NO: 834172 - DNA, 120 bp, Artificial Sequence
  ENSG00000260235_0 (sequence is synthesized)
tgcctccaagtgttcggaccttagccccaggtggtcttagcaccagtaacccccgctccaactccctaaagtccgacccgccccaggcctggctctatccctccagatgacgtcccagga

SEQ ID NO: 834173 - DNA, 120 bp, Artificial Sequence
  ENSG00000260235_1 (sequence is synthesized)
ggccagagtgcagggccggccagagggagtcacagtccggcaccgagaggcaactcggcagctggcggggcccgggctcgaacccagggactcacccaaaccgaggtgaccgtcgcacgc

SEQ ID NO: 834174 - DNA, 120 bp, Artificial Sequence
  ENSG00000254556_0 (sequence is synthesized)
aggattaaaattaaataagagacagttttgcttcttaatggtttctccacttaattattttagtaggaatctgaaatcaaatatagaatggaaaactaatgtagccaaaccatctgagag

SEQ ID NO: 834175 - DNA, 120 bp, Artificial Sequence
  ENSG00000254556_1 (sequence is synthesized)
ccaatagtagagacagacattaaatcacagcacttgttcactagcagtttgggtacctacagtatgctatattgaatgataattgttaacagctagaaacttgcttataaaatgtggtga

SEQ ID NO: 834176 - DNA, 120 bp, Artificial Sequence
  ENSG00000254556_2 (sequence is synthesized)
tgtttctttatgatagatgcctgaccagtgtcctcttccctcagtaaggtggttctaactcatagttgttcatactaatgggagaagatggtgggagagtcttatcatctgctaacattt

SEQ ID NO: 834177 - DNA, 120 bp, Artificial Sequence
  ENSG00000254556_3 (sequence is synthesized)
caacatgagacaccacacatgtgtgtcctaagtaggtgatgcattgttgaagtacctgcaggattttcgtatgatctttgcatttataatatctttctggaatgggtcttaaagtcaggt

SEQ ID NO: 834178 - DNA, 120 bp, Artificial Sequence
  ENSG00000254556_4 (sequence is synthesized)
ttgagcaggtgcttatagcatgtagtcagattccatggtagaggcaagcattctccctaagaatgttgtttacgttgaagacagcgatggaggatcccacccttctgctctgatgtcttc

SEQ ID NO: 834179 - DNA, 120 bp, Artificial Sequence
  ENSG00000254556_5 (sequence is synthesized)
cgaggtagaaggggttgctgacggcttcatcagggcattagagagaatgagcctggtgggtttactgtgatcaaggtcgagttgtgtcacgaaataggattttggacctaagtcttattc

SEQ ID NO: 834180 - DNA, 120 bp, Artificial Sequence
  ENSG00000254556_6 (sequence is synthesized)
tttagtttatttaatatatcagtctttttccattatttcctcatttgccttaattgaagattctagagttgcggtgcagttcagaaagcctgaggtttaaggggaaatggtaaagagaaa

SEQ ID NO: 834181 - DNA, 120 bp, Artificial Sequence
  ENSG00000254556_7 (sequence is synthesized)
aactggttttcttctttcctatttcaggggagtagcttcttcagcagactctccgctgcttgtgctccacattgcattgctcacaccatggcatggtgtttccattcattgtctcctgag

SEQ ID NO: 834182 - DNA, 120 bp, Artificial Sequence
  ENSG00000254556_8 (sequence is synthesized)
ttcatttggtgtagaagagctggttctaaagagaacttctccctgctgtctttttcttccagaacactggggtgatgggtataccgcagcagttgcctggccgtctcctaggttagtgta

SEQ ID NO: 834183 - DNA, 120 bp, Artificial Sequence
  ENSG00000254556_9 (sequence is synthesized)
gcagagattctattctcagataagacttccgtgtcggctgaagatgtaagggactgtccacgtttgagggagaatttcttctcactattctagctagaatatgtgaatgaagaaagattt

SEQ ID NO: 834184 - DNA, 120 bp, Artificial Sequence
  ENSG00000254556_10 (sequence is synthesized)
ctattatcctggactcctttgtattttttataattgttttctttttctcacttatgctctgatatgtattggtttcttgaataaattaaaacttaaagcactgctttagtagacatttct

SEQ ID NO: 834185 - DNA, 120 bp, Artificial Sequence
  ENSG00000254556_11 (sequence is synthesized)
ggaattcctgtctcccgctttcctcaccacatacagctcttctccactgcctacagctgtatgttttagcatgatgatggatggatggactggagctagagcaaggttaaccacatatgc

SEQ ID NO: 834186 - DNA, 120 bp, Artificial Sequence
  ENSG00000254556_12 (sequence is synthesized)
tctggtttcagaaacatcagagagggaggtggtgacatttataagtattcatcttttatttacaaatttcacgcacatttgtagtctactgtaagcaacatagtgtcttctaccatcttt

SEQ ID NO: 834187 - DNA, 120 bp, Artificial Sequence
  ENSG00000254556_13 (sequence is synthesized)
ttcctcttaagggtcaacactactattctatttcatatttaccatttttttcttttaaaagaattcatgtggtgggtcattgtagaaaatttagagaatatgcaaatattgaaaaagaaa

SEQ ID NO: 834188 - DNA, 120 bp, Artificial Sequence
  ENSG00000254554_0 (sequence is synthesized)
aggccaaaggtgcgagaccactagccaaacaggcttctagtcctcacctcccggcaattcgctgtgtgaaggtgggcgagtcatgtcccatctctcgagtccccatcttagagccggtcc

SEQ ID NO: 834189 - DNA, 120 bp, Artificial Sequence
  ENSG00000254554_1 (sequence is synthesized)
ccagcagacctttaagcttccttcctactctgccatatggctctgagctccggtgcaaaggcggctgggcagtgggtcgcgcggaccttgcccagagtggtctgtctgggccgcgcactg

SEQ ID NO: 834190 - DNA, 120 bp, Artificial Sequence
  ENSG00000254554_2 (sequence is synthesized)
ctggcttagctgccttttcactctcgggactcaacagtggacattgcacctggggaagaaatggccgcgcggaagttatttaaggactcttcctggaaggagtcacctgagcggacctga

SEQ ID NO: 834191 - DNA, 120 bp, Artificial Sequence
  ENSG00000254554_3 (sequence is synthesized)
ctctgaggatgcgacctacttgtcgccagcttccacttggttccgcgccaggacaggttttactttcatttctcccgcgcgcgcctccgactgctggggaggtcaaggacagctaggcgt

SEQ ID NO: 834192 - DNA, 120 bp, Artificial Sequence
  ENSG00000254554_4 (sequence is synthesized)
cggcccacggccagggaaggtcccgtggtctggactcgttccttccagtctccaccagtcctggggggtggggcgcggcgggggtgttcgttctccagagaactctgcgactgtacctcg

SEQ ID NO: 834193 - DNA, 120 bp, Artificial Sequence
  ENSG00000254554_5 (sequence is synthesized)
ctgccacctcgctgcctcctcgctgccctttacaaaagctcgtgattccgtgggggaaacttgagctgtggctctgccaggaggatcgcgaagcaagtgcccttggttcaaactcctctt

SEQ ID NO: 834194 - DNA, 120 bp, Artificial Sequence
  ENSG00000259138_0 (sequence is synthesized)
cgctttcggggaaggcctgcaaagtgaggcctcgggctagggttggcgggcgcgtggtgggaaccgcgtggaaccgaagggctcccacgggaacaagggcatcactgacggtacggcctc

SEQ ID NO: 834195 - DNA, 120 bp, Artificial Sequence
  ENSG00000259138_1 (sequence is synthesized)
tattgacccttctctgcctccccggtccggactcatacaacttggaggcccagaggtcgtccagtctcatcttgacgtcagaatgacacagccagttatcaaaagaaatcttcaaggaat

SEQ ID NO: 834196 - DNA, 120 bp, Artificial Sequence
  ENSG00000259138_2 (sequence is synthesized)
tccctgtatgctgaggaatgaaggatgtgagaaagaaattaactgtcttctgctctcaagttagacccctaagaaaactcttaagagtatctaataactagaggcatctgtcacaccagc

SEQ ID NO: 834197 - DNA, 120 bp, Artificial Sequence
  ENSG00000266680_0 (sequence is synthesized)
ggaaccgcgggccaggagccgacaggcgggggcggaggcccgccccctccggacgtcactccgcggcggccgccgccggtgtgaaccggttgatgaatggctaagcgccgagtcggagca

SEQ ID NO: 834198 - DNA, 120 bp, Artificial Sequence
  ENSG00000266680_1 (sequence is synthesized)
tccccggggcgggggagggaaggggctgccgggagtgctccgggatgcaggaagcctgaagttaagaaggggtgggagcgagagagattccgatttatcgactggaaggaatcatgctgc

SEQ ID NO: 834199 - DNA, 120 bp, Artificial Sequence
  ENSG00000266680_2 (sequence is synthesized)
aaaccacgtttctcataattaaaacggtccaggagtgcacacatgtcacatgaggagactcgaagtttgcctgaatcgtaaaatgcaatccttctagggctggaaccgcgtctcagtgtc

SEQ ID NO: 834200 - DNA, 120 bp, Artificial Sequence
  ENSG00000266680_3 (sequence is synthesized)
gagcctgctttctactgccttaaccacggtcatctttgccagtggtttaccttggcacctgggccccgagtaccttcgtcatcaaataatatttatgtcgcaagaccgctgtacccggtg

SEQ ID NO: 834201 - DNA, 120 bp, Artificial Sequence
  ENSG00000266680_4 (sequence is synthesized)
actcaacaccttgcatgccacggccttaggcttggtcaagatgaattcttgtccctgggggcgctttcaagcggggagaaacttaccttcgcaaaacttaaggctatagaagatggggag

SEQ ID NO: 834202 - DNA, 120 bp, Artificial Sequence
  ENSG00000266680_5 (sequence is synthesized)
gcagttggctcaattgtggcatttcgaaatcacatgcatcctttgtactgctgctcacttgatatgttgtctcagataatgaaaggttaggaagtgcttaaagaaagcgtttttagaaat

SEQ ID NO: 834203 - DNA, 120 bp, Artificial Sequence
  ENSG00000266680_6 (sequence is synthesized)
taagaatcctcggttttgtcaagcactgatgtaattctttgcgtcaaagctaaagctcttctttatgttcgttttcagtcctcttttactgacttcattatttaagcccctaagaagtaa

SEQ ID NO: 834204 - DNA, 120 bp, Artificial Sequence
  ENSG00000266680_7 (sequence is synthesized)
agtcttatcgcaattctgtgccatacaagggcacctctgttatttataatctgaaaaccctttctcctcagctctggagaaggaccaaacaggacctttacctgctttttaagaactcag

SEQ ID NO: 834205 - DNA, 120 bp, Artificial Sequence
  ENSG00000266680_8 (sequence is synthesized)
ttttccactaacactgaagccttttgtttgttattttcaccgagtatgagattggagagggctttagggatcaaattttgtcctctttcagtgccctgcaacatcttaggatttattaga

SEQ ID NO: 834206 - DNA, 120 bp, Artificial Sequence
  ENSG00000266680_9 (sequence is synthesized)
acttctatttagagactggttgtatagttattcaactttcttaactctgtaagtaaaataagaactttaaaaaaacaaaaacaaacaaaatcctgggccagactttcaaaggaacaaaaa

SEQ ID NO: 834207 - DNA, 120 bp, Artificial Sequence
  ENSG00000266680_10 (sequence is synthesized)
ctcttcgtcatttggaagaaaatggctcacctacgacacattttaatccattaaaatcaaggaaaactagcacacttgagaaatatgtccctttacaaataaatgatttaaaaaagtaaa

SEQ ID NO: 834208 - DNA, 120 bp, Artificial Sequence
  ENSG00000259133_0 (sequence is synthesized)
gggcttttgaccgcatcactcctgaggggatgagagtgggctgaaagtggtgagagcccagagattgttttgtgttgggcttgggtggtttgttttgattttaaagtgctgtggcctggt

SEQ ID NO: 834209 - DNA, 120 bp, Artificial Sequence
  ENSG00000259133_1 (sequence is synthesized)
taggggagaacgcatcctccttggttatgcatgagccagaaccagcctcagctcggacaattccactggaagtttgtgtgtgagttgtgatcctgagagacggaagactgcatttgattt

SEQ ID NO: 834210 - DNA, 87 bp, Artificial Sequence
  ENSG00000259133_2 (sequence is synthesized)
tcttgaactcctggaaccaagggatcctcctgcctcgacttcccaaagtgctgggattataggcatgcaccactgtgcccagcctgc

SEQ ID NO: 834211 - DNA, 120 bp, Artificial Sequence
  ENSG00000259133_3 (sequence is synthesized)
gtgctgggattataggcatgcaccactgtgcccagcctgctttttggttttataaggaatggctactgtttcatgataggtgttacttgttgagcttgttaaaataaaaaattatgctta

SEQ ID NO: 834212 - DNA, 120 bp, Artificial Sequence
  ENSG00000259133_4 (sequence is synthesized)
gaaccctgtccaggcactgcaggctccaatggacatcttcaaatccagagaatggaggggcaagagcttcccctgtgtgatgccaaaaccaacaaagccccatggatcaggtaatgaaac

SEQ ID NO: 834213 - DNA, 120 bp, Artificial Sequence
  ENSG00000259130_0 (sequence is synthesized)
ttcgtggtctcccagttcccgtggccgtcgtattggtcggcagggggcgccgcgccacaagcttcctgcacaagagtccaaaacttctttcttggtttcctttgagacaggctgcaggtt

SEQ ID NO: 834214 - DNA, 120 bp, Artificial Sequence
  ENSG00000259130_1 (sequence is synthesized)
tcttggttgctgacacgggtagacgataataggtgaataaacaaaatccagccagcataaatacagtctaactgttgaagaacagatttctgagtctaccataactttcatacactgcag

SEQ ID NO: 834215 - DNA, 120 bp, Artificial Sequence
  ENSG00000259130_2 (sequence is synthesized)
aaggaagtgaatatgcactgaggacctacttgtgttatgagctttacagttcagctgcgctggagaagagtttatttctttcatggaatccattacatcaccgatccccttctgaaggag

SEQ ID NO: 834216 - DNA, 120 bp, Artificial Sequence
  ENSG00000259130_3 (sequence is synthesized)
gttattttatccacgagaggaagcatccaaaggtgttcatattctctaccctgtgactccagcagaatggtgacaaggttttgaagcaaaggagggcacttgactctagggcagccgtcc

SEQ ID NO: 834217 - DNA, 120 bp, Artificial Sequence
  ENSG00000259130_4 (sequence is synthesized)
attaactgactagcccggtgcctgtggaacagagttgcgtgaggattttacccttttggaataatccagtgacaaaactggatactattactttcattccttcccccgatgccaggagat

SEQ ID NO: 834218 - DNA, 120 bp, Artificial Sequence
  ENSG00000259130_5 (sequence is synthesized)
ctcagcctccagagtagctgggtctacagatttgataaatggttggtccttatgatccactgatgcagactacttgggaggtcccaatgtcctggtgcccaaaggcaagatcatttttcc

SEQ ID NO: 834219 - DNA, 120 bp, Artificial Sequence
  ENSG00000259130_6 (sequence is synthesized)
gtcctggtgcccaaaggcaagatcatttttccccctgcagtgtttctgtctatcatgatgatgtgagtgggctcttattgggggtgcctaatgctgccataaagaaagagttttcttggc

SEQ ID NO: 834220 - DNA, 120 bp, Artificial Sequence
  ENSG00000259134_0 (sequence is synthesized)
ggtacgatggccctgccttgtgtcactattttattcggcagttccagcctggttctgtcacattgtctcatcacaaaattggattgcacagaactcaaatggagaggacgttcaaactca

SEQ ID NO: 834221 - DNA, 120 bp, Artificial Sequence
  ENSG00000259134_1 (sequence is synthesized)
ggaatgtggagcactcatcatctgctgtggtcaaagagacaatctgtgaagaaagtgaacaaggcagatggagataaattcaaaaacagagatccgaaaggctgctaagagagaaaggaa

SEQ ID NO: 834222 - DNA, 120 bp, Artificial Sequence
  ENSG00000259134_2 (sequence is synthesized)
caggaatctcccagttcctgagagcctcccaggctttctccctcgatgtttggagttttatgcctatgtaatcagtgcagacagccgttaagtaaatgaagaggcaactaacaatgtcag

SEQ ID NO: 834223 - DNA, 120 bp, Artificial Sequence
  ENSG00000259134_3 (sequence is synthesized)
aaaagagaccgggcggttccggctgacactaccctaatcttccaggacccattaaatggtagtttcaacgcattacctaccataacatccttgaatatcactgattttatttgcagtatc

SEQ ID NO: 834224 - DNA, 120 bp, Artificial Sequence
  ENSG00000259134_4 (sequence is synthesized)
aaacattccatttcatgccccattaacagtgggagcctgggctttttgacgcagctaaacattttactaactacctggactaagtaaccaattaacttttggagacaatacggccaatta

SEQ ID NO: 834225 - DNA, 120 bp, Artificial Sequence
  ENSG00000259134_5 (sequence is synthesized)
agcgcgaaaagaaaatttggaaaacaggcttttcctatccggatgaacagagataatttgtgtcgatggatgttctgtgaaggcctattgtgtcgagcagcgtattaaaacataaacatg

SEQ ID NO: 834226 - DNA, 120 bp, Artificial Sequence
  ENSG00000259134_6 (sequence is synthesized)
gctcttcccccaagaaacttacatttcagtaagggagcctggccaaaatggaaaactgcaaggttcaaatcctggagtgcagaagaagcattaggcattgaccctgtggcttcctaatag

SEQ ID NO: 834227 - DNA, 120 bp, Artificial Sequence
  ENSG00000259134_7 (sequence is synthesized)
atccgcaaagtgctttgttcctggaaatcatccgatgagtagttcagtgctattgtatatcttgttagagcagccgaagtgccacaaaatgaactaaaatctccctgcagagttgctgta

SEQ ID NO: 834228 - DNA, 120 bp, Artificial Sequence
  ENSG00000259134_8 (sequence is synthesized)
tcatatgctgagaacattcggaactttcaacaaattcatgttacgatcctgggtagccatggttaaatctgtacaggggttaaatgagaaatatgagcctgctgttaagtgtcttctgag

SEQ ID NO: 834229 - DNA, 120 bp, Artificial Sequence
  ENSG00000259134_9 (sequence is synthesized)
agtgacaaagctctggccataagggatgggagaggagggatttcttctcagccttccagccctttccagctgtatcacagacaggagacataatgcaaaggggctcagacattgacttcc

SEQ ID NO: 834230 - DNA, 120 bp, Artificial Sequence
  ENSG00000259134_10 (sequence is synthesized)
tacgctgtaaaatgaggatcctcctatattatggagtttattgtgacaactaaatagctgagaagaaggacatctcatttgttttaactatgcagtttcctgtctatctatctatctatc

SEQ ID NO: 834231 - DNA, 120 bp, Artificial Sequence
  ENSG00000259134_11 (sequence is synthesized)
ccatcaatctatcaatcaatctatcaatctgtctatccctatctatctatccatctatctatctatatctgtctatatctatctaacatttatctatcatctattcatctatcagctatc

SEQ ID NO: 834232 - DNA, 120 bp, Artificial Sequence
  ENSG00000259134_12 (sequence is synthesized)
ttctgtctatcaatatttcaatcaatctctctatccctatcaattaatctatctacctacctatcaactatccatctatctctatcatctatcatctattcatctatcatttatcatctg

SEQ ID NO: 834233 - DNA, 120 bp, Artificial Sequence
  ENSG00000259134_13 (sequence is synthesized)
tatcatttatcatctgtcaatccatcttcctactatctatcaaaagcaacacattttcttcctgactttaaaaatatttaagtgggccgggaggatggctcacgcctgtaatcccagcac

SEQ ID NO: 834234 - DNA, 120 bp, Artificial Sequence
  ENSG00000259134_14 (sequence is synthesized)
agaaacaaaaacaaaaacgtaagtgatactctgtccactcttttgattgaggaggtctgattttcaggctttggattttattatgtcttcaatataataattgttccatgtatctctcct

SEQ ID NO: 834235 - DNA, 120 bp, Artificial Sequence
  ENSG00000259134_15 (sequence is synthesized)
aaattgccatttgaaaaactgcttttctgaagtttaaagtgcacattttgatacatcttgacacatatatacacccatgaaatcatcaccacaatcaggatagtagatctatccattacc

SEQ ID NO: 834236 - DNA, 120 bp, Artificial Sequence
  ENSG00000259134_16 (sequence is synthesized)
gccaaggtttacttgcactcctttgaactttctccccactcctcaccccctgcctatccccaatccttaagcaatcactgatttgctttctgtcactatcagttaatttgaatttttcag

SEQ ID NO: 834237 - DNA, 120 bp, Artificial Sequence
  ENSG00000259134_17 (sequence is synthesized)
aaatgtatataaataaaatcattcgacgtgtatgctctttttctgttcacccggtacaatttgagatttagccatgtttttgcatgtgtcaatagtttatttttttgttgctcagtacta

SEQ ID NO: 834238 - DNA, 120 bp, Artificial Sequence
  ENSG00000259134_18 (sequence is synthesized)
atccattttatggatacagagaaatgtattaatgcaatcccatattaataggcatttgggttgtttccaggtttgggctgttacaaataaagctgctatgaacatttttgtgcaagtctt

SEQ ID NO: 834239 - DNA, 120 bp, Artificial Sequence
  ENSG00000259134_19 (sequence is synthesized)
ggaattcagacgtggcttggaaactgcaccatgggttcacccaagaaacagaccagaggcaacacattctatcactaaaacgtgttctcagttacacttcccttccaaaggattatttgt

SEQ ID NO: 834240 - DNA, 120 bp, Artificial Sequence
  ENSG00000259134_20 (sequence is synthesized)
gcccatgagggaaacacgaaggattgtcagtattcatttgctatcagaactgcctttgaacttcagggaagccgccatcttgttttagttcactcctctaaagcacagtgtctgcaacat

SEQ ID NO: 834241 - DNA, 120 bp, Artificial Sequence
  ENSG00000259134_21 (sequence is synthesized)
gaaacactagtaagacacagttatccagaaagagccctagagatggataaggaacctgttggaatgctctgatattaagaaaaaaaaaattaaattcaaaaccaaaaacaagtcacaagg

SEQ ID NO: 834242 - DNA, 61 bp, Artificial Sequence
  ENSG00000259134_22 (sequence is synthesized)
actaaaaatacaaaaaaaaaaaaaaattaaccggagaacccgggaggcggagcttgcagtg

SEQ ID NO: 834243 - DNA, 120 bp, Artificial Sequence
  ENSG00000259134_23 (sequence is synthesized)
ctggttaagtaaatggcccaagaccacgtaacaaacaacttgaagctgggatttgaacatagacaatttagatttaacatctgtgcccttaaccaacagaatctagcacatgctgggccc

SEQ ID NO: 834244 - DNA, 120 bp, Artificial Sequence
  ENSG00000259134_24 (sequence is synthesized)
ggaaactgcaccatgggttcacccaagaaacagaccagaggcaacacattctatcactaaaacgtgttctcagttacacttcccttccaaaggtatctctgttcaagccaacacccgcta

SEQ ID NO: 834245 - DNA, 120 bp, Artificial Sequence
  ENSG00000259134_25 (sequence is synthesized)
gcttatgctgagtctttttttcctgaagatactcctaaagaatactccatgatctcatcagtaacaccagcccatgtgaccgtaactctcactcaacgaggagaaaatatacaaagagaa

SEQ ID NO: 834246 - DNA, 120 bp, Artificial Sequence
  ENSG00000259134_26 (sequence is synthesized)
gatgggtagcacaggaaggctgtgacctgtctcggaagcagtctagcccagcacaaaaatcacaggctttgaagccaaaagggaatatttgtttctgatgcttgaccctctccaatttgt

SEQ ID NO: 834247 - DNA, 120 bp, Artificial Sequence
  ENSG00000259134_27 (sequence is synthesized)
tacagtgtccacaagaagttttttcctggaagtctttttttcagagaaatctatgtaccacggctgtgttcaaacatgatacagagaccccaaatgccacttgcttgctgtcttcctggg

SEQ ID NO: 834248 - DNA, 120 bp, Artificial Sequence
  ENSG00000259134_28 (sequence is synthesized)
aacaggatgaggatgtaatctgagctttttagggtctatctctacattgcaacatcataacactgaagtgtagatttatagctgctttatgtatattttcttactcccaaagcccccctt

SEQ ID NO: 834249 - DNA, 120 bp, Artificial Sequence
  ENSG00000259134_29 (sequence is synthesized)
tttacagatacatacacaacatgtcatgtagaaaaatataaattgttgaccgtacaggcactttcttcctttttaaacctttccaaaggtctttttgttaaatacacccagatgccgttt

SEQ ID NO: 834250 - DNA, 120 bp, Artificial Sequence
  ENSG00000259134_30 (sequence is synthesized)
gacagatgaggggctaattgctctgtgaattacctctatcgattcctgtttcatgttgagccaaacaaacaaaagatattaatgctttgaaaaaaatgaatgatgacctttctctgcaaa

SEQ ID NO: 834251 - DNA, 73 bp, Artificial Sequence
  ENSG00000259135_0 (sequence is synthesized)
ttaaaattttttcgagagataggatctcgcttatttggacccccacagtgctgggattacaggggtaagccac

SEQ ID NO: 834252 - DNA, 120 bp, Artificial Sequence
  ENSG00000259135_1 (sequence is synthesized)
gggtggacagtgtatacagcatggacacactggacagaggcatgactcaatgttccagtattttcagatttcaggtgactgctgtaacttgaagcaagaaaagtgaaactacagaaaagg

SEQ ID NO: 834253 - DNA, 120 bp, Artificial Sequence
  ENSG00000259135_2 (sequence is synthesized)
gaggaccactggacggctgctttcattctacgcccactttttagagtgcattcctacaataagcaccctaataatgtaaaccaggggccaagggatgcaccttccactctacttccttcc

SEQ ID NO: 834254 - DNA, 120 bp, Artificial Sequence
  ENSG00000259135_3 (sequence is synthesized)
gacgagagagtgccagagagagagagagagacagtgacagagagaagagagagacagaaagacagtgacagagagaagagagagagagagacaggagagaggggagagagaagacagaga

SEQ ID NO: 834255 - DNA, 120 bp, Artificial Sequence
  ENSG00000259135_4 (sequence is synthesized)
gagagagagagagagagagacagtgacagagggaagatagagagagagagaaggaagaaaagagggggagagagagcgagcgagcgagcgagcgagcgaaagagagtttgcggccccacc

SEQ ID NO: 834256 - DNA, 120 bp, Artificial Sequence
  ENSG00000259135_5 (sequence is synthesized)
gcccagtccccaagggatctagcgtctgggccgggcagggctcgggtttgggctcaccttcctttcagcaaaaagcaagtttcggccccttctcttctcgccagcccaacagaagtcttc

SEQ ID NO: 834257 - DNA, 120 bp, Artificial Sequence
  ENSG00000259135_6 (sequence is synthesized)
gagaataaaaaggccaagccactttttgaagaaagtctttgtccctaccccctttttctacctggaagtcagactcaggcctggagtgtagcggccgccttggtacctggaagcaacaat

SEQ ID NO: 834258 - DNA, 120 bp, Artificial Sequence
  ENSG00000259135_7 (sequence is synthesized)
catggccgggagaccttacacctggcatggtagagcagacggaggaggggccgcctggtgaatagcctggccaacagccccaaactgctaccccttaaattctggatttcaggtgactgc

SEQ ID NO: 834259 - DNA, 120 bp, Artificial Sequence
  ENSG00000258661_0 (sequence is synthesized)
ccagccagatgctgtgaagtctccataaatctgtcagccgtcccagtgccgcgggcagtcacctgcggcgcccccttcccggcgctagagcggcccgcggagagacgcggagaagcaacg

SEQ ID NO: 834260 - DNA, 120 bp, Artificial Sequence
  ENSG00000258661_1 (sequence is synthesized)
ggaatctagcccggcagactgtacccgagggctgccgaagtcagacccaagcactacaggttgtgcggaacgcgaggacccctccctgtatccccaacctggaccgacccccggaagcct

SEQ ID NO: 834261 - DNA, 120 bp, Artificial Sequence
  ENSG00000258661_2 (sequence is synthesized)
gctcctccgggtctacagggatgaaggtcagagtgtcaaattgcagattttggatcctcaataatgggccgctgtatttaacctcttcaacttcttttctccacttataagaaggaacaa

SEQ ID NO: 834262 - DNA, 120 bp, Artificial Sequence
  ENSG00000258661_3 (sequence is synthesized)
aataaaatgttttgtggaagtttatattgaaatgaggtcaggtaaactaatgactgcttggtattttatgacaagttttataaccttggagttgccataactttcaaacgatcatcaata

SEQ ID NO: 834263 - DNA, 120 bp, Artificial Sequence
  ENSG00000258661_4 (sequence is synthesized)
aagttttattgcaaaagggtcgccatgtgtctgaatgcttttgcacatagtaaagctatgctgccccattgtcgtagctcaccagccccttttcaccccagccataaagtcctcttcttt

SEQ ID NO: 834264 - DNA, 120 bp, Artificial Sequence
  ENSG00000258661_5 (sequence is synthesized)
tttattggaggttgaaaagtcctcgggtctgctctcctccatcaagttggcaatgtgggaacaacacagaaattaaactacatgattaaatgatcgtacacaaccaaatcttcaagaata

SEQ ID NO: 834265 - DNA, 120 bp, Artificial Sequence
  ENSG00000258661_6 (sequence is synthesized)
tgtaataagactgctttttaataattataaatttggattttaaatgggttccatttaataaaataaatgacagtgggcggcgggtgggaaaggaggaagtcagatgagagtttcctccag

SEQ ID NO: 834266 - DNA, 120 bp, Artificial Sequence
  ENSG00000258661_7 (sequence is synthesized)
aaacttgtgtttgaatgttagataagacctatcagtctacccgatatacccagagggctgccattaaataattaggtgcttagggaccgataatggtctcaagacaaaacaacgaattgc

SEQ ID NO: 834267 - DNA, 120 bp, Artificial Sequence
  ENSG00000258661_8 (sequence is synthesized)
taaagactctttgagctgacccgaggatcttaaagatttaagaggcctcgcattgcgtcctaacttgaattttcccacggagggaagggttgggctacagctcatgcttgcccgattgct

SEQ ID NO: 834268 - DNA, 120 bp, Artificial Sequence
  ENSG00000258661_9 (sequence is synthesized)
gcctaacacattccctaaacgctccctaaagccaaaccaagaacttcaagtgtccacttcacggcatcagctgtcaggttcaggttcgggtccgcctactccttgtccactgccgaatgc

SEQ ID NO: 834269 - DNA, 120 bp, Artificial Sequence
  ENSG00000258661_10 (sequence is synthesized)
cttcagacaggtattccgcaggcgagggttgtgacccagggagagagtgcgggagtgctagcagagcggcgggagcggaaggagaggctggacgaaagttggaaaatcatcccatctcgg

SEQ ID NO: 834270 - DNA, 120 bp, Artificial Sequence
  ENSG00000258661_11 (sequence is synthesized)
gacttgagtgcgagagcccgccccggagtcggcaagtctccagggttagaaggccctagctccaaagttttttgtcccggctcaggcaggtcccccacctctaaccttccccgatttgcc

SEQ ID NO: 834271 - DNA, 120 bp, Artificial Sequence
  ENSG00000258661_12 (sequence is synthesized)
tggttgctctcggggaagggactggtaaataccgccctctcccggatttcctgaaactctcaccagcgcgctgaacccgctccttcccacgttcggcgccccgcactctgcgtctgcgcc

SEQ ID NO: 834272 - DNA, 120 bp, Artificial Sequence
  ENSG00000258661_13 (sequence is synthesized)
cactgcgcgtcaccttccctccggccgagaccactagagccctagatccgggatctgcggagggaacaggacctgagcccctgctggaccctgcaacttggctgcggagagcgcgcagcc

SEQ ID NO: 834273 - DNA, 120 bp, Artificial Sequence
  ENSG00000258661_14 (sequence is synthesized)
acaagcgccgttcctcacttgagggcttcgcgagagctggctcagccccgcgggtccccgccagtcctcgccagccctcgccagccccggtcggccccacgctaagtccgcagcaggcgg

SEQ ID NO: 834274 - DNA, 120 bp, Artificial Sequence
  ENSG00000258661_15 (sequence is synthesized)
gaaaccccgcaggccttcccggactcacgaactgcctactcccacccctaaagagctcagacctgaaggtgctcttatggtgcgtggccgcaaccccggagtggaatgggtggggggcct

SEQ ID NO: 834275 - DNA, 120 bp, Artificial Sequence
  ENSG00000258661_16 (sequence is synthesized)
ccatggcgaaggagacgccgtgggcgaatcggctcccagctcgcccctcatgtcctacaggtcactagccgagtccctaccccgggcgctcccatgaggcaccaagagcagccacggccc

SEQ ID NO: 834276 - DNA, 120 bp, Artificial Sequence
  ENSG00000258661_17 (sequence is synthesized)
agggaagggcctgggtcttcactgctggagcgggccccagtcgagggcgcgcaggtgtcggggtccccagcaacctccgtatgcgcggaaagccgtaaacggggttctgaggccggcgcc

SEQ ID NO: 834277 - DNA, 120 bp, Artificial Sequence
  ENSG00000258661_18 (sequence is synthesized)
ttctgaggccggcgccaggcacaaggatcaccccgcgccacgggccacggctcagagcgcccacgaagcccggctgccaggtccaggccgcggccgggcgggacccactcgctccccacg

SEQ ID NO: 834278 - DNA, 120 bp, Artificial Sequence
  ENSG00000258661_19 (sequence is synthesized)
agtcgggctggttaaggcgggaggccggcactgccacgggctgtggcgccccctcccgaagacacctcgccggaagtgcggctcccgcctggcaggcgctgagactcctcggctgtagcg

SEQ ID NO: 834279 - DNA, 120 bp, Artificial Sequence
  ENSG00000258661_20 (sequence is synthesized)
cgaaggccccggtccgcgcaacttcccataataacgccgcgaaatgcctccagaaatgcctgtgtggtatggtgtctgagccaatggtcggcattcgtcttccccaagtgcggaaaagag

SEQ ID NO: 834280 - DNA, 120 bp, Artificial Sequence
  ENSG00000258660_0 (sequence is synthesized)
acaggcatgcgccaccacgcccggctatctttttatatttttggtagacatggggtttcaccacgttggccaggcatgatggcacgtgcctgtggtcccagctactcgggagtgagactc

SEQ ID NO: 834281 - DNA, 120 bp, Artificial Sequence
  ENSG00000258660_1 (sequence is synthesized)
acagagataatctattccacataggtcaaatatctgatccaagaggcataaaccaaaggcagttttatcagctaaatttgcagcagtaaaggataatttagggaatgatttgagagaata

SEQ ID NO: 834282 - DNA, 120 bp, Artificial Sequence
  ENSG00000258660_2 (sequence is synthesized)
tcctacatttcttcatacatcccaactgccattttctaatggcatgggttccatgaacagggatgcatagaagtcattcaaagatttgttgaatgatactgaatatgaattttgcatgaa

SEQ ID NO: 834283 - DNA, 120 bp, Artificial Sequence
  ENSG00000258660_3 (sequence is synthesized)
atggacagagaaaagtatcttacatttgtctgagaactacctgtaattaaaagtcattgagaaacaaggagaaagagaaccagtttctatattacagaattcagaaaaaacaaacaccaa

SEQ ID NO: 834284 - DNA, 120 bp, Artificial Sequence
  ENSG00000258663_0 (sequence is synthesized)
tttttgttaagacaggaaacacatttattgagagcacagtggggtgcgccaagccctgtgctttggaaccgcatcacagcgcccctcacaacagccctgtgaggtaggtgaaggagccca

SEQ ID NO: 834285 - DNA, 120 bp, Artificial Sequence
  ENSG00000258663_1 (sequence is synthesized)
tcaaggagccaggttaaagggctgcccctacactcaagggagcaacgagacccctctgccggtgcctcagaaaagtccagaaacccaagcaggatggggacgtggggagttaacttttga

SEQ ID NO: 834286 - DNA, 120 bp, Artificial Sequence
  ENSG00000258662_0 (sequence is synthesized)
ctgtctcccaccaggagagttttggccacgtttacaacctagttctgcccatgaaggcaccagctgtcaccagctcaaccacgcagtagattaggcactgcatataaggcattggcgact

SEQ ID NO: 834287 - DNA, 120 bp, Artificial Sequence
  ENSG00000258662_1 (sequence is synthesized)
gcaactatggtccactgaaagagacatccagaaagtggctgtcaatgacagaagtgagaaataagactgcaggacttacttagaagccacatttttcttctggtccataaactgtgaatc

SEQ ID NO: 834288 - DNA, 120 bp, Artificial Sequence
  ENSG00000258662_2 (sequence is synthesized)
tttgtatggtttgcaaaaccaacgaccccagaggtcaagcagggaaaacaaaactcatcatctgtaaacctgatccagttttgctttattctgatttttgccattaaactttaaacagag

SEQ ID NO: 834289 - DNA, 120 bp, Artificial Sequence
  ENSG00000258666_0 (sequence is synthesized)
caggagccaaggaagtttatttactctactgggtgacaggagggcagagtgctccagaggagacccagatacatcaaccaaggacttccctgagatttggctttgctcttccagggtcag

SEQ ID NO: 834290 - DNA, 120 bp, Artificial Sequence
  ENSG00000258666_1 (sequence is synthesized)
tccgtcatctggatgaccaagggcacgttaaatacatcctggagccacctaaagaaacacagggggagaaagctgacgtctcatctcccctgtggaggaacgccatcgtgcatctgaaaa

SEQ ID NO: 834291 - DNA, 120 bp, Artificial Sequence
  ENSG00000258666_2 (sequence is synthesized)
cacagctcctacttacaacgtatgttaaaacttccttgcctacaaaatcacaatttgaattgtgatatgaatttgactatggataatgataaggtctactaccatttatcgaccaggtgg

SEQ ID NO: 834292 - DNA, 120 bp, Artificial Sequence
  ENSG00000256955_0 (sequence is synthesized)
gcagccaagcagatggggctgtacctgtgagagtgtgtcacccgtgggtggagtgtgcagtgatcagatgttgagtttggaagctcttttcctcttggtattgaatagagtcccactgtc

SEQ ID NO: 834293 - DNA, 120 bp, Artificial Sequence
  ENSG00000256955_1 (sequence is synthesized)
tggatgcaccccgctgacccacccactcaccgactgcagggcgtcccggttgctgccaggtgaaataggggcggggacaatccagggacatctttcccagcatgcatgaaccagaaataa

SEQ ID NO: 834294 - DNA, 120 bp, Artificial Sequence
  ENSG00000256955_2 (sequence is synthesized)
caccagcgtgtctgagaagaaacggtgaagaaatccaccctggctgtctgtcgggcagccccggcgaggagttgagtccccttaccgctgcgaatgagctgtcctccaccccacgtcgga

SEQ ID NO: 834295 - DNA, 120 bp, Artificial Sequence
  ENSG00000256955_3 (sequence is synthesized)
gcaacccctggcatatgcctgggcctcacagctattggcggagcgcctactctgttccaggcacagggcacagcagcaacctggaccccccaggggtggctcctcctccatcccggcttc

SEQ ID NO: 834296 - DNA, 120 bp, Artificial Sequence
  ENSG00000256955_4 (sequence is synthesized)
ctgctggaacatgagcaggcaattcacacaagaagcctgtaatcccagcactttgagaggtggaagcgggaggatggcttgagtcttgggagttcaaggctgcagtgggctgtgattgca

SEQ ID NO: 834297 - DNA, 79 bp, Artificial Sequence
  ENSG00000256955_5 (sequence is synthesized)
gagtcttgggagttcaaggctgcagtgggctgtgattgcaccactgcactccatcctgggtgacggagcaagaccctgt

SEQ ID NO: 834298 - DNA, 120 bp, Artificial Sequence
  ENSG00000266970_0 (sequence is synthesized)
gccgcttcgggagagcgggcagttctaggaggccgacctggagagcctcccggttccccttccccttttcccggaccccgcggggacaccccctcgccgccacccgggcctccccgaggg

SEQ ID NO: 834299 - DNA, 120 bp, Artificial Sequence
  ENSG00000266970_1 (sequence is synthesized)
cccaactgcgggtcaggcggcccgggccagccgaaagggaagtggggctaccccacagccaggcagcggggctggggtcagacccgggagccggaggttggagacgtgcgacagtcacct

SEQ ID NO: 834300 - DNA, 120 bp, Artificial Sequence
  ENSG00000266970_2 (sequence is synthesized)
gcgggcagattccagaggggagacccagggctgcaggggacgccccttcgtggcagctacccagcctcggcccactgccagtgttacgtggctgcatgaccatacacttctgggtagagc

SEQ ID NO: 834301 - DNA, 120 bp, Artificial Sequence
  ENSG00000266970_3 (sequence is synthesized)
aaggcagagaagtgggctagaagaagtggggttggagcctccaccaaggacaagaaggccttagccccctgcttccagctcaagctgaagtggctgtgagctgagctaagaagaccccac

SEQ ID NO: 834302 - DNA, 120 bp, Artificial Sequence
  ENSG00000266970_4 (sequence is synthesized)
agtgttacgtggctgcatgaccatacacttctgggtagagcccagtggaagacaaagaagactcaaggaatagcccttgagggctcaggagctatacagatgggatagagggtgtgagtg

SEQ ID NO: 834303 - DNA, 120 bp, Artificial Sequence
  ENSG00000266970_5 (sequence is synthesized)
ctgggaagccccatccatggctcgctggagattagaggcctgttaatctgaagacaaaggaatgaagacgaaaacgtttctgaaaatgtgggtggagacacctgggcctttacagggtac

SEQ ID NO: 834304 - DNA, 120 bp, Artificial Sequence
  ENSG00000266970_6 (sequence is synthesized)
tgcttccaggcagggaccccggctgagagaagccagagccagagagtcgcaggcttgcttgctcttatcttccctctgctgggggggtcgaggggagatctggcccctctgctctgccct

SEQ ID NO: 834305 - DNA, 120 bp, Artificial Sequence
  ENSG00000266970_7 (sequence is synthesized)
cctgatttcccgtctaagggatttaggagacttttgccttttcctaatctctccctttgcagaatttctgcgaagtcacaatcccatttccaggcaaaggtgcttggtcataaagataat

SEQ ID NO: 834306 - DNA, 120 bp, Artificial Sequence
  ENSG00000266973_0 (sequence is synthesized)
gacaaaatcatatctattgactggcagaaagggagaaaattccacaggaagggttggaatagaatggacgagagagacgagaaaagctctttcgtaaacggttgagttccagctgaaaga

SEQ ID NO: 834307 - DNA, 120 bp, Artificial Sequence
  ENSG00000266973_1 (sequence is synthesized)
ttctaaggaggatctaatgacagctgcaatctggaatggctgctgtttccgagcctgattaatgacagagctgcttcattgttcagtccgagctgattttcattccacagaagaggaaag

SEQ ID NO: 834308 - DNA, 120 bp, Artificial Sequence
  ENSG00000266973_2 (sequence is synthesized)
atatgcaacagcaatcatttcctcctctccccgctgccttcctaaagaacagcaggattgggaaaggagacgggaatcttgagaccgcgggcctttcctggagccggccttggctgagca

SEQ ID NO: 834309 - DNA, 120 bp, Artificial Sequence
  ENSG00000266973_3 (sequence is synthesized)
ggacacacccccgctagcgcacttgctccctccgtctactgcgcgcaaaacccgatggaaataacagggagcctggaataaagctgaccctttcccgtatcagagcgaaaggccaggtac

SEQ ID NO: 834310 - DNA, 120 bp, Artificial Sequence
  ENSG00000266975_0 (sequence is synthesized)
cagtcgctggaaaagagaggctgcagtgatgtggatagcacactcatctgaccggctctagctcctgctatcgcttcccagttccctcatgagagaacagactcagccgtcacctgcacc

SEQ ID NO: 834311 - DNA, 120 bp, Artificial Sequence
  ENSG00000266975_1 (sequence is synthesized)
ggccgctctccctgacccccaaggctgggtcagctgtcacagctgggtcccctgttttcccccatcactctggttcttgaagcaccttcctattacgtcgcaacctgcgtgagggcagca

SEQ ID NO: 834312 - DNA, 120 bp, Artificial Sequence
  ENSG00000266977_0 (sequence is synthesized)
aggagactccccttagaatgcctgagatagggcaggtgtctttccactcagaatacctgatgtcggccagggacccctccccttacaatgcctgaggtcagccaggtgtctctttcacta

SEQ ID NO: 834313 - DNA, 120 bp, Artificial Sequence
  ENSG00000266977_1 (sequence is synthesized)
gaatgtttgagatcggccaggtgtatctgccattacaaagaatgaagttggcttgatgtctccccattagaaagcctgaattcaaccaggagtttctcccattagaatgcctgagatcgg

SEQ ID NO: 834314 - DNA, 120 bp, Artificial Sequence
  ENSG00000266977_2 (sequence is synthesized)
ccaggactctcctgtgagaatggttgtgggtccagagcaagcttccctccccactgcagctcctgtgaaagggcctgctggtcgacctcagacaagactaatcagcaggcagaccaacaa

SEQ ID NO: 834315 - DNA, 120 bp, Artificial Sequence
  ENSG00000266977_3 (sequence is synthesized)
gctgcaatcacacaatgggtgcatcaccagtgcggacacctaggcgtacagggaaccatggcttggggagtgtaaagaaggatgttaccccaggatgcagttcagacaattttatcccaa

SEQ ID NO: 834316 - DNA, 120 bp, Artificial Sequence
  ENSG00000266977_4 (sequence is synthesized)
tgcactacatgccaacagttaaaaaccaagccaattcctcaaagggctatggggcacattcaccggggaaaaatgccaggacaaatttgtcaaatggactatatttgtcccttgccactt

SEQ ID NO: 834317 - DNA, 120 bp, Artificial Sequence
  ENSG00000266977_5 (sequence is synthesized)
tctaaagggtgccaatatatatgtactgctgtagacacctacttagggctcctagtagcctgtgcttatgctaatgctaaccaaattaacactattaaaacatgaaatatcctaattcta

SEQ ID NO: 834318 - DNA, 120 bp, Artificial Sequence
  ENSG00000266977_6 (sequence is synthesized)
gattgagagaagaatttgaggactggaaggcaggacatgtggttgagtgactggagaagggagcagataatggcaagacttcattctttgtccacaaacagaagagtgtggatcgcaaac

SEQ ID NO: 834319 - DNA, 120 bp, Artificial Sequence
  ENSG00000266978_0 (sequence is synthesized)
ggaggatacaacaggcggtgaggattgcattaggtccatggcccctgcccccacccagctctgcccgccggctcactcacagagcacattcacggtcaccttgcgggtgacctccccttg

SEQ ID NO: 834320 - DNA, 120 bp, Artificial Sequence
  ENSG00000266978_1 (sequence is synthesized)
agtgctcctggcccgacagaggaagtcactctgaaaactcaggtttacacaacatctacttgtacaatcaagcacacactctcaggctgcatgaagtactgtcgcagacaggactgcaaa

SEQ ID NO: 834321 - DNA, 120 bp, Artificial Sequence
  ENSG00000266978_2 (sequence is synthesized)
ccctctcaggggtgagaatggctggcagcagtgctcaggagagggatgtggcaggagtcagctcctaggaagtgccagcgcccacgcacctgtgagctcctggagtctgactcaccgggt

SEQ ID NO: 834322 - DNA, 120 bp, Artificial Sequence
  ENSG00000266978_3 (sequence is synthesized)
tcttcatccctctgccactcagttcaccattacagccctcgctcacctgggcgcggtggcgaaaacatcggggtgcaggtcggccaggcccacgcgctcctgctcgaagccccgcaagga

SEQ ID NO: 834323 - DNA, 120 bp, Artificial Sequence
  ENSG00000266978_4 (sequence is synthesized)
ctcgacccaggcctgcactgggcgtcgatgagtgggtaccgggagctcgactttgcgcagcacgggctccgggagacctggagcgattgcgggggtcagaggttagggtcaagggtcaga

SEQ ID NO: 834324 - DNA, 120 bp, Artificial Sequence
  ENSG00000266978_5 (sequence is synthesized)
cctctctgtcgccgcccctcctggagccaccccggttgccttaccctcgctcgccacctgctccgggttctcggtcgcacgcgctgcctcttccgccagggaactcaggccctgcaaggg

SEQ ID NO: 834325 - DNA, 120 bp, Artificial Sequence
  ENSG00000266978_6 (sequence is synthesized)
ttgggcgaaagtgagagacgacccctggacacccccaaatttcatccttcgaccacgcctccagcccctggcctcacctggctgccggtaggccgaagccaggcccgcgccccggcccgg

SEQ ID NO: 834326 - DNA, 83 bp, Artificial Sequence
  ENSG00000266979_0 (sequence is synthesized)
agggtttcaccatgttggccatgctgttttcaccatgttggccgggctgttttcgaactcctgacctcagatgatccatcttc

SEQ ID NO: 834327 - DNA, 120 bp, Artificial Sequence
  ENSG00000266979_1 (sequence is synthesized)
gccacctcacccggccctactattggatttttaaagacagatatttaagaacattctttgctagaactgaggacaatttaaacttattccattcaagaaaacttagtgcagaatgcagac

SEQ ID NO: 834328 - DNA, 120 bp, Artificial Sequence
  ENSG00000266979_2 (sequence is synthesized)
tttccctttcaagtatatgtaaaagttaacttctttttttttccacctctggaagacaatgtacaatgtagtactcttcagatacactaatgagaccctttttatactttaacagggacg

SEQ ID NO: 834329 - DNA, 120 bp, Artificial Sequence
  ENSG00000266979_3 (sequence is synthesized)
taaacatttccttttgtaacaaaaataaattatgggtttcattttaaaaagcctatccccaagaaatgttttgagtgttaatctaagtaagatttcattattctcataagtaaaactttg

SEQ ID NO: 834330 - DNA, 120 bp, Artificial Sequence
  ENSG00000266979_4 (sequence is synthesized)
agttcaaataaagttttgattttttttttgataattgaaggtatatgtaggggctcaacctaaatgccagggaattaaccctccataggaagtaatcatataattctaagtcagtatata

SEQ ID NO: 834331 - DNA, 120 bp, Artificial Sequence
  ENSG00000266979_5 (sequence is synthesized)
attgaattgatgtaggatttttaagtattctctcaactatattaaatgaattgtttttccagttttctagtggtccaaaaacttaaataggctgcaaatctgctgtgattcaaaccgtgc

SEQ ID NO: 834332 - DNA, 120 bp, Artificial Sequence
  ENSG00000266979_6 (sequence is synthesized)
aattcctcacaggcatctctgacttgagggactaagttcctgtaattatgtgtcctgaaattaactgggttgccagataggttttctcaacctttaatagcttgttggaaggcttacaga

SEQ ID NO: 834333 - DNA, 120 bp, Artificial Sequence
  ENSG00000266979_7 (sequence is synthesized)
atgctctttattagaaatatttggaactacttccccccttttggatactcaaattagtgtttttctagttctctggcataatttgtatagctgcttcctttgtagaaagtaagcttatgt

SEQ ID NO: 834334 - DNA, 120 bp, Artificial Sequence
  ENSG00000266979_8 (sequence is synthesized)
agggtctgcttctgtttgggttagggggtagacacttgaattcattggtcttttttttggctcactgcagccttgacctccagcactcaagggatcctcccacttcagcctctagagtag

SEQ ID NO: 834335 - DNA, 120 bp, Artificial Sequence
  ENSG00000266979_9 (sequence is synthesized)
ctgcaactataggtgcctgccactatgctcactaattttgtgtatttattgtagagacaaggtcttactgtattcctaggctggtctcggactcctggactcaagggatcttccttcttc

SEQ ID NO: 834336 - DNA, 120 bp, Artificial Sequence
  ENSG00000266979_10 (sequence is synthesized)
agcctcccaaagtgctagggtaacaggcatgagccaccatgcccggccaaatagattggtttttatcaaagatgctgtaatattaatatgcatcttcctgctatcccttcaaaagtgaga

SEQ ID NO: 834337 - DNA, 70 bp, Artificial Sequence
  ENSG00000266979_11 (sequence is synthesized)
gagcctcgacctcctgggatcaagcgattctctcacctcaacctttgaacttctagataagtggttctca

SEQ ID NO: 834338 - DNA, 120 bp, Artificial Sequence
  ENSG00000266979_12 (sequence is synthesized)
tctcacctcaacctttgaacttctagataagtggttctcaaagtgtggtccttcaaccaacagcatcatcaccacccaggaacttattagaaatggaagttcttgcaccctgccaaaacc

SEQ ID NO: 834339 - DNA, 120 bp, Artificial Sequence
  ENSG00000266979_13 (sequence is synthesized)
agaaactgcggatgggtcccagcaatctttattttaacgactgttaaaatcagaatcaagtgattctgatgcaaacttaagtttgaaaacattgttctattaaaagtaatggcaaaaacc

SEQ ID NO: 834340 - DNA, 120 bp, Artificial Sequence
  ENSG00000266979_14 (sequence is synthesized)
gcaattacttttgcaccaacctaagagctctgcactgttcaatatggtagcttctaactattgaattttttaatgctattatctcctttattcaaaaataaatatttcactttgattcaa

SEQ ID NO: 834341 - DNA, 120 bp, Artificial Sequence
  ENSG00000228917_0 (sequence is synthesized)
atcctgcctggaatgtcacccccagcatccttccccaccttaccccaagacttgaagacatattaatctcaggctcaaggtggaagtacccagagatgaggtcactgtccctccaggtga

SEQ ID NO: 834342 - DNA, 120 bp, Artificial Sequence
  ENSG00000228917_1 (sequence is synthesized)
tgggaacttgccattaaggactccccagcagaacaaaacaaatgttccctctccccttgctcctcaggttcctactaaaaggactgccaaccttctcaccactacccccagccactcccc

SEQ ID NO: 834343 - DNA, 120 bp, Artificial Sequence
  ENSG00000228917_2 (sequence is synthesized)
tgggcccctcagcagctctggccccccaaggaggcctctccctgggaatctctgtcagggctctgctgctgccaccaccagaaaaaccagctctggctccaggcctggcaacaatctcca

SEQ ID NO: 834344 - DNA, 120 bp, Artificial Sequence
  ENSG00000228917_3 (sequence is synthesized)
ccgagagctggagtatgtgggtgagtctggggtgagaaaggacctaggagggacgcaccgaagctcaccatccaggacagccagacccagtgacccttccaacaccccagcaccccactt

SEQ ID NO: 834345 - DNA, 120 bp, Artificial Sequence
  ENSG00000228917_4 (sequence is synthesized)
cgtatttcagagctggaaggtcaatagagatcatctggtcctagctctcggtctactgaagtctggtttcatcgctgcccaaggttaccaaatagattaatagcagaaacgggatctgga

SEQ ID NO: 834346 - DNA, 120 bp, Artificial Sequence
  ENSG00000228917_5 (sequence is synthesized)
ccaagactcctgacttcccagtccaaggattttttcagagacatgaaacattccaggttcctgggagccattaaggagagtctacacacagaagagccagaatgggggtggtagtggagg

SEQ ID NO: 834347 - DNA, 120 bp, Artificial Sequence
  ENSG00000228917_6 (sequence is synthesized)
taggaccatctgatcctcaggctaggagcctccagcccccagagcaacctcagctctgtgcaggttgtagctgctgcagcagcagcagagtggcctcctaccaggtgccagcttcctggg

SEQ ID NO: 834348 - DNA, 120 bp, Artificial Sequence
  ENSG00000228917_7 (sequence is synthesized)
gcaatctggagccaggcttcctcccttactgccaggcattgcatgaggtctaactagaagggggtctcctgtccccttccctgggcttctcttagtaagaacagttttgccatcatggaa

SEQ ID NO: 834349 - DNA, 120 bp, Artificial Sequence
  ENSG00000228917_8 (sequence is synthesized)
aagaaaggcaagaaccatgtgatgcagtcaccattgcatctccagcatctagtatccaggttgtacccagtgtgcactcaaatgtactattcttcaatgaacttagagtgagaacaccaa

SEQ ID NO: 834350 - DNA, 120 bp, Artificial Sequence
  ENSG00000228918_0 (sequence is synthesized)
gttgaatttcattttgctgacttcatctcatcctgtgtgttccagtgctggcagactctgtgggtgaatccagttttttgagagggaaaaaaatctgtgaagatatgagcagaggcagtt

SEQ ID NO: 834351 - DNA, 120 bp, Artificial Sequence
  ENSG00000228918_1 (sequence is synthesized)
tccaaacagggtcacattaacaatgatcattgctgtccgatgggctcctgcatcctccaccctctctgtgagatctctcctttaggtttcatcaggaatcctcaggaatcttttgcatgt

SEQ ID NO: 834352 - DNA, 120 bp, Artificial Sequence
  ENSG00000228918_2 (sequence is synthesized)
gcccacatgatcccgcatggactctgccccatgagggtgctgatgtctgccaacgctgctgccaccatgtccccaaagatatagatagttacagtctcagaagaattcaagatcccccaa

SEQ ID NO: 834353 - DNA, 120 bp, Artificial Sequence
  ENSG00000228918_3 (sequence is synthesized)
atgctgcaggattagcacagaagcagacagaatattgctccttcccactttagctaccttttctcccccggcatcagattgtgctgttcacatctcccctagcttctgaaaactggctat

SEQ ID NO: 834354 - DNA, 120 bp, Artificial Sequence
  ENSG00000228918_4 (sequence is synthesized)
aagtacccaagccggctccactccagggtatagactcccaccaccaaaatccccttccaaagtgacccttgccccgcctttctgtgacacacacgcagacaggtctgaattgctgaaatg

SEQ ID NO: 834355 - DNA, 120 bp, Artificial Sequence
  ENSG00000228918_5 (sequence is synthesized)
aacgctatttaggctgaactgggggccctgatatgctatttaaagaaaaaagaaatgagaaatcataggaatcttgaagctattcatcttgaagaccattcacggaagcagtgaaattaa

SEQ ID NO: 834356 - DNA, 120 bp, Artificial Sequence
  ENSG00000228918_6 (sequence is synthesized)
acatagcatccttcaatatattccctccaaacataaacttgggctattgttccttcataatgccagtttacctctgggagtttgagaggcgggtactcatgtcctctcagcacaatcacc

SEQ ID NO: 834357 - DNA, 120 bp, Artificial Sequence
  ENSG00000228918_7 (sequence is synthesized)
aaagcactgcaccaggtatcaggaggaaacaagaacaaatctattgtcaggaagcctgagggttgacccaaacacagcagagctatggaaaattattttggaaactatttcttacatagc

SEQ ID NO: 834358 - DNA, 120 bp, Artificial Sequence
  ENSG00000228918_8 (sequence is synthesized)
tgcctgcagttgttcaacctgattcttagactggactggaagaggaaaaccactcatcatctgagaagccttcgtgttgctattttattaaggacagaaacataaagagaaaaaaatcca

SEQ ID NO: 834359 - DNA, 120 bp, Artificial Sequence
  ENSG00000228918_9 (sequence is synthesized)
agggtgaggctgccttggccacagatggtggtggcgtatggttctgaggaatgaagaagcagagatcatgcaaggtgtttccatccaaaagtaggcatctcatgtcatctgctctggcca

SEQ ID NO: 834360 - DNA, 120 bp, Artificial Sequence
  ENSG00000228918_10 (sequence is synthesized)
gtatttaaccttgagaaaagaagaagtgtagagatgatgtacttgcctgagggatggattaaaaagtctttggtcttctctgaacggtactactgaatttatcctcatcaccgtcatcat

SEQ ID NO: 834361 - DNA, 120 bp, Artificial Sequence
  ENSG00000228918_11 (sequence is synthesized)
tattattgttcaaaaaagacctggagacagcggattgaaaatctcacagccaaaacgcaatctggtgactaccttctctggctctcatttgctgactttggaagtttgaaaagaagtctg

SEQ ID NO: 834362 - DNA, 120 bp, Artificial Sequence
  ENSG00000228918_12 (sequence is synthesized)
gtgaagggaagcaaggtgtggaaaaacatgagaagaaagctcttgtagaaggcctgtctccacaaggacctcacctgtacataggaaagatggacaagagccgggaaccacaaaatctca

SEQ ID NO: 834363 - DNA, 120 bp, Artificial Sequence
  ENSG00000228918_13 (sequence is synthesized)
gagttggagagcctgtcaagtctgtccattgctatctctcacagatgcgagccggcactgcaccaccaggctgaaggaccatcttttttcctttctaattaaagaatcgtgtttcctttt

SEQ ID NO: 834364 - DNA, 120 bp, Artificial Sequence
  ENSG00000228918_14 (sequence is synthesized)
actgcatgtctagtactttggggatgcccattctctccaaggctctcatagcctaactgtagagaaaaggcttacatgtatgacatattaagattgtagaaaccagcacctgtgggacct

SEQ ID NO: 834365 - DNA, 120 bp, Artificial Sequence
  ENSG00000228918_15 (sequence is synthesized)
ctgagagggtctggaattagggttcaggtaccatccatctgttacgtgctttgaagatgccactccatctgtgggattcaatttacataaactgaagactattcttctgagttgaagtga

SEQ ID NO: 834366 - DNA, 120 bp, Artificial Sequence
  ENSG00000228918_16 (sequence is synthesized)
ggagaggcatcaatcacactggaaaattatttgatctcctggaagcaaaaagtccaccatgaagttgttcttgccatggacttctagaggagctgactgtcctttgggaagctacaaata

SEQ ID NO: 834367 - DNA, 120 bp, Artificial Sequence
  ENSG00000228918_17 (sequence is synthesized)
ccattagcagtaatgtgcaccagtgggactccagggagaggaagaaagctgaaagggctggagttcctggtccaatttttaaagaaaacaagagaataaaaggcccataaaactcagaaa

SEQ ID NO: 834368 - DNA, 120 bp, Artificial Sequence
  ENSG00000228918_18 (sequence is synthesized)
cacttcttcccttggctcattcacatggaaatgcaagtctgatgatcatggacaaggaggtgatggctccaggagcaggggtcagggtgacctccagctcctcaactccagccctgtgtg

SEQ ID NO: 834369 - DNA, 120 bp, Artificial Sequence
  ENSG00000228918_19 (sequence is synthesized)
caccagcaaggttcacccccaagccaccagtgccaaatggaaaaactttattgtcatgtctttgaacacttggcaggaagtaccacgggtgttccaattattaaactaataagcactcga

SEQ ID NO: 834370 - DNA, 120 bp, Artificial Sequence
  ENSG00000228918_20 (sequence is synthesized)
agaatcactggacgtgtgtgaagtgactgaaggaagaagagaggaaaggaatgattgtgttaagtggcaaaaacccagccatggagcgagcaagctccattctgaaagtgctgcattaaa

SEQ ID NO: 834371 - DNA, 120 bp, Artificial Sequence
  ENSG00000228918_21 (sequence is synthesized)
gctgagcaaacagagaaatcaaagatgattatacgctgctggaaacccgcgtgcttccgcctggctgcatctccctgccaaactgttatgtaagccgcagccccactcaggcctggaatc

SEQ ID NO: 834372 - DNA, 120 bp, Artificial Sequence
  ENSG00000228918_22 (sequence is synthesized)
aaacagagatgccatttagagccctcccgtgacccgctcctcacctgtagcctggctcaaaccgtgtctcacctggagtagacctgcccagggagggccatgcatgctctgtggctggca

SEQ ID NO: 834373 - DNA, 120 bp, Artificial Sequence
  ENSG00000228918_23 (sequence is synthesized)
aagtggcttttccatttgttttgggatttccctctctcctttcccatccagcacagaggtatggatgggtcaggaccaggcgtttactttggttagattccaaatgactaagatatttta

SEQ ID NO: 834374 - DNA, 120 bp, Artificial Sequence
  ENSG00000228918_24 (sequence is synthesized)
tgatggaaaactccatttgacaatcccagggagttgagtgtttttcaccctcctaagtgaataattcactttggctgtttagatatcagagctgaacaagtggctctggagcccaagatg

SEQ ID NO: 834375 - DNA, 120 bp, Artificial Sequence
  ENSG00000228918_25 (sequence is synthesized)
cctaaccgcactgctctgatgaccagtacttatttctatttagggattctgggcatcttccgcagccctaaaccacctaaatggacttataagagctgttccttaaatgcgtcagtgact

SEQ ID NO: 834376 - DNA, 120 bp, Artificial Sequence
  ENSG00000228918_26 (sequence is synthesized)
tgggtaaatgagctgaattctcagggctttatttttttttctttctgcatcactcaatgactccacaataagtgtgctacaagttttaaatgctaatattggattttggacactgttaca

SEQ ID NO: 834377 - DNA, 120 bp, Artificial Sequence
  ENSG00000228918_27 (sequence is synthesized)
gttatatctgaagtaagatgtcaggctgtttggcgttaacagtgcccaagagtttatattcgtatctattcaacgctgacctccattactctctcccttttgcagccttaactgaccatg

SEQ ID NO: 834378 - DNA, 120 bp, Artificial Sequence
  ENSG00000228918_28 (sequence is synthesized)
ctccagtgtgagggactcagatctcaagtagaagaggcctgaactttggagtcagataacgcctgtattggagctatagcttagtctttcagagcctatgggaccttgtgctgtggcccg

SEQ ID NO: 834379 - DNA, 120 bp, Artificial Sequence
  ENSG00000228918_29 (sequence is synthesized)
aaccatgctaaatccctggagcctcccgatttcccttaattttcctacattccatcagaaatgcacaaagattccaagagggccaattctggctttggaaaatgattcaccatcctccac

SEQ ID NO: 834380 - DNA, 120 bp, Artificial Sequence
  ENSG00000228918_30 (sequence is synthesized)
ctctcacttgttccagtatggaaagggtgaacaggaaaccctttgctatttggtgagatcgacccaggagtgaggcattagactggaatctctggaccctcatctttttttttttttttt

SEQ ID NO: 834381 - DNA, 70 bp, Artificial Sequence
  ENSG00000228918_31 (sequence is synthesized)
ttcatcctcccaggttgaagcgattcttctgcctcagcccaccgagtagctgggattacaggcgcatgcc

SEQ ID NO: 834382 - DNA, 84 bp, Artificial Sequence
  ENSG00000228918_32 (sequence is synthesized)
ttgaagcgattcttctgcctcagcccacggctatttttttgtatttttagaagaggcaaggtttcaccctgttggccaggctgg

SEQ ID NO: 834383 - DNA, 120 bp, Artificial Sequence
  ENSG00000228918_33 (sequence is synthesized)
agtgctgggattacaggcatcagccaacacacccagccctggccctcatctcttttcccattaatgctggagggggcgcctcacaaaccaagacacctgctagtcgttggactcactctt

SEQ ID NO: 834384 - DNA, 120 bp, Artificial Sequence
  ENSG00000228918_34 (sequence is synthesized)
tcttgatgaccaaggtgccgtatctagtaattgatacagttatcttttcctgggaatatgaatagcaggttcttagtccttgcacaggcattttaaaaatgcacaaaccaaagaaaaaaa

SEQ ID NO: 834385 - DNA, 79 bp, Artificial Sequence
  ENSG00000228918_35 (sequence is synthesized)
agagggaaaaaaatctgtgaagatatgagcagaggcagttggacccctctgctacaggtccactggagtttgctggaga

SEQ ID NO: 834386 - DNA, 120 bp, Artificial Sequence
  ENSG00000228918_36 (sequence is synthesized)
aagcttcatcccagaggggtaccccccaaacgccagccagagctctcctgtatgaggtccttgtggtgaagaactggattacatggtggactgttcctgaacagagacctatctggaatg

SEQ ID NO: 834387 - DNA, 120 bp, Artificial Sequence
  ENSG00000228918_37 (sequence is synthesized)
gcggaatttgttttcactcagcgtggtacactggatgagctgttgctgtctctagtttgtcctcttaaatgtcacctccagaagctgattagaaaggctgaaatgaccaccatccaaaag

SEQ ID NO: 834388 - DNA, 120 bp, Artificial Sequence
  ENSG00000228918_38 (sequence is synthesized)
acccaggggcatatttcatggttttagtctatttgaaaggttgttagagtaggttaggaaagaccaaggcctctagctcaaggtggccagctcatgctgtgtatggactgtacactatca

SEQ ID NO: 834389 - DNA, 120 bp, Artificial Sequence
  ENSG00000228918_39 (sequence is synthesized)
tgttgtaggccactaatttctcatgccaatccctccaagtgccactggtttcatatttctaggcctttacatggcccattccttctgtttggaaagtcctcgatgctcatttttactttg

SEQ ID NO: 834390 - DNA, 120 bp, Artificial Sequence
  ENSG00000228918_40 (sequence is synthesized)
gcccaccaagccctgagtgcaccgatctttgcttccctccccagcagcatatcacaacctctctccttttctaattcaccttgtttgacaccaaggtctttctgcagtttttaaaacaga

SEQ ID NO: 834391 - DNA, 120 bp, Artificial Sequence
  ENSG00000228918_41 (sequence is synthesized)
ataacctcctcagcaaggactttcttgatctctaacgggcccccttcttgttctccctatcttagtatccttcctagcccttcacattttgtaaatatttgtttacctatttattgcctg

SEQ ID NO: 834392 - DNA, 120 bp, Artificial Sequence
  ENSG00000228918_42 (sequence is synthesized)
acttctaactaactataagggccagtgagacaggaactgtcttagtctgttttgtgttgctataaaagaacaccactgagtgggtaatttataaagaaaagaaatgcatttcttacaatt

SEQ ID NO: 834393 - DNA, 120 bp, Artificial Sequence
  ENSG00000228918_43 (sequence is synthesized)
ctggtggatgagaagtccaaggttgaggagtctacatctggtgaggattttcatgctgcgtgatcccatggcagaaggcagaaggatctaggttggtgtctgcctgggtgctctactgtg

SEQ ID NO: 834394 - DNA, 120 bp, Artificial Sequence
  ENSG00000228918_44 (sequence is synthesized)
tcctgggcctacctccacatgctgcatcatggtgcctgttggcagtccctttcttcaagaagatggaactggaagggttgggccaggacattgggttgatggatcaaaatatgctttgat

SEQ ID NO: 834395 - DNA, 120 bp, Artificial Sequence
  ENSG00000228918_45 (sequence is synthesized)
ggagctaaatcccaggtctctcgaaaaaagagcaattttggatctgaaaggcagctttgatgcctttgaattccttgcagattgtgccttttagtactctgtacaacaccagctgcatgt

SEQ ID NO: 834396 - DNA, 120 bp, Artificial Sequence
  ENSG00000228918_46 (sequence is synthesized)
tcatgcctgtaataccagcactttgggagcctgagggcggtggatcacctgagacagagtctctctccgtcaccaggttggagtgcaatggcatgatctcgactcattgcaatcttcgcc

SEQ ID NO: 834397 - DNA, 77 bp, Artificial Sequence
  ENSG00000228918_47 (sequence is synthesized)
gctacaggctggagtgcagtggcacgatctaggttcactgcaagctccgactcccaggttcatgccattctcctgct

SEQ ID NO: 834398 - DNA, 64 bp, Artificial Sequence
  ENSG00000228918_48 (sequence is synthesized)
ggggctacaggctggagtgcagtggcacgatctaggttcactgcaagctccgagtctagctctg

SEQ ID NO: 834399 - DNA, 120 bp, Artificial Sequence
  ENSG00000228918_49 (sequence is synthesized)
ccttggtccagacaccagctgtatagactatcaaagctgctgtcatttagaggggaatagctcctcattaggccacagatgcaccgcggacctgttcttccttttgggttggcaggcgca

SEQ ID NO: 834400 - DNA, 120 bp, Artificial Sequence
  ENSG00000228918_50 (sequence is synthesized)
accatgtacaaatccaagcctgccatagaagttgttaccctacatagagtccatgcctgtttgtccagagtttgggaaaagtcagagcacaacctagaataaatgcgataatgtatcaca

SEQ ID NO: 834401 - DNA, 120 bp, Artificial Sequence
  ENSG00000228919_0 (sequence is synthesized)
caaccgcgccccccgcgcacggacccccattacactcgcgtcccaggcggggtcgacccagacgagccacggggcggcgcagagccccactcgcagggcggccgggacccacgcgcgtgg

SEQ ID NO: 834402 - DNA, 120 bp, Artificial Sequence
  ENSG00000228919_1 (sequence is synthesized)
gtccacgcaacaacctataggtgacaaaacactcaggaagccgtcatgcggggccaagaaagagcccccatccagagtcacggaccccctcgtccgagggtccgcgcagtcccctcggta

SEQ ID NO: 834403 - DNA, 120 bp, Artificial Sequence
  ENSG00000228919_2 (sequence is synthesized)
agtcggacgaagcagtctcgctacgggggagggcggcggagcctcccactcttggtgacccggaccccgccccacgagtgggtcttcgcagggccccctctgacgcacacggggaccagc

SEQ ID NO: 834404 - DNA, 80 bp, Artificial Sequence
  ENSG00000228919_3 (sequence is synthesized)
cacgccgcgggggcaccgggcaggagccagcgcccgggtccacgcagtcccctccgggcagacgcggggagctggggagc

SEQ ID NO: 834405 - DNA, 120 bp, Artificial Sequence
  ENSG00000228919_4 (sequence is synthesized)
cccacgcggcgtcgcagcaggcgcggagcccccggtaccacccgaggccgagacaaagcccaggcgcacggaccccggaccctgcggagccccgctcggagcttccacgcccggggcaga

SEQ ID NO: 834406 - DNA, 120 bp, Artificial Sequence
  ENSG00000228919_5 (sequence is synthesized)
gcctgggccgactggagcgcagctgaacagccgacagagccgcagccgccttaacaatggagccccggggcggggccgccgccgccgcctcagcccgtgtaccccgctcgagatccggct

SEQ ID NO: 834407 - DNA, 80 bp, Artificial Sequence
  ENSG00000228919_6 (sequence is synthesized)
ggctcggctcgcggagctgcagccggcgtggggctgcggccgggacagacaccacgcaggcgcacacggccccgcccgcc

SEQ ID NO: 834408 - DNA, 120 bp, Artificial Sequence
  ENSG00000228919_7 (sequence is synthesized)
cccccggccaatgggaagcgagctgcgcggagtgggcggggcctgagggaacaaagggaggttgggcggggcggtgctgggactgggcttgcggggtcccgcgggaggacccgcctcaaa

SEQ ID NO: 834409 - DNA, 120 bp, Artificial Sequence
  ENSG00000228919_8 (sequence is synthesized)
gagccggcccgatcatcgcctcctagaatacccagctcaacgtctacctggagtcggctctacaggacgcgctcatctcaaacccagagctcaggcttttagggcagagagcgagagaaa

SEQ ID NO: 834410 - DNA, 120 bp, Artificial Sequence
  ENSG00000228919_9 (sequence is synthesized)
ggcttgctttacagaaagggaaactgaggtccaaggaataggattgcctgccgctcgaagaaacgtaatcccattcactcgttcatcttgtagtcattcagcaaacatttggaagcacgt

SEQ ID NO: 834411 - DNA, 120 bp, Artificial Sequence
  ENSG00000281831_0 (sequence is synthesized)
gcccattggaagcagggcctcagcaccaatgctactgaggatgtcagagcacaggagcagggccttgggagattacccagcattactcaaaccttctgccctgatgggtctgggtccttg

SEQ ID NO: 834412 - DNA, 120 bp, Artificial Sequence
  ENSG00000281831_1 (sequence is synthesized)
gaaatcaagctgtctcaggctgaattgctggatgattctgttcacacttacaatgaggtaagggaaaccagaaggcccccaggtcgatctctggtttccacacacacttccgccctcatt

SEQ ID NO: 834413 - DNA, 120 bp, Artificial Sequence
  ENSG00000281831_2 (sequence is synthesized)
gtgtgaaagtagccatgccttctcctgaagatgaggatctattacctgggcctggagaggaggagaatcctcttttcaccaggtggtctctgggcacatactaatcaaaacttctctcgt

SEQ ID NO: 834414 - DNA, 120 bp, Artificial Sequence
  ENSG00000281831_3 (sequence is synthesized)
gacaatcggaatgtgtagttcagtgggctgtcttttgtatccttttaagggtaccctccttggaaaccaggacctcgtaccctgcacagcccagtgttggaagataaaacgtgcaaaata

SEQ ID NO: 834415 - DNA, 120 bp, Artificial Sequence
  ENSG00000281831_4 (sequence is synthesized)
ccccattgggtgaatctaagggattggacgtggagccaaacctgcttccatcttttgattcctggacacacatgttcttcctattgagaacacagcactctagagacatctctgattcaa

SEQ ID NO: 834416 - DNA, 120 bp, Artificial Sequence
  ENSG00000281831_5 (sequence is synthesized)
acaatgcacggtgtcctgaaagacggcacccacctctcagagtgcttcctccaggctggcactgagttttgcctgtagaagacctgtccagcattccttgtggctggcagcctctggatg

SEQ ID NO: 834417 - DNA, 120 bp, Artificial Sequence
  ENSG00000281831_6 (sequence is synthesized)
gtccagatggtgataggattagtggaacccacagccatggaaacactgaaactttcccagccaagtgggtccttcaggcagataatgggctaggagcacctcctagcctgcagatcagga

SEQ ID NO: 834418 - DNA, 120 bp, Artificial Sequence
  ENSG00000281831_7 (sequence is synthesized)
gatgaacctctggcccttccaggatggaagtagctaaatgtagtcaacttgttacttagtggctagttagtcacctaaagaaatagtgccccactggggcacatcatgggcctcaattgc

SEQ ID NO: 834419 - DNA, 120 bp, Artificial Sequence
  ENSG00000281831_8 (sequence is synthesized)
tgatgagttggacattcagaggtgtcgacagctggatctgccttggtaggggggagtcagtgctgttggccccatatgtagcctcatgcctgccactgtggttgctccattcatgaactc

SEQ ID NO: 834420 - DNA, 120 bp, Artificial Sequence
  ENSG00000281831_9 (sequence is synthesized)
atcctaccagaccagggctgacccatggtgaaggctggctaacttccatttgtctgtttggttgttcagtgccacttcagacttgggtattttctgtgggtgtaaacatgggattcaagc

SEQ ID NO: 834421 - DNA, 120 bp, Artificial Sequence
  ENSG00000281831_10 (sequence is synthesized)
tcaacccaggtggaccattttcacctcatgatggatgctgttgggcctgtccaatctatgactctgtgggtcacacaggcacttggaaccacatagttgcttggtgtcccgtggtcaaac

SEQ ID NO: 834422 - DNA, 120 bp, Artificial Sequence
  ENSG00000281831_11 (sequence is synthesized)
attctatctaatcaggacaagggacactaaaagttgcttctaataggtggcatatgtctctgctgtgaatgacatgaccttactccagaatcccaggcctttcactgtgactttcccact

SEQ ID NO: 834423 - DNA, 120 bp, Artificial Sequence
  ENSG00000281831_12 (sequence is synthesized)
ggtgcttggttcagctccatcctgcatctttccccaccaatggcatcaccagcaccagggggtctgagagatggtggctgcttgcaccatggcctggatctgctgcagggtccttttctg

SEQ ID NO: 834424 - DNA, 120 bp, Artificial Sequence
  ENSG00000281831_13 (sequence is synthesized)
tgtgggccccacttgaagctggcctcctcctatgtcacctagagtgtgggccaaagcaacatacctagatgtggaaagtggtgttgtcagaactgaaagaggctcatcaggcagtgtgct

SEQ ID NO: 834425 - DNA, 120 bp, Artificial Sequence
  ENSG00000281831_14 (sequence is synthesized)
tccttctttctggtgaggatgcaagatgaaacagtttgtctgttaccttggaggggacacacctgcattcccctaaacacttggccattgttcacccataaaactttacttcaatgccca

SEQ ID NO: 834426 - DNA, 120 bp, Artificial Sequence
  ENSG00000283061_0 (sequence is synthesized)
atgatctcggtcataatgagtcagaatgtatatatacaaccattcctttcagctacgatacaaaagaagcaaatatttgccactggaaaaaatattcaaagacactcttaggttaatcta

SEQ ID NO: 834427 - DNA, 120 bp, Artificial Sequence
  ENSG00000283061_1 (sequence is synthesized)
atgggacgtgactgctgcctcattcccacgcctctctggacctgataatttagaggaagctcacattcgcaagataaaaattttcttttccttctcagtattaaatatgctgtcacaata

SEQ ID NO: 834428 - DNA, 120 bp, Artificial Sequence
  ENSG00000250078_0 (sequence is synthesized)
ggagaacactgagttctaacatccaagggcagagaaaaatggtatcccagctccggaagacagagagcaaactatttcacattgtctctgcctttttattgtatccaggcgctcagctga

SEQ ID NO: 834429 - DNA, 83 bp, Artificial Sequence
  ENSG00000250078_1 (sequence is synthesized)
attgtctctgcctttttattgtatccaggcgctcagctgattggatgatacctgctcccattgggatctcactatgttacttg

SEQ ID NO: 834430 - DNA, 120 bp, Artificial Sequence
  ENSG00000250078_2 (sequence is synthesized)
ctcacctcagagactgcgacacactggctatgccccaagtcatatgtggagagggcagcttttctcatccggcttgccaggctcttctaaattgaacatagacagaaggaaaagaaaggc

SEQ ID NO: 834431 - DNA, 120 bp, Artificial Sequence
  ENSG00000250078_3 (sequence is synthesized)
atgttctgggagctcagagtcttttgttacacgtgtctcgaagggtactaatacatctccagtagctgtgattatgccatgaaatgtctctaataaaaattactttttgaaataactgtt

SEQ ID NO: 834432 - DNA, 120 bp, Artificial Sequence
  ENSG00000242798_0 (sequence is synthesized)
acgtacgtccttgcccgtcaccctccaaaggctatcctttatgtttccctccatcgaatcctagccgcgctctaccttgggcctctgctaggtcttgcctcactcgaagaaagcgcagaa

SEQ ID NO: 834433 - DNA, 84 bp, Artificial Sequence
  ENSG00000242798_1 (sequence is synthesized)
gcctctgctaggtcttgcctcactcgaagaaagcgcagaaatcgaaaacgcggagtccatctgtcactgagactctactgccga

SEQ ID NO: 834434 - DNA, 120 bp, Artificial Sequence
  ENSG00000242798_2 (sequence is synthesized)
aagtgatccacccaccttggcctcccaaattgctggaattacagacgtgagccaccgcacctggcctacctggtggatttgatgtgaaggctcagataaagaacaagtgtctggatggat

SEQ ID NO: 834435 - DNA, 120 bp, Artificial Sequence
  ENSG00000242798_3 (sequence is synthesized)
ggatggatggcattgctatgaagataaggaaagctgagcctgggccagacacttcggctcacgcctttaattccaacactttgagaggccaacgctggaggattgcttgagcccaaaact

SEQ ID NO: 834436 - DNA, 120 bp, Artificial Sequence
  ENSG00000242797_0 (sequence is synthesized)
tctcccttctcttccccctccagcctccactccttcgcccgctcactcaccctctccctctcccgctgccccccctttctcccccacctctttgtttcagctgagaaccagctcctcggg

SEQ ID NO: 834437 - DNA, 120 bp, Artificial Sequence
  ENSG00000242797_1 (sequence is synthesized)
accgaggccgcaggaacaagaggtgggtgtccatgacattggtacctgtcatccctgtgtgcagcaggtgtgccccaccctggaggcagcagaagaagatggacaagagcctagaagatc

SEQ ID NO: 834438 - DNA, 120 bp, Artificial Sequence
  ENSG00000242797_2 (sequence is synthesized)
ccagccttgccactgggtatgagcacaggacagggggacgctcaatgctaaggctgccagagaaaatacaggacttccggttaaatttgaatttcaaataaacaagtaatttttaaagta

SEQ ID NO: 834439 - DNA, 120 bp, Artificial Sequence
  ENSG00000242797_3 (sequence is synthesized)
tcatctgtactacatatgtactattgcatctactttaataaatgcctaccataaatgttgcaagctgacttcatcagcaagtatggactgagcagggtaaggaggctgggaattgaggtt

SEQ ID NO: 834440 - DNA, 120 bp, Artificial Sequence
  ENSG00000242797_4 (sequence is synthesized)
ccagctctactataggctttctgagtggctgggacacctccatttctctcactgggcctcatccgcaaaatgagacatggggtgagattaacactacgctcttcccttaacaacctcagg

SEQ ID NO: 834441 - DNA, 120 bp, Artificial Sequence
  ENSG00000242797_5 (sequence is synthesized)
ctagttctcagctctccggtaagaaaagacagccatgcctgacttctgttgtgaaagggaacacagagggcatcgtcatggggattccgaaaatgggtccagttttggccagggggaccc

SEQ ID NO: 834442 - DNA, 120 bp, Artificial Sequence
  ENSG00000242797_6 (sequence is synthesized)
tggctggcaagctcaggtgtgacccaggccccagcagcctctgtgggcccatcctgcccatcggtgccaccgctcaaaaacagcacatctatcggccccagcggccaccttctcaactct

SEQ ID NO: 834443 - DNA, 120 bp, Artificial Sequence
  ENSG00000242797_7 (sequence is synthesized)
gctccaacacgcagggccagttcctggttccggccacccctgcccgagccctgcagctgtactgtgggctcgccaccagccagcaggcagactgggccccttccccatgccatggtctcc

SEQ ID NO: 834444 - DNA, 120 bp, Artificial Sequence
  ENSG00000242795_0 (sequence is synthesized)
gttggaatgagcagcttgggaaagcaatgagaaggcatgaagaaaggagataagaaaatggaggcaaagacagattggataacttgctgaacttggtggaggagaaggacttgaacttag

SEQ ID NO: 834445 - DNA, 120 bp, Artificial Sequence
  ENSG00000242795_1 (sequence is synthesized)
cagcccagcttgagtctttctatgtgctgtgctgtgctgtcttcccgaagcgggtgcactagcagtataacccaaaaagaggtgagagactggcacagaacaggtacccagtaaatgaat

SEQ ID NO: 834446 - DNA, 120 bp, Artificial Sequence
  ENSG00000242795_2 (sequence is synthesized)
gcagaaagatctccagaccttcagagaaaacatctcacctcagaaggtattcactggccagatgccacattctccttgaagtcaggctgccccactgaactcactggctttgaagcagag

SEQ ID NO: 834447 - DNA, 120 bp, Artificial Sequence
  ENSG00000242795_3 (sequence is synthesized)
taaggcctgctcaggaacccagcgggaagtcttgtgtctgtgacctgggcccccatggttagagtcaggagattagagtgtccttgctccaaagccagagatacagacccagattactca

SEQ ID NO: 834448 - DNA, 120 bp, Artificial Sequence
  ENSG00000250072_0 (sequence is synthesized)
aggcctggggaacagggctcctccctgcctctcagcagatcgcttcatgcctatcagcctgcagcacattcctcgcattctaggattgagatacacagtttggttcttgtgagggcagcc

SEQ ID NO: 834449 - DNA, 120 bp, Artificial Sequence
  ENSG00000250072_1 (sequence is synthesized)
agggctggggaggagggcagagaacatcccagagatcaagactgctcttcttgctccctccccgactgacttggcccacactgactggcctgccacccctttacagtgatctccacccag

SEQ ID NO: 834450 - DNA, 120 bp, Artificial Sequence
  ENSG00000250072_2 (sequence is synthesized)
tctctctctgcaaaggcctcccttggctctctgataaagttggagctgtgggtgcagcatttcacttggacctagcagcatcaatgagccagctcctcactggggaacatgcaaaccccc

SEQ ID NO: 834451 - DNA, 120 bp, Artificial Sequence
  ENSG00000250072_3 (sequence is synthesized)
ggaatccagttgacactgtggctaaatttcagaaaacctcccatgagatcttgcaaaggagatggagaaaatatggctgaatgccagcaagagcaaagtggtgaaaggaccctggtgaga

SEQ ID NO: 834452 - DNA, 120 bp, Artificial Sequence
  ENSG00000250072_4 (sequence is synthesized)
ggcccaaagaacaggaggtgtgagccaagagaaggtcctgccaggcctatgttgcaggctatttggaggctgaacttgaggaaacttcagtcttcagtcttaaggccttcaactgattgg

SEQ ID NO: 834453 - DNA, 120 bp, Artificial Sequence
  ENSG00000250072_5 (sequence is synthesized)
aaggcccccagtcagctagtgggaagacccatgcacattagagagggtaatctgctttgttcactgtctactgatgtcaatgttaattatctttaaaaaaaaataccttcaacatctatt

SEQ ID NO: 834454 - DNA, 120 bp, Artificial Sequence
  ENSG00000250072_6 (sequence is synthesized)
ttgttctttggtcaaacaactggccaccataacctagccaagagaacacatgaaattaaccatcacagagacccatgaggatgtgttgatacattgaatgtatgagaggaaaaaaaaaaa

SEQ ID NO: 834455 - DNA, 120 bp, Artificial Sequence
  ENSG00000250072_7 (sequence is synthesized)
cccccagctgctggtgtgcaggaaaagaatccaggagatcacctgatgaagcccagcattttacaggccaatgaagatacacaggctttccatggcgcacatgagggaggacatggactt

SEQ ID NO: 834456 - DNA, 120 bp, Artificial Sequence
  ENSG00000250072_8 (sequence is synthesized)
gtcgcagatcacacagaaatatcagggcctggtttgaatcttacctctgccccaaccagttgtgtgaccttgagaaagtgaagatcttttttgttcattggtttcctcatctgtaaaata

SEQ ID NO: 834457 - DNA, 120 bp, Artificial Sequence
  ENSG00000250072_9 (sequence is synthesized)
gggatttaattttacctgcctcagaagattgtagtgaggattaaatgaggtgataaaactataatgtttaggacagtaaattgtatgtaatataatattaataaatattagccattatta

SEQ ID NO: 834458 - DNA, 120 bp, Artificial Sequence
  ENSG00000250072_10 (sequence is synthesized)
gttgacactgtggctaaatttcagaaaacctcccatgagatcttgcaaaggagatggagaaaatatggctgaatgccagcaagcaaatgtgcgctgagtgcctctccatggaagcctgag

SEQ ID NO: 834459 - DNA, 120 bp, Artificial Sequence
  ENSG00000250072_11 (sequence is synthesized)
gggaacccagcagggcgcagagcaagcaacatccctgccctctactggctggatgagggaggacgatgagatgcggtgccatccgtgcatctggacattgcaaggtgaggaatagaaaaa

SEQ ID NO: 834460 - DNA, 120 bp, Artificial Sequence
  ENSG00000250072_12 (sequence is synthesized)
gttccagccaagaagtgtacacagaaatacctccaagcaaaaccagatctgcctgtcctcagagataatcagaaggattcctttcagttgcctcagaccaagagcagcctggctacattt

SEQ ID NO: 834461 - DNA, 120 bp, Artificial Sequence
  ENSG00000250072_13 (sequence is synthesized)
tttgcctcttgcttctcaactggctggcattttcatagacttacattttaaaaggctgtttacttaggaacaaaaaatgaagttacatactcaattaattttaactttatgatatttggc

SEQ ID NO: 834462 - DNA, 120 bp, Artificial Sequence
  ENSG00000250072_14 (sequence is synthesized)
gtgagaggcccaaagaacaggaggtgtgagccaagagaaggtcctgccaggcctatgttgcaggctatttggaggctgaacttgagagtggctgtgagaggaaattcagaagtatctttg

SEQ ID NO: 834463 - DNA, 120 bp, Artificial Sequence
  ENSG00000250072_15 (sequence is synthesized)
attttgttaattttgagatgctggggacatcatcaaaatgaaaaacttttgtgcctcaaagaacaccatcaagaaactgaaaagacaacccaagaagacaaaatttgcaaatcttatatc

SEQ ID NO: 834464 - DNA, 120 bp, Artificial Sequence
  ENSG00000250072_16 (sequence is synthesized)
cctatgttgcaggctatttggaggctgaacttgaggaagacagatgtcagctttctgaagaaagtgtcaagcatttgtcccttacaaggactgggaagaaagagcatacattttccccgt

SEQ ID NO: 834465 - DNA, 120 bp, Artificial Sequence
  ENSG00000250072_17 (sequence is synthesized)
tgcctgcccttgacatatttataacatcccaggactggcactgaccatcctctcccaagtaacggaatgtcaagatgactgcagagattatgctgtgagtagaaaagctttatagtaagc

SEQ ID NO: 834466 - DNA, 120 bp, Artificial Sequence
  ENSG00000250072_18 (sequence is synthesized)
cgaggtgatcaccagcctccctgagctaaaataatcacagactttttttcttagtgacccctgtcctactctcaggcaccttatatcctcaaatcttaaatagagttaagagattgggca

SEQ ID NO: 834467 - DNA, 120 bp, Artificial Sequence
  ENSG00000250072_19 (sequence is synthesized)
gggtatgagagaaggcctgagtacctagaaggattgggatgccatgaactgacagaggttgtgtaatagtgtgatataataagaaatacatggtgggcatggtggctcaagcctgtaatc

SEQ ID NO: 834468 - DNA, 120 bp, Artificial Sequence
  ENSG00000250072_20 (sequence is synthesized)
agtggtgaaaggaccctggtgagaggcccaaagaacaggaggtgtgagccaagagaaggtcctgccaggcctatgttgcaggctatttggaggctgaacttgaggtcagtatcaccagca

SEQ ID NO: 834469 - DNA, 120 bp, Artificial Sequence
  ENSG00000250072_21 (sequence is synthesized)
tttttaggacggcagtggcctgatcaagtttatattctgagaggagcacttgggtgaccaggtgaagaatggcctaggggtcagtcccaccagagatcaggagtatccacctcacacacc

SEQ ID NO: 834470 - DNA, 120 bp, Artificial Sequence
  ENSG00000250072_22 (sequence is synthesized)
agcctagccccagaggacagggtcttgagcctgtctctgaagcactgctcccgtctccatcctgactcatcctgagacacagttactgaatgtttactgtgggccaggctctcactgtac

SEQ ID NO: 834471 - DNA, 120 bp, Artificial Sequence
  ENSG00000250072_23 (sequence is synthesized)
attattctattcaaatcccataacagccccataatgtaggcatcatttctactttgtaagtgaggaaacggataaagaggagtgtataacttgtccaactccctcccttctcccaccatt

SEQ ID NO: 834472 - DNA, 120 bp, Artificial Sequence
  ENSG00000250072_24 (sequence is synthesized)
tatgaatgtcagagtcaagactgagcaaggtctagttgattccacagcccagaagaatcacgtttctgatacatgggatacattgtgggttctcccatgactactaggacacacaatgag

SEQ ID NO: 834473 - DNA, 120 bp, Artificial Sequence
  ENSG00000250072_25 (sequence is synthesized)
aaaggcctaggaaggactgaaacctctggagccagctaaccatttacacaaagcccaggagatgagagctggggcagggagtagagcgcaggagggatggggtctctctgatcacattgc

SEQ ID NO: 834474 - DNA, 120 bp, Artificial Sequence
  ENSG00000250072_26 (sequence is synthesized)
caccggggaggatgttttctctgtgcaggtctatttaaagtatctacttcccatacgtttctcatgtgtttcccttactgaagtacagtgtttttgaatatgaattcaaatgttttcttg

SEQ ID NO: 834475 - DNA, 120 bp, Artificial Sequence
  ENSG00000250072_27 (sequence is synthesized)
ggcccacaatgaaaggacaagagtttctttagaaaacagccacttaaaactgggatgtacttgaaagtcaggcagtgacaagaagccccatgctctaacttacacacgctgacagatgcg

SEQ ID NO: 834476 - DNA, 120 bp, Artificial Sequence
  ENSG00000250072_28 (sequence is synthesized)
cagacttatcattgctccttggctggtctgcacaccaaccactcttacacaggtacaacaacaatcagactataaatgatcaaaatcaactattgaaaggatcccaggccatgtgtcaga

SEQ ID NO: 834477 - DNA, 120 bp, Artificial Sequence
  ENSG00000250072_29 (sequence is synthesized)
tgcaagaaactgtgctgttctgctcctgggtagcctgatgaattgactagagcaaagagacttccagcaggagcaaaggccctgaagtaggaacttgcttagcatgttaaaggaagtgtg

SEQ ID NO: 834478 - DNA, 120 bp, Artificial Sequence
  ENSG00000250072_30 (sequence is synthesized)
gctgaaggctagtgaggtaggtgagggcacagagatgaagtcagagaaagcagcaggagaccaaacagtgtagggccttagaggtcatctaaggactccagtttttactctgaatgaggt

SEQ ID NO: 834479 - DNA, 120 bp, Artificial Sequence
  ENSG00000250072_31 (sequence is synthesized)
aagagccaatggaggacactaaagagaagagtaacatgcatgacttacggttttaaagggtcagcctggctcatgggctatagatggaactccagatatgcagcaattgtaacatccagc

SEQ ID NO: 834480 - DNA, 120 bp, Artificial Sequence
  ENSG00000250072_32 (sequence is synthesized)
agagagatgataatgtcttgaaccaaagtgctattggtagaggtgatgaaaagggtttaggtattagacacattttgaaataagggtgtattagtcaaggtactccagagaaacaggacc

SEQ ID NO: 834481 - DNA, 120 bp, Artificial Sequence
  ENSG00000250072_33 (sequence is synthesized)
aataaaagttgagaaaaaaaaaaattaacaaattggctcctgtgagggttggcaaatctgaaatccatagggcaggccagcagtctggagactcaagtaagagttgctattgcagtcttt

SEQ ID NO: 834482 - DNA, 120 bp, Artificial Sequence
  ENSG00000250072_34 (sequence is synthesized)
agtcaaaattccacagagcagcagactagagactcatataagtttcccatgttgcagtcaagaattcttgagaagaatttcttctttttcaggaaacttcagtcttcagtcttaaggcct

SEQ ID NO: 834483 - DNA, 120 bp, Artificial Sequence
  ENSG00000250072_35 (sequence is synthesized)
gagtttggttttgtatatgtaatatttaatagtcctttagtatatccaagcaaatgtagacaaagcaatctggagttcatggagaagttaaaagctgaaggtaagtatttgggagttgtc

SEQ ID NO: 834484 - DNA, 120 bp, Artificial Sequence
  ENSG00000250072_36 (sequence is synthesized)
actgtgtagagggtatgtaaagttagaagaccaagcaagatctcttaaggcagaaagtggaggatagaatacagaggatatatcaagaatgagccctacaagcacattaatttttatatg

SEQ ID NO: 834485 - DNA, 120 bp, Artificial Sequence
  ENSG00000250072_37 (sequence is synthesized)
aataagaaaggagtagaaaccagcaaaagcgatagagaaatagtggccagtgagacgatatgcaccaagagcataagatggtacagaattcaagtgaagaaagtgtttcaagagcagaag

SEQ ID NO: 834486 - DNA, 120 bp, Artificial Sequence
  ENSG00000250072_38 (sequence is synthesized)
gtgattaactatgtcaaatgctgctaataagtaagatgtgcacagagaatttaccactggacatcttggtggagcagtggagataaaagctagattgagaaagcttcaagagtatacggt

SEQ ID NO: 834487 - DNA, 120 bp, Artificial Sequence
  ENSG00000242791_0 (sequence is synthesized)
ggtttgcctatccagtatgtactcttcttccttgctaacagaatcttgaatttgcttgagataatagtaaataatttaaaatacctccataaatgcccttccagctagggtggtcatcta

SEQ ID NO: 834488 - DNA, 120 bp, Artificial Sequence
  ENSG00000242791_1 (sequence is synthesized)
gtccattggccaataaactagatcaaaagctacttcatggaaagctattttttccttgatacctatatctttctgtaaaggactgctcagctggcataagctttctacttttaacctgtc

SEQ ID NO: 834489 - DNA, 120 bp, Artificial Sequence
  ENSG00000242791_2 (sequence is synthesized)
aaaggggcctgttctctcaaggaccttcactatccattcatttcctacccccagactcttgttagattgggctgatccaaactcataatatgaatagatggacattgaccaaagagacca

SEQ ID NO: 834490 - DNA, 120 bp, Artificial Sequence
  ENSG00000242791_3 (sequence is synthesized)
gcagcagaacaaaagcataaacaaacatgagagtaggctaattttaccaacctgaggtcaaaaagttctcatgagatctggtcgtttgaaagcatgtaccacttccctcttcgctcactc

SEQ ID NO: 834491 - DNA, 82 bp, Artificial Sequence
  ENSG00000242791_4 (sequence is synthesized)
gtcgtttgaaagcatgtaccacttccctcttcgctcactctctccctcccgctccaccatgtgaagattgtgcctgcttctc

SEQ ID NO: 834492 - DNA, 120 bp, Artificial Sequence
  ENSG00000255737_0 (sequence is synthesized)
ccccttccgcgaaccccgagcgggtagacccagagcaatccgagtgtggaaacaatggagagggggcgtgttgagctggggtctccatgcctcgttggggagagggagctcacgtaccca

SEQ ID NO: 834493 - DNA, 120 bp, Artificial Sequence
  ENSG00000255737_1 (sequence is synthesized)
cagcagcagttgcgtgatgacgacgtgggcgagctcggccgccaggtggagtggggagcgcagctgtgggtcctctacgctggtgtcgagcggcccgtgtcgcgcatgggccaaaagcag

SEQ ID NO: 834494 - DNA, 120 bp, Artificial Sequence
  ENSG00000255737_2 (sequence is synthesized)
gagaacggtagccacgtcctgggcctgcacggcggcccacagctggcggcccagcggctcctccgaggtgctcagcggcgccaggaacagtagctgctcgtacttggcgcgaatccacga

SEQ ID NO: 834495 - DNA, 120 bp, Artificial Sequence
  ENSG00000255737_3 (sequence is synthesized)
ctcgcgctcctccctgcaagaccagggatcaacggaaaaggctctagggacccccagccaggacttctgcccctacccacgggaccgtctcaggttcgcacaccctcagcaaccctcccc

SEQ ID NO: 834496 - DNA, 120 bp, Artificial Sequence
  ENSG00000255737_4 (sequence is synthesized)
ccgctctgttccctcacgcttaccgcgaagagtcccgcgagggcttggcacggcctcgcgtgtcgctttcccacacgcggttggccgtgtcgttgccaatagccgtcagcaccagggtca

SEQ ID NO: 834497 - DNA, 120 bp, Artificial Sequence
  ENSG00000255737_5 (sequence is synthesized)
gctcccgtggccagtcgtccaagtccagcgagcgaacgcgggacaggtgtgtgcccaggttgcggtggatgccagaacactcgatgcagatgagggcgcccaggttcaagctggcccacg

SEQ ID NO: 834498 - DNA, 120 bp, Artificial Sequence
  ENSG00000255737_6 (sequence is synthesized)
attcactacactccctagcccctccgctgcctcctggcactcactgggggccccgcagtccacgcagattgaattccccttggcgttccggatcgcctggatggccacggcctcgctttg

SEQ ID NO: 834499 - DNA, 120 bp, Artificial Sequence
  ENSG00000255737_7 (sequence is synthesized)
gctgtctgtgcgcagctgcagagagggtttgggttggcactgactctgcctccaagccccacctccttctcagacacctctgctctcctctcacacgacttcggccgtgtcgttgccaat

SEQ ID NO: 834500 - DNA, 120 bp, Artificial Sequence
  ENSG00000255737_8 (sequence is synthesized)
ggccgtcagcaccagggtcagttcctgcggccagtcctccactccacctcaaactcttaccttgaccttgctgctctcacagcattgcagactggctaggatctgactctcgatggcctg

SEQ ID NO: 834501 - DNA, 120 bp, Artificial Sequence
  ENSG00000255737_9 (sequence is synthesized)
gacccaggcatcccgctcctcaaaactggctgcctcaaagtgccacgtctgacccgtgctggacacgatcaggaactcaaagttttcctctgagtgggggatgggatggggtcattaagg

SEQ ID NO: 834502 - DNA, 120 bp, Artificial Sequence
  ENSG00000255737_10 (sequence is synthesized)
gacagagttcaagcaggggctgcctttcccaagaccgtcctccctgatgtccatcccgagcccctgggagtggggcagtgggggtagggaaagcagagggtggggggcagcaggaagccc

SEQ ID NO: 834503 - DNA, 120 bp, Artificial Sequence
  ENSG00000255737_11 (sequence is synthesized)
gagcacatgcaggggaaggcgggggcacccccacccttctgcaccccagctgagcgcccctcccggctccccacttgttacctgctttataaatatttcttaaactaccaaaggatttta

SEQ ID NO: 834504 - DNA, 120 bp, Artificial Sequence
  ENSG00000255733_0 (sequence is synthesized)
ggtagcttttctgactcttaaagagatctcaagtataccttcagagaaatgccagcaaaaactgtagtcatttgggaaggaataagcctggaagaaaaagatacaacgaactagcacaac

SEQ ID NO: 834505 - DNA, 120 bp, Artificial Sequence
  ENSG00000255733_1 (sequence is synthesized)
gaggagtttgaaaagttcatgacagctcacagctgatgatggtggcaatcttaaggatacagaaagctcattcctcatgcagggaagaagaaaatattctaaagaagagataagcatatt

SEQ ID NO: 834506 - DNA, 120 bp, Artificial Sequence
  ENSG00000255733_2 (sequence is synthesized)
ccatgaaatcaaaaaagcgtaaaacgctggaggagaagtcagtagcaagcagctaagacaacatggtacatgtgggtccaatgtgaaaaacactaagtgggatggttaattgtatgtgtt

SEQ ID NO: 834507 - DNA, 120 bp, Artificial Sequence
  ENSG00000255733_3 (sequence is synthesized)
gagtttttgggctagaagcccaccaactgctaacaaccagctggagggtaagtcaaaagctatgagagcccagaaggagaacaattatttagacctggaggggccagttgggaaagtctt

SEQ ID NO: 834508 - DNA, 120 bp, Artificial Sequence
  ENSG00000255733_4 (sequence is synthesized)
tgaagggtcttcagaaaatggaccaaaagaaaagaggaaaagtcattctactgagaggtgtttgtgtaatcaaagcaaccgaggcctaagaactcacaaaagattagaaaagggtaaagg

SEQ ID NO: 834509 - DNA, 120 bp, Artificial Sequence
  ENSG00000255733_5 (sequence is synthesized)
atgcctggaaagccggactaggaaaaggctgtgaagggccctgaaggtcacatgtcacatgttgcctgcagcatgcagaatcaaaacatgataaatcatgtcttgaatcatgacatatga

SEQ ID NO: 834510 - DNA, 120 bp, Artificial Sequence
  ENSG00000255733_6 (sequence is synthesized)
agcatgacacacgaatcatgacatgtgacatgttgaatgtcacatgtcacatgccgtaggcagccatcaagagtatttgaaaggaaagtgtataatcaggcctgtgctttagtaagacaa

SEQ ID NO: 834511 - DNA, 120 bp, Artificial Sequence
  ENSG00000255733_7 (sequence is synthesized)
caactgctaacaaccagctggagggcctccccggaagctgagcagatgccagcaccataattccagtacagcctatcaaactgcctaggtgctctctgatggtgggaatccactaataag

SEQ ID NO: 834512 - DNA, 120 bp, Artificial Sequence
  ENSG00000255733_8 (sequence is synthesized)
aggtgtccagttcttctagcaaacttgtcagtgctcatgtcttccatgggttgtgccctgaatcaatgcatttattaattctttcaaaatgcaaaataaaaattatgtgttgagcctcta

SEQ ID NO: 834513 - DNA, 120 bp, Artificial Sequence
  ENSG00000255733_9 (sequence is synthesized)
ttctttgtcgctggactaaaagtggaaataaatgtttacaacctctaaggtggattaagctaagaatttggagttgttggcaaaactgccacataaaatttcagacatgcaaagaaatgc

SEQ ID NO: 834514 - DNA, 120 bp, Artificial Sequence
  ENSG00000255733_10 (sequence is synthesized)
aatcgtagacttatgcacatacttccaccagagaagggaatctgggcagagtgttcaaagcttaagaaattcctttgctcttcaccaagaagagccaacagagttttcgttgaatcaact

SEQ ID NO: 834515 - DNA, 120 bp, Artificial Sequence
  ENSG00000255733_11 (sequence is synthesized)
cttatattcccttaaaaagaagttgatagtgttgtggaaaactcacccattgaagtgacaacaaaaacagcaacccagtatgagttaactggtattatgttaaagggacaagtaactgca

SEQ ID NO: 834516 - DNA, 120 bp, Artificial Sequence
  ENSG00000255733_12 (sequence is synthesized)
cttttgacacacatcctctaaaaggtagggtgggagtgtttcaaagaaccaagtctgagtaatagaaaagcatataccacttccccatatacacgttcgagcatgggggagcaggaagct

SEQ ID NO: 834517 - DNA, 120 bp, Artificial Sequence
  ENSG00000255733_13 (sequence is synthesized)
gggtaattgaatgcagttgtgcacactggcaattttcccgccacataccatttcttcggtgtctctcccaaaattctcctcctaagtggcacatccctttattgatcatctttccccata

SEQ ID NO: 834518 - DNA, 120 bp, Artificial Sequence
  ENSG00000255733_14 (sequence is synthesized)
ctgatcatcctcagcaatcatgtgagttattagtctaagtatttgtttttctcaaatatggtcttttaactactccctaaatattttatatatacatagtttgttttcccaatttaacta

SEQ ID NO: 834519 - DNA, 120 bp, Artificial Sequence
  ENSG00000255733_15 (sequence is synthesized)
caagcatttaaaaaatgggaatatttgtctatatttctgtaatttttcatcatgccttatatggtatataaagatcaacagcaataaaacaacaacagtaataatagctaagaccttttg

SEQ ID NO: 834520 - DNA, 120 bp, Artificial Sequence
  ENSG00000257395_0 (sequence is synthesized)
gggaaggctgcctaagccagagagcttcacagggagccttgatgtctgagtaagaattaaccaggtgaagcagaaggggaaataggctctaggaacagagagctttgagcgcaaaggcag

SEQ ID NO: 834521 - DNA, 120 bp, Artificial Sequence
  ENSG00000257395_1 (sequence is synthesized)
gcagagtgtgaggagaggaggccttacttccttgtgactgcagcatgaagtttgttcatatatcatgtagcaattaccagccttgtctggctgacatatacctgagggagtgtggaaagt

SEQ ID NO: 834522 - DNA, 120 bp, Artificial Sequence
  ENSG00000257395_2 (sequence is synthesized)
gccgaatgcctgaagataaatcaactcttcctctgggagggcacggataaacaacttcatcgatgtgcttcaggttaccatttgaaaaggcagtagagatatgtataaaggcttccagct

SEQ ID NO: 834523 - DNA, 120 bp, Artificial Sequence
  ENSG00000257395_3 (sequence is synthesized)
ttggcatctgactagccgtaagagcttctgggtggcagtgatgttaagttgcacagcatgtctacagaagattaagcagaaggaaatacagtgagataagtcagcatcatgccttgctat

SEQ ID NO: 834524 - DNA, 120 bp, Artificial Sequence
  ENSG00000257395_4 (sequence is synthesized)
aactgcacctactcccataactggcatacctatcagattttggtggctgcaccaaaacaccaggaagaaaaggatggggcacggctgcacagttatgtgatacttggaatgtcttatgta

SEQ ID NO: 834525 - DNA, 120 bp, Artificial Sequence
  ENSG00000257395_5 (sequence is synthesized)
ttgatgatgtgtttgtgtacataaaccctattcactgatgcactgtatggcatatttagaggtcacttggctctaatcaactggaaaaagaatcacaatcctctgaatttacaaaggtgc

SEQ ID NO: 834526 - DNA, 120 bp, Artificial Sequence
  ENSG00000257395_6 (sequence is synthesized)
aagaaattggaaaatataaataaactggagagaagcaacagtggatttttaaatgagcaatataagttgttataaagttccaggccagacatgaaaattgatgtcaaaatctgaaattgc

SEQ ID NO: 834527 - DNA, 120 bp, Artificial Sequence
  ENSG00000257395_7 (sequence is synthesized)
aactactggaatacaaagctatatagacagtatgtgataacaatgaaatacttcattctaggaatacatggtttatcgaataccaggaaacttattaatttaatttaactcaaaaagaga

SEQ ID NO: 834528 - DNA, 120 bp, Artificial Sequence
  ENSG00000257395_8 (sequence is synthesized)
aaaagagaaaaactatataataatctgtatgtattttgaaaagtttaagacgatgtttagttttcatttccaatttcattaaatgaattcactagaataggaataaaatgattaaacaat

SEQ ID NO: 834529 - DNA, 120 bp, Artificial Sequence
  ENSG00000257395_9 (sequence is synthesized)
aatttgctagccaatgtcattcttaatggtgaaaagctaggaatactgctggtaaagccagggctagaaataatgcctgcagtcacaactactacttaacattgttctgaggtcctagcc

SEQ ID NO: 834530 - DNA, 120 bp, Artificial Sequence
  ENSG00000257395_10 (sequence is synthesized)
ttgtaagtaattagaaagaaaactaaaattaatgaagaaatatagatattaaaaagacagtcacaaaaattactataggattatataattgcatacctggaaaacagaagcagctttttt

SEQ ID NO: 834531 - DNA, 120 bp, Artificial Sequence
  ENSG00000257395_11 (sequence is synthesized)
agcagcttttttaaaaagctaaagtgtactatagttcagtaaggtgtccactgataaaaattatatgaaaaggccaggcacagtggctcaagccttaatcccagcactttgggaggctga

SEQ ID NO: 834532 - DNA, 120 bp, Artificial Sequence
  ENSG00000257391_0 (sequence is synthesized)
cggaggcttcaccctccgctccacagggtcggcagcagagcggggcctccggaagctccgccccacgcgttcccggggcgcatgcgacgtggggcggagcgtctggaagctccgcccgtc

SEQ ID NO: 834533 - DNA, 120 bp, Artificial Sequence
  ENSG00000257391_1 (sequence is synthesized)
gcactggagagtcggccgaggcgcacgaggtatttttcacgctccgccccactgcaggctaaagtgcgtgggcgggaagcggtgggcagggtgccatctggctccgcccttctcctgtgg

SEQ ID NO: 834534 - DNA, 120 bp, Artificial Sequence
  ENSG00000257391_2 (sequence is synthesized)
tgtgggccaggcggcgggttcctcctcctgcagcagccacaggctccaccctgatccttctcccgcggcatggatccttctcccgcggcgtggatccttctcccgcaatctccgtgcgcg

SEQ ID NO: 834535 - DNA, 120 bp, Artificial Sequence
  ENSG00000257391_3 (sequence is synthesized)
tccccagtcagtacccgcagcctcccgacgcacccgctggctccaagcctccctaccccaggtttcctggctaagagagagacagaaggagagagggggaagagagagaacaggcaatgg

SEQ ID NO: 834536 - DNA, 120 bp, Artificial Sequence
  ENSG00000257391_4 (sequence is synthesized)
gaggttgatggtgagagcttattgaaagacaagagggaggaaacccacatcctccattccccatccattcatttattgccttatttattccattgaatcttcacagctctagaaaaagtg

SEQ ID NO: 834537 - DNA, 120 bp, Artificial Sequence; identical to SEQ ID NO: 821215
  ENSG00000257391_5 (sequence is synthesized)

SEQ ID NO: 834538 - DNA, 120 bp, Artificial Sequence
  ENSG00000257391_6 (sequence is synthesized)
cagcctggccaacatggcgagaccccgtttctacaaaaattagccaaaattagccaaactggctcacacttgtagtcccaggtactcgagaggctgaggccggaggagcgtgtgagccca

SEQ ID NO: 834539 - DNA, 80 bp, Artificial Sequence
  ENSG00000257391_7 (sequence is synthesized)
aactggctcacacttgtagtcccaggtactcgagaggctgaggccggaggagcgtgtgagcccaggaggcagtggctgcg

SEQ ID NO: 834540 - DNA, 82 bp, Artificial Sequence
  ENSG00000257391_8 (sequence is synthesized)
tacagtgagactccgtctcaaaaacaaaaaaaatcctaccacatgtgctccaccaagctctgtctccaaggtggccttggaa

SEQ ID NO: 834541 - DNA, 120 bp, Artificial Sequence
  ENSG00000257391_9 (sequence is synthesized)
atgtgctccaccaagctctgtctccaaggtggccttggaagccacatggggaaggtggcagagactctaggagcctgagcagagacccagatgattatgaaaaatgcagacctacccatc

SEQ ID NO: 834542 - DNA, 120 bp, Artificial Sequence
  ENSG00000257391_10 (sequence is synthesized)
cttattcacctgggaccaccgtgaactatatcataagaaataaacccctattgtacatacatgcaccattccagttgggtctatttgttacagcagtttagccaaccctaatccacatat

SEQ ID NO: 834543 - DNA, 120 bp, Artificial Sequence
  ENSG00000257391_11 (sequence is synthesized)
acagtgtcaacagtggctgagatgacatgttgcacagacatgagagtcagaaagacctgagttcaagtcccagtgatgacatttactatctgtgtgaccttgaaaagctgcctaactact

SEQ ID NO: 834544 - DNA, 120 bp, Artificial Sequence
  ENSG00000257391_12 (sequence is synthesized)
ctcagaccgtttcctcatcagtttgttttgagaatcaaatgagaaaattactaaaaagcccttagcactgcatctaagatggggaagagacagtcaatgaattcaagtttcctgaagccc

SEQ ID NO: 834545 - DNA, 120 bp, Artificial Sequence
  ENSG00000257391_13 (sequence is synthesized)
agttgcatccctgccctgtcctgggctctgagagacagttgccgaagctagtgttaaagtgaactaaatatggcctgagtgggacttcgtacttctatagttgagtccttgtggacaaat

SEQ ID NO: 834546 - DNA, 120 bp, Artificial Sequence
  ENSG00000257391_14 (sequence is synthesized)
ttgaaaacctaacttaggagtatgcgtctgtaacaatagctgagtcttggccaatcccagaggccgtagttcaaccgctcatacgctgctgagtgttcaaactgtactcaaataaggcaa

SEQ ID NO: 834547 - DNA, 120 bp, Artificial Sequence
  ENSG00000257391_15 (sequence is synthesized)
gtgttcaaactgtactcaaataaggcaaacgccaacttgtaacaatccagccattctgtacttcacttctgatttctgtacatcatttcccttcttttgtccataaatcttcttccacca

SEQ ID NO: 834548 - DNA, 120 bp, Artificial Sequence
  ENSG00000257398_0 (sequence is synthesized)
agagctctccttgggggtggatgacagaatgaacatttactctgggctcactggaaaagctccaacgtcttggaaattgagtgggtaagcacaaccttgagcacattgtcagcattccat

SEQ ID NO: 834549 - DNA, 120 bp, Artificial Sequence
  ENSG00000257398_1 (sequence is synthesized)
ttcttttttgaataagaatatgcagttttaccaatatcattggttcaagaggctttcctttcccagttgtgtattcttggcacctttgttgaagatcacttgactgtgtatgtgtgcatt

SEQ ID NO: 834550 - DNA, 120 bp, Artificial Sequence
  ENSG00000257398_2 (sequence is synthesized)
tagttctgggctctcttttctctcccaggggttctaatgggtgcccttatgctaggaccatgctgtctaaatttctgtggctttgttgtaaatttgaatcttatgaatgtctgtcctcca

SEQ ID NO: 834551 - DNA, 120 bp, Artificial Sequence
  ENSG00000257398_3 (sequence is synthesized)
acactattctttttcatgttatcatggctatttgaggccatgggaaaattcataaaaataattttaggattagcttttccatttctgcacacatggccattaccagttcgataatagttg

SEQ ID NO: 834552 - DNA, 120 bp, Artificial Sequence
  ENSG00000257398_4 (sequence is synthesized)
ctatccatgaatacaggatgccttttcacttatttttaccttctttgctttctttcagtagtctttctttctaatcactctacaagtatttcacctccttggttaggtttattcctaagt

SEQ ID NO: 834553 - DNA, 120 bp, Artificial Sequence
  ENSG00000257398_5 (sequence is synthesized)
atttagttattttagatgttattataagtgggattacatttgtcatcttcttgttggatcattcactgttggtttgtattaacaaaccaatcatttgaatattggccttgtaccctgcaa

SEQ ID NO: 834554 - DNA, 120 bp, Artificial Sequence
  ENSG00000257398_6 (sequence is synthesized)
ctttgatgtaattattaacactaatagcattcttggagattatttctgattttctatatgtagaatgatagagaagttctgtttcacacctattttctcaagatagtctatattgatact

SEQ ID NO: 834555 - DNA, 120 bp, Artificial Sequence
  ENSG00000257398_7 (sequence is synthesized)
gtaaagatatgttcatattcacctactgaatgatgtccttccaaaaggccttgttagattattcaaaaaatattttgtcattacattccacaatttaataaaaaatagtaattcattgtc

SEQ ID NO: 834556 - DNA, 120 bp, Artificial Sequence
  ENSG00000257398_8 (sequence is synthesized)
agtataatactgtctatgggtttgtcataactagctcttattattttgagctatgttccatcaatacctagcttattgagagtttgagcatgaatggggtgttgaattttattgaaggcc

SEQ ID NO: 834557 - DNA, 120 bp, Artificial Sequence
  ENSG00000257398_9 (sequence is synthesized)
agttacatttacctgaattcttcatttctgcatatggcttcaagttactatccagtgtttcttcatttcagcctgaaggattataggtgctgggcttcgttgctgtttctggcagagtcc

SEQ ID NO: 834558 - DNA, 120 bp, Artificial Sequence
  ENSG00000257398_10 (sequence is synthesized)
cccgctgcactgggtttggcgtctctgctgttcgctgagatctgcacactccaggagccatagggaggacgccaggacagccccgaagacgagaatgcctcgctcctcctaggacgggag

SEQ ID NO: 834559 - DNA, 120 bp, Artificial Sequence
  ENSG00000257398_11 (sequence is synthesized)
gaaaatcccacaaatcctgtctactccaagcagccgcgcccctcgggagaccaccccagttggaggggcccactccagccaccgctacaccgggacgcgctcctcctccccctgtgcccg

SEQ ID NO: 834560 - DNA, 120 bp, Artificial Sequence
  ENSG00000257398_12 (sequence is synthesized)
ccccttctcgtgagggaccaccaggaggcccctcgattccccagcaaaacacaggttttggagccagagtttctgagtttgaatgtttggtctgctactgaccaactctatgggcttggg

SEQ ID NO: 834561 - DNA, 120 bp, Artificial Sequence
  ENSG00000257398_13 (sequence is synthesized)
acaatcaagagggaaagaggggaagcagaaagagacggagacctgctatcttggccaacgatcccgtgaagagggaacggcggtctacgcagggaattcagcttcctatcaagcctagca

SEQ ID NO: 834562 - DNA, 120 bp, Artificial Sequence
  ENSG00000257398_14 (sequence is synthesized)
cacaaattagttttcctgtgacagcatgcagagcacttttccaagtccccagcacaggggttcgtagaagaggaatgactgaatcttcaggtgtctgtgggctgccaggaggacacttgg

SEQ ID NO: 834563 - DNA, 120 bp, Artificial Sequence
  ENSG00000257398_15 (sequence is synthesized)
ccaagaactatgtctcatcttgctttctgagacctcttcccctcttttacacttgttcctgtcttttgaataccaggaagcccaggttgccttctgaccttcagaggccctcacaccacc

SEQ ID NO: 834564 - DNA, 120 bp, Artificial Sequence
  ENSG00000257398_16 (sequence is synthesized)
ggtataaggaatgcacaaattagttttcctgtgacagcatgcagagcacttttccaagccccgtcacctgtccttagttcctctgaactatacagaggaacaaatcaatataaatgcaga

SEQ ID NO: 834565 - DNA, 120 bp, Artificial Sequence
  ENSG00000257398_17 (sequence is synthesized)
gtttaatgattcaaagtgacaatacagtcaacttctgagaaaatgatctatggaaaattgaaagtttaaaatattttcttcctcctaactttgaagaggacttgtttcatatcaaatctg

SEQ ID NO: 834566 - DNA, 120 bp, Artificial Sequence
  ENSG00000257398_18 (sequence is synthesized)
cctgttcatctgcctgtccgtccactcactgtttatccatggatcttggtgttagcttctgaggtggtaatgaattcaaaacccttctgttcctactctcatattaaaggttcaaaaatc

SEQ ID NO: 834567 - DNA, 120 bp, Artificial Sequence
  ENSG00000257398_19 (sequence is synthesized)
aaggaatgcacaaattagttttcctgtgacagcatgcagagcacttttccaaggagaatggcccgggagcagctcagtccatgcttgtcaaccacccacctccatatactccagccctgg

SEQ ID NO: 834568 - DNA, 120 bp, Artificial Sequence
  ENSG00000257398_20 (sequence is synthesized)
ccacatcccccaaggctccttttgtaggattcctcaacagcacaaatgcaccaactgtcactctatgttctcctagacctacaggaggagtgtgcaggtgataatccagaggaggaagtg

SEQ ID NO: 834569 - DNA, 120 bp, Artificial Sequence
  ENSG00000257398_21 (sequence is synthesized)
tcatctatcaaggtggagttcacagccaaaaaacaccgtacgtattctaagagcactcccttgctgacaacaaatctaagtgatgagaaaggaggaactctcttgcctgcttttgtctgg

SEQ ID NO: 834570 - DNA, 120 bp, Artificial Sequence
  ENSG00000257398_22 (sequence is synthesized)
agacccttcctggcttcagcttcctgataggagtgaggatctggggtgtggtgtgagaaacagaagtcccaataaagaactatgaccatccactatagtctctggaaacagccatatcat

SEQ ID NO: 834571 - DNA, 120 bp, Artificial Sequence
  ENSG00000256040_0 (sequence is synthesized)
aaactggactgtgcagtgtggttctgagtgcagtctttataaagcccagtgctgtactggtaaatataaacattttataacgtgaaaagcacaacgacacaatatgtccccttaatagct

SEQ ID NO: 834572 - DNA, 120 bp, Artificial Sequence
  ENSG00000256040_1 (sequence is synthesized)
ggaaaaaccaatataagccctcccactccctactaccactgattgccaccaaacaaataaacaaaatgcccaccccacccaacaacaacaataacacatcaagggggaaaatgtcatatt

SEQ ID NO: 834573 - DNA, 120 bp, Artificial Sequence
  ENSG00000256040_2 (sequence is synthesized)
tcctggacctaccacaatgtacagaaaataacagacagtgttatcaaatcccactctatgtcttctagggaaatctttatgtttgtgtctacctactgaggctgtagaataaacaatttc

SEQ ID NO: 834574 - DNA, 120 bp, Artificial Sequence
  ENSG00000256040_3 (sequence is synthesized)
ctttaggaaacataaaaataggttttttattcttagtttttaatcatgcatttttatttccttttaatctctttgtcttctattatctctatctgtacagctttgtcaccattttttttt

SEQ ID NO: 834575 - DNA, 120 bp, Artificial Sequence
  ENSG00000256040_4 (sequence is synthesized)
gtcaccatttttttttattttctcacttgaagtagttccagaaaaaaacacaaaacctcaaaactgttaacttgaccttataatttcctttctctttctttctttctttctttttctttc

SEQ ID NO: 834576 - DNA, 120 bp, Artificial Sequence
  ENSG00000256040_5 (sequence is synthesized)
cctataacaacaaattgacaattacaaccaagttaaatcgaacctggaagggaggtagctgaaatctgtctcaaagaattattttcaacaaatagtatttaagcattggccaggatggga

SEQ ID NO: 834577 - DNA, 120 bp, Artificial Sequence
  ENSG00000256040_6 (sequence is synthesized)
ataagaccaagagaaccgtctaggcagtgactcaatgtgttgaagccaggagtggcagctgataccctgcattttcaaagccctaccatctatgacaatctttcccttccttaacacccc

SEQ ID NO: 834578 - DNA, 120 bp, Artificial Sequence
  ENSG00000256040_7 (sequence is synthesized)
aattcaccatcaaaactcatttcccaaggactgtatttccttaaaaggttgttggcacagaatctgggggtaatgcaaatcctttgggtaggtagttaagattgtggcttggaaaagctt

SEQ ID NO: 834579 - DNA, 120 bp, Artificial Sequence
  ENSG00000256040_8 (sequence is synthesized)
ccctaaatagggcttagaggactgtccacctcatctttcatattttgctgctaacaatctaatacttcagatgcagaaccttcagtgttttagggcctttgagctgctgacacacaatag

SEQ ID NO: 834580 - DNA, 120 bp, Artificial Sequence
  ENSG00000256040_9 (sequence is synthesized)
tgcatcagagctgcctctcagtgctccggtcacctacacagaagatgactgaaggaatgaaatgacgagttaattcccaggaagaaaatgaaactgggaacaaatgcattgcccaaattg

SEQ ID NO: 834581 - DNA, 120 bp, Artificial Sequence
  ENSG00000256040_10 (sequence is synthesized)
ccatgtgggcacgaggttggccaccaatcaagtagcctcttttgcctaatatccttggcaaatataaatttgttagcaacaggtctgaatgaaagagactgggtgggtcttgattcagaa

SEQ ID NO: 834582 - DNA, 120 bp, Artificial Sequence
  ENSG00000256040_11 (sequence is synthesized)
gagctgaattcactctgtgagtctgaagatacaagtcagcctccaggaatctttgcttagctggatagtgtgaaaatagatgatgatgggagtgaagatagaaagaggataaggactgat

SEQ ID NO: 834583 - DNA, 120 bp, Artificial Sequence
  ENSG00000256040_12 (sequence is synthesized)
ttgagggaagctggtaaggttcttctgtggctcctgaaatcacatcattagtaatgtcatctttgggtcttcagagctttttgtattacctatgggtataattaagcaactgggagggtt

SEQ ID NO: 834584 - DNA, 120 bp, Artificial Sequence
  ENSG00000256040_13 (sequence is synthesized)
gatactgttacatttcttagcttgtaccttctaaggtagttaacaccacacaggctgataactcagggcaagagagaggcctggagagttgacaagagtgtgaagatactggagaggggt

SEQ ID NO: 834585 - DNA, 120 bp, Artificial Sequence
  ENSG00000256040_14 (sequence is synthesized)
tcaaaataggatcaattcttctaatactattcttatttcttgctaataatttgtccttgtaattatagtgaagtaatggtctggatataaatgagatatggttttgtgaggaagaaacat

SEQ ID NO: 834586 - DNA, 120 bp, Artificial Sequence
  ENSG00000256040_15 (sequence is synthesized)
agaggattattcttaacaactgtggcagccttgccaatatggaacccaatttcagagtttgtgaaatggtacaagtctcataaactatctcagcactgcatccgtatttgtgggcacctg

SEQ ID NO: 834587 - DNA, 120 bp, Artificial Sequence
  ENSG00000256040_16 (sequence is synthesized)
tgccaaaagcaccttgatatgtttcttagtgtaattggccagagatggccaatagatgtcttctcaagtgtttttgatcaccaggtcagtgctattgggagtgatataatatggtggttc

SEQ ID NO: 834588 - DNA, 120 bp, Artificial Sequence
  ENSG00000256040_17 (sequence is synthesized)
atttttggtctctttttttttttttttttaagtgctatgatagattaacaacacctgccttggatgcaggaattaggtggggctgcacacgtgcatggtattttctatccctatgctagg

SEQ ID NO: 834589 - DNA, 120 bp, Artificial Sequence
  ENSG00000256040_18 (sequence is synthesized)
atgctaggttttgtttctgttggctgtcttcactagacttgagatgacttgatttacagtaatccctatgtgatgtaactagtctagaccttcccttctccgcaattcccagctccaggt

SEQ ID NO: 834590 - DNA, 120 bp, Artificial Sequence
  ENSG00000256040_19 (sequence is synthesized)
ttcagaaagtatgccacactcaacccttctctccagttcatcctgtattaatttcttcccatattaattcaaagggagtggacaggtccctggctgaaaagaaataaagagatccccaaa

SEQ ID NO: 834591 - DNA, 84 bp, Artificial Sequence
  ENSG00000253679_0 (sequence is synthesized)
catcttgccatgctgtggcactgagcatgaagccatcaggccggaagtggagccgaaagttgagactagagactgggagactga

SEQ ID NO: 834592 - DNA, 82 bp, Artificial Sequence
  ENSG00000253679_1 (sequence is synthesized)
agtggctcacgtctgtaatcccagcactctgggagactgaggcgggcagatcacgagacggaagtttcactctttttgctca

SEQ ID NO: 834593 - DNA, 120 bp, Artificial Sequence
  ENSG00000253679_2 (sequence is synthesized)
cctgagtagctgagattacagacatgagacaccgcgcccggcctaaaatgtcattttcttcggtgccacggggaagtgaaatagtcctgaacaaaattatatatcctatctgaggttggg

SEQ ID NO: 834594 - DNA, 120 bp, Artificial Sequence
  ENSG00000253679_3 (sequence is synthesized)
atgaggcacagaggtgggaagaaaaagtccacagtcaagtacatgggctggacataaatgagagcaagactgaaatgctgagggggctgcagggagaggcacaagttacttgcatatagc

SEQ ID NO: 834595 - DNA, 120 bp, Artificial Sequence
  ENSG00000253679_4 (sequence is synthesized)
gcaaactgaagtcctcagggttttctatgtttttgttttccatgtggctaaaaattctgtgatttttgtatactactgcagaaatacagaatcaggtcttttatttcataacttactgac

SEQ ID NO: 834596 - DNA, 120 bp, Artificial Sequence
  ENSG00000253679_5 (sequence is synthesized)
actggcttaatttctttgcacagttctaccctatttccaaaaagctaaagagaggaatgtgctagaccaccctccctgcctcactatgccatagtctcttttgggcacacattatattcc

SEQ ID NO: 834597 - DNA, 120 bp, Artificial Sequence
  ENSG00000253679_6 (sequence is synthesized)
tatccatgacaagcagccagggcagaagagctctctacatatgtgccaccttgtctccaaaacctgctgtcccctttggacagactggcccatccctgaccactgttctcccctgtcttc

SEQ ID NO: 834598 - DNA, 120 bp, Artificial Sequence
  ENSG00000253679_7 (sequence is synthesized)
aattcctgatggcaacaagagagattctctgactgtttccaaggatgtcattctcagcctcacctccaagtttgattttatagaacaaccaataaatgtggtttcaccttccttgagttc

SEQ ID NO: 834599 - DNA, 120 bp, Artificial Sequence
  ENSG00000253678_0 (sequence is synthesized)
tctgtggctgatgggaggaccagggctgatgaaaggatggagccatgaagggcagccctcctgctgcgggtcgccctgctgctgccctgggcctgcagctcctggcacgtgggtctctgg

SEQ ID NO: 834600 - DNA, 120 bp, Artificial Sequence
  ENSG00000253678_1 (sequence is synthesized)
gactccttgtggatgtgcctctccagggccctccatcctcggtgggcaggagactcccctagggagcttgctctcaagttctcaatagcatacacacggctgccacaaatacacagaagt

SEQ ID NO: 834601 - DNA, 120 bp, Artificial Sequence
  ENSG00000253678_2 (sequence is synthesized)
tagctctgtgagacaggcctatttcagataagaaaaatgaggatcagagaagctgaaagtcttgcggaggacaccccagcaaggcgaattacaggcccagaattctaacgagggcatccg

SEQ ID NO: 834602 - DNA, 120 bp, Artificial Sequence
  ENSG00000253678_3 (sequence is synthesized)
gactctgggattacaaccgccttctgcgtcccaggaaaaacctcctctagtcatgcccagatctgcctggtctaaaaaccacaaaaatcgcaggactttccactgagtcaatgcttgtca

SEQ ID NO: 834603 - DNA, 120 bp, Artificial Sequence
  ENSG00000253678_4 (sequence is synthesized)
aagtaaattcatggccatcggacgatattaattagacatacacggcatcaggaccttcacagccaccacagttctcaatagcatacacacggctgccacaaatacacagaagttttggga

SEQ ID NO: 834604 - DNA, 120 bp, Artificial Sequence
  ENSG00000253678_5 (sequence is synthesized)
aaatttaagatccaaaccgtaccactgttgtacctgacatccttcatgcacctccctcatcttcagagaaacaattctaattcttcactttaaagcaaggtagtgtgactttccaatgac

SEQ ID NO: 834605 - DNA, 120 bp, Artificial Sequence
  ENSG00000253678_6 (sequence is synthesized)
ttcagggcattcggtaaagaacagcttggttcaaagtaagttgatgagcacagcaatttcttcataatggcaacctggttaaaaaaaaataaaataaacccatacctggctttgggaagg

SEQ ID NO: 834606 - DNA, 120 bp, Artificial Sequence
  ENSG00000253678_7 (sequence is synthesized)
aagttgtttgttttaatgttttgtatttggacttgcatcacatagagtggtgatttttttcaacattttgtgtgtcacttaacatttttaaaaataaagtcttacaagctgtgaaacaat

SEQ ID NO: 834607 - DNA, 120 bp, Artificial Sequence
  ENSG00000253678_8 (sequence is synthesized)
gtgaacatcctgatcctatctctgtaaaatatgatgggtgcacattgatagacgagggtgtggaaagttacatctgaaggtggcaacaggagttgcctctgcatgtgtggaattagaagg

SEQ ID NO: 834608 - DNA, 120 bp, Artificial Sequence
  ENSG00000253678_9 (sequence is synthesized)
attgttgatttcatttatttatctgaatatacgatagagaaagttcaagtagcacagatggctgcacaatgaagaggaatttcacctcttacactcattctcagtccactcgccaaaggc

SEQ ID NO: 834609 - DNA, 120 bp, Artificial Sequence
  ENSG00000253678_10 (sequence is synthesized)
aattacatggatatgtattcttcctgaaatattcttttcatacacaatcgtgtataaaatcgtgtatgaaaaaaagtctgctcatcatgtagtgtgtgtttatatataaatgtacttatt

SEQ ID NO: 834610 - DNA, 120 bp, Artificial Sequence
  ENSG00000253678_11 (sequence is synthesized)
gagccgtcctgcaggagagatgttacttttaccatcaatgtaaaaactgagccttaaactgcttcagaaactgtttagattcattcaactgaatattcacactggagtttgaatcaaggc

SEQ ID NO: 834611 - DNA, 120 bp, Artificial Sequence
  ENSG00000253673_0 (sequence is synthesized)
gcacgtgtgtgttttgtgtattattgtcaggaggcagggatggtcatggaggtcccaccccaaggctgcaacctacaaatgacacgtctcagccctggtctttggccttgacttacacca

SEQ ID NO: 834612 - DNA, 120 bp, Artificial Sequence
  ENSG00000253673_1 (sequence is synthesized)
gatcagtgggaaaaagaaacatgtaggtaaagttgatccttgaacaacatgggtttgaactgaacgtgtccactgatttgtggattttcttccacctctgtcattcctgagacagcaaga

SEQ ID NO: 834613 - DNA, 120 bp, Artificial Sequence
  ENSG00000253673_2 (sequence is synthesized)
tacttaatgaagagtaaatgtattctttcttccttatgcttttctgaaaaacattttaacatctaaaatatgtgttaattggctatattattgataagacttctctgttcagtaggctat

SEQ ID NO: 834614 - DNA, 120 bp, Artificial Sequence
  ENSG00000253673_3 (sequence is synthesized)
tagtagttaagtttttggtagttaagtcaaaagttatatgcagatttttgacatgtaggggagaggagattggctcccctaatccctgcattgttcaagagttaactgcaattgaaaata

SEQ ID NO: 834615 - DNA, 120 bp, Artificial Sequence
  ENSG00000253673_4 (sequence is synthesized)
aaagcaatgctaaattgttacacaagtataagcaactagaataattgttttttctcctgatgactactctgatggttttcaaataataaattcaataaaatttttttatttcaggtgccc

SEQ ID NO: 834616 - DNA, 120 bp, Artificial Sequence
  ENSG00000253672_0 (sequence is synthesized)
tatgtctaggggtcagaggaacatgttagagtgaagccaagttttaaaaggaaggttcaaatatgcactaggttttgcccaggatccaggaggaagcattgtgtataaagaagggagaat

SEQ ID NO: 834617 - DNA, 120 bp, Artificial Sequence
  ENSG00000253672_1 (sequence is synthesized)
atcctgagtgggtctgacttaaccaggtgggctggtaaaagagacaaaaggtaacaacagattctcttgctggagttgaaaaagtcagttactatgttttaagatgagaagtccacatgg

SEQ ID NO: 834618 - DNA, 120 bp, Artificial Sequence
  ENSG00000253672_2 (sequence is synthesized)
gaattctttcaataaccagtgagctttgaagggatcttgaatttcagatgaaatcacatccttgggaaacattttgattttagcctagtgagacctggaggacctggctaacccataccc

SEQ ID NO: 834619 - DNA, 120 bp, Artificial Sequence
  ENSG00000253672_3 (sequence is synthesized)
agactcctgacccaaggaatctgtgagataataaatctgtgttgttttagtgactcagtttgtggtggtttgttctgtgggaatagaaaatgaatacacatactgtttcttgtctacccc

SEQ ID NO: 834620 - DNA, 120 bp, Artificial Sequence
  ENSG00000253671_0 (sequence is synthesized)
ggcatctagaacactgagaaatccaggatggacacttaacactaccaaagattgatctattttggagttagttctttagatcagaggtccccaaccccaggactgcggactgccactggt

SEQ ID NO: 834621 - DNA, 120 bp, Artificial Sequence
  ENSG00000253671_1 (sequence is synthesized)
ctttggcctgtcaggcacccggccacacagctggagtgtgaaaaaaaaggaaaaaactgaaaatctcaagaggattccaggaaatcaaaacaatgaattattgaatcaagaatttgaaag

SEQ ID NO: 834622 - DNA, 120 bp, Artificial Sequence
  ENSG00000253671_2 (sequence is synthesized)
gataacgggggagctatgtatatatgaggggagggatatattggaaatctctgtatcttcctctcaatcttgctgtgatcctaaaactgctctaaaaaatattttgagaaggaataatga

SEQ ID NO: 834623 - DNA, 120 bp, Artificial Sequence
  ENSG00000253671_3 (sequence is synthesized)
tgtggtaaacatgttctgttatttaaaaagagagacttttcatagccgcctccctccccctctacacacacacagagtcctgtccgtcttcattcccttactcaataatttgtacagaca

SEQ ID NO: 834624 - DNA, 120 bp, Artificial Sequence
  ENSG00000253671_4 (sequence is synthesized)
cagccactgggctccagtaatcctaaagtttctagaaaatcaagcacagaaaaaggttaaaaccctgagggaataaaagaattcctttgcatccattgcatttctcaggaagtgaactaa

SEQ ID NO: 834625 - DNA, 120 bp, Artificial Sequence
  ENSG00000253671_5 (sequence is synthesized)
acacgtggggatgacaattcaagatggaattgtgtggggacacagagccaaaccatatcaagtacctacaaaattatggtgactcttcactaatttgcaaactgattatctgcaaatctt

SEQ ID NO: 834626 - DNA, 120 bp, Artificial Sequence
  ENSG00000253671_6 (sequence is synthesized)
aaatagggaataaaacacaaaaatatcattatccctccagaactgaggacgcaaattggatttagaagacttagctttgacacctagatatgttttcattgatttgacctaacttgatct

SEQ ID NO: 834627 - DNA, 120 bp, Artificial Sequence
  ENSG00000253671_7 (sequence is synthesized)
gcccggcaatcgcggcttattttctgagatggtcagactctgttttctttccttgctttcatctggaccccgtctttccttgatctctatcgtcccagttccgtacaatgagcattcttt

SEQ ID NO: 834628 - DNA, 120 bp, Artificial Sequence
  ENSG00000253671_8 (sequence is synthesized)
tccaagaagtttcttctctgtgcagtgcttgtccaggagtggaaatttgggtggttagtttggaacattcattgtgcccgtcagacactttgcattcccctgactttggagtgtgcaaaa

SEQ ID NO: 834629 - DNA, 120 bp, Artificial Sequence
  ENSG00000253671_9 (sequence is synthesized)
ctttttccagtttcagctgctgttcccaagtggaacctccaagctttccagcaattgcctgcttgctattttgagattatcagatttatcagagtctcatgaattccctccactttctat

SEQ ID NO: 834630 - DNA, 120 bp, Artificial Sequence
  ENSG00000253671_10 (sequence is synthesized)
tatacagttgctgataccacctagcccttgtatctgtctatggctttcctcaattccttatgttctagggttcgtggagacacttcatcacctaattttgttatagatgttgtccacggg

SEQ ID NO: 834631 - DNA, 120 bp, Artificial Sequence
  ENSG00000253671_11 (sequence is synthesized)
ttttttattttatcttttgtcctttgtctatatttgtggcagaattttaaggttaaaaaatgatgacccccggatacaggtgaccattgtaagggtacaaggaaaatatcccctttgtcc

SEQ ID NO: 834632 - DNA, 120 bp, Artificial Sequence
  ENSG00000253671_12 (sequence is synthesized)
tctgaagatttgcttaaaaatcaactcataaaagtcagattaattggagtaaatgtatataaattttattaacgtgtacatgagagcctttagaataaagacccaaagatatagagaaaa

SEQ ID NO: 834633 - DNA, 120 bp, Artificial Sequence
  ENSG00000253671_13 (sequence is synthesized)
agacagagagggcaggggaaactgccatttttaagctatcagatcttgtcagaactccgtcactatcacgagaagagcatgagggaaactgcccccatgacccaatcacctcccaccatc

SEQ ID NO: 834634 - DNA, 120 bp, Artificial Sequence
  ENSG00000253671_14 (sequence is synthesized)
aataaaagccctaagagagcttccactgccagcagccttccaatttgctctgttcccccttgggccctgttgattgggcccagtgatcacctaaaaagagtgcaaagagtcaggaaggct

SEQ ID NO: 834635 - DNA, 120 bp, Artificial Sequence
  ENSG00000253671_15 (sequence is synthesized)
tgtgggttcagtctttctgtgctaacaccaggccacatccaggcctgatgtactaactgatctccagttcattccttttgcaatttttggccttgattcatagttcctgattcttgattg

SEQ ID NO: 834636 - DNA, 120 bp, Artificial Sequence
  ENSG00000253671_16 (sequence is synthesized)
gctctgaaatcctccccattttcaaaagggatgcagtcaagcaggccaaagcgctccatgttagctaacaaatgtttgcaaatcataataatgtaggaagagaaccataaactaaatgaa

SEQ ID NO: 834637 - DNA, 120 bp, Artificial Sequence
  ENSG00000253671_17 (sequence is synthesized)
caacaggcattagccctcatgctgtcacataagcattcctcaaaatataatcatgcttctaaacatgggctggcaattcaggaaagggccactgaaaatattagcctcgttcttttctct

SEQ ID NO: 834638 - DNA, 120 bp, Artificial Sequence
  ENSG00000253671_18 (sequence is synthesized)
gtagagtgagcacagactattcctaaaccacattgcagtatgccaacattgtaaattaatgcctgattggttacctagaagtaagacaatcttacttttaggcatctagaacactgagaa

SEQ ID NO: 834639 - DNA, 120 bp, Artificial Sequence
  ENSG00000253671_19 (sequence is synthesized)
ggcatctagaacactgagaaatccaggatggacacttaacactaccaaagattgatctattttgggtaagtatacttctgatctctttttgaggactgtattagtccattttcacactgc

SEQ ID NO: 834640 - DNA, 84 bp, Artificial Sequence
  ENSG00000253671_20 (sequence is synthesized)
gttatggcagaaggcaagggagaagcaggtaccttctttacaaggcggcagaagagacagagagggcaggggaaactgccattt

SEQ ID NO: 834641 - DNA, 120 bp, Artificial Sequence
  ENSG00000253671_21 (sequence is synthesized)
ttagtacagaaaccaaggtgaatgacctttaaaaaacatattagactgttgacgtgtcttctatgttgtactctaggtaaaaacgataaaccaggaaaaagaaagtaaaattcaacctta

SEQ ID NO: 834642 - DNA, 120 bp, Artificial Sequence
  ENSG00000253671_22 (sequence is synthesized)
ggctcatggatccagagtggataattatgagtctgtagtatctacatgcatgtgatgaggttcaaggacaataaccataaagcaaagacttaaaaggttttatcattagaataattgtaa

SEQ ID NO: 834643 - DNA, 120 bp, Artificial Sequence
  ENSG00000253671_23 (sequence is synthesized)
ttcacttgatctctcaatgtaacaatacttcggtctactgtctcaagccattattatgtcttacactcagcatattggtttgtctaccattaaatatttattttctacagtgctttctgg

SEQ ID NO: 834644 - DNA, 120 bp, Artificial Sequence
  ENSG00000253671_24 (sequence is synthesized)
aaggcaaacaaagcagccactctgctactttatattgattcctgagttgtccttcggaaacgctttcaggaagtttaataggtttgaaagatatttagacctgtgactggcaaatatact

SEQ ID NO: 834645 - DNA, 120 bp, Artificial Sequence
  ENSG00000253671_25 (sequence is synthesized)
tccttctttttatttcaataagagagtactagaacttagatctttattgtttaatctagtcagtgctgtcattgtcaatcaagttctcaaatgacacttgtcctgagctgtaactgatct

SEQ ID NO: 834646 - DNA, 120 bp, Artificial Sequence
  ENSG00000253671_26 (sequence is synthesized)
attcagaagaatatgaaaatagtaaagacggcaactatgcatgtttttaccggacacgattttaattgctttaaaatgaagttatgcaaccaatgaggaatggagcttttggagtggcct

SEQ ID NO: 834647 - DNA, 120 bp, Artificial Sequence
  ENSG00000253671_27 (sequence is synthesized)
gaagctaaaggtttcaggtgtatttttgctttctttgaagaaagaaccaaatcattttatttaataaaaaggccatttatcaagaatttcttaaagctgttttaaacctgagtttgcaat

SEQ ID NO: 834648 - DNA, 120 bp, Artificial Sequence
  ENSG00000253671_28 (sequence is synthesized)
ttatagaatatgttcaagcagcctcagtgcccttttaattggatggttttcacagatttatccaatttgagatttatccagtgagaattccctttgttcaagtatatatgtcttctcttc

SEQ ID NO: 834649 - DNA, 120 bp, Artificial Sequence
  ENSG00000253671_29 (sequence is synthesized)
cataaagcagattcaaatgaaagagtgcaatctgatatatcagacatgtcagttatacatttgatgtggtaaatttataagagaggccaattattgttatgaaaaaatacaatgaaatac

SEQ ID NO: 834650 - DNA, 120 bp, Artificial Sequence
  ENSG00000253671_30 (sequence is synthesized)
acaatgaaatacatgatagtcatttactgtttttataactaatctaaaagtatttactaaaaagaaactatttcttttcatatgtactttactttttactttaacccttcatatgtcctt

SEQ ID NO: 834651 - DNA, 120 bp, Artificial Sequence
  ENSG00000253675_0 (sequence is synthesized)
taaagaaaggtgtgaaaagcaaatttattaacaaatttaacactgcttgcatctagaagataggatttgaaattgtgttgctttctcaagctgattacatcaaagtatattagaaaacaa

SEQ ID NO: 834652 - DNA, 84 bp, Artificial Sequence
  ENSG00000253675_1 (sequence is synthesized)
acaaggactgtggatccctggagcccaggaattcgacaccagcctggataatatgttgaaaccctgtctctacaaaaaatacaa

SEQ ID NO: 834653 - DNA, 90 bp, Artificial Sequence
  ENSG00000253675_2 (sequence is synthesized)
atgtcttagccttgtgtgggggtgtacacttgtagtgccagctactttggaggctgagagctgggaggatcacttgagcctgggaagtcg

SEQ ID NO: 834654 - DNA, 120 bp, Artificial Sequence
  ENSG00000253675_3 (sequence is synthesized)
ggttgatatagtcttgctgggtcaggaggctggccttgcatcctcgaaccaggccctccaggtagccatggtccacgttgaagtacagctccgcaccttcgagcatgggggaagagattg

SEQ ID NO: 834655 - DNA, 120 bp, Artificial Sequence
  ENSG00000253674_0 (sequence is synthesized)
tggcctggtgaagccctcacagaccctctcccttacctgcgctgtgtctgtgttccccatgataacgaggtcttcctgctgaagctggatccatcagccccccagggaagggaatggagt

SEQ ID NO: 834656 - DNA, 120 bp, Artificial Sequence
  ENSG00000253674_1 (sequence is synthesized)
acacattaccacccactcctcaagtgtccagtcaccatccccagatccgtgtccaaaaaagcagttcttcctacagctgagctacatgagcaacaagcacatagccatgtatttttaagc

SEQ ID NO: 834657 - DNA, 87 bp, Artificial Sequence
  ENSG00000230728_0 (sequence is synthesized)
gttctaaaaatgacagctccatgtctgaaatgttggagcctctgaaccacccctggtttcacctcccctgtaacatgcaatggtatg

SEQ ID NO: 834658 - DNA, 120 bp, Artificial Sequence
  ENSG00000230728_1 (sequence is synthesized)
cacccctggtttcacctcccctgtaacatgcaatggtatgggagtggggagagtatcagagtaacccacataacacagcctgaggcacacacttccctgggccatttgctgttctaagca

SEQ ID NO: 834659 - DNA, 120 bp, Artificial Sequence
  ENSG00000230728_2 (sequence is synthesized)
ctctgccggggtgcagggtgaagggctcctccattcacacaggtacctggagtagccaccatgcccccacctcatgcctgtgttcctcagtcctgagcctcaagggctctgcctttctgc

SEQ ID NO: 834660 - DNA, 120 bp, Artificial Sequence
  ENSG00000230728_3 (sequence is synthesized)
cctctgccctccagccctccagccctgccctgtgagaagcttcgaagtctcctcctggacccctcttacaaggtccctctgcctgcttttgtcagctcctgttagctctgcagcccagat

SEQ ID NO: 834661 - DNA, 120 bp, Artificial Sequence
  ENSG00000230728_4 (sequence is synthesized)
ctttccaagcaaccctcgctcactgccctcagcacacagcaactcctttgctaaagttcgaggccattcacaacctgatcccaacgttcttccaatcttttatctttttttaaaatttta

SEQ ID NO: 834662 - DNA, 120 bp, Artificial Sequence
  ENSG00000230729_0 (sequence is synthesized)
gacaggggccagggctggagttgggactggattcagagagagagtcaacgtcggcagagcgagaatggcaggcccagcagaggatgacccagagcagcagcagcaagaagcccacgagac

SEQ ID NO: 834663 - DNA, 120 bp, Artificial Sequence
  ENSG00000230729_1 (sequence is synthesized)
cgttgcagacgatggcgatgagggccccctgggagatggctgcccccatgacaggcagcaccctcagaccagcacagacagtggagctgcctcaatggactccagccagcccgaccagga

SEQ ID NO: 834664 - DNA, 120 bp, Artificial Sequence
  ENSG00000230729_2 (sequence is synthesized)
aactttgtggaggccctggcaggcatgtgcaggctctgtgcgtccagggctgtgtgcctctatgtggggctgcctctctgggtcaggccagtgattgtcacctattctgatccggccgtc

SEQ ID NO: 834665 - DNA, 120 bp, Artificial Sequence
  ENSG00000230729_3 (sequence is synthesized)
ttctcatcccgctctacatgctctccttggaggatcacatccctgaagctatatcatgaagactcccagtgctcccaagtctagccttaacttctctctggaatcctagactcatataac

SEQ ID NO: 834666 - DNA, 120 bp, Artificial Sequence
  ENSG00000230729_4 (sequence is synthesized)
taagtgcctactgtaatcggggcagtattgattcctggttcacttactaactttgtgatcttgagcaagttactaaatctctcttagcctcagcttcctcatctgtaaaatggttgtaat

SEQ ID NO: 834667 - DNA, 69 bp, Artificial Sequence
  ENSG00000230724_0 (sequence is synthesized)
gcctctacagtcccaacgtctgcctcacagcagattcttcacgcccagcatctacctcactgtggaccc

SEQ ID NO: 834668 - DNA, 64 bp, Artificial Sequence
  ENSG00000230724_1 (sequence is synthesized)
gcctcccgtcagcctctacagtcccaacgtctgcctcacagcagattcttcacgcccagcatct

SEQ ID NO: 834669 - DNA, 67 bp, Artificial Sequence
  ENSG00000230724_2 (sequence is synthesized)
tcacactggcctctctacatccagcttatgcctcacggtggcctctccaagactctctagtcccaac

SEQ ID NO: 834670 - DNA, 120 bp, Artificial Sequence
  ENSG00000230724_3 (sequence is synthesized)
aagtcggcctctccagacccacttgcaccctccgtgcattctctccgggcccagctcttcttcctgtcggcctccctgggcccagctccgtcctctcgacggcctctccaggtgcaaaac

SEQ ID NO: 834671 - DNA, 120 bp, Artificial Sequence
  ENSG00000230725_0 (sequence is synthesized)
gcacggggatgggcggagaaccgagtgacgacagcaaagagccagggggagccaggaaaagctcgaaaatcagcgtaacgctgttggagatgagagggcacagcacaattttgagagcca

SEQ ID NO: 834672 - DNA, 120 bp, Artificial Sequence
  ENSG00000230725_1 (sequence is synthesized)
aacaaaggcggggcacagagctgttgcctcgagatgtgtggcctcagaaggtcttgtcgaggcgagtgatgaaagggaggaggttcccgaggatactggagccggaagacgcggcgaggg

SEQ ID NO: 834673 - DNA, 120 bp, Artificial Sequence
  ENSG00000230725_2 (sequence is synthesized)
tccgggattcaaggagattcaaaacccgtgtcactgctgccatcttcctagaatccctttaaatcctcatggatttgctgacattgggagcatcctgaaagagtccccatgctagggtgg

SEQ ID NO: 834674 - DNA, 120 bp, Artificial Sequence
  ENSG00000230725_3 (sequence is synthesized)
gaggattatgtcatcggggaataaatgggaaattctcaaggtactttgctccagtaatcaggactttatttatctctaagctaaaagaggggattgacttctttaatgatgatcagaaaa

SEQ ID NO: 834675 - DNA, 120 bp, Artificial Sequence
  ENSG00000230725_4 (sequence is synthesized)
tgcttttaggaagattcctttcctattaaacaatttcttaaagttgcagtaaatgttgtgtggcttgtctatgcccaaggcttggcagcacactttcctttgtcttcaaaaccatgggaa

SEQ ID NO: 834676 - DNA, 120 bp, Artificial Sequence
  ENSG00000230725_5 (sequence is synthesized)
agaatgtcacaggagtcttggaggaaaaataattacaaagaggaaaaggttgatcaagggccagttaatgttactgatgacatatcggtaaggttctccaggcccaattctttttggggg

SEQ ID NO: 834677 - DNA, 120 bp, Artificial Sequence
  ENSG00000230725_6 (sequence is synthesized)
actttggctccacaagcaaatgccacttggtgatatggctcccagcactggccacctcagtgttccctacactactggagaaatttaggcctaaattaaaatcagagtcatgcaacttga

SEQ ID NO: 834678 - DNA, 120 bp, Artificial Sequence
  ENSG00000230725_7 (sequence is synthesized)
cacaagcaaagcctcgactgaaatcttctctaacaattggctggtcactcctgagcgtaatctaccccttcagaacactggggatgaatttagagacatcgaagcctcctgatgagaaat

SEQ ID NO: 834679 - DNA, 120 bp, Artificial Sequence
  ENSG00000230725_8 (sequence is synthesized)
acgtgtccactcaccgggagaactgaaataccaggagatttctacacaaatctcacagagtccttctggcgtcctaggggtttgctcacatataagggactttctggtaggaagagagtc

SEQ ID NO: 834680 - DNA, 120 bp, Artificial Sequence
  ENSG00000230725_9 (sequence is synthesized)
tctttacattctttattatatgatcctggtggctttgtagagagatggtacagctgacagatcatgtcctgtggggccagggagttgtgtgtgtgtgaatgctctgtgaacttgggcaaa

SEQ ID NO: 834681 - DNA, 120 bp, Artificial Sequence
  ENSG00000230725_10 (sequence is synthesized)
ctacttagcctctctgagccttagctgcatcagctttgaaaaacaggatgataaaatggagtcaccttatttgacttttataaatacacttacacaattacacaagttgtggggatggga

SEQ ID NO: 834682 - DNA, 120 bp, Artificial Sequence
  ENSG00000230725_11 (sequence is synthesized)
agagagagttggggaaagagaaatgagagagagagagagagagaatgaatgataaacaatttaaacaacagtggggtgtagaccaacgcccagcctggcaagggtgagcccagagagcct

SEQ ID NO: 834683 - DNA, 120 bp, Artificial Sequence
  ENSG00000230725_12 (sequence is synthesized)
tccctcctggctattggcagcctccgcatggaagcctgtcgttgacttcttaatgatgagagatgttctgggggcactccaggattcttggacatgggatcgtcttcacagctgtgtcta

SEQ ID NO: 834684 - DNA, 120 bp, Artificial Sequence
  ENSG00000230725_13 (sequence is synthesized)
ttgaaagctgaagtttcagtctcccctgccccctgccccctggagtggcttcccaggggaaattcaagggcacctgtgactgcatggctgctttcctttcctttactcaatgccgtcctt

SEQ ID NO: 834685 - DNA, 120 bp, Artificial Sequence
  ENSG00000230725_14 (sequence is synthesized)
tggtgacagccgtgtctcatgccaggatacatgaggtgctctatagtagtatgttttccctcctgggaggtaattttatttaaatgtgaagtcaaaaggatcactaaatagaaccatgag

SEQ ID NO: 834686 - DNA, 120 bp, Artificial Sequence
  ENSG00000230725_15 (sequence is synthesized)
tggccaccaagccctccagggcagtgctatttgtaatagtcccaaatgggagagatggcaaacgcccgccaatggggcagcatggataaatggatgctgcacagcaacggcgatgagtga

SEQ ID NO: 834687 - DNA, 120 bp, Artificial Sequence
  ENSG00000230725_16 (sequence is synthesized)
gccccagcacccgtgagctcaccagtgtaatattgggtggaagaagccaggaggaagggcattcacattctgtgattccagctacactatgtttaaatatgggcagagctaggctgtggt

SEQ ID NO: 834688 - DNA, 120 bp, Artificial Sequence
  ENSG00000230725_17 (sequence is synthesized)
gctggaagccaggacagtgggatccttgcatgggggtgatggtgctggtaggttctggtaatttcctcttcttgatctgggtgtaaacattttgtgaaaattcaatgagctgtacattta

SEQ ID NO: 834689 - DNA, 120 bp, Artificial Sequence
  ENSG00000230725_18 (sequence is synthesized)
tgactggtacatttatgactttgtatgaatattatactttcataaaactactttaaaatatgattgtgaaccttttttcacctattttctgccaattagcaccgaattgctcactaacta

SEQ ID NO: 834690 - DNA, 120 bp, Artificial Sequence
  ENSG00000230725_19 (sequence is synthesized)
atgagtggtgctggttttgacttgcttgctacactgtcttgagacagatagggttttctgtgctttgtatgaccccctctggaaccagggtgggactgggaacactcggaaaacatgtgc

SEQ ID NO: 834691 - DNA, 120 bp, Artificial Sequence
  ENSG00000230725_20 (sequence is synthesized)
tgacagatgctgggcatccccgtgttggtggaggcatgctcattcctcagcaaaatacccatatggggtgttggcaggaaagaggacagaaaaggacaaagtatttgtctctgctagcgt

SEQ ID NO: 834692 - DNA, 120 bp, Artificial Sequence
  ENSG00000230725_21 (sequence is synthesized)
tcctggagctgtctcaccttggccaagcccccgcccagtcctctcctaacgtggacagactagggggcagaaactagtcagccaaagaatttccaagctaggggttgatgaatgcttgga

SEQ ID NO: 834693 - DNA, 120 bp, Artificial Sequence
  ENSG00000230725_22 (sequence is synthesized)
taatttgcccatgaacacgttggattcttcttcacttgccatcacggggggataagtaccccagtttttttttggagagaattgagggactgtgccattgcagtgtggatttcaagagat

SEQ ID NO: 834694 - DNA, 120 bp, Artificial Sequence
  ENSG00000230725_23 (sequence is synthesized)
tttaaacggaaggcagagtaacagtgtggtttgggaagctctaaagacagttgtcctggtgcggtttcttccataaaagagtggggacgccatggacctgctcaccaaattccagtcccg

SEQ ID NO: 834695 - DNA, 120 bp, Artificial Sequence
  ENSG00000230725_24 (sequence is synthesized)
acacagttctgtgaggcactctccacatcagggcagacgggcaggaggagtttacacagcgatctgggggccattagagcactgagggatccattgctgtctcttgtttctgtttcccac

SEQ ID NO: 834696 - DNA, 120 bp, Artificial Sequence
  ENSG00000230725_25 (sequence is synthesized)
actgtgctgggtgctgggaacatgacgatgaacttgaaggaaataatgtgtacggtggttcatttccaagacatagtgccttgaatcagtttaggtcagcaaactacagaagaaacagga

SEQ ID NO: 834697 - DNA, 89 bp, Artificial Sequence
  ENSG00000230725_26 (sequence is synthesized)
gagagctgatgcctgtttgttgcccctcacccccttagttgcccttaccagaaccaaaggagtttagtctaagatgaaagtttactagc

SEQ ID NO: 834698 - DNA, 82 bp, Artificial Sequence
  ENSG00000230725_27 (sequence is synthesized)
actttgtctgttcttatcagcctgcccagctacttaggtcataagtgaaatacttgaagagcccctgagctaactaggattg

SEQ ID NO: 834699 - DNA, 120 bp, Artificial Sequence
  ENSG00000230725_28 (sequence is synthesized)
ggccggggtggtgggcgccccggggtggggggaggcgggagtgctctcccaggtgggcttggaggggccccggcccagacacccagggccagccggcgcacccgcatgatgttctgaaag

SEQ ID NO: 834700 - DNA, 120 bp, Artificial Sequence
  ENSG00000230725_29 (sequence is synthesized)
cgcacccgcatgatgttctgaaagcgtccccgcagcctggtcggtggctgggggaagctgggcgtggttagcctggcagcctggctttgcggactcacctccgggcctcgtcctccagtg

SEQ ID NO: 834701 - DNA, 120 bp, Artificial Sequence
  ENSG00000230725_30 (sequence is synthesized)
ccttccctccccaactgaggggcttggctgcacccgcacgcggttttccaggaacagcgatcccggagtggactctcccgcatccagggggacgtcagcactctcggcttccccatgggg

SEQ ID NO: 834702 - DNA, 120 bp, Artificial Sequence
  ENSG00000230725_31 (sequence is synthesized)
acacactcactgaggtcacgcgacccaaaaccaaatgacccaccaccacgacagccgcatcgtttttagtggtttgtccgggaggttttagagtgagagaatgaagggggtgaggcctga

SEQ ID NO: 834703 - DNA, 120 bp, Artificial Sequence
  ENSG00000230725_32 (sequence is synthesized)
ggtacaatgagaaatgatggttctccccactccagaaaaaatcaaatcagattgtgaatttattccctgacattaacacacggcattacaggagcatgtacatcacatggtcaatttatt

SEQ ID NO: 834704 - DNA, 120 bp, Artificial Sequence
  ENSG00000230725_33 (sequence is synthesized)
ggcatgaggattatgtcatcggggaataaatgggaaattctcaaggtggcccaggcctgtaggcttccagtgagaaaactggagaccacactcacccgtcccactgccgtttctttgggg

SEQ ID NO: 834705 - DNA, 120 bp, Artificial Sequence
  ENSG00000230725_34 (sequence is synthesized)
ctgcctgtgatactgggttattccccttgccgagttccactgtgcttaccctgttggaatatgatggtggacttgccagaggagatgaccatgattttcaggaacagcagcccctccttc

SEQ ID NO: 834706 - DNA, 120 bp, Artificial Sequence
  ENSG00000230725_35 (sequence is synthesized)
ctggttgaggcagccagcaggcactcctatccatgagccacagctcagctaaggcaatccagtccagctgcatgccctctctctgcttctggggaggtaggaaggaccaggggcattcat

SEQ ID NO: 834707 - DNA, 120 bp, Artificial Sequence
  ENSG00000230725_36 (sequence is synthesized)
gcttgtttctagggggccctaactggatctctggatcaagacctactcaggggagaaagactactctgggttccatgttaggactgacgggtgcatcttaactgagatgcagacagtgga

SEQ ID NO: 834708 - DNA, 120 bp, Artificial Sequence
  ENSG00000230725_37 (sequence is synthesized)
ggttttctaagaggcttccgagatttgaaaaacggtggctaatgatgacaacagcaacagcactgagcacagaaaactccacaggcctgggctcggctcatcgcacagcctccatctctg

SEQ ID NO: 834709 - DNA, 120 bp, Artificial Sequence
  ENSG00000230725_38 (sequence is synthesized)
atagcaaagatgtgcaggagggaagttagaatggtctcaaataactgtgtttatagtttactgttgcaaatttcacaaaaacatatgaccacatgaacacattccaagggcccctcctaa

SEQ ID NO: 834710 - DNA, 120 bp, Artificial Sequence
  ENSG00000230725_39 (sequence is synthesized)
gaccttggaaagggcagctgtccaccattttgataaagattaagtagatcagggtgtatccataagatgtaatggtatgcagccatggaaaataatctttctgaatttaaaaataatctt

SEQ ID NO: 834711 - DNA, 120 bp, Artificial Sequence
  ENSG00000230725_40 (sequence is synthesized)
ttcataataatgaatgtgcattgtagaaaattagaaaatataggtaataaagcataaagaaaataagaaaataacaatatttctgccacccagaggttatcactaaatgtccttccacat

SEQ ID NO: 834712 - DNA, 120 bp, Artificial Sequence
  ENSG00000230725_41 (sequence is synthesized)
tttgacatactttgacaatgttgcatgcaaagtgaaaaaaaagtcagttcaagttgcacctacaatgtgatattgggttgtgaaattatgtatgttttgaaaagtattaaaatacaatag

SEQ ID NO: 834713 - DNA, 120 bp, Artificial Sequence
  ENSG00000230725_42 (sequence is synthesized)
accaaaaatgttgacagggcttatttgtggatcataggcttagcggtgattgttattttcttatttcctatattttccaccacaggaatgtagacttttataatcattaaaaatgaatta

SEQ ID NO: 834714 - DNA, 120 bp, Artificial Sequence
  ENSG00000230725_43 (sequence is synthesized)
tttaaaaaagtaattatggtgatttcagaagtgaggtttggttgtgagtgtgtttgaaatcggatgaacagcttattttgtgtctgctgattatgtgtctgcattatgttgtttcaggtt

SEQ ID NO: 834715 - DNA, 120 bp, Artificial Sequence
  ENSG00000230720_0 (sequence is synthesized)
acccccaggattagatcagaaagatggacctgccaggggaaagcgtcagaggcttctgttcctaccatcagtaccatggatgcgctattaacagaccagcgtcccttgtttctaatactg

SEQ ID NO: 834716 - DNA, 120 bp, Artificial Sequence
  ENSG00000230720_1 (sequence is synthesized)
ctgagattggaaaggaagcctcaggagcagaagcgaatgcaagctaacagaaagaaaggcagcgcggaggacgccacagccccagcgccctcccagcctcagcagagctgtggggattgt

SEQ ID NO: 834717 - DNA, 120 bp, Artificial Sequence
  ENSG00000230720_2 (sequence is synthesized)
tcttcacatctgacgccatggggttctggaagtctcttaagggatatattggaactgacttgtattatttggaaatcgacataaattgtctattattaaatctcactgaattaagtccaa

SEQ ID NO: 834718 - DNA, 120 bp, Artificial Sequence
  ENSG00000284928_0 (sequence is synthesized)
atatctaactacactgctaacgctgtacatacagctcactcatgcccagaaagagagtaaagccatgtcgaaactctaaaattcctcgagtgtttttccagctacctgccactcacccac

SEQ ID NO: 834719 - DNA, 120 bp, Artificial Sequence
  ENSG00000284928_1 (sequence is synthesized)
caactcccctcggacttcaattagaacctgataattggcgtcacaaacaggatcctgaggttaacatgctccaactgcatcatgaactgggcccacacgtaggctgaggtgaccaatatt

SEQ ID NO: 834720 - DNA, 120 bp, Artificial Sequence
  ENSG00000284928_2 (sequence is synthesized)
tccaactgttggctctgcaccactcttccagcagcagttgtggacagcttgccttggcacatgcattcagtgtctgcagagaactggacatggctggagacttggggtcccatggctgac

SEQ ID NO: 834721 - DNA, 120 bp, Artificial Sequence
  ENSG00000284928_3 (sequence is synthesized)
acctggaacgcaatgcagcaagctttggacaaaagacactgcaagacccatggcacacacacccctggctggcctgtagtgtttatgatgggtggggctggctagtgggggaacatgtag

SEQ ID NO: 834722 - DNA, 120 bp, Artificial Sequence
  ENSG00000284928_4 (sequence is synthesized)
atggcctgtgtaaacataatacatgtcactccactgaagttatggtgggtattcctgggctctggcctatgctgggccctaacagtcataagtagcataactgggatcctagtagtgagc

SEQ ID NO: 834723 - DNA, 120 bp, Artificial Sequence
  ENSG00000284928_5 (sequence is synthesized)
tattgctctctgtattgttgtttgagctatggattcagggctccgccctatgggcatgtgtccctgcccagaggatgccctgagcctagctggtggagtgtaagggaagtggctgtgctt

SEQ ID NO: 834724 - DNA, 120 bp, Artificial Sequence
  ENSG00000284928_6 (sequence is synthesized)
tactcagaagtaggccaaggcggccttctagcgcagcatgactcagtgggtttggagcgcaggcgtacaaccctgcacattatgtaaccacaccgcatgaggcatattaggtgatcaccc

SEQ ID NO: 834725 - DNA, 120 bp, Artificial Sequence
  ENSG00000284928_7 (sequence is synthesized)
atgtgagcttgtgcttggcttggagggactattgtctgtaaaacatacaattaccctgctaacgctgtatatatggctcgcttgtgcccagagagagagtaaagccatgtcaaaactgtc

SEQ ID NO: 834726 - DNA, 120 bp, Artificial Sequence
  ENSG00000224271_0 (sequence is synthesized)
gagacacttcgtgcaattctggaggctgagaagtcccacgatctgctgtccgcaagccggacacccaggaatgctggcagtgcaagttccaagacctgagggccgggatccaatggagtg

SEQ ID NO: 834727 - DNA, 120 bp, Artificial Sequence
  ENSG00000224271_1 (sequence is synthesized)
gacgccagtcagagtctgaatccctgagaaccaggagtaccaacggccagagggaacggatgtctgccttgggtcaggcagagagaatccaaacgccctccacctttttgtcctgttccg

SEQ ID NO: 834728 - DNA, 120 bp, Artificial Sequence
  ENSG00000224271_2 (sequence is synthesized)
gcttccacagattggacgaggcccacccaccttggggaggggccagctgctgtgttcagtccgccattgcaaacacgaagctcttccagaaacgccctcacagacaccccggaagtcacg

SEQ ID NO: 834729 - DNA, 120 bp, Artificial Sequence
  ENSG00000224271_3 (sequence is synthesized)
tacccactctgtaggtgccccggggcacaggcaagcggacgagccagttatccctcagagctcctgctgcctcgcccgctttctctcggaaacgtgaagtgtggcctcagctgaaagtga

SEQ ID NO: 834730 - DNA, 120 bp, Artificial Sequence
  ENSG00000224271_4 (sequence is synthesized)
ggtgggcctcattcaatcagttgaattcttcaagagagaaaaactgaagtcccttagaaggaaagagttctgccttcagactgtctttgaacttaagactgtagcgtcgactcctgccgg

SEQ ID NO: 834731 - DNA, 120 bp, Artificial Sequence
  ENSG00000224271_5 (sequence is synthesized)
aatttccagcctgctggccagctctgcagattcacacttgccagcctccacaatcgcagctgaggcggaggaaccctaagggctcattgagatcatggatttgcccttctatgcattgat

SEQ ID NO: 834732 - DNA, 120 bp, Artificial Sequence
  ENSG00000224271_6 (sequence is synthesized)
ggagcacctgctgcccacagcgtctgtatttggtgctgggatgctgagcctccttctttatgaatttttaaaaggacactgagatcttcaaacagaggctgccactctaagcaaacagat

SEQ ID NO: 834733 - DNA, 120 bp, Artificial Sequence
  ENSG00000224271_7 (sequence is synthesized)
cccgagccctggactctgaagcttgggcccagttctccttttctccgggtttcagatcccactgtgaagtgagggggcccttctgattcaggacccggggaagccaggggcatgagcatc

SEQ ID NO: 834734 - DNA, 120 bp, Artificial Sequence
  ENSG00000224271_8 (sequence is synthesized)
ggtgcctcttctctatttcaaggacccttctgggtgtaaagttctctgagatgccttacatggattcccaccactgcaagataaccatcgtaaatgactgatggggagaaagatgcagag

SEQ ID NO: 834735 - DNA, 120 bp, Artificial Sequence
  ENSG00000224271_9 (sequence is synthesized)
cacagactaattcgcagctaattcttctaaacagtcatgactggctagacaaaatgtggcagatgcttttcattttatttccaaatttgcaatgaaagccgagagtcgcggtggataggc

SEQ ID NO: 834736 - DNA, 120 bp, Artificial Sequence
  ENSG00000224271_10 (sequence is synthesized)
tctttcttctggcccctgacctgtgcgatgactcaacatggcacaggatgatggagttagaaaaccccacggggacagaagacgctgtagacagtcagctggcgggaaggactcggacaa

SEQ ID NO: 834737 - DNA, 120 bp, Artificial Sequence
  ENSG00000224271_11 (sequence is synthesized)
cccaatcgcacaccaagatgcccttgagcgctgctgtctccctcacagtgggggcgccacccagaacaccaggcactttgctgtggctccagggagacgtgagctctggacagaaggaaa

SEQ ID NO: 834738 - DNA, 120 bp, Artificial Sequence
  ENSG00000224271_12 (sequence is synthesized)
tgttctcctgagtcctttcaattcttggtggctgctggacttgcctgttgagggggatcttgctgcgggtcatagccactcctctcatggtggggacacagtaagaaaacaagacaggtc

SEQ ID NO: 834739 - DNA, 120 bp, Artificial Sequence
  ENSG00000224271_13 (sequence is synthesized)
atgacaggtgacagttaaggagggatggccactgttcagggaaagtctctctggaaagatgaccttcgagctgaggaccagaaaggcctgtggcagtgaggcttttttgttgttgttgtt

SEQ ID NO: 834740 - DNA, 120 bp, Artificial Sequence
  ENSG00000224271_14 (sequence is synthesized)
gggattacaggtgtgaaccactgcacccagccgtcagcaagttttgtgtgtcgacttggttaggatgtggtgcccagttatttgatcaagcaataatctggatgtcaatgtgggggtact

SEQ ID NO: 834741 - DNA, 120 bp, Artificial Sequence
  ENSG00000224271_15 (sequence is synthesized)
tctggatgtcaatgtgggggtactttgtagatgtgggtaacatccaccatcagctgatggtacataaaggagataccctgaatagtgtgaatgggcctcatcccatcaattgaagatctt

SEQ ID NO: 834742 - DNA, 120 bp, Artificial Sequence
  ENSG00000224271_16 (sequence is synthesized)
aagagcgtaactgaagcttccctggaaaagaagaaattctgcctgaagaccacagcatcactgctgcccccgagccctacggagctcagacttgcctacccccagagtcccgtggaccaa

SEQ ID NO: 834743 - DNA, 120 bp, Artificial Sequence
  ENSG00000224271_17 (sequence is synthesized)
tttcttgcaatctcttttattgattcaaatttctacttctattaaatttatttttatttattttatttttattttgttgtacaatacacacaatattctactggttctgtttctctggag

SEQ ID NO: 834744 - DNA, 120 bp, Artificial Sequence
  ENSG00000224271_18 (sequence is synthesized)
aaccatgtcggatgctaatacagggttcatagtcatgcatcttctctatccatttgctctggacacattagtgggcctcatccacacatggtttcagctattcacatatggctgcaactt

SEQ ID NO: 834745 - DNA, 120 bp, Artificial Sequence
  ENSG00000224271_19 (sequence is synthesized)
ctgaatttctgtctacagcctgggactctctccttgcaccacagtcataaactcaggaacctgctggacatgactactcaaaggctcccgcgtatctcaaacctaagatgtctgttgtga

SEQ ID NO: 834746 - DNA, 120 bp, Artificial Sequence
  ENSG00000224271_20 (sequence is synthesized)
aatgagaaaatttaccctcaccctaagcttttttattattttttaaaaattcttaactaatttttaattgtaatgtaacataaacaggaacatgcataaatcagaagcgtgttgtgtgca

SEQ ID NO: 834747 - DNA, 120 bp, Artificial Sequence
  ENSG00000224271_21 (sequence is synthesized)
gagctcagtcaattttcacaaaatgaacacacccctgaagtcaccatcctgatcgagatgaccacatcctcagggttccaaatatccccatgctcattcccagtcatgaccgccttcttt

SEQ ID NO: 834748 - DNA, 120 bp, Artificial Sequence
  ENSG00000224271_22 (sequence is synthesized)
gcaaagtgtaacaccttcttctgactactggcccctatgttacttttgcttgtttcaaattttatacaaattgaaccatatagcatgaattattttatgtctgtttcttttactcaatat

SEQ ID NO: 834749 - DNA, 120 bp, Artificial Sequence
  ENSG00000224271_23 (sequence is synthesized)
tgtatttgtgggatttattcatgtggtgttgtatattaatcatttatgcatccatattttatcattgcagagtaccacactgtgtaattctaccacaatttgttcaaacaattccactgt

SEQ ID NO: 834750 - DNA, 120 bp, Artificial Sequence
  ENSG00000224271_24 (sequence is synthesized)
tggtgggcgccggggctgcctccagcttggggccagtgtgtataatgctgtgtgattattctatacatgtgtttggtacatatttccatgtggcattgttgtgtataaacctgattaaaa

SEQ ID NO: 834751 - DNA, 120 bp, Artificial Sequence
  ENSG00000224271_25 (sequence is synthesized)
ccagcctccacaatcgacacagcaggaaggcagccatctgtgagccagaaagtgagccctcacctgatggccaagcctgctgatgctttggttttggactttccagcctccagaatggtg

SEQ ID NO: 834752 - DNA, 120 bp, Artificial Sequence
  ENSG00000224271_26 (sequence is synthesized)
ccgctgtttaaactccccagtttgtattgtcttattgtagcagactcaactgattaagacaggactctaggggagaagaagaaagatggcgcagataaaagtgagggaaggaagaaggga

SEQ ID NO: 834753 - DNA, 120 bp, Artificial Sequence
  ENSG00000224271_27 (sequence is synthesized)
aagcagatcttcggaagaaagaggccgtaattttggacactggatgttaaccttagaagaggaagccctgggactgtgaagccacagaggcactctgacccactctttctttcgaataat

SEQ ID NO: 834754 - DNA, 120 bp, Artificial Sequence
  ENSG00000224271_28 (sequence is synthesized)
actggaaaatcatctcacttaaactagcaataaaagcttgtgactaaatgcaaagttagtataaaaaaaggaacaattagcataataatatccctacagacactaaggcacaacagaaag

SEQ ID NO: 834755 - DNA, 120 bp, Artificial Sequence
  ENSG00000224271_29 (sequence is synthesized)
atatggtcacaataaaccaaaaactttaatctttcaaaaacaatatgttgttcttttacaaataacagaatttgtgaaagaatagcatctatcagaattaaaataacacataaataaggt

SEQ ID NO: 834756 - DNA, 120 bp, Artificial Sequence
  ENSG00000224271_30 (sequence is synthesized)
gctcagggacatgaccctatgccagcccacaccacagtcttggtcatcactcctgtttccatggtgttaacagcagcagttacttggttacggagagcttttccttacgccagcacccta

SEQ ID NO: 834757 - DNA, 120 bp, Artificial Sequence
  ENSG00000224271_31 (sequence is synthesized)
tagctgtgacatagttcacattccacaaccactgaagggttgaaacatgaacttgaaagtaaatagctttgtggagattcacatcgaggagcactgtgcagtcattcagaagaataaact

SEQ ID NO: 834758 - DNA, 120 bp, Artificial Sequence
  ENSG00000224271_32 (sequence is synthesized)
ccagctctgcccggtgatggcaggggtgttaacaatgcagtattgagctcaaaaagtaacttgctaaaaggtgtgtttgatgaaatttatttttgcaaaacaattacacaggataaagcc

SEQ ID NO: 834759 - DNA, 120 bp, Artificial Sequence
  ENSG00000224271_33 (sequence is synthesized)
atgctgaggggctgagctccttaagggaagtggccacatcatcaagggagaaagaggttcttaatgactgtccactacagcctcagttttcaggcagagcccaatttgctgtcttgggta

SEQ ID NO: 834760 - DNA, 120 bp, Artificial Sequence
  ENSG00000224271_34 (sequence is synthesized)
tcatggcccagttcagccactcccggactcctgacccagggaacctgtcagatgctttttatgctctcttcatgccccctcatggaagcttcgcacacactcttggttctgtcgcatggt

SEQ ID NO: 834761 - DNA, 120 bp, Artificial Sequence
  ENSG00000224271_35 (sequence is synthesized)
tcccttttgacatcggtggcatcagaggtccacggaggagccacaggactgcctgtcggtctagcattaccttgtgcggcttaccttgtctgttttggctcccaaggctccagagggcag

SEQ ID NO: 834762 - DNA, 120 bp, Artificial Sequence
  ENSG00000224271_36 (sequence is synthesized)
ggcccagggctcaaccctcacatgtctcaagagctcagtacacggcggagattcccgggaaatgctgcagtgaactggattgtgaggcaatgcacagaacacagcactgcgtggcaccta

SEQ ID NO: 834763 - DNA, 120 bp, Artificial Sequence
  ENSG00000224271_37 (sequence is synthesized)
gcagttatgacgtttatcatcccgggtttctaccagtgccaggagagtcctgggaaatgagagtccactgagaggtcatgggatggaaggaactcacagacttggggcacagatggcttc

SEQ ID NO: 834764 - DNA, 120 bp, Artificial Sequence
  ENSG00000224271_38 (sequence is synthesized)
tctgtgcctgtgtcacccccgcctgcagatcccatgtccatcctggtgcccgagagtccccatcctgcatgcatggctttgaacctgctctgggctaggaatgtcaggcagtgcgtctga

SEQ ID NO: 834765 - DNA, 120 bp, Artificial Sequence
  ENSG00000224271_39 (sequence is synthesized)
gcttcagcctctccatccataaaacaggaataacattactgcctatcaggatttcatgaggattaaataaggctgaatgagaaagaggcatataaacttgatttttacatgccttggaat

SEQ ID NO: 834766 - DNA, 120 bp, Artificial Sequence
  ENSG00000224271_40 (sequence is synthesized)
ataaatgcttcttaaaaatttcagtgatgccttttacaattctgaaaagttagtataaaaagtttgcctgccctgcctttctcctgagactgcatgtgaaaatcaaatacaacaacgaaa

SEQ ID NO: 834767 - DNA, 120 bp, Artificial Sequence
  ENSG00000224271_41 (sequence is synthesized)
atcctctgccatttttgtctcttactgtgcatgcccaggaagttgtttctccctgacacttgtgttcaattatcactttagtacaataggtgtggacatcaggaaatggcctctccctgg

SEQ ID NO: 834768 - DNA, 120 bp, Artificial Sequence
  ENSG00000224271_42 (sequence is synthesized)
caccagctgccagtttatcacttttagagaggcaatgtgaccactgctgaaccatcacctgacattcgtagtgggtgggggagagcctctcctgccgccgctcatgcctgtctaactacc

SEQ ID NO: 834769 - DNA, 120 bp, Artificial Sequence
  ENSG00000224271_43 (sequence is synthesized)
tataacactttctgctctatgaatttgactattctaggggacctcatatgaggcttcaggcttgaccaaatctgactggctggctgccggagacactgctacccatcggcccttaataaa

SEQ ID NO: 834770 - DNA, 120 bp, Artificial Sequence
  ENSG00000224271_44 (sequence is synthesized)
tggcctcatttgatcatcatgtgatcttcagaagctgggcttgattatccttgccaaacaaaatgctgaaaccaaaaatctgaaagctttggacattcagttctgcctgtgctgtttcat

SEQ ID NO: 834771 - DNA, 120 bp, Artificial Sequence
  ENSG00000224271_45 (sequence is synthesized)
tctatgagatttcgatgctatcttcattgccagcagccctgacaaagatgcactgcagacggatagcctctcaggaaaatctgacagctggaagccgtgagttcttggccccttgccctg

SEQ ID NO: 834772 - DNA, 120 bp, Artificial Sequence
  ENSG00000224271_46 (sequence is synthesized)
aagcaagagtgaccaggcctctctcctgagggaaggccttcccaggtggggacataggccctaaagtgagaactgaagcattgtccactccctctttgatgccacatgcatggacggttc

SEQ ID NO: 834773 - DNA, 120 bp, Artificial Sequence
  ENSG00000224271_47 (sequence is synthesized)
agtgaatgtcgtgggaactcagctgtgcccacccctgctttgttaccccggcactttgggaaacagcagagtccagcagaaaccactgaagttttgggctcggagggattccagttcaag

SEQ ID NO: 834774 - DNA, 120 bp, Artificial Sequence
  ENSG00000224271_48 (sequence is synthesized)
ccccggcttcaccacctacaaggttcaattttggtctaggaatggaacttctctgagtcttagttgctgtcatcaatattattttactgtcatcattatttatagtaaaataataacctc

SEQ ID NO: 834775 - DNA, 120 bp, Artificial Sequence
  ENSG00000224271_49 (sequence is synthesized)
aaaaggagacccacggttatgaggaaaaatggccatgaaatgtctagagagggcctggatggtggcatcatctaataaataaggccctttaatatgcctatggcagctatgttaaaggac

SEQ ID NO: 834776 - DNA, 120 bp, Artificial Sequence
  ENSG00000224271_50 (sequence is synthesized)
ctcgtagagaggtagaaacaagctggaaatttcaccagatagatggaaactatagaaacatccaaatggaaatgacagaaatgaaaactgagatccagaatgaagattaattaaatgggg

SEQ ID NO: 834777 - DNA, 120 bp, Artificial Sequence
  ENSG00000224271_51 (sequence is synthesized)
tcaccagcagattgagcacagctggacattgcctggtgtggccccaggccattcttcacttgtcaattctccttggactcctgggatggttggagcgtgtcccgtacatggcaaatggat

SEQ ID NO: 834778 - DNA, 120 bp, Artificial Sequence
  ENSG00000224271_52 (sequence is synthesized)
aagcaacagaggacaatggacaacgcttgctgtctgatattgtctggccccatgtccctacccaaatctcatctcgaattgtaatcctcataattcccacgtgtcgagggagggaccggg

SEQ ID NO: 834779 - DNA, 79 bp, Artificial Sequence
  ENSG00000224271_53 (sequence is synthesized)
gtaatcctcataattcccacgtgtcgagggagggaccgggtaggaggtgatttgatcatggggctggttttctagttgg

SEQ ID NO: 834780 - DNA, 120 bp, Artificial Sequence
  ENSG00000224271_54 (sequence is synthesized)
aagaaggaaggctggtgcagagggtgggtccggggcaccgcagcgggattggcctctggtcggagggaacttgcggtagggaaggcaggggaggggaagatgtgagtgggtttgtacatg

SEQ ID NO: 834781 - DNA, 120 bp, Artificial Sequence
  ENSG00000224271_55 (sequence is synthesized)
gaagtgcattccagagggaaagacagcggctcagattctattgaaagaaacatgacataatgataccacagcaaaagccaatcttgctcctttttaaaaaattaaaaacaaaacaaaaca

SEQ ID NO: 834782 - DNA, 120 bp, Artificial Sequence
  ENSG00000224271_56 (sequence is synthesized)
aaattaaaaaacaagaaaaaacaccaccataggatgtccaccctgggagactaattctaagagagaagctctgttcttccactgctaatcactccaaataaataccacgactgagcttgt

SEQ ID NO: 834783 - DNA, 120 bp, Artificial Sequence
  ENSG00000224271_57 (sequence is synthesized)
cggagaagagagagcagcaacagccttgcccacaggtcttctcatctgcatgagaacaaagtggatggctcagaaagacagagacactcttccatccaatatgaaatcccatcagaagtg

SEQ ID NO: 834784 - DNA, 120 bp, Artificial Sequence
  ENSG00000224271_58 (sequence is synthesized)
tagagaggcctccagctgcatccacctccaggccccacccagcctcctgtcctgagccgctttggatgagatcaggggctcatgagccatgcaaagccagcccggcattcctgcccagaa

SEQ ID NO: 834785 - DNA, 120 bp, Artificial Sequence
  ENSG00000224271_59 (sequence is synthesized)
cagccatgcttgcatgtttctgtacatttcgtccatggtcttcttgtccacaagtcttagccggcctatttcccttctccagaaacataaacatggtatttgtaattttattatcaccaa

SEQ ID NO: 834786 - DNA, 120 bp, Artificial Sequence
  ENSG00000224271_60 (sequence is synthesized)
caaggaagccacccatgcatccaccaaacatgagaaactcaatccccaaatctcgttttgaagttctggttcctagtccattcctagtagccacaatgagatcagtcagggtcttaggag

SEQ ID NO: 834787 - DNA, 120 bp, Artificial Sequence
  ENSG00000224271_61 (sequence is synthesized)
gaaaaaacattcacacagatgttttaaatgaagggaccttaatgactaaactactaacagacctgttggcatattaaggaaagaaatgagagagatggggaaactaaggactggtaacag

SEQ ID NO: 834788 - DNA, 120 bp, Artificial Sequence
  ENSG00000224271_62 (sequence is synthesized)
ttgaagtgcattccagagggaaagacagcggctcagtgaaggaaagaccctggctttcctccccagctccaagtgggctgttctgattgcttccgggtcctgtcctcatggggagcagca

SEQ ID NO: 834789 - DNA, 120 bp, Artificial Sequence
  ENSG00000224271_63 (sequence is synthesized)
ccacgggagactctgcctctgctgagttttctaacattagtgtcgggaaacaagaatctgccactgatgctccttttgtaaaggtataaacatgtatataaaggaacaccccagcacacc

SEQ ID NO: 834790 - DNA, 120 bp, Artificial Sequence
  ENSG00000224271_64 (sequence is synthesized)
ctctgcagattcacacttgccagcctccacaatcgggcagtggaagaagactgctcagagagggactggatggccattttggtggaagctcagtggtttagacttgaatcttggatttag

SEQ ID NO: 834791 - DNA, 120 bp, Artificial Sequence
  ENSG00000224271_65 (sequence is synthesized)
accgcgtgaccttcaggtccacattaaagctgaaactttatgactctgaattggaatggaagaccgacttgaacccaaatgtatgctcagaaattctgcaagcagcttcattactgaatt

SEQ ID NO: 834792 - DNA, 120 bp, Artificial Sequence
  ENSG00000224271_66 (sequence is synthesized)
actccatttctaatctcacactcgtaatgcaaatgggcttactaaagctggttatcagggaaatctaatttaatttcactgtctgatgaagatgatgtctagatgggtactatattcttg

SEQ ID NO: 834793 - DNA, 120 bp, Artificial Sequence
  ENSG00000224271_67 (sequence is synthesized)
actggctttattgaacatactttaatgttaagtgtcttcgaatattacattttcaggtacttgcatgggctgctctcagctaagagtttcagatctgaatgttaactttggagtccactt

SEQ ID NO: 834794 - DNA, 120 bp, Artificial Sequence
  ENSG00000224271_68 (sequence is synthesized)
aattaggcaagtaaggcttggctgcctcacaggcttacttcaaagtcatatataactgaaaactcctaaacataaacaagggagagattattgttcaatttttgtgtctaaggaagccat

SEQ ID NO: 834795 - DNA, 120 bp, Artificial Sequence
  ENSG00000224271_69 (sequence is synthesized)
ggtccataatcttcacatcagtgcaaaaacatcactgcactatggtgacaagtcaatgcttctgtggacagagacttttgtacaacagaattcttgccttgaaggaataacaaaaattta

SEQ ID NO: 834796 - DNA, 120 bp, Artificial Sequence
  ENSG00000224271_70 (sequence is synthesized)
tctagggacttaaaaggctatttaaaaatattctccatgtaaagataaactttaagaataatatttgcatagctattaatttaattagtacatgcctacatcaaagccaatgtatctaac

SEQ ID NO: 834797 - DNA, 120 bp, Artificial Sequence
  ENSG00000224271_71 (sequence is synthesized)
tagaacctaagttattttcctgcatctcagtgtttcttcgatttgaaagtagtcactgtttcctaactgaccagtttacaataaccatgggaggcaccttggctcatccttctaatgagt

SEQ ID NO: 834798 - DNA, 120 bp, Artificial Sequence
  ENSG00000224271_72 (sequence is synthesized)
ttgttggtctggtctttcctgctgccagcagctccttccataaagtaggtggtccctcactccagctcatagagaaaacttgaagagccctggaaagttgtttgcttctttgaagcgttt

SEQ ID NO: 834799 - DNA, 120 bp, Artificial Sequence
  ENSG00000224271_73 (sequence is synthesized)
tccaacagtatagagctcaggaatcagacccttgatgcagatgatactgtatttcccaagaggtccagcaatcaaaaagctctctgtcaaggtaatttgcttcccattgattttgcccat

SEQ ID NO: 834800 - DNA, 120 bp, Artificial Sequence
  ENSG00000224271_74 (sequence is synthesized)
ggtcagcttgagtgtggctgtgagaggagctgtggctctgggtggcatgttcccctgcaccttggacgtcatgctcctggggcagaggtatgaatgaaggaaggcggactttcctctcta

SEQ ID NO: 834801 - DNA, 120 bp, Artificial Sequence
  ENSG00000224271_75 (sequence is synthesized)
gcccagagctaaggatgactgcactatagggaaactgttgggagggtgcttggtctgaaggtttgtgtcccttgaaattcacatgttgaaactataaccccaaagtgatcatatggggtg

SEQ ID NO: 834802 - DNA, 120 bp, Artificial Sequence
  ENSG00000224271_76 (sequence is synthesized)
gtggtggggttgggaggtgattaagtcataagggtggagccgtcatgaatgggtttggcccccttgtaaaatagaccccagagagctctctagccctttttccactatgtggagacacag

SEQ ID NO: 834803 - DNA, 120 bp, Artificial Sequence
  ENSG00000224271_77 (sequence is synthesized)
caagaagacagccatctatcagccaggaagtgggccctcttcagacactgaatcttctggcacattaatcttagacttcccagcttccacaactgtcagaaataaatggttgttgtttaa

SEQ ID NO: 834804 - DNA, 120 bp, Artificial Sequence
  ENSG00000224271_78 (sequence is synthesized)
gctttgccaccctaagaatcaaacagggaagggaaagatgcagcgttaccaggtcctgtgtgagctggcatgaagcccgggaggtaccaccatggaggcatggggcttcctgagaagtgg

SEQ ID NO: 834805 - DNA, 120 bp, Artificial Sequence
  ENSG00000224271_79 (sequence is synthesized)
tgaggaagaatggatggagcagggaagcaagaccccttccacccaccggccccctgctgctgacctcttggccaaatgggacagaagccagcttgcaggggctgctattccgcctgtggg

SEQ ID NO: 834806 - DNA, 120 bp, Artificial Sequence
  ENSG00000224271_80 (sequence is synthesized)
tatcagggcagaaagtgggcagtttcagggcaggtggggtcagtcaacaattcagttcatctttttcagttttctttctggatgattttcagatgctgtcttgtggtgttgggactgcag

SEQ ID NO: 834807 - DNA, 120 bp, Artificial Sequence
  ENSG00000224271_81 (sequence is synthesized)
tttcatgaaaatatgtctaggtgtagagtttgttttattctgcttagatatagagtgcttcctatgttggtggatccatcttttttgacattatggaaattgtctctttaagtgtgtcta

SEQ ID NO: 834808 - DNA, 120 bp, Artificial Sequence
  ENSG00000224271_82 (sequence is synthesized)
ctgctgtattcttttttttttttgtaggaaagcaaatatatgcgactttttcattctgttatctagaggcagttttgaatggtgattaaaagcatgatttctgaagaagactgcctgggt

SEQ ID NO: 834809 - DNA, 120 bp, Artificial Sequence
  ENSG00000224271_83 (sequence is synthesized)
ttaaatcttattccccaaagttcctagctgtgtgaccttaggcaagttacttaaaatctccgtccctctgtaatctcaccatgtaaatgagggtgacattagcacggtgcaggtttgacg

SEQ ID NO: 834810 - DNA, 120 bp, Artificial Sequence
  ENSG00000224271_84 (sequence is synthesized)
tgaggattgaatggatgaatgtcaggaaagatccaggacataatggaaaaacttatgtcttacctattgttgttattgcttgatattaatgttgtcttctttattatagtaagaatgcaa

SEQ ID NO: 834811 - DNA, 120 bp, Artificial Sequence
  ENSG00000224271_85 (sequence is synthesized)
ttagagaatccgccttgggacgaatcccattctcacactcctgtaacatccttatcagaaggctggaagaccaagctggggctgtgggactaggagtaattaaaatacctttaattggaa

SEQ ID NO: 834812 - DNA, 120 bp, Artificial Sequence
  ENSG00000224271_86 (sequence is synthesized)
tcccaccactgcaagataaccatcgtgtcctttggaagatgaggatgaagctcttgtgaatggaattcgtgaccttatagaagaagcccaagagagctgccttgtcctttttaccacgtg

SEQ ID NO: 834813 - DNA, 120 bp, Artificial Sequence
  ENSG00000224271_87 (sequence is synthesized)
aggacacagcaagaaggtgccgtctgtgaaccaggaagcaagctctcactagatttggaatctgccgatgcctccgtcttggacttcccagcctctgggacagggaaggagtgacagctt

SEQ ID NO: 834814 - DNA, 120 bp, Artificial Sequence
  ENSG00000224271_88 (sequence is synthesized)
ccaaactgttgatctgtcagtgctgaaaccagcaggtcccttcagcgagggccaaatgagcggaactctccaggatacgtctgatttatatgatgccctctctgggtcagcagcttcagt

SEQ ID NO: 834815 - DNA, 120 bp, Artificial Sequence
  ENSG00000224271_89 (sequence is synthesized)
catgaaaacctgcaaaactgaagcgccctttggccagctgctggttctgcgacatcacagggagtctggcatccacacaccaattctaggcaaggaagcaaaggagcttgctcttcagct

SEQ ID NO: 834816 - DNA, 120 bp, Artificial Sequence
  ENSG00000224271_90 (sequence is synthesized)
tctgtgggcccatttgtgagtttgagcgggtgcagcctctccttgaaacagaggccaggtccatggcatgagtcttttgttcagaccaatgccccactggagggtctgggagctgccgag

SEQ ID NO: 834817 - DNA, 120 bp, Artificial Sequence
  ENSG00000224271_91 (sequence is synthesized)
ccagattcctgggtgtgcctgggtgctgtacccgaaactgcagggcctggggcacctgccctgctctcattgttactagctggtttattctcagtggagggttgtaatttaattcctgta

SEQ ID NO: 834818 - DNA, 120 bp, Artificial Sequence
  ENSG00000224271_92 (sequence is synthesized)
gttctgcagtacatggagttgggaattatatccttcctctgtgttttcattacactgaccttcctgcttcattgctcctgagacgggaacctcacctgcctggcctttgtctccttcttc

SEQ ID NO: 834819 - DNA, 120 bp, Artificial Sequence
  ENSG00000224271_93 (sequence is synthesized)
cccagaacctcccgagacctctcatctgctgatttgacatgaaaccccctgcccaccccagcttggccccagcagatgtctgggcagagccgttacccagacctctgatttttcccaggc

SEQ ID NO: 834820 - DNA, 120 bp, Artificial Sequence
  ENSG00000224271_94 (sequence is synthesized)
tgtttgcccctgaaggttcttttttctctacccaccaccccgaccctggcggctggctcaggtcagccacaggaacagccatatctttcctgcagcctcacaacagcttcagtgcctttc

SEQ ID NO: 834821 - DNA, 120 bp, Artificial Sequence
  ENSG00000224271_95 (sequence is synthesized)
tggtcccacaatcttacccgtgtcttattgccccatcctctcccaccttggctgcagcttgcagaagagagacctggttaggagtcaggcaaaccctggctcccagctgcttctgatgtg

SEQ ID NO: 834822 - DNA, 120 bp, Artificial Sequence
  ENSG00000224271_96 (sequence is synthesized)
actttagtgaagtggctagacctctctgaaccctaaattcctaatccccaaatccaagatctctacagttgaggatgatatgacttcacagggctgtcatgaggactagatccaacggac

SEQ ID NO: 834823 - DNA, 120 bp, Artificial Sequence
  ENSG00000224271_97 (sequence is synthesized)
ggaagccttgctgcatggtcggtgtgtgcatcgataaaggtggctcaggccagctccctcccccacgcctggctcagcgcatattttgcctcggagtgtccagcctttactctctcctct

SEQ ID NO: 834824 - DNA, 120 bp, Artificial Sequence
  ENSG00000224271_98 (sequence is synthesized)
cgtgtgagctggaactgtcccagcaagtgatgagcaagttcagcgctctgcctacctgtgtggattctgagtagcatggcacacccgctccccacccacacgtgtggctcactctgggca

SEQ ID NO: 834825 - DNA, 120 bp, Artificial Sequence
  ENSG00000224271_99 (sequence is synthesized)
tagggagactcgggcaacctggtccctggtctgagtccaaccaagggtggtgtgtttgcatctgatgacattgctacaaatctcttctggctcaattgaggacgtcctcctcaaattgcc

SEQ ID NO: 834826 - DNA, 120 bp, Artificial Sequence
  ENSG00000224271_100 (sequence is synthesized)
cttccaactttatttccatagttgtcttctccatttggtttccaacatgcatacctttccaggctgcctcacaggtgcatcaggtgagagccccgggagaggccagcagaggaggcctgg

SEQ ID NO: 834827 - DNA, 120 bp, Artificial Sequence
  ENSG00000224271_101 (sequence is synthesized)
aagcacccacagccacgtgagtgtggagaatggagggttaaagcgaagagttgctaacagtctcagccactttattcttttttgttgttgtttgcttctttgtttgtttgttttgagatg

SEQ ID NO: 834828 - DNA, 86 bp, Artificial Sequence
  ENSG00000224271_102 (sequence is synthesized)
cgtctcagctcacttcgttcgtagctgggattacaggtcatttcgcaggaataatgcctgtgtggaatcctctttgaaaaacactg

SEQ ID NO: 834829 - DNA, 120 bp, Artificial Sequence
  ENSG00000224271_103 (sequence is synthesized)
aggaataatgcctgtgtggaatcctctttgaaaaacactggcttcaattcctgggataccatggcgaagttcaatgtatacctacatgctccccagccagggaggttgtgactctgcagg

SEQ ID NO: 834830 - DNA, 120 bp, Artificial Sequence
  ENSG00000224271_104 (sequence is synthesized)
gttgtgaggctcaggctggggccagtgcctgctcaccttcctcttggttccctaagaagcctcccgtcaacctgcagcctgatgtgggaatggcactgaccaatggctggatggggagga

SEQ ID NO: 834831 - DNA, 120 bp, Artificial Sequence
  ENSG00000224271_105 (sequence is synthesized)
agaaatggtggctgtcctcatggaggactcagtgtggagttggaggtgtcaggagaggggtcctcggcaagggattccatgactcccatggcacagcgtcttctcctgcacacggcttct

SEQ ID NO: 834832 - DNA, 120 bp, Artificial Sequence
  ENSG00000224271_106 (sequence is synthesized)
tgtcagcacacgtctaatgcctccttgtttccaaagtaccttgtatagtgtctgttatggtgtaagcatttagcaaatgttcaatgaaagaatagaaatcatatcttggaattttgagaa

SEQ ID NO: 834833 - DNA, 120 bp, Artificial Sequence
  ENSG00000224271_107 (sequence is synthesized)
atactgtcttgggaacgatagtgagcagatagtataattaaaaccagatgccaaggagattttctaactgtctcagggcatgacattcccatcatttatttggtaaaaattactctctgc

SEQ ID NO: 834834 - DNA, 120 bp, Artificial Sequence
  ENSG00000224271_108 (sequence is synthesized)
tccatcttgaagccagctctttcctggcactggaaacgcaatctaaatagcgtttaattccagggaagcttttatcaattcctgctcatgttccaacttgacttcaggccaacctggatt

SEQ ID NO: 834835 - DNA, 120 bp, Artificial Sequence
  ENSG00000224271_109 (sequence is synthesized)
ggcccaatttgctgcaagtctgtctcggctcaaggcagcctcgtggggcagttgggattcttgctgccttcacaagccacagccagaacatggaataggcaacctcacagcaccgttttg

SEQ ID NO: 834836 - DNA, 120 bp, Artificial Sequence
  ENSG00000224271_110 (sequence is synthesized)
atgtgagctgctggataccagaccaggctccttcccttgtgtctgctttacctgtaggtctacctccaagggtggaggctgggaccctacttggaaggcaggaacacctgtccagctggg

SEQ ID NO: 834837 - DNA, 120 bp, Artificial Sequence
  ENSG00000224271_111 (sequence is synthesized)
agaggatgatggtggggccaggctctggcagctgaggtggagagaaggaaactgacttgggatattttcagggaaagagcaccaggacctgctgatattggacatgatggtgaggggaga

SEQ ID NO: 834838 - DNA, 120 bp, Artificial Sequence
  ENSG00000224271_112 (sequence is synthesized)
ccatggctgccgtgcacagctttatcactggaactgcaagggaggagaggatctttcataaaagggggcagctccctgggctataaaaggcaaggctgccagggtgagcacaggagaggc

SEQ ID NO: 834839 - DNA, 120 bp, Artificial Sequence
  ENSG00000224271_113 (sequence is synthesized)
aatcaggtgggtttggggtgaaaagggaggcagctgctgttttctcgggaagggtgagatgttgctgggctgaggaggtcagggagggtgtgaaatagcttttctgcacaaaggagaggg

SEQ ID NO: 834840 - DNA, 120 bp, Artificial Sequence
  ENSG00000224271_114 (sequence is synthesized)
aaacgtttaacaaatacattaggattgctgggggtttcgcctgcctgtttgaggactcgtgagtccagccagcgcagtagcgtgtgtcactgtgagcacattcagcagttggggaggggc

SEQ ID NO: 834841 - DNA, 120 bp, Artificial Sequence
  ENSG00000224271_115 (sequence is synthesized)
agggcagaaggagaaaggggctttagtgggtctgaggaaatgggaggtgggacagggactcattagagggtttctaatgatggtcctggagtctaattgaagcaaagggcgaagcaggac

SEQ ID NO: 834842 - DNA, 120 bp, Artificial Sequence
  ENSG00000224271_116 (sequence is synthesized)
ataagggagagacaggtctggaaaaagtggttgatggtcaattgatgccacaccaaaatgaaaagagcttgattttggccatgaagatgatgaaatgggggcattacaagaaggatgtgg

SEQ ID NO: 834843 - DNA, 120 bp, Artificial Sequence
  ENSG00000224271_117 (sequence is synthesized)
ggagagaggtggtgagctgaggctgacaggctcttgcaattctgaagacaagattgcccaagatatgatgtaggagggcatgggggtaaggaagacatggcaggtggggagaggagaggc

SEQ ID NO: 834844 - DNA, 120 bp, Artificial Sequence
  ENSG00000224271_118 (sequence is synthesized)
cggtcctcggggatgctgatgtcagggaggacgatgaaggcagacatgaggccaaggtgggaaggtgggttcatgtctttaacaaatgcgggaggcaaccaggctctcagaggatgacag

SEQ ID NO: 834845 - DNA, 120 bp, Artificial Sequence
  ENSG00000224271_119 (sequence is synthesized)
cagatgacaccacacacaatcagaggggctggggtttttgagctaggaagaaaatcgcaaaagtatcaaggaacactggtctgaatcccaggcctgtgctgcaggcatgtgagtgaaatt

SEQ ID NO: 834846 - DNA, 120 bp, Artificial Sequence
  ENSG00000224271_120 (sequence is synthesized)
gtcccaaatggacaggacacggggtggaggcgttctcagctggatctcaaagcagaagaaagtgagactatccagagaggaagttgcgatacaggaggtttagacaggaggcagtgatta

SEQ ID NO: 834847 - DNA, 120 bp, Artificial Sequence
  ENSG00000224271_121 (sequence is synthesized)
gggagggcacagcaggagggattttcatgcagcaggagtgtgggaagcaccctgccatctcagttgggatctctagcttgctatattctaagagtaggggtgaaacagatgtagcctgag

SEQ ID NO: 834848 - DNA, 120 bp, Artificial Sequence
  ENSG00000224271_122 (sequence is synthesized)
ctttacagagatggcagctcattctttgaacatctcagtccatgtttggattaaagtgatctgttggctccatttatctaaaagaggatacagaactctcctcagaggaaggcagtagca

SEQ ID NO: 834849 - DNA, 120 bp, Artificial Sequence
  ENSG00000224271_123 (sequence is synthesized)
gccagagtctcaggaactttaatgggcattgttcagctttcaacagaaaggaagcatgcatatgagacagggcaaagggaacaaacagaaatcaaactcagacccacagatgacccagat

SEQ ID NO: 834850 - DNA, 120 bp, Artificial Sequence
  ENSG00000224271_124 (sequence is synthesized)
atcagagatggttgacactgttgttaaaataattgtgattaacacgttaaagtattatttgaagaaatactttaaataagtatttaaagtgaaatccacaaaaaagaatccaatgggatg

SEQ ID NO: 834851 - DNA, 120 bp, Artificial Sequence
  ENSG00000224271_125 (sequence is synthesized)
gtgggcaaaggcaggataacaacttcccaaaggtgcccatgtcctggcactcagaacgtgtgaatgggctatgtcacatggcgagaggtacttaagattgcagatggaagaaaaactgct

SEQ ID NO: 834852 - DNA, 120 bp, Artificial Sequence
  ENSG00000224271_126 (sequence is synthesized)
aacaagctgatcacaacttaaggacattatccttaatttaggtaattacacagttccttaaatgtggaggagggagaaagaagaattactgtcagagtgatgtgatataagaaatacttg

SEQ ID NO: 834853 - DNA, 120 bp, Artificial Sequence
  ENSG00000224271_127 (sequence is synthesized)
aacggctattattagctttgaagatagaactggttcatgagccaaataatgcaggcaggctattaaagccaaaaaatgcagcaaatccaagtctctcctagagactgtagacacaaacat

SEQ ID NO: 834854 - DNA, 120 bp, Artificial Sequence
  ENSG00000224271_128 (sequence is synthesized)
atccctgccaataccttgattttagccccgtcagatccactttggacttttctcctcaagtatataagataataaatttgtgttgttttaagctgctaagtttggggaaatttggagtaa

SEQ ID NO: 834855 - DNA, 120 bp, Artificial Sequence
  ENSG00000224271_129 (sequence is synthesized)
gggaaatttggagtaacagcaattcaaaaaaatacagattttggtacttgaaggtgtggttctgccataacaaaggactaaaaatgtgaaatgggtaatcccagcactttgggaggctga

SEQ ID NO: 834856 - DNA, 120 bp, Artificial Sequence
  ENSG00000224271_130 (sequence is synthesized)
aatggctctggaattggacagtagggaaaggctggaggaatgttgaggacatgatagaaaaagctgagatttccttggacagtctgttgtagaaacatggatgctaagggtgaccttagt

SEQ ID NO: 834857 - DNA, 120 bp, Artificial Sequence
  ENSG00000224271_131 (sequence is synthesized)
caagtctcaaaaagaaatgagcatggtagagaaagcccttatcgttctagaggagaagaaatcaccatgcataccaagtaggtagaaatatggacattgaaggcgtggctggggagaact

SEQ ID NO: 834858 - DNA, 120 bp, Artificial Sequence
  ENSG00000224271_132 (sequence is synthesized)
cacaaggacatgagaaggacattaaggaatataaggaaaggccgcctttgtcaaatagcagcagggagcttagctgaattgtgttctgcaattgtgtggagagcaaaacgttggacaatg

SEQ ID NO: 834859 - DNA, 120 bp, Artificial Sequence
  ENSG00000224271_133 (sequence is synthesized)
aacttagatatttaactgaagaggtttccaagtaaagtgttgatggtgcagtcgtttttgtttgtttttttttcttgctacttacactaaaatgtgaaaggaaaaaggattgattgaagc

SEQ ID NO: 834860 - DNA, 120 bp, Artificial Sequence
  ENSG00000224271_134 (sequence is synthesized)
aagggctgttaagcaaaaaggaaccaagacttgctgttttgcggacttctcaggctactgagattgcaaatcgtgcttaaattaagagattcaggaaatgtcagaacagccctctctgcc

SEQ ID NO: 834861 - DNA, 120 bp, Artificial Sequence
  ENSG00000224271_135 (sequence is synthesized)
aagagccacaggtgtggctgaataaaatttgtgctagtggctttcaggaatcaaaggtcagagtatttggttacactggaggctcttcgaagagattaggcatgtgactcccggattccc

SEQ ID NO: 834862 - DNA, 120 bp, Artificial Sequence
  ENSG00000224271_136 (sequence is synthesized)
ctcagccatctcagccaaagccagaaatagagatgattatctggggaagatctgcagaggagcccattgtctaatggagttaatccccatggagagctacaagggccttaaaaatattct

SEQ ID NO: 834863 - DNA, 120 bp, Artificial Sequence
  ENSG00000224271_137 (sequence is synthesized)
actggcaggaaagctgcctgccagcttgtaccaaagggtcaaaagaaagaaggctattggaccccaaagattccacaggcataaaactagctctaagtgctacccggctgcaaacatatg

SEQ ID NO: 834864 - DNA, 120 bp, Artificial Sequence
  ENSG00000224271_138 (sequence is synthesized)
cttccttttgtttaaaaagaaggatggtttctgagggtgaagctgcatgcccagaggacaaagttgtgagtcacggaaatcattcccatgccgtttgaaactcaaatggagttcttggat

SEQ ID NO: 834865 - DNA, 120 bp, Artificial Sequence
  ENSG00000224271_139 (sequence is synthesized)
tgcaaaattgcttgggaccagggacttctgtcttcctttccatttttttttcctttttgaatggaaatatctatagctgtgactctatccttgtctcactattttatttagagcacaaga

SEQ ID NO: 834866 - DNA, 120 bp, Artificial Sequence
  ENSG00000224271_140 (sequence is synthesized)
acatgtttcttgactttcacagatcaggaataattttgacacaagatgggtgtatgcagaccttcatcttaaatgttaaattttttatatgcaaggatttaggacttgtgcactgatgag

SEQ ID NO: 834867 - DNA, 120 bp, Artificial Sequence
  ENSG00000224271_141 (sequence is synthesized)
atttagatacaattttgaactttgagttaatgctgtaatgagatgaggctttggtgatcctaagatagaatagacgtgttttcccggtggaacacatgtgaatctttagaggccagaggg

SEQ ID NO: 834868 - DNA, 120 bp, Artificial Sequence
  ENSG00000224271_142 (sequence is synthesized)
cagattgtgtcaggcaggacagtgcctccctcctgcaaaagatgcccacattcaatccatgaatatgtgatgttacatttaaaaaatcatatgataataaatttgtgttgttttaaacca

SEQ ID NO: 834869 - DNA, 120 bp, Artificial Sequence
  ENSG00000224271_143 (sequence is synthesized)
ttctttgactcactagggattgagtatgacacagataaaaagaaaatcctgcctgcatggaccttcccctccagtggagaaccaaccggactattaaaaatgatatatttttggttaaaa

SEQ ID NO: 834870 - DNA, 120 bp, Artificial Sequence
  ENSG00000224271_144 (sequence is synthesized)
aactgaagaagcaagcaatctggaaatgtcagtggatgcacacaaagaaacaaccgcaaaagcctgctcgctctagccaagggacaagaataggggcagtccatcaagacagaatccttt

SEQ ID NO: 834871 - DNA, 120 bp, Artificial Sequence
  ENSG00000224271_145 (sequence is synthesized)
ttgttaagatacataaacctgcagattcaagaagctgaaagatgctccaacaggataaacctaaagaaatctatgccaacatgcatcataattaaacttctgcaaagcaaaaaacaaaac

SEQ ID NO: 834872 - DNA, 120 bp, Artificial Sequence
  ENSG00000224271_146 (sequence is synthesized)
atttctgaaaacagccaggggaaaagaacacccaacctggaagggaaaaacaattcgaatgacagtggatttgtcatcagaaaccatggaagccaggaggaaatgacacaatatttttca

SEQ ID NO: 834873 - DNA, 120 bp, Artificial Sequence
  ENSG00000224271_147 (sequence is synthesized)
gctactaagagcaaaaaactgtcatcccaaaattctatacccataaaaatatctttcaagaaggaaggagaaatgaagacattctcagatgaaggaaaactgagagaatgtatcagcagc

SEQ ID NO: 834874 - DNA, 120 bp, Artificial Sequence
  ENSG00000224271_148 (sequence is synthesized)
agacctatcctaacaaaatagctaaaaagagttctctaaacagaaaggaaatgataaaaaggaaccttacaacatcaagaagaaaaaatgatgagcaaagtaaataaaaatatgaataaa

SEQ ID NO: 834875 - DNA, 120 bp, Artificial Sequence
  ENSG00000224271_149 (sequence is synthesized)
cagagggaaagacagcggctcagataatcatagagcaccaactctatctgcaccatggattttgcaagctcctgggaatgcagaagagaacattacagatggctttgctggctttgtggg

SEQ ID NO: 834876 - DNA, 120 bp, Artificial Sequence
  ENSG00000224271_150 (sequence is synthesized)
attcaaaaatagccatcaaaacaagtctgaagcaactcacacaactaattttaatggtggccactgccagggtaaccagttcattgaagaaatgactctcggcagggatcagaacacaac

SEQ ID NO: 834877 - DNA, 120 bp, Artificial Sequence
  ENSG00000224271_151 (sequence is synthesized)
aagatgcactgcagacggatagcctctcaggaacctgcttacctcagagcctgctgcggactgagttgtcttctccaaaatccatttgtggaggccctcatccccagtgggagagtattt

SEQ ID NO: 834878 - DNA, 120 bp, Artificial Sequence
  ENSG00000224271_152 (sequence is synthesized)
ggagatgaagcatttggaggtgattaagcttagatgagctcagagtggagcctcaggatggcatcgatgccctggtaaagagggacactgagacctggccctcccttgctctccaccgtg

SEQ ID NO: 834879 - DNA, 120 bp, Artificial Sequence
  ENSG00000224271_153 (sequence is synthesized)
tgaggacacaatgagatggtggccacctacaagccaggaactgaaccctacggggccttgacactggccgttccagcctccagaatggctaggaataaatgtctgctctttaagtcactg

SEQ ID NO: 834880 - DNA, 120 bp, Artificial Sequence
  ENSG00000224271_154 (sequence is synthesized)
ggcggtggagctttgttatggcagcaccaggggctggttgagagcctttgcatggctcttgttccacctggaatgagatttctaactcttggctacctcacccccttacctcattgtttc

SEQ ID NO: 834881 - DNA, 120 bp, Artificial Sequence
  ENSG00000224271_155 (sequence is synthesized)
atgttgcaaccacccacccactccccatgtctctggcattctcatttattttttctttgatttcatagaacacatcacaaagccatttgctcatgcatgatgtttattgtctattttcta

SEQ ID NO: 834882 - DNA, 120 bp, Artificial Sequence
  ENSG00000224271_156 (sequence is synthesized)
tctccctgctagagggtaagatgctcaagaacactgctctgtctgcctccctggacccagaaaatgcttggcgtgtggtagaacttagatatatttgtgttgaataaattaattgaaggg

SEQ ID NO: 834883 - DNA, 120 bp, Artificial Sequence
  ENSG00000224271_157 (sequence is synthesized)
gaagaatctggctgtaccccaggtacatcagcaaagataacctttacctagcagtaaagaggtcccccttacactgggagccctagtgaagagcagggactttcacccccacctagcagt

SEQ ID NO: 834884 - DNA, 120 bp, Artificial Sequence
  ENSG00000224271_158 (sequence is synthesized)
gatggggccccacccaccacagtgccagcagagaccatgtgggagccagaatcctcatccctacccagcagtaacaaggagccctcctcactgcgggcatcaagggtgagtgagtgcaaa

SEQ ID NO: 834885 - DNA, 120 bp, Artificial Sequence
  ENSG00000224271_159 (sequence is synthesized)
acctgggtgtcactcggaagggaagaatggtgtctccttccttcccatcccctgccagagtgatatcactaggaaaaagaaaataatttatcaccagcaaatctaccctacagctaaaac

SEQ ID NO: 834886 - DNA, 120 bp, Artificial Sequence
  ENSG00000224271_160 (sequence is synthesized)
cacttattctactaaaaatggagaggatcacacaatgggtgaaaagacaatcagtgcatgccatacaaattgacagagatgttggaattatttgacaaaggttttaaaacagcgatgaaa

SEQ ID NO: 834887 - DNA, 120 bp, Artificial Sequence
  ENSG00000224271_161 (sequence is synthesized)
atgcttcaataaacaattacgaacacacttaaacaaaggaaaacaaagaaagcctcagcaaagaaatagaaagcctcagcaaggcaatagagatataaagaaaaaaaaatgagtagacat

SEQ ID NO: 834888 - DNA, 120 bp, Artificial Sequence
  ENSG00000224271_162 (sequence is synthesized)
tcccaaagtgctgggtttacaggcatgcacccccacacccagcctcaaatagacattttagaactgaaaaatataattgaaattttaaaagcacagtgaaatgagctcaacagcagaatg

SEQ ID NO: 834889 - DNA, 120 bp, Artificial Sequence
  ENSG00000224271_163 (sequence is synthesized)
acagtgaaatgagctcaacagcagaatgaaatggacacaggaaagaactgcgaaatggaagatggaacaatggaaataatccaacccgaacaacatggagaaagtagaagaataataaaa

SEQ ID NO: 834890 - DNA, 66 bp, Artificial Sequence
  ENSG00000224271_164 (sequence is synthesized)
cattgccagcagccctgacaaagatgcactgcagacggatagccccactcaagcaattctcctgcc

SEQ ID NO: 834891 - DNA, 120 bp, Artificial Sequence
  ENSG00000224271_165 (sequence is synthesized)
ctgagattacaggcatgagcctccacacccagcctatttaagctattttttttcaaatctctatgaactcaaagttttacttataaaatggaccaaatataaggaagaaataacagaaaa

SEQ ID NO: 834892 - DNA, 120 bp, Artificial Sequence
  ENSG00000224271_166 (sequence is synthesized)
gtgggcctgcggagagctacgtggatcttcccctcccaacagtcgagaagactcgaggccgcctctgagcacctcccctggctcagcggagtacagtgcaccgtccccacagctccttcc

SEQ ID NO: 834893 - DNA, 120 bp, Artificial Sequence
  ENSG00000224271_167 (sequence is synthesized)
tgagctttcggtccactttaaatcaatagcagaagaatgtatttgattatcaggctgattttactctctgtgctctaatgaagagcccatattatgcaaatgcatatgatgatgacagca

SEQ ID NO: 834894 - DNA, 120 bp, Artificial Sequence
  ENSG00000224271_168 (sequence is synthesized)
ggtttttaaactgcaaattcattctccaagctcaaaataaacttttgttgtggggtgggggacggtgtactataacacaaggaagatgggaaaactcatttcagaaagaatgcatcccag

SEQ ID NO: 834895 - DNA, 120 bp, Artificial Sequence
  ENSG00000224271_169 (sequence is synthesized)
gaaaaaaaataattaagctccttagaattaatttgaaggctttcgtatttatcttttgtgactcattgttgaaagttagaagaaccaatcaaccctattccttcattctgtcaaattaaa

SEQ ID NO: 834896 - DNA, 120 bp, Artificial Sequence
  ENSG00000224271_170 (sequence is synthesized)
acaaagatgcactgcagacggatagcctctcaggtttacatcaggaaaacaaaacagatgacatccatgggctctcaaggaaattgcaatataatgacaaatttctctcaactgtttggc

SEQ ID NO: 834897 - DNA, 120 bp, Artificial Sequence
  ENSG00000224271_171 (sequence is synthesized)
ttctctggaggaaatacgcaggatatgcagtaagaagtgagatgggatcgtcaggtaaggctgcctggaggaggtggcatggaagccaaggctgtagagcaagttgactaggcattgcac

SEQ ID NO: 834898 - DNA, 120 bp, Artificial Sequence
  ENSG00000224271_172 (sequence is synthesized)
agggggaactgcatccttggtagagggaaaggaatgtgtaagccttgaggtaggcaccagctctctggttagaggaagagacggtaggccctctccagggcagcttgagcttagggaagg

SEQ ID NO: 834899 - DNA, 120 bp, Artificial Sequence
  ENSG00000224271_173 (sequence is synthesized)
aagataagtatcatgacaagaggacggatgggcctagatctcacaggatttgtgggtcaggcttggattggcttattctagggctaatgcaaagccagggctgaggtttccggtggtgat

SEQ ID NO: 834900 - DNA, 120 bp, Artificial Sequence
  ENSG00000224271_174 (sequence is synthesized)
gacctgcactgtgatgggaccttttggctgcttctggtgcaggcaattgtcagccttcacctttgccccatcagctttgccagaagtttggccaacttccctgaaaggccttttctaacc

SEQ ID NO: 834901 - DNA, 120 bp, Artificial Sequence
  ENSG00000224271_175 (sequence is synthesized)
atctcagttaaattgcagtctgcatttcataatcataaagaggtcaattatctaagaagacagagcaatacttaatgtgcatgcacctaacaacaaagcatcataacacgtgaggccaaa

SEQ ID NO: 834902 - DNA, 120 bp, Artificial Sequence
  ENSG00000224271_176 (sequence is synthesized)
aacgatagacccgtgaagagatgcatccactactgtagtaggagacttaaaatccctcagtcagcacaggacagatgtagcaggcagaaaatcagtaaggatgtggttgaactcaatggt

SEQ ID NO: 834903 - DNA, 120 bp, Artificial Sequence
  ENSG00000224271_177 (sequence is synthesized)
accatcaatcaagtggatataatcaataccaatagatgacttcatttaacaataacagagtacatatccttctcaagatcacatggaacattcaccaaaatggatgaaagtctcggccat

SEQ ID NO: 834904 - DNA, 120 bp, Artificial Sequence
  ENSG00000224271_178 (sequence is synthesized)
aaaacacatttaacacatttaaaagaatagaaatcatacagtgtgtgcctttaggccacagtgcaattaaactggaaatcaataacagaaagctggaaaattccaaagtacttgcagatt

SEQ ID NO: 834905 - DNA, 120 bp, Artificial Sequence
  ENSG00000224271_179 (sequence is synthesized)
aaacaacacacttgtaaataacacatgggtcaaagaagaaatctcaagaggaattttaaacatatttggaactgaataaaaatgaaaagataacatcacaatttgtgagatgcagcaaaa

SEQ ID NO: 834906 - DNA, 120 bp, Artificial Sequence
  ENSG00000224271_180 (sequence is synthesized)
gctcctggggcagagcatccagaactgactaagacagagaggaacataaattgagcaggaaagggaattgctatgaactgactgtgagtgtctcccccaaaattcatatgctgaagctct

SEQ ID NO: 834907 - DNA, 120 bp, Artificial Sequence
  ENSG00000224271_181 (sequence is synthesized)
ggtggcttagcacacattcttggaaacaaagacccatggataccctcatgagatgacccagaaagtcaggactttccagagggagaaggctgaagaaacactgagccataaagctcagaa

SEQ ID NO: 834908 - DNA, 120 bp, Artificial Sequence
  ENSG00000224271_182 (sequence is synthesized)
gatcccaggctgcaaagccatcgactatctgaaggaggccggccccctttactgcaggcactgctggctctgagtgtgtctgtgcctgctggctgattccctgtgtgtcagacccgggac

SEQ ID NO: 834909 - DNA, 120 bp, Artificial Sequence
  ENSG00000224271_183 (sequence is synthesized)
acatcacctcggggtgagaatgtgtaacatcttcgtgtgtgggtgtagcagctgcagtgggaacatgtctgaatgactttgcacagttctggatggcaaataaatgtttaaataggtgca

SEQ ID NO: 834910 - DNA, 120 bp, Artificial Sequence
  ENSG00000224271_184 (sequence is synthesized)
tcaccctgaacagcgcaaactgcttgtggagctccaagactggcagacttgggagggggagcatttagggattggatgactttggccgtggactcggggttgggacagtgaggctgccac

SEQ ID NO: 834911 - DNA, 120 bp, Artificial Sequence
  ENSG00000224271_185 (sequence is synthesized)
tgaatggctgtcactcagaaatgtagttactgataaaaagttgactcaatttgtcagggcaggcttaaaatcagttttggtagttactttttgtcatggctgaagagcaatcctctgtct

SEQ ID NO: 834912 - DNA, 120 bp, Artificial Sequence
  ENSG00000224271_186 (sequence is synthesized)
tcttgaatttggacctttatttggacttgagtttggaaaaactaagaaatttttgttctcattttcattacatgcttgagaaaactgaggctcagacaggcgagtaagtttcccagggtc

SEQ ID NO: 834913 - DNA, 120 bp, Artificial Sequence
  ENSG00000224271_187 (sequence is synthesized)
acgcatttaccggctggcatattaaagttttgaacaaagtccacgcttttcttacacactattctcattagtattagttttagtagtaatcgtagctgtacttttggttcataggttcat

SEQ ID NO: 834914 - DNA, 120 bp, Artificial Sequence
  ENSG00000224271_188 (sequence is synthesized)
agagagttgttaatcctactcctcactgataatccattctcgccatcatgccctacaagacctctggttgtttaattccatttctccttcatgctggatcccatctcccatcccctctcc

SEQ ID NO: 834915 - DNA, 120 bp, Artificial Sequence
  ENSG00000224271_189 (sequence is synthesized)
acccctccgacagagtcactctttctaatgtctttttatctgtacctaaatatttgtgtagctttgaaaaatctaatttgtcaagggttatgtgttcattttacatttccatacatgtta

SEQ ID NO: 834916 - DNA, 120 bp, Artificial Sequence
  ENSG00000224271_190 (sequence is synthesized)
ttgtgcaatatatagatctcatttgtttcctaatttttttcactcaccactgttgtgaaaacacactgacatttctgtatgaccctcttctgacctttgcttcacagcgtgcatctacca

SEQ ID NO: 834917 - DNA, 120 bp, Artificial Sequence
  ENSG00000224271_191 (sequence is synthesized)
acccctggattgcctctggctccccccaacacacaccttactgcaacatccacacactggggtctttatggatttccctgggttttcacttaggagtgggattgctggatcctaggagac

SEQ ID NO: 834918 - DNA, 120 bp, Artificial Sequence
  ENSG00000224271_192 (sequence is synthesized)
acccgttaattctgcttggcacagacagtttgctctgtgtggcaggccatattcccatcagcagtgcgtgaggggttcattctgccacatcctcaccagcatttttatactccttgaaag

SEQ ID NO: 834919 - DNA, 120 bp, Artificial Sequence
  ENSG00000224271_193 (sequence is synthesized)
ttttgtcagttagatgaatgggtgcaaaatgtaatcttaacattgatttaacctgcatttctgtgtttgccaaggaagttgtgcgtctcttcattacttagcagccattcaagtttccct

SEQ ID NO: 834920 - DNA, 120 bp, Artificial Sequence
  ENSG00000224271_194 (sequence is synthesized)
ttctgtgaagctcttattcatataccttagccaatttgatagtccattgtttttattttgttggatttcactatttccttgcatgttctagatgccaatatcttgttgattttaaaagat

SEQ ID NO: 834921 - DNA, 120 bp, Artificial Sequence
  ENSG00000224271_195 (sequence is synthesized)
gtagtcattctccccccaatctgtcacttgtttactttaatgatgcctttttatctcaaacccaaatttttaatgttgctattgaaagggcaaaagttcccttatccctgtcacagggtg

SEQ ID NO: 834922 - DNA, 120 bp, Artificial Sequence
  ENSG00000224271_196 (sequence is synthesized)
tgtgatgcgggagtggctcacttcctcagcgccccgctgctgagacctttaggggagcatgcagatgggccggttgtgtggctccgaccccacggcagcgtctaggggtgaatgtttaca

SEQ ID NO: 834923 - DNA, 120 bp, Artificial Sequence
  ENSG00000224271_197 (sequence is synthesized)
gctgctgaagccacagtgggcgtgtgttacaggatgctcttttagttcagccatccgtaggtggcttgtgttagctcaattagacacccttccttatcacaaggacacagggatttctgt

SEQ ID NO: 834924 - DNA, 120 bp, Artificial Sequence
  ENSG00000224271_198 (sequence is synthesized)
atttctgtatcccggggtttcttgccttggtgtactggaagaatcggatcagttgtgggcttggagaataagtgtaagtttgtttttttgttattttattattattattattattttgag

SEQ ID NO: 834925 - DNA, 120 bp, Artificial Sequence
  ENSG00000224271_199 (sequence is synthesized)
caggcgtgagccaccgtgcctggcctaagtgcaaggttttattgagtggaagttctcagcagatggatggggagccagaagggagatggagtgggaaggtggttttcccttggagtcggg

SEQ ID NO: 834926 - DNA, 120 bp, Artificial Sequence
  ENSG00000224271_200 (sequence is synthesized)
cgggcagctcagtggcccaggctgtcctctgacctccctggttgaactctgtgtcgttctgcaggtcaatggcctgccagcctgcctgtgtctgtcagtgtgctgttctgctggggccct

SEQ ID NO: 834927 - DNA, 120 bp, Artificial Sequence
  ENSG00000224271_201 (sequence is synthesized)
ctccacatccagctgctgtgtcgtcttccactgatgcgttcctcttgacatccagccgcatgtgcatgtgtgtccgatggggcctcggggtttttataggcataggatgggggtgtggtg

SEQ ID NO: 834928 - DNA, 120 bp, Artificial Sequence
  ENSG00000224271_202 (sequence is synthesized)
tggtcttgggaaatgcaacatttgggcgggaaaacagaaatgcctgtcctcacctaggcccatgggcacaggccctgggatgaagccctagccagggaccacaccttcctctacccagca

SEQ ID NO: 834929 - DNA, 120 bp, Artificial Sequence
  ENSG00000224271_203 (sequence is synthesized)
acccagcacgtccctgtcccccttccatatcactgtggtaaaatccagtttttttcaccttagattttgtacatttgaggtatgacataaagtgcatattcagttcaagataaaaagttt

SEQ ID NO: 834930 - DNA, 120 bp, Artificial Sequence
  ENSG00000224271_204 (sequence is synthesized)
tctccaatagtctcctattagctttatttttatgccttttcatttgagtttttaatcaatctagagatcattttacttaggatgtaaggaagagttccaattttagttttacccatcagg

SEQ ID NO: 834931 - DNA, 120 bp, Artificial Sequence
  ENSG00000224271_205 (sequence is synthesized)
aaggcagccatctgtgagccagaaagtgagccctcacctgatggccaagcctgctgatgctttggttttggactttccagcctccagaatggagaggtgaaagggggagaggctgaaaag

SEQ ID NO: 834932 - DNA, 120 bp, Artificial Sequence
  ENSG00000224271_206 (sequence is synthesized)
ccagcagagcgtaattgaagtgcattccagagggaaagacagcggctcaggtaggccttgccaggcgttttggggtttcacccatgggatgctgcttgtttgctgataccactaagcaaa

SEQ ID NO: 834933 - DNA, 120 bp, Artificial Sequence
  ENSG00000224271_207 (sequence is synthesized)
tgaacagttgcattctctgagagggaaacagtccagccaaaatggtgcatggctcacccaggattcacgccacacccagtgtcaccccagcagcggggggcctgggaaccacttctgtgt

SEQ ID NO: 834934 - DNA, 120 bp, Artificial Sequence
  ENSG00000224271_208 (sequence is synthesized)
tatccctttggtgctgcctctctggggagccctgactaatatgcatgcagatgatacggtgcctggcattctgaatacatgcactaaatccaccacttttccccatttatagatttggat

SEQ ID NO: 834935 - DNA, 120 bp, Artificial Sequence
  ENSG00000224271_209 (sequence is synthesized)
taacacactaacttactcatatctgcaagtataaataaaaaaaattgctggtgccaatttcaaagttttgccatgaggtagcttgaaggaatgacattttaaggaattcgctcaaggccg

SEQ ID NO: 834936 - DNA, 120 bp, Artificial Sequence
  ENSG00000224271_210 (sequence is synthesized)
taggacatgcgatcaggttgtaatgccaagcaactcttattgggccctctgctctgatgcccttcacatctgccacctcaatggattagagctctccctgcagacacccctagccccagc

SEQ ID NO: 834937 - DNA, 120 bp, Artificial Sequence
  ENSG00000224271_211 (sequence is synthesized)
tcctgcctatcgtttctttaacgtgctcatcacgctccaacatgtcatgtatttactggctaagttgcctttttttatgtgttttcctgggataaatgtcagctcacagaacctagcacc

SEQ ID NO: 834938 - DNA, 120 bp, Artificial Sequence
  ENSG00000224271_212 (sequence is synthesized)
tggcacatagtagaggcttaattccatatctgttggaattgatgcaaataaatgaattattgtcaagagggagggagggagagagagagagaaagagagagagagctgtagctcagggag

SEQ ID NO: 834939 - DNA, 120 bp, Artificial Sequence
  ENSG00000224271_213 (sequence is synthesized)
tcaaagtgcaacagaatgagtgaatgagtttggggctccgtcagaccaacttcaagttccacctcagtcacttgcaaggtcatttagcctctctgcatcttgttcttcacatctagagtg

SEQ ID NO: 834940 - DNA, 120 bp, Artificial Sequence
  ENSG00000224271_214 (sequence is synthesized)
agtagtatgacttggagttcagtactcacctagaaaatgaagaaaagcacagaccacaagcctggtgtatagtccacactcagtgtgaagggcatgtattatttttgtgggatcccatag

SEQ ID NO: 834941 - DNA, 120 bp, Artificial Sequence
  ENSG00000224271_215 (sequence is synthesized)
cactctgctggcaccccgttgaaagtaccttccctaccttggagtcatttgtcttataggcacttttgtattttgttaatatttacagttgtattataagcctctctttttccccattga

SEQ ID NO: 834942 - DNA, 120 bp, Artificial Sequence
  ENSG00000224271_216 (sequence is synthesized)
ctgctgtggtgcactgcaggctggtgcatacagagtgctccgtggatgcttgctgagtgcctgtgtaagagggtggaccgatgatgggtctagtgggttgcatggctggctttctccatc

SEQ ID NO: 834943 - DNA, 120 bp, Artificial Sequence
  ENSG00000224271_217 (sequence is synthesized)
catttatttagatgtgcgttgccctgtgtggcaatactctgatggtagatcttaggcaaaactcaatttacagaggacccaagggtcaaaatccaagtcacagctgtactttgacaccag

SEQ ID NO: 834944 - DNA, 120 bp, Artificial Sequence
  ENSG00000224271_218 (sequence is synthesized)
tgataagcgacttagagcagcatactaccctttacacaattttcaaagtcatcattcagtttagtccccatgagctagatctgatcattatttctaggtggtgaagcagtgatgtacggc

SEQ ID NO: 834945 - DNA, 120 bp, Artificial Sequence
  ENSG00000224271_219 (sequence is synthesized)
tgtgagtgtctcccccaaaattcatatgctgaagctctaattcccaaggtgagagtatttggaggaggggcctttgggaggtaatcagatttagatgaggtcttgagggtagagtcccta

SEQ ID NO: 834946 - DNA, 120 bp, Artificial Sequence
  ENSG00000224271_220 (sequence is synthesized)
gaccaccgggaggtggagaggctaagatgctagcaaagggcagacctgtaagagagagccctggagggtgggtgacagcaaagctgacagagggggtcttttaggaaaagccgtgggatg

SEQ ID NO: 834947 - DNA, 120 bp, Artificial Sequence
  ENSG00000224271_221 (sequence is synthesized)
ctgcatgtcacaggagagcagacggcctgctggatttggagacactcaggtcagggcccgacttaggacaactttgggctgtgagctaggtggcgtagggtaccacaagttgatttaatc

SEQ ID NO: 834948 - DNA, 120 bp, Artificial Sequence
  ENSG00000224271_222 (sequence is synthesized)
ctagctcctctggggacatgaagaacacaagagccattattctgaggactctgctgggtctgagcccttgctcttgcctccaggacccactggcattcctttccctagcaaaaggcggag

SEQ ID NO: 834949 - DNA, 120 bp, Artificial Sequence
  ENSG00000224271_223 (sequence is synthesized)
gtaattgaagtgcattccagagggaaagacagcggctcagtctcactctgttgcccaggttggaattcagtggcatgatctcgactcacggcaatctcgcaatctctgcctcccaggttc

SEQ ID NO: 834950 - DNA, 83 bp, Artificial Sequence
  ENSG00000224271_224 (sequence is synthesized)
gcataacgttctcaaggctcagccacactgtagcctgtgtcagaacttcattcctggctgggtgccgtggctcacacctgtaa

SEQ ID NO: 834951 - DNA, 120 bp, Artificial Sequence
  ENSG00000224271_225 (sequence is synthesized)
agacagagcaagactctgtcacaacaaacgaacaaacaaacaaacaaaacttcattcctttttatggaggaacactaccatatttcattgtataaatataccacattttgtgatacacca

SEQ ID NO: 834952 - DNA, 120 bp, Artificial Sequence
  ENSG00000224271_226 (sequence is synthesized)
acacccttggcaaccacgttctactcctcgtttctacgagtttggctattttaatacctcatctaagtggaattgtgctgcatttgtccttctgtgaccggctcacctcacgtagcgtgc

SEQ ID NO: 834953 - DNA, 120 bp, Artificial Sequence
  ENSG00000224271_227 (sequence is synthesized)
tgttctccaggttcatccatgttatcctgttcagcaggatttccttctcttctgaagctgaatcataatccatcgctaacgttatcttgtaactcttctattaaactctctatctcctta

SEQ ID NO: 834954 - DNA, 120 bp, Artificial Sequence
  ENSG00000224271_228 (sequence is synthesized)
gaaccagccccatcattgctaaactttaatgaggcaagtaggatatcatttttagtgggaaaaatcaggttcattcaaagtgttggggaatccagtgctatcaaacttctcaacagcaac

SEQ ID NO: 834955 - DNA, 120 bp, Artificial Sequence
  ENSG00000224271_229 (sequence is synthesized)
cagtgctatcaaacttctcaacagcaaccttgaaagctaggagatagataatgccttcaaatttctagaggaaaatatctctcacgtagcattttcttttctttctttctttcttttttt

SEQ ID NO: 834956 - DNA, 120 bp, Artificial Sequence
  ENSG00000224271_230 (sequence is synthesized)
gccaccgcacctggcctcacatagcattttctactcagcccaactttcattcacataggagggaagaataaaggcattttcttacatgcagactctaagcagatattactcatttgcctt

SEQ ID NO: 834957 - DNA, 120 bp, Artificial Sequence
  ENSG00000224271_231 (sequence is synthesized)
ttttggggacagtcctgtagcatgtgattcaacaaaacacatccataaaccaagtagctccaagaaacagtgactacacccaggaaggaaaggaagaggctgtccaggatggtgatgatg

SEQ ID NO: 834958 - DNA, 120 bp, Artificial Sequence
  ENSG00000224271_232 (sequence is synthesized)
aacatccaagaaagcaattatcagacaaagggacatacattgacaggggcgtgtgcatcggcaggggagttgcaggatataccagtcctaagcacattaaaatctcaaaaaaaaaaaaaa

SEQ ID NO: 834959 - DNA, 120 bp, Artificial Sequence
  ENSG00000224271_233 (sequence is synthesized)
cagagggaaagacagcggctcaggtgcattagatgcggacggaggggagtttgcctgatgcagttgaggaccttgcggggcgattgcacctgtttccttttgcagaagactgactctgag

SEQ ID NO: 834960 - DNA, 120 bp, Artificial Sequence
  ENSG00000224271_234 (sequence is synthesized)
tgaagaaatgactctcggcagggatcagaacacaacttacattctgtatcgctgtgccttcaattattattattattattatttattattagtttcttttgagacagagtcttgctctgt

SEQ ID NO: 834961 - DNA, 120 bp, Artificial Sequence
  ENSG00000224271_235 (sequence is synthesized)
atgctctggaaagccctcagaggacctgggtctcacctccacagtcccgtggctccctgcccctgcaggctggactcgcccctgggcttggaccacctccagccagactccagtggtgtg

SEQ ID NO: 834962 - DNA, 120 bp, Artificial Sequence
  ENSG00000224271_236 (sequence is synthesized)
atagagagggctcaggatagggggttctgcgaactgactcatcacccccaagcaagtgataacctcactaaggctcagtcctaataatcctgctatattaacaacctctatacttttgaa

SEQ ID NO: 834963 - DNA, 120 bp, Artificial Sequence
  ENSG00000224271_237 (sequence is synthesized)
actgacccctagtcccataaacagttttttgtttttgttttgataaacatagaaatggatgcttctggtcttaaagcttgaaacttgtatttgttttatgagttcctttttcaggaaagg

SEQ ID NO: 834964 - DNA, 120 bp, Artificial Sequence
  ENSG00000224271_238 (sequence is synthesized)
gcccccaggcctctcaaaagcatcaaagaactgaaactcactagatcatctcatccagacagtgagatgtcagacccttcattcaccctgattgcttccttacccctctgagctcctctt

SEQ ID NO: 834965 - DNA, 80 bp, Artificial Sequence
  ENSG00000224271_239 (sequence is synthesized)
ttcccatacatctggtcattgagatggatttgagaatctcctgggctgcagcaccaataaagctttcttccttggtgata

SEQ ID NO: 834966 - DNA, 120 bp, Artificial Sequence
  ENSG00000224271_240 (sequence is synthesized)
ggagagagagatcaccagggagagaattgctggtgcacccgcgggttgctggcagtgagaagcacggagcgcggcagggagagggaccggcatgaggactccttggagcccttaagaaag

SEQ ID NO: 834967 - DNA, 120 bp, Artificial Sequence
  ENSG00000224271_241 (sequence is synthesized)
ttgttttaaccatatgcattaactttttaacttaaacattgttttttatgtataaaggttatttttagaaaatgtttgttaattttgtttataaacttaaatttagtaaattgctggctg

SEQ ID NO: 834968 - DNA, 61 bp, Artificial Sequence
  ENSG00000224271_242 (sequence is synthesized)
aattttgtttataaacttaaatttagtaaattgctggctgggcacagtggctcatgcctgg

SEQ ID NO: 834969 - DNA, 120 bp, Artificial Sequence
  ENSG00000224271_243 (sequence is synthesized)
ccttccatttacaaaaacatggggaatagaagatgaactcaaatgacaccacaaggaacaaccagacaaatcatctacggctggaatgtacaggacaagtaatataatgttgggaaaaaa

SEQ ID NO: 834970 - DNA, 120 bp, Artificial Sequence
  ENSG00000224271_244 (sequence is synthesized)
ataagtagatgacaaatagagctcacagaatttagtaaatgactagaaataaaagaaacatcattttagaacaagagagatgaaatcagaggaaatacaaaagtaaataaccatcacata

SEQ ID NO: 834971 - DNA, 120 bp, Artificial Sequence
  ENSG00000224271_245 (sequence is synthesized)
tcagatcccactgtgaagtgaggggttttaaaagtaataaaggaagatgccccaaggaaacaagataacgggattaaagtgagaaaaggagagaacagccaggcaatgtttctgagatgc

SEQ ID NO: 834972 - DNA, 60 bp, Artificial Sequence
  ENSG00000224271_246 (sequence is synthesized)
gcctggcctccttattcttaatgaccacttggaatccaatgacagaatctgccaccacaa

SEQ ID NO: 834973 - DNA, 120 bp, Artificial Sequence
  ENSG00000224272_0 (sequence is synthesized)
aacatcttggcgaggggcattcacatgcacccacataaagtgcagaggccctttgcacagaatcccggcagggggccctcggcggctctgaccctcagcctgcaccgtgagcgtcctggg

SEQ ID NO: 834974 - DNA, 120 bp, Artificial Sequence
  ENSG00000224272_1 (sequence is synthesized)
ccctggccagggcgaagactccgaccacagacccttcacctggtagagcgtccccgaccagcccatctgcagaacgaccctgtgggctggggccggccccctgcattgggcccctcacaa

SEQ ID NO: 834975 - DNA, 120 bp, Artificial Sequence
  ENSG00000224272_2 (sequence is synthesized)
ccagtctgtctccatcccatgccctgaatctgcccccaggaaccctcagtgtcacacccaccctgtgggccaggtcaaggcactcaacactggggtgctgaggacacgggggtgcgccct

SEQ ID NO: 834976 - DNA, 120 bp, Artificial Sequence
  ENSG00000224272_3 (sequence is synthesized)
ccaacaagggctgtgctgggacaggcccagctgtgaggccgcagttgacctcccagagggacacgggtctgctgctccagagacgcggccctgccaggagggctccgtgagtgcacactc

SEQ ID NO: 834977 - DNA, 120 bp, Artificial Sequence
  ENSG00000224272_4 (sequence is synthesized)
cgcaatgtcctgtgcctctcagggcccagggtgacccctccccagcacagctgccgtgcaggactcctgccagtcccattcacgctggcctgcccccagcctgtccccgcaggactcctg

SEQ ID NO: 834978 - DNA, 120 bp, Artificial Sequence
  ENSG00000224272_5 (sequence is synthesized)
ccagtcccattcacgctggcctgcccccagcctgtccccgcaggactcctgccagtccctttcacgctggcctgcccccagcctgtccccgcaggactcctgccagtccctttcacgctg

SEQ ID NO: 834979 - DNA, 120 bp, Artificial Sequence
  ENSG00000224272_6 (sequence is synthesized)
gcctgcccccagcctgccatttcagaggcagccttggtaaccaatgctcaaatgaccactgcccaggccagaatctcagaggaggccacaggtgcccggtatgttctgatggggcagcct

SEQ ID NO: 834980 - DNA, 120 bp, Artificial Sequence
  ENSG00000224272_7 (sequence is synthesized)
ccgtgggggatccctgggccctgaacaccctcctttctcactgtccctccctcccctgcgaagggcatcctcagctgcttctgaaacctggggcgctgtggtgggaaacaggtaggtcac

SEQ ID NO: 834981 - DNA, 120 bp, Artificial Sequence
  ENSG00000224272_8 (sequence is synthesized)
gtggtttccaggcttttcaagcccactgttttcaatctagagatttcacagaaaaacccgtgttttcagcttctcttgaaaagtcagatctgccctcaggtgccacccacttcccctggg

SEQ ID NO: 834982 - DNA, 120 bp, Artificial Sequence
  ENSG00000224272_9 (sequence is synthesized)
aaatttctattcaaaaagaccgtaccagtttcagttcccgccaacctcaaaggcagagacaaaaggacggtgtgcccctcctgtaacttcatttcttcggtgactgtgaagctgagggca

SEQ ID NO: 834983 - DNA, 120 bp, Artificial Sequence
  ENSG00000224272_10 (sequence is synthesized)
gagtccacgcctggggacagggctgccaccgcagcggccactgcgtccaaccctcgctcctcctcccagagacgacctgcgttccgctcagggacagggctgccaacgcagcggccaccg

SEQ ID NO: 834984 - DNA, 120 bp, Artificial Sequence
  ENSG00000224272_11 (sequence is synthesized)
cacccaacgctcgctcctcctcccagagacaacctgagctctgctcagaagcggcacctcctcatgctggactcactcgggcccacatgtgccaagggggcctggttttggggccggcgg

SEQ ID NO: 834985 - DNA, 120 bp, Artificial Sequence
  ENSG00000224272_12 (sequence is synthesized)
gatgctgaaaactgtgagtctttcttcaactcaggggaatgtttccagggcacgccaggcctcactcacgcaggcctccgcgacaactgttcagcactgactgagggtgaagtgaaatcc

SEQ ID NO: 834986 - DNA, 120 bp, Artificial Sequence
  ENSG00000224272_13 (sequence is synthesized)
tgaaagctgagagccagcgccctcacacgagggctgggacgtaacaaaagcccatcaagagttttgcccagggctttcttgggccttgaagcatgacgagaccaggacccgtttaggatt

SEQ ID NO: 834987 - DNA, 120 bp, Artificial Sequence
  ENSG00000224272_14 (sequence is synthesized)
cttgaagcatgacgagaccaggacccgtttaggattaaacaagttttactgggggtctgaaaaaactccccaggcctccacaaacaagtggagaaggaactccccaaacctccatgattt

SEQ ID NO: 834988 - DNA, 120 bp, Artificial Sequence
  ENSG00000224272_15 (sequence is synthesized)
tttagatcaagtaaatttactgagtcttcagaggaagatcttcaggaccagacctcagttagagatgagaagaattgaatcacgtacgtctttagacgaatgcacactgacacggagaca

SEQ ID NO: 834989 - DNA, 120 bp, Artificial Sequence
  ENSG00000224272_16 (sequence is synthesized)
cagagcttagaaggtgtgtaagctctggaaaaactgtaatctggagttggtctggcgatcatttccaggccttctccctgtaaccagttacagaaataaaatccctcttcttccccagtt

SEQ ID NO: 834990 - DNA, 120 bp, Artificial Sequence
  ENSG00000235154_0 (sequence is synthesized)
agaacctgtcccaagtctccatactgagcatcataaggatgtatattttctggccaagtggcaatgatgagttttcagagaggatgacactgaggttctgggacgacctgtgtctcaccc

SEQ ID NO: 834991 - DNA, 120 bp, Artificial Sequence
  ENSG00000235154_1 (sequence is synthesized)
gtaaaggggagcagaaacaggtagagggagctggtctcctgaatccgatccagccccgttttcctgccaagccctgggatgaggacctgagacgccttctcccacccactgctctgcgca

SEQ ID NO: 834992 - DNA, 120 bp, Artificial Sequence
  ENSG00000235154_2 (sequence is synthesized)
ttgcacagaagagcggctgctggtaaagttctgggagttctgacacatgcacgccacagaaacacaggactgggggttgtcaccgctatcaacgttaatgacaataaagggaaaacagca

SEQ ID NO: 834993 - DNA, 120 bp, Artificial Sequence
  ENSG00000277247_0 (sequence is synthesized)
cgaaagttaaatgcaccactgcatctattcaggttcaagaacagtatttcacattacctgtgaagccctcaatgaaggctgactgctgtacatccccgctaatcgtcaagacaagaattt

SEQ ID NO: 834994 - DNA, 120 bp, Artificial Sequence
  ENSG00000277247_1 (sequence is synthesized)
gtcgacatccccattagctcctgaccaagtcacatgcaagtcctcagtgctcctgttgcgcaatgttagatccttaacaggctctggaactagggagaaaaatgagaagacatttcagga

SEQ ID NO: 834995 - DNA, 120 bp, Artificial Sequence
  ENSG00000277247_2 (sequence is synthesized)
aaggaactgatcagagtttacctacataataatttatgaatcacattcaaggaactggcaacatctcccttccccaaataaaccactagcactacttcatgcataattaaacaagaaaaa

SEQ ID NO: 834996 - DNA, 120 bp, Artificial Sequence
  ENSG00000273584_0 (sequence is synthesized)
tgatttttccttcattttgttaatgtggtgttttaaatgactcattttattgtgttgaactactctttcattctagaataaaccccatttggtcacagtgtaaatttttcttaatattct

SEQ ID NO: 834997 - DNA, 120 bp, Artificial Sequence
  ENSG00000273584_1 (sequence is synthesized)
attggattcccttttccagtattgcatataggatagttacatctgtattcataaaggatattggtgtgtagttttcctttcttgtgctgtcatgtctggcttggggtcagggtaatgcta

SEQ ID NO: 834998 - DNA, 120 bp, Artificial Sequence
  ENSG00000273584_2 (sequence is synthesized)
ttgcttgattccatgaacctttgactgctttccagagttctgacaaagtggattgtgctgtttttccttgattttttcaatgattctgtggcgagatggacacttcaagctgcctacctt

SEQ ID NO: 834999 - DNA, 120 bp, Artificial Sequence
  ENSG00000273584_3 (sequence is synthesized)
gccatttttgctgacatctcgtcacacccattattgatcttgggaaatctagaccaatattactaaagcaactgtatgcattctgtttactttcaccattaataaaaatgattttaaccc

SEQ ID NO: 835000 - DNA, 120 bp, Artificial Sequence
  ENSG00000272226_0 (sequence is synthesized)
ccccatgtggctgacagcacaggtaaccttatacccattttacagatgaggaagccgacccagacaaattaacgcaatggtccatgtctggtacatttcaagatcaggatcctggggagg

SEQ ID NO: 835001 - DNA, 120 bp, Artificial Sequence
  ENSG00000272226_1 (sequence is synthesized)
ggtggcctcctgaaatagggggatattatgaccttcacctgccctccctgaaaccccagatgactggttgaggctgaactgtctggggaacttcctctgacctaaatcctgtcggctata

SEQ ID NO: 835002 - DNA, 120 bp, Artificial Sequence
  ENSG00000272226_2 (sequence is synthesized)
cttgtgcttcatgccaggggatttctctttcaggaactacatttaaaaaggggggaattatatgataattggacacctactatgtggcagacattacacaaggcatgcttgtgtgggtta

SEQ ID NO: 835003 - DNA, 120 bp, Artificial Sequence
  ENSG00000272226_3 (sequence is synthesized)
ttttatctcatgtgagccatgttatgtggacagggaaaagaggaggatgatggaggaggaggaaagaatcgacttgttccaactgctctccataataaaacttcattcaagtgcatataa

SEQ ID NO: 835004 - DNA, 120 bp, Artificial Sequence
  ENSG00000272221_0 (sequence is synthesized)
gtgtgtgtttgtgtatatatataccctttttttttttttttttttttgtagagactgggtcttgctttgttacccatgctggtcttgaacttctggcttcaaacaattctcatgcctcag

SEQ ID NO: 835005 - DNA, 120 bp, Artificial Sequence
  ENSG00000272221_1 (sequence is synthesized)
ccaaagtgctgagattacaggcataaaccacaatgcctggcccctgtgtgtgtacatacaaagtcaaagtgctaaacctggcgcctaggaaacatccccacctaggcattgcttgcaaca

SEQ ID NO: 835006 - DNA, 120 bp, Artificial Sequence
  ENSG00000272221_2 (sequence is synthesized)
aacagtcggtattttgtgcacctgtgcttttatttcaggagctgggacagttatattcatcagaacagcacggtgtcaaggccctcacccccagaaagcttaggagacactgttttatgg

SEQ ID NO: 835007 - DNA, 120 bp, Artificial Sequence
  ENSG00000272221_3 (sequence is synthesized)
aggagagtgagattggaggaagccctgactccaggtctcctgatccttcctacacaaagcgaagctgaaaaaaagtgcaggacactccatttcctcctgggaccagacagggaagccaga

SEQ ID NO: 835008 - DNA, 120 bp, Artificial Sequence
  ENSG00000272221_4 (sequence is synthesized)
gccaccatggatgtcaaattccggcaaggaaacaccagtatagcaaaatctccacatcacattttaaagctcacacaatggctcaaagagaacccacatcaaaaaaccgaattcctagct

SEQ ID NO: 835009 - DNA, 120 bp, Artificial Sequence
  ENSG00000272221_5 (sequence is synthesized)
gatcaccaaagttgcctgtgaggcttcgtggaacctgcaggtagaaaggacatctttatttcgagctgcagcccagttgcttctgcgtcttggagccccttgaaaggaccctctcccttc

SEQ ID NO: 835010 - DNA, 120 bp, Artificial Sequence
  ENSG00000272221_6 (sequence is synthesized)
aacagtacatagggaggccatttctggggagaaatgtagactgtccttagactcctgaggtttttacacttgcttgctgactctgtggactttgacttcatcattaaacatcttataatg

SEQ ID NO: 835011 - DNA, 120 bp, Artificial Sequence
  ENSG00000272221_7 (sequence is synthesized)
atgtaatttgctttgactgtaagtgtagaacaggacgctgttcctgaatcaggaaacaagggactggtgacctgaactgccaccaccctccctggtgctcagatgcaatgaaatcgtgag

SEQ ID NO: 835012 - DNA, 120 bp, Artificial Sequence
  ENSG00000272221_8 (sequence is synthesized)
gcaacaaatctatggctaggtaaagggtcaactccatttcagcaaatgtttcagatgttccttcctgcctagtaatgttccagctttaccccagccttaatcttttaaaatgtatatttt

SEQ ID NO: 835013 - DNA, 120 bp, Artificial Sequence
  ENSG00000272221_9 (sequence is synthesized)
ccttagcgttgattttaaagtaattcgtatgtatttattacactgggtttgttgcagtaagccacctcgaatgttgctgtagaattaaagtaagcaaataaatgtgtggttctccaagga

SEQ ID NO: 835014 - DNA, 120 bp, Artificial Sequence
  ENSG00000272223_0 (sequence is synthesized)
tctgtcaccagccaggaaggacatgaacctttctctccctcagggccatccattctagagggcagagagttggcctcatttctgagataacttaggggacagaagttcactaccctgagc

SEQ ID NO: 835015 - DNA, 120 bp, Artificial Sequence
  ENSG00000272223_1 (sequence is synthesized)
ccattgtgaggccatcctcacagccgtgactccttatatttctactgctgggttgggaccttggcttgtcaagactaagtagtcagcccccaccaccccaaaaacaaaaccaagcaaaga

SEQ ID NO: 835016 - DNA, 120 bp, Artificial Sequence
  ENSG00000272223_2 (sequence is synthesized)
tcccaaataggcaaatctataaagacagaaagtagatgagtggttgcctagggctgaggagactgaggatgactgctaaggggcataggggtttttttggggggaggtgtcaaaaatgtt

SEQ ID NO: 835017 - DNA, 120 bp, Artificial Sequence
  ENSG00000272223_3 (sequence is synthesized)
ccaaaattgtaatagttgcacaattctgtaaatttactaaaaaacactgtataccttaaatgggtaaactgtatagttaagtgaactgtatctcaataaaacaaaaacaaaacccaaaaa

SEQ ID NO: 835018 - DNA, 120 bp, Artificial Sequence
  ENSG00000277619_0 (sequence is synthesized)
acaaaagaaacgcatctggcctgcgagtcccgggcggctcgtgcacacctcaggcctcaaatgacttgtttcgcctagaatcaactcccgtctcggccgcctcgaagtccccagccctgg

SEQ ID NO: 835019 - DNA, 120 bp, Artificial Sequence
  ENSG00000277619_1 (sequence is synthesized)
cgagaacagcccaggatgagtgaatgtttgccgaacaggatcgcaccgagcgggcgccttcgagccagcgccggggcgggggcagagcccggggcccgttccggcagctcccagcggtgt

SEQ ID NO: 835020 - DNA, 120 bp, Artificial Sequence
  ENSG00000277619_2 (sequence is synthesized)
cctcgtcgaggggccgcctgcccctccttctccagcctcttctcccgggaactcagcccggctgagtgacagcagcctgcgctctaatgggcccccggatgctgcctcctaattagcttg

SEQ ID NO: 835021 - DNA, 120 bp, Artificial Sequence
  ENSG00000277619_3 (sequence is synthesized)
gaccttctcccctacggctgcttctcaggcctccctctctgcaccgcagtcaattttccgggattgggatagaaatgatggcttctaatcagacgaaacgtttctgctggctctaggcgt

SEQ ID NO: 835022 - DNA, 120 bp, Artificial Sequence
  ENSG00000277619_4 (sequence is synthesized)
ttggagaatgcagaaggaagaccccaaggatcccagccagaccccacagcctcttgtacctctccccttgttttacaccttaggccttggccaaatgggccaggcctggccttggcaggc

SEQ ID NO: 835023 - DNA, 120 bp, Artificial Sequence
  ENSG00000277619_5 (sequence is synthesized)
tggggcctgcgtcctggcttcccagggcttcaggcataggcctggtaagccaggtgactgctgtctcccaaccctgggccagcagcccaggaagccctcagtcttccagcttctctccca

SEQ ID NO: 835024 - DNA, 120 bp, Artificial Sequence
  ENSG00000277619_6 (sequence is synthesized)
cacagtggtagctgagctgcagctccaatgggccttcactgggcacaggcaaagacattactctcccactcctaagagtgattccctcctcgagtccttgcacgtaggtgaagtttgtcg

SEQ ID NO: 835025 - DNA, 120 bp, Artificial Sequence
  ENSG00000277619_7 (sequence is synthesized)
aaggattttgctcaacaattgttagctggccccgagacctcagcgtcttgagcaaacaggccacagctggggcggcaaggcgccgccctgacctgctcctctggccataggcggacccca

SEQ ID NO: 835026 - DNA, 120 bp, Artificial Sequence
  ENSG00000277619_8 (sequence is synthesized)
gactgccctctgcccctcacctgtgatcagctccaccagacacagcaacccaagggagctgcgccaggattgtctgcctgggaaagaagcagggaggtgtccagtgtcctcaccccaaaa

SEQ ID NO: 835027 - DNA, 120 bp, Artificial Sequence
  ENSG00000277619_9 (sequence is synthesized)
cccagtgcctcctcaactcctgggtgggtggcactgactgtgcaggtatcagcgtctggggcactctgcaggttctgcctttgagtcctcgtcttaccccttcccatcacagggagacac

SEQ ID NO: 835028 - DNA, 120 bp, Artificial Sequence
  ENSG00000277619_10 (sequence is synthesized)
ccagggtcagctgagctccttgtgggggctgctggggccagggtcgggcatgcagggtggaaccaggcctgccttccattccctccacgttagtccaaagcacccccacccctaccccca

SEQ ID NO: 835029 - DNA, 120 bp, Artificial Sequence
  ENSG00000281358_0 (sequence is synthesized)
acacgcacgcttcgcccccaggaatgacctcatcgctccggagctccactcacagaccccacctaccacagggaacgggggcgggtgccagcgtccgggcaagcgcacaagagtggcctc

SEQ ID NO: 835030 - DNA, 120 bp, Artificial Sequence
  ENSG00000281358_1 (sequence is synthesized)
tggccggaggcgagggcgggaaggtgcgggaagtgcgcgtgcgcggagcctgggtcagcctgggcccgggtccgcttgcagcgggtggagtacttgcggagccggcaatccaggctcccc

SEQ ID NO: 835031 - DNA, 120 bp, Artificial Sequence
  ENSG00000281358_2 (sequence is synthesized)
tcccagcccccgcgcagaattagcctctctgtgccgccgggaaatcggcaattagaacgctccttgcgcgcggcacccaggcagccctcgagaatgcctgcactgtggcctgcccatcct

SEQ ID NO: 835032 - DNA, 120 bp, Artificial Sequence
  ENSG00000281358_3 (sequence is synthesized)
caggtcccggggcccgcaacagtccaggcagacgagcgcgcggcagcggtagtggcaggtgaacttgcaatctgcagagaggcctggcggtgaggcggaggagctccaggtcggggaaat

SEQ ID NO: 835033 - DNA, 120 bp, Artificial Sequence
  ENSG00000281358_4 (sequence is synthesized)
gtcccggagattgaagggaagccccagggagagggccgctgctcgccaggctccgcaggcccgacctatctcagtgggttacctcacactgctacgcggactctaatgttggccacctgg

SEQ ID NO: 835034 - DNA, 120 bp, Artificial Sequence
  ENSG00000281358_5 (sequence is synthesized)
gcgtctggaaaccggccggaaggccacaggcagagaggcctgctcaacagttggatctctatcgcctagcacagaacttcccctttcctcattggcaattaaaaaaacaacaacaaaaaa

SEQ ID NO: 835035 - DNA, 120 bp, Artificial Sequence
  ENSG00000279501_0 (sequence is synthesized)
ggacactccctgcagggcaaatctggagattttctcaagcctctttatgaaaatggagagacctcacaagagatgctaatggacagctgaccctgctccctgctccatcacaggttgtag

SEQ ID NO: 835036 - DNA, 120 bp, Artificial Sequence
  ENSG00000237187_0 (sequence is synthesized)
gggagtcggcgaccgcttagtgacgagcgatgattttaaagagcagaataaaaggttttcccgtgcctgccccacagcccctccagctcgaataatggagaactgtcaatgcactccgcg

SEQ ID NO: 835037 - DNA, 120 bp, Artificial Sequence
  ENSG00000237187_1 (sequence is synthesized)
agcggtggcccattgtacgcagctgatggcgaggaggcgactgggggtagcaggggctccttgccctcgtccctatgcccaaataaacgcgcaaacgcgctcccgtcttctggtcagtta

SEQ ID NO: 835038 - DNA, 120 bp, Artificial Sequence
  ENSG00000237187_2 (sequence is synthesized)
aaaggtgaaacgaacacgattaaaatagaccaaaagaaaagaaagaaaagaaaacctttctatgtacagattctaaatcgtactccccatacagtcagaggcagggagtcgagggcagag

SEQ ID NO: 835039 - DNA, 120 bp, Artificial Sequence
  ENSG00000237187_3 (sequence is synthesized)
gcagcaggcggagagagggagatagggcgagggaaggagaacgcggagagagacgaagggagtgggagaccagcgacagcgagcgccagggcaccgcaggcacactggatgcccagtccg

SEQ ID NO: 835040 - DNA, 120 bp, Artificial Sequence
  ENSG00000237187_4 (sequence is synthesized)
ccggcccagccgccctcggaccctggaccgtgcgtcgtgggcaccagaaacgagactcggccaaatcctgcctcaccagcaggtagatgaaactcaagagaaaaggtgtggataaatgaa

SEQ ID NO: 835041 - DNA, 120 bp, Artificial Sequence
  ENSG00000237187_5 (sequence is synthesized)
actagcccatgatgaacctgttttctccgtgaccacaatattaaccaggatgaatggcggtggcagtgggcctgcatcacaggttgcagcagatgttctcaatatttctattaaaatttc

SEQ ID NO: 835042 - DNA, 120 bp, Artificial Sequence
  ENSG00000237187_6 (sequence is synthesized)
cttatttccatatgcaagaggagccccagagctgcatccttatggtagctaccatgccgtgatgtaagctgccattcactggggagctttggcaatagaattggctagatcaggaagcct

SEQ ID NO: 835043 - DNA, 120 bp, Artificial Sequence
  ENSG00000237187_7 (sequence is synthesized)
caatagaattggctagatcaggaagcctatgtcaactatggaacaacaacttgcagctcatctctattgatgatggaatctcgctatgtcaccaggctggagtgcagtggcgcaacctcg

SEQ ID NO: 835044 - DNA, 120 bp, Artificial Sequence
  ENSG00000237187_8 (sequence is synthesized)
cctgagtagctgggattacaggaatctaatgaccattgaactgtggccatgacttcaattacaaatacactgcctctaggactgggacagatagccactgagtacctgcttcaaatcacc

SEQ ID NO: 835045 - DNA, 120 bp, Artificial Sequence
  ENSG00000237187_9 (sequence is synthesized)
actgagtacctgcttcaaatcaccctgcacgttttctctttggaaagataagcactggagaaccatctcgttaccttcagcagaaatggaaacaaatcaagacattaagaatgccgcagt

SEQ ID NO: 835046 - DNA, 120 bp, Artificial Sequence
  ENSG00000237187_10 (sequence is synthesized)
agccagaaatcagaaaagatcgaagctagccttttcatctcagctgctccttaaatcagtgcaacccctccaaattaatgtgaattgaaacttgcattgcttttcaacttaattgaatac

SEQ ID NO: 835047 - DNA, 120 bp, Artificial Sequence
  ENSG00000237187_11 (sequence is synthesized)
ttactatatgtgaaccactgcacaaaataggggaagaagatgtgggagacaaagatgtggagcctgtcttcaataaatttacagttagtttcagggtacattgtttttcttctgctgtta

SEQ ID NO: 835048 - DNA, 120 bp, Artificial Sequence
  ENSG00000237187_12 (sequence is synthesized)
attaggtgtatccccaagacaataaatacatgaatggaaaagtatattctgtgttttaagtctctttaataaaaaacaaaacaaaatccaaaaaaactcctaacatggcaactcaggaca

SEQ ID NO: 835049 - DNA, 120 bp, Artificial Sequence
  ENSG00000237187_13 (sequence is synthesized)
ttttaatccttttttttgttgttgggcttctgataggatccattttattgattccataaatatttagtagactttagacatattaatacattgtagtttgagttaatttgcattaaattc

SEQ ID NO: 835050 - DNA, 120 bp, Artificial Sequence
  ENSG00000237187_14 (sequence is synthesized)
tgtttttttccccttaggtatagattgtctgttggaaaaatatattgcttgtggatttcttggggagtgggaaggtgaattatacctgttgtctctacagtccactaccttccacaccct

SEQ ID NO: 835051 - DNA, 120 bp, Artificial Sequence
  ENSG00000237187_15 (sequence is synthesized)
agggcagtggtccccaaccttcttggcaccagggatcagtttcctggaagacaatttttctgtggatggtgtggggatggttttgggatggaactgttccacctcagatcatcaggcatt

SEQ ID NO: 835052 - DNA, 120 bp, Artificial Sequence
  ENSG00000237187_16 (sequence is synthesized)
agttaggctctcataacgagtgcgcagcctagatccctcacatgcacagttcacagtagggtttgcgctgctatgagaatctaaggctgccactgatctgacaggaggcagaactcaggt

SEQ ID NO: 835053 - DNA, 120 bp, Artificial Sequence
  ENSG00000237187_17 (sequence is synthesized)
ggcaatgcttactggcccactgctcacctcttgctgtgcggcctggttcctaataggccatggacccccacagacgggtactagtctgcagcctgtggaccccagccctaggggcctgcc

SEQ ID NO: 835054 - DNA, 120 bp, Artificial Sequence
  ENSG00000237187_18 (sequence is synthesized)
attctgagtgagttattagcatgaagaagaggaagatctggatcaaacgtgggtgatggtactcagagacccaagataggatagggatggaacaaaatccatctgggcaacggctctatg

SEQ ID NO: 835055 - DNA, 120 bp, Artificial Sequence
  ENSG00000237187_19 (sequence is synthesized)
aaaatttggctaagtaattatttcagtattcattgtattcattgtccttcgtgttccataagttaaatgactgtctaatttttccaaaaatttatttctgacttgagaataagtgtgtca

SEQ ID NO: 835056 - DNA, 120 bp, Artificial Sequence
  ENSG00000237187_20 (sequence is synthesized)
tgattttcccagtgtaaagacactgatataactgtagataccagacattttatgtagtgtctatgacacattttagtatgtatgagccaacaatagacatgtctttgtcttgaggagtgt

SEQ ID NO: 835057 - DNA, 120 bp, Artificial Sequence
  ENSG00000237187_21 (sequence is synthesized)
agcgccaacacgccctcaggtaaaggtggaagtaaatggccacgctgtattgacagaggtagggtttgttttttaatactcgttctcactttaagtctcaccagggaggggtttgggaag

SEQ ID NO: 835058 - DNA, 120 bp, Artificial Sequence
  ENSG00000237187_22 (sequence is synthesized)
gaactgtggccatgacttcaattacaagtattttcttcactaatgtcagactgtgggcctttgtatatacacttttaacaaactttttggaagtgcaatacatatcgcaacaacttctca

SEQ ID NO: 835059 - DNA, 120 bp, Artificial Sequence
  ENSG00000237187_23 (sequence is synthesized)
atgctgaatcatagtattggaagacattttaagcaacaattaaactcaacttatttactaccaataatgtacataagtcagctgaagtgaggataacatgaatagcacaaatacattatg

SEQ ID NO: 835060 - DNA, 120 bp, Artificial Sequence
  ENSG00000237187_24 (sequence is synthesized)
attgctgcctggccaacagtaattataagaaactgtcagttttgagatgtgtcttgatttcagagatgttaaaaaagttttggctgtagttatgccacagacatgaccaaagagagagct

SEQ ID NO: 835061 - DNA, 120 bp, Artificial Sequence
  ENSG00000237187_25 (sequence is synthesized)
ggacgggagccgctcccgggcggcacacagccgagtccctcctcccctccccgcaggcagcctgtgccttttctccaaacgaagacagcactttgaaaattctttcaatggatttttttt

SEQ ID NO: 835062 - DNA, 120 bp, Artificial Sequence
  ENSG00000237187_26 (sequence is synthesized)
tccttgaaagatcgtactgggggaaaatgatacttctattagttacatattctccaatcgcatactcgcacccccctcgttttgagatcgctcccctaggcaggctcaggcgggcgcgga

SEQ ID NO: 835063 - DNA, 120 bp, Artificial Sequence
  ENSG00000237187_27 (sequence is synthesized)
acacgccctcaggtaaaggtggaagtaaatggccacgctgtattgacagagcaggtagatgaaactcaagagaaaaggtgtggataaatgaaactagcccatgatgaacctgttttctcc

SEQ ID NO: 835064 - DNA, 120 bp, Artificial Sequence
  ENSG00000237187_28 (sequence is synthesized)
atgtgtcagcttttttttaacatcatcaacagacttcttaattaagctgccaatacatactgccaatagcactgtgtgctgtctgagaaatgcattgtgtaagtgctatttccatcttat

SEQ ID NO: 835065 - DNA, 120 bp, Artificial Sequence
  ENSG00000237187_29 (sequence is synthesized)
taaataaacaatgttgctctgtataaactggatttaaagtgttctttgaatgaggcattatattgctccataaataatgtgatgtgaattctcatatgatcccttttaacttaatttcta

SEQ ID NO: 835066 - DNA, 120 bp, Artificial Sequence
  ENSG00000237187_30 (sequence is synthesized)
aaaaaatattatttgctcctcagtaaggaatagctctaattggactggtaactttagtgatatgatttgtctgtaacaggctgaatcgccccactcccaaactcctggtcgtgatactgg

SEQ ID NO: 835067 - DNA, 120 bp, Artificial Sequence
  ENSG00000237187_31 (sequence is synthesized)
atatttgttatgccacttttagtttgcatgaggtatcttccaggaagtattagttattaacttgtgttctactaaactgtagatatttatttcctgttctggaagatttcttggagtgtc

SEQ ID NO: 835068 - DNA, 120 bp, Artificial Sequence
  ENSG00000237187_32 (sequence is synthesized)
catctgtgcattcctggtgcctagtgtagtcttgctaatggaatagcacctttattggtgctacttaggggttggtagcttacaatcaatctacttggaacgtatccaaataaactggat

SEQ ID NO: 835069 - DNA, 120 bp, Artificial Sequence
  ENSG00000237187_33 (sequence is synthesized)
ccgggagaaggaaagctgggacgggccgggaccacaggagccccagccccacacagcaaccacccgggcgagaaagaaagaaagagccagggaggcgggcgaagcgcggggagagaagca

SEQ ID NO: 835070 - DNA, 120 bp, Artificial Sequence
  ENSG00000237187_34 (sequence is synthesized)
gagaagaaatattcaccttcccgcctcatgcccactttgaggcacttcttgaggcggcagtattggcactggttgcggtggtgctggtcgatgggacagttcctgttggcacggcatgtc

SEQ ID NO: 835071 - DNA, 120 bp, Artificial Sequence
  ENSG00000237187_35 (sequence is synthesized)
caaggaaacactgacttgaaaactctcccccatggttttgtctgaactggctgccattctgcagcacacaccagatccaattgctggagtcgggaacccgagaggtgagcaagagcaagc

SEQ ID NO: 835072 - DNA, 120 bp, Artificial Sequence
  ENSG00000237187_36 (sequence is synthesized)
ctcatgttgatattttgatctccttttatgaaacatggatgttttaatagcatctagaatgagaaatcttttccagaaggctttcaattgactttgcccagatccatcagaggaatcgct

SEQ ID NO: 835073 - DNA, 120 bp, Artificial Sequence
  ENSG00000237187_37 (sequence is synthesized)
ctaaggagaggccccggatcaggacagcagtttcctcagacgtgatgtggtgccccttgcatcctgctcagagaattctcagcagcacagatccacttcaaggaaacactgacttgaaaa

SEQ ID NO: 835074 - DNA, 120 bp, Artificial Sequence
  ENSG00000237187_38 (sequence is synthesized)
cagggagtacagggactgagaaacggaaatactaccatcctccagccaatctgttgggaggactgcttgcagaggactcgtgctccagatgttgcactagaggcgctgcaagtgtgagca

SEQ ID NO: 835075 - DNA, 120 bp, Artificial Sequence
  ENSG00000237187_39 (sequence is synthesized)
aaaaaagtttgtaagttaccattgataaaatatgagtttgcttccacaaatattctttcttctgtccttctggaactcaagagtaaacatatattagattttctcaccatttcatgcatg

SEQ ID NO: 835076 - DNA, 120 bp, Artificial Sequence
  ENSG00000237187_40 (sequence is synthesized)
ctggttcctaggctactctctgagtcattttttttttcttatctgccctccagttcactagttctgtcattttctgggtctgatctgctgcaaatgcaatacattgagttttaaatttca

SEQ ID NO: 835077 - DNA, 73 bp, Artificial Sequence
  ENSG00000237187_41 (sequence is synthesized)
gactttgcccagatccatcagaggaatcgctatctatgacagggactgaaccctctttccttggcctcctaaa

SEQ ID NO: 835078 - DNA, 120 bp, Artificial Sequence
  ENSG00000237187_42 (sequence is synthesized)
agacttattctctaagaaactttgaggcataatacttcttcatttattttataaaagagcatggagaaaacccagtgccaaaacggacctctaacaatgatattggaagaatagatacta

SEQ ID NO: 835079 - DNA, 120 bp, Artificial Sequence
  ENSG00000237187_43 (sequence is synthesized)
agtcttggagaggtgaaacagtcgcaaatggaattccaagaaacattctatcatcaggtattatctactgctgtctgcagaattcagacatggagggctcaatggtgtcccctggtcttt

SEQ ID NO: 835080 - DNA, 120 bp, Artificial Sequence
  ENSG00000237187_44 (sequence is synthesized)
ggtcatggcataggagaagcatgaaaatatactttactaaaagttgaataatgcatatatcaaaatgaacaagaagagcagtaatgctcacaatgtgccagtgatagcatgtataaaacc

SEQ ID NO: 835081 - DNA, 120 bp, Artificial Sequence
  ENSG00000237187_45 (sequence is synthesized)
tgtggtttcttggctatttggaaaataataaaatgaaaaatgacttctaatggacaaatgtgatatactgttataaaataagcctttcttaaagattaggaaaaatagaaattacacaaa

SEQ ID NO: 835082 - DNA, 120 bp, Artificial Sequence
  ENSG00000237187_46 (sequence is synthesized)
aagatatgggaaaatctgtaacttcaacctttgtgggcatggtatgagagcaggtagtaccgaattaaggaggaaaacatgctgacaaaagaagctataattgtaggcagcgtacaggca

SEQ ID NO: 835083 - DNA, 120 bp, Artificial Sequence
  ENSG00000237187_47 (sequence is synthesized)
gggtgctttgtgaagttctgccagggaacagctatgacgcatcagcagtagttggaatggagaaataggggaatggataatttaatgaccatttaaaatagttattttactctctgagat

SEQ ID NO: 835084 - DNA, 120 bp, Artificial Sequence
  ENSG00000237187_48 (sequence is synthesized)
atggtaagaagggtaaccaaacccaatgctccaggacacaagtgattggctaaaggagtcaggaagaagtgtttgttgttctagttggtgtagccttgctcagctacttaggtaccctct

SEQ ID NO: 835085 - DNA, 120 bp, Artificial Sequence
  ENSG00000237187_49 (sequence is synthesized)
gtttcctatccctggagatattttcaatcatgccatttaattttttaaatacgcaagtgtagttttataatttgtgtctgataattctaatatctgaagtcttagtaggtctgtttcagt

SEQ ID NO: 835086 - DNA, 120 bp, Artificial Sequence
  ENSG00000237187_50 (sequence is synthesized)
ctgcccttgcaaaattatttggagagtcctggaggcttaaatgaagataacttttaggaataatttgcatttgcttttgccgaggatcttgggatcatttcaaccaaaatcttagcttga

SEQ ID NO: 835087 - DNA, 120 bp, Artificial Sequence
  ENSG00000237187_51 (sequence is synthesized)
aattccgcaatcaatcaaggtgatgagaacctggtcagtaaatcctaatgagggccaggctgtggccaaagatttttagacagatgtttccctcctttgccatttctcttttctttcctc

SEQ ID NO: 835088 - DNA, 120 bp, Artificial Sequence
  ENSG00000237187_52 (sequence is synthesized)
ctctgctcctcttagtgtccagacaaccttcatggaagtccttggggtgggtgggaaatgaggacggcaggtttcattctaggtatagccctttgaggtctaacttaatgcagagagagt

SEQ ID NO: 835089 - DNA, 120 bp, Artificial Sequence
  ENSG00000237187_53 (sequence is synthesized)
tttctggtctatgtgccaccttacatgggatcttgagccttgatttctaaaccccttgcctttgatgtttcagaattgaagcttaaatttgccaacaggcaaatgtcctcaaggcaaatt

SEQ ID NO: 835090 - DNA, 120 bp, Artificial Sequence
  ENSG00000237187_54 (sequence is synthesized)
ggcttaggtgttcgatattcttcttaccagaaaggtaaacttgggttttttacttcacccaggatttggcatgacagttccccattatcttgtcagcttagtgctttaagtgattgcatt

SEQ ID NO: 835091 - DNA, 120 bp, Artificial Sequence
  ENSG00000237187_55 (sequence is synthesized)
taaaaaaattctgcattttcagtttttagcaggaggaatggcctcaactagtggttttcaactggggatgatttttttcccctaggggacatttgataatgtttggagatgttttagttg

SEQ ID NO: 835092 - DNA, 120 bp, Artificial Sequence
  ENSG00000237187_56 (sequence is synthesized)
ttagaactggggttgggggaactactgtcatctggtggggagagaccggcaatgctgttgatcttactataatgcacaggccacccccaacaacaaacaaattacatagccccaaatatc

SEQ ID NO: 835093 - DNA, 120 bp, Artificial Sequence
  ENSG00000237187_57 (sequence is synthesized)
aataatgccaaggtccaaataacctaaccttccattactgaaaatagaagttcaagaagatagtttataatttaaaaatttttaggtcttaataagttgtcatactttcacaggttttat

SEQ ID NO: 835094 - DNA, 120 bp, Artificial Sequence
  ENSG00000237187_58 (sequence is synthesized)
ttcatactaagtaatttatttcaaattttacattccaattacagaaaattttctaagccagtttttgttcttcatgagtattactatcaaggtcacatttttcatctagtatgttttacc

SEQ ID NO: 835095 - DNA, 120 bp, Artificial Sequence
  ENSG00000237187_59 (sequence is synthesized)
ctggtacttgttggcagggtcaggactaaggtgagatgcgcaaggcatttgcctcacacaaaatgcacaatgaataaaatgtcaaaactttaaataaagacagaatcactaaaagtactt

SEQ ID NO: 835096 - DNA, 120 bp, Artificial Sequence
  ENSG00000237187_60 (sequence is synthesized)
tgccatattggaacctgaggcaaaaagaaaaataagtaataatatttaaaattttgatctcttgttcattgtagatttttacattaattttgattgtttaaaacattgcattaaaatatt

SEQ ID NO: 835097 - DNA, 120 bp, Artificial Sequence
  ENSG00000237187_61 (sequence is synthesized)
gagcattcctagcgccaacacgccctcaggtaaaggtggaagtaaatggccacgctgtattgacagagtttagagagttgatatgtcccgcgccatcagcccgctgaatgggatcttcct

SEQ ID NO: 835098 - DNA, 120 bp, Artificial Sequence
  ENSG00000237187_62 (sequence is synthesized)
gtcaactatggaacaacaacttgcagctcatctctattgatgtcttgggtacatctttatcagcagcatgaaaatagactaatacagtcaatttgtaccagtagagtggggtgttgctga

SEQ ID NO: 835099 - DNA, 90 bp, Artificial Sequence
  ENSG00000237187_63 (sequence is synthesized)
ggaaaatgtgggaaagtttggaacatcctagaaatttgttgaatggctttgaaaagaaactgagatgatctcagatggagatgaggtact

SEQ ID NO: 835100 - DNA, 120 bp, Artificial Sequence
  ENSG00000237187_64 (sequence is synthesized)
ttgcccctgccctagagatttgtggaactctgaacttgagagagatgatttggggtatctggaagaagaaatttataagcagcaaagcattcaaaaagtgacttgggtgctgttaaaagc

SEQ ID NO: 835101 - DNA, 61 bp, Artificial Sequence
  ENSG00000237187_65 (sequence is synthesized)
aagcattcaaaaactgatgattcagtagcctcatgatgcagtagaaaagaaaaacccattt

SEQ ID NO: 835102 - DNA, 120 bp, Artificial Sequence
  ENSG00000237187_66 (sequence is synthesized)
ggagcctaatgttaatccccaagaccgtggggaaaatgtctccaggccatgtctctaggccatgtcagagaccttcacagcaggccctcccatcacaagcctggaggcccggaagaaaaa

SEQ ID NO: 835103 - DNA, 84 bp, Artificial Sequence
  ENSG00000237187_67 (sequence is synthesized)
cagggtccccatgctgtgtgcagcctaggaacttggtgccttttgtcccagccgctccagtcatggctgaaaggggccaatgta

SEQ ID NO: 835104 - DNA, 90 bp, Artificial Sequence
  ENSG00000237187_68 (sequence is synthesized)
ttgagcctgcaaggcctctgcctggatttcagaagatgtgtggaaactccaggatgcacagacaaaagtttgctgcaggggcagggccct

SEQ ID NO: 835105 - DNA, 120 bp, Artificial Sequence
  ENSG00000237187_69 (sequence is synthesized)
tgcagaagggaaatgtggggttggagtccctacagagagttcctactggggcatttcctagtggagctgtgagaagaggggcaccgtcttccagaccccagaatggtagaccactgacag

SEQ ID NO: 835106 - DNA, 120 bp, Artificial Sequence
  ENSG00000237187_70 (sequence is synthesized)
ttccagaccccagaatggtagaccactgacagctttcaccatgcacctggaaaagctgcagacacgcaacattagcctgtgaaagcagctgggaagggaggctataccctgcaaagccac

SEQ ID NO: 835107 - DNA, 89 bp, Artificial Sequence
  ENSG00000237187_71 (sequence is synthesized)
agggatggagctgcccaagaccatgggaaccgacctcttgcatcagcatgacctgaaatttgactgccctactggattttggacttgca

SEQ ID NO: 835108 - DNA, 76 bp, Artificial Sequence
  ENSG00000237187_72 (sequence is synthesized)
taggaagtaactagattgctcttgattttacaggcttataggcggaagggacttgcctggtctcagatgagacttt

SEQ ID NO: 835109 - DNA, 120 bp, Artificial Sequence
  ENSG00000237187_73 (sequence is synthesized)
taggaagtaactagattgctcttgattttacaggcttataggcggaagggacttgcctggtctcagatgagactttcgactgtggacttttaggttaatactgaaatgagttaagacttt

SEQ ID NO: 835110 - DNA, 88 bp, Artificial Sequence
  ENSG00000237187_74 (sequence is synthesized)
gttgggaaggcatgattggttttgagatgtaagaacatgagatttggtgggaccaggggcaggatcaacttgaattgtatctcccaga

SEQ ID NO: 835111 - DNA, 75 bp, Artificial Sequence
  ENSG00000237187_75 (sequence is synthesized)
ccatgtatctttcctgtgctattctcatgacagtgactaagtttcaggagatctgatgggtttatcaggggtttc

SEQ ID NO: 835112 - DNA, 84 bp, Artificial Sequence
  ENSG00000237187_76 (sequence is synthesized)
atttcttccactgacatcttgaacccctcagtcatccatgaggcttggaatcaacttcttccaaactcctgctcatgttgatat

SEQ ID NO: 835113 - DNA, 120 bp, Artificial Sequence
  ENSG00000237187_77 (sequence is synthesized)
tgcctaacgatttgccctgccttggacagccagtcctcttcaggtggtgggctgctggtaggggtaggaagcaaggcctggggcacagttggggaccctcacacctgattttctgtttta

SEQ ID NO: 835114 - DNA, 120 bp, Artificial Sequence
  ENSG00000237187_78 (sequence is synthesized)
aggaggaactgggtttcaaaaagctgtagagtcagtgggagtttccttttgtggcccttggcactttttaaaacacccatctgcaaggcgggaacagcggagaaagtgctatgtagttca

SEQ ID NO: 835115 - DNA, 120 bp, Artificial Sequence
  ENSG00000237187_79 (sequence is synthesized)
taaaaaggatattgggagactgttatcttaagagtttttctagagattgttttgtaatctctcagtttagagagttgatatgtcccgcgccatcagcccgctgaatgggatcttccttca

SEQ ID NO: 835116 - DNA, 120 bp, Artificial Sequence
  ENSG00000237187_80 (sequence is synthesized)
catctctattgatgagtaaaagaatatggaattttagctccagatcaatttcaagaacaaatcaggaatcccgagaggacccgcagaccctctgaaggaagcagactgctcctgtagaac

SEQ ID NO: 835117 - DNA, 120 bp, Artificial Sequence
  ENSG00000237187_81 (sequence is synthesized)
ccgggagacaccccaaatactgggagtgccccaactgcagaattgggaaagggagagcctcctgtactgaacacacagctccactggagaaactgaaggtctgtttgtgggagaagtttc

SEQ ID NO: 835118 - DNA, 120 bp, Artificial Sequence
  ENSG00000237187_82 (sequence is synthesized)
tgactttacctgaagctgagtcaatttagagagctgagcaggggtagaggaagcagcggaaaggccttgggagctgactcagtcccctagcaggccattcttgcccagcaccacagggat

SEQ ID NO: 835119 - DNA, 120 bp, Artificial Sequence
  ENSG00000237187_83 (sequence is synthesized)
ccattgggagggtggccagaagagtgggaggtgttggggaacaccacagggaaaaggtaatcttcagctaaattttgtaacaatttgaacagggtgagaagcttcctggccagaactcag

SEQ ID NO: 835120 - DNA, 120 bp, Artificial Sequence
  ENSG00000237187_84 (sequence is synthesized)
gggagggcacagaactgttgtgcagactccactggcagaggaagaaccaagccctttacttttgcagctgggaggcgtactcgcctgcctcacccacaacctggaaacagactcagggtc

SEQ ID NO: 835121 - DNA, 120 bp, Artificial Sequence
  ENSG00000237187_85 (sequence is synthesized)
acaggcatgagccactgcacccggcctggtagttgtgttttaataagcagaccagcaggtagatgaaactcaagagaaaaggtgtggataaatgaaactagcccatgatgaacctgtttt

SEQ ID NO: 835122 - DNA, 120 bp, Artificial Sequence
  ENSG00000237187_86 (sequence is synthesized)
acggaaatactaccatcctccagccaatctgttgggaggactgcttgcagaggactcgtgctccagatgttgcactagaggcgctgcaagtgtgagcaggtagatgaaactcaagagaaa

SEQ ID NO: 835123 - DNA, 120 bp, Artificial Sequence
  ENSG00000237187_87 (sequence is synthesized)
tgcccttttgtacctccctaactttttaccttatttccactaagaatgctttttctgtacttgtctctctgtccagcagcaactcattctttaaagccagtttttccttccttttagtat

SEQ ID NO: 835124 - DNA, 120 bp, Artificial Sequence
  ENSG00000237187_88 (sequence is synthesized)
ctgtagtactttctataaaacttattatagaactggttacagagtattatagtagccagttttaaccttaatttcttactagactgagttatttgttcggctaggcgttgtagaaattgg

SEQ ID NO: 835125 - DNA, 120 bp, Artificial Sequence
  ENSG00000237187_89 (sequence is synthesized)
aaaccaaaatgaagaggaactttaggagtttgcaatctagtggaagacatccaattttggtgagttggtgggggatgataatggaaagctgttaaagagaatatgcttgctgcatgaccc

SEQ ID NO: 835126 - DNA, 120 bp, Artificial Sequence
  ENSG00000237187_90 (sequence is synthesized)
attaaaacagaattgtgactggaaatgtttatatggtgtcttaaaattaatgaattttatttgtttgcaggtggcagtgggcctgcatcacaggttgcagcagatgttctcaatatttct

SEQ ID NO: 835127 - DNA, 120 bp, Artificial Sequence
  ENSG00000237187_91 (sequence is synthesized)
agacaccgcagttgagcaccatcgactcacaagatgaatagaatggtgatgtcagaacagatgaagttgccatccaccaagaaggcagagccaccgacttgggcacaattaaagaagctg

SEQ ID NO: 835128 - DNA, 120 bp, Artificial Sequence
  ENSG00000237187_92 (sequence is synthesized)
acagagttagctaaaaaaaaaaagcctagagaacacaaaggtgacacaaacttcagagaacatgctgtttgcagctttgatgattgtatcaacggtgtgtgcaggtgtacctagcagctc

SEQ ID NO: 835129 - DNA, 85 bp, Artificial Sequence
  ENSG00000237187_93 (sequence is synthesized)
tgattgtatcaacggtgtgtgcaggtgtacctagcagctccaaagagacagcgaccatcgaggacaagccatgatgacaatggtg

SEQ ID NO: 835130 - DNA, 120 bp, Artificial Sequence
  ENSG00000237187_94 (sequence is synthesized)
cattttgttctgtactaagaaaaattattttgcctcgagatgctgttaatctgtaaccctacccttaaccctgtgctggcagaaacacgtgctgtgacgactcaaggtttagtggattta

SEQ ID NO: 835131 - DNA, 83 bp, Artificial Sequence
  ENSG00000237187_95 (sequence is synthesized)
gcaataggcaatagtgctctttaaagcattgagatgtttatgtatgtgcacattaaaagcacagcacctttttctttaccttg

SEQ ID NO: 835132 - DNA, 120 bp, Artificial Sequence
  ENSG00000237187_96 (sequence is synthesized)
gctctttaaagcattgagatgtttatgtatgtgcacattaaaagcacagcacctttttctttaccttgtttatgatgtagagatgtttgttcacgttttcctgctgaccctctccccact

SEQ ID NO: 835133 - DNA, 120 bp, Artificial Sequence
  ENSG00000237187_97 (sequence is synthesized)
tgtctccctgttgtccccctctccgatatggtagagatactaatgaataaatactgagggaactcagagaccggtgccggcgtgggtcctccatatgctgaacgccggttccctgggccc

SEQ ID NO: 835134 - DNA, 120 bp, Artificial Sequence
  ENSG00000237187_98 (sequence is synthesized)
cccccttaaatttgcaccaatgtgagtgtcttgctttccttatttgattcctgccctgcttgttattgagtcagtctggttgggtagctcatacaggatggagaggccagggctgacaat

SEQ ID NO: 835135 - DNA, 120 bp, Artificial Sequence
  ENSG00000237187_99 (sequence is synthesized)
aggtttcatttctcaagcaggacaggtggaaaggttgctgtcctaataaaggggtagtggaaggtttgagggacaatggtgctgatgttcaaattttcgattatatccagttatactttg

SEQ ID NO: 835136 - DNA, 120 bp, Artificial Sequence
  ENSG00000237187_100 (sequence is synthesized)
agtaaaaactgttgttcaggggatccagggtaaagttgcaaagtccccacaggtataccaaccaagcagtaagaaactgagttggtgattccaatttaagagagcagtcatataggaaga

SEQ ID NO: 835137 - DNA, 120 bp, Artificial Sequence
  ENSG00000237187_101 (sequence is synthesized)
agtccattgatacatttagggaggaggcatagccactaggtttaagaccacagctatcaggattagggttattgatttccattgagggagactgaaagaccatggcttaacatactgttg

SEQ ID NO: 835138 - DNA, 120 bp, Artificial Sequence
  ENSG00000237187_102 (sequence is synthesized)
ttcccaggaggaaaaagtatagtgagaactcatttattctgactggaatacaggagaggcaaaggaagcctcagaaactttatggtgggcctgcttatcacatgggaggagtgaagcttg

SEQ ID NO: 835139 - DNA, 120 bp, Artificial Sequence
  ENSG00000237187_103 (sequence is synthesized)
tgaaagaccaaatggtaagagacacatgaagtgtgctttaaagcagttgtgtatttcttacctcagtcaaaattaactcaaatacaagggtaggacagaatctgcaggtagaaggtgaca

SEQ ID NO: 835140 - DNA, 120 bp, Artificial Sequence
  ENSG00000237187_104 (sequence is synthesized)
cttagaggtggttagggaaacctgaggcaggagaaaagaaaaagtgagggctaacgttggaaagtgttttgaagcattaatttttaaactgttataagtaaaaagtcattttcttctatc

SEQ ID NO: 835141 - DNA, 120 bp, Artificial Sequence
  ENSG00000237187_105 (sequence is synthesized)
aaaccagtaatatgtgtgtcatcataagcactcatgtacttgcacagtagaacggagtgaccatttttttgtattggtgttcccatgctttttctcccccagagtctctcaatttcagct

SEQ ID NO: 835142 - DNA, 120 bp, Artificial Sequence
  ENSG00000237187_106 (sequence is synthesized)
gtaccacaattttattgtattttccagtggcaaagtgtacacttgtgtgtgtttttttgtgtgtgtgttttaaattttttttgaagggaaaaattcttctttatcttggcttgcacattt

SEQ ID NO: 835143 - DNA, 120 bp, Artificial Sequence
  ENSG00000237187_107 (sequence is synthesized)
ctaggatatgttcctgttttagatttttagcacaactccactaaaaccataacaggtcacttttgaattaagtgtcaaaaatcatgttaaaactacctctatctatttgcattatagagg

SEQ ID NO: 835144 - DNA, 120 bp, Artificial Sequence
  ENSG00000237187_108 (sequence is synthesized)
aaacactgaaggcttcaaagcaatttttagtgctggaatgtcagaaaagtaaatggatgctggcaagcagataagattccatgagaatagccccttgagcctattgggtgaaatactaga

SEQ ID NO: 835145 - DNA, 120 bp, Artificial Sequence
  ENSG00000237187_109 (sequence is synthesized)
gctgcaaagaatgatgggctttgcaagcagagtgagctacagcccttgaaatacaaagaaagaaaaggaaacagaaaccagaaacatctttttggagaacagatctcaggactactctga

SEQ ID NO: 835146 - DNA, 120 bp, Artificial Sequence
  ENSG00000237187_110 (sequence is synthesized)
aagatcttactttttttctttttaaacaggtgacagacactcatcagacatattccttccattcaaagagagtattcaacattagtgattctctattttctttttcatgacacatttatc

SEQ ID NO: 835147 - DNA, 120 bp, Artificial Sequence
  ENSG00000237187_111 (sequence is synthesized)
cccagatccccaaacaacatcatttttgcatatttataaaaccagtgacaactgtagtataaaatttttgaaatgatactggtgatgattttaaaacattgagaataaactgatcacata

SEQ ID NO: 835148 - DNA, 120 bp, Artificial Sequence
  ENSG00000237187_112 (sequence is synthesized)
gaaatttattgagttaatcaagatccctgagttgcacttgtggtcatgaggcatattctaggagccaagtgatttgcttttttgttgtacatggtaggcttatcttgggctaattcacat

SEQ ID NO: 835149 - DNA, 120 bp, Artificial Sequence
  ENSG00000237187_113 (sequence is synthesized)
aggttgtcttagtatcttgagacactgacactgctttattttttattcctttctgtctcttatttagttaaattaaaatttaattgacacattataattatatatgtttatggggtacaa

SEQ ID NO: 835150 - DNA, 120 bp, Artificial Sequence
  ENSG00000237187_114 (sequence is synthesized)
tatgatatatttgttgtataatcatccaatcaggttacttagtgtatccatcatctcatacctttatcatttctttgtggtgagaacagtcaaaggcctctcttcttgctgtttgtaata

SEQ ID NO: 835151 - DNA, 120 bp, Artificial Sequence
  ENSG00000237187_115 (sequence is synthesized)
gagaataccttaatgttaaccatagttaccttactgtgtaatagaacacaagaattttttccccttgtctaattgtaactttgcacccattgaccaacctcttcccatcctccattccct

SEQ ID NO: 835152 - DNA, 120 bp, Artificial Sequence
  ENSG00000237187_116 (sequence is synthesized)
cctccattccctccttcccctgatccctctccagtctctggtaaccactgttctctctgcctctataattttttttgaagattcagcatatgagtgagatcatgtggtatttgtctttct

SEQ ID NO: 835153 - DNA, 120 bp, Artificial Sequence
  ENSG00000237187_117 (sequence is synthesized)
catccatgttgtcacaaatgacaggattttatttttttaatggacgattagtattccattatgtatatataccacattgtctttatccattcatctgttgttgaatacataggttgattc

SEQ ID NO: 835154 - DNA, 120 bp, Artificial Sequence
  ENSG00000237187_118 (sequence is synthesized)
atctgttgttgaatacataggttgattccctatcttggctattgttaagtagtgctggaataaacatgggagtgaaaatgtatatatatttttttgatatggagtcttgctctttcaccc

SEQ ID NO: 835155 - DNA, 120 bp, Artificial Sequence
  ENSG00000237187_119 (sequence is synthesized)
accactacgcctggcccagatgtctttttgatatactgatttgctttcctttggatatacagtaatcctcccttaacattgtctataagttcttggaaactgactttaagtgaagtgatg

SEQ ID NO: 835156 - DNA, 120 bp, Artificial Sequence
  ENSG00000237187_120 (sequence is synthesized)
tataacgaaaccaattttttcaaaggctaattgatagaaacaaggggcagttcctatggtatatttctgattataaaaacatcactaaacttctaaagacccacatttctaatactaaac

SEQ ID NO: 835157 - DNA, 120 bp, Artificial Sequence
  ENSG00000237187_121 (sequence is synthesized)
attgaaataaatgtgaattacatgtatatttaagaaagattaataaaaacaagataattatttactcatctttttgtgaatcagtgagtgacagtggctgtagtggcaatgcattaaatc

SEQ ID NO: 835158 - DNA, 120 bp, Artificial Sequence
  ENSG00000237187_122 (sequence is synthesized)
aaggaataaatgtttgtaaagaaaaattataagaagtatttcctacaactgttaggttcaaaaacaatcacaaatatggtgggcatgctcaacactttcgtgcagcattgtttgttgttg

SEQ ID NO: 835159 - DNA, 120 bp, Artificial Sequence
  ENSG00000237187_123 (sequence is synthesized)
tacatttgtgtgattattgtatattttgtgaatatttatttatttaattattaatttttgaaacagtctcactcccatcacccaggttggagtgcagtggcgcagttatggctcactgca

SEQ ID NO: 835160 - DNA, 120 bp, Artificial Sequence
  ENSG00000237187_124 (sequence is synthesized)
gtggcgcagttatggctcactgcagcctcaacttcctgggttcaggtgatcctcccatctgagcctcccgagcagtgggggactacaggcccatgccaccatgcatggctaattttttgt

SEQ ID NO: 835161 - DNA, 77 bp, Artificial Sequence
  ENSG00000237187_125 (sequence is synthesized)
gatctgcctgcctcaacctttgactttttaatttaaaataatttgtattcattcattcattcattttccaacccatt

SEQ ID NO: 835162 - DNA, 120 bp, Artificial Sequence
  ENSG00000237187_126 (sequence is synthesized)
ataatttgtattcattcattcattcattttccaacccattatgccagttcagggttgtatgtggctggagtccatccctgcagctcagggcacaaggaaggaactagccctagacaggac

SEQ ID NO: 835163 - DNA, 120 bp, Artificial Sequence
  ENSG00000237187_127 (sequence is synthesized)
accataccattgcaaggctcactcacacacacccatactcactcaggctggactatgtatatatgccaattcacctaccatgcacatctttgagatatgtggggaaactgcagtacccag

SEQ ID NO: 835164 - DNA, 120 bp, Artificial Sequence
  ENSG00000237187_128 (sequence is synthesized)
agaaaacccacacagacatgagtaaaatgtgcaaattccagacagacagtggcgtagctgagaatcaattttttttcttatatgccttataatgaaggacattgaatgaaatgttattgg

SEQ ID NO: 835165 - DNA, 120 bp, Artificial Sequence
  ENSG00000237187_129 (sequence is synthesized)
ttgctggatcatatggtagttctattttaagatttttaaagaaccaccatactcttttttataatgactactaatttacaatcctgttaacagtgtgtttcttttcttccacatccttgc

SEQ ID NO: 835166 - DNA, 120 bp, Artificial Sequence
  ENSG00000237187_130 (sequence is synthesized)
gtgtgtttcttttcttccacatccttgccaatactagttttcttttgtctttttgaaaatagtcattctaactgaagtgaggtggtatctcatagtggttttgatatgcatttccctact

SEQ ID NO: 835167 - DNA, 120 bp, Artificial Sequence
  ENSG00000237187_131 (sequence is synthesized)
gattagtgatattgagcattttttcatatacctattgaccatttgtatgttgtcttttgagaaatgtctattaaggtcttttgcccattttaaaattgagttttttgttgttgttaagtt

SEQ ID NO: 835168 - DNA, 120 bp, Artificial Sequence
  ENSG00000237187_132 (sequence is synthesized)
ccttatatattctggatattaaccccttgtcagaggtacaatatgcaaatattttctcctattctgtaggagaataggagaatatttgtttcttcactctgttaattgtttcctttgctg

SEQ ID NO: 835169 - DNA, 120 bp, Artificial Sequence
  ENSG00000237187_133 (sequence is synthesized)
tgtaaaagcatcttagtttgatgtaatctcatttgtgtatttttgcttttgttgcctatatgtttaaggtcttatttaaaaaattcctgtccagcccaatgccataagcatctcccctat

SEQ ID NO: 835170 - DNA, 120 bp, Artificial Sequence
  ENSG00000237187_134 (sequence is synthesized)
attttcttctaataatttcatggtttggattttatagttaagtctaatccattttgagctgatttttgtacatgatgagtgtattagtccattttcacactgttgataaagaaatacctg

SEQ ID NO: 835171 - DNA, 120 bp, Artificial Sequence
  ENSG00000237187_135 (sequence is synthesized)
gtatttaacatccagcagtgttatgctgactttgaatatataatagaacatgaaagagataaccactttcctgaagttgtgccttttgcctcccaccgtgattctgaggcctccccagcc

SEQ ID NO: 835172 - DNA, 120 bp, Artificial Sequence
  ENSG00000237187_136 (sequence is synthesized)
cgcgcggggttggctgccgggaggtcgacgctagtgcggtcccccgcgcggcggaggggcccgggccgcggtatctgcgcactgagacgtcggcggaaggctagaggccgtgctctcgcc

SEQ ID NO: 835173 - DNA, 120 bp, Artificial Sequence
  ENSG00000237187_137 (sequence is synthesized)
cccgcagaaggccaccactccttgagaaggccggagggacaaagcaccgggcctgcgccgggggcattcaagaaggaagccaggcccgaccgggggtggcgcacgcttcccgaaccccag

SEQ ID NO: 835174 - DNA, 120 bp, Artificial Sequence
  ENSG00000237187_138 (sequence is synthesized)
atattttcatcatatcaaagggagaagctacgttggagctgtgaggcaaatatcgttttgaattggaagtcactttgactttgcatttttaattgtattaacagcagtgtactggagtag

SEQ ID NO: 835175 - DNA, 120 bp, Artificial Sequence
  ENSG00000237187_139 (sequence is synthesized)
cttagaaaatgtttacaacttggcccagtcaacagacttatttactgaataattttcaaaaattaggttaaaatgtacagcattttctctgctatctctgccagttggtctttgagccaa

SEQ ID NO: 835176 - DNA, 120 bp, Artificial Sequence
  ENSG00000237187_140 (sequence is synthesized)
gccaagccaaaccaaaccaaccaaactacacaaaaaagaccaggtttgcatgttgaatctggaatgttttgaatccaaggaaataacttacttattcacgtttagttggagtaacatgtt

SEQ ID NO: 835177 - DNA, 120 bp, Artificial Sequence
  ENSG00000237187_141 (sequence is synthesized)
tatgggtactagattttaatgccagtagtttgaatgggtgctttcatgcatatttacttacttggttgacagagcactagatatcaaatgtggagtagactgcttagggttgcatgattc

SEQ ID NO: 835178 - DNA, 120 bp, Artificial Sequence
  ENSG00000237187_142 (sequence is synthesized)
agaacgtgggcatgacatcttgtctttgggtcttgatgagcaaacactttatctcaagacagtgtcctctagctcataaatatattttactaatgatgcataaatattaaaaagaaatat

SEQ ID NO: 835179 - DNA, 120 bp, Artificial Sequence
  ENSG00000237187_143 (sequence is synthesized)
caactatggaacaacaacttgcagctcatctctattgatggtgaaacagtcgcaaatggaattccaagaaacattctatgtaagtcctggctttgaaatactttgtcatcctaagaagct

SEQ ID NO: 835180 - DNA, 120 bp, Artificial Sequence
  ENSG00000237187_144 (sequence is synthesized)
tggactttatcctgtcaaagaaatgacaaatcagatcattccagctgcagtatggagaatagagtgaagtggggtaacactggtttagtggcacaaattaagcatctacgtaagagagga

SEQ ID NO: 835181 - DNA, 120 bp, Artificial Sequence
  ENSG00000237187_145 (sequence is synthesized)
taatgacctgaactagggttaaagtagtggggatggagataaatagatagtttgagagaaattaagcagatagaatgactaggacttggcagttgactggatatggtgggcctggtgaat

SEQ ID NO: 835182 - DNA, 120 bp, Artificial Sequence
  ENSG00000237187_146 (sequence is synthesized)
gagaggcaggagtcaagattgatggtcaggtttctgacttgggcagtgggtatatagtgatgcttgtacgaagattgagaaagtaaaagggaaagtaaatatcaagcagtttcaagcagc

SEQ ID NO: 835183 - DNA, 120 bp, Artificial Sequence
  ENSG00000237187_147 (sequence is synthesized)
agtcagctgctgggctggctcaccacacttctgtagattccgttgaaaaggagacaatgagcctagatagatttagacagtttattactcaaagcaaagtaggcagcatgatcttcatgc

SEQ ID NO: 835184 - DNA, 120 bp, Artificial Sequence
  ENSG00000237187_148 (sequence is synthesized)
atctatgaattccccaaatcccatgatacagagtgaggcccagacagatgctgtgtacacggtggacctgtgtcctcccaatcttataagaggctacttgcaaacttgcccaaaatcatt

SEQ ID NO: 835185 - DNA, 120 bp, Artificial Sequence
  ENSG00000237187_149 (sequence is synthesized)
gtcctggaggttgacattatctttgttatgctggtcaggaaacaaatgtaccctctaacccagaagcatatcctgtctttactcagagacaaataaaaacaccatggacaattacctttc

SEQ ID NO: 835186 - DNA, 120 bp, Artificial Sequence
  ENSG00000237187_150 (sequence is synthesized)
tatagaaatgagataataaaacaataaaatatataaactttggctatgttaataacgtgatagttgcttgtaagatagttacagcaggtggttactgtgttgcctaattaaacatcatga

SEQ ID NO: 835187 - DNA, 120 bp, Artificial Sequence
  ENSG00000237187_151 (sequence is synthesized)
tagaatcttaatatgtgtaaaatttataattttattcatcacaaactgaattcacctaggcttagtcctctgctgcttttgaggtttgatgatctgctaacaatctcagaaaatgagaga

SEQ ID NO: 835188 - DNA, 120 bp, Artificial Sequence
  ENSG00000237187_152 (sequence is synthesized)
gttgtgtggtggcagtatatttataacacactatggaactggccttataactgtgacttttgcctgcttttagtccagaccagccctcttcaatagaaataagataaatgcaaacatcaa

SEQ ID NO: 835189 - DNA, 120 bp, Artificial Sequence
  ENSG00000237187_153 (sequence is synthesized)
atgtgagccacatacataatttaaaaatttctagtagccacattaaaaaacctaaaaggaagcaagtgaaattaatttttataatatactttaacccaatatatcgaaatattgtttcaa

SEQ ID NO: 835190 - DNA, 120 bp, Artificial Sequence
  ENSG00000237187_154 (sequence is synthesized)
catgtaatcaacataaaattattagtgagatattttacatttttttcatgctaaatctttgaaatccggtgtgtatcttacatttacggcttatctcaatttggacttgacacattgcaa

SEQ ID NO: 835191 - DNA, 120 bp, Artificial Sequence
  ENSG00000237187_155 (sequence is synthesized)
gtgctcaatagctatgtgtagctattgactactattttggacagtgcaattctagacctcaagaacaagaagttatattttatcatgtatgatgaatatagtttttctttgtatgttaga

SEQ ID NO: 835192 - DNA, 120 bp, Artificial Sequence
  ENSG00000237187_156 (sequence is synthesized)
ggactaaatactgtggtatgttttttatcttaaacaattgaataccaagaatagctaacattataatgaaaaaacaaatggtcagtgaatttacatggtatttaattttttttttttttt

SEQ ID NO: 835193 - DNA, 120 bp, Artificial Sequence
  ENSG00000237187_157 (sequence is synthesized)
ggagataatgagtttcacttaaaatcagctaggtattactgtgtctaatataggcatcttggaaggtaaattagggctgtaggttgtatcattaggtccttgagtgtaaacctctccagg

SEQ ID NO: 835194 - DNA, 120 bp, Artificial Sequence
  ENSG00000237187_158 (sequence is synthesized)
atttcactaagtggaccaggtagtcaggtgatttaaattataattaatgttcatcctttacccttgggaatatattacgtgttggtagaatttgttccattattttatataatgaggtgc

SEQ ID NO: 835195 - DNA, 120 bp, Artificial Sequence
  ENSG00000237187_159 (sequence is synthesized)
ctcataattttgtggcttgtgaacaaatgttcacatttgtgaacttatttaccatgttgacaaatgtattggctttatagtacagaagcatctcaaaaacctaaaagatttctgttaagt

SEQ ID NO: 835196 - DNA, 120 bp, Artificial Sequence
  ENSG00000237187_160 (sequence is synthesized)
aatttaatgaaaaacagacattgatgggaaaagtcagccatcctagtgccctcaatacagcagttggaaataatatacttttgaatgtctgaaatatgttagtggttttagaaaaagact

SEQ ID NO: 835197 - DNA, 120 bp, Artificial Sequence
  ENSG00000237187_161 (sequence is synthesized)
aggtaagtcatttgagaaacttaagaagacctaagaaactggcaatacatggtaatagcttactgagtttgctttgggtaaactcagtaagtcatggaacttgctatgcattttggtggg

SEQ ID NO: 835198 - DNA, 120 bp, Artificial Sequence
  ENSG00000237187_162 (sequence is synthesized)
gatacctttaattctaattggtgaaatgcagtcactttgaattgtatgttgagggaatgttctcagggaaaagtgagtttctgtgttgaatgactaagtgaaagcacttgactatttgta

SEQ ID NO: 835199 - DNA, 120 bp, Artificial Sequence
  ENSG00000237187_163 (sequence is synthesized)
aagcctgtgggtatctctttgatgttgattattatctgtgattgtttgttgagggttttctgtttgttttttaaaacacttgggaaaagcaaatggtgagtgttacaatttaaacagatt

SEQ ID NO: 835200 - DNA, 120 bp, Artificial Sequence
  ENSG00000237187_164 (sequence is synthesized)
ttcttttagagaatgttctgtaggaaaagacaaatagttctacttgatccttgtttgttgatgcttttatttgatttcatatttattgatacaaacagctttaaacattagattaattct

SEQ ID NO: 835201 - DNA, 120 bp, Artificial Sequence
  ENSG00000237187_165 (sequence is synthesized)
tgagctccaaggtcgtggtctggtcctcagggatgaggtcccgggtccagactctttccttggtcagcaactcctgcttagaagctccccgccccgaatggaatcgtgacctggcgctag

SEQ ID NO: 835202 - DNA, 120 bp, Artificial Sequence
  ENSG00000237187_166 (sequence is synthesized)
gtcccccgctgggagtgcccgaggctttcctgaaggccccaggccttcaggccgccagggtcctaaggtgcctgtggcggcccctcgtccgcctgagccctgagatcagcgcggccctcg

SEQ ID NO: 835203 - DNA, 120 bp, Artificial Sequence
  ENSG00000237187_167 (sequence is synthesized)
gtgctgcagggccccagggcggccaggaaacacctgcccgaagtccaggcccggccccactgcagtccaggaccctaattctcgagtgtctcttcacgaccctgaccccggaagggcgct

SEQ ID NO: 835204 - DNA, 120 bp, Artificial Sequence
  ENSG00000237187_168 (sequence is synthesized)
cccttgcgaacgaatttttaattctgcggactgggatcccttgtaggggcccctccgagggcccctcccacccctttccctggactagcgaactccgaccctaagcgcggccccgcaggg

SEQ ID NO: 835205 - DNA, 120 bp, Artificial Sequence
  ENSG00000237187_169 (sequence is synthesized)
gggagtgtgagtgggtccccgccaatcttttaaggttcagagatccaccgtcgaacgaagccgcttttacaacttccccatttagcctctttcctcccccgccgctggctaaagcgctga

SEQ ID NO: 835206 - DNA, 120 bp, Artificial Sequence
  ENSG00000237187_170 (sequence is synthesized)
ggaacccgagaggagaaccaatctcagcggcatccagtgtcggcagccaagatggttagctttgtgctggggacaatggagcggccctgggggaagcagagctggaaggcctcctcggag

SEQ ID NO: 835207 - DNA, 120 bp, Artificial Sequence
  ENSG00000237187_171 (sequence is synthesized)
gagcttgacttgcaggaggctgatttgcatgataatcaccatcatggatcctccctggtgccagcctccacacttaaccaaatgcagtataactttcatagcagctgaaaagcccgagta

SEQ ID NO: 835208 - DNA, 120 bp, Artificial Sequence
  ENSG00000237187_172 (sequence is synthesized)
ggggctgtagcacacattttgcaaagcctggatgacgtcaaaaactgctagtgaagagggggcagctggttgtaaagctaaaccacaccgaggaatggagacttggaacataaccttaaa

SEQ ID NO: 835209 - DNA, 120 bp, Artificial Sequence
  ENSG00000237187_173 (sequence is synthesized)
acctgataaagaatataactttggggactgttgaaaaatacgaagcttttccctcttttttttttttttaactcaaaagaatctgtttaccagaagaagccttttcttactggaacttct

SEQ ID NO: 835210 - DNA, 120 bp, Artificial Sequence
  ENSG00000237187_174 (sequence is synthesized)
gaagctgttgaaaccatggcatgaaaatagatcagtggaaacacagaaacatttccagtgcagacatttcggtctccatcagttaaaagtatggagccagacttgtagactaggaatctt

SEQ ID NO: 835211 - DNA, 120 bp, Artificial Sequence
  ENSG00000237187_175 (sequence is synthesized)
cccaccaatccttggtctgtttgattttactttatactgcattgtgatttggggcatatggtagaatggtagccagaattgcaatgaaaaattgcacagagccagtcaagcttaaatcac

SEQ ID NO: 835212 - DNA, 120 bp, Artificial Sequence
  ENSG00000237187_176 (sequence is synthesized)
tcaaagtttcttatgaaaaactttattccttagggctcccagggacaaaggagcatgtaaatcaactgatgttatgaagcatgattttggataatatggagagtatgtacatatcaatac

SEQ ID NO: 835213 - DNA, 120 bp, Artificial Sequence
  ENSG00000237181_0 (sequence is synthesized)
tgggcagacacagaagagggagaagcattccacaggggaggaaaggcctcagtggggacctatggagctcccaggcccaccgcagggaggcaggtcctcggtcatctgcggagggagaac

SEQ ID NO: 835214 - DNA, 120 bp, Artificial Sequence
  ENSG00000237181_1 (sequence is synthesized)
actttcagtcgaaggagcctgggacccttgacacagaagtgacatgtgcattcggaacctctctgtggaaaacacagacccttcatgacacgcaaactcgaagccggtgaggccgagtct

SEQ ID NO: 835215 - DNA, 120 bp, Artificial Sequence
  ENSG00000237181_2 (sequence is synthesized)
cagggctgcgccaaccaggaagcctggctgtccaatgttccaaatctggatgtgaaatggaccatgcagacaggacccaaggggcatgggggagctggcagaggcacccgggacaagtgg

SEQ ID NO: 835216 - DNA, 120 bp, Artificial Sequence
  ENSG00000237181_3 (sequence is synthesized)
tcggccaggaaggtagagaggcacctaccccagaacacggtgccagcgtcacactcttattaacagatgcaataaccaccttcggagaccagacccctcaaagagcactcagcccacaat

SEQ ID NO: 835217 - DNA, 120 bp, Artificial Sequence
  ENSG00000237181_4 (sequence is synthesized)
gtgacgcagagaaaccagagacccaggcagggagtgcacccacggggacactccgagggtggcctcctgcctgccctgattacttaaaaaggagattcttggaaacctttgcgggcccac

SEQ ID NO: 835218 - DNA, 120 bp, Artificial Sequence
  ENSG00000237181_5 (sequence is synthesized)
aggtgcaccctgactcccagggatgggggctgagccacccaggaaacaaatatgaaatcaaagatccagacagccctgaccctcctgattccagggtccataaataagtcattcttaaaa

SEQ ID NO: 835219 - DNA, 120 bp, Artificial Sequence
  ENSG00000237188_0 (sequence is synthesized)
caagatggcgtgtttaggagctctagctccttgacaaattagtaaaatgttagtcttaggagaagaacgaaaaggctctcctaggctaagaaacagcatacacagtgagaaacctcagaa

SEQ ID NO: 835220 - DNA, 120 bp, Artificial Sequence
  ENSG00000237188_1 (sequence is synthesized)
gaaataaaattcaaggaagatagcaacaacgaaaacatcagaaggaacactaaagctaaatggaaatgacttttgaattatctgctttggaagattatccatgacactgttctgccctgc

SEQ ID NO: 835221 - DNA, 120 bp, Artificial Sequence
  ENSG00000237188_2 (sequence is synthesized)
gaaaccgctgactattcaggctgacaattttctctccatcctctgaatttctctagcacttatcacctgtagaactcattaaaaatcatgtactggtaaagttgaaagcagctggagacc

SEQ ID NO: 835222 - DNA, 120 bp, Artificial Sequence
  ENSG00000237188_3 (sequence is synthesized)
atttaatctaaaaccctcattcttttgccattgacattgttggcattattacaaaaacccctgctatttatcatttttattgatattaaactttctacactcctaatttctgtctcttca

SEQ ID NO: 835223 - DNA, 120 bp, Artificial Sequence
  ENSG00000237188_4 (sequence is synthesized)
aatgtgttttctcaaggataggagataaagcctacacatccacagcagattatcatcacttccatttattgggatttgtgacctttaagtcattgtgctaggtccttcatctatattaca

SEQ ID NO: 835224 - DNA, 64 bp, Artificial Sequence
  ENSG00000237188_5 (sequence is synthesized)
tcagcgatactccgtccccctctccccgccccaagaaaaatctgttcagtggggagcgacaagg

SEQ ID NO: 835225 - DNA, 120 bp, Artificial Sequence
  ENSG00000237188_6 (sequence is synthesized)
ggaagatagcaacaacgaaaacatcagaaggaacactaaagtagtcaaatcagcctagcagaaacaaagtacgttaaccaatggaaaactgacggagagaaataaactgtttttgcacag

SEQ ID NO: 835226 - DNA, 120 bp, Artificial Sequence
  ENSG00000237188_7 (sequence is synthesized)
ctaaatggaaatgacttttgaattatctgctttggaagattatccatgacactgttctgccctgctctgctctaacaacatttggattcacctacgctcttaccagctggagggagtaaa

SEQ ID NO: 835227 - DNA, 120 bp, Artificial Sequence
  ENSG00000237188_8 (sequence is synthesized)
agcgcttggcctctgagactacccggcagaagggacgtccccaaatgacactcggaggccgcctccctgggctccggtgctcggtgccgggaggagcggcacggctttctaccccgcctc

SEQ ID NO: 835228 - DNA, 120 bp, Artificial Sequence
  ENSG00000237188_9 (sequence is synthesized)
aggtgcgccagcacgttttctgggcagcatctgtgtgttaggcgaccggagaggtgggttccttatagggaataagaaaactgaaactgacttccaactgcaggcagaaggaagcagtgg

SEQ ID NO: 835229 - DNA, 69 bp, Artificial Sequence
  ENSG00000237188_10 (sequence is synthesized)
ctgaaactgacttccaactgcaggcagaaggaagcagtggtcattgctggaggttaaaactgttctgac

SEQ ID NO: 835230 - DNA, 120 bp, Artificial Sequence
  ENSG00000237188_11 (sequence is synthesized)
aacatttattcccttggagtgttcttgttgtggatgaagctcacaggttgaaaaaccaaagctccctgctgcataagaccttgtcagagtagtcttcagtctcctgttgaccggaactcc

SEQ ID NO: 835231 - DNA, 120 bp, Artificial Sequence
  ENSG00000237188_12 (sequence is synthesized)
catccagaacagcctccaagagctctactccctcctcagttttgtggagcctgatctcttttccaaggaagaggtgggagattttattcaacgctaccaggatattgagaaagaatctga

SEQ ID NO: 835232 - DNA, 120 bp, Artificial Sequence
  ENSG00000237188_13 (sequence is synthesized)
ggcatgtcagcattgcagaagaaatactacaaggccattttgatgaaagacctagatgcatttgaaaatgagacggcaaagaaagttaaactacagaacattttgtcccagcttcgaaag

SEQ ID NO: 835233 - DNA, 120 bp, Artificial Sequence
  ENSG00000237188_14 (sequence is synthesized)
tgtgtggatcacccatatttgtttgatggtgtggagccggagccttttgaagttggagaccacctgactgaggctagtgggaagcttcacctgctggataagctactagcattcctgtat

SEQ ID NO: 835234 - DNA, 120 bp, Artificial Sequence
  ENSG00000237188_15 (sequence is synthesized)
tctgggctacagctatgagcgtgtggatggttctgtgagaggagaagagagacacttggccattaagaactttggacagcagcccattttcgtttttctcctgagtactagggcaggtgg

SEQ ID NO: 835235 - DNA, 120 bp, Artificial Sequence
  ENSG00000237188_16 (sequence is synthesized)
agttggcatgaacttaacagcagcagatactgtgatttttgttgacagtgactttaatcctcagaatgacttgcaagcagctgccagggctcatcgcattggccaaaacaagtctgttaa

SEQ ID NO: 835236 - DNA, 120 bp, Artificial Sequence
  ENSG00000237188_17 (sequence is synthesized)
agttattcggctgattggtcgagacactgtggaagaaatagtctataggaaagcagcctccaaactgcagctcaccaacatgatcatagaaggaggccattttactctgggagcccagaa

SEQ ID NO: 835237 - DNA, 120 bp, Artificial Sequence
  ENSG00000237188_18 (sequence is synthesized)
acccgctgccgatgctgacctccagttgagtgagatactcaaatttggtttggataaactgctggcctctgaggggagcaccatggatgaaatagacctggagtccatcctgggagaaac

SEQ ID NO: 835238 - DNA, 120 bp, Artificial Sequence
  ENSG00000237188_19 (sequence is synthesized)
aaaagatggccagtgggtctctgatgccttgcctgcagcagaaggagggagcagagatcaagaggaaggaaaaaatcatatgtacttatttgaaggtaaagattattctaaagagcccag

SEQ ID NO: 835239 - DNA, 120 bp, Artificial Sequence
  ENSG00000237188_20 (sequence is synthesized)
taaggaagacagaaaatcatttgaacaactggtaaaccttcagaaaacccttttggagaaagctagtcaagagggccgatcactccgaaataaaggcagtgttctcatcccaggccttgt

SEQ ID NO: 835240 - DNA, 120 bp, Artificial Sequence
  ENSG00000237188_21 (sequence is synthesized)
ggagggatctaccaaaaggaagcgggttctgagtccagaagagctggaggacagacagaagaaaagacaagaagcagctgccaagagaaggagactcatagaggagaagaagaggcaaaa

SEQ ID NO: 835241 - DNA, 120 bp, Artificial Sequence
  ENSG00000237188_22 (sequence is synthesized)
ggaagaggctgaacataagaaaaagatggcctggtgggaatccaacaattaccagtccttctgcctgccctctgaggagagcgagccagaggaccttgagaatggggaagagagctctgc

SEQ ID NO: 835242 - DNA, 120 bp, Artificial Sequence
  ENSG00000237188_23 (sequence is synthesized)
ctctcttcatttatttggcaggaagattaaatgatgaagggccatttctgattctttgtcccttgtctgttttgagcaactggaaagaagaaatgcagagatttgctccaggtctttcct

SEQ ID NO: 835243 - DNA, 120 bp, Artificial Sequence
  ENSG00000237188_24 (sequence is synthesized)
gtgtaacatatgcaggcgacaaggaggaaagagcctgccttcagcaagacctgaaacaggagtcacgttttcatgtgctactgactacctatgagatttgcttgaaagatgcatcatttc

SEQ ID NO: 835244 - DNA, 120 bp, Artificial Sequence
  ENSG00000237188_25 (sequence is synthesized)
taaaatcattcccttggagtgttcttgttgtggatgaagctcacaggttgaaaaaccaaagctccctgctgcataagaccttgtcagagttctcagtagtcttcagtctcctgttgaccg

SEQ ID NO: 835245 - DNA, 120 bp, Artificial Sequence
  ENSG00000237188_26 (sequence is synthesized)
gctctcattgtgcactgcgtagatgactctggccactggggcagaggtggtttatttacagctctggaaaagcgatccgctgagccaagaaaaatatatgagctggctgggaaaatgaaa

SEQ ID NO: 835246 - DNA, 120 bp, Artificial Sequence
  ENSG00000237188_27 (sequence is synthesized)
gacctgagtttgggaggtgtccttttatttcctgttgatgataaagaatcaagaaacaaagggcaagatttgttggccttgattgtggctcagcatcgtgatcgttccaatgtcctgtct

SEQ ID NO: 835247 - DNA, 120 bp, Artificial Sequence
  ENSG00000237188_28 (sequence is synthesized)
ggcattaagatggcagccctagaagagggcctgaagaagatatttttagcagcaaaaaagaagaaagcaagtgttcatcttccacgtattggacatgccacgaaaggttttaactggtat

SEQ ID NO: 835248 - DNA, 120 bp, Artificial Sequence
  ENSG00000237188_29 (sequence is synthesized)
ggtactgagcgacttattcggaaacatctggctgcaagaggcatcccaacttacatatattattttcctagaagcaagtctgctgtccttcattcacagtcttcatcttcctcctcaaga

SEQ ID NO: 835249 - DNA, 120 bp, Artificial Sequence
  ENSG00000237188_30 (sequence is synthesized)
cagctggtgccttaagaattggcccagcctcagatcctgtctttagcaaccagctaatatttacccagaggtactgcaatagagtatttcaaaatggaatcaggatctggtgggcctcag

SEQ ID NO: 835250 - DNA, 120 bp, Artificial Sequence
  ENSG00000237188_31 (sequence is synthesized)
aaattgtctcttttctgagtttcagtttggttctcctggatgttttgctctgttttggtacctgtaatatagggaaacacaactttttttgggaaagccctttgaccccagcttgctagt

SEQ ID NO: 835251 - DNA, 120 bp, Artificial Sequence
  ENSG00000257808_0 (sequence is synthesized)
tccctaacgggtaaagagagcagcacagcacgcctacctttgacagcctttcgtggtacctgtgaacagagagtgagaaaccataggcggggaggaaaagcagagatccagacagaagag

SEQ ID NO: 835252 - DNA, 120 bp, Artificial Sequence
  ENSG00000257808_1 (sequence is synthesized)
gcccacgtagaatgagccacagagagaccgagagaaaagtaatcccgggagcaggaaagagggaggggcatggacccaggagaggggaacagggacgaccccccacctcctcccgcctac

SEQ ID NO: 835253 - DNA, 120 bp, Artificial Sequence
  ENSG00000257808_2 (sequence is synthesized)
gggcaaggacaaaggcctggtcgatgcgccgctccagcccttgatcgccctgtgccttccacatgagccacagcttcagacagtccacacggcggccacactgcaccaccttgtctcccg

SEQ ID NO: 835254 - DNA, 120 bp, Artificial Sequence
  ENSG00000257808_3 (sequence is synthesized)
tgtccagagccacatcgtagaacttgtcctgctggaaaaggtccccagcaaaggggctttggtctcaccctcaccccagcatcaggaagaactgccatgtctgacctcccagctccaatc

SEQ ID NO: 835255 - DNA, 120 bp, Artificial Sequence
  ENSG00000249328_0 (sequence is synthesized)
gattgcttagaaactagcggttaaagatggagtctagggaacagtcgagagtcacgcaaatgttagaggtgcccttggcctcatgagtggtcggtagaaggcggctgcaaggagcctttg

SEQ ID NO: 835256 - DNA, 120 bp, Artificial Sequence
  ENSG00000249328_1 (sequence is synthesized)
aaatggtgccgagttcttcctctgccagaaagcctttcctccgcgctgactgtgtcaaaggctactcccagatctgtggaaagctgaataaatgaacagggccatttgacagagtgtaac

SEQ ID NO: 835257 - DNA, 120 bp, Artificial Sequence
  ENSG00000249328_2 (sequence is synthesized)
gcaatgccttgaacattcacagggagatcaagtattttgcccaagagcacacagctagagagtggagaagtccggattcaacccagacagattgactccagagcgtgtgctattcgtggc

SEQ ID NO: 835258 - DNA, 120 bp, Artificial Sequence
  ENSG00000249328_3 (sequence is synthesized)
tatgccagaatgccctgatggcctcaggtttgccttgccaactgacaaaggcgactgtttcctacccattggctcagatggttccagcttcctacccttccagttaaaataaacaaaaac

SEQ ID NO: 835259 - DNA, 120 bp, Artificial Sequence
  ENSG00000249328_4 (sequence is synthesized)
accacagggaatgaagctgcacacactgtttaatacagaaagccaacatagagggtaggaaccgtattggttttattcatcaatgtaaattcagtaccaagcccagtgcctggtacacag

SEQ ID NO: 835260 - DNA, 120 bp, Artificial Sequence
  ENSG00000249328_5 (sequence is synthesized)
ttatgcttagctttacttttgagatgtaaactaagaaaaacgagattccactaaaaccttgtcacatatatatatttggaaatctgtgaaatggtcaaccccaaaccaaaatttacataa

SEQ ID NO: 835261 - DNA, 120 bp, Artificial Sequence
  ENSG00000249328_6 (sequence is synthesized)
gattaacttattactttcaaatttacaaccgatggattgtggtgtgtgtgtgtgtgtatgcgtgtgttccatttgtagcatgtgtagttgctttatctaatatgtacattctctaattca

SEQ ID NO: 835262 - DNA, 120 bp, Artificial Sequence
  ENSG00000249328_7 (sequence is synthesized)
cagatggttccagcttcctacccttccagttaaaataaacaaaaacgagggtcttgagtgtctatgattttcataagatctatggcgtttcttctgcagatgatcaacagttgcctgcct

SEQ ID NO: 835263 - DNA, 120 bp, Artificial Sequence
  ENSG00000249328_8 (sequence is synthesized)
tggactttggagttcccaagaactagaaaatccaggtcaggaactgtatctttgctcagccacctgcaaacagacttgagaacaatgtaaaccaccctctgcaggatattgattctgatg

SEQ ID NO: 835264 - DNA, 120 bp, Artificial Sequence
  ENSG00000249328_9 (sequence is synthesized)
agtttcgaaggagaaggaagagaagttagataaagatgagaattcagaggcggagaagtaagatgatcaacagttgcctgccttggactttggagttcccaagaactagggaggaaggag

SEQ ID NO: 835265 - DNA, 120 bp, Artificial Sequence
  ENSG00000249328_10 (sequence is synthesized)
agagtctgaatactgctccttgtcctcagatgagctcttcctgtactcatgtctggatccagaggaaataagacatgacatctggagtatctcttctgcaagggaacgcagataaaagca

SEQ ID NO: 835266 - DNA, 120 bp, Artificial Sequence
  ENSG00000249328_11 (sequence is synthesized)
gcctgcggaacggatgtgagttctaggagtgcaagatggatgacttttgggtcacctttgtgttttcaggccctagcacagcacatggcacatagaagaatacgtatttattggaagcat

SEQ ID NO: 835267 - DNA, 120 bp, Artificial Sequence
  ENSG00000249328_12 (sequence is synthesized)
tgaaaaatcagtcaaacttaagaagcaagacaacctcatttgtaatttttttagagacagagtctcattctgttacccaggctggagtgctgtgcaatgatcatagctcattgtagcgtt

SEQ ID NO: 835268 - DNA, 120 bp, Artificial Sequence
  ENSG00000249328_13 (sequence is synthesized)
gacctcctgggctcaagcctcggcccccagagtagctaggacacaggccaccatgcccggttcatttttaaattttttctagagatggggatcttgccgtgttgcccagtctggtctggc

SEQ ID NO: 835269 - DNA, 120 bp, Artificial Sequence
  ENSG00000249328_14 (sequence is synthesized)
actcctggcctcacgcaaacctcccacctcagctttctacgaagctaggactacaggtgcatgccatgcctggctaatttttaattttcttttttaagaaatggggatcttgctatgttg

SEQ ID NO: 835270 - DNA, 120 bp, Artificial Sequence
  ENSG00000249328_15 (sequence is synthesized)
gcctggccgtagagaacctcctttttgacataaaagtaatcatgaacatgtgagcaatatttcatttggatgccaatgtagagttaagcatccctaaccccacccggtctcgtctcactc

SEQ ID NO: 835271 - DNA, 120 bp, Artificial Sequence
  ENSG00000249328_16 (sequence is synthesized)
aacatctgcagcttgtccacgcctctccacagcagcagaaatgagccaaagcaggaaaggctgactcattgtaggtgccagaggctgggaaaatctatagagccagaggggaagtagaca

SEQ ID NO: 835272 - DNA, 120 bp, Artificial Sequence
  ENSG00000249328_17 (sequence is synthesized)
cgttggttctggggaagggtggcctgtcactttggggaaagaaatggaaggtcagagggacttctggaaggcagaggggagcaggtgggatggtttcctatgcctggaccatcagtttct

SEQ ID NO: 835273 - DNA, 120 bp, Artificial Sequence
  ENSG00000249328_18 (sequence is synthesized)
gggagggaagaggcaggaagtagtgatggatgccctggactgaagactgggagggccaggaaggagccttaaaatttgcacttccagagagaaagtcggctggtgggattgacctcggac

SEQ ID NO: 835274 - DNA, 120 bp, Artificial Sequence
  ENSG00000249328_19 (sequence is synthesized)
tgacaactaacaggcagcatgcggtggagtttcaggaagccagaggtctggggtgccagcagcaacaaacccaggctggctgatggaagggcccagcctagacagggaagcagaggggct

SEQ ID NO: 835275 - DNA, 120 bp, Artificial Sequence
  ENSG00000249328_20 (sequence is synthesized)
gcatggaaaggctcagggctggaggtgatgtgaagtggaataagcttcagtgggagccaggaggttgtatttcccgttgggggcggtggtggagggatgggggtgcccagagaggaacta

SEQ ID NO: 835276 - DNA, 120 bp, Artificial Sequence
  ENSG00000249328_21 (sequence is synthesized)
agagaggaactatggattaggcccaggccggccactcagagtgcttggcatccaggatgtgttaagatggcattgaggccgagcgcggtggcttaggcctgtaatcccagtactttggga

SEQ ID NO: 835277 - DNA, 88 bp, Artificial Sequence
  ENSG00000249328_22 (sequence is synthesized)
caaaaacaattagctgagcatggtggcgcgcgtctgtaatcccagcttctggggaggccgaggcaggagaattgcttcaacccgggag

SEQ ID NO: 835278 - DNA, 120 bp, Artificial Sequence
  ENSG00000249326_0 (sequence is synthesized)
tccggtctgcgcgcggcgcgccgggtgcaggagctgggagccgctgctctgcagaggtcaagacaggccccgaagggaagctggagcagcaggtgaccggctgcccaggacgttctgtca

SEQ ID NO: 835279 - DNA, 120 bp, Artificial Sequence
  ENSG00000249326_1 (sequence is synthesized)
caaggagaacgcgagagatgaagttggtgaagactctgctttgcaggcaatctaaaatcctgggtctgatgttgcctgcttccagagctccattaaagcttcggtgaagtctcccccagc

SEQ ID NO: 835280 - DNA, 120 bp, Artificial Sequence
  ENSG00000249326_2 (sequence is synthesized)
ccacaggatcatctcggcattgacagtgtgccttgcaaggctggaatgcactgggccgctcccagactgctgcctgcaaagcaaaaatcccctctaccaggatgtggtgggcttcaaact

SEQ ID NO: 835281 - DNA, 120 bp, Artificial Sequence
  ENSG00000249326_3 (sequence is synthesized)
attgctgttcacctgcaattccaattttgcatgggtgtctctctagtcccctcctagtcagcctcttgtggactatgggccaacattgtggacacctcttgagtcagtggccccgaagct

SEQ ID NO: 835282 - DNA, 120 bp, Artificial Sequence
  ENSG00000249326_4 (sequence is synthesized)
gcagtggggtctggggtctggaccagagcatgttctcagggcaggccgagccatgctgtccggatgtgagaagggagctgtgtcaggcaggctgacaggccctggggcctgctcctgggg

SEQ ID NO: 835283 - DNA, 120 bp, Artificial Sequence
  ENSG00000249326_5 (sequence is synthesized)
ccacagggttctagggacccattactgaggtctgggggcaccaacagacccggcctgggtgggtggccagcagcccagagccagatgcagctgcacctgcctgagtgtgtgatgtgatgc

SEQ ID NO: 835284 - DNA, 120 bp, Artificial Sequence
  ENSG00000249326_6 (sequence is synthesized)
aggacctctttttcccctggatatggtcatatctcgaagcgacctgggggaccaagcaggtgttatgccagcaggggccccacattggccagaggtgccgggctctcccctgggaccatc

SEQ ID NO: 835285 - DNA, 120 bp, Artificial Sequence
  ENSG00000249326_7 (sequence is synthesized)
actttgactcttagtctagaaattagaagtgtggagctcaacagctgctggtgtcccctcatctcacctacatttaaaaaccatttctcatggaaaattccaaatatttacaaaaatagg

SEQ ID NO: 835286 - DNA, 120 bp, Artificial Sequence
  ENSG00000249326_8 (sequence is synthesized)
gagacttattgaatagggagaagaagtgggcacccgtcagccagtttcagcacttacataattcatggccaatcttacccattttccccaaccaatttgctttggagcaagttcagggta

SEQ ID NO: 835287 - DNA, 120 bp, Artificial Sequence
  ENSG00000249326_9 (sequence is synthesized)
aacaaaacaaaacaaaagaaaacaaaactcatatgaatatcatatgtgaaaaggcaacaattcttttcatgtttttacatttttaaattatttcattttattttatttgtggagacagga

SEQ ID NO: 835288 - DNA, 60 bp, Artificial Sequence
  ENSG00000249326_10 (sequence is synthesized)
ttttatttgtccatgcctcagcctcccgaaatgctgggattacaggtgtgagctaccatg

SEQ ID NO: 835289 - DNA, 120 bp, Artificial Sequence
  ENSG00000249326_11 (sequence is synthesized)
tgagctaccatgcctggcccaataattctttaatatcttcaaatacacaatgtttccgtttctttgctttttgacagtttatttgtttttatgttttatttttaaataacaggtttcttg

SEQ ID NO: 835290 - DNA, 120 bp, Artificial Sequence
  ENSG00000249326_12 (sequence is synthesized)
agaaacaatttgcataacatttactcttttaaactgtacaattgagtgatttttagtactttcatgaacttgtgcaaccatgaccatagattgcagaacaatttcattaccccccaaaaa

SEQ ID NO: 835291 - DNA, 80 bp, Artificial Sequence
  ENSG00000286388_0 (sequence is synthesized)
gccctcctggggtgcctctcagggacccaggcgctcagctgctggggccgcggagggcgttcgcggggcgccggggaagg

SEQ ID NO: 835292 - DNA, 120 bp, Artificial Sequence
  ENSG00000286388_1 (sequence is synthesized)
gacgcctgccagaccaccaagtgggggccatgtcgacgtgtgaggagcctggtggaaggtgatactggaattccggcactgggcctgcaacccttttagtccacagttgtcagaatctaa

SEQ ID NO: 835293 - DNA, 120 bp, Artificial Sequence
  ENSG00000286388_2 (sequence is synthesized)
agggaagaaaaacgaagtgctcagaaccctcacagaagccgggcacctcatcccgtgtgtgggttttttccccagtacaaacccattgtggggacaggcgcttttgaagaaaaaattcag

SEQ ID NO: 835294 - DNA, 120 bp, Artificial Sequence
  ENSG00000286388_3 (sequence is synthesized)
attcccgggctgaagtggctcctcacagccttgaacctgacccccagcttcccgctaaagccgagcgtgcccagcacggcgaggtcagcagaggcccctcggagggcggccgggggaggt

SEQ ID NO: 835295 - DNA, 120 bp, Artificial Sequence
  ENSG00000286388_4 (sequence is synthesized)
cagtgggaggccctcgggcagccggtggatgggccggcgacctccccgactccatcagaagcgctcagtctgtgcccttcagttactggagcagctcccgtcctttggccagttctctgg

SEQ ID NO: 835296 - DNA, 120 bp, Artificial Sequence
  ENSG00000286388_5 (sequence is synthesized)
aaggtcgtttccgtttctgtgtctgccacacgtgcagcacaatcgaaaaaccttgttcgacatttctagaaagagtagatgctactgaagacccaatagattgctgagggttttcagagc

SEQ ID NO: 835297 - DNA, 120 bp, Artificial Sequence
  ENSG00000286388_6 (sequence is synthesized)
agggacaattgcatcagggtgctgggctccgggaagaactcagaggacttggctgacgggcggatgggacagtgattggtgccgagaatgggccagagaagcaggtctgcctggagcagg

SEQ ID NO: 835298 - DNA, 120 bp, Artificial Sequence
  ENSG00000286388_7 (sequence is synthesized)
cacccgaggccgcgtgcaggggcggtcctgggccaccaacccctggaagctgggccaggagcttcggagccatccgaggcttttttcgctcctctcactctcatgcacctagttaccctc

SEQ ID NO: 835299 - DNA, 120 bp, Artificial Sequence
  ENSG00000286388_8 (sequence is synthesized)
cccacagagtcttctcacggcgcggttttcggctaccattgcagtggtgtctgactacacccagtgcctctatcgttcccccctcagtctgttctcgcttcttggcaaacctgtccttgg

SEQ ID NO: 835300 - DNA, 120 bp, Artificial Sequence
  ENSG00000286388_9 (sequence is synthesized)
aaagccctctgctgactcctgttaccctgatcaaatgcatcctcctcaggaggctcgtgagccctttgcagggtggcccaagaggcatcacgccctgctctccagccactcttggggtcc

SEQ ID NO: 835301 - DNA, 120 bp, Artificial Sequence
  ENSG00000286388_10 (sequence is synthesized)
cctacagggccaggcgtcccacaccagcagcgggtgctggtcctgccacagtctgtgcgacacgtgaatgaaggctgtagacctgtggtctgcgggaggcaaattccaactccagctgtc

SEQ ID NO: 835302 - DNA, 120 bp, Artificial Sequence
  ENSG00000286388_11 (sequence is synthesized)
aaacataaggggactggtaggctctccagggtggattgtctcacggcatccagaggcagggaccgaggcagggacctagccaggcctcgggaaggagctgcaaacccaggagctctgggg

SEQ ID NO: 835303 - DNA, 120 bp, Artificial Sequence
  ENSG00000286388_12 (sequence is synthesized)
tgtggcttcatctccctccctccctaccaccctacccccatctctccgtgttcttcagatgcctcattttcctgtcaggcacctggccagctctaggagctggaatcaggttggtgcctc

SEQ ID NO: 835304 - DNA, 120 bp, Artificial Sequence
  ENSG00000286388_13 (sequence is synthesized)
caggacattggccatcttgggaaagatcacagagacaggaagggcctctccagctgagcagatgagaggttcttcagtggtctggacacatttgcccactcatggccgtccccctgccct

SEQ ID NO: 835305 - DNA, 120 bp, Artificial Sequence
  ENSG00000286388_14 (sequence is synthesized)
gttgagagaaccgatgaggaaagggagccctgcatctgtcgccttccgactccgaccgcctgaggctgggctgccggcaagccgcggcagcatatgacagcacttgaaagaaagtccctg

SEQ ID NO: 835306 - DNA, 120 bp, Artificial Sequence
  ENSG00000286388_15 (sequence is synthesized)
gaaagaatgtggatcattgcagaactccctcaagaaagcgccagaggaggaccccattcagcaccccgcagaactcctcaaactcctgcgtccacactcccccagcgtggtggctgcttc

SEQ ID NO: 835307 - DNA, 120 bp, Artificial Sequence
  ENSG00000286388_16 (sequence is synthesized)
tatctccccaggcttagctggcctgggtcttgaaggcctctcctcctgctgtccccacgcagcatcctctctgccactgcacagctggatgcagtgaaggccaggcggctgtggctgctt

SEQ ID NO: 835308 - DNA, 120 bp, Artificial Sequence
  ENSG00000286388_17 (sequence is synthesized)
gggcaacaggagctgcttgaccctgttctgctggccttgttggcctcactcccgtagagagccaaggttacccacgtctctgaagctaaggctttctttctaggcctgggggagtcacat

SEQ ID NO: 835309 - DNA, 120 bp, Artificial Sequence
  ENSG00000286388_18 (sequence is synthesized)
gctaaggctttctttctaggcctgggggagtcacatcttgcattcgtactcactgagctccacgtctatggccctggtgtgtgatgttgcccgcactgtgtccaagtgttctcattgttc

SEQ ID NO: 835310 - DNA, 120 bp, Artificial Sequence
  ENSG00000286388_19 (sequence is synthesized)
gaagtggctcatcatcagctttaggtgttttctatctattgggagcctgcctttctctggcaccagctgcaaccaataattattttagacagtttaacaacagcttgaccatcacctgat

SEQ ID NO: 835311 - DNA, 120 bp, Artificial Sequence
  ENSG00000286388_20 (sequence is synthesized)
gatcacctgacatttctgttggggcgcgggcccatctcctgccccgctcatgtggggctcagtctgcccaacctttccccaagggcctgtctttacttcatttgtggtaagccccaagca

SEQ ID NO: 835312 - DNA, 120 bp, Artificial Sequence
  ENSG00000286388_21 (sequence is synthesized)
gaatggactcttgttatgatcccaggaactgctcacggccacctctgtggatgaacacctagcggctgctctaaatacatgctgtgaaagttgtcagaatcaaaatggagtcactaatgt

SEQ ID NO: 835313 - DNA, 120 bp, Artificial Sequence
  ENSG00000286388_22 (sequence is synthesized)
taagaaagccctgacaaagagttggtggggaaggccacgaagagaggacacttatgcttgcatgcctgataccagaaaggactacaaaaaccacagcccggcacagaggccatcacaccc

SEQ ID NO: 835314 - DNA, 120 bp, Artificial Sequence
  ENSG00000286388_23 (sequence is synthesized)
ttacacaaaaaatatttctgcaaggacaactgcccagcaattgcctgtccaacctcagactggaatgacctttgttattgatgtttgtagccaaggagaattatctcaaaaccactgtga

SEQ ID NO: 835315 - DNA, 120 bp, Artificial Sequence
  ENSG00000286388_24 (sequence is synthesized)
tcctgctcgcttttcctttaaagacctttgtcttccttgacctccctgaataggcatatggtttactatggcgtgtgtactctccttgtaatgttctgttctcaagctaacatctattct

SEQ ID NO: 835316 - DNA, 120 bp, Artificial Sequence
  ENSG00000286388_25 (sequence is synthesized)
tctagagaacctctctcttaggctgacaacgctgtggatctgggctcccaggaactggggctgacatcagaggggtggaaagagaacagcagctctccctgaggggatgcttgccaagga

SEQ ID NO: 835317 - DNA, 120 bp, Artificial Sequence
  ENSG00000286388_26 (sequence is synthesized)
taaggagacgatggttctctaaggattattttatattcatctaaaagggtatttttgttgttacccctagccttttttcccttttaattttctgatgaataatttatataaagaaaaccc

SEQ ID NO: 835318 - DNA, 120 bp, Artificial Sequence
  ENSG00000255091_0 (sequence is synthesized)
aagccccttccaactcatggatgcagcgattccccaggaagtgggttagcagaagtcagcaagggcaggggggcttaccccggcctccaggtcgaaagggcgcctccgggaatgcagctg

SEQ ID NO: 835319 - DNA, 120 bp, Artificial Sequence
  ENSG00000255091_1 (sequence is synthesized)
tcttcttccaaccacaccgaagtgacaccagctacctgaaactcaaagcgaaagtggaccagggagcattcctgacctcgatgcacctcatagagtctgaattaaaacaccaagatcgcc

SEQ ID NO: 835320 - DNA, 120 bp, Artificial Sequence
  ENSG00000255094_0 (sequence is synthesized)
attcctttcaattttaggtaaaagaaacctttttaccagatagtgacgagtggctaccatgattaataagtgactagacctcatggtcctcctcatactaaaaggtgaacagtgcaagct

SEQ ID NO: 835321 - DNA, 120 bp, Artificial Sequence
  ENSG00000255094_1 (sequence is synthesized)
gtcggtggatctaccattctggggtcttggggacagtggccctcttctcacagctcccggtgaatgctgcaatgatcattggtaggactgttaggctttgtttctcaagaggataatctg

SEQ ID NO: 835322 - DNA, 120 bp, Artificial Sequence
  ENSG00000255094_2 (sequence is synthesized)
attgggaaaagaataagagtgcagctgcagcccatccttgtgaagaaggtaccagtgcgctctcaaagccaagtcttgaaaataatagcgaatgctgtattggataacagccatgccaga

SEQ ID NO: 835323 - DNA, 120 bp, Artificial Sequence
  ENSG00000255094_3 (sequence is synthesized)
aaaatctattaagaaattcaaatgcagatttcaatatttactccttttcattctcttcctctctctctcgctcacttgctctttttctctctcccaccttgtttttctcgctctcctttt

SEQ ID NO: 835324 - DNA, 120 bp, Artificial Sequence
  ENSG00000255094_4 (sequence is synthesized)
ttttgcatacagtttctcagtaaaatacatttgattaaattttataacaaacaagcttatgaaatgcagatatacaaaaaggaaaacataagaagcatgcataattctaccactgaaaaa

SEQ ID NO: 835325 - DNA, 120 bp, Artificial Sequence
  ENSG00000255094_5 (sequence is synthesized)
tactactaaaatttggtatttaaacttttgaatgtttgtcactgcacttgcatgtgtgtgtaaatataatctccaactctgcagagaaatacaagaattgttatgaaccttaataaactc

SEQ ID NO: 835326 - DNA, 77 bp, Artificial Sequence
  ENSG00000255097_0 (sequence is synthesized)
gacccccttttatgctagcctcagctgaccatcctgctcactagtacactgtgggtcatagggggccaaaaacatga

SEQ ID NO: 835327 - DNA, 120 bp, Artificial Sequence
  ENSG00000255097_1 (sequence is synthesized)
aagttaatggttgtttttttattgaatacatttcaatgccaggtattagatggtattatccccatgttggagattaggaaactaaagtgcagagagtttgaataacatgcccgagactat

SEQ ID NO: 835328 - DNA, 120 bp, Artificial Sequence
  ENSG00000255097_2 (sequence is synthesized)
aaagcaagaattggaagcctgttctccctgtctctaaagtcttctacttttgtgttattgaaagaccaacttagtgatggggcacttgtttgcaaagatgtgtaagtgagacagtcactg

SEQ ID NO: 835329 - DNA, 120 bp, Artificial Sequence
  ENSG00000275393_0 (sequence is synthesized)
tgcattccgaataaaccacttccacttggatcctgtttggggatccaacctcaggtgacgctcccgcactccacctatcagccgatggcctcgagcaagtcacttggcctctctgagcct

SEQ ID NO: 835330 - DNA, 120 bp, Artificial Sequence
  ENSG00000275393_1 (sequence is synthesized)
cagtttccttaatcttcaaatggagatggtaaccaggatgtgcagaagatggcatgaatgaacacgcgcaaggaaccggaaatgctagcaccagcgccgatgtttgcccagctgtgctgt

SEQ ID NO: 835331 - DNA, 120 bp, Artificial Sequence
  ENSG00000275393_2 (sequence is synthesized)
agtgaaccggacgcttcatcaaaggctggggttgctctgtgggtgggggtgggtgcctctttggagcaaatccagagtgaggatttatgttgaacccaaaacgtcactcccctattctta

SEQ ID NO: 835332 - DNA, 120 bp, Artificial Sequence
  ENSG00000275393_3 (sequence is synthesized)
ttttttgtctgttcttctttaagtacgtcctgggggaatggttcctaatgtctgcagtttatttttcatttatttttaatgccaaagccaagcatactgattaaaaccaacgataaaaaa

SEQ ID NO: 835333 - DNA, 120 bp, Artificial Sequence
  ENSG00000245857_0 (sequence is synthesized)
acagagaaaaaagggatcaagttccaccattatgcaaaagggactcctgtaagccagaccctgagccgttgtcaaaacacagcttaatccccattccctgggcccgagaccctgcagccc

SEQ ID NO: 835334 - DNA, 120 bp, Artificial Sequence
  ENSG00000245857_1 (sequence is synthesized)
tcttacctggggcaacctgaccaacaagaacgcggaaggccaggagccaaaaacagagactcctgatgggtaacagaaggaaaaggcaggacatcccagtgctaaggagagtgacctcag

SEQ ID NO: 835335 - DNA, 120 bp, Artificial Sequence
  ENSG00000245857_2 (sequence is synthesized)
acaccagagacacagcaagtgcagcagagctgacggctctgggaacactggtcttcaaagtcttccccgttgttggttttgttgtctttatttacaaataaagtaaatatttcttattta

SEQ ID NO: 835336 - DNA, 120 bp, Artificial Sequence
  ENSG00000245857_3 (sequence is synthesized)
ggggaggtttccggcccggggcccgactgcgggtggcatttctggctaagccgttaggcgcgaattttctgtgtccagaaaacacagggcacgttacccggtatcgtggtctacacctcg

SEQ ID NO: 835337 - DNA, 120 bp, Artificial Sequence
  ENSG00000245857_4 (sequence is synthesized)
cccacaaatccatcccaggctgtatcctcatggaagctttttccagatgtgcttgagggttaagatcgcaatgtgcaagaagaaaaagtgcacattggaaaaccttctcttcggagatat

SEQ ID NO: 835338 - DNA, 120 bp, Artificial Sequence
  ENSG00000245857_5 (sequence is synthesized)
ctatatctatatttatatatatttacagatatggagatatatacacacacgtatctgaaaacattctgacgttttaaaaacggagcaccagaggagggggacttcatctgacttgttcag

SEQ ID NO: 835339 - DNA, 120 bp, Artificial Sequence
  ENSG00000245857_6 (sequence is synthesized)
cactgtctcccaggccctggcacagagggagcactcgatacacaccgatgggctgaaggtgtgaatggatctggggactagagtgatggttatttggcagacagcatgccccgcctgggc

SEQ ID NO: 835340 - DNA, 120 bp, Artificial Sequence
  ENSG00000245857_7 (sequence is synthesized)
ctaaagttaaccaacacagtgccctaagaccagaaaggagaaaaaatggaagttctgggtcctgccaaaggactatttcactgagcagactgctgagacctctgaattatgtggacactt

SEQ ID NO: 835341 - DNA, 84 bp, Artificial Sequence
  ENSG00000245857_8 (sequence is synthesized)
ctgagcagactgctgagacctctgaattatgtggacacttgagaatcagtcatgtgttggggccggcttttgggaggccaaggc

SEQ ID NO: 835342 - DNA, 120 bp, Artificial Sequence
  ENSG00000245857_9 (sequence is synthesized)
gtgaaaccctgtctttactaaaaacaaaaacaaaccccaaaaattagccaggtatggtggccggcacctgtaatccgagctagtcgggaggctgaggcaggagaactgcttgggcttggg

SEQ ID NO: 835343 - DNA, 68 bp, Artificial Sequence
  ENSG00000245857_10 (sequence is synthesized)
tgccactgcacttcagcctgggcgacaagagtgaaacaccagtcacctgttggtttgtggatcaaaca

SEQ ID NO: 835344 - DNA, 120 bp, Artificial Sequence
  ENSG00000245857_11 (sequence is synthesized)
ccaaaatcagtcacctgttggtttgtggatcaaacaaagtggaggtgacatcactgaagcctaggacatcactccccttttccaggcaggctttgtggttcgacctgtctcacgttccaa

SEQ ID NO: 835345 - DNA, 120 bp, Artificial Sequence
  ENSG00000245857_12 (sequence is synthesized)
cccatgcaccctaaccccctacttctttacctcttccaattgagacacaagattcattttggcccaaaggaggtatacttcaaaagcaattttcctttattaaaagaatgcttataaaaa

SEQ ID NO: 835346 - DNA, 120 bp, Artificial Sequence
  ENSG00000245857_13 (sequence is synthesized)
ggcaaggcccttcttggtcagcagggataaggcagttgtgtatgggagagcatgcgaggagggcgagggctgggggagatggagcaggaacatttggttggggctctgaggcactcttct

SEQ ID NO: 835347 - DNA, 120 bp, Artificial Sequence
  ENSG00000245857_14 (sequence is synthesized)
gcttggggagtgtgtgggcaaaggcaggggctgtgcaggaaggatttagctaaagccataaagctggaagagggtttggggaacggctttgaagttacatttgttttgcaagttctttgt

SEQ ID NO: 835348 - DNA, 120 bp, Artificial Sequence
  ENSG00000245857_15 (sequence is synthesized)
ttttattaatgtttgcatgttatttgggtagctgtagggagtaggttttcggggagttaaagtgcactctctcacccctccttcagtcctactactgcccctagatacacaatcacctca

SEQ ID NO: 835349 - DNA, 120 bp, Artificial Sequence
  ENSG00000245857_16 (sequence is synthesized)
agtgactttcacgtcaccaggaatgggcaaagtctagattttggaacagaaaatattttaggtccccgtccctctctgtaaccaataaccaatgccatataaatggaaaagtataaagaa

SEQ ID NO: 835350 - DNA, 120 bp, Artificial Sequence
  ENSG00000245857_17 (sequence is synthesized)
atgtccccagagcatgtagctggtcaaagaccaaccccggaccagaatggatgcctcctgatctcacttcagttctcattccacttcaccacactgctggttgactgtggtgtcacggtg

SEQ ID NO: 835351 - DNA, 120 bp, Artificial Sequence
  ENSG00000245857_18 (sequence is synthesized)
cataaccagaactaatttctggcattaccttccaggatctagtacattatgggacacaaaaggaattgcagcaaagttagtgagagggtactttgattacattctgtgttccacatctaa

SEQ ID NO: 835352 - DNA, 120 bp, Artificial Sequence
  ENSG00000231193_0 (sequence is synthesized)
gaaatgttttgttagccatcaggcaaactgaaaatagatttagaaagtatttaagattcattttttcaatgcacagtaattgagaaacctgtatgtgccaggcactgtgttagcactgga

SEQ ID NO: 835353 - DNA, 120 bp, Artificial Sequence
  ENSG00000231193_1 (sequence is synthesized)
gctctaaagggcagaaggctgaatgtgatagatggatctctaccttcagggtgcagtctagtaacacatagaaggactgagaccaatagccatgttgaagaggagacgatggttctccca

SEQ ID NO: 835354 - DNA, 120 bp, Artificial Sequence
  ENSG00000231193_2 (sequence is synthesized)
gaaatctgaagtgatgctgaatcttcgtcctttaatgttgtctgttttattgttgaacaattttatcatgcatcgtgtgaacttttatgcttatggtgtgtatcatcacagcactggaca

SEQ ID NO: 835355 - DNA, 120 bp, Artificial Sequence
  ENSG00000231193_3 (sequence is synthesized)
ataatgactcacacagtagaataacataactgtatacttgcatcaagggtagttaaaacatggtaaggttttctcatgtctttattaataatgattaaaaaattaattattcacctctga

SEQ ID NO: 835356 - DNA, 120 bp, Artificial Sequence
  ENSG00000271754_0 (sequence is synthesized)
ccacagccatagttggcacctgcccaaggaaaaataaccacttatctgcaaaaacccaacagaccccctacctatccccgtaaccccaacctccagaggtagggagctatctctcttcct

SEQ ID NO: 835357 - DNA, 120 bp, Artificial Sequence
  ENSG00000271754_1 (sequence is synthesized)
agaatgtttaatgagaaatttacaaagaatgagaaggtaaaatgctcagcaaaattccaggaaaattaaggagggaaggacagcttgagacacttaattctccaagtgaggtgtcagtgc

SEQ ID NO: 835358 - DNA, 120 bp, Artificial Sequence
  ENSG00000271754_2 (sequence is synthesized)
aaaagcattggcaatggctgcgtcaattcccaccatgtcaaactccagtgagttttcatccatgtgtactacatccacacggaaattctagagggacaggaaaaaacatttaagtgaaat

SEQ ID NO: 835359 - DNA, 120 bp, Artificial Sequence
  ENSG00000271754_3 (sequence is synthesized)
ctgctctctgtgtaatatctcttcatacctcccccttagataattccctcaagtattatcctctcatccaaaaacctccctttgcccaaatgtctcttattaaatattctatctcgccca

SEQ ID NO: 835360 - DNA, 120 bp, Artificial Sequence
  ENSG00000271755_0 (sequence is synthesized)
ggagaaggcgctgaagcacctggaaatgcacagcactgagatgcagcatgcttttaccgccagtcagatggatgtttgtgactttgctgcaggaagtgcctgcccagtccctgagggatg

SEQ ID NO: 835361 - DNA, 120 bp, Artificial Sequence
  ENSG00000271755_1 (sequence is synthesized)
cacacagggaggaagaacctccgttacaggttcacccaatggtctgccagaaaatagagcatgagcagctgttgggccccaagggtgggccagagaccccctactgtggtggagcacact

SEQ ID NO: 835362 - DNA, 120 bp, Artificial Sequence
  ENSG00000271755_2 (sequence is synthesized)
tcctatgttgtctgtgcccctgctaagttgtaggagttaagcaagtaatgttggcactcttgtacagacttggtgcaagtcatttgggagaaggatgttgctgcgcaacctggtcctgcc

SEQ ID NO: 835363 - DNA, 120 bp, Artificial Sequence
  ENSG00000271755_3 (sequence is synthesized)
agagtgttccagttcaaagagtacctgctgcagttggtggaagtataaagcattttctgtttgataagagaactggccaaggtgcccggcttggtaggggataccagacaaccaaaggcc

SEQ ID NO: 835364 - DNA, 120 bp, Artificial Sequence
  ENSG00000271755_4 (sequence is synthesized)
atatatggacttggcaatccactggtccctggacccggataagtttccagggaaggctgcatagacagctatgaaagctggtcagtgaaagtgaaacctgtgtctttgcacctgggcatc

SEQ ID NO: 835365 - DNA, 120 bp, Artificial Sequence
  ENSG00000271755_5 (sequence is synthesized)
agctgcttggctctccacttatgcactgtgtatgtctcttgcatgcctgaggacattcttgggggtggatgttttgcaagacttggcagctgtgccacctgtcatggacttgatggaccg

SEQ ID NO: 835366 - DNA, 120 bp, Artificial Sequence
  ENSG00000271755_6 (sequence is synthesized)
tttgacaacagaactgggatggtgccactgtgtggtggacttgaccaatgcattcttctcaatcagcattgctccagagagccaggaacagtttgccttcatgggagggcgacaatggac

SEQ ID NO: 835367 - DNA, 120 bp, Artificial Sequence
  ENSG00000271755_7 (sequence is synthesized)
tttcatagtgttgctgcagggctatatgtatagccccattatatatcattttcttattaatgatgttatgttaacctctagttcttttgctggtttggaggccacaacacccctcttgcc

SEQ ID NO: 835368 - DNA, 120 bp, Artificial Sequence
  ENSG00000271755_8 (sequence is synthesized)
tgggattgggatgatgaggctgaaacagcccttctgatgacataagccctctgggtggttaaccagggtgcccatttaaactagatgtgcatgtaaccaccaatagagttggctagggcc

SEQ ID NO: 835369 - DNA, 120 bp, Artificial Sequence
  ENSG00000271755_9 (sequence is synthesized)
tatggcagtatatggagtgcttggaagcgccagtcagcttttagtcccagctatggaagggagctgagccccagtgttcattaataaagaagcagttagtaaccatatatgctgcccttc

SEQ ID NO: 835370 - DNA, 120 bp, Artificial Sequence
  ENSG00000271755_10 (sequence is synthesized)
aggttcataagagcgtggctggatgggttacagtcgtgtggatggcttaccccatagtgggatgggtgcgttcatgagcaatgacccccccagactgggacagcacagacatccacttta

SEQ ID NO: 835371 - DNA, 120 bp, Artificial Sequence
  ENSG00000271755_11 (sequence is synthesized)
gcgaagtggggcacctacttagagcagtggagtacgctaagtataagtcccttagcagcagagttgcaagaggtcttggaacctgtagtcctaatgcaagataaggccatggggcctggg

SEQ ID NO: 835372 - DNA, 120 bp, Artificial Sequence
  ENSG00000271755_12 (sequence is synthesized)
gtctagttggggtgccactgctgcctggactgctggtgcagtccagcctagtactgacaccatatggtttgaaaccaggtgtagacagcggggcagtcaggattatcaatatcactgttt

SEQ ID NO: 835373 - DNA, 87 bp, Artificial Sequence
  ENSG00000271755_13 (sequence is synthesized)
gtagacagcggggcagtcaggattatcaatatcactgttttacagcttcacatcttagctgactggaaagccttccaggagcagtaa

SEQ ID NO: 835374 - DNA, 120 bp, Artificial Sequence
  ENSG00000271755_14 (sequence is synthesized)
ctgttttacagttaactttttttaaataagtagaagtacactctaaaatattaaattggtgcaaaagtaattgccgtttttgccattgcagttacttttgcaccaacctaataacaataa

SEQ ID NO: 835375 - DNA, 120 bp, Artificial Sequence
  ENSG00000271755_15 (sequence is synthesized)
tacttttgcaccaacctaataacaataaaaagtaaggtaaatacacaaaccagtgatatagtactttcctatcaggtattatatagtgctattttttttttttgagaccgagtctcactc

SEQ ID NO: 835376 - DNA, 85 bp, Artificial Sequence
  ENSG00000271755_16 (sequence is synthesized)
cgagtctcactctttacccagaatgcaggcagtggcatgatcttggctcacgacaacctctgcctctcggattcaacatataggt

SEQ ID NO: 835377 - DNA, 120 bp, Artificial Sequence
  ENSG00000271755_17 (sequence is synthesized)
tgctatacttttatatgattggcagtgcagtaagtttgtttacaccagtatcaccacaaacatataattgtgctatgatgtcactagttaataggcattttccagctccattataatctt

SEQ ID NO: 835378 - DNA, 120 bp, Artificial Sequence
  ENSG00000271755_18 (sequence is synthesized)
atgtgatcactgtcatttctgcagtccattattgaccaaaatgtccttgtgtggttcataactgtactcaaatatctacaaagagagtttcttctggtacccagtaaatatttcattact

SEQ ID NO: 835379 - DNA, 120 bp, Artificial Sequence
  ENSG00000271755_19 (sequence is synthesized)
taatatactctcccccctgctcctgcgaacctcactccatcctaagaacaatcttcgcatctgcctttctggactttctgctatgaactaaatatttattcaccagagaaactgctgtat

SEQ ID NO: 835380 - DNA, 120 bp, Artificial Sequence
  ENSG00000271755_20 (sequence is synthesized)
actaggtgttatgaaatataattttttttatatcaaagacattgtataattacatgaagaccaatggagtaattcatcttaattctaagtattagaaaagctttgttttccttgaagaat

SEQ ID NO: 835381 - DNA, 120 bp, Artificial Sequence
  ENSG00000271755_21 (sequence is synthesized)
ggacatatttttttccttctaaaacaatgtaagcaaatgaccttctcattttggttgccagaatgctcagtttgtatccctaactgactgcctgtgtaggttatcataacttgtcctgat

SEQ ID NO: 835382 - DNA, 120 bp, Artificial Sequence
  ENSG00000271755_22 (sequence is synthesized)
ctcctagtgctcatttgtatgtgttgttttctattttactgtatcttgttcgccatcttgagtcatttttttacacacaatggagttataataaaatagctattgcctattatgataaaa

SEQ ID NO: 835383 - DNA, 120 bp, Artificial Sequence
  ENSG00000271751_0 (sequence is synthesized)
agaagaaatgtaaaagcagagatgtgaacaagagatagagtgcatctttgttgcttgggtgctccccctgttgtccaatggcagaagctccacgtcttcctctgagggctgaatctggtt

SEQ ID NO: 835384 - DNA, 120 bp, Artificial Sequence
  ENSG00000271751_1 (sequence is synthesized)
cctgccagagagacccacagcacctcttcagacttactaccttctttcctttccttcttttgacaaatatgtattgagcactcctagtccaggaattgtaccaaatgcccagaatataaa

SEQ ID NO: 835385 - DNA, 120 bp, Artificial Sequence
  ENSG00000271751_2 (sequence is synthesized)
tgaacaagacatggtcctcaaccaccaccctagagacaggcataaaaagaactgacagtaacaagcccctaatttcatgtagtaaattatatctaataaagtgccttcgcttttcatgga

SEQ ID NO: 835386 - DNA, 86 bp, Artificial Sequence
  ENSG00000271752_0 (sequence is synthesized)
gttgcttgaggtcaggagttcaaaaccagccttggcaatattgcaagacccctgtctctacaaaaaataaaataaaaattagctgg

SEQ ID NO: 835387 - DNA, 120 bp, Artificial Sequence
  ENSG00000271752_1 (sequence is synthesized)
gtgaatacctgtagtgctagctacttgggaggatctcttgagcacaggagtttgaggctgcagtgtactgtaactataccactgcactctagttgagatgacagagggagaccctgtttc

SEQ ID NO: 835388 - DNA, 120 bp, Artificial Sequence
  ENSG00000271752_2 (sequence is synthesized)
ttaaaaaagaaaagaaaaagctgcctttggaaactaatcctacttttctgacctcttctgataggtctactgtaaaaaaccaaagtcaactttgaataaacttgacaagctgaaggagaa

SEQ ID NO: 835389 - DNA, 120 bp, Artificial Sequence
  ENSG00000268683_0 (sequence is synthesized)
ggcacaacatcgtgaatgtacttaatgccactgaactatacacttaacatagttaaaatgattaacttcatgctatgtatattttaccagagttaaaaaaaattttttttcttcatctat

SEQ ID NO: 835390 - DNA, 120 bp, Artificial Sequence
  ENSG00000268683_1 (sequence is synthesized)
aaattaagctttccatagtagcaaaatcaggggaagtgtagatacagcactcagtttgattcagcacaagtccccaacatgatcaaaatgatgtaaagctgcatgaggctggtctcgaac

SEQ ID NO: 835391 - DNA, 120 bp, Artificial Sequence
  ENSG00000268686_0 (sequence is synthesized)
gtggccacggagtttgtctggtggtggaaggagggggtggctgcgcccgccatgctggggctcgtgtttttctcttccgcttcaggctttggtgaaatgggctgaggaagggggaattga

SEQ ID NO: 835392 - DNA, 66 bp, Artificial Sequence
  ENSG00000268686_1 (sequence is synthesized)
ttcaggctttggtgaaatgggctgaggaagggggaattgaactgagagactccttgtccgtccccc

SEQ ID NO: 835393 - DNA, 78 bp, Artificial Sequence
  ENSG00000268686_2 (sequence is synthesized)
agcgcctggcctgtcctttttatgtattgccatattttcttttcttttcttttctgtgagatccctgttgagttttgt

SEQ ID NO: 835394 - DNA, 120 bp, Artificial Sequence
  ENSG00000268686_3 (sequence is synthesized)
cttttcttttcttttctgtgagatccctgttgagttttgttaacaaggctatgctgatataatgtgtggagaagtgttctctctttttctattctttgaaagtgctagtgtaggattgat

SEQ ID NO: 835395 - DNA, 120 bp, Artificial Sequence
  ENSG00000268686_4 (sequence is synthesized)
agagttttctttgtggaaagactttaaattacaaattctatttcttttataaaaatacaactattcagatgttctattttatttctgggtctcactctgttacgcaggctggagtacagt

SEQ ID NO: 835396 - DNA, 120 bp, Artificial Sequence
  ENSG00000268686_5 (sequence is synthesized)
cccaggctcaagcgatcctcccaccttggatctgtccagtccaatcacatgagcccttcaaagcagaggactgtctctgccagaagaggaaggcataccagagatgggacacaaggggaa

SEQ ID NO: 835397 - DNA, 120 bp, Artificial Sequence
  ENSG00000268686_6 (sequence is synthesized)
gaaggcataccagagatgggacacaaggggaagtcagagtcccgccatgatactgggctgtggctctgggatgtcaggtccacctgcagtaactggagagaggcctcttggagctaagcg

SEQ ID NO: 835398 - DNA, 120 bp, Artificial Sequence
  ENSG00000268686_7 (sequence is synthesized)
tggaagcatgggtggcccccagctgacagccagcaagaacgtggggacctcagtcccacaagcccaggaactcgattctgcttaaaatctgaatgagcttgaaagcagcttcttcccaga

SEQ ID NO: 835399 - DNA, 120 bp, Artificial Sequence
  ENSG00000268686_8 (sequence is synthesized)
gcctcccaatgagagctcgggtggctgacaccctgtgaaacccagagctgagggccagcggagccatcctggatttctgaccaggatgatatgtgaaataatgcatttgtgttgttttaa

SEQ ID NO: 835400 - DNA, 120 bp, Artificial Sequence
  ENSG00000268686_9 (sequence is synthesized)
tttttctgcaggtgctgggagagtacttgttggcatatgctgatggtcatctgcatgattggactcttccatatctgctccagaagcttgagtgtctccactacaggaagagtctttgtc

SEQ ID NO: 835401 - DNA, 120 bp, Artificial Sequence
  ENSG00000268686_10 (sequence is synthesized)
attactggttttagaaaagctgtcctcagagccaccatttttcttgatgcctttcacggtgacaacggccagcacttgccctgaggacatctcttcaggaagctctgctacaagaatggc

SEQ ID NO: 835402 - DNA, 120 bp, Artificial Sequence
  ENSG00000268686_11 (sequence is synthesized)
gaagcaatcttttttcttggcatctcattttgccctgtgaagagatagggctgcttctggggacttttcactgatcaccatccccgccaggtcatccttgaaatcatttacctggactcc

SEQ ID NO: 835403 - DNA, 120 bp, Artificial Sequence
  ENSG00000268686_12 (sequence is synthesized)
ctagggtgccttcacattacatggggcctccttttccttgatgttgttggcaaattctttcactggattatctatgggaactttttccttggcacatttgtcggcattcagatccagtgg

SEQ ID NO: 835404 - DNA, 120 bp, Artificial Sequence
  ENSG00000268686_13 (sequence is synthesized)
agcatcctcatgtgagctttcgttggtgaggtcttccaccagggtatcctccatgggaactttttccttggctcatttgtcagcctttaaatttagcaaaacatccccatctgagctttt

SEQ ID NO: 835405 - DNA, 120 bp, Artificial Sequence
  ENSG00000268686_14 (sequence is synthesized)
gttggcaaggtcttccaccagggtatcctccgtgggaacttttccttggtgaattcatcagccttcaatccagtagagcgtcctcatctgagctttcattggcaaggtctttcaccaggg

SEQ ID NO: 835406 - DNA, 120 bp, Artificial Sequence
  ENSG00000268686_15 (sequence is synthesized)
ttcatgcgtttgtcaaccttcaagtccagtgaggcatccttatctgagctttcgtttccaaggtcttccaccagggtatcctccatgggaactttttccttggcacgttctttggccttc

SEQ ID NO: 835407 - DNA, 120 bp, Artificial Sequence
  ENSG00000268686_16 (sequence is synthesized)
aaatccagtggggtgtcctaatctgaaatttcattggcgaggtcttccagaggatcctccatggcacctttttccttggcacattcattggccttccaaagccatggggcattttcatct

SEQ ID NO: 835408 - DNA, 120 bp, Artificial Sequence
  ENSG00000268686_17 (sequence is synthesized)
gagctttcactggcttggtatccttccaggatatcttccatgtgaacacttgcctgagttgctgagtctgtcaagtgaacagcaagaacctgttcagaggaagtgtcgctggtctgctcc

SEQ ID NO: 835409 - DNA, 120 bp, Artificial Sequence
  ENSG00000268686_18 (sequence is synthesized)
cctgccaggttgtccttgaaatcttcagatggctacctgccagggtgcacatgaggatgacacctgcggtggcacattctctctctaaaactgcgctggcagaccatggattcgccatgg

SEQ ID NO: 835410 - DNA, 120 bp, Artificial Sequence
  ENSG00000268686_19 (sequence is synthesized)
acagtggagtctcctgaaacctgagtatccactgctgcatcttggaggcaatactctagccttcacgagcacccttctactccagtcaggctgaagtctccctcgctgtcaccgccacaa

SEQ ID NO: 835411 - DNA, 120 bp, Artificial Sequence
  ENSG00000268686_20 (sequence is synthesized)
ctgtaggaggtgagccacagagccgtgccatctgcaagctccaaactccacctcaccacaggtgactcctccttcactttctcctccagcctttctcagagtggctgggcgggcaaagcc

SEQ ID NO: 835412 - DNA, 120 bp, Artificial Sequence
  ENSG00000268686_21 (sequence is synthesized)
agaaaagccactctggccacactgcagcctctgttgccaccaccaactgcagtgaggcaagccatggtgccacaggctccaacctccagcatgtggcaggtgattccccttccccttctc

SEQ ID NO: 835413 - DNA, 120 bp, Artificial Sequence
  ENSG00000268686_22 (sequence is synthesized)
cccttctcctggttctctaagccaggaacagagtagctcggtgggcagatacagaagagcctaaaatctgttgtactattttaagaaaaacttctcttgcctgtaatcccagcactttgg

SEQ ID NO: 835414 - DNA, 82 bp, Artificial Sequence
  ENSG00000268686_23 (sequence is synthesized)
tggccaacatagcaaaacctcatcgctactgctggatattgtagtgcgtgcctgttatccctgctctttgggaggctgaggc

SEQ ID NO: 835415 - DNA, 120 bp, Artificial Sequence
  ENSG00000268686_24 (sequence is synthesized)
gctgaggcaggagaatcacttgaacctgtgttagaatcaaaatgcttgtttcttggtgtcgcaaggaaaaattagcattcagacaaaaagttttctcagcaaggcaattttactttctgt

SEQ ID NO: 835416 - DNA, 120 bp, Artificial Sequence
  ENSG00000268686_25 (sequence is synthesized)
agttttctcagcaaggcaattttactttctgtagaaagggtgctgcccatcagcaatcctgccaggagagcacaatgaacaaagaaaggcaggaatatttatcccttatgcattgggtcc

SEQ ID NO: 835417 - DNA, 120 bp, Artificial Sequence
  ENSG00000268686_26 (sequence is synthesized)
ttactgctgtgtcctgtctccattggttggagctggacctcacagtctaagctaaacccaattggctaacaacttaaaaaactttcttaaataggtaaaggcaatggagaacaaaggaaa

SEQ ID NO: 835418 - DNA, 120 bp, Artificial Sequence
  ENSG00000268686_27 (sequence is synthesized)
agaggaagttgcttgccaaaagacttggagaagtaataacatttccaaataaggaaagggcataagctgtgagctgggacatgcttgagcacgtcgagaccaaatatcttggttaacgta

SEQ ID NO: 835419 - DNA, 120 bp, Artificial Sequence
  ENSG00000268686_28 (sequence is synthesized)
caaggacacagaaggtacttatttccttatatctaacaactacataagatatggtttaaaaaagagttactaacacaaagcaaagaggcttaaaaaaagttaattaaaaatattatttct

SEQ ID NO: 835420 - DNA, 120 bp, Artificial Sequence
  ENSG00000268686_29 (sequence is synthesized)
tttattatttaataaaaactttaaagagaaacttttttactttccacaacctagaaggtggaggttgctgtgagccaagatggcaccactacactccagtctgggtgacagagggagact

SEQ ID NO: 835421 - DNA, 120 bp, Artificial Sequence
  ENSG00000270482_0 (sequence is synthesized)
ggagacagccgccaggcggcgcctggagctagaactaaagcggtgatcgttagcgacctaggggcggagggtttgaagggcccttggcaggtggaggtggtctctaatttaagcagggaa

SEQ ID NO: 835422 - DNA, 120 bp, Artificial Sequence
  ENSG00000270482_1 (sequence is synthesized)
cgacgcgacctgcccccttattaggtcggaaaacctagacgtccagagtcttgctctgagctctcaactgaagaaggggagaatttgcctaccagaagttatttggctaaggcccacgtg

SEQ ID NO: 835423 - DNA, 120 bp, Artificial Sequence
  ENSG00000270482_2 (sequence is synthesized)
aacaggagagctgagtatctgcaagaattaatttgtgcgattccctctgagtagaaaaggaacacggtgttataagttttgctgaacgaatagatttaaggtgtccctttagctaagagc

SEQ ID NO: 835424 - DNA, 120 bp, Artificial Sequence
  ENSG00000270482_3 (sequence is synthesized)
aatgtggtctagttgtgtgtagcgagaaaaaagggtaaggtttttaatggtttgtccaaagtagccccacttttatgttccacccgagtctccgtaggaaacgcaaccagtagtgaaaat

SEQ ID NO: 835425 - DNA, 120 bp, Artificial Sequence
  ENSG00000270482_4 (sequence is synthesized)
gaacagatgtgaaaaccagggtggaaccgaatattcccattctcagaccttttgtgattaaatttatctctgaattgttccctatggactcttctgaaaatgaaacgttattctcatccc

SEQ ID NO: 835426 - DNA, 120 bp, Artificial Sequence
  ENSG00000270487_0 (sequence is synthesized)
tttaggctcagcctactagcaagaaacagcaagagtgcaggacacttcctaacagcgctgtaggactcgggtgacagcaaaataaagaaaatccaaataaatacgatcccaaaagatcaa

SEQ ID NO: 835427 - DNA, 120 bp, Artificial Sequence
  ENSG00000273669_0 (sequence is synthesized)
aggaggaagatcactcggtcctgtgccgtcaggttccaaacatgacagcacacagccatgaagccctgccccattcagccagccctgtgcaaagctttccagatacatgaccttccctac

SEQ ID NO: 835428 - DNA, 120 bp, Artificial Sequence
  ENSG00000273669_1 (sequence is synthesized)
tgcctcctgaaccccacgggacatgtggcattagccacacttacagagcctcagaaaggctaagcagctcgcccagtgacacacagtggaggtgacagggccccatccccagctttaggt

SEQ ID NO: 835429 - DNA, 84 bp, Artificial Sequence
  ENSG00000273669_2 (sequence is synthesized)
ggtgttgagggagaggcctggtgggagtggagggagaggcctggtgggaggtgattgactcatgggggcggtttcccccatgct

SEQ ID NO: 835430 - DNA, 120 bp, Artificial Sequence
  ENSG00000273669_3 (sequence is synthesized)
cccatgctgttctcgtgatagtgagtgagctctcacaagatctggtggttttataaggggctctttcccctttgctttctcttctctctctcctgccaccatgtgaagatggtccttgct

SEQ ID NO: 835431 - DNA, 120 bp, Artificial Sequence
  ENSG00000273669_4 (sequence is synthesized)
ttttataaggggctctttcccctttgctttctcttctctctctcctgccaccatgtgaagatggtccttgcttcccctttgccttctgccataactgtaagtttcctgaggcctccccag

SEQ ID NO: 835432 - DNA, 120 bp, Artificial Sequence
  ENSG00000273664_0 (sequence is synthesized)
ctttcataggagtgttacaaagattaatgatagggccctaaatgctccttgggggaggccgtgtgtgattatgtgattatttcttttcagcataccactctctgcaaagtttttcataaa

SEQ ID NO: 835433 - DNA, 120 bp, Artificial Sequence
  ENSG00000273664_1 (sequence is synthesized)
gatgtggggctgtgtctggggctttctagtgcatactatgttataggttagaatccctggtagaccaggtattgttaagtagtactgctgcatgttgcctgggggtggggtgactggctg

SEQ ID NO: 835434 - DNA, 120 bp, Artificial Sequence
  ENSG00000273664_2 (sequence is synthesized)
gagaatagagagacggctgcgtacaaaagtaaagtgaaaggaaaaaagaaaagtaaacaccaggacacagggcagagaatatgcttctaaataaaatcagttgtctcttctcagttttaa

SEQ ID NO: 835435 - DNA, 120 bp, Artificial Sequence
  ENSG00000231814_0 (sequence is synthesized)
tgagatggctactgagtgactaacagatttttccttttgcattgtgatgatgtgtcctgacaaacaacaggattccattattaaatagtgatgctacccaaatccaggcttgtcctgtgc

SEQ ID NO: 835436 - DNA, 120 bp, Artificial Sequence
  ENSG00000231814_1 (sequence is synthesized)
ttgatggctgctgctattgctccacagagatgcctcttcccaaccagaaactgtgttaaccgactctcacactgacttccaatcctcaccacaaccttgcgaggtcggtattatgaccac

SEQ ID NO: 835437 - DNA, 120 bp, Artificial Sequence
  ENSG00000231814_2 (sequence is synthesized)
ttacaggtaaggatggtgaaactcggaaaggttaagtcactcagacccagcatgcagtgtcgtttccctctgcccgctgcctgtgctacacattctgggcgctgttgctgagctccgctc

SEQ ID NO: 835438 - DNA, 120 bp, Artificial Sequence
  ENSG00000231814_3 (sequence is synthesized)
aatggctttacgcctccctttcagggaaaagcagctgcactgaagttctgtaaatgctgtaatagaagttgttaaccacttccacatgatttttaaagtaaatgtcacactgcattgtaa

SEQ ID NO: 835439 - DNA, 120 bp, Artificial Sequence
  ENSG00000231814_4 (sequence is synthesized)
aagggtgaaggagaaactgaggcacaatatcatgagttcacatggaaaaatcatgagtacacatggaaaaaaggtagaatttttgacgtgaattatctcagtttatatataccttttaaa

SEQ ID NO: 835440 - DNA, 120 bp, Artificial Sequence
  ENSG00000231814_5 (sequence is synthesized)
ttccaatacggaagttactgtgatgcctgcaaggacggccacgttcagtgaattacttggcagctgggccatttatttcttcacttctcccttgctgcctccctcggtggtttttgaagt

SEQ ID NO: 835441 - DNA, 120 bp, Artificial Sequence
  ENSG00000231814_6 (sequence is synthesized)
ttagttattgctatgcttcctctcatgctgctatccgagggagaatggaactgttggtttcagcagcagtcagatcctcaccattccagcctggctgcggaagcgcccactagttccctt

SEQ ID NO: 835442 - DNA, 120 bp, Artificial Sequence
  ENSG00000231814_7 (sequence is synthesized)
tgtctgctgctctgcccagagctggaagcataggctgagcggctgctggctgtcagcttgcagcgtctgatattgttaggagacgaattatgcccctcctgcccccccactgccctcaat

SEQ ID NO: 835443 - DNA, 120 bp, Artificial Sequence
  ENSG00000231814_8 (sequence is synthesized)
ttgtatgttgaaatcctaatctctagtacctcagaatgtgatcttatttggaaacaggtccattgaagaggtagttagttaagtggaggtcatattggagtaggctgagtgagccgctaa

SEQ ID NO: 835444 - DNA, 120 bp, Artificial Sequence
  ENSG00000231814_9 (sequence is synthesized)
tccaacatgactggtgtccttataaaaagggacaatgtggatgcagagacacacacagggagaataccatgtgaagactggagttattcagccacaactaaggcatttccagaagccagg

SEQ ID NO: 835445 - DNA, 120 bp, Artificial Sequence
  ENSG00000231814_10 (sequence is synthesized)
agagaggcttggaacagatccttccctagagccttcagagggtgtgtggccccgctgacactgacctcagacttccagcctccagaggtgtgagatgataaatttctgttgcttaaatga

SEQ ID NO: 835446 - DNA, 80 bp, Artificial Sequence
  ENSG00000271288_0 (sequence is synthesized)
atggactggacctggaggatcctctttttggtggcagcagccacaggtgcccactcccaggtccaactggtgtagtctgg

SEQ ID NO: 835447 - DNA, 120 bp, Artificial Sequence
  ENSG00000271288_1 (sequence is synthesized)
aaatattcacagaagctccagggcagagtcaccattaccagggacacatcttcgagcacagcctacatgcagctgagcagcctgagatctgaggacacggccgtgtattactgtgcgaga

SEQ ID NO: 835448 - DNA, 120 bp, Artificial Sequence
  ENSG00000276255_0 (sequence is synthesized)
caaaaaaccaaatggatcttgttccgcatagggcagacaggacccagaggacacagcagtccacaacaaaggcactggattctgaatggcccctgtcttgtttggggagaggggaactgt

SEQ ID NO: 835449 - DNA, 120 bp, Artificial Sequence
  ENSG00000276255_1 (sequence is synthesized)
tggtccccgtctgtgttccgaggcttggtgacaaattctagcaaaccttagtggtttaaaacagcagtccacatagatggtctctcacagttcctgggaagcaggaccctgggctccatg

SEQ ID NO: 835450 - DNA, 120 bp, Artificial Sequence
  ENSG00000276255_2 (sequence is synthesized)
gcaacctggttctgctctaaggtctcaactgaggtgtcagtgcctgggtttacctcgaaggtattgtagtggggtaggttgggcaccccccttcacatccagctggagccttggagcagg

SEQ ID NO: 835451 - DNA, 120 bp, Artificial Sequence
  ENSG00000276255_3 (sequence is synthesized)
acctcctgtagaaccagggtcttggcagacatcctcaatgagtgacgtcgagaccaggccatcctggattagggtgggccctggacccgtaacaggtgatcgtctaagagaaagaggagg

SEQ ID NO: 835452 - DNA, 120 bp, Artificial Sequence
  ENSG00000276255_4 (sequence is synthesized)
gggatctgagatgcacagatcgggaaccagccatgaagacaggccagagactggagtgtgtggccatgcgcctgaggcacctgagccaccaggagctggaggaggctgtgcagggtcctc

SEQ ID NO: 835453 - DNA, 120 bp, Artificial Sequence
  ENSG00000276255_5 (sequence is synthesized)
cccagaacctttggagggagcatgcccgggacacctcaatgtggggcttctggctgcagagttgcgaggaaatacctcccttgctgttgtgaaccacccaggttgtggtaacttgctgtg

SEQ ID NO: 835454 - DNA, 120 bp, Artificial Sequence
  ENSG00000276255_6 (sequence is synthesized)
gccaccctgtgatgccagtatacctccttccctcatgtctggtgccaaggccgggagagtcaaatacctggggctaaaagcattggggttcctcagatgatcctctttgcacccctgcat

SEQ ID NO: 835455 - DNA, 120 bp, Artificial Sequence
  ENSG00000276255_7 (sequence is synthesized)
agggtgtctgcccacacggcctcagggtcatgagttttctgcaggcagccacctgacctgtccagccggacatgtgtctcccccatgggtcagtttgggcagcaggttgggtcccgtgta

SEQ ID NO: 835456 - DNA, 120 bp, Artificial Sequence
  ENSG00000276255_8 (sequence is synthesized)
aggctcagggctgctgggctctgatgtcacctgttgccacggtgactctggttgctaggatcagactactcccttcctgggcacactgtatcccgaatccccagaagaaccaaggggatc

SEQ ID NO: 835457 - DNA, 120 bp, Artificial Sequence
  ENSG00000276255_9 (sequence is synthesized)
ccccagcacaaggctcgttggggagggagtccttggcgctcagatttgagagagagagtcggggctggccagggggcgtggcttgggcagaggagagtgctcatggtgaccctggaggag

SEQ ID NO: 835458 - DNA, 120 bp, Artificial Sequence
  ENSG00000276255_10 (sequence is synthesized)
accctcccttccctcgttcattgctcccaaggccaggtgtctctaaaggaagccagttgtggagaatgttggtcctgcagtggcgattaatgcaaagatgccctgaacaaagcaggacac

SEQ ID NO: 835459 - DNA, 120 bp, Artificial Sequence
  ENSG00000276255_11 (sequence is synthesized)
gtgcctgcctgctacccctgcccagctgctgttcttggacgcatgtgctcttctggtgggacccgtgaatacgtggctcacggtcctggggcacaccccattgtgtgaggctgggggtct

SEQ ID NO: 835460 - DNA, 120 bp, Artificial Sequence
  ENSG00000276255_12 (sequence is synthesized)
tgtggggagccaggcccctggtgtgggtccctgctcagaagccccacgcagcccctgttctgctgagtgcggctgaaagccccccatacccacagccctctgtcctcaaatttttctcat

SEQ ID NO: 835461 - DNA, 120 bp, Artificial Sequence
  ENSG00000276255_13 (sequence is synthesized)
cctctgtcctcaaatttttctcattttaaaaattgtggtaaaatacccataacataggacttaccattttaaccttttaaaaataatttaaattttttaagagacagggtcttgctctgt

SEQ ID NO: 835462 - DNA, 120 bp, Artificial Sequence
  ENSG00000276255_14 (sequence is synthesized)
ggctcaagcaattctcccacctcagcctcttgagtacctgggatggtaggcacgcaccaccatgccagctaattaatatattttttcttgtactgactgggtctcagtatgttgcccagg

SEQ ID NO: 835463 - DNA, 85 bp, Artificial Sequence
  ENSG00000276255_15 (sequence is synthesized)
ggcacgcaccaccatgccagctaattaatatattttttcttgtactgactgggtctcagtatgttgcccaggctgatctcaaatt

SEQ ID NO: 835464 - DNA, 120 bp, Artificial Sequence
  ENSG00000276255_16 (sequence is synthesized)
acttttttttgtttgtttctctaatagctgccatcctgatggggtgagctggtgtctcatggtggttttgatttgcctgtcctgaaggactcgtgactttgagcgtctttccatgtgctt

SEQ ID NO: 835465 - DNA, 120 bp, Artificial Sequence
  ENSG00000276255_17 (sequence is synthesized)
gctgctgtttatagatcttctccggagacatgtctgtcttccctctcattcttgcatgcgggcgtccacaggctgacccctcagctgctcagccaggcccctgctcctgtccacagagcc

SEQ ID NO: 835466 - DNA, 120 bp, Artificial Sequence
  ENSG00000276255_18 (sequence is synthesized)
caccctccaggtgcactccctgcctgcctcctgcaggttcctttcctgggcatggtggcccagccctctctgtccctcacctcacctgctttcttcatggcatgtgcacatctgacatgg

SEQ ID NO: 835467 - DNA, 120 bp, Artificial Sequence
  ENSG00000276255_19 (sequence is synthesized)
ttactagttgtgtgatttctgtctgcctttgcagtggacacaccacagacgctcagccaatgcttgaaccagcaggtgggtgggactatgccaggacgggatggtggctcagagaggggc

SEQ ID NO: 835468 - DNA, 120 bp, Artificial Sequence
  ENSG00000276255_20 (sequence is synthesized)
tgcctggtctggggcctgacaggcgggaggaggagaggcctgtagcacccattggaggtgtgtggtcgcccagcacaagaacaagggaggaggcagtcaggcgggggcgctcctgcccag

SEQ ID NO: 835469 - DNA, 120 bp, Artificial Sequence
  ENSG00000276255_21 (sequence is synthesized)
gccacggagctttaattaaaacccgcccggagcatgaccccactctgccatgcattcttcacttaattggggcccttcaggaggggccggctgaggttaattaaaaagcccagctgaaga

SEQ ID NO: 835470 - DNA, 120 bp, Artificial Sequence; identical to SEQ ID NO: 834520
  ENSG00000233408_0 (sequence is synthesized)

SEQ ID NO: 835471 - DNA, 120 bp, Artificial Sequence
  ENSG00000233408_1 (sequence is synthesized)
gcagagtgtgaggagaggaggccttacttccttgtgactgcagcatgaagtttgttcatatatcacgtagcaattaccagccttgtctggctgacatatacctgagggagtgtggaaagt

SEQ ID NO: 835472 - DNA, 120 bp, Artificial Sequence; identical to SEQ ID NO: 834522
  ENSG00000233408_2 (sequence is synthesized)

SEQ ID NO: 835473 - DNA, 120 bp, Artificial Sequence; identical to SEQ ID NO: 834523
  ENSG00000233408_3 (sequence is synthesized)

SEQ ID NO: 835474 - DNA, 120 bp, Artificial Sequence
  ENSG00000233408_4 (sequence is synthesized)
aactgcacctactcccataactggcatacctatcagattttggtgactgcaccaaaacaccaggaagaaaaggatggggcacggctgcacagttatgtgatacttggaatgtcttatgta

SEQ ID NO: 835475 - DNA, 120 bp, Artificial Sequence
  ENSG00000233408_5 (sequence is synthesized)
acaatcctctgaatttacaaaggtgcttctataagcagccattaaaagaacaaaaaacatgtaaattaagcatctaactgaagaaattggaaaatataaataaactggagagaagcaaca

SEQ ID NO: 835476 - DNA, 120 bp, Artificial Sequence
  ENSG00000233408_6 (sequence is synthesized)
gtggatttttaaatgagcaatataagttgttataaagttccaggccagacatgaaaattgatgtcaaaatctgaaattgcaactactggaatacaaagctatatagacagtatgtgataa

SEQ ID NO: 835477 - DNA, 120 bp, Artificial Sequence
  ENSG00000233408_7 (sequence is synthesized)
caatgaaatacttcattctaggaatacatggtttatcgaataccaggaaacttattaatttaatttaactcaaaaagagaaaaactatataataatctgtatgtattttgaaaagtttaa

SEQ ID NO: 835478 - DNA, 120 bp, Artificial Sequence
  ENSG00000233408_8 (sequence is synthesized)
gacgatgtttagttttcatttccaatttcattaaatgaattcactagaataggaataaaatgattaaacaatatgtatttaatttgctagccaatgtcattcttaatggtgaaaagctag

SEQ ID NO: 835479 - DNA, 120 bp, Artificial Sequence
  ENSG00000233408_9 (sequence is synthesized)
gaatactgcttgtaaagccagggctagaaataatgcctgcagtcacaactactacttaacattgttctgaggtcctagccttgtaagtaattagaaagaaaactaaaattaatgaagaaa

SEQ ID NO: 835480 - DNA, 120 bp, Artificial Sequence
  ENSG00000233405_0 (sequence is synthesized)
actctgtgctagagggcctgattcttccaccccagggccacacatgcggggacagcaaaggataataaatcccacggatcgtccttcagactcttcccattggcgatgccattagaagac

SEQ ID NO: 835481 - DNA, 120 bp, Artificial Sequence
  ENSG00000233405_1 (sequence is synthesized)
tggctcaacctggaggcagctgcgtgctgttcctgacattaccagacctgcccactctcccctggatcccaacatcaccgtctacctgggtcctcattcttgtaacccaacgatggcctc

SEQ ID NO: 835482 - DNA, 120 bp, Artificial Sequence
  ENSG00000233405_2 (sequence is synthesized)
ctaaattagcaaagtgctttggctccttttctataacaaaggctctttttgaacctcatcagtgaaactatgacaaatattttataaacggctctctgaaagcacagctcgacacgtgcg

SEQ ID NO: 835483 - DNA, 120 bp, Artificial Sequence
  ENSG00000233405_3 (sequence is synthesized)
cacttacacgcacacacaatggcgtgtttagatgctcacgtgcgctctctgcacagggctgcagcattttctccccttcaagtttgctcccaaacggatttattttttaatttttatttt

SEQ ID NO: 835484 - DNA, 120 bp, Artificial Sequence
  ENSG00000233405_4 (sequence is synthesized)
gttgtactgtatgtatcaactgcacaaggcaatcagccaaagagagatttaaacatatggactaaatttcatgtctttggaaaacatggtagagcaagacagcaataagctcttccactc

SEQ ID NO: 835485 - DNA, 120 bp, Artificial Sequence
  ENSG00000233405_5 (sequence is synthesized)
gtgcaaatatgcaaagccccctttgaaagctctgtggtgctgcttagcggtgttctttgcaccttgaacaatgctcactcacatgcaagacctgcccatggacataccaggattagcaaa

SEQ ID NO: 835486 - DNA, 120 bp, Artificial Sequence
  ENSG00000233405_6 (sequence is synthesized)
gcaatccacggtcctgaatttctgtgggtgcctgcatttgctatgctacaaggggaagagattgtcatttacagtgaaaaataaaggtggtgttaattaaatttattttcctgagtgccg

SEQ ID NO: 835487 - DNA, 120 bp, Artificial Sequence
  ENSG00000233405_7 (sequence is synthesized)
acgtctccagacctctattccttttgtaagaaagcttatcagatggaatgatcacaatggcgacggtgaaagttctacagataacccaatagtcgatacagtcacgagtttaaaagaacc

SEQ ID NO: 835488 - DNA, 120 bp, Artificial Sequence
  ENSG00000233405_8 (sequence is synthesized)
ttcctgggctactgtcaggactcccaggcagggatgaagatggggataatgaaaaacaaaagtcctgccagcactaacattgtcaagccgtgatatcggcacttaaaacaaccgtttgtg

SEQ ID NO: 835489 - DNA, 120 bp, Artificial Sequence
  ENSG00000233405_9 (sequence is synthesized)
agagaaaacctggtatctggcttctgacgtttcagtacaatcttctattgtgcatctggatgacatcactgttgtgtcctttgcagagatgtgcatacagggccctaactgtccaggagc

SEQ ID NO: 835490 - DNA, 120 bp, Artificial Sequence
  ENSG00000233405_10 (sequence is synthesized)
tggatcctgtgcctcccaagggtggcgcccacggtgactgcacacttgtcacagactggcaggccatttgtctgctgcagcccaccaaatcccacagatccttttggatcctttgcagca

SEQ ID NO: 835491 - DNA, 120 bp, Artificial Sequence
  ENSG00000233405_11 (sequence is synthesized)
ggcttttcataccttgagtcttacttaatgttcacatgaaaaagcaactgctgtttgctgtgctcataaaagtcttgttagaaattaacaccttgtgtgaataaaaacatcaagtaagta

SEQ ID NO: 835492 - DNA, 120 bp, Artificial Sequence
  ENSG00000233403_0 (sequence is synthesized)
gcaagaaacaaagtcatgctagaatgtacaggtaacagagacatggactttttaaggtaacagagacatggacttgagaagacaacttggctcaattcctagctctgcaacttacttact

SEQ ID NO: 835493 - DNA, 120 bp, Artificial Sequence
  ENSG00000233403_1 (sequence is synthesized)
aggtttgtgtctttggactgcatcctaacaaacaactgtgtcaagacatttgaacagcatattctacacaaataaaaaggaaatgataaagataaaagaaattaatagaatggaaagtga

SEQ ID NO: 835494 - DNA, 120 bp, Artificial Sequence
  ENSG00000233403_2 (sequence is synthesized)
ttgggacaataaacaaaatatatatgccagggcagctcccggcgagatcgacgcaaaaggaaccgacctttgatcatccgcacgtgagactgctcccagaaagggggaacaatgttaatt

SEQ ID NO: 835495 - DNA, 120 bp, Artificial Sequence
  ENSG00000233403_3 (sequence is synthesized)
acccacagactacgttggatccaggctttcggcattatgtctgtactaaataaaagcaagcgctgcagcttattaaaactgctcactctttggcagtcccctagctgctcttacactgca

SEQ ID NO: 835496 - DNA, 120 bp, Artificial Sequence
  ENSG00000224260_0 (sequence is synthesized)
tggagcagagctgcactgactctttcttatccatgggtagcacaagcgaaaaataaacttctgtggtgcaaagtcactgagattcaggagttgttgccaaagcggagccgagctcagtgg

SEQ ID NO: 835497 - DNA, 74 bp, Artificial Sequence
  ENSG00000224260_1 (sequence is synthesized)
gattcaggagttgttgccaaagcggagccgagctcagtggttcccagtctggtcccagccaccacgtaagatgt

SEQ ID NO: 835498 - DNA, 120 bp, Artificial Sequence
  ENSG00000224260_2 (sequence is synthesized)
aaaattgagctggagtaagtggcaacagagagtatttattgtcccctaagagccctggcccttgtaggacatgtgaatgccagtgctcatggagaaaggtggaggaagagagccagagtg

SEQ ID NO: 835499 - DNA, 120 bp, Artificial Sequence
  ENSG00000224260_3 (sequence is synthesized)
ccagagtggcttccgtgggcacatgctggattgaagtgagaagacgtgactactaaagttgaggccccaagtctcagcttcttccccctccaaagcatgagtggaggattcacttaaggc

SEQ ID NO: 835500 - DNA, 120 bp, Artificial Sequence
  ENSG00000224260_4 (sequence is synthesized)
cactttgaagcccatattggaggagcattactcactctgaggatcctggcataggcagatgcatcacttgtattgaagtatattatctgctgtgatatttatgatgaaatgagtttgcca

SEQ ID NO: 835501 - DNA, 120 bp, Artificial Sequence
  ENSG00000224260_5 (sequence is synthesized)
gccatcgtctatcaggggatcaaacataggcacctgcctgtccaagggggtctaagtcacagtacagaagtggtttgcaaaggctggtgggatggtgtggcaggcctgtggagttgaata

SEQ ID NO: 835502 - DNA, 120 bp, Artificial Sequence
  ENSG00000224260_6 (sequence is synthesized)
aaaatcctgatgtccttcctggcatgaagaatggagctgccaagctgcccccaggagaagcgtgctgcctatgcatctcactggacttctgtgtacagaagaaatattggtggtttgacc

SEQ ID NO: 835503 - DNA, 120 bp, Artificial Sequence
  ENSG00000224260_7 (sequence is synthesized)
ggaaaccaaatcagttaaggaatggaggaagatattgagagtgctgagtctggggcctaggtatttcttgggaccaggaactgggtaaggggtaaccaccacaggcccacaggctaaaat

SEQ ID NO: 835504 - DNA, 120 bp, Artificial Sequence
  ENSG00000224260_8 (sequence is synthesized)
tgagctggagtaagtggcaacagagagtatttattgtcccctaagagccctggtaagcttctgagaaattaagtgctcatttcctagcagataaaaatccactgactcacacctgcctct

SEQ ID NO: 835505 - DNA, 120 bp, Artificial Sequence
  ENSG00000224265_0 (sequence is synthesized)
aaacccaaaacaatgaaaccttttcaaggaagtaaggtgttgacatgactggattaagaaatacctacaaaactggcaaaacagtacttctggatgtgtctgtgagggtgtttcaaggag

SEQ ID NO: 835506 - DNA, 120 bp, Artificial Sequence
  ENSG00000224265_1 (sequence is synthesized)
tgctaccagcatctcagagttgccagcttgtagacagcctgttgtgcgacttctcaacctctgtaatcaagtgagctaattcccctaacaaaccccctctcatatgtctatatctatcga

SEQ ID NO: 835507 - DNA, 120 bp, Artificial Sequence
  ENSG00000224265_2 (sequence is synthesized)
tagctcctattgatctgcctctctgtagaaccctgaccaatgcacacatgcttattacaaggtattgacccttggccaatgctgtgcaatggattaactaaagataaagatgttctataa

SEQ ID NO: 835508 - DNA, 120 bp, Artificial Sequence
  ENSG00000235123_0 (sequence is synthesized)
aaaaaagaaaagaaaagaaaagaaaatgatatatccatgatgaattaaaatggagtggaacccactgatgggaaagccacagaaggtaccagttatccactcactgacttaggtgcctcc

SEQ ID NO: 835509 - DNA, 87 bp, Artificial Sequence
  ENSG00000235123_1 (sequence is synthesized)
ctgatgggaaagccacagaaggtaccagttatccactcactgacttaggtgcctccactagaattctcagcacgtttttgcagaacc

SEQ ID NO: 835510 - DNA, 120 bp, Artificial Sequence
  ENSG00000235123_2 (sequence is synthesized)
tagggaagttctggtctcatcatgatccttgtttggtctcactccccatgtccttctctgtccctcctccaactgccatttatttatttaactgaaaaagtaccaatcacccacataggc

SEQ ID NO: 835511 - DNA, 120 bp, Artificial Sequence
  ENSG00000235123_3 (sequence is synthesized)
atgacatactcatccatgtacccatttcttaaaattgatcattgttaacatttggtgtaatttgctttatttatttttaatgaaataaataaaactttacagaaaatgctttatttttct

SEQ ID NO: 835512 - DNA, 120 bp, Artificial Sequence
  ENSG00000235123_4 (sequence is synthesized)
ctttgttccctccccatcctatatttttctcctaaaaaaccctattatcagaaatattagtgtgtattcccagtttcgactttttattttattacacacacactcccacacatagctgtg

SEQ ID NO: 835513 - DNA, 120 bp, Artificial Sequence
  ENSG00000235123_5 (sequence is synthesized)
acaatgaacttcacatagtatggttctgtattttctctttgtttttcaaacttacataagtattttactatttctcatggaaaaactcacttttcccatccaacgttatgtttccttaag

SEQ ID NO: 835514 - DNA, 120 bp, Artificial Sequence
  ENSG00000235123_6 (sequence is synthesized)
atctctctatgttgatataaagaaatctagctcattctttttaatgaaaataaagtatattttatgaatgtaactcatgctaaccatggcaataaaagctccatcaagcatgcatttagt

SEQ ID NO: 835515 - DNA, 120 bp, Artificial Sequence
  ENSG00000235123_7 (sequence is synthesized)
atccggacacatgacaaaggaaaagtaaaccgctggtttagagtctttggaaggcaattgtatctgactagaatttaatattattgtttttctttcattgtattgcatttatctgtatgg

SEQ ID NO: 835516 - DNA, 120 bp, Artificial Sequence
  ENSG00000235123_8 (sequence is synthesized)
ctagttaaactgattttccatttaaaagtagtaatgcatttttttataattacattgttttaagtaaacaagaattattcaaaggacaaaaacactagcacagatggcattcaatgattg

SEQ ID NO: 835517 - DNA, 120 bp, Artificial Sequence
  ENSG00000235123_9 (sequence is synthesized)
cagatatcataaagatagttcatgaatgacaaagatttgagaagtactgtgttcacgatgcttcctggaagaggtgggttatacagtgtttcttagagaaagggataggggtctactgct

SEQ ID NO: 835518 - DNA, 77 bp, Artificial Sequence
  ENSG00000235122_0 (sequence is synthesized)
gggcagagggtcatgtagtggaatagagctgtacctggcttcaggcgagacttggagctcaaaactttcagtaggac

SEQ ID NO: 835519 - DNA, 88 bp, Artificial Sequence
  ENSG00000235122_1 (sequence is synthesized)
tcaggctggagtgcaacgttgaattcaggcaattcttgtgtctcagcctcctaagaagctgagattacagcaactccaaaatggaagt

SEQ ID NO: 835520 - DNA, 120 bp, Artificial Sequence
  ENSG00000235122_2 (sequence is synthesized)
agcagttgttctacaaatgagcgtcttagcctctggattactgctcaatgaggaaagctatgaaatgcatggataacttgctaatcagtatttgccatatgtgctagcagcatcagcatc

SEQ ID NO: 835521 - DNA, 120 bp, Artificial Sequence
  ENSG00000235122_3 (sequence is synthesized)
agttgggagattatggtggcctccatgtcagacctcctaaatcggaatatcagagaaggtggcccaggttaccatgcttcatctgccaatgcattgaaaacttggaatgtaaattaattc

SEQ ID NO: 835522 - DNA, 120 bp, Artificial Sequence
  ENSG00000235122_4 (sequence is synthesized)
aaccattgtggaagatggtgtagtgattcctcaaagacctagaagcagaaatatcatttgatccagaaatcccattactgtgtatacacccaaaggaatataaaccattctattacaaag

SEQ ID NO: 835523 - DNA, 80 bp, Artificial Sequence
  ENSG00000235122_5 (sequence is synthesized)
agattccaacttcctgggcagagggtcatgtagtggaatagagctgtacctggcttcaggcgagacttggaagtgccttt

SEQ ID NO: 835524 - DNA, 120 bp, Artificial Sequence
  ENSG00000235122_6 (sequence is synthesized)
ggaatagagctgtacctggcttcaggcgagacttggcaactccaaaatggaagtactattgttatctccgtttacaaattaggaaactgaggcacagatatgctcttgggtacttgtcag

SEQ ID NO: 835525 - DNA, 74 bp, Artificial Sequence
  ENSG00000235122_7 (sequence is synthesized)
gggcagagggtcatgtagtggaatagagctgtacctggcttcaggcgagacttggaagtgccttttcttgtgct

SEQ ID NO: 835526 - DNA, 120 bp, Artificial Sequence
  ENSG00000235122_8 (sequence is synthesized)
tcccagcactttgggaggccgaggaaactgaggcacagatatgctcttgggtacttgtcagcagcagttgttctacaagctaaatatctggatatcttaaatctcagatgagcgtcttag

SEQ ID NO: 835527 - DNA, 120 bp, Artificial Sequence
  ENSG00000235122_9 (sequence is synthesized)
aagccatgcaataagaggcttgagatttcaccaactctggagactcacttgggcacaactgaaactataacaaacttggtgctcagtgccattttcctttggcagtgttacaaggctgtt

SEQ ID NO: 835528 - DNA, 120 bp, Artificial Sequence
  ENSG00000235122_10 (sequence is synthesized)
gattttctaatctctgtaattgggaaagagatgatctgtaacctgctttactcctgagctgattgagaggaacagataaatcaactggtggaggaaaatacaaaacttaagagacagacc

SEQ ID NO: 835529 - DNA, 120 bp, Artificial Sequence
  ENSG00000235122_11 (sequence is synthesized)
aaacatcgtaacattaaaaagcaaaggaggaagaacagactatagaaatattttaaaggattacgtggattagaaaagatgtcaaaagcattaacacatcaactccaaaatggaagtact

SEQ ID NO: 835530 - DNA, 120 bp, Artificial Sequence
  ENSG00000235122_12 (sequence is synthesized)
ggagatcaagaccatcctggctaacacgcaactccaaaatggaagtactattgttatctccgtttacaaattaggaaactgaggcacagatatgctcttgggtacttgtcagcagcagtt

SEQ ID NO: 835531 - DNA, 66 bp, Artificial Sequence
  ENSG00000235122_13 (sequence is synthesized)
ggaatagagctgtacctggcttcaggcgagacttggagctcaaaactttcagtaggaccttgtgct

SEQ ID NO: 835532 - DNA, 120 bp, Artificial Sequence
  ENSG00000235121_0 (sequence is synthesized)
ataaagagaacaagtctcagccagtagctcagctcaggggagaggctctcagctgagtccccactgaacattctggggtatagggtctctaaatcacctccttcttgggattgattcctg

SEQ ID NO: 835533 - DNA, 120 bp, Artificial Sequence
  ENSG00000235121_1 (sequence is synthesized)
agctgccagaacccaacagaaggcaagtttcctgctataagttcctctttccttcttgatgaggacggacacttcagagccaaagaggaaacgaatcccatctgttctgagcccccaagc

SEQ ID NO: 835534 - DNA, 120 bp, Artificial Sequence
  ENSG00000235121_2 (sequence is synthesized)
acagttcaagaggacaggctggggagtggaggaaggggcggtgaagagaaaaataagaagactggaacatccagccacacacggagggcaggaagccacctgatgagagagccagggtgt

SEQ ID NO: 835535 - DNA, 120 bp, Artificial Sequence
  ENSG00000235121_3 (sequence is synthesized)
ggcagaagtcgccaaggaatccttctgttcccgacacacgcctacagcactcgctcaagatggagcctgctgactctgtctaaggccctgtggcccttggcataggtttcaggacagcag

SEQ ID NO: 835536 - DNA, 120 bp, Artificial Sequence
  ENSG00000235121_4 (sequence is synthesized)
tcctgtcagggctgtggacctcacacctctatgtaatgtgaagggcaccctctggagttgtgggacttggcagtagtgttactgcactggcctgcaagtccccatccattactgccaccc

SEQ ID NO: 835537 - DNA, 120 bp, Artificial Sequence
  ENSG00000235121_5 (sequence is synthesized)
agctcagacacagctcacccattcacatacacaaaaatggacacattgagagggaaacccacattaaagtagggagaagatggagggccctctgacctcctcccatcaggcacgtgtgcc

SEQ ID NO: 835538 - DNA, 120 bp, Artificial Sequence
  ENSG00000235121_6 (sequence is synthesized)
tcctctactcagtgcctgcatccacctctgtatgggtacccatcctctattcccctcccactccaatggatgccagggatggaaggacagatggctgtgaaacttatcttcttatttaga

SEQ ID NO: 835539 - DNA, 120 bp, Artificial Sequence
  ENSG00000235121_7 (sequence is synthesized)
agactttcctatttttagaaaaacaaattccttttgtatttccaagtggtaaaaatggcccgagctgtcatctaggacagtcagcagccaactcaaagttgtctgcagtgtcatgatttg

SEQ ID NO: 835540 - DNA, 120 bp, Artificial Sequence
  ENSG00000235121_8 (sequence is synthesized)
gatattaccctggcgagactacttctagtgtcaagcgggtgatcagtctaggtgccaaattttaagagggtcattgacgtcctgagagcttccagaggagggtgaccaggacaatgaaag

SEQ ID NO: 835541 - DNA, 120 bp, Artificial Sequence
  ENSG00000235121_9 (sequence is synthesized)
gttcgaaaaactgggtcattgaaaaaagtactgaaataagctagggactttttctttttctttttggtctagagaatatttgagctatattaagaacatgttgaaatatttggatgaaga

SEQ ID NO: 835542 - DNA, 120 bp, Artificial Sequence
  ENSG00000235121_10 (sequence is synthesized)
gttacacccttattctatttttcccagatgacagaatttgaatcaataggtagaagttacagcgaaacagatttcagttgaatatttagaaactttcttataacttaattctgtatgata

SEQ ID NO: 835543 - DNA, 120 bp, Artificial Sequence
  ENSG00000235121_11 (sequence is synthesized)
tggaataagcttcccatcactgtgcctatgcaagccaaggatgaaagactgtctgtcagggatactgtagataagattattgtactagataggaacatggactagtctaaaattactgag

SEQ ID NO: 835544 - DNA, 120 bp, Artificial Sequence
  ENSG00000235121_12 (sequence is synthesized)
aagctttagaaaaatgtggctttctgggtagcagagattctgcattggtaagtctgaggcttagaatttgtatttccaaaaaaccccatcagctataaaactctcagaagaaaacgtagg

SEQ ID NO: 835545 - DNA, 120 bp, Artificial Sequence
  ENSG00000235121_13 (sequence is synthesized)
ggaaaagctgcatggcgttagattttgcagtgatttcttagatatgacactcaaagcatagccaacaaaagaaaaaaacagataaaatggatttcatctaaataaaaagcttttgtgcat

SEQ ID NO: 835546 - DNA, 120 bp, Artificial Sequence
  ENSG00000235121_14 (sequence is synthesized)
caaaggatacatctacagaatgaaaaggaaacccaatacacagaatgaaagaaaatatctccaaatcatacatgtgataaaaggttcatatctagcatatataaagaactcttaacactc

SEQ ID NO: 835547 - DNA, 120 bp, Artificial Sequence
  ENSG00000224269_0 (sequence is synthesized)
gtggcacaggagaggcctagggtccgcttccagccccctccgctgccgggtgctcccgggtcagcccgcgcctggctcctgggccggggagccgcggggctggaggccgcgcttgcagac

SEQ ID NO: 835548 - DNA, 120 bp, Artificial Sequence
  ENSG00000224269_1 (sequence is synthesized)
agaggcgaacgcaaaaggtcgagctttccgatttcgagtagagtgcctggatgggcggcagggagggcgagggaaggaggggtgccgaggccgcccctgtggctctcgggaaggtcacca

SEQ ID NO: 835549 - DNA, 120 bp, Artificial Sequence
  ENSG00000235127_0 (sequence is synthesized)
ttcgtaattttggccacggtggagggaggcactcgggaagaagttgccagaagtcattgcattcaagccttgcctagaaggaaacttggaaggctggagtgcaatggtgcgatccgatct

SEQ ID NO: 835550 - DNA, 62 bp, Artificial Sequence
  ENSG00000235127_1 (sequence is synthesized)
gtctcaaactcctgacttcaagtgacccccgttaacctattcaccttaggcatttccctcgg

SEQ ID NO: 835551 - DNA, 120 bp, Artificial Sequence
  ENSG00000235127_2 (sequence is synthesized)
tggcctccattaacctattcaccttaggcatttccctcggaggaagatgggaaggaaaaagaatggtaatagagtttggatacgtcaatgtagacactggctcaaggtatgatagaggtg

SEQ ID NO: 835552 - DNA, 120 bp, Artificial Sequence
  ENSG00000278367_0 (sequence is synthesized)
gaggccgtggaactggagcaggtaggactgcaggccactctgcgtgcgcgcccagctctcgggctcctgcaagggctgcagctgaatgatcgtggtgttggtgtctgggccttccagcac

SEQ ID NO: 835553 - DNA, 120 bp, Artificial Sequence
  ENSG00000278367_1 (sequence is synthesized)
gtgcgttaggtgtccccccagcgacgcgttgccctggtaccacacgtgataggggtcgcggaagtaggagatctggagcatatgaagtctttggaggcctgcgggcagagtcagcttcag

SEQ ID NO: 835554 - DNA, 120 bp, Artificial Sequence
  ENSG00000278367_2 (sequence is synthesized)
cataaactataatgtgccctcccaccgcttctcccgtttgacgctgacagtaactctgccaggaggacaggacagggattattatctccgttttacagatgaggaaactgaggcctgcag

SEQ ID NO: 835555 - DNA, 120 bp, Artificial Sequence
  ENSG00000278367_3 (sequence is synthesized)
tggaagagacactcctttctgcctcctttttcaccctcggctctccctccccccgtttcctgttaaccaacggaacaaatggttaacaaatcctgacctgaataaaattccaattccatc

SEQ ID NO: 835556 - DNA, 120 bp, Artificial Sequence
  ENSG00000229297_0 (sequence is synthesized)
aagactttgggtatgctcacaacattcaagggcttaaatgattagttatgcctagcatggatatgggagggggaattggatgatcagttatgtctgacagcagcatgaaaagggagaatg

SEQ ID NO: 835557 - DNA, 120 bp, Artificial Sequence
  ENSG00000229297_1 (sequence is synthesized)
actgcactgcatttactgtttctgagctggatagctttgaagagatctttgaaggctaactttatgcagttctgcaaaaatcaacttctccatatttttcaaaagagcttgccacagaga

SEQ ID NO: 835558 - DNA, 120 bp, Artificial Sequence
  ENSG00000229297_2 (sequence is synthesized)
cagagctgggagactgctggaccaccataaaccaattgaaagatcatctcttgaaattcaatcctaaatgccattgctggaactcagtagcttctcaataaaagatacacactgaataaa

SEQ ID NO: 835559 - DNA, 120 bp, Artificial Sequence
  ENSG00000229291_0 (sequence is synthesized)
ttggttgaattctgtgttctgaagaggcaagaattgaggttgctgcagacctgtatggattcgccaccagtaacaagatctcagaacactggaaaaatcgatgcacaaaaaaaaaaggtt

SEQ ID NO: 835560 - DNA, 120 bp, Artificial Sequence
  ENSG00000231808_0 (sequence is synthesized)
cgcgcacgcctgaccggagcaccccgcttcacgggggcgttctgcgcgtccttcctccccggctgcctagatcacacggccccgtttcattcatttttactgaataacggtcgttggaca

SEQ ID NO: 835561 - DNA, 120 bp, Artificial Sequence
  ENSG00000231808_1 (sequence is synthesized)
accgacaaggctggcggggacattgagcaaacggcggcttctgagttggcacctgtccttcaccacgttgtgtgggaagtgtggggagtcgggattcccactcctccccagccttccgga

SEQ ID NO: 835562 - DNA, 120 bp, Artificial Sequence
  ENSG00000231808_2 (sequence is synthesized)
aaaatgctcggaaatttccttccacattgacacctgattacagtctaaatagtaaccttattctgattgttaatgtaaccctctcgtaatctctacaaaaatactttagtttttctagct

SEQ ID NO: 835563 - DNA, 120 bp, Artificial Sequence
  ENSG00000268027_0 (sequence is synthesized)
agcagaacttggactgagtcctgcaggacacagttgtatgtgaactatgttgaaaacaggatgcatgactggcggccagaacaaagaagtttggtttaatttctatctatacacccagta

SEQ ID NO: 835564 - DNA, 120 bp, Artificial Sequence
  ENSG00000268027_1 (sequence is synthesized)
aaatatctgtaataccactggaaaaccttaaaatacattatctatttcttgtaaaagaatgatgaaatgtgaatttgaacagcataaatatgtacaagtatctcttctcaacggaaaaaa

SEQ ID NO: 835565 - DNA, 120 bp, Artificial Sequence
  ENSG00000268027_2 (sequence is synthesized)
tatgtttgtggatgaaatatgaaccgagtttgtggatgaaatatgagcagcatgaatatgcacagatatctctcctcaatggaaaaaatcacgtacaaaatataagaacccagtttgtgg

SEQ ID NO: 835566 - DNA, 76 bp, Artificial Sequence
  ENSG00000268027_3 (sequence is synthesized)
gacccgaggtccggagctcaaatccagctcgaccaatgcggtgaaaccccatctctagtaaaaatacgaaaattag

SEQ ID NO: 835567 - DNA, 71 bp, Artificial Sequence
  ENSG00000268027_4 (sequence is synthesized)
ggatgacccgaggtccggagctcaaatccagctcgaccaatgcggtgaaaccccatctctagtaaaaatac

SEQ ID NO: 835568 - DNA, 70 bp, Artificial Sequence
  ENSG00000268027_5 (sequence is synthesized)
gggagagcagaacttggactgagtcctgcaggacacagatgtgctgcaatctctgtctcccaggtttaag

SEQ ID NO: 835569 - DNA, 79 bp, Artificial Sequence
  ENSG00000268027_6 (sequence is synthesized)
gcctcctgagtagttgagattacaggtacacaccacaatgcccagtgaatcgctggtctcgaactcccgacctcaggtg

SEQ ID NO: 835570 - DNA, 120 bp, Artificial Sequence
  ENSG00000268027_7 (sequence is synthesized)
ctaccacgttcagccatgattgtttccagggtgatttgctacacatgttgggaaaaatcaaaccaggaacagtatgaaaatggcctccttgaagacggtgttccctgagtacctagaacc

SEQ ID NO: 835571 - DNA, 120 bp, Artificial Sequence
  ENSG00000268027_8 (sequence is synthesized)
caaaaccgatcagtaaccctgtacagggactgtgttcacaggatataaggcaaaaaaaatccatcttctcataagagctttagagactcttaggcttctttactaggacagctgagctct

SEQ ID NO: 835572 - DNA, 120 bp, Artificial Sequence
  ENSG00000268027_9 (sequence is synthesized)
aaagcatgtgaacttcacccaccacaactgtttgctccatctcaagctcagaaccctgccctgtctgcctaaccacaagtatccaacccagtatctacaaataaatgcttcactcatcta

SEQ ID NO: 835573 - DNA, 120 bp, Artificial Sequence
  ENSG00000268027_10 (sequence is synthesized)
atgagcctcaagagatttagaaatcttttcagagtaaccagctgaatgtcagaaagtcatatttggaggccaatctagttagattagataaatagtttttaattttaacaaactgtcttc

SEQ ID NO: 835574 - DNA, 120 bp, Artificial Sequence
  ENSG00000231806_0 (sequence is synthesized)
ttgttgttttttttgtttttgtttttttaggtttccgtgtgtttctattgagctgctcagtgcccggcttagaagaccaggaaaaggagtcacaggtcgtatgctggaggcttgagccgc

SEQ ID NO: 835575 - DNA, 120 bp, Artificial Sequence
  ENSG00000231806_1 (sequence is synthesized)
gaaaaggagtcacaggtcgtatgctggaggcttgagccgcggcaccgtggcgcggctcgcctcgctgcggttggtggtggcggtggacattgcagcgcggctggaggggtaggaagaaga

SEQ ID NO: 835576 - DNA, 120 bp, Artificial Sequence
  ENSG00000231806_2 (sequence is synthesized)
agatagttttgggatagatagaggtgagatattcctgcacatcctctggtgaccccagaatgagggggactcgctggtgaattgcctcgggcttcacgtccagtacaggctgggtccccg

SEQ ID NO: 835577 - DNA, 120 bp, Artificial Sequence
  ENSG00000231806_3 (sequence is synthesized)
tggtcgccaagcctcctgcctgctcaatgatgtaggccacgggattgcattcatacaggagccggagctgtggaggaacagaggcaggacaaattcaccaagagcctagcaacatgaaga

SEQ ID NO: 835578 - DNA, 120 bp, Artificial Sequence
  ENSG00000231806_4 (sequence is synthesized)
gagatgccaggaagaagagagaagccaggaaacaagccaaccgcacaatccccacatcagagcaggagaagatgggggcctgctggcagagctggggcttggctgtggtcactctgaacc

SEQ ID NO: 835579 - DNA, 120 bp, Artificial Sequence
  ENSG00000231806_5 (sequence is synthesized)
tgctctttggtgttttcatgagtggtgggaagaatagggaccatatggagcccacacaggaagctctagcagtaacacagcaagcaggaagacaattctaaggaagcagcccatagtctt

SEQ ID NO: 835580 - DNA, 120 bp, Artificial Sequence
  ENSG00000231806_6 (sequence is synthesized)
ctttcttttcctgtgcatcttccactgtcagtgaggctcctcatttatggtgaacccaactgtgtgtatctcccaagttctcacccgcagattaatgttttcaggaagataggccatcaa

SEQ ID NO: 835581 - DNA, 120 bp, Artificial Sequence
  ENSG00000231806_7 (sequence is synthesized)
gaagataggccatcaacagtgagaggaagaagttacattgtcgtatgagggatgcattttaaccattaatttgtggtacaggctgggcgcagtggcttatgcatgtaatcccagcacttt

SEQ ID NO: 835582 - DNA, 120 bp, Artificial Sequence
  ENSG00000231806_8 (sequence is synthesized)
gtgtggtacagttattttgtttatgttagtgattcaatcatagaaactattcagtttctggtatcccactcttacctggagaaaagaggaagccgctttcatcagacactgtgttcaccc

SEQ ID NO: 835583 - DNA, 120 bp, Artificial Sequence
  ENSG00000231806_9 (sequence is synthesized)
agcgtaaggaaaaagttggtaaaatctaaaggaatcctcagacatattaataaaagtgtgcccagtccctctccacaacccatgtagccactgtggtcagtacctgcagggcatctctca

SEQ ID NO: 835584 - DNA, 120 bp, Artificial Sequence
  ENSG00000231806_10 (sequence is synthesized)
aatacccctatgtctagttctggtgatatcagtcactaaaaatgggatcagcttgtggcagataccaccttaaatgctcatgtctgtctcagtcactaggaggaaaaccagagcctggaa

SEQ ID NO: 835585 - DNA, 120 bp, Artificial Sequence
  ENSG00000231806_11 (sequence is synthesized)
accagatccattttgatgaatgtccaagattttgagagtgaaaaactccaaaatgacagctcacagttggcagctaggccagaaggttcccaaggaacatcagaggtattcccggaatat

SEQ ID NO: 835586 - DNA, 120 bp, Artificial Sequence
  ENSG00000231806_12 (sequence is synthesized)
aaagaggcaaggccacagaatgactccacatagcagaggtgttgctacgagaggtgacactgtccctgtcagaaacaagtcagtgccaaggagactcaataacaaaaacaactaaacaat

SEQ ID NO: 835587 - DNA, 120 bp, Artificial Sequence
  ENSG00000231806_13 (sequence is synthesized)
cctttcctgcctaacatgagtgacaactgcttctatatcagtgacttcaatctctctgcctcctagataaaaatgattaaggtaactagtcattaattgcacccacttccagacaatatc

SEQ ID NO: 835588 - DNA, 120 bp, Artificial Sequence
  ENSG00000231806_14 (sequence is synthesized)
cctctcttcctcaaatcctctttagaattaccaagcaaaaccccaagtcctataagcccatctcaactccctccttatgcaacaccccatggttcctctgcagtgcctgctaaatctaac

SEQ ID NO: 835589 - DNA, 120 bp, Artificial Sequence
  ENSG00000231806_15 (sequence is synthesized)
ttcgggttattacaggtgcacgagtgatggtctttgactcatgacctttaacttgctgtgggtgtctgttgctttggagcagcccagcgctgatttctacttctgaaaagtgccctgact

SEQ ID NO: 835590 - DNA, 120 bp, Artificial Sequence
  ENSG00000231806_16 (sequence is synthesized)
tgctttgaattggatgccagtctaggaagactcatatctgggcctcttgtaggccaaggtcaggcatgtaccttagcttgaaaatgagatacgcctccctaggatttgaaacctgagtga

SEQ ID NO: 835591 - DNA, 120 bp, Artificial Sequence
  ENSG00000231806_17 (sequence is synthesized)
gaggcgcagcactgggggtggtgtccaggccagaccggccatgttgcgagaccactgccgtgcttcctgcttcctggtcctctagtcctgcccgttcctagccagggtcctcagctttcc

SEQ ID NO: 835592 - DNA, 120 bp, Artificial Sequence
  ENSG00000231806_18 (sequence is synthesized)
catcaatgcagtaactcctttcacttaattgagccggggtcaattttgctgttgctttccagcaaagaggatggagatgcacaactgtcatctgaacagtggcactcactcaccacctga

SEQ ID NO: 835593 - DNA, 120 bp, Artificial Sequence
  ENSG00000231806_19 (sequence is synthesized)
acagaggcgctcattctgcatcagggcgggtgaaaacgccttacgttgatccactcctggggctggggccgggacactcaggccctgggaatattgtttccacagttttattaacctgga

SEQ ID NO: 835594 - DNA, 120 bp, Artificial Sequence
  ENSG00000231806_20 (sequence is synthesized)
aaatgtgttcctttgttctgattgtgtggtcaccaacaacggctgatttttaatatgggctctcatacaccctgttaccgattatcagacaccagatcctggtcacaagaaacaacagct

SEQ ID NO: 835595 - DNA, 120 bp, Artificial Sequence
  ENSG00000231806_21 (sequence is synthesized)
cccatttgtaaatgaatgccttgacattgagctttacccacaatggagagttggttaacaggaggtggtctctctgtgcctgaacaatatgtgtgttctgacaaaatcaaatcaccagcc

SEQ ID NO: 835596 - DNA, 120 bp, Artificial Sequence
  ENSG00000231806_22 (sequence is synthesized)
ctgcaatcccacagacctcacaggctcagtttgacccaccagggaatgctgcctccataagctactggccgccttccatggcatttctatctgtgacaactgccacaagctacctccgct

SEQ ID NO: 835597 - DNA, 120 bp, Artificial Sequence
  ENSG00000231806_23 (sequence is synthesized)
ggatgtcaaacaggcactaagctttgtgcactgggtctttgctcaaatgtcctttttagtagggagatgtgatccaaaggggtttcaggctaatacatagagatccggaaagatgctatg

SEQ ID NO: 835598 - DNA, 120 bp, Artificial Sequence
  ENSG00000231806_24 (sequence is synthesized)
gttcatctcttccttctgtcatgttgacaagctctggtgcccacctatgtccagactgggccctgctttcatgactgagggcagaaaacagaggctctgtctgtgcctgggaatctttga

SEQ ID NO: 835599 - DNA, 120 bp, Artificial Sequence
  ENSG00000231806_25 (sequence is synthesized)
attgggtccctgagtcaaagcatctcccatcacctttagaactgctcagaatgttcatggagatattttgcttgtactcaagagcagttgtgttggaaatttagtgtggtagagtaatta

SEQ ID NO: 835600 - DNA, 120 bp, Artificial Sequence
  ENSG00000231806_26 (sequence is synthesized)
aagcacagactgctggagcatgactcctgacaccagtcactagcttgaccttgcgcaagttactcactctctctacgcctcactttccccatctgaaaatgggaataattgtaggacata

SEQ ID NO: 835601 - DNA, 120 bp, Artificial Sequence
  ENSG00000231806_27 (sequence is synthesized)
tctcatagggccactgtgacatttaaatgcattaatagatgtaaatttcataggacaggtactttacattcctaccacttacgaagaattatctaactcttagctgttattctacaacaa

SEQ ID NO: 835602 - DNA, 120 bp, Artificial Sequence
  ENSG00000231806_28 (sequence is synthesized)
ctttagaaagggtgttttattgtctgagggtaatatttgcaagccatagaatttctcagggtttgccagcttctttgaacataaagggaaattggggcattagcaaactgacacagcaat

SEQ ID NO: 835603 - DNA, 120 bp, Artificial Sequence
  ENSG00000231806_29 (sequence is synthesized)
gggtcttggtctaatgggcatacaggtgaaaagattctatttgaaaagtttctgggtttccatactgtaaactctgttttgtaagttaactccatgtcattttgaaattttgcaaacccc

SEQ ID NO: 835604 - DNA, 120 bp, Artificial Sequence
  ENSG00000231806_30 (sequence is synthesized)
tctctccacacatgtgcactaacacgtgaactccacaagggctgtcatgtgtgtttgatcaatgctccatctccgctgtctggagtggtgctttgggacacagtagatgctcaataaaca

SEQ ID NO: 835605 - DNA, 120 bp, Artificial Sequence
  ENSG00000231806_31 (sequence is synthesized)
caagaacagtgttattacctgctttccaatcttgcctgctacctccaatatttcactggtgcactgaaagtgacttttagagaagtgacaaactttggaattttggaactttgaaacttc

SEQ ID NO: 835606 - DNA, 120 bp, Artificial Sequence
  ENSG00000231806_32 (sequence is synthesized)
ggaacttggggttcagccttgaaggagaaaaacagtttccaacatcatggcctctgattttgtcatcttctctgggactggttacatattctggcccatttttgtgcacattttaaactg

SEQ ID NO: 835607 - DNA, 120 bp, Artificial Sequence
  ENSG00000231806_33 (sequence is synthesized)
atgggcaaattacaacaagaaaaattcagagttcaaatggttaacctacactgtggagttaagtagaatcttctttagctctctaccttcctctcttttctgcctgctttaaatctgctg

SEQ ID NO: 835608 - DNA, 120 bp, Artificial Sequence
  ENSG00000231806_34 (sequence is synthesized)
ttattaaactgctggcgcgagacaagactcattatttatggtctaaattgaatataaacattgaaaactcatttgaaactgaacagcaaaaaggggaaaagatttaaaaagaaaaaaacc

SEQ ID NO: 835609 - DNA, 120 bp, Artificial Sequence
  ENSG00000231806_35 (sequence is synthesized)
caaactgccatagagactgctttaccccaaattttggctgccagctttccttggattacctatcagggcaaacaaagttagccacgtggacagcttccagttttgtcagaaaaacaactt

SEQ ID NO: 835610 - DNA, 120 bp, Artificial Sequence
  ENSG00000231806_36 (sequence is synthesized)
tgaacattgattgaaacttttggccattggcaaacctctctgtataataagctgtgtgtgaacccatagtgaatgcagaccctccccagccgtgccttccttcaccgacttcaccatcct

SEQ ID NO: 835611 - DNA, 120 bp, Artificial Sequence
  ENSG00000231806_37 (sequence is synthesized)
acgaggaaaccttgcttacttctgagggctgcagctccgcagtgtggaagccgataagaaatctgtgctggccctgccaggatctctaaggaaaagggcccaaaacacatgactcaaaca

SEQ ID NO: 835612 - DNA, 120 bp, Artificial Sequence
  ENSG00000231806_38 (sequence is synthesized)
actgctggggccctcaaggaactccctctggcctcggggactgtggcagctgccagggagccgcagcagtctgtaaataggacgggctgcccagaaacatggagctgctttctcctgctg

SEQ ID NO: 835613 - DNA, 120 bp, Artificial Sequence
  ENSG00000231806_39 (sequence is synthesized)
agcaccccctttcaagataccaagaagccaccatttaggcacaggtgggagttccagaaagcaaatattatgggaagatgtccaagtcagcacacagaggcttggatcattccagcttgc

SEQ ID NO: 835614 - DNA, 120 bp, Artificial Sequence
  ENSG00000231806_40 (sequence is synthesized)
ggacattcagataatttaggaatgtaaggtgcacagcaggtcagggtactgctgtgtgagacaaaaggtccaggtagaggcaattctccggatgcaggcagggcaggtgctcactgggca

SEQ ID NO: 835615 - DNA, 120 bp, Artificial Sequence
  ENSG00000231806_41 (sequence is synthesized)
gagtgcttctcatacaccttcaggaactcgagcacgtcgtcgggggatcccaagatcaccggcgccctctggtgaatgtctgtgggaatgacgtctaacacggcctccttcccagtggtg

SEQ ID NO: 835616 - DNA, 120 bp, Artificial Sequence
  ENSG00000231806_42 (sequence is synthesized)
gccattcccccagccttctccatgacgtaggccatggggttgcattcgtacagcagtctcagctggaaaacaagaccgggtagcggcctccttgtatcagaaggtattgcgtaaaaaaga

SEQ ID NO: 835617 - DNA, 120 bp, Artificial Sequence
  ENSG00000231806_43 (sequence is synthesized)
gacttttctgcagcaaaacatgcagagctggtgggagtttccaagggaacgaatactgtatttttccttcctgtgaggctgtaaaagtttcctcccaccccaggttgcatctgagacaaa

SEQ ID NO: 835618 - DNA, 120 bp, Artificial Sequence
  ENSG00000231806_44 (sequence is synthesized)
acagttaaccatttggttaaattcaaccattcatcaagccagtgccagcaatagattacctgatgcaaatgtgagacagaccacctgcatactggacagaatgacattttggcagaagcg

SEQ ID NO: 835619 - DNA, 120 bp, Artificial Sequence
  ENSG00000231806_45 (sequence is synthesized)
atcattgccttctctttataccatggaaactggacttaatgagtgattctgtgtgtgttggatggagcttcgcctattctaaaagcaataaaaaaaatccatggtggtgtctggctacag

SEQ ID NO: 835620 - DNA, 120 bp, Artificial Sequence
  ENSG00000254347_0 (sequence is synthesized)
agtcattagtggattgaatacaaatatttatagtataaattatctacagtataatcatctttcatgcagcctgtactaactttgacaaatttaggttgttactcaggctgaacctttggc

SEQ ID NO: 835621 - DNA, 120 bp, Artificial Sequence
  ENSG00000254347_1 (sequence is synthesized)
tgcagcttcactctcaaggcatagactttgcatcctcctgagcaccaccagatatctctactgaagtccacagaacaagactattggactacatgttctgtatgttctctaacaaatatt

SEQ ID NO: 835622 - DNA, 120 bp, Artificial Sequence
  ENSG00000254345_0 (sequence is synthesized)
ggatcctgtgggaatattgtgatgacccagactccactctctctgcccgtcaccaatggagagccggcctccatctcctgcaggtctagtcagaaccttttacatggtaatggatacacc

SEQ ID NO: 835623 - DNA, 120 bp, Artificial Sequence
  ENSG00000254345_1 (sequence is synthesized)
tgatctgtaggacttccaatcagttttctgccttcccacacaggttctcagtagggtggaggctgaggatcttggctattacaactgccaccacactctacaatatcctcccacaatggt

SEQ ID NO: 835624 - DNA, 120 bp, Artificial Sequence
  ENSG00000229299_0 (sequence is synthesized)
caagaacaggaaatctgccacgcagcaaacacttggggagccctgaagctcagcactccggggggtcttcacacgggcaggtcctggagggaaggaggaggccaccgcgcccacctccca

SEQ ID NO: 835625 - DNA, 120 bp, Artificial Sequence
  ENSG00000229299_1 (sequence is synthesized)
aggccgtggcaacggtcccgaggctgtgagtctaggcagcctgcctccgggacccccaaagccaggcggtgcaccacagcacacaccgtgggacctttgcttttcactcaggaaaagaaa

SEQ ID NO: 835626 - DNA, 120 bp, Artificial Sequence
  ENSG00000229299_2 (sequence is synthesized)
gaacatgtgagtgcttctgaaaacacagcaagaggacttgagcacaagctaaaggaaaaacaaccctatatagtttcttcgagtgagaaaaataatgccaaacaaaataattttatgtaa

SEQ ID NO: 835627 - DNA, 120 bp, Artificial Sequence
  ENSG00000287597_0 (sequence is synthesized)
acctgccagcccctactcattggtccttagtggctcagcactgcctactgcctaggggaacaaagggcatggtgctgggtacttataggcaccagaacattcctgaggactcacaccaca

SEQ ID NO: 835628 - DNA, 120 bp, Artificial Sequence
  ENSG00000287597_1 (sequence is synthesized)
gggaaagggctctgtactcattgctcttcatcccactgctgtgtgctattgtctttgtgatcttcatgattggattttgcttcttcaaggaagatataaaagagcccaagtaattctgga

SEQ ID NO: 835629 - DNA, 120 bp, Artificial Sequence
  ENSG00000287597_2 (sequence is synthesized)
aaccagcattttacccttgacctcctgcttttcatcctactggtcctcgccagaagtcgctggttgcctggtataagaaaacaatcataattatctcattaatacttggacctggcctcc

SEQ ID NO: 835630 - DNA, 120 bp, Artificial Sequence
  ENSG00000287597_3 (sequence is synthesized)
ctgctaatcaggtttgtactgctgagatttcaaaggagaacagaaatctactaagaagaaataaattggttctcaggctataaatagttctaggaagctgcccagggacaaaaatttgcc

SEQ ID NO: 835631 - DNA, 120 bp, Artificial Sequence
  ENSG00000287597_4 (sequence is synthesized)
tgctggtgaaataaaagaccatgtaaactgtagatttatttggagagtatagttccatgaatttaactggtctagactctgggcctctggaaggcagagaccatgctctcagccttgcct

SEQ ID NO: 835632 - DNA, 120 bp, Artificial Sequence
  ENSG00000287597_5 (sequence is synthesized)
ttagtaccttgtctgtaacaggctatcagatatgttgattgtgtcaaagataagcaaattctgaaatgagtaatttttttcattctctatcctctctgaattcacttagtgcctctcaga

SEQ ID NO: 835633 - DNA, 120 bp, Artificial Sequence
  ENSG00000287597_6 (sequence is synthesized)
atgtgtctgagtggaaagggatttgcacaggatatgtccaaacaggttattgtaactttggaggtaaactcttgtctatcattccatgcacttcattattatttatatccatttctttct

SEQ ID NO: 835634 - DNA, 120 bp, Artificial Sequence
  ENSG00000287597_7 (sequence is synthesized)
ttctttctttgtttatttatttaagtaattggtcatgaaatagacttgcatgctgaatactgaaatgtggtgtttgacacttgtaaattattccagattatatatgagactataatagat

SEQ ID NO: 835635 - DNA, 120 bp, Artificial Sequence
  ENSG00000287597_8 (sequence is synthesized)
ttagataataaagtgatctgtaattgaagtaaatgagagctgggtgctgtggctaatgccttgtactcccagcactttggaaggctgaggcagtaggatcgcttgggtccaggagtttga

SEQ ID NO: 835636 - DNA, 120 bp, Artificial Sequence
  ENSG00000287597_9 (sequence is synthesized)
ttgagactagcgtggcaacatagctagaccctgtctctacaaaaagtaaaaaattaaccaagtgtggtgatgcgcacctgtagtctcagctacacaggaggctgaggtgggaggatcact

SEQ ID NO: 835637 - DNA, 62 bp, Artificial Sequence
  ENSG00000287597_10 (sequence is synthesized)
gctgaggtgggaggatcacttgagctccagatgttgaggctgaagtgagccataatcatcct

SEQ ID NO: 835638 - DNA, 120 bp, Artificial Sequence
  ENSG00000287597_11 (sequence is synthesized)
gaaatagtagttgcaacttccaaaccaaagcttgtaattctggtcactatgacttggaaatattttccagaacaactgtgactcttgccgttgctctataaaatactggcaaggtccaaa

SEQ ID NO: 835639 - DNA, 120 bp, Artificial Sequence
  ENSG00000287597_12 (sequence is synthesized)
agggaattttcccccactgtgtataatattattagacagatggtattgtatagatgttcataatgataattttttaaaattagcacagcaaatattaactgaacatgatcttcatgtcct

SEQ ID NO: 835640 - DNA, 120 bp, Artificial Sequence
  ENSG00000287597_13 (sequence is synthesized)
gttccacacaggttgtatttgttgatgtggactctgataaaactgaaagttctttactaatgaatgcaaaaccatctcattgcttacattctttctagaatttgcatatgcaaagataca

SEQ ID NO: 835641 - DNA, 120 bp, Artificial Sequence
  ENSG00000287597_14 (sequence is synthesized)
aattccagaaatagcactcaagagaacagtctgtagaaatcttgtctaacaactctaaattttcaatcagcattgaatcagaattatagccatagttctctgaattattcatgataaata

SEQ ID NO: 835642 - DNA, 120 bp, Artificial Sequence
  ENSG00000287597_15 (sequence is synthesized)
gatgactggctacccatgggactctgatacagcgctttcaatgtggtaaaataattagaattgtcatatccactctttgtaaaattatgagaactgttatttattaatagcaaatgtcat

SEQ ID NO: 835643 - DNA, 120 bp, Artificial Sequence
  ENSG00000287596_0 (sequence is synthesized)
caaaagattttttaattgttttcatttctttagtttctctttaattgatatttccctttattaaactttaaaagtggagacaatgtataatgtactatgtagatatattattgtgagtca

SEQ ID NO: 835644 - DNA, 120 bp, Artificial Sequence
  ENSG00000287596_1 (sequence is synthesized)
ttattcattaaaatacaaagatggtaagatatttttttctccaaggatgaagataaaggaaagaataactataatataagttccctttaggggagaacttgaagaggtacaaaatggtaa

SEQ ID NO: 835645 - DNA, 120 bp, Artificial Sequence
  ENSG00000287596_2 (sequence is synthesized)
tctgtgatctctaaagtgcagggtgagggaattccctagtgtaaccaatttcagtagcgagtaaagaagaaccttgagattggagtcagctgaggttcccaagaggaaaattagtttact

SEQ ID NO: 835646 - DNA, 120 bp, Artificial Sequence
  ENSG00000287596_3 (sequence is synthesized)
tgaaccatggggagctcattgagatggtccaatctgagacatcctgtgttgtagagagtcagaacccacaggggttaagatcgtggtggaggttttgagaggatacacacccaggaatga

SEQ ID NO: 835647 - DNA, 120 bp, Artificial Sequence
  ENSG00000287596_4 (sequence is synthesized)
ggggataactcgacattgagtttcagacttaagtatctaactgtcaaattgactcctctgttgcgtattaataggcatccttgtaggaatgacagcagaagggcagaaaccacccacgtg

SEQ ID NO: 835648 - DNA, 120 bp, Artificial Sequence
  ENSG00000287596_5 (sequence is synthesized)
aggaagcacgatatgtgatgccatcagttcatgggatttggagtcagccatacagaccaagatttgagctgcaattctgtcacttaactttgtaaccaagaataaattgcttaactgctt

SEQ ID NO: 835649 - DNA, 120 bp, Artificial Sequence
  ENSG00000287595_0 (sequence is synthesized)
gacccgacggagctacacccgctagttcagccaggaggccctgcgcggctccggggagagctgggtggttatgccacctcattagacacattggtggacgatgccgcggattagcgggat

SEQ ID NO: 835650 - DNA, 120 bp, Artificial Sequence
  ENSG00000287595_1 (sequence is synthesized)
ggtttgtgtacaaacgaagccgtgtcacttctcaagtgtcggtgctcaacgtggcaacgcccctcccgcccccagtacagagatcctgcccatccaccgacaatccccctcctcatcttc

SEQ ID NO: 835651 - DNA, 120 bp, Artificial Sequence
  ENSG00000287595_2 (sequence is synthesized)
cttcccccaggtgcgagtgattcaaggaaatccgactggagggaacacacgctgcgatgcaccctctcctcttccattgagccaggggtgaccttgagagactcaggccacctcaccagg

SEQ ID NO: 835652 - DNA, 120 bp, Artificial Sequence
  ENSG00000287595_3 (sequence is synthesized)
ctctaccaggaacagcgtctacagctggtagagagcacgggctgcagagaggtaaagatggggttcggaagccaaggctccccttgttgcatgggtgacatcaggcaagctactcaacct

SEQ ID NO: 835653 - DNA, 120 bp, Artificial Sequence
  ENSG00000287595_4 (sequence is synthesized)
ctaaccctggcttccccttctgtatactggagacagtatcggccccacaggcacttgtggagcaagtgggtttgagctgagctcctctgaaaatcagaggcacactcagagagtagctca

SEQ ID NO: 835654 - DNA, 120 bp, Artificial Sequence
  ENSG00000287595_5 (sequence is synthesized)
gaaaaccaggatgtgtcagtttcatttgctgggaagcagaagccaagatagaattagaagtgcaatgtctgtgaaggaagaataaagggaaaaggaaacaggagtggggcagggggcaga

SEQ ID NO: 835655 - DNA, 120 bp, Artificial Sequence
  ENSG00000287595_6 (sequence is synthesized)
aagacagacaagtgtgagaaggagccccacagtgcagtgtaagcttaagaaggtgtggagaggatgggagtcactcactgggcaggaatggcccagctccagcaccttgctatgaccagc

SEQ ID NO: 835656 - DNA, 120 bp, Artificial Sequence
  ENSG00000287595_7 (sequence is synthesized)
cagctgctgggaacaggccaggaagagtgtggccttagcgcaaacactggggtggatctcgagatgaaggtgtggccgctggaagctgtcacttcaccactcctcttctgaagagagagc

SEQ ID NO: 835657 - DNA, 120 bp, Artificial Sequence
  ENSG00000287595_8 (sequence is synthesized)
tgagccctgcacatgggagcattggtgaaaagggtggtagacgtttatcagtaaccttactggttttgtgctccatcctccatctcccaaagtccccctgaccttgccttcagctccagg

SEQ ID NO: 835658 - DNA, 120 bp, Artificial Sequence
  ENSG00000287595_9 (sequence is synthesized)
aatggccacatgactcagacaaagccaaccagccatcccatttcagtggccagtgatgaatgattcagtgtttacccaaacgcatccaatcagggtgaatctgaggacatttgctgggga

SEQ ID NO: 835659 - DNA, 120 bp, Artificial Sequence
  ENSG00000287595_10 (sequence is synthesized)
ggctgggacacagataatctcttttctgacagatggtaacaagaaagtaggtagctgcaggggctgctggcagccatcttgagacatgaaaggtgtccaaattgggatgaattcagcact

SEQ ID NO: 835660 - DNA, 120 bp, Artificial Sequence
  ENSG00000287595_11 (sequence is synthesized)
gaagatggtggtacagagaaacaggagatagggcctttgatcacattgttggatggctggttaagcctctcctgaaatccattctactgctggactttacagttcataaactaataaatc

SEQ ID NO: 835661 - DNA, 120 bp, Artificial Sequence
  ENSG00000287594_0 (sequence is synthesized)
ggaagccgctcgccctgcacccaagcgggacttgcaccacaagcagccccaggaaaaaactctccatttctttctcgtggaggctccagaagaaaagctgcgcatttacccggcgcattc

SEQ ID NO: 835662 - DNA, 120 bp, Artificial Sequence
  ENSG00000287594_1 (sequence is synthesized)
taaccgcctttgaggttccctccggcagccatgggagccgtggtggggcaaagcctgggctgggagacgctgcaaggctctggggagcagtgaggcgccgcgccagctcctccgttcccg

SEQ ID NO: 835663 - DNA, 120 bp, Artificial Sequence
  ENSG00000287594_2 (sequence is synthesized)
tcatagcctcacacgggcttcgctggacacgtccaggacgcagcgccggtgggcaccaggcgttgagcgcctgccccgcgtctgtgctaagacctccctttgcattattgcatttattcc

SEQ ID NO: 835664 - DNA, 120 bp, Artificial Sequence
  ENSG00000287594_3 (sequence is synthesized)
atggggtgaggaccctgaaattgtctgggatccacaccagtcggaagaaaaaaagaatagaaaacgcagggattcacctcctctgcaggcaccctcatgccgaacactaaacaggatgat

SEQ ID NO: 835665 - DNA, 120 bp, Artificial Sequence
  ENSG00000287594_4 (sequence is synthesized)
gttgaaaaggatttggagatttatgcaggtcacgagcttgaggaatttttccattgaatgcaccatgccttgggtttcccgtttcccactgaaaatcccatggctgacactttttttata

SEQ ID NO: 835666 - DNA, 120 bp, Artificial Sequence
  ENSG00000287594_5 (sequence is synthesized)
tcattaccttgggagatgaagaaaaactcatctgttagggcagctctgtgaatgcagatgctttgggttgttttgaatgaatgactgaatgttctgaaataaagcaggaaggtgcctgcg

SEQ ID NO: 835667 - DNA, 120 bp, Artificial Sequence
  ENSG00000287593_0 (sequence is synthesized)
gcgcttctcctggggtagggaagcaagtcatgggtgttttacagcctgactttctggaagaagcaacaggattgtacccacctataacgagaaagcttaacttactgacatattctcatt

SEQ ID NO: 835668 - DNA, 120 bp, Artificial Sequence
  ENSG00000287593_1 (sequence is synthesized)
gctgaagactctgtctgaatgaggatttcaatctcaagtctaggatgtgatttcatctggtgaaggggagaggcagacacggaagaagcgcatctgtagctaagaaagaaatacactgac

SEQ ID NO: 835669 - DNA, 120 bp, Artificial Sequence
  ENSG00000287593_2 (sequence is synthesized)
cccatttccagtggttgagcttctctccaagtaggtagatgctggcgatgaagacgtagctgagagagaagaaagctgctagacccaagaggctgagtttggcaaacacaggatacaccc

SEQ ID NO: 835670 - DNA, 120 bp, Artificial Sequence
  ENSG00000287593_3 (sequence is synthesized)
aggtacccgtctcaaagtagagccataggatgctgcaggaaataagaagtcgtggtggttatagcaggaggagaaaaacaagccattttctcatcaggattaatgaggcattttggttga

SEQ ID NO: 835671 - DNA, 120 bp, Artificial Sequence
  ENSG00000287593_4 (sequence is synthesized)
ataagaactaaggtttgaacaggaaagatgagaagagcaggagatgagataccctctcctctcctagtcctccacctccatccctcttcagtttggatcctggctgggctggaccccgca

SEQ ID NO: 835672 - DNA, 120 bp, Artificial Sequence
  ENSG00000287593_5 (sequence is synthesized)
tgttgacaacaaggatgtgttgtgtggcatctttttaattaattttcatatatgaatttacaggtagggtaaggatttcttctgtggaaaatggtgctgagattccaatccctgctgagt

SEQ ID NO: 835673 - DNA, 120 bp, Artificial Sequence
  ENSG00000287593_6 (sequence is synthesized)
tgaggttataaagctatggttgacctggatgatctcagttgaaggtcatattttggaaacggtaacagtggctctggtagggagttcacaacatggttggttctgagcaggaccaaccat

SEQ ID NO: 835674 - DNA, 120 bp, Artificial Sequence
  ENSG00000287593_7 (sequence is synthesized)
gtgttagggaaaatatttattcaatagaaaaatgaataaaaaccagaaagagaagaagagaattgctgattctggaaatggcaaggtggctggtcctggaactcagcttagtccacccct

SEQ ID NO: 835675 - DNA, 120 bp, Artificial Sequence
  ENSG00000287593_8 (sequence is synthesized)
tggcagtttttaatgtattctcagggtaagatgtgtacatgtatttgtaaatgaggcatgaatttaaagaactgttacttctgggaacccaggaagctttgctgagggatcttaccctgg

SEQ ID NO: 835676 - DNA, 120 bp, Artificial Sequence
  ENSG00000287593_9 (sequence is synthesized)
tggggaagggactttacaaacatctgccccaaggctgggtgacagctgcatatctgtgcagtgtttgtacggggcatgcaatactttacacactagcagggacacctgcagcatcagtag

SEQ ID NO: 835677 - DNA, 120 bp, Artificial Sequence
  ENSG00000287593_10 (sequence is synthesized)
gtttctggtctaccaagagcagtgtgatgatgcactccaggccagctggggtggttgctgtggcgagtaacattgttaattctaccaacacagggggctgatgggtaaatgacactgttg

SEQ ID NO: 835678 - DNA, 120 bp, Artificial Sequence
  ENSG00000287593_11 (sequence is synthesized)
gcatcagcagtgggcatggtgtgctaacccttaacactgtgccaggtggggatgttggacccagtggggattacagttttgctatctgtgtgtaagaacaatgctcagaacagtgtgcag

SEQ ID NO: 835679 - DNA, 120 bp, Artificial Sequence
  ENSG00000287593_12 (sequence is synthesized)
catgggttgtgcagtgcacgacaggggcatgtgtgagcactcagcagattattggaactccttggaaaactggaccaagacctccaaggcagaagggtgcttggggatatcactggaact

SEQ ID NO: 835680 - DNA, 120 bp, Artificial Sequence
  ENSG00000287593_13 (sequence is synthesized)
gtgaaataaccatacataaaaactaagacattgtgatcaaagtacataatgtgctggctagtttttatttttatattggtttatattttattttgtttcccatctcttgtcactccaact

SEQ ID NO: 835681 - DNA, 120 bp, Artificial Sequence
  ENSG00000287593_14 (sequence is synthesized)
tatttgaagcactattgtcaagaatgacattttaaagcataatttgctggccaagttacaaatactgctcacccttgcttccactccaaacaaacaaacaaacaacagcaacaacaaatg

SEQ ID NO: 835682 - DNA, 120 bp, Artificial Sequence
  ENSG00000287593_15 (sequence is synthesized)
ctcccattttctatactatgtccaacatcctctagtctgccatctgcaagccttcatgagtgggtagttccagggatatttctcattagtctctttcacaaacaggtccagcaaagagaa

SEQ ID NO: 835683 - DNA, 120 bp, Artificial Sequence
  ENSG00000287593_16 (sequence is synthesized)
ttactgacccttgctctcacgctttctgcactctcctggccttgggactgtgctccttttgtttaccttctctcattttttctagctccaatcctgccggtccttcagggctcagatcca

SEQ ID NO: 835684 - DNA, 120 bp, Artificial Sequence
  ENSG00000287593_17 (sequence is synthesized)
atgcatgccttccacagtgcccttcccacaccgctcagctggatgcaaactcttccttttctgtggctccttgtgttttttttatgaggttttaccactttccatcttctgcacttataa

SEQ ID NO: 835685 - DNA, 120 bp, Artificial Sequence
  ENSG00000287593_18 (sequence is synthesized)
tttgtatgcatgggtcatctccacttattaaggataaaccccctgcaggctgaagcttggcctgatataacattgcttttctgggcaggaccaaccatgtgttagggaaaatatttattc

SEQ ID NO: 835686 - DNA, 120 bp, Artificial Sequence
  ENSG00000287593_19 (sequence is synthesized)
gcctagagttctttaagatatgcgttccatggatgcattacaggatgcccacagtgattcttacctgcatggctacttctcatggcaggacaaagaagcaatcttgtcactccacgaggg

SEQ ID NO: 835687 - DNA, 120 bp, Artificial Sequence
  ENSG00000287592_0 (sequence is synthesized)
agaggggaaaatctggcaatgtaaatagaaagtatctgtttacataggttttttagaatttgatctgaaattttagcaagttgcagaatgggttgtgaagcacaacatttcatctttttg

SEQ ID NO: 835688 - DNA, 120 bp, Artificial Sequence
  ENSG00000287592_1 (sequence is synthesized)
ttcatctttttgattctagacactatcctcagaaattagatttgaaaaatgagcttcattttcgaagaacatattgtcttgctgctgctccctctttgggtccgcactgcctttatgagc

SEQ ID NO: 835689 - DNA, 90 bp, Artificial Sequence
  ENSG00000287592_2 (sequence is synthesized)
ggatgggaggaacgaacaactccggatgggaggaacgaacaactccagacgcgcgccgctttaagagctgtaacattcactgcgaaggtc

SEQ ID NO: 835690 - DNA, 65 bp, Artificial Sequence
  ENSG00000287592_3 (sequence is synthesized)
aacgaacaactccggatgggaggaacgaacaactccagacgcgcgccgctttaagagctgtaaca

SEQ ID NO: 835691 - DNA, 120 bp, Artificial Sequence
  ENSG00000287592_4 (sequence is synthesized)
ccagacacaccatctttaagaactgtaatactcaccgcgaggttcggcagcttcagtcttgaagtcaatgagtccaagaacccaccaattctggacacagtaggatagtgtgttatgaag

SEQ ID NO: 835692 - DNA, 120 bp, Artificial Sequence
  ENSG00000287592_5 (sequence is synthesized)
gtgaaacgcctatttgcttccagagtataaatttcattccaattggaggaaaaggcttaaatgacttcaagaaacacattgtaaatttgccacctcttttgcattttcctgagatatttt

SEQ ID NO: 835693 - DNA, 120 bp, Artificial Sequence
  ENSG00000287592_6 (sequence is synthesized)
cctcaaggaattgacgtgcaaatcaccaaggtctacatatttttcccattacctacaaaagtagtgactataccaattagaaattttgttcactagtaaaaaatcaataagagtacactg

SEQ ID NO: 835694 - DNA, 120 bp, Artificial Sequence
  ENSG00000287592_7 (sequence is synthesized)
cttggacacttacataagaagttataatttttttttctttctgaatcatttctcctaagccgttttctactgacaggagtctgtctcttcacattagtgacaggaagaaataattaagtg

SEQ ID NO: 835695 - DNA, 120 bp, Artificial Sequence
  ENSG00000287592_8 (sequence is synthesized)
taagttgtcacttgtgatcggaagatccatgaagtaaaagtgaactaagtggggcagatgaaatcctggctgtcctctctacatctgctgaaatagacttaggaatcatctctgaaacat

SEQ ID NO: 835696 - DNA, 120 bp, Artificial Sequence
  ENSG00000287592_9 (sequence is synthesized)
tcccacttctaatttccagaatttatgtggattacaaatgagaataatctagatttttcttgtagaatcttgaagaggcattctttatttttaatcacttacccttaggaatatcctcag

SEQ ID NO: 835697 - DNA, 120 bp, Artificial Sequence
  ENSG00000287592_10 (sequence is synthesized)
aatgtgcctgaaattaggacaaatctatgtattatagttagagtgaaatattagtaattgtttaatgtcactacgcctaacttaactgttagtgtgaattttgagtggataaataaggaa

SEQ ID NO: 835698 - DNA, 88 bp, Artificial Sequence
  ENSG00000287591_0 (sequence is synthesized)
ctgcctttatttctcagccggccaacacttacggaaaatagaacctacattgaaattcctgtttccactctggctggaaaagtataat

SEQ ID NO: 835699 - DNA, 120 bp, Artificial Sequence
  ENSG00000287591_1 (sequence is synthesized)
attgaaattcctgtttccactctggctggaaaagtataatgttggttcgagatcaagaaggaatctggataccatgtgccagaccagtcaaagaatcctgtgtcaaaactgggagaacga

SEQ ID NO: 835700 - DNA, 72 bp, Artificial Sequence
  ENSG00000287591_2 (sequence is synthesized)
ataggagaggtatcgctaaattattttcctagcaaggaatattacatattaagaccctaggaaaagaattgc

SEQ ID NO: 835701 - DNA, 86 bp, Artificial Sequence
  ENSG00000287591_3 (sequence is synthesized)
atgtgcaaataggagaggtatcgctaaattattttcctagcaaggaatattacatattaagaccctaggaaaagaattgcattcct

SEQ ID NO: 835702 - DNA, 120 bp, Artificial Sequence
  ENSG00000287591_4 (sequence is synthesized)
ccttgtgatctttgttggacccttatctgttgtgggaagtcaggcaccccgaacagagggaccagctggagccgtggcagaggaacataaattatgaagatttcgtggacatatatcagt

SEQ ID NO: 835703 - DNA, 83 bp, Artificial Sequence
  ENSG00000287591_5 (sequence is synthesized)
gagccgtggcagaggaacataaattatgaagatttcgtggacatatatcagttcctaaaattaatacttttataatttcttaa

SEQ ID NO: 835704 - DNA, 86 bp, Artificial Sequence
  ENSG00000287591_6 (sequence is synthesized)
catttatcacttccctaataatactctcataatttcttatgcctgtcttactttaatcttttaatcccgggaccctgtgatgattg

SEQ ID NO: 835705 - DNA, 75 bp, Artificial Sequence
  ENSG00000287591_7 (sequence is synthesized)
ttgaacaatatgaaatcagtgcaccttaaaaaagaacagaataacagcgattttagggaacaatgcagccatatt

SEQ ID NO: 835706 - DNA, 120 bp, Artificial Sequence
  ENSG00000287591_8 (sequence is synthesized)
tgcagagagcctataaatggacgtgccaagtaggagagataccactaaattcttttcctagcaagtaatattaaatattaagaccctaggaaaagaaatgcattcctagggggaggtcta

SEQ ID NO: 835707 - DNA, 79 bp, Artificial Sequence
  ENSG00000287591_9 (sequence is synthesized)
cctaggaaaagaaatgcattccttatgcggttgagaaaaggactgagatacactctggtctcctgcagtaccctcaggc

SEQ ID NO: 835708 - DNA, 85 bp, Artificial Sequence
  ENSG00000287591_10 (sequence is synthesized)
aatacgtgcactgctgaacacagacccttatcaggagtttctgattttgccttgtcctgtttcctcagaagcatgtgatctttgc

SEQ ID NO: 835709 - DNA, 120 bp, Artificial Sequence
  ENSG00000287591_11 (sequence is synthesized)
tttgccttgtcctgtttcctcagaagcatgtgatctttgctctgcttttttgccccttaaagcatgtaatcttttccctgttcatacactccctccccttttgaaatccctaataaaaac

SEQ ID NO: 835710 - DNA, 120 bp, Artificial Sequence
  ENSG00000287591_12 (sequence is synthesized)
tacactccctccccttttgaaatccctaataaaaacttgttggttttgaggctcagggggcatcatggacctaccaatatgtgatgtcatctccggcagcccagctgtaaaattcctctc

SEQ ID NO: 835711 - DNA, 120 bp, Artificial Sequence
  ENSG00000287590_0 (sequence is synthesized)
ctcctgaatcagagtctgcgttttaaacaagatgtacatgggagtctgagaaaccttgctgttgggatctgtggaagcctacagcagccttccaacaaagagaacatgagtttccagttg

SEQ ID NO: 835712 - DNA, 120 bp, Artificial Sequence
  ENSG00000287590_1 (sequence is synthesized)
acaaagtctgtgctcagctccttcactgaacattgctctgagccaacgcatgtcagcgagaggacgcggtgacaccggcctgtggttgcacccagaaacaaacaagtagggagagcagcc

SEQ ID NO: 835713 - DNA, 120 bp, Artificial Sequence
  ENSG00000287590_2 (sequence is synthesized)
ccagttctccagaatgacctctttcctccgaatcccactccaggaagagagtccagcaggggcccctgagcttggggctggccctgtgcgctgtcagcagagacccctgtccatcagcac

SEQ ID NO: 835714 - DNA, 120 bp, Artificial Sequence
  ENSG00000287590_3 (sequence is synthesized)
tttgcatgggtctgtcctgcttcagtggggaatgttcctcagcaaaagaactgagtgcaatgcagggatgccatcggagttggctggggacagcctggctttgtcatgttagggggcatg

SEQ ID NO: 835715 - DNA, 120 bp, Artificial Sequence
  ENSG00000287590_4 (sequence is synthesized)
gagctcagaggaacaaatcgcagggagagaatgtgccaatggtgctttctccaagacacctctgacctggaactgcaaaccaccgctgattcccctgcccagctcctctgttagaatgac

SEQ ID NO: 835716 - DNA, 120 bp, Artificial Sequence
  ENSG00000287590_5 (sequence is synthesized)
cccgtggggctgcagatgacttaacagctatatttagcaagtcatgggagggatgggccagttccagccagctagcctgccttcagaggccctagattcctttgtccttcccttctgcct

SEQ ID NO: 835717 - DNA, 120 bp, Artificial Sequence
  ENSG00000287590_6 (sequence is synthesized)
cccctcctagtttttcccactggctggctcttaaccccttcatggcttgaggactcctctcaaatatgggcaaagcagatagaacgtaagggaggccacccgagtatcccagcccccaaa

SEQ ID NO: 835718 - DNA, 120 bp, Artificial Sequence
  ENSG00000287590_7 (sequence is synthesized)
tttctcactcagctgcctggaactctgctttacgaactccctttcttcagtcctgaacttttcttttttttcatcattaagtgtttcctaataaaattatgcaagtacccttgggaaggg

SEQ ID NO: 835719 - DNA, 120 bp, Artificial Sequence
  ENSG00000287599_0 (sequence is synthesized)
agcacatcatataagattacaaagcacagagtaatgacattgttagaaactcttcacagtagccccaggagtcacgaaactgacttaactaagacccactgtctagtaaggtgtaaaacc

SEQ ID NO: 835720 - DNA, 120 bp, Artificial Sequence
  ENSG00000287599_1 (sequence is synthesized)
cagcaggaacgcaatactaggaaggtgcaaagccaggaggctcaataaacgttaaacagtgtctgggggaaagagcaacgatccagagcactgtttgtgaactcaaccacttttattcag

SEQ ID NO: 835721 - DNA, 120 bp, Artificial Sequence
  ENSG00000287599_2 (sequence is synthesized)
ggaagagaactgaggaattgagctgacaatgagaattgaggtcccagcctatggtcccagttgtgtgttccagccagcatccagttgtttgaactgcctctatactagtaaacaagtaat

SEQ ID NO: 835722 - DNA, 120 bp, Artificial Sequence
  ENSG00000287599_3 (sequence is synthesized)
taattaatacaagtaaatgaaaacaagtaataaagtaattaatacaagtattaagtgagtgaaaaaaaacatttacccacagaattgtgagcaaataaagtggtgttgttttaagcctct

SEQ ID NO: 835723 - DNA, 120 bp, Artificial Sequence
  ENSG00000287598_0 (sequence is synthesized)
gcgagatctgatggttttatcagtggtttccgcttttccgtcttcctcattctctctttgccagctgccatccacatcaaccctgaggattgggaaggaattatacataccaggaggcaa

SEQ ID NO: 835724 - DNA, 120 bp, Artificial Sequence
  ENSG00000287598_1 (sequence is synthesized)
ggagcactgggggccctcctgggactgcctatcacagcgtccttaaagcagtatgatggtacttccagtaccccagtgacatctagcctgagaaagaagcagagataaagtctatagagg

SEQ ID NO: 835725 - DNA, 120 bp, Artificial Sequence
  ENSG00000287598_2 (sequence is synthesized)
aagagagcatctgaatgacgtttgagtccctggatccactgtgtgaagccagagccactcctagatcagatccagagcctgacaagtttatttacttggagaagcagattctaggttcta

SEQ ID NO: 835726 - DNA, 120 bp, Artificial Sequence
  ENSG00000287598_3 (sequence is synthesized)
gaaaagaaggctgaaaatacaactttaagggaaaggataatctgatgactaattctcatttatcaaaaagccactttgccttagatctatctctataaactccatgcttcaccataaaat

SEQ ID NO: 835727 - DNA, 120 bp, Artificial Sequence
  ENSG00000287598_4 (sequence is synthesized)
tttattgaaaaaagggggccacctggcaaataacaccaagagtattatttctgggttcatttaacccaacgacaattatttatcttactaaaatccatttctaggtctacaaacctattg

SEQ ID NO: 835728 - DNA, 120 bp, Artificial Sequence
  ENSG00000287598_5 (sequence is synthesized)
tgtagttcatgaatacataggctttagtcctagatagttggagcagatcctggctataccaattgttagccataagccacgattaatgtacttaagttctccaagtttctcatctttaga

SEQ ID NO: 835729 - DNA, 120 bp, Artificial Sequence
  ENSG00000287598_6 (sequence is synthesized)
atggggataatagtgctatttactttatataattattgggaggaggaaatggcttcataaatataaagaacttagcaaagtgaatgacacataataaaccataaataattgcagcaactg

SEQ ID NO: 835730 - DNA, 120 bp, Artificial Sequence
  ENSG00000287598_7 (sequence is synthesized)
cttttattaggaagtcttccagatgtttgtaatatttgtccagttgtcatcacagacagaaataaaagaataaaaaatttccattgagaattacgctaattatataaacataatgcatat

SEQ ID NO: 835731 - DNA, 120 bp, Artificial Sequence
  ENSG00000287598_8 (sequence is synthesized)
tctatgaaactaacagattctcagaggtaattatacaattttaggagaaaacattattttaaaatttaccagtaaaacattgttataaatatcaataaaatattgtccaacctactgaaa

SEQ ID NO: 835732 - DNA, 120 bp, Artificial Sequence
  ENSG00000270159_0 (sequence is synthesized)
caagttagctgtatggatggctatgaggggtgcacacagcccgttcaccaactgaggaatggagaactcgaagggaggaacggagactcggccaagcctcagcactcacagcggcagggt

SEQ ID NO: 835733 - DNA, 120 bp, Artificial Sequence
  ENSG00000270159_1 (sequence is synthesized)
actaggcatcagcccaaatggctcctgcatgaaaagctgcggtggatctaagtggcagctaggagtcaaggcaactagcttcctccgaagcgaggcaagacaaggcacagccgagaagcc

SEQ ID NO: 835734 - DNA, 120 bp, Artificial Sequence
  ENSG00000270159_2 (sequence is synthesized)
actcaacctctgttcccaatgaatccatttccatgtccctgcttcgctgtacgacaccccacaccctgatgtgcatcttgtgaaaaatcaagatgaaaataaaaggtcaggagaaaactc

SEQ ID NO: 835735 - DNA, 69 bp, Artificial Sequence
  ENSG00000270154_0 (sequence is synthesized)
tttcagagacagggtcttgctacgttgcccaggctggactcaaactcctgggctcagactgtgcccagc

SEQ ID NO: 835736 - DNA, 120 bp, Artificial Sequence
  ENSG00000270154_1 (sequence is synthesized)
aagattttaaaaaatacgtatgcccggacaccactctaaaccaactaaatgagaatcagatatcgtgaagtcactaatcattttgctcctgggtctttatgacagttttgctcctgggaa

SEQ ID NO: 835737 - DNA, 120 bp, Artificial Sequence
  ENSG00000270154_2 (sequence is synthesized)
gctatgcattttgaaaataatttttatttggtgtttgtcttgagggaaggcggtaaacatttcaattgcctttaagtgtgcttggatgctggaacgatggttctttgaatgcagcgtcaa

SEQ ID NO: 835738 - DNA, 120 bp, Artificial Sequence
  ENSG00000270154_3 (sequence is synthesized)
actggcattgggtcacatggcagccagcattaacctttatgccacatttataaaacatgaatgtcatgagcccactctcagagaccttataatttggagggttaggtcagatccacaaat

SEQ ID NO: 835739 - DNA, 120 bp, Artificial Sequence
  ENSG00000270154_4 (sequence is synthesized)
ctcttctatctcatggtaaaggaaacctggcgtgtagcaggagatggtgtgataacaataacatattgcatgatcagtatttgtattcttcttagcaatattaaactttttgacctcctc

SEQ ID NO: 835740 - DNA, 120 bp, Artificial Sequence
  ENSG00000270157_0 (sequence is synthesized)
gcctcctttgaatagagtagttccttgcgctgaatattatgggataatctgaaattttaattcttgaatcaaatgaaatctctttgccccgtaggtgcagaagccagggcctttccacct

SEQ ID NO: 835741 - DNA, 120 bp, Artificial Sequence
  ENSG00000270157_1 (sequence is synthesized)
cacagtactgatttcattcctagacagctgggtgaagtagccttctgtggcatcaactgaattctcccagcttcctgtttggtcttccaggggtgaggttgtggtttgatgctgaaaact

SEQ ID NO: 835742 - DNA, 120 bp, Artificial Sequence
  ENSG00000270157_2 (sequence is synthesized)
taatgtgggcatttctacaaaggtgtagcaccttgattctaatagtggacttctaaaacctacatcctgtttaggtggaaagtatctgagacttgagcacagccatagtctcatccaggt

SEQ ID NO: 835743 - DNA, 120 bp, Artificial Sequence
  ENSG00000270157_3 (sequence is synthesized)
gggctggactgtctagtctaactaggcagtgaaccctgtcctgaacagagcttgtttgttcataaagcactctaaagcagtgacttttaaatcttgatctgtgcataatctcactcctcc

SEQ ID NO: 835744 - DNA, 120 bp, Artificial Sequence
  ENSG00000270157_4 (sequence is synthesized)
caaagagtcatcaagggagagcaaacacccaagggtaacgttggctcacgttcattttgttgttgttgttgaatttttgcttcctcctatgactaagcagaaagagagaaaagcagtgtt

SEQ ID NO: 835745 - DNA, 120 bp, Artificial Sequence
  ENSG00000270157_5 (sequence is synthesized)
tgggggcctcttctcaggctgtgtttaaacccaggtcacttccctcaacaggaaaatggattttgacaggccatcttgcttagagatttccctaatcacaccataattaatgccaaatgg

SEQ ID NO: 835746 - DNA, 120 bp, Artificial Sequence
  ENSG00000270157_6 (sequence is synthesized)
tttctttgctaaccttagtagcacttgaataattaacttttactcttttctttttttaaaagatacctgcgaatccactgaaaagtacattaaacaaaacagtatagttttggttcccca

SEQ ID NO: 835747 - DNA, 120 bp, Artificial Sequence
  ENSG00000251371_0 (sequence is synthesized)
tgtaatgagagtcactatatttcttagctccattccaaaatattaactggggagctgctcatttataatagtgccaaacttctgacagacagaaattataaaagaggccccagaaaagca

SEQ ID NO: 835748 - DNA, 120 bp, Artificial Sequence
  ENSG00000251371_1 (sequence is synthesized)
tcagaaaaaaagggaaacttttaaacagaaatggtaatttgaaatactgaccctaggtttaaaatttagaaaaggcctgttttctggagcagtcatctggatggtccaacagctccctct

SEQ ID NO: 835749 - DNA, 120 bp, Artificial Sequence
  ENSG00000251371_2 (sequence is synthesized)
gcttggggaaagccacatgtttccttgttccagccaggagctccaaaatggcctccagccatcggtcctattaaataacataactcacctaaagcagagaatccatggacccagtagaag

SEQ ID NO: 835750 - DNA, 120 bp, Artificial Sequence
  ENSG00000251371_3 (sequence is synthesized)
taaattgctgacccagttaaaatctatggagaatgtgtcctacggcatatccacgaatataccttcaaaaggaaagaggttatgtccaagcgaagatgaggaatatctgaggtgaaactt

SEQ ID NO: 835751 - DNA, 120 bp, Artificial Sequence
  ENSG00000269646_0 (sequence is synthesized)
cttccagtccacgcgatccgcttcctggtccgggcgaatctacaagcacaggacagaagccaggcctccgtggagccaacgagtacctgttttaagaaaaaaaacaacaaggaagtaaaa

SEQ ID NO: 835752 - DNA, 82 bp, Artificial Sequence
  ENSG00000269646_1 (sequence is synthesized)
gagtacctgttttaagaaaaaaaacaacaaggaagtaaaaccgaagacaggcagccctgcgccacatagttaaaaatcaact

SEQ ID NO: 835753 - DNA, 120 bp, Artificial Sequence
  ENSG00000269646_2 (sequence is synthesized)
ctccctgccctgttctgtttctctctaccagtgcacgaaacccctgtgtatatatctgggactgtagtccctgttacgtatcccctagattgctcaatcacgacccttttatgtgaaatc

SEQ ID NO: 835754 - DNA, 67 bp, Artificial Sequence
  ENSG00000269646_3 (sequence is synthesized)
ctcaatcacgaccctttcggggagctcggattttaaggcagcttgccgatgctcccagctgaataaa

SEQ ID NO: 835755 - DNA, 120 bp, Artificial Sequence
  ENSG00000234292_0 (sequence is synthesized)
tcaaagcttctagtgcagtcactttctagtcattttagaacccagagcagtgtgacgatttgatgcttaagtttcaacacgttttattaatccattcttcttgtgcttcatttaaaatat

SEQ ID NO: 835756 - DNA, 120 bp, Artificial Sequence
  ENSG00000234292_1 (sequence is synthesized)
tggaaactataaaaagatcagcgtgttaatcctctgccaggaaacgggaaaaaaaagttaaaaacctaacaacaacacgaaaagagcaagagcgctggaatctcagctttgaggaaacac

SEQ ID NO: 835757 - DNA, 120 bp, Artificial Sequence
  ENSG00000234292_2 (sequence is synthesized)
atgggatgaaagcatccgcccaagctctaaccatttgtcacatgggactcttcccctcgggggtgaatcctggatgtccccaggatggagcgaggaggtcgtgcgtgcgggcgagtgtgt

SEQ ID NO: 835758 - DNA, 120 bp, Artificial Sequence
  ENSG00000234292_3 (sequence is synthesized)
gactgcagggggccttggcggcgcgaggaggcgacgccgccccctccctcaggcgcagggagggtcttccaggaagcggcggatctctgctgactccgcggctgcgggccccgggctgcg

SEQ ID NO: 835759 - DNA, 120 bp, Artificial Sequence
  ENSG00000234292_4 (sequence is synthesized)
cgcgctactcctgtcgccgggagctcgcaggacttcgcagataccgctgcctccttagtctttcctgaatagcagagcagtcctgtcgctttaaacagagcaaggcagctttcactgctt

SEQ ID NO: 835760 - DNA, 120 bp, Artificial Sequence
  ENSG00000234292_5 (sequence is synthesized)
ttgaatcccgaccgagcggggcactgccgtgctttgttttctttgcctttaagagtgcaatagtccactaatcaaattctttcatcaaaagagtgttgggacaaatccctgacatcgtcc

SEQ ID NO: 835761 - DNA, 120 bp, Artificial Sequence
  ENSG00000234292_6 (sequence is synthesized)
ttccactgtgatttggagatgacctccacccaggtttcacttccgttgtacccagctctcgtcttatttttgtccctcattttgtgaatttatcctctcactacgcttgataactaacct

SEQ ID NO: 835762 - DNA, 120 bp, Artificial Sequence
  ENSG00000234292_7 (sequence is synthesized)
tggcgcaaacccacaactgtggtgacgcaaatcaggttggaacttggcatcgttgtgtgcgggcagtgagggacttactgtaaaaactggggccttcataaaggcgttcttatttgcaat

SEQ ID NO: 835763 - DNA, 120 bp, Artificial Sequence
  ENSG00000234293_0 (sequence is synthesized)
cttttcctgggctgtacagagactcgttaccattttatcctctacagtcctttctgtttacttagttctacaactgcctcatctcactgtgttcttgtagtataactgtggggctcttcc

SEQ ID NO: 835764 - DNA, 120 bp, Artificial Sequence
  ENSG00000234293_1 (sequence is synthesized)
aattatggagccaggactttacatagctccctctgctgttttctggaagctctgagaaggcggtgcctacagttcacaactccaaaagcacccaacacattgttatcacaataatttata

SEQ ID NO: 835765 - DNA, 120 bp, Artificial Sequence
  ENSG00000234293_2 (sequence is synthesized)
gccaggatgcctcttccacctgagagtgagctgcctgagccctcaggtttatgtctccagccccgaacacaattccaggcacaaaggaagttctcaataaatacttgtgaaatgaaaaaa

SEQ ID NO: 835766 - DNA, 120 bp, Artificial Sequence
  ENSG00000234290_0 (sequence is synthesized)
tttttttttttttttttttttttaagaaaaaggttttctagtttcttctacattaaaaataatccctccttctcataaagcacaattttacagaggaaaagggagatgtgaaactataca

SEQ ID NO: 835767 - DNA, 120 bp, Artificial Sequence
  ENSG00000234290_1 (sequence is synthesized)
actatacacaattcaaatctaattaatatataatttttttgtggaatacagatggagggaatacatcacaatactaaaggtgattatctttggatggtgggattacaggtgattatatat

SEQ ID NO: 835768 - DNA, 120 bp, Artificial Sequence
  ENSG00000234290_2 (sequence is synthesized)
tttttatatttctatagtttaaaaatattccatgatgacctataattacttttacttattttttgagacaaaatctcaccctgttgaccaaggctggagcgcagtggtgcaatctcggct

SEQ ID NO: 835769 - DNA, 120 bp, Artificial Sequence
  ENSG00000234290_3 (sequence is synthesized)
caagtgatcctcccacctcagcctccggagaagctgggactacagctctttgcccagcttccagtgactcctctgtgcctggagagaagggcaagcgccttactcatgccttgaggttgc

SEQ ID NO: 835770 - DNA, 120 bp, Artificial Sequence
  ENSG00000234290_4 (sequence is synthesized)
agaagggcaagcgccttactcatgccttgaggttgctgaccacttccgtcaccagcctcgctccttccagacctgccctgggagtccctgcctcctggccttcacctgcatcacggtctg

SEQ ID NO: 835771 - DNA, 120 bp, Artificial Sequence
  ENSG00000234290_5 (sequence is synthesized)
cacttctcagagccctgcccttccttgaagaacaaagcctggccaaattgtgtcagccttctggcctgcagtgacccctgcttacatcgtacataacaatagctataacttattgacatt

SEQ ID NO: 835772 - DNA, 120 bp, Artificial Sequence
  ENSG00000234290_6 (sequence is synthesized)
aacttcaggtcacatagcaaaagtgctctcatttaaatcttaggccaccagaggatccatagactaaaatgttaacagcatctcctggagttgtggagtgtggtgaccctatgtgatcct

SEQ ID NO: 835773 - DNA, 120 bp, Artificial Sequence
  ENSG00000234290_7 (sequence is synthesized)
cctgtgccactgagagatatattattaacccagtttcactgataagataactgaggctcagagaggtcaagtaacttgcccatggtcacacagtgggtccatggcagagctgggaggtga

SEQ ID NO: 835774 - DNA, 120 bp, Artificial Sequence
  ENSG00000234290_8 (sequence is synthesized)
tccctagtcagttccctccaagtccaggattttctcactcccacaatggtgtctcccttaatgactctcacattccagcctctgagggcaggaagggtatgttctgagttgaacacacag

SEQ ID NO: 835775 - DNA, 120 bp, Artificial Sequence
  ENSG00000234290_9 (sequence is synthesized)
agagcactcaatgatgtctggtggtgaagatgttaatcatgagctcaatcaaggtttatcattaaatcaacaagtcttcctagtgtgtctgggagctctggggcccagggacaggcctac

SEQ ID NO: 835776 - DNA, 120 bp, Artificial Sequence
  ENSG00000234290_10 (sequence is synthesized)
tgtagttcagtgttgtattctggcacctggtggtttctggcacatagcccatgttcattaaatgacatgaattgattgtccattcaaataataaaacaataaataaataatactagctaa

SEQ ID NO: 835777 - DNA, 120 bp, Artificial Sequence
  ENSG00000234290_11 (sequence is synthesized)
caggtatggagtgcctacaagccagccacctcagggagtttccaggacagttgaggagaaacataacactgttgacaagagctacaacgtagggttttacaccaaaacagtgtctacgta

SEQ ID NO: 835778 - DNA, 120 bp, Artificial Sequence
  ENSG00000234290_12 (sequence is synthesized)
aacagtgtctatcaaagagagaaaaatgatgggcagacaccctgatccttcccacagtgctaaaggccatgccagccactgtccccattacgacttgcatatactgactgccgaagcaca

SEQ ID NO: 835779 - DNA, 120 bp, Artificial Sequence
  ENSG00000234290_13 (sequence is synthesized)
caaacctgaattttccgtctgcatccatcgttctgtctgttcggatcacatctggatactactgttgcctctccagactggataaccagtctgctgagggccagaagatggtgagatgga

SEQ ID NO: 835780 - DNA, 120 bp, Artificial Sequence
  ENSG00000234290_14 (sequence is synthesized)
aactagtcatgtttacttggagaagagaaatgaagaccgtctttaacacctgacaggttgctcttcccaagaggggccagagggcaacagccatggtcaacagctccaggcacccctgag

SEQ ID NO: 835781 - DNA, 120 bp, Artificial Sequence
  ENSG00000234290_15 (sequence is synthesized)
ccagctggcagggctgtctggcaagggaccagtccctcctctggagaagtggtgagcccagtgggctgcctctccagcaggatcctgtagagaccttactctctacaatgcacactccac

SEQ ID NO: 835782 - DNA, 120 bp, Artificial Sequence
  ENSG00000234290_16 (sequence is synthesized)
acacttgctcacttgacaaacacttattataactgtcaccctgggcccattccaggttagggacataaggatgaataaaacaaggtctgtaccagtagagaacatcagtcctctagggga

SEQ ID NO: 835783 - DNA, 120 bp, Artificial Sequence
  ENSG00000234290_17 (sequence is synthesized)
gaaagtcaggaaagcctcatcctgagccttcgactccttactgtccatcctctaggctcctgtctcagcttctgctgaaggctattttcttccttgtattctgcagtgaccaggcatatg

SEQ ID NO: 835784 - DNA, 120 bp, Artificial Sequence
  ENSG00000234290_18 (sequence is synthesized)
gcagataatcaacaaatacaggcatccctgaagagggtatcctgggataaaagccccagctggatcagtgctatacaggggccaactgggggtgggttccaggcagggtcatttgcaagg

SEQ ID NO: 835785 - DNA, 120 bp, Artificial Sequence
  ENSG00000234290_19 (sequence is synthesized)
gtccctctgccccttcaagtcctgccagacaggccttggccatggtttcttcctgcccctgtcccctgaccacagttgatctcccctggctgttatgaaatgtcaaagaatgtcctgcaa

SEQ ID NO: 835786 - DNA, 120 bp, Artificial Sequence
  ENSG00000234290_20 (sequence is synthesized)
tcctaaattccataatgatctttatcttctgttccctctgaggctcctcaatctgcagtaacagctgtggttcagcaagcagtgcggcactctggagtgctgttctgaaacagggccggc

SEQ ID NO: 835787 - DNA, 120 bp, Artificial Sequence
  ENSG00000234290_21 (sequence is synthesized)
gtggggcagagctcatctgctgccctatccattcactgtgctgttcggggctagagaagattcatgtgtgtatatgctttttaaaaattgtgaaacaataattatgcagaaaaatacata

SEQ ID NO: 835788 - DNA, 120 bp, Artificial Sequence
  ENSG00000234290_22 (sequence is synthesized)
gaatatatgttcagtttaacaaataatcataaagcaaatctctataaaaccactgctgctctgcagtgacccctgcttccccctaagtcgtgcataacaatagctacaatttactgacca

SEQ ID NO: 835789 - DNA, 120 bp, Artificial Sequence
  ENSG00000234290_23 (sequence is synthesized)
tgaacttcaggtcacacagcaaaggtgttctcatttaatctttggccaccagaggctgcatagactaaaatgtgaacagtgtcccctgcagttgtggagtgtggtgaccctattggatct

SEQ ID NO: 835790 - DNA, 120 bp, Artificial Sequence
  ENSG00000234290_24 (sequence is synthesized)
tctcatgccactgagggatatactgttttctgtagagaagtccagcagagtcactgtcctggggggcatccttcttgatcgcccccatgccatgaaggcccattccttgcccagggctct

SEQ ID NO: 835791 - DNA, 120 bp, Artificial Sequence
  ENSG00000234290_25 (sequence is synthesized)
agagtctgagcttctccaagagggaatggagtctttcgcagaggggctgtggagcctcgtaaggctgaatctaaccacgagcagggattttgggcagctgcatatcccagatggtttccc

SEQ ID NO: 835792 - DNA, 120 bp, Artificial Sequence
  ENSG00000234290_26 (sequence is synthesized)
agtggatcagcttcctgttgctgctctaataaactaacataaacttaggggcttaaaacaacacaaatttcttttcttatagttccgtaggtcagaagtccaaaacaggtctcactgggc

SEQ ID NO: 835793 - DNA, 120 bp, Artificial Sequence
  ENSG00000234290_27 (sequence is synthesized)
taaactgaaggtgtcagcagggctgcattccttcctgggggctctagtagagaatctctttcctttcttcccctttccagcttttagaggctgcctgcattccttggcctgcggcccctt

SEQ ID NO: 835794 - DNA, 120 bp, Artificial Sequence
  ENSG00000234290_28 (sequence is synthesized)
cctccaccttcaaagccagcactggctggccaggtctttcatatattgcaatctctctgcttctgcttctgcttctgacccttctgcctctctcttctccatttaagaatgcttgtgatt

SEQ ID NO: 835795 - DNA, 120 bp, Artificial Sequence
  ENSG00000234290_29 (sequence is synthesized)
acattgggctcacccaccccagtttctacccaataatccagggtaatctcccaaacttaaagagagaaaacaatactagcacccccaaagcacctacgtgttcccctactaatcacaacc

SEQ ID NO: 835796 - DNA, 120 bp, Artificial Sequence
  ENSG00000234290_30 (sequence is synthesized)
ccaaccctcccttctgcataagtagacatttgtaataattctgtgctttttgtagtttgacctcctctgcatgtatccttaacaatacagttttgccagctgttaaatttttgctaaaag

SEQ ID NO: 835797 - DNA, 120 bp, Artificial Sequence
  ENSG00000234296_0 (sequence is synthesized)
gcaaggaaggaccaagcgacctgagaagagcagaggtgccccatggggaccacgctgacttgtcgcatgtgcaccaaggccagccccactcagggccctcacagggcttctgcagagccg

SEQ ID NO: 835798 - DNA, 120 bp, Artificial Sequence
  ENSG00000234296_1 (sequence is synthesized)
agctcaggatgcggtgtttggagcagtcctgcagctctgcgatccacgaggtggtggtgggagtagcgccagagtccactgctttggagcctgccccgtctgattcaggagtcatgacga

SEQ ID NO: 835799 - DNA, 120 bp, Artificial Sequence
  ENSG00000234296_2 (sequence is synthesized)
ccagaagacgccaaaagaccacaaatttttagaccaagtttataaaattagggatactcctatttcttagacaatcaaaccaatgatcagaaagactagataaatcaccatagtcacaaa

SEQ ID NO: 835800 - DNA, 120 bp, Artificial Sequence
  ENSG00000274677_0 (sequence is synthesized)
acaggatagccttctgcctgagcctttgtcctgtgacagcgtcagcccccagcgtccccgccactcagccccaccaggggtccccgcctcccacactcacgtgcctcttcctggagctga

SEQ ID NO: 835801 - DNA, 120 bp, Artificial Sequence
  ENSG00000274677_1 (sequence is synthesized)
cctgttggctggggaccattctctcatgtgacagtctgtgcagggcaggctgcgtgtcctcccatccacgctccctcagcatgttccttgtgctgccggataatgggaaactgcatccac

SEQ ID NO: 835802 - DNA, 120 bp, Artificial Sequence
  ENSG00000274677_2 (sequence is synthesized)
agctccctgtgtaaatgctctcaccgaactgtggtgagatgtcatccactttgtccccagctccccgtgtaaacgctttcaccaaaccgtgatgagatgtcacgtccatggccttcatca

SEQ ID NO: 835803 - DNA, 120 bp, Artificial Sequence
  ENSG00000274677_3 (sequence is synthesized)
ccagccagctttttaatggcatttgagaaatgtccttccatcatcacagctgcagtggaggatgcctttactcggtatcccagtatgtgcatccatggtccttgggtttgatggtcagaa

SEQ ID NO: 835804 - DNA, 120 bp, Artificial Sequence
  ENSG00000274677_4 (sequence is synthesized)
aagggcttcccttcaaattgggctcctgttttctgacagaatatgagatcctattctaattttcgttttgccccaattcttaagaagcttaagcaagtacttattaaaacgttatcccaa

SEQ ID NO: 835805 - DNA, 120 bp, Artificial Sequence
  ENSG00000274670_0 (sequence is synthesized)
gagctttggagctgtgcatcaggcgccttccactgcataacctgcccatctatttaagagtgaaacccgtatcacttaccacctgtccatttcttcatggtacttatcccctgaattatt

SEQ ID NO: 835806 - DNA, 120 bp, Artificial Sequence
  ENSG00000274670_1 (sequence is synthesized)
ttatctgacctgctaggatgcaacccccttttttattttgctggcaagtatagcctagttgtctaaactgccacatagtatgtactttataaacagctgaataaaccagtaattcatcca

SEQ ID NO: 835807 - DNA, 120 bp, Artificial Sequence
  ENSG00000274678_0 (sequence is synthesized)
ggaacaggtgcctcacggacgtgcttgctcactgggcgggggaagagtgaaggtaatctcatacctgcgcaggatcttcaggaagccaaccttgaccagaaagctgctgtcgctgtcctg

SEQ ID NO: 835808 - DNA, 120 bp, Artificial Sequence
  ENSG00000274678_1 (sequence is synthesized)
cctgggtggccatgaccaccgagtcatgaagcctctcatcaaagcagacgtggctctgggagtattacaggtcgagaaaatgtgggtcgtgaccaactcagtataccactggaggctata

SEQ ID NO: 835809 - DNA, 120 bp, Artificial Sequence
  ENSG00000274678_2 (sequence is synthesized)
gagtgctgagagcagtcacgccccaagcgcagtgttccttgtgattacctataggaacatctgaagcctgttgtacaaagaaagcaattatgtgtacctgtgataaatcaagcaactgac

SEQ ID NO: 835810 - DNA, 120 bp, Artificial Sequence
  ENSG00000274678_3 (sequence is synthesized)
cctgtgataaatcaagcaactgaccaaccgttacctctccctccctgctctttctacctaataaatacgaagggctgtggaagctcagggctgcccttgttcactagaagcaaggagccc

SEQ ID NO: 835811 - DNA, 78 bp, Artificial Sequence
  ENSG00000203258_0 (sequence is synthesized)
aggcatgtgccaccacgcccaactaatttctgtatttctagtagtaacagggttttgccttggcacctcagccactct

SEQ ID NO: 835812 - DNA, 120 bp, Artificial Sequence
  ENSG00000203258_1 (sequence is synthesized)
taaccactaagacctgagtcatcatatactttaaaataagtatctacatttaaatttcctttttgaattggttattaggaaaatgtccaactccttaggcaaaacttcctactttctgtc

SEQ ID NO: 835813 - DNA, 120 bp, Artificial Sequence
  ENSG00000203258_2 (sequence is synthesized)
tacaaataaagagaaccgcactttgggaggcctaagccaccatgcctggcgcagcccaacattttttaaaaaagtgaaaacatgcatgtggtaaagacgggggaaaaataaaactgtaaa

SEQ ID NO: 835814 - DNA, 120 bp, Artificial Sequence
  ENSG00000175061_0 (sequence is synthesized)
agggcctggcgcacataaggtgtgaccttttcattcccgttgttatggagggccacatctgccagagcctggagtctgcgaaggccgggacccggttccccggcccacagtgggggtgtg

SEQ ID NO: 835815 - DNA, 120 bp, Artificial Sequence
  ENSG00000175061_1 (sequence is synthesized)
caaacccgagagaactgggtaagttggggtcggcttgcagtttggggtaccccgagggcggtgtacgtcggtaagattgtaacagtattactggaagacttattcgactgtcctgatgat

SEQ ID NO: 835816 - DNA, 120 bp, Artificial Sequence
  ENSG00000175061_2 (sequence is synthesized)
acttgtaataggaagtgccgtcagaagcgataactgacgacgtctaatgtctatctgaccgcagtcgctgaaacctctacaacttagttgaccgtaactgccagagccctgccctgaatt

SEQ ID NO: 835817 - DNA, 120 bp, Artificial Sequence
  ENSG00000175061_3 (sequence is synthesized)
cctgtccttactccctctttaagattgcgtacccactgcagagtgctgaagacggggtagccacgaggtgagaggctctctggtgtagggtttaacatggaacgtagttttgtcacttga

SEQ ID NO: 835818 - DNA, 120 bp, Artificial Sequence
  ENSG00000175061_4 (sequence is synthesized)
atgcacggaaattggcgttttgacagttttctacgtttaggtgttttatacactttagggtaacgttatcatgtcattgcatagggtggaacttaaatagaaactggagatggctgcttc

SEQ ID NO: 835819 - DNA, 120 bp, Artificial Sequence
  ENSG00000175061_5 (sequence is synthesized)
agccacagtcctaacctagaactgcatttaaagcaaactgataatgcagaaacaaactccttcgttaagaaatgtctccagtagcagggttagcttaagtttcaggtagggtctagatct

SEQ ID NO: 835820 - DNA, 120 bp, Artificial Sequence
  ENSG00000175061_6 (sequence is synthesized)
gcggttggaacagtactggagggttgtgaggtgcttgactgctctgatgaaatcactaataggaagtgccgtcagaagcgataactgacgaagactactcctgtctgattgcagtcaagt

SEQ ID NO: 835821 - DNA, 120 bp, Artificial Sequence
  ENSG00000175061_7 (sequence is synthesized)
ccacttgctggttcccaggagtaaacttgtttgaacggtgacctaattgctatattcacctaggttgcaaattcgtgaagaatcagcatcatgtttggcagctgagtattggagccagga

SEQ ID NO: 835822 - DNA, 120 bp, Artificial Sequence
  ENSG00000175061_8 (sequence is synthesized)
gcctgccatgaggttttgagaacagagtgctgttttagagctggcagcagcatctcagcccaagagaaggttatattcccagaggatgtcagtcccaaggaccagtagctgccatcagtt

SEQ ID NO: 835823 - DNA, 120 bp, Artificial Sequence
  ENSG00000175061_9 (sequence is synthesized)
tggattctgaaaactaactggcatcaacactgggtgtagaaacatgcttgccttatgtatcagaggacatgctcagcagatccaagagatatatttggcaactttttctagaaaaggcac

SEQ ID NO: 835824 - DNA, 120 bp, Artificial Sequence
  ENSG00000175061_10 (sequence is synthesized)
tttttttttttttttgagacagtcttgctgtattgcccaggctggagtgtggtggcacaatcacagctcattgcatcctcaatcacccaggcctaagcaatcctcccaccttgtagctgg

SEQ ID NO: 835825 - DNA, 120 bp, Artificial Sequence
  ENSG00000175061_11 (sequence is synthesized)
aatcacccaggcctaagcaatcctcccaccttgtagctgggactacagctcacagcacacctggctaaaattttttttttgttgagacggattctctatgttgcccaggctggtctcagg

SEQ ID NO: 835826 - DNA, 120 bp, Artificial Sequence
  ENSG00000175061_12 (sequence is synthesized)
ctcctgggctcagatggtcctcctgcctcagcttccaaaggcacaggccaagttgtagctttgtcccttgccatcatgcccaacaagaggttctataccttttaatgaattgactttcat

SEQ ID NO: 835827 - DNA, 120 bp, Artificial Sequence
  ENSG00000175061_13 (sequence is synthesized)
aaattggttatgttggtgggcaaagttctttaagctggaaattgtaaattcctcctgaaatgttttttcatgcagttaccatgaactaatactacaataaaggatggtcttgggtgtcaa

SEQ ID NO: 835828 - DNA, 120 bp, Artificial Sequence
  ENSG00000175061_14 (sequence is synthesized)
tggcagctgagtattggagccaggagcctgccatgagccgatgcagcctcagtgttcctttgccttgggggtttctgagtggtggggttgtaagcagatcctgccaggcacccagaagga

SEQ ID NO: 835829 - DNA, 120 bp, Artificial Sequence
  ENSG00000175061_15 (sequence is synthesized)
cggagtgatcggctttggagaagtaaggagacatgacgtgcctgccctggggtggggactaaacttcgtgccactccacgtgaaagggggagaaatccctggaaggcacgcaggctggac

SEQ ID NO: 835830 - DNA, 120 bp, Artificial Sequence
  ENSG00000175061_16 (sequence is synthesized)
atcatcatatattctctacagatggagacaccaaggcccacgccttctgtgctgttggaatttcaggaaggatgggggtggggcacggcctcagccctgggcatgttctgcagattgcac

SEQ ID NO: 835831 - DNA, 120 bp, Artificial Sequence
  ENSG00000175061_17 (sequence is synthesized)
tgctcttatctgccagggggtggtgagagggtggctgagctggacagatggcgggcagggacgggctctgcggtctggcagctgacattgatacaagcaaaaaaagagtctttgctgggg

SEQ ID NO: 835832 - DNA, 120 bp, Artificial Sequence
  ENSG00000175061_18 (sequence is synthesized)
tcccgttgttatggaggtaggctctctaggaatctgggagtagtagctggggggcaagagcaaataaagagctcgagcttctgtggtctctggggagatgttcccgggaagcctgtctag

SEQ ID NO: 835833 - DNA, 120 bp, Artificial Sequence
  ENSG00000175061_19 (sequence is synthesized)
agggcggagggcagctgttgagatggcgtggctccccggctcctgcgcccgcgtggctttcgcggcgggcgctgcggcccggtattggacagcctggcagggcagcgcggggccgaatcc

SEQ ID NO: 835834 - DNA, 120 bp, Artificial Sequence
  ENSG00000175061_20 (sequence is synthesized)
acccagctaaggagtggcggaggtggggcccaaacgcgcgatccagccctcgcgcaggcgccctggaactccccgcgcgtgttgtgacccagaattcccggggctgtggaagagaccata

SEQ ID NO: 835835 - DNA, 120 bp, Artificial Sequence
  ENSG00000175061_21 (sequence is synthesized)
gactcaacaggagggggagtcctgggtagcgcgccggtctaaatcgttacttggcggaaagttcccatgagtctttgccagcgtccccctccttttgtgaggattgggatattccgactc

SEQ ID NO: 835836 - DNA, 120 bp, Artificial Sequence
  ENSG00000175061_22 (sequence is synthesized)
gaccctagcttggtgccctgcacagaccaggcaatgctgacattcccatccggagactgtcctcacaccatcctggggaacatgagacatccctgggtagggaggcaaagcaggcccacc

SEQ ID NO: 835837 - DNA, 120 bp, Artificial Sequence
  ENSG00000175061_23 (sequence is synthesized)
cactgcaggctgtcctcattctgggggctcccacagctgccccagcacagcccagagaaaggctcccagcccaggtggctggggtccagtgccctggggacgggacgtctgggcagggaa

SEQ ID NO: 835838 - DNA, 120 bp, Artificial Sequence
  ENSG00000175061_24 (sequence is synthesized)
gaggagcctcttgtggggagccccttggagcccaactgccagccaggtcctacctgccgtggttagggggcactctgcccccaccctcattaacgcctcagtgaggacacaagaggccag

SEQ ID NO: 835839 - DNA, 120 bp, Artificial Sequence
  ENSG00000175061_25 (sequence is synthesized)
ttgtgagggctgttttccatatggcaggaatgaaccttggaggcgaactgccaggtcctgtgccaggctctctggctgctgaaaaaatttgctgggaaccaggacctgggggctcaaggt

SEQ ID NO: 835840 - DNA, 120 bp, Artificial Sequence
  ENSG00000175061_26 (sequence is synthesized)
ctgtcatggatgcagtcaggggaggcttctgaagcactggctggtacaggttctagagctgcacccccttgtagaagcaggcatgactccacagtttctgcaacaacagagccggggaaa

SEQ ID NO: 835841 - DNA, 120 bp, Artificial Sequence
  ENSG00000175061_27 (sequence is synthesized)
ggaggacgcagcaagcgctgaatattaaccagcaaaggtgggccctgaatccaaaacaagtgttcttacaagagacacagagaaggcagcaatgtgaaggtggaggcagagaagggagtg

SEQ ID NO: 835842 - DNA, 120 bp, Artificial Sequence
  ENSG00000175061_28 (sequence is synthesized)
atgcggccacaaccaccagaagctggaagggagaaagagtgaaatctcccctggaatctctggatggacacggccctgccgacactctcatctcagacttctggcctccaaaccatgaga

SEQ ID NO: 835843 - DNA, 120 bp, Artificial Sequence
  ENSG00000175061_29 (sequence is synthesized)
gaatatgtttcggttggtccaagtcactcagccagtggtcattggttacggcagccccaggaaatgaatgcaccagattggatcaggacagaggtggcatttttcccaggggcacaccag

SEQ ID NO: 835844 - DNA, 120 bp, Artificial Sequence
  ENSG00000175061_30 (sequence is synthesized)
gcaaaagggagaagagatcaaggcaagtggccgggacccctcccttcttccacagctgcagacctcagccaagagcacagctgtgggcaaccaaggacgttattgccagaaatcaacttg

SEQ ID NO: 835845 - DNA, 120 bp, Artificial Sequence
  ENSG00000175061_31 (sequence is synthesized)
ctgtctccaccagccctgaagcctctgtgggtacactctcctttgctgtctgctcccaggggcagggctgtactagtcagaaatgcttcctataggatccccaaggtggttctcagctca

SEQ ID NO: 835846 - DNA, 120 bp, Artificial Sequence
  ENSG00000175061_32 (sequence is synthesized)
acatgggaaagaacctttaaaaacaggtgatgaaggaaatgctgacactgtccacgacaaggatgaggcttgaagactccactaagagaaataagctcggaacgagaggacaaataccgc

SEQ ID NO: 835847 - DNA, 120 bp, Artificial Sequence
  ENSG00000175061_33 (sequence is synthesized)
atgaggccacttacgtgagggaccaagagtatctaatcattcaaagtactcaaattcacagagacagagggtaaaatggcagttgctgggactggggaagggggaattcgtgttgggtgg

SEQ ID NO: 835848 - DNA, 120 bp, Artificial Sequence
  ENSG00000175061_34 (sequence is synthesized)
ggacagggtttcagtttgaggaagatgaaagagttctggagatggaaggtggtaatggttgcacagcaatatgaatgtgcttaatgccactgaactgtgcacctaaaatggttaaaacgg

SEQ ID NO: 835849 - DNA, 120 bp, Artificial Sequence
  ENSG00000175061_35 (sequence is synthesized)
cagattgtgtagtggtgaacctatggttttctgaagatatctcttaccctgtgattgactgtcagttggtgcagaaagtgagattgaaatgtagtttctttgcaggttatattcccagag

SEQ ID NO: 835850 - DNA, 120 bp, Artificial Sequence
  ENSG00000175061_36 (sequence is synthesized)
cagcatctcagcccaagagaaggtaagccttgagctggccaatgatcccttcaaccccatagtggaatgaataaacagctgatcttgttaaaactcgcttcaaaaaaaaaagatatcaaa

SEQ ID NO: 835851 - DNA, 120 bp, Artificial Sequence
  ENSG00000175061_37 (sequence is synthesized)
gggatattccgactccttaagggcctggcgcacataaggtgtgaccttttcattcccgttgttatggaggttgcaaattcgtgaagaatcagcatcatgtttggcagctgagtattggag

SEQ ID NO: 835852 - DNA, 120 bp, Artificial Sequence
  ENSG00000175061_38 (sequence is synthesized)
acaacagagccggggaaaggaggacgcagcaagcgctgaatattaaccagcaaaggtagatgcttcaatatcgaaaccaccgggacccgcatgtgcaaagctacttaatgagggtgtaat

SEQ ID NO: 835853 - DNA, 120 bp, Artificial Sequence
  ENSG00000175061_39 (sequence is synthesized)
caaacacagtctaccagaaggaaattaattagagtccggagagcaagcaggaagcagaaccaggctgctccccctcctggctctagaacatcactggcagccactgctaagggagggaca

SEQ ID NO: 835854 - DNA, 120 bp, Artificial Sequence
  ENSG00000175061_40 (sequence is synthesized)
aggctgggggatgccaggcctcagctgggtgccagggctcctgtcctcttccccgtgacattccggcttgcctttgggggacacccaggggagggaagggaaatgtcaggtgctgttagg

SEQ ID NO: 835855 - DNA, 120 bp, Artificial Sequence
  ENSG00000175061_41 (sequence is synthesized)
gaaacacagcctgaggaagcccccagggagagaagctgggacatcccagagttaaggagctgggcacagagaagacttgcttctctaggaagacaatggtctcataagaagaaggacgga

SEQ ID NO: 835856 - DNA, 120 bp, Artificial Sequence
  ENSG00000175061_42 (sequence is synthesized)
atcataaacaacagaaatgtattctctcatagttttggagaccagaaatctgaaatcagggtgttggcagagctgcactccctctagagattctagggggagacttcattctttccccat

SEQ ID NO: 835857 - DNA, 120 bp, Artificial Sequence
  ENSG00000175061_43 (sequence is synthesized)
gtgcgacaaggaagggagggatgccaggcacagacctatgcacctaatgagagaaacagatacaggatgcagtgggatgaatggtggcccccaaaagacatgcccatgcgcttgtgccca

SEQ ID NO: 835858 - DNA, 120 bp, Artificial Sequence
  ENSG00000175061_44 (sequence is synthesized)
gaaactgtgaatgtgacctcatttggaaaaagggtcttcacacacagattaccttcaggaccctgagatgagatgatcctggtttatccaggtgggccctgaatccaaaacaagtgttct

SEQ ID NO: 835859 - DNA, 120 bp, Artificial Sequence
  ENSG00000175061_45 (sequence is synthesized)
atacaagcagaggagagacactcatcagccggcactgctgaggcaggatttctggaccacaaggaaggtggccactaagggttgccctctggccccctgtgactcttctcatcagcatgg

SEQ ID NO: 835860 - DNA, 120 bp, Artificial Sequence
  ENSG00000175061_46 (sequence is synthesized)
cccaggatgcagcatcctggcatccaaggaggtgccactaagtagctacaagatgtggggcctggcgagaggaaccacaaaagaacgcagaaaaaaaaagcaacaaaaagccagtgacaa

SEQ ID NO: 835861 - DNA, 120 bp, Artificial Sequence
  ENSG00000175061_47 (sequence is synthesized)
agctgcgtggatggcggaaggcgagcaggagtttggtgatgcagtttgaagaccgggactgagacccccccactggaggggtacgtggggtgcaaaagcagaagtggcaccagtgggctt

SEQ ID NO: 835862 - DNA, 120 bp, Artificial Sequence
  ENSG00000175061_48 (sequence is synthesized)
gactgctccagagaggggcattgctcctcagtgcagcaacaaggcgcctttagcccccttgtcgtttttggccccaaaagtgccacagttacacagggtggccctggagcaaagtgagtg

SEQ ID NO: 835863 - DNA, 120 bp, Artificial Sequence
  ENSG00000175061_49 (sequence is synthesized)
ctaatgcgctggggcatacggaaatctggtatttcacacatttgtcatgttaaggagaattaggcgtatcagagtatctaacagattggccttccaatccccatttaaaacgggtaattg

SEQ ID NO: 835864 - DNA, 120 bp, Artificial Sequence
  ENSG00000175061_50 (sequence is synthesized)
agtagctgattttaagcttatgattttaagcagaacaccggaagtggattcagccaagtttgtaagttttgaaatgtttcagagaactaatagtcatcatatttatcagcttattaaatt

SEQ ID NO: 835865 - DNA, 120 bp, Artificial Sequence
  ENSG00000175061_51 (sequence is synthesized)
tcaagaactatttaggaacccaggaaagtcctgctttttaggatgagtatttataaacttaagaacactggttatgttaaatttataaagttacatcaagatatttaaagaaatttaatt

SEQ ID NO: 835866 - DNA, 120 bp, Artificial Sequence
  ENSG00000175061_52 (sequence is synthesized)
acttaagttataaaccccctacccttgaacatcgacatttaaatggactagattcgtgaggggaataatgaaattggtatgttaaatgcttcaggaaacactaggtttaaaaatttccac

SEQ ID NO: 835867 - DNA, 120 bp, Artificial Sequence
  ENSG00000175061_53 (sequence is synthesized)
cttttcattcccgttgttatggagggccacatctgccagagcctggagtctgcgaaggccgggacccggttccccggcccacagtgggggtgtgcaaacccgagagaactgggttgcaaa

SEQ ID NO: 835868 - DNA, 120 bp, Artificial Sequence
  ENSG00000175061_54 (sequence is synthesized)
ttcgtgaagaatcagcatcatgtttggcagctgagtattggagccaggagcctgccatgaggcagaaccgggtggaactgcatgagaagcgacggaggcgccagccccagccagctccct

SEQ ID NO: 835869 - DNA, 120 bp, Artificial Sequence
  ENSG00000175061_55 (sequence is synthesized)
gtggctcctggcaccaatcaggcctcgaggcttcctcaacaccagctttccttcccctcccattgggccctgcatccctgccttctgcaacattgtgctcctgaccctggctggctccca

SEQ ID NO: 835870 - DNA, 120 bp, Artificial Sequence
  ENSG00000175061_56 (sequence is synthesized)
ctccacagctgggccccacctcagagcctttgcatcaggtagccccagagtcagagagaaggcccccgacaaagccgcagatggagctcagccccaggaaacacctttccagagcaaggc

SEQ ID NO: 835871 - DNA, 120 bp, Artificial Sequence
  ENSG00000175061_57 (sequence is synthesized)
cgcacataaggtgtgaccttttcattcccgttgttatggagggccacatctgccagagcctggagtctgcgaaggccgggacccggttccccggcccacagtgggggtgttgcaaattcg

SEQ ID NO: 835872 - DNA, 120 bp, Artificial Sequence
  ENSG00000175061_58 (sequence is synthesized)
aagtgctgggattacaggagtgagccgctgtgcctggcctcccattttctaaaagagtctaattccagtccaaagtccctccctgctccgtgtgcccattaccttcagagagccctcttc

SEQ ID NO: 835873 - DNA, 120 bp, Artificial Sequence
  ENSG00000175061_59 (sequence is synthesized)
ccctcttctggtcctggctcatggactggcctctccctaagacatgcgacaccaaagccatttctattcgcctcgccctgctggaccttttctggagagatgggaattcttggaacaggt

SEQ ID NO: 835874 - DNA, 120 bp, Artificial Sequence
  ENSG00000175061_60 (sequence is synthesized)
tcagaaagcaggccctgaagaatcctgtgaccttcatctaaagtaggtcatgagacccctgagcttaaaacggagtgatcggctttggagaaaaatccctggaaggcacgcaggctggac

SEQ ID NO: 835875 - DNA, 120 bp, Artificial Sequence
  ENSG00000175061_61 (sequence is synthesized)
cttttcattcccgttgttatggagggccacatctgccagagcctggagtctgcgaaggccgggacccggttccccggcccacagtgggggtgtgcaaacccgagagaactggtcaagtct

SEQ ID NO: 835876 - DNA, 120 bp, Artificial Sequence
  ENSG00000175061_62 (sequence is synthesized)
cttttcattcccgttgttatggagggccacatctgccagagcctggagtctgcgaaggccgggacccggttccccggcccacagtgggggtgtgcaaacccgagagaactggtgccgtca

SEQ ID NO: 835877 - DNA, 62 bp, Artificial Sequence
  ENSG00000231113_0 (sequence is synthesized)
cttggccaggatagttttgggagccactgcgcctggcctaaccaccaccaagattcctaaaa

SEQ ID NO: 835878 - DNA, 120 bp, Artificial Sequence
  ENSG00000231113_1 (sequence is synthesized)
gccactgcgcctggcctaaccaccaccaagattcctaaaaggcgaataggaagcagctgtggcttattggaaggaaagaatggcagcaagtcctgggggagctgtgcccgcaccagatct

SEQ ID NO: 835879 - DNA, 120 bp, Artificial Sequence
  ENSG00000231113_2 (sequence is synthesized)
ccaggtcctgggaaaatgatactgtcttggtccagcctccacctctgcatctccaggactgatgttccccctgttaaaggagctggatctccctttgtcacccaggctggagtgcagtgg

SEQ ID NO: 835880 - DNA, 120 bp, Artificial Sequence
  ENSG00000231113_3 (sequence is synthesized)
atcatgactcactgcaggcctcaacctctcaggctcaagtgatcctcctgaatagttgggaccatagaaacacaaacagcagaatggctccatctctgttgaagacttccatcaactaga

SEQ ID NO: 835881 - DNA, 120 bp, Artificial Sequence
  ENSG00000231113_4 (sequence is synthesized)
tgttgaagacttccatcaactagaaccacgagggctgatggacagaccacaaggccagtttgttccagttcaatgattaaaagaaccacagatgaccaggcacggtggctcacgcctgta

SEQ ID NO: 835882 - DNA, 120 bp, Artificial Sequence
  ENSG00000231113_5 (sequence is synthesized)
taaagtgtgaaatggtaaaaataacctctctttttttttaagttttctatttgtataaatgtatagggcaaaagtatcgttttgttacatgcatagagtgtgtagtggtgaattcagggc

SEQ ID NO: 835883 - DNA, 120 bp, Artificial Sequence
  ENSG00000231113_6 (sequence is synthesized)
cacatcagtggagtactcactgataacactacgcttaatagtaatgttgccattattagtgttacgacccactgatatagagacctatttgacaactaacaggactttcttaaaagtcca

SEQ ID NO: 835884 - DNA, 120 bp, Artificial Sequence
  ENSG00000231113_7 (sequence is synthesized)
aaaaaggatctgctttgataattctgctaggagatccaagtgggtgggtggatctgctagcaccactcctcaagtgtttcaatgttcagtctggggtagatccaattagcagagaagaat

SEQ ID NO: 835885 - DNA, 120 bp, Artificial Sequence
  ENSG00000231113_8 (sequence is synthesized)
ttttatgcaatggcttggactagagtttggaatttggcagtcatcactggaaaaatgaatttctgcctgttctgaatcaaaacaaaacaagccatgtgcagtacacacctgtagtcccag

SEQ ID NO: 835886 - DNA, 120 bp, Artificial Sequence
  ENSG00000231113_9 (sequence is synthesized)
ctacttgggaagtgacttgagaggatcacttgagcccaggagttccagtccagcctgagcaacacagtgagaccctcatctctaaaaagcaaataaaaataaaaaacaccaaaacaacca

SEQ ID NO: 835887 - DNA, 120 bp, Artificial Sequence
  ENSG00000231110_0 (sequence is synthesized)
cataaggaggtcaggagcatggggtagaccattgggaggcttaaatatggctaaggagacccacacaccagtgaagcctaaagaaaatatgaaacaaccaattctaagcacgaaaaagcc

SEQ ID NO: 835888 - DNA, 120 bp, Artificial Sequence
  ENSG00000231110_1 (sequence is synthesized)
taccccaagaaccaaagagaagaaggaaaagaagaactcttctcaacaaaagaccaacaaaaatggcaaggtggagaagaaaatcataaaggtaaaaaaaccccttcaaaggaattcaag

SEQ ID NO: 835889 - DNA, 120 bp, Artificial Sequence
  ENSG00000231110_2 (sequence is synthesized)
aaatcagaagagcaagcacaaaagacaacagaaaatgaaaatcagaagagcaagcccagaagccgctggcaaaagcaaaccatcccaagtaaccatctctgctgccagtaaatgcagagc

SEQ ID NO: 835890 - DNA, 120 bp, Artificial Sequence
  ENSG00000231110_3 (sequence is synthesized)
ctggatcagaaacgtacaactagcaacagcaactctggggaatcaccaatcacataaaggccaaagctgagcccaacagtgttccacccatgctgatgaatgcaataaaatcagcacaat

SEQ ID NO: 835891 - DNA, 120 bp, Artificial Sequence
  ENSG00000231119_0 (sequence is synthesized)
taacagcctgagtggataacgtcatttactgttacaggtctgagcattggcctcagaactcctctggtgctgggagtgaggagtttcaaggtgactgctttttagctccaggggagaaag

SEQ ID NO: 835892 - DNA, 120 bp, Artificial Sequence
  ENSG00000231119_1 (sequence is synthesized)
gagggcacagtgcccaaggccatgccagggcaaggacgggccactggcccccgccggccgagtcaaccagaggcaaagccagattgagggttcccaggctgacaaatgtctgctgcctct

SEQ ID NO: 835893 - DNA, 120 bp, Artificial Sequence
  ENSG00000231119_2 (sequence is synthesized)
gccacaggagagagaaggggaaagagggcaaaagaaacaaagacatcacgcgttgcaagtggctggacttttaaaaacctacctttgcctccagggttttctaggttactgtcaccccac

SEQ ID NO: 835894 - DNA, 120 bp, Artificial Sequence
  ENSG00000231119_3 (sequence is synthesized)
ttcctaaaaagtgtctcccccctcatcctatttaagacctgatgcagtctccccactggttctcccagggaaagaaaaggggaaatgttttgttgaaaataaaagggatgacaagaaaga

SEQ ID NO: 835895 - DNA, 120 bp, Artificial Sequence
  ENSG00000231119_4 (sequence is synthesized)
aaggaaaaaaagctattgttttcatccctaatttataatccaagaggcccccaattgtttctttctgactcaaatctttgagctgttaattataaaagtaactggacttggcgccaacgg

SEQ ID NO: 835896 - DNA, 120 bp, Artificial Sequence
  ENSG00000231119_5 (sequence is synthesized)
gctaactatgatcaggctcagcaattagaaaaactctgtagaaagtttactgagtgattatatataattaattcctagttacagactgaacactgaccattttctggagctaataaaagc

SEQ ID NO: 835897 - DNA, 120 bp, Artificial Sequence
  ENSG00000231119_6 (sequence is synthesized)
agttactccccctcccccacgtgaatgccacttaatttcccaaagcagaaagtgaatccatcctggagggtcttgaaggaaaaaaaaggagaggaatcaaaagcttcagtgtgtctgtgt

SEQ ID NO: 835898 - DNA, 120 bp, Artificial Sequence
  ENSG00000231119_7 (sequence is synthesized)
gcagctgtgtatcctctttggggactgaggaggcagaaggaaaaaggaaaacagcccaacattctgttcctccttctgcaatttacaaacgtggcagagagaacattctaccttgatgag

SEQ ID NO: 835899 - DNA, 120 bp, Artificial Sequence
  ENSG00000231119_8 (sequence is synthesized)
aaaaagaaggggggttggggggaagcagggaagggagatgacctaggaatggaaggtaggagacgcttctgcttggcagatctgcttttcctaaaaggaacaaagatggtagaaatttcc

SEQ ID NO: 835900 - DNA, 120 bp, Artificial Sequence
  ENSG00000231119_9 (sequence is synthesized)
agaaggcccgttcttagttcggccactgcaattgtcaatctttaacctttcctccaagtctattggtttaaaagctagagtagaagaaccccattgggctgctctgggagccagtactgc

SEQ ID NO: 835901 - DNA, 120 bp, Artificial Sequence
  ENSG00000231119_10 (sequence is synthesized)
cgtccctacctagtcctgctgcaatgcagacatttatttttttccccctttcctgaaactggaaaataatgctactttgaaagcaattaactttttacagactcatgcttggtaggggtc

SEQ ID NO: 835902 - DNA, 120 bp, Artificial Sequence
  ENSG00000231119_11 (sequence is synthesized)
acagtaccagaggaaaagtggctagcttggtccagggttgggaacttgctgggggctgtacatttgaaaacagatcttggctctccaaacctgtgggagccattttaatgcaagctttta

SEQ ID NO: 835903 - DNA, 120 bp, Artificial Sequence
  ENSG00000231119_12 (sequence is synthesized)
gaggacaaatgccttgcccttaagttcccttccagcccaacaaacacagtattatgcaaacgttgaaggcaccaaaccaggagtcttatgattagatattgcttctagggaggccacaag

SEQ ID NO: 835904 - DNA, 120 bp, Artificial Sequence
  ENSG00000231119_13 (sequence is synthesized)
aacctcgatatgtaatttccatttacagcaaggagataagaacaaagaaaatagctgagtgtctgaacttacttgtttggggcagtggcactgttcagttttaagtatataacatcatta

SEQ ID NO: 835905 - DNA, 120 bp, Artificial Sequence
  ENSG00000231119_14 (sequence is synthesized)
actgcctgcagttttactctaagaagctaagctggcctgccttgcacagacttttctcaacttagaatgtggtacgtttctgctgattaaatgagcctttttccaattcggtgtcagaaa

SEQ ID NO: 835906 - DNA, 120 bp, Artificial Sequence
  ENSG00000287569_0 (sequence is synthesized)
gcagattctttcgctgtgcccaattagctgctgccgcgccttggagtccggagtaacttggccaggctggccccgagcggaactggagaaagctgagggtgaggaatccggctccggtcc

SEQ ID NO: 835907 - DNA, 120 bp, Artificial Sequence
  ENSG00000287569_1 (sequence is synthesized)
ttttgtgtgtggagggctgaggagaggagtttgcgtgtgtgattgccatggttgccgtgggtcttcgtggtctgtgactgtggctgcgtggtgctgactctgggtgatcaagtgggcgct

SEQ ID NO: 835908 - DNA, 120 bp, Artificial Sequence
  ENSG00000287569_2 (sequence is synthesized)
tgtgactgtgcgcgctcggagtggatgtgtgtgtcctggacgagccgcgttgtgtgtgcggatgtggacaaccggtgactgtgtggttggggctgcgtgtcccagggtggatgtgtgact

SEQ ID NO: 835909 - DNA, 120 bp, Artificial Sequence
  ENSG00000287569_3 (sequence is synthesized)
ttgcgtgtgtgtgcagtactgtgtgtgcgtgagttgcaggtctgtggctgtgcaggtgcaacttgtgtggccccgtggtctgtgtgagagaggagagtgtgactggctgtgaggcagagg

SEQ ID NO: 835910 - DNA, 120 bp, Artificial Sequence
  ENSG00000287569_4 (sequence is synthesized)
gtaagtggatatagggaggcatgtgtgtgattggaactttgtgtgtccccttgagagaaaaaaacctttagggagttagagcgggtccttggtaaaactcctttaaacagagaaacagcc

SEQ ID NO: 835911 - DNA, 120 bp, Artificial Sequence
  ENSG00000287569_5 (sequence is synthesized)
agaaaaatcaggctgcaggcacagagaaggaaaactagcaaagggggttgtcctaaagacattcctcagctgcactgataagggaccgaggcccaacatagaaatgcctttgtcctttgt

SEQ ID NO: 835912 - DNA, 120 bp, Artificial Sequence
  ENSG00000287569_6 (sequence is synthesized)
cttccaggaaatagtcgcttttttgtgggcatgtatacagtgggctctgttagattttgaagggaaggcgaaggttaaagaaagagagttggcggctctatggaggggaccaactaaatg

SEQ ID NO: 835913 - DNA, 120 bp, Artificial Sequence
  ENSG00000287569_7 (sequence is synthesized)
ccagagcccactgccgcttacaagctggagtaattataggcctgggcaggaggggtctgggcagtatagcttgttgcctgggagaatgttggtaaggatgtttcttgggcctttccccag

SEQ ID NO: 835914 - DNA, 120 bp, Artificial Sequence
  ENSG00000287569_8 (sequence is synthesized)
caggatgtgataaggaagtcaggcggttggggaggatgtttctcgcagcccaaaccccagtggaatgtttccctctgaacagggtctgtgaaatggtgggggcttacaaatcggtgcagc

SEQ ID NO: 835915 - DNA, 120 bp, Artificial Sequence
  ENSG00000287569_9 (sequence is synthesized)
ttggactaacaggctccggcggccactttgttttctggacatgctttggactgtgagccgagcctctatgaatcatcacttcagcctctgattggtcctgggccaaactttcacttcagc

SEQ ID NO: 835916 - DNA, 120 bp, Artificial Sequence
  ENSG00000287569_10 (sequence is synthesized)
ccctgattggtcttgggccaaaatttcacttcagcctctgattggtcccaggctaaggtcccgggccaagcgaagtcgtgctatctccaagacagctcacagaccagtgagcacattctt

SEQ ID NO: 835917 - DNA, 120 bp, Artificial Sequence
  ENSG00000287569_11 (sequence is synthesized)
cctcttcccagttcacaaaacccccagattcagcctcctagttggcaaccctctttcgggtcccctctctgctggggagagctttcttcttttgcttattaaacttctgttccaaactca

SEQ ID NO: 835918 - DNA, 120 bp, Artificial Sequence
  ENSG00000263412_0 (sequence is synthesized)
gcgccttcgcggcgggcgatgttagtgggcttgggcgttgggtgaagtatccaggttgggcgcttccagcgctttctgtggcgggggaatgaaggcctaggtcagggaataggaaggtgt

SEQ ID NO: 835919 - DNA, 120 bp, Artificial Sequence
  ENSG00000263412_1 (sequence is synthesized)
atcgccgccagagtgcggaacaccctcgccttgagggttcccacagtgacttgcaaaagtctagtgagacccgagaatgctgaggcgggacacgaagcatgtggttcttgtggttgcgac

SEQ ID NO: 835920 - DNA, 120 bp, Artificial Sequence
  ENSG00000263412_2 (sequence is synthesized)
gcgaacctggagaagccaccccagctgtgagggacggttgcgcctcatggcccaggcaagggtaccttcgctggagcagtaccgcggacggatatcatgagggtggtgggacgttggcgg

SEQ ID NO: 835921 - DNA, 120 bp, Artificial Sequence
  ENSG00000263412_3 (sequence is synthesized)
aacgttggcggaacgttggcggtgtgagaggctggactggaactcctggactcaagcgatctttccatttatcagggactactgacgcgtgtctcccaataaatacctgagtataaacaa

SEQ ID NO: 835922 - DNA, 120 bp, Artificial Sequence
  ENSG00000263412_4 (sequence is synthesized)
cgtttggcctcccacgcagcttagtcttgcttttttagggatgtttctcattttttaatttctccagtcccatctggttatattgccaaaacatgtttgtgactctcaaacgttagttta

SEQ ID NO: 835923 - DNA, 120 bp, Artificial Sequence
  ENSG00000263412_5 (sequence is synthesized)
ctcccagcatcacttggggagcttgctaagctacgaattccgaggtcccactggagagtctgatttaatgaccctggagtggcggccggataacctgcctgctggggtgattttaacgca

SEQ ID NO: 835924 - DNA, 120 bp, Artificial Sequence
  ENSG00000263412_6 (sequence is synthesized)
gctgatgcgaagaccccatttagggaatcattgggttggcgtttgcaatgcgttcctcccagctataggacaaagaggtgtcaactcaactgtgtcttcttagaagagcccattatttat

SEQ ID NO: 835925 - DNA, 120 bp, Artificial Sequence
  ENSG00000263412_7 (sequence is synthesized)
aggtgagtcattagtccctgtacaactaaggacaaggccaactgataactcagtaaataatcgagtccattttgtgcttgcgagttaggggcttaatttggggtggtttgcagattaagt

SEQ ID NO: 835926 - DNA, 120 bp, Artificial Sequence
  ENSG00000263412_8 (sequence is synthesized)
actttcactgcatataataaacgtacaccagcaaaccactcatggaattcttaaaaaaacttctgagctagtttaccagtttcaaagactaattcagagagcatgttttacctattctag

SEQ ID NO: 835927 - DNA, 120 bp, Artificial Sequence
  ENSG00000263412_9 (sequence is synthesized)
gctggactggaactcctggactcaagcgatctttccatttatcagggactactgacgcgtgtctcccaataaatacctgagtataaacaacatgaggactagaattttgtgcgttaactg

SEQ ID NO: 835928 - DNA, 120 bp, Artificial Sequence
  ENSG00000263412_10 (sequence is synthesized)
ttataacttagtagacactcaaatactgagtacttgaagggggactcaagcaggcaggcctctgattttcctgttaaaagcagaaattaaccacaccttggaggatgtacagttttgaag

SEQ ID NO: 835929 - DNA, 120 bp, Artificial Sequence
  ENSG00000263412_11 (sequence is synthesized)
gatatggcatgttaacaataaaataggagaccattcagtccccgaagtagtgagacaatgaagataaagactggtattgtataagaaaggaggaatatttaggtgtggccatcaactcta

SEQ ID NO: 835930 - DNA, 90 bp, Artificial Sequence
  ENSG00000263412_12 (sequence is synthesized)
accccagcctgggcagcatagtgagacccccgtcgctacaaaaaaacaagctgggcttggtgccacacatctatagtcccaactactcag

SEQ ID NO: 835931 - DNA, 84 bp, Artificial Sequence
  ENSG00000263412_13 (sequence is synthesized)
gggcagcatagtgagacccccgtcgctacaaaaaaacaagctgggcttggtgccacacatctattcttgagctgggagattgag

SEQ ID NO: 835932 - DNA, 120 bp, Artificial Sequence
  ENSG00000263412_14 (sequence is synthesized)
agatgcttcctcaacaaaacaaaacataaaattgagagatataaaggctcaactacagtgtttaactacaagacaattttgagaaggtgaaaagagcatactaaagttggtctttttttg

SEQ ID NO: 835933 - DNA, 120 bp, Artificial Sequence
  ENSG00000263412_15 (sequence is synthesized)
acagaaaaatacagaacaattttcagtcctaacagttcaaactaaaactggacaatcgtttatctgtggagtttcctgcttagccatttcacaaaggtgggcagaaaaagggaaagagtt

SEQ ID NO: 835934 - DNA, 120 bp, Artificial Sequence
  ENSG00000263412_16 (sequence is synthesized)
gcaagggccgaagagagtaaaggtgtagagacaaactcagtcgcaacagcaggcctaggcctggcagggtgtgggcgcccaggatatttgatgctccatggaagggagtggagacagaaa

SEQ ID NO: 835935 - DNA, 120 bp, Artificial Sequence
  ENSG00000263412_17 (sequence is synthesized)
gactgtcttccattctgtctagagttccagatcaagtctgagcaggtgcaagctttcccagaacctgctgattaaccttgtaaaacccagggtgtgtccttcttcacccaggaagccacc

SEQ ID NO: 835936 - DNA, 120 bp, Artificial Sequence
  ENSG00000263412_18 (sequence is synthesized)
ccctcctttcccccaacactctccccctccctttgcctgggacagctgttaataggacagttacccaagaagcaaaagaaggatcccatgctgatgtgtcatcagtcccggtatatccat

SEQ ID NO: 835937 - DNA, 120 bp, Artificial Sequence
  ENSG00000263412_19 (sequence is synthesized)
taaatcagactgagaagaccactggaaaaagtgagcgcatgcatgtggctccctaagggaaaggctggcagccattgtaaaactaggccttgcccctgcgactccaggctgggcaggaga

SEQ ID NO: 835938 - DNA, 120 bp, Artificial Sequence
  ENSG00000263412_20 (sequence is synthesized)
gagaagaaggcagtggaagccgagaagagggttaggtctaaagcacacggatttggggccagctaactataaaacatacacggaaatccccacccccaccccaggaatagcagtgtagtg

SEQ ID NO: 835939 - DNA, 120 bp, Artificial Sequence
  ENSG00000263412_21 (sequence is synthesized)
tctaccgacccagcttccctggtaggaaaagctgctgctgccgccaacagccacatccatcctgcagtcatccctggaggatgacacatgccaggaatcctcagagaaggggctgtggga

SEQ ID NO: 835940 - DNA, 120 bp, Artificial Sequence
  ENSG00000263412_22 (sequence is synthesized)
gggcaggctggctggggctctgatttcttctggaacagtgaaattgctttttccctaaaagggaaacccaggctttctgccattctggttgtccattatctttcctctaaaaatgtctct

SEQ ID NO: 835941 - DNA, 77 bp, Artificial Sequence
  ENSG00000263412_23 (sequence is synthesized)
tatctttcctctaaaaatgtctcgagaggcccaggtgggcagatcacttgagccaggagtttgagaccagcctggcc

SEQ ID NO: 835942 - DNA, 120 bp, Artificial Sequence
  ENSG00000263417_0 (sequence is synthesized)
ggaaaacagctacggagggaaggatgagaagcaatgcaaagtgacatataccatcctggccacagcttcccaagttgggtcctttgctgggtgcactcatgtggccatgagggacatctc

SEQ ID NO: 835943 - DNA, 120 bp, Artificial Sequence
  ENSG00000263417_1 (sequence is synthesized)
aggggaggagtcaccacctgccatttgcatggaagtgtttttgttcctctggtttattgctcctatttatgcatgcgtgtgcaggatcttcaaaatccaggtaagaaacacagtgaagaa

SEQ ID NO: 835944 - DNA, 120 bp, Artificial Sequence
  ENSG00000263417_2 (sequence is synthesized)
ctcatctactgcaagcttggccccatccatcagtaccagtgaagagagacaaatcaggatagaaagacatcactaccatctctatggtcagtgatattatggactaatgaataaaaataa

SEQ ID NO: 835945 - DNA, 120 bp, Artificial Sequence
  ENSG00000272988_0 (sequence is synthesized)
cagtcagtgacaccaacagaggctgcgctcagtggggcaacctctcctcctccgcagccccagcctcctccctgactctgccaggcagctagctccagccaggtcctccaacactcccct

SEQ ID NO: 835946 - DNA, 120 bp, Artificial Sequence
  ENSG00000272988_1 (sequence is synthesized)
tgtcctggagggccagcctggggcctggcaacgcccagctgttcaacatgaagttgccccaggacccccaggatcaccctggaggggcccccatcaggagacgcaagacccctgggccag

SEQ ID NO: 835947 - DNA, 120 bp, Artificial Sequence
  ENSG00000272988_2 (sequence is synthesized)
ggctgagagggcctgttcacttgctgagctgctgatgggcaggtgacggcctatcctgcagcagttagagggcagctagggagacgtgggctcctacctttctctccctgcaccccttct

SEQ ID NO: 835948 - DNA, 120 bp, Artificial Sequence
  ENSG00000272988_3 (sequence is synthesized)
ggactccactgaacttggatctctttggttttgttccttgtcctctccctctgctcacacactgggctccaaggagcccgttcaaccccagattcttggattcagaatcctgggatcatc

SEQ ID NO: 835949 - DNA, 120 bp, Artificial Sequence
  ENSG00000272988_4 (sequence is synthesized)
aaatcccagagatgtcaaagctcatttggtctgccccttccttagagctacaccatccggccttgacccttggagatgggatgtccacttggctgggtttattgcacccttgctgtatgc

SEQ ID NO: 835950 - DNA, 120 bp, Artificial Sequence
  ENSG00000272988_5 (sequence is synthesized)
aaggctctttgcttatcaggcttggagaaattgagttaggtggtgcaaaagaggatacagagggaaatagtgcccggcctgccttaggaagcccacagtccaataaaaaagacacaagaa

SEQ ID NO: 835951 - DNA, 120 bp, Artificial Sequence
  ENSG00000287563_0 (sequence is synthesized)
aggagacctcctccaagttgggggaggcgccccacacagtcctgacatcaagggctttcctcagaaacaccccagctgggggctttcttttgactcacagcactttcagccaggatgttc

SEQ ID NO: 835952 - DNA, 120 bp, Artificial Sequence
  ENSG00000287563_1 (sequence is synthesized)
atgagcctggggtccattgtttgtgaagtcaactggattccaagtttaaacatgcagaggaaaggaggagttcctcaagcacctctgaactccagcagctctggaatattcccatttcaa

SEQ ID NO: 835953 - DNA, 120 bp, Artificial Sequence
  ENSG00000287563_2 (sequence is synthesized)
cattcccacctgcgctccgtcctccctcctgcctcttccatcataggggatgagatgtgtccttttcaaagggtgtgaggaacaactgttatgcacagaactaaggttagaaaacacctt

SEQ ID NO: 835954 - DNA, 120 bp, Artificial Sequence
  ENSG00000287563_3 (sequence is synthesized)
gtaagtcaactgattaacaagcacatggtctggagatcagaagtccaaaaaatgggtctcactgagctacaatcaaggtgtcaacaggctgtgtcctttcctggaggctctgggagagaa

SEQ ID NO: 835955 - DNA, 120 bp, Artificial Sequence
  ENSG00000287563_4 (sequence is synthesized)
tcggtatccttgctcttttcccacttcgagaggctgccacattccttggctggtggctccttcctccatcttcaaagccagcgacagatggtgaatggagtcctttcacgtggctcactc

SEQ ID NO: 835956 - DNA, 120 bp, Artificial Sequence
  ENSG00000287563_5 (sequence is synthesized)
cccttcctccactcttgtcattaccttgggcccatctgaaaatcctggatcgtccccctaattaaagtcagtggactagcaactttaattccatctgcaaccttagttcccttctgtcat

SEQ ID NO: 835957 - DNA, 120 bp, Artificial Sequence
  ENSG00000287563_6 (sequence is synthesized)
gtagcctaacctcatcacgagtgtcagggatttgcacgtggacatcctcagggaccccatcgtgagtggttggggggatgtggccagaaagaaggcagtggcagaatgcccaagaactct

SEQ ID NO: 835958 - DNA, 120 bp, Artificial Sequence
  ENSG00000287563_7 (sequence is synthesized)
gcagctgcgctgaggcatctgagagccaaggaggaaaccttctttgtggttaagtaagaatgaactaatatccatctggcatttggcattttacactgcactttttgtacattatctcat

SEQ ID NO: 835959 - DNA, 120 bp, Artificial Sequence
  ENSG00000287563_8 (sequence is synthesized)
tggatcttaaaaacagctcattgtgagatgtgttaatattattcttattttaaggtggggaaaccgaaatcaaacaatgtaggtgacttttttcaagatcacccagtgagtgattcagga

SEQ ID NO: 835960 - DNA, 120 bp, Artificial Sequence
  ENSG00000287563_9 (sequence is synthesized)
cttggcccaggctttctggtctacactcacagcctttccttcatccacagaggcaagatctagcaattgaattaggttgcctgaataccaacctttgtaacctcctattgttggcttatt

SEQ ID NO: 835961 - DNA, 120 bp, Artificial Sequence
  ENSG00000261924_0 (sequence is synthesized)
atgggctgcctggccctgtcttggggacatgaagcctggtttgccaagtgggaaccgagggacatgtgctccaagagacacatccagggactgcaatcaatttccaaagggccttttctc

SEQ ID NO: 835962 - DNA, 120 bp, Artificial Sequence
  ENSG00000261924_1 (sequence is synthesized)
ctttcagcgatgctgttaagaaaggcaatgaatcatgtgccacaagaatcttgagagaacccacgagcttgggagctggtgacagacccccattcggagcgctctctgcacagctacaca

SEQ ID NO: 835963 - DNA, 120 bp, Artificial Sequence
  ENSG00000261924_2 (sequence is synthesized)
gcgaccccgcccccgcctgcccatcaggacggctctgcagctgcaaagggcgagtgcttggttcccaaggcagggcccagctccatggttctcctcgcctcactctcctccgtgagcctc

SEQ ID NO: 835964 - DNA, 120 bp, Artificial Sequence
  ENSG00000261924_3 (sequence is synthesized)
agggacccggtggccacagcaccctcagttctccccagagttgctgttcccacctctggctgtgaggagcccgcctggcacagctgcgtgagtgccgggcgtccttgcctgaaacaaact

SEQ ID NO: 835965 - DNA, 120 bp, Artificial Sequence
  ENSG00000261924_4 (sequence is synthesized)
gcaattcagcgcaggattccaggattccatggcaacgtgccctgtgttccggccccggctggggcttgggagcagctgctgtgtcatgggggatccacttgtttaccgacagccccaagg

SEQ ID NO: 835966 - DNA, 120 bp, Artificial Sequence
  ENSG00000261924_5 (sequence is synthesized)
acccggacatggtgccagcttcccatgccttggccctgagatctgggaggcccatcgcggccggtgcttcccccaaccccactgagcatctccttcccgccctgtgtccacccacctcct

SEQ ID NO: 835967 - DNA, 120 bp, Artificial Sequence
  ENSG00000261924_6 (sequence is synthesized)
gcccaagacccctgagtgttcgtgggctctacctggtgggatgctctttggcttgtagacaggggttggttggcagcatagtgttccctatcgatgtccacatcctagtgggagcctgtg

SEQ ID NO: 835968 - DNA, 120 bp, Artificial Sequence
  ENSG00000261924_7 (sequence is synthesized)
actacctggctcgggggatccaggttgcagatgaaataaggttggatcagctgactttaaactagggtggtgaccctggagcatcccggggggcccagtgtaatcacaaggtccttaaaa

SEQ ID NO: 835969 - DNA, 120 bp, Artificial Sequence
  ENSG00000261924_8 (sequence is synthesized)
gtggaggaggggccagcgtggggctcacgcctgcaatcccagagctttgggaagccgaggcagcaggatcccctgaatccaggagttcgaagccagcctgggcaacaaagtgagaccgag

SEQ ID NO: 835970 - DNA, 120 bp, Artificial Sequence
  ENSG00000261924_9 (sequence is synthesized)
acaaagtgagaccgagtcttcaaagccagcctgagccacatagtgagactgagtcctgtctctacaaaaagtaaacaaaaatcagccgagtgtagtggtgcacgcctgtggtcccagcta

SEQ ID NO: 835971 - DNA, 84 bp, Artificial Sequence
  ENSG00000261924_10 (sequence is synthesized)
tgatcacaccaaaaaaaaaaaaaaaaagtggaggagggaggcaggcgagccgggctcagtgaggagggcccaggctgcagtggg

SEQ ID NO: 835972 - DNA, 120 bp, Artificial Sequence
  ENSG00000261924_11 (sequence is synthesized)
gcgagccgggctcagtgaggagggcccaggctgcagtgggtgccagaatctatcctggaaaaaggaatgacatgaacacgagggaagccccgaagggccattcagtgcagcactgagtga

SEQ ID NO: 835973 - DNA, 120 bp, Artificial Sequence
  ENSG00000261924_12 (sequence is synthesized)
gaggggacgtcctcaaggagccacgagccctggtgatgaggccgtggtgggtgggggcccagcgggtagcaggcgccccctctgtgtgcgcagcggggctggttgctccacatatcgccc

SEQ ID NO: 835974 - DNA, 120 bp, Artificial Sequence
  ENSG00000261924_13 (sequence is synthesized)
tcccgagctgccactcctgcaggcctgctctagggcggggcggggcttgcacaagcagcacctgtaggtcccgagtgcgtggctcccccagccccaacacaccccccagcccaagtggtg

SEQ ID NO: 835975 - DNA, 120 bp, Artificial Sequence
  ENSG00000261924_14 (sequence is synthesized)
gagtaaaggtctccgcacatggccttggggtggggttaggaccccagtccctgccaccacccaacaggcagggctttgggcaagctactcagtgcccgagacccaatttctggtcggcag

SEQ ID NO: 835976 - DNA, 120 bp, Artificial Sequence
  ENSG00000261924_15 (sequence is synthesized)
gtgagaggggccggggggacaagagcctgttcccaagctctccagaagtcaggcccctgaggtggtgcagtgtggctgacatgaccatccccacggacccttgcctcccactcgccccgc

SEQ ID NO: 835977 - DNA, 120 bp, Artificial Sequence
  ENSG00000261924_16 (sequence is synthesized)
aggaccatgcccaggcccgttgcctctgctgtggcttccacaacattccccctggctcccaatccctgcacggaccttgctgcttgggaaaaacctcaagggacaggccatgacctgcag

SEQ ID NO: 835978 - DNA, 120 bp, Artificial Sequence
  ENSG00000261924_17 (sequence is synthesized)
caagggacaggccatgacctgcagagcagagtgtgatctggaaacgggagcctttcaagaattggccagacggggacaggcgtggtggctcacgctgggaggctgaggcaggtggatcac

SEQ ID NO: 835979 - DNA, 120 bp, Artificial Sequence
  ENSG00000261924_18 (sequence is synthesized)
tgcactccagcctgggtgacagcgtgcgattccatctcaaaacaaaaagcaaacccaaaaagagttggccagagggatgtgcagatgtgattagggctaaggacccacacagcccgaggt

SEQ ID NO: 835980 - DNA, 120 bp, Artificial Sequence
  ENSG00000261924_19 (sequence is synthesized)
atgtgattagggctaaggacccacacagcccgaggtgggtacggcccctaggcctggaaacacttctggcctgcatgagaagtggtgacggtgggcgtgggtcagaggccctgaactgga

SEQ ID NO: 835981 - DNA, 120 bp, Artificial Sequence
  ENSG00000261924_20 (sequence is synthesized)
ggaaggggccacgagccaaggagagtgggggcctccagaagtggggaggagcggggaagcggcttctcccccaggaactctgacgtggcccagatttcaatgcagacttgaatggggcct

SEQ ID NO: 835982 - DNA, 120 bp, Artificial Sequence
  ENSG00000261924_21 (sequence is synthesized)
ctaaccgtgagaggataaccgtcattttaaagagaaagacacgtgtctggcctacgtcacaagatggctcttgccacacagtacgctccctgatgtggggtctgcgccacagggctgggg

SEQ ID NO: 835983 - DNA, 120 bp, Artificial Sequence
  ENSG00000261924_22 (sequence is synthesized)
gcactgcctgggagaaaaggaccgagacctttgcacactcgacgtgccaggccccctgtggccacagtgcctgcctggagagcacccgggacgcagagctgctggtggccctggggacag

SEQ ID NO: 835984 - DNA, 120 bp, Artificial Sequence
  ENSG00000261924_23 (sequence is synthesized)
caggggggacccgggcaacgtccccccaccccccagagctctgctctgaccgatgcccccctgaggtggggtgggcagtttccttaaagacacagccgccagccgcggagtctgcgcgtg

SEQ ID NO: 835985 - DNA, 120 bp, Artificial Sequence
  ENSG00000261924_24 (sequence is synthesized)
ttgtttactgttggtcactctctgctcttagcttcacattaccatttcgtgttttgtcaaagtccgtctcaattcgcgtttggtaaaataaatagataatgagcctctaggccggcgctc

SEQ ID NO: 835986 - DNA, 120 bp, Artificial Sequence
  ENSG00000261924_25 (sequence is synthesized)
acagcaccctcagttctccccagagttgctgttcccacctctggctgtgaggtaggtggcatggcagagggggctggcctgggatgtgggatcctgctgtgagcggcaccagtggggttt

SEQ ID NO: 835987 - DNA, 120 bp, Artificial Sequence
  ENSG00000261924_26 (sequence is synthesized)
gtcatgctgacactgatgacagaggtgaactcatggtcccccggccctggggagcagagacccccttccaggcagcagggcagggtaggtgcatccagcaccctccatggtcgcagccct

SEQ ID NO: 835988 - DNA, 120 bp, Artificial Sequence
  ENSG00000261924_27 (sequence is synthesized)
ccaccaggtggcaggtcacgccatgccttctctgtcctcacagtggtgtggcggggctgggtgtgtaactctcgtcctgtgttccgtggacactgtgcctgggtcacacaacagcggatg

SEQ ID NO: 835989 - DNA, 120 bp, Artificial Sequence
  ENSG00000261924_28 (sequence is synthesized)
gagcctcagagccccaggagccctgtggctgctcctgctcctgggacggcagggccagcgcagggactgtggagctcaggaggagggaccctctagctcattatgtagaggaggcggcag

SEQ ID NO: 835990 - DNA, 120 bp, Artificial Sequence
  ENSG00000261924_29 (sequence is synthesized)
tcaggcggacggggtgggcaccggagggaggatgggatgggcagggaagccgccgcaacagctgcagtgaggttctttcccaaggtggaggagggggaaggacaggcagggcccatgtgg

SEQ ID NO: 835991 - DNA, 120 bp, Artificial Sequence
  ENSG00000261924_30 (sequence is synthesized)
ttgggctcttcctcctccagctcaggagccaccgacaggacatggcctcagctgggtggcaccaggtgaccaggcccagctcagggtctgctctcctctgatggtccaggcgggtaccgt

SEQ ID NO: 835992 - DNA, 120 bp, Artificial Sequence
  ENSG00000261924_31 (sequence is synthesized)
cccagctcccaagccctgtggcacccgcagttgtgaagtcctcaggtgacctcggacagtgtccattgggtgcttccctggtgccagtgctgttctggaagcttctgtggtcttgtttgg

SEQ ID NO: 835993 - DNA, 120 bp, Artificial Sequence
  ENSG00000261924_32 (sequence is synthesized)
tgctcacagcactcatgcctgcagtaactgtccccacattaaagtgagggacaggctggggcttggaggtgccatggtggcgccagtgtcccagggccaccaagcaaaccaccgtgggcc

SEQ ID NO: 835994 - DNA, 120 bp, Artificial Sequence
  ENSG00000261924_33 (sequence is synthesized)
cggcagcctgagcggcaggcctgtattccctctccacccgccctgtctggaggctggacttggagacagaggggcctcttggctatcttcttccgggaccactctccctggcaggagccc

SEQ ID NO: 835995 - DNA, 120 bp, Artificial Sequence
  ENSG00000235919_0 (sequence is synthesized)
gctctctcagagatccaggtccgggagatgacagtggctcccagaaagcccaggattcaatcgctgagagagtgcttaggcccgaatgccggcccaaatcgttctactcaccgtgtcgga

SEQ ID NO: 835996 - DNA, 120 bp, Artificial Sequence
  ENSG00000235919_1 (sequence is synthesized)
ggccgaggccgaggccgagagcgatgagagtgcagggaagtggggaagagggggtggccgccaggctcctccgcttccctgggtccacggcggatccctcccgcttgtcaggaggcggcc

SEQ ID NO: 835997 - DNA, 120 bp, Artificial Sequence
  ENSG00000235919_2 (sequence is synthesized)
agcgggggcaggagaggaagggacgggccgagcgggtcggggcttgccgtttgactggaattgccagaatggcggaccgagccccacgacaacctacctccctgggctcctcgccgcagc

SEQ ID NO: 835998 - DNA, 120 bp, Artificial Sequence
  ENSG00000235919_3 (sequence is synthesized)
cccctctgcccaccggtggttggaggccgcggcggctgcgcgttgagtcgtttcctgccggttgacctgagcctacttcgcagtagcaggaccgctgctgtggagctggtcgcaggcggt

SEQ ID NO: 835999 - DNA, 120 bp, Artificial Sequence
  ENSG00000235919_4 (sequence is synthesized)
gtgtgccggtcgcctagtcaggagaactagtcctcgactcacggtgagggaatggaccgacacgggtattgtaccgctgagggaaaggagcgggactccggacctccaggaggtagggag

SEQ ID NO: 836000 - DNA, 120 bp, Artificial Sequence
  ENSG00000235919_5 (sequence is synthesized)
tgaggccagtaggaccggcgcgcctccggggggattcctcccgggcgttgagttgccaacctgggacccgaggaagatcggcgtggtggtgtgctttttgttgttgttaaccctcctcgg

SEQ ID NO: 836001 - DNA, 120 bp, Artificial Sequence
  ENSG00000235919_6 (sequence is synthesized)
atttctcgaatttcacaccactgtccatatgcgatgatgtttgtttgcccttgacgcacttactcatggatggtacttcttcagcctcgttagacagcctggtgatggaggatgaagaaa

SEQ ID NO: 836002 - DNA, 120 bp, Artificial Sequence
  ENSG00000235919_7 (sequence is synthesized)
tttttgttagttccttatcaaaaagtgtacataaaaattaggcaactccaaacatgcctccagggttaatgtgtgaaataataagataatatatgtaaagtggaattagctcctaggcat

SEQ ID NO: 836003 - DNA, 120 bp, Artificial Sequence
  ENSG00000235919_8 (sequence is synthesized)
agggaaagtgcagaatattgccgtgttgtcatttacagttctgttgatgtcgataacgtttgtgggtgtaattggtagtgttctgtccctccaaggagttaataaaacaaagcaaacata

SEQ ID NO: 836004 - DNA, 120 bp, Artificial Sequence
  ENSG00000235910_0 (sequence is synthesized)
tctgcgcgcagcggctccaccttctggcggtagagctccatctcctcctgccacttcttctggaagtcgtccagggtggcaggcagggagattacggacagcatggggcatgtgaaatcc

SEQ ID NO: 836005 - DNA, 120 bp, Artificial Sequence
  ENSG00000235910_1 (sequence is synthesized)
tgacacttctacaaattgggaagaaacctttggcatgctgcctgcttagtgctctcacagtgcctggcctcatactggctggtggcaaatcgccatcaaggaaatagatccaaatggcaa

SEQ ID NO: 836006 - DNA, 120 bp, Artificial Sequence
  ENSG00000235910_2 (sequence is synthesized)
accttcttcatccaccaggacccaacccacaggctacttattgctggaaacctacgttgttccttggattgaagtaatctctccctcctctggtgcgcccacagcacttgcaccaacagt

SEQ ID NO: 836007 - DNA, 120 bp, Artificial Sequence
  ENSG00000235910_3 (sequence is synthesized)
aaagagaaactagagaaaataatttttgaagaaaaacatttcaggaagtattgaaagtacacggtaactcagcctggggcaggggtggagggcagcagcactgtttgctgcagctatgct

SEQ ID NO: 836008 - DNA, 120 bp, Artificial Sequence
  ENSG00000235910_4 (sequence is synthesized)
ccttcctcagtgccctgcacacccgggacttgctcggtgagcatctctcgtgtcagtgacagctagtgtgagtactcttatgttcagctgcccctgactacctcttgactttggggacaa

SEQ ID NO: 836009 - DNA, 120 bp, Artificial Sequence
  ENSG00000235910_5 (sequence is synthesized)
gttacttaatctctgtgcctccgctgtttcactggtaaatgggaataagagttggttattctagggttgtagggttgttgtaaggattaaatgaatccgtatgtgaacagcatttggtgc

SEQ ID NO: 836010 - DNA, 120 bp, Artificial Sequence
  ENSG00000235910_6 (sequence is synthesized)
cagcttctcttgcagctcgtgcagcttctggcgcgcgccctcttggagctctgcgcgcagcggctccaccttctggcggtagagctccatctcctcctgccacttcttctggaagtcgtc

SEQ ID NO: 836011 - DNA, 120 bp, Artificial Sequence
  ENSG00000235911_0 (sequence is synthesized)
aggatgaagccaaggaagaagagaagagaggaaggacacgcccattaaccaaaggacccaaaacatatctcaaggagctcatgaagtcatcctcatgcacacagtttcccaggtgtcaga

SEQ ID NO: 836012 - DNA, 120 bp, Artificial Sequence
  ENSG00000235911_1 (sequence is synthesized)
tgaagacttcctgcaaacccccagaagctggggcagaggccctccagtctccagaagaggccaaccatgctgataccttgaccttggactcctagccccagaactatgagaaataaattt

SEQ ID NO: 836013 - DNA, 120 bp, Artificial Sequence
  ENSG00000235911_2 (sequence is synthesized)
ctgttatttaagtcactcagttgtcttacttggttgtggcagccctgagaggctaattctcagcgctttctctgaatgtcctcaacactctcctggttctcctcctgcctcaaaagcact

SEQ ID NO: 836014 - DNA, 120 bp, Artificial Sequence
  ENSG00000235914_0 (sequence is synthesized)
ggggagggtggcgagcccagcgaggacgtggattccccacggcccttcccacataccccgttctttcatttggctgtttctgagttgtgtgctttataatcaactgacaatgcttggagc

SEQ ID NO: 836015 - DNA, 120 bp, Artificial Sequence
  ENSG00000235914_1 (sequence is synthesized)
agaagagaggatggctgtggcaggcttggtgcatggtgttaaagctggctgtggagcatcctttttcagtctgcagtgtagggcatgagaaaacgcagctgacaacatgaagccatcaca

SEQ ID NO: 836016 - DNA, 120 bp, Artificial Sequence
  ENSG00000235914_2 (sequence is synthesized)
aaaggcaggggcttatgggtcctatgtcccttcctcttaaatttgggcagaatttgtgacttctttgtccaacaaaatatcgcagaagtgatgctgtaccagactgaaaaagagtggcag

SEQ ID NO: 836017 - DNA, 120 bp, Artificial Sequence
  ENSG00000235914_3 (sequence is synthesized)
tttctagctgtggtatcttggatccaaagaatcaatgaccccatacaacagacccagtagagttcccaggaaacagccagcaccagccatgttggtaagatatcttgaaaatagatactt

SEQ ID NO: 836018 - DNA, 120 bp, Artificial Sequence
  ENSG00000235914_4 (sequence is synthesized)
cagcccacttgagccaccacagctcacaccacctggagcacagtcaagccttttctgctgagccctgcccaaactgcagatttgtgaaccaaataaataattgcaattgttttaagccaa

SEQ ID NO: 836019 - DNA, 120 bp, Artificial Sequence
  ENSG00000235914_5 (sequence is synthesized)
gagcccagcgaggacgtggattccccacggcccttcccacataccccgttctttcatttggctgtttctgagttgtgtgctttataatcaactgacaatgataggtagaagcagtggcag

SEQ ID NO: 836020 - DNA, 120 bp, Artificial Sequence
  ENSG00000235914_6 (sequence is synthesized)
ctgctaggttggtgaacacatggaggtgcggggagggtggcgagcccagcgaggacgtggattccccacggcccttcccacataccccgttctttcatttggctgtttctgagttgtgtg

SEQ ID NO: 836021 - DNA, 120 bp, Artificial Sequence
  ENSG00000235914_7 (sequence is synthesized)
ctttataatcaactgacaatgaacagtggaagtaccaagtcaaagaacaaaaaacaaaaacaaaaccacaataaaaaacctaggagagaagcaataatatggagaaagtgcaagaatgaa

SEQ ID NO: 836022 - DNA, 120 bp, Artificial Sequence
  ENSG00000235914_8 (sequence is synthesized)
ttagctgcccatgcccagctaattgaggtgaaggctggaagaggtccaggaaagaatctcaccatagctgatggagtggttcaggagctggagatctgggcttggaagacacctctctat

SEQ ID NO: 836023 - DNA, 120 bp, Artificial Sequence
  ENSG00000235914_9 (sequence is synthesized)
gaatgaatgagatacagctcatgttcctattgcagaggatgaaaagcaggcccacagagaagaaaaatgtagagtctaaaggatatgacaacagtactgggtagagcctaggtaaatagc

SEQ ID NO: 836024 - DNA, 120 bp, Artificial Sequence
  ENSG00000235914_10 (sequence is synthesized)
attggagaggttacaccaatgagaatcgggatgttccagcagacggagaatgacagtgactctggaggatgtagtggtctcccagactgtgagggcaggaagggatcttagttccatcca

SEQ ID NO: 836025 - DNA, 120 bp, Artificial Sequence
  ENSG00000235914_11 (sequence is synthesized)
gaaaaaggccaagtaaaatgttcaagggcatagatgtcattctgctgctcagaacttgccttcctcactcttatttctcaccttgcctttccttctccttgtttacagaatgaagtccaa

SEQ ID NO: 836026 - DNA, 120 bp, Artificial Sequence
  ENSG00000235914_12 (sequence is synthesized)
ctctttagtatgacatcaatggcttgactttgcagtttgacttcatagtaatccctttgcttatttttcagtttgcctaaaaatattctgtgcttttccctgattcccagctcatgctat

SEQ ID NO: 836027 - DNA, 120 bp, Artificial Sequence
  ENSG00000235914_13 (sequence is synthesized)
tctttctgaattgaatgtctctctttcctctatccatttcttgaaattctggatttaagagccagtttaagactcagaattctaaatgtccaaaacattttcttcaaatctctcccttcc

SEQ ID NO: 836028 - DNA, 120 bp, Artificial Sequence
  ENSG00000235914_14 (sequence is synthesized)
aagaaatatttttccttatttccaagccatatatcactctgtggtatttctcttgtgtaaatgtcaccttgtatcatgactgctagagttctcataatcaggtggcaaactctttaacaa

SEQ ID NO: 836029 - DNA, 120 bp, Artificial Sequence
  ENSG00000235914_15 (sequence is synthesized)
caataaagctgctttagtaatttttgtgcccaccatcactcagagcttgtacatattaagggccgagcagtatttactgctaggaacaaaggaacgaataaatgaagctattaaatctca

SEQ ID NO: 836030 - DNA, 120 bp, Artificial Sequence
  ENSG00000248516_0 (sequence is synthesized)
atgggtgagctgttcaccctctcaggatcttctctggagtttcttttttgcagtatgagaggaacatcttccagtattttcacaaggcttgtctgatctgagcactcacttgaaaatacc

SEQ ID NO: 836031 - DNA, 120 bp, Artificial Sequence
  ENSG00000248516_1 (sequence is synthesized)
tgcccggcgcctggcccttgacagggcgttctaaatatttacttccccttcccagcgggcttgacagcctctgcaggaaggagatgtgcccgtggctctgtcgctggaatatcaaggtga

SEQ ID NO: 836032 - DNA, 120 bp, Artificial Sequence
  ENSG00000248516_2 (sequence is synthesized)
gactggggatgtggcacgtcacaggtgatctgcttatagcactgcctgcacggaagactggagagcaccctacacggaggactgtgtggagagcaccctcgaatactcgtgagcagctct

SEQ ID NO: 836033 - DNA, 120 bp, Artificial Sequence
  ENSG00000248516_3 (sequence is synthesized)
aactcagaagtacaagatactcaacgagagaccagtgaggaggagaggattttcatagaaaaacagcacagttgcagagtagggcatcagctctgaagtccattacaggtgcatttcgtg

SEQ ID NO: 836034 - DNA, 120 bp, Artificial Sequence
  ENSG00000248516_4 (sequence is synthesized)
ttttcccatccatcagctgcactacgcttctgccaggctggctcagcgagcatctgttgtccccattgcacacatggagtgaacttggaacacaatggccgcacgtgccaagggaacagg

SEQ ID NO: 836035 - DNA, 120 bp, Artificial Sequence
  ENSG00000248516_5 (sequence is synthesized)
aaccacaggactggggccagccttgtttcccagatgcgtgctacagagactgtccctggcgttggcagatgtgactggtgacggcagccacaaagcaggaagaagacacttagtgcttcg

SEQ ID NO: 836036 - DNA, 120 bp, Artificial Sequence
  ENSG00000248516_6 (sequence is synthesized)
tatttatctgcccgtttggctgacagaagagccatcgggcgatttgtgttccgccattcctgctgtgcaagcttggggaaagcacgtgacctctctgggccttgcttttttttttttttt

SEQ ID NO: 836037 - DNA, 120 bp, Artificial Sequence
  ENSG00000248516_7 (sequence is synthesized)
cttttgtaaaaacatttctggcttagtgcaatggctcacacctatcatcccagcactttgggaggttgaggagggaggatcacttgagctcagtagttcaagactagcctgggcaacatg

SEQ ID NO: 836038 - DNA, 120 bp, Artificial Sequence
  ENSG00000248516_8 (sequence is synthesized)
cagtgagccaagattgccccactgcattccagcctaggcgatgggtgacagaggagaccccttctaaaaaactaataataaacaaataataatgaagacatttcctgctcacccacaacc

SEQ ID NO: 836039 - DNA, 120 bp, Artificial Sequence
  ENSG00000248516_9 (sequence is synthesized)
catgcccctggcctgccttgcttgctgattgcagtattttctcactgagctcaggttgactctagggtcctcctcaacactgtgctgccacagatgttttcagcctgaccaactgcacca

SEQ ID NO: 836040 - DNA, 120 bp, Artificial Sequence
  ENSG00000248515_0 (sequence is synthesized)
atagccaagaaatttggagctcagtttcaaacaagaaatcttaaaagtttgagaagaaaatatggtaaataactaagagaaatctctggtcaatactcaacaagtccttcagtccaacaa

SEQ ID NO: 836041 - DNA, 120 bp, Artificial Sequence
  ENSG00000248515_1 (sequence is synthesized)
tattccatacatgaaatcctgccaaaaaccagactcagcaccaaacacacgagatgaaacataagatgcataaacacaacccttgcctttgaagaaaatttgcactaatggcagagatgg

SEQ ID NO: 836042 - DNA, 120 bp, Artificial Sequence
  ENSG00000248515_2 (sequence is synthesized)
gtgctgtatgagtgagctgtggctgccatagcaagacatcatagattggatggcttaaacaacagaaatttattttttcacagttctggaggccagaaatccccaataaaggtactgact

SEQ ID NO: 836043 - DNA, 120 bp, Artificial Sequence
  ENSG00000248515_3 (sequence is synthesized)
gattaggtgagggctttatttctgctgacagacaaccaccttcttgttgagtttttatacggtcttttctctgtggctcatagagagagacagagagagctctggtgttttttcctcttc

SEQ ID NO: 836044 - DNA, 120 bp, Artificial Sequence
  ENSG00000248515_4 (sequence is synthesized)
ttattaggacaccagtcctgtatcactaaggctccatcctgatgattccacttagccagtaactatgggaattagggcttcaacatacaaatttagagaaatgtgattccgttcataaca

SEQ ID NO: 836045 - DNA, 120 bp, Artificial Sequence
  ENSG00000248515_5 (sequence is synthesized)
tgaaacctaaggatttactgtctgttgtagaatttctcatataaagaagaacctgaggcaagtacagaaatgttacctccctaccttctcattggaaagcagctcacagagaatacaata

SEQ ID NO: 836046 - DNA, 120 bp, Artificial Sequence
  ENSG00000248515_6 (sequence is synthesized)
gttctacccactatgcccgtataatgcaatgatatatatccgtcactaaaatctccatgcttgtctcacccaacgtctcaaactatgctataactattggcggatctcacataattgagc

SEQ ID NO: 836047 - DNA, 120 bp, Artificial Sequence
  ENSG00000248515_7 (sequence is synthesized)
aatctgaatgatggaattgtacactagttgaatacaggagatactattttacatagcacagcaaagctctcccataactctacaaatagggctgaaaaaatcaaatacgtaaaatgcagc

SEQ ID NO: 836048 - DNA, 120 bp, Artificial Sequence
  ENSG00000248515_8 (sequence is synthesized)
gtcatgttattgcatggttaataaaattactgactcttctcagctatctgagtgttttaggttcctgagagccaagtcagtcatgtcatttccgaattttggtgatcaaagggtggatga

SEQ ID NO: 836049 - DNA, 120 bp, Artificial Sequence
  ENSG00000248515_9 (sequence is synthesized)
tcacagttttactccatttcaacttgattattagttacattaaaaaaaggtttttctatgtgtgctgtgagactgattctcatttagtatggtttcattaaaaattaggatccctttttc

SEQ ID NO: 836050 - DNA, 120 bp, Artificial Sequence
  ENSG00000248515_10 (sequence is synthesized)
ggaacaccgctcctggagcgattgtttcaatgttgcttgctcggaatggccctcctgagcaaacaacagacggtgctcaaagtaacaactggacttaataaaaggagcttacacgaagga

SEQ ID NO: 836051 - DNA, 120 bp, Artificial Sequence
  ENSG00000248515_11 (sequence is synthesized)
ggagctgaaggctgctgtggtcgtgtgctgggggctgccccagctccagctgcaggaccccggccgtctgccttccgactccggtgatgattcttcctgcggtctgaatattgctatgag

SEQ ID NO: 836052 - DNA, 89 bp, Artificial Sequence
  ENSG00000248515_12 (sequence is synthesized)
ccggtgatgattcttcctgcggtctgaatattgctatgagcattgcaagcattctgatagtagatgagaaaactaatggactgatggac

SEQ ID NO: 836053 - DNA, 120 bp, Artificial Sequence
  ENSG00000248515_13 (sequence is synthesized)
taaaagtgagcaggaatcagaggaatgaagaatgaagttgtcctcaggaaataaaaggggaaccaaggcttgccagcaagaaaataagaggagacctggcagtgaatgaatgatacattt

SEQ ID NO: 836054 - DNA, 120 bp, Artificial Sequence
  ENSG00000248515_14 (sequence is synthesized)
gattaagaataaaaatttcagtgttactgggggattttcttcactcatttaagtgaaataaataactaggagttagaatgtgaccagacaatagatggtcttaaatataccaataagatt

SEQ ID NO: 836055 - DNA, 120 bp, Artificial Sequence
  ENSG00000248515_15 (sequence is synthesized)
ccttgtgttcaaaatatatttagcatagacagtattttgaggcatcataattatttaatagtaataacaaagtttatggagcatttactgtatgtcaggccctcttctaactactttaga

SEQ ID NO: 836056 - DNA, 120 bp, Artificial Sequence
  ENSG00000248515_16 (sequence is synthesized)
tgttaatccagtttaacctccccagcatccaagtagcaacataccacaggccagccagtgatgtctgtctgcccttttacgtaggcaataagaagttgcatttttctgtcaaaaatttaa

SEQ ID NO: 836057 - DNA, 120 bp, Artificial Sequence
  ENSG00000248515_17 (sequence is synthesized)
aaacaattgtaaaactattgttatccccatgtaaccaatattggtaactctttaaaatgtcaatgataaaatagtagttcctgaaacaaataatttgttggcttaaatcctataattgct

SEQ ID NO: 836058 - DNA, 120 bp, Artificial Sequence
  ENSG00000248515_18 (sequence is synthesized)
gatactgtgagttttgagtggcttttattctgtcattgtgtatggtcagttgaagtttttattagtttaaaatttcaaacaatgaaatagtgagaaatgcatgatgggctattgtgcctg

SEQ ID NO: 836059 - DNA, 120 bp, Artificial Sequence
  ENSG00000248515_19 (sequence is synthesized)
gtacagaaaatagtttactgcattttaataatatccttagaattaaaatgccttattctatttaattgttacttaattcttcatttttgtgaccgactaatacataggtatatatactct

SEQ ID NO: 836060 - DNA, 120 bp, Artificial Sequence
  ENSG00000248515_20 (sequence is synthesized)
ctgcctgtttgagctgagatgttggtcttctccttcccttggactggaatttacaccatcatcttccctgtttctttggcctttggtctcatacttgaattaccaccagtttttctgggt

SEQ ID NO: 836061 - DNA, 120 bp, Artificial Sequence
  ENSG00000248515_21 (sequence is synthesized)
gtgtatgtgtgtgtgtgtgtgtgtgtgtgccctattggttttatttttttggagaactctgatgcaaatgtcatatagattgttagtggttagactaaattagaagacagttcttcagat

SEQ ID NO: 836062 - DNA, 120 bp, Artificial Sequence
  ENSG00000248515_22 (sequence is synthesized)
agttcttcagattcccattgcctagcactccttccataccgggttacaagcaaatgtcattttatatctgatattaaattttgtattgtattaactgaaatattgttttcatagtcattg

SEQ ID NO: 836063 - DNA, 120 bp, Artificial Sequence
  ENSG00000248515_23 (sequence is synthesized)
ggagtagggcgcatatggagggtttgaaatagtaatttcattttgactctaaagcaaaacatgtgtgttgatacacccagtatagagcacgttctacattgtctgtttgtgatttgtggg

SEQ ID NO: 836064 - DNA, 120 bp, Artificial Sequence
  ENSG00000248515_24 (sequence is synthesized)
gattctatgcagttaactttgtatccaaggatctatagccaagaaatttggagctcagtttcaaacgcaagtattctgggtccaaattttctgccttttcccttaaaacaactgaatttt

SEQ ID NO: 836065 - DNA, 120 bp, Artificial Sequence
  ENSG00000248515_25 (sequence is synthesized)
attttattgggaaacagaaatacagaattcaagagttattagatattataaaatctaacactctaagttaacatacaaggagacatagcgtttcaatgacaaatgtcatacataaaactg

SEQ ID NO: 836066 - DNA, 120 bp, Artificial Sequence
  ENSG00000248515_26 (sequence is synthesized)
cttcatatcagaggcagaaagagagcttgcttttcctgtagtttctgtaacacagagctgtccagctcattctatgtatgaaattgatatataatcaagacagatttcccatcccataaa

SEQ ID NO: 836067 - DNA, 120 bp, Artificial Sequence
  ENSG00000248515_27 (sequence is synthesized)
ttttatgccacttgattgtgtctttgttatttgttagcagcagtttatgtgagagaatattttggagccaattcaaatctgccattaattatttcactgaatattaagaaaattgagatt

SEQ ID NO: 836068 - DNA, 120 bp, Artificial Sequence
  ENSG00000248515_28 (sequence is synthesized)
atagtatttagctaggagatatgaacatgtttttttctcttgttgtctaaatcataaataccctcatttaatcatcttcatttaaaagggggatttggactagaaactataattggaagc

SEQ ID NO: 836069 - DNA, 120 bp, Artificial Sequence
  ENSG00000248515_29 (sequence is synthesized)
agtggaagggcaaaaggtgaattgtattttttaagcctgtcactttgaaaactccctgcttcaaaactcaatgcatttccaggattgtcgacttcacagcagcagtgaagcgggagatgc

SEQ ID NO: 836070 - DNA, 120 bp, Artificial Sequence
  ENSG00000248515_30 (sequence is synthesized)
aaaggcatctttggaagcagctacatgtagaagtgcttaatatctccccaggcttgtgagaacttgtttatctggcaggtatttccaagcactctctgttctttggacaatggagttggc

SEQ ID NO: 836071 - DNA, 120 bp, Artificial Sequence
  ENSG00000248515_31 (sequence is synthesized)
aatctggagactgtaacttcataatagagaggctttagggagagaagcttccatttaaattcatttaaatggataagtattagataacttccctgaaaaaatgttaacatagttattaaa

SEQ ID NO: 836072 - DNA, 120 bp, Artificial Sequence
  ENSG00000248515_32 (sequence is synthesized)
tatattcaggttccattctgatctcattctctgaacaattgaaccccttttcactgggcattatgctgcaattttatggtaggttaaatgataccaagtgcattgaagttattcttaaaa

SEQ ID NO: 836073 - DNA, 120 bp, Artificial Sequence
  ENSG00000248515_33 (sequence is synthesized)
tgcctctcagtatttcttatatagtactgaatagttcatcgatgaataaaatctctattttccagccatttttgaaatagcacatggcacataactgaaaaagcccacgtggctaaccta

SEQ ID NO: 836074 - DNA, 120 bp, Artificial Sequence
  ENSG00000248515_34 (sequence is synthesized)
tattctgggtaccattacatcacaattgaattctgttgtgattttagtcaaagcccttaacttcataaatatatcacaaaaagcctgtatcaaggccattggtcattgctgcttgcaaga

SEQ ID NO: 836075 - DNA, 120 bp, Artificial Sequence
  ENSG00000248515_35 (sequence is synthesized)
aatagagacacatgtgaagtaggaaaaaaaggcttgtttagtgacaatagagaagacaataacaatacaaaattattttagatttagctgggcttcatggagattgattcaattgaggat

SEQ ID NO: 836076 - DNA, 120 bp, Artificial Sequence
  ENSG00000248515_36 (sequence is synthesized)
ttaaaggtctgaaaatgaaatcatttatgaattaagatgcttataaccacacagaaattatatgcccaagtactatggctagaataaataaggatattttttatctaacataccaaaaaa

SEQ ID NO: 836077 - DNA, 120 bp, Artificial Sequence
  ENSG00000248510_0 (sequence is synthesized)
aggtgctaagaacgctcaagccatggagagagatgcatttggagttgtttacattcagacaaagctcatctggttgtttgcagctagtcacaaggatccagagccgagaacactggtatg

SEQ ID NO: 836078 - DNA, 120 bp, Artificial Sequence
  ENSG00000248510_1 (sequence is synthesized)
atgcaaggatttgtggccagccaattcaagcttgaaaacttatctctatcactaacatgacattatattcctgatatttttacttctcttagcctctgtttatttgtctgtaaaactgga

SEQ ID NO: 836079 - DNA, 120 bp, Artificial Sequence
  ENSG00000248510_2 (sequence is synthesized)
gtgtgattcaagaagggtgtaagaacatttaatggggataatagtcttttcaattaatagttatagaaccactggatatccactgcaaaagaattaaatcagacccctgcttcataccat

SEQ ID NO: 836080 - DNA, 120 bp, Artificial Sequence
  ENSG00000248510_3 (sequence is synthesized)
atgcaaaaattaattcaaagcattcatagatttaaatgtaagaactaacactataatactcttagaagaaaacataggggtgaatcatagtgaccttagataaagtaatgatttcttaga

SEQ ID NO: 836081 - DNA, 120 bp, Artificial Sequence
  ENSG00000248510_4 (sequence is synthesized)
tacaatagcaaatgcacaagcaacaaataaagacatatattgaacttcattataatgaaaaaatgcatgtttcaaggatgtcatcagtaaagtgaaaagatgacccacaaatagggagga

SEQ ID NO: 836082 - DNA, 120 bp, Artificial Sequence
  ENSG00000248510_5 (sequence is synthesized)
aatgttttcaaattatataactgatgaggaacttgtatccagaatatataacgaacatttacaactcaacaataaagagactatttaattttttaaatggccaaaaaacttaaatagatt

SEQ ID NO: 836083 - DNA, 120 bp, Artificial Sequence
  ENSG00000248510_6 (sequence is synthesized)
ttcctccaaagaaggtatacaaatggccaataagcatatgaaaatgtgttcctttgtgaaatgcaaatcaaaacaacaatgagctattgttcatacctagtaggatggatatactagaaa

SEQ ID NO: 836084 - DNA, 120 bp, Artificial Sequence
  ENSG00000248510_7 (sequence is synthesized)
gaataacaaatgttgatgaggttgtggataaattgaaactcttatgcactgctgatgagaatatgaattcatgctgcccctatgaaaaacacttcaaaaggtgctcaatatttaaacaga

SEQ ID NO: 836085 - DNA, 120 bp, Artificial Sequence
  ENSG00000248510_8 (sequence is synthesized)
gttaccatatcactgagtaattctactcctaggtatacaccaagaaaattgaagatttatgttcatgtaaaaacttgtgcacaaatactcatatcagcatcataaataatagttaacaag

SEQ ID NO: 836086 - DNA, 120 bp, Artificial Sequence
  ENSG00000248510_9 (sequence is synthesized)
tggaaacggcccagatctccatcactgataaatggataacaaattattttatattcatacaatggaatattatttagccataaatgtatcaggaattaagtactgatgcattctacaaca

SEQ ID NO: 836087 - DNA, 120 bp, Artificial Sequence
  ENSG00000248510_10 (sequence is synthesized)
tggataaaccttgtaaacattatgctaagtaaaagaagccaaacacagaagaataaatattgtataaatcaatttatatgaaatgtccaaaaagtagattaattgttaccagggcctggg

SEQ ID NO: 836088 - DNA, 120 bp, Artificial Sequence
  ENSG00000248510_11 (sequence is synthesized)
gcaaggcagatgtgggaaatgaatgctaagtgtggatgatgccacctttctaatattaggtgggggagatggctgcacaatcctgtgactatacaaaaaaaatgctgaattgtatacttt

SEQ ID NO: 836089 - DNA, 120 bp, Artificial Sequence
  ENSG00000248510_12 (sequence is synthesized)
gatgcatttggagttgtttacattcagacaaagctcatctggttgtttgcagctagtcacaaggtggcccattgtcctgccttgcttttctccattatctctgggtcaagttgtttcttt

SEQ ID NO: 836090 - DNA, 120 bp, Artificial Sequence
  ENSG00000248510_13 (sequence is synthesized)
gataaatccaaatcatgaaaatagcctgctgaaagaattcactttgaaaatgccacaaaacagacaatggaaaaatgagatgaacaagtgcgaatccatcattcttctcaggttctggaa

SEQ ID NO: 836091 - DNA, 120 bp, Artificial Sequence
  ENSG00000248510_14 (sequence is synthesized)
aaatgctggttttcagctcctggaaaattctcacaagacatctgttttgttttatatcttcatttgtttccattcatctttcctactgtagacactgtctatgatttttttgtgtggggg

SEQ ID NO: 836092 - DNA, 120 bp, Artificial Sequence
  ENSG00000248510_15 (sequence is synthesized)
agctgtgttgtcacttggatatctagtttattacttctacttgcaaagtagtacaatgagataccaaaccaccatattttttccatctattttctcaattatggacacttttcaacttat

SEQ ID NO: 836093 - DNA, 120 bp, Artificial Sequence
  ENSG00000248510_16 (sequence is synthesized)
tactacagtagggaagttaaaggctatttgaattattggagaatagagatacctaggatcagaattaccaagtcatagaccgaaactttggctaagacctaaacttaatatgggtaaata

SEQ ID NO: 836094 - DNA, 120 bp, Artificial Sequence
  ENSG00000248510_17 (sequence is synthesized)
ttgttacattgctccctagaatattgatatggtttggatttgtgtccccacgcaaatctcatgttgaattgtaatcctcaatgttggaggtggggaatggtaaggggtgattagatcctg

SEQ ID NO: 836095 - DNA, 120 bp, Artificial Sequence
  ENSG00000248511_0 (sequence is synthesized)
tggtcttcgctgccagaatctaagtggaaaggaaagattaggagattccaaacggagcagccagattccaccagggaggggggaaaaaagccctctccaagaggggtagaaaaagtgaac

SEQ ID NO: 836096 - DNA, 120 bp, Artificial Sequence
  ENSG00000248511_1 (sequence is synthesized)
ttcaagaatttttgagaaaaactgatttgcattggaggggaaactacaaatgctgactgcttcaatcatgcacaattgtggaaagaaagcaagatctgcagtgcaaattaatatattaaa

SEQ ID NO: 836097 - DNA, 120 bp, Artificial Sequence
  ENSG00000248511_2 (sequence is synthesized)
gttacactgttgcaacgcattttctaaattccaaaagtaaaattattatttttgttgttgttgttgatttctcttctgttttttgatatttctattagccagatcacaaatctgtatgct

SEQ ID NO: 836098 - DNA, 120 bp, Artificial Sequence
  ENSG00000248511_3 (sequence is synthesized)
ggaatatcatatctggagagaaattctggtttgtgctgtaatagaaatttctaatctccattttgaacttctgtgatggaagaaagatctatcactaagcaataaacatgttttcatttt

SEQ ID NO: 836099 - DNA, 120 bp, Artificial Sequence
  ENSG00000259730_0 (sequence is synthesized)
tggtgcccttgtaagaagagacaacagagatctctctctctctgtgagcacaaagagaagaggccatgtggagacacagggagaaagcaacagtctacaagccaggaagagagttctcac

SEQ ID NO: 836100 - DNA, 120 bp, Artificial Sequence
  ENSG00000259730_1 (sequence is synthesized)
ccctggacctgagccggagctgtctatctacatgaggacaccatctggcaacactgaaatgttgccctcactgtatgccatcaccaggaagacaagcaatagatgatgagtgaaaataaa

SEQ ID NO: 836101 - DNA, 120 bp, Artificial Sequence
  ENSG00000259731_0 (sequence is synthesized)
cgtagagtctgcatgagctagagccaccacatacagaaaattcaggatctacgtgaaaattccacttataaacatgagaagatctgtaacagcatatgacaaaaccctaattaatgagga

SEQ ID NO: 836102 - DNA, 120 bp, Artificial Sequence
  ENSG00000259731_1 (sequence is synthesized)
gagaaaggaaggaattacatatagacaaattttgatcccaacacttcaggctgtcttgctcattgaatcattacacttacacaactatttccatttcaaagatgaaggaactaaggctca

SEQ ID NO: 836103 - DNA, 120 bp, Artificial Sequence
  ENSG00000259731_2 (sequence is synthesized)
gaaaagttaacctggatcaataagcgcttgggtagaaaacccacattcaaatcctgacagccttactggctacaagccatgtgatcttagataagttctttttttctgagtttgtttccc

SEQ ID NO: 836104 - DNA, 120 bp, Artificial Sequence
  ENSG00000259731_3 (sequence is synthesized)
ttctacaacacaagacactggagaccaaaacaattcaaaggaaaaagtgatgaggtgcactgagaaattcagggaatactccaaagctgcagaggatataaagaataggatttcccagaa

SEQ ID NO: 836105 - DNA, 120 bp, Artificial Sequence
  ENSG00000259731_4 (sequence is synthesized)
gaagagacatttttatcccagtaatccacaataaaatggggtgtagagagatgtatccagagctgcacagctagtggacgtctgagcaggagccacatgcagaagagtctgactccaggg

SEQ ID NO: 836106 - DNA, 120 bp, Artificial Sequence
  ENSG00000259731_5 (sequence is synthesized)
cctcagcgtgtaatgccctacacctgctgcatgggtttacatttccagctgctttaaagttaagactatggatgtctgaacagctctttttccttagagcataaaactaaactaacctaa

SEQ ID NO: 836107 - DNA, 120 bp, Artificial Sequence
  ENSG00000259732_0 (sequence is synthesized)
gcttaaaaaaaaaaagtcactggtgacagtgtttcttatgtgagaatggtgttatggataggtacgaaaacgtactttttagaatatgcttctgaaacatttagcagggatgtgctgtga

SEQ ID NO: 836108 - DNA, 120 bp, Artificial Sequence
  ENSG00000259732_1 (sequence is synthesized)
tatctgcaaatcgctttcaaatggcatagcaaaaattgtgtgtgagtatacacagagagggagaggagggaaacgtggcacatgttcatgattgatcagtctacatgaaggatatataga

SEQ ID NO: 836109 - DNA, 120 bp, Artificial Sequence
  ENSG00000259732_2 (sequence is synthesized)
attttttgaaataaataaaacatttgaggcaaaaatgtcactggtacatggtaccaatggctcatttttagtcaccttactcttaaatgtgcttcgctctcccagttttctgagaattta

SEQ ID NO: 836110 - DNA, 120 bp, Artificial Sequence
  ENSG00000259732_3 (sequence is synthesized)
tttcaaaaggctagaaattgtgcattatttcagtttttactcgtttcctctttcttcccttcaaagtattttaggattaaattgtgtagactgggcacagtggctcacacctgtagtttc

SEQ ID NO: 836111 - DNA, 120 bp, Artificial Sequence
  ENSG00000259732_4 (sequence is synthesized)
agcagttttggaggctgaggcgggaagactgcttgagcccagagctttgagaccagctgggcaacacagggagaccccatctgtacaaataattagccgaatgtggtggcacatgcttgt

SEQ ID NO: 836112 - DNA, 120 bp, Artificial Sequence
  ENSG00000259734_0 (sequence is synthesized)
agaagcaggaagagagccggacggaagacacctaccctggctggcagacacccctgaagatggagaaagaggccttccagaagacagaaggttaaattgaagaagctgaaatgcacctct

SEQ ID NO: 836113 - DNA, 120 bp, Artificial Sequence
  ENSG00000259734_1 (sequence is synthesized)
ggctcaggtgagagaagggaaaggaattaagacaactcaaagagtggctcatggaccagcagcacctgcatccgtgagagcttgtggagccacaatctgctttttaacacaatgcccagg

SEQ ID NO: 836114 - DNA, 120 bp, Artificial Sequence
  ENSG00000259734_2 (sequence is synthesized)
aatgttttgagaagcacagcactcttgcatcttagcacttattgcccttaattgccctcccgtaagtgtgggagtcagcctatggagtctgttttgcactctggctctccattccattat

SEQ ID NO: 836115 - DNA, 120 bp, Artificial Sequence
  ENSG00000259734_3 (sequence is synthesized)
taatgacagagccattcaggtgtccctgttggtacagtgacacaagtgaccaacgctgagttccacagaaactatcatggaacaggctggttctttttgtcagtgttggggccaccatct

SEQ ID NO: 836116 - DNA, 120 bp, Artificial Sequence
  ENSG00000259735_0 (sequence is synthesized)
gcttccctttaagttttaataggagtggctttgttttatagaacgctgtaggcatctccagccactgaggggacttcttcaagcttggcccagcctcatccacagaaggatctggcagtg

SEQ ID NO: 836117 - DNA, 120 bp, Artificial Sequence
  ENSG00000259735_1 (sequence is synthesized)
atatcttggcattcatagtctcagtgtgcaggacagcattggttccccaccctacagtcccagctctacctaggcagtatcatatgtatcatggtaatggctatggaaaataatatccct

SEQ ID NO: 836118 - DNA, 61 bp, Artificial Sequence
  ENSG00000259735_2 (sequence is synthesized)
tggctatggaaaataatatccctccctccctgcctcccttcccctcttcctctttttagag

SEQ ID NO: 836119 - DNA, 120 bp, Artificial Sequence
  ENSG00000259736_0 (sequence is synthesized)
tctttgtttttggtgttttagagtcggtgaaggctttaaaggaagtaggcagctggaacccggctgtggcgggttgaaaagcccgggcgtttgagagctgagacttgccagttcccacag

SEQ ID NO: 836120 - DNA, 120 bp, Artificial Sequence
  ENSG00000259736_1 (sequence is synthesized)
gccaagccaggcgtctgcaccccattctcttggttccgacgaatatgctctccatgagggtgttcttcagggcctaccacaatggctggcactagagaagggcacaaaattgaagaacag

SEQ ID NO: 836121 - DNA, 120 bp, Artificial Sequence
  ENSG00000259736_2 (sequence is synthesized)
cctgaacacacaacaacataaaagcagtaaagaagctgagggatagctcgctcacctggcaggatggtgttcgggagactcccgcagttggaatacgggcttggtctcaaatgaaaagag

SEQ ID NO: 836122 - DNA, 120 bp, Artificial Sequence
  ENSG00000259736_3 (sequence is synthesized)
tcctgcagttctcgggaaccttgttgcaccagaggcacctggaagcatcgaaggtcatgtgaggaaggccacacctctgtttccaaggaggaagatgtcaccgatgcccacagcctgcca

SEQ ID NO: 836123 - DNA, 120 bp, Artificial Sequence
  ENSG00000259736_4 (sequence is synthesized)
cagctcggggctggtaggctcctctcgattcctgcacgtttctgcttctgacactgcttctacccggagagttgtgtatttaccaagagtcagttgtgtgattctcaaacatacttatgt

SEQ ID NO: 836124 - DNA, 88 bp, Artificial Sequence
  ENSG00000259736_5 (sequence is synthesized)
gagagctgagacttgccagttcccacaggccaagccaggcgtctgcaccccattctcttggttccgacggtgtacagtggtgtgatct

SEQ ID NO: 836125 - DNA, 120 bp, Artificial Sequence
  ENSG00000259736_6 (sequence is synthesized)
actgtttgagcctaagtaacattagtggctttattcatttggtagattgtttgtatctttgcgttgtctctatcctgctttttccttggccattttgctattaaaaatctgttgatttac

SEQ ID NO: 836126 - DNA, 120 bp, Artificial Sequence
  ENSG00000259737_0 (sequence is synthesized)
cttaaaggtagtctatgaatagagatgctgctgctgctttcacttgtgtggtagaaggactttgtttacctacagagtcataaagaggaacgtcacttggaaattcacttggatgccact

SEQ ID NO: 836127 - DNA, 120 bp, Artificial Sequence
  ENSG00000259737_1 (sequence is synthesized)
taaaccccttttaaggaaaattttcctagcataatatatgaagtcttggtggggaccaaaaagctgaagaaatcagagataagtgctgcacattctaaggaaaggtgcaagacatctgcg

SEQ ID NO: 836128 - DNA, 120 bp, Artificial Sequence
  ENSG00000259737_2 (sequence is synthesized)
cctcagagtcagtcaagctactgacaaaaacatttctttggaagtgatgggtatttaggatgtaagccctgtggctcaagactgagcttaaaatgtgtttcgggggatgtccaagtacag

SEQ ID NO: 836129 - DNA, 120 bp, Artificial Sequence
  ENSG00000259737_3 (sequence is synthesized)
aaatctctaccagatgccatgagacacaaaggccacagaacacgccatgacatttggtctacctttctcatcccctatttgtctccaagtcctggaccatctgaacttgtaagaaattat

SEQ ID NO: 836130 - DNA, 120 bp, Artificial Sequence
  ENSG00000259737_4 (sequence is synthesized)
cagaaacagaagaggagaagtagcaagcagagagcagatacaaacagcactccctgcaatcatttacccatttgtggttctctagttgcaagccagttgcttatgctggggtagggaaag

SEQ ID NO: 836131 - DNA, 120 bp, Artificial Sequence
  ENSG00000259737_5 (sequence is synthesized)
gtgctttgaaatggtttgttttgatttaaattggattggatattttcacatctgaaaataatactgttctaatacccaaaagtgacaatataaaagctatagggaaacttcctgaggtat

SEQ ID NO: 836132 - DNA, 120 bp, Artificial Sequence
  ENSG00000259737_6 (sequence is synthesized)
tttccaagagagcagaaagcaggtctaacagagaatttcttaaaatagtggtagagaaaaaggaaacaaattcttggttgtatcccattgaaattagcctgttcacctgcacacacatac

SEQ ID NO: 836133 - DNA, 120 bp, Artificial Sequence
  ENSG00000259737_7 (sequence is synthesized)
atgtgtctacgtattctcacagtattgcatttttttctaggttgatgaaatatctttaagctctttggtctatgcttcataaaagatagcaaaataaaattttatggaatttccaataac

SEQ ID NO: 836134 - DNA, 120 bp, Artificial Sequence
  ENSG00000259737_8 (sequence is synthesized)
taagaacaactgctaggctggtttttattgaacatggtttggaaatctctcgaacaaatgattcctgagacccaccccaattccaatgctatcattttgtgagttttattattcatctga

SEQ ID NO: 836135 - DNA, 120 bp, Artificial Sequence
  ENSG00000259737_9 (sequence is synthesized)
attcttacaactggtgtttggtaaccagaagaaacctgcaaggtgatgctcatttggacccaagcagtggtgaaattgctgactgaatcaaatagtgtaaatagatccacagaagaagaa

SEQ ID NO: 836136 - DNA, 120 bp, Artificial Sequence
  ENSG00000259737_10 (sequence is synthesized)
tagatccacagaagaagaagtataatgaacctgaaattgctaaaccccttttaaggaaaattttcctagcataatatatgaagatggtccctctctttgttgcccaggctggagtgcagt

SEQ ID NO: 836137 - DNA, 73 bp, Artificial Sequence
  ENSG00000259737_11 (sequence is synthesized)
gagatggggtttcaccgtattggccaagctagtcttgaagtcctgacctcaagtgatctgccctgagcctggc

SEQ ID NO: 836138 - DNA, 120 bp, Artificial Sequence
  ENSG00000259737_12 (sequence is synthesized)
atttagtaaccttaggcaatatctaatgatatgtgatttttgttgatgttttggttatattattatctttaccttttcaggttttaagacatttacattccattatataattaaaattaa

SEQ ID NO: 836139 - DNA, 80 bp, Artificial Sequence
  ENSG00000259737_13 (sequence is synthesized)
atgattatgtgaatgttatttattacagaatcaaatagtgtaaatagatccacagaagaagaagtataatgaacctgaaa

SEQ ID NO: 836140 - DNA, 120 bp, Artificial Sequence
  ENSG00000259737_14 (sequence is synthesized)
catgattgagatacaatttatacactatacaattcacccatgtatagtgcatggttcaatggcttttaatatattcacagttgtgcaaccatcacaacaatcaatttcagaacaatttca

SEQ ID NO: 836141 - DNA, 120 bp, Artificial Sequence
  ENSG00000259737_15 (sequence is synthesized)
ttacccctgaaaagaagctcctcaccccttagccatcaccttgctgctatgaacatttgtgtacatgtttttgtgtgtacatatattttcatttctctggggtccctgtctaggcatgga

SEQ ID NO: 836142 - DNA, 120 bp, Artificial Sequence
  ENSG00000259737_16 (sequence is synthesized)
attttttgatcacatggtaactctatctttaaccttttgagaaactcccagactgttttccaaagtggctgcattactttacactcccaccatcaatgtatgaagattcccatgttctac

SEQ ID NO: 836143 - DNA, 120 bp, Artificial Sequence
  ENSG00000259737_17 (sequence is synthesized)
accatcaatgtatgaagattcccatgttctacaccctggtcaacatttgctattatttgtcctattgatgataccccttctgttgaatgcaaagtggtatctcattgtggttttgatttg

SEQ ID NO: 836144 - DNA, 120 bp, Artificial Sequence
  ENSG00000259737_18 (sequence is synthesized)
ttttcatgtacttattattcatttgtatgtcttctttggagaactgtctgttcagatctcttgcccagtttttaaattgggttatttgtcactttgtcgtaaaagaaagctggtggtgtt

SEQ ID NO: 836145 - DNA, 120 bp, Artificial Sequence
  ENSG00000259737_19 (sequence is synthesized)
cctggcttcccacagccatgtaaaatagctgtaatgcatggacatgagaaaagaagactgacatatcattccctaattaggatattatgaccttctgaacctcccaggtccaggactgcc

SEQ ID NO: 836146 - DNA, 120 bp, Artificial Sequence
  ENSG00000259737_20 (sequence is synthesized)
actgaattggaagcagagcctgaggagacagccacagtgaaagcggcttgtatactcttagagtttgaggggcattggtgatgagctttcctaggggccacgtggatatctgacttttga

SEQ ID NO: 836147 - DNA, 120 bp, Artificial Sequence
  ENSG00000259737_21 (sequence is synthesized)
tggctagagtcttttagaagaggccctgcccatgagtgatgcctgatgggggcaggagtccctagggatgtagccccaatttaaaagctagagcagaatcaaaagtagttagccagagca

SEQ ID NO: 836148 - DNA, 120 bp, Artificial Sequence
  ENSG00000259737_22 (sequence is synthesized)
tctggagctctccaaagatccctcaaagcagtccatgagataaagagtttacttttacatgagcaccaatcaagaaaaactttgtcctttctgtctaccctcctcagggtactccaccag

SEQ ID NO: 836149 - DNA, 120 bp, Artificial Sequence
  ENSG00000259737_23 (sequence is synthesized)
ggctattaatattgtaaatgactctaataactgactgcttagcttacattatgtgatgaaggatcttcattctcctgggcaatctcagatcttttaataattattggtttaataagtgaa

SEQ ID NO: 836150 - DNA, 120 bp, Artificial Sequence
  ENSG00000259737_24 (sequence is synthesized)
aatattcagtcaacaaaatggttatttgaaataataccatatgtagaaacaattttccaagttcacatattaatataataatgtgttaattacagaaagctgattgtttgggtagcgcac

SEQ ID NO: 836151 - DNA, 120 bp, Artificial Sequence
  ENSG00000259737_25 (sequence is synthesized)
tcctagaggctgaagtgcagcaacaatgtgggtcagtccctgagagcctgagctcttgcattttggtcatgtcaagcccaagatcaagagaaagctcatgtggtaaaaagcttggcatga

SEQ ID NO: 836152 - DNA, 120 bp, Artificial Sequence
  ENSG00000259737_26 (sequence is synthesized)
catcttagagacccagagcacggaggccctttacataaacagaacaaatccttttcagtgcttttagaccttaacaaacatggggtgatgtacaaaactgcactccccccactataaggc

SEQ ID NO: 836153 - DNA, 120 bp, Artificial Sequence
  ENSG00000259737_27 (sequence is synthesized)
tagcccccaccctacaaacccctgaactcttttcagcatttcttaaatctgttccattgaacaatctgcgttcattgtaacaaatacaatctcattgaattagattctgaagagacttta

SEQ ID NO: 836154 - DNA, 120 bp, Artificial Sequence
  ENSG00000259737_28 (sequence is synthesized)
tagtagaggaaaaaaggagactgatcctgtattctctttagtttaaacaaggaacagagcacagcaaatgagaaatcttgggtgagctaagttcactggaatgggtggggagggatgggg

SEQ ID NO: 836155 - DNA, 120 bp, Artificial Sequence
  ENSG00000259737_29 (sequence is synthesized)
aagaggaaggggggaaattggagagacttgtaccagataaggaatccatttctaggtgtctcagaaacaaaaaacccagtgttaatgtctgtgctttaattacatgactgttaggtgtca

SEQ ID NO: 836156 - DNA, 120 bp, Artificial Sequence
  ENSG00000258066_0 (sequence is synthesized)
agcacgattcttacaatgagatctaaatgggaccattgttcactttcttgagtgtgataaagatccagcaaggagcctcccagatggagtacatggagaccatgactgtgaaagatgagg

SEQ ID NO: 836157 - DNA, 120 bp, Artificial Sequence
  ENSG00000258066_1 (sequence is synthesized)
gtggcctctgattgccagtatctggcagccacattctcttcccacaagatgtgctggaaatatgaccaagcagaagttcacttaagtgaatccaacagttaaacctaccatggaagggtg

SEQ ID NO: 836158 - DNA, 120 bp, Artificial Sequence
  ENSG00000258066_2 (sequence is synthesized)
tggtgcacagagggcatgtggagaagagaagaccacagtgggaacctccaaggaactaacatctagctggggatgaggggggatttggctatgtagagagtaaataaagtgatatgagaa

SEQ ID NO: 836159 - DNA, 120 bp, Artificial Sequence
  ENSG00000258068_0 (sequence is synthesized)
gctgttagttttgggactgatggagagttctggagcagtgagagctcagtgtggaagcccttggtctgatggggcttcagggaacatttcctggatccatcctgaacaaagtcttgaaat

SEQ ID NO: 836160 - DNA, 120 bp, Artificial Sequence
  ENSG00000258068_1 (sequence is synthesized)
acagaatatggatttagaatgcgaagtctctaagtcaagggaaaggtctaggtcgaacagtggtgcccttcaacaagtaataccctacatctcagccaaagaatctatcagtgaatccat

SEQ ID NO: 836161 - DNA, 120 bp, Artificial Sequence
  ENSG00000258068_2 (sequence is synthesized)
tcacagtattataagtaaatgcagcagagagtccactcttgaagcttgtgactgggaggaagaaagcatggagaggaagtatgcattcagatccacagaggaaaatggtaacctttgaag

SEQ ID NO: 836162 - DNA, 120 bp, Artificial Sequence
  ENSG00000258068_3 (sequence is synthesized)
tcttcccacaaatccctaaactaggcctaaggccagaagagttctatatcagaacgttttgggaatcgtcttcaaaaccggaatccatttggccaataaagagtctatttgaattacaaa

SEQ ID NO: 836163 - DNA, 120 bp, Artificial Sequence
  ENSG00000272148_0 (sequence is synthesized)
cagctactgctctcttcacctaatatccttggtgacgggcttggccttttgcatacccacctaggtacacaagctttttgtcctctccacccaccagctctgttcctgctcctggctgtc

SEQ ID NO: 836164 - DNA, 120 bp, Artificial Sequence
  ENSG00000272148_1 (sequence is synthesized)
atttctcactttgggaatgtttctgtcaaactatgtcttacctatttttcaaattatttcttaactgaacattctttggctaattactcttgtgtttatccaccacagtagttccccaaa

SEQ ID NO: 836165 - DNA, 120 bp, Artificial Sequence
  ENSG00000272148_2 (sequence is synthesized)
ccctcaggatgtttacagtgtttgtgcgctctcatgttgtatttactgtcctgtttcccctattaagtttcaagtcaatcaaccaggaattacttagtactgactgtgcatattttctat

SEQ ID NO: 836166 - DNA, 120 bp, Artificial Sequence
  ENSG00000272148_3 (sequence is synthesized)
tggtagggggaagtaacagagaaatagaatacatgtccttcacctcagggggctcaatgcagtgttgtgcattggaagcggggcagggaggatgtcaataaaatagtgattaaaaagtgc

SEQ ID NO: 836167 - DNA, 120 bp, Artificial Sequence
  ENSG00000272149_0 (sequence is synthesized)
gttttcaactattttctaattttcaacaagagtgagcttgtacataccacactaacccaaagaggggaggcagaaaaagacatcagcaacggtctttggagtttggcctactggctgcca

SEQ ID NO: 836168 - DNA, 120 bp, Artificial Sequence
  ENSG00000272149_1 (sequence is synthesized)
tcattaactcttccttctcttacactccacattcaaactctcagcaaatcctattggctcttttcaaaataaatctagatatttgaccactgctgttgctgtggcccaggcccaagcctg

SEQ ID NO: 836169 - DNA, 120 bp, Artificial Sequence
  ENSG00000272144_0 (sequence is synthesized)
acgtttacagggtggaggtggaaattaaatttagggagccatgaggaagacccccagccctgtgccttttgaattgacaaccatggcatttcagggcatcagctccaggtcaggcattct

SEQ ID NO: 836170 - DNA, 120 bp, Artificial Sequence
  ENSG00000272144_1 (sequence is synthesized)
caggcagttgcataattctgccaatgtggggcccgcccacctcaaaaatccacatggattggatccagcaaaaccaaatattcagcaaaacttcaagatctagcaacactgaaggctcaa

SEQ ID NO: 836171 - DNA, 120 bp, Artificial Sequence
  ENSG00000272144_2 (sequence is synthesized)
gtacatcaccggtgcatacttggcccaaggaggctattctctcacaatctctacccagctccgggcctgcagcatctgagactcactccttcaagctgcaggtatcccaggaaaaagatt

SEQ ID NO: 836172 - DNA, 120 bp, Artificial Sequence
  ENSG00000272144_3 (sequence is synthesized)
tatgcatcctcatagcttcaacatgcagtgtgtcaggcacagaaaaatggttgtcttcagaaagtgataaaaaaaacatgcagtagcaatcaccctttggactttgaaacttttctgtca

SEQ ID NO: 836173 - DNA, 120 bp, Artificial Sequence
  ENSG00000272144_4 (sequence is synthesized)
acagtgacagttctgaatttgaatataaaggagcttaggtgctataatctgaatggaacgtgggaataaaactgtctttgccttgtacttcttgttagattaattaaataccaattatca

SEQ ID NO: 836174 - DNA, 120 bp, Artificial Sequence
  ENSG00000272144_5 (sequence is synthesized)
gtataagaaaatggcaataaattgtcaaagtggaattggaaagtgtttttaggatttggatatgaagcaggcttcccatgtgaccattctcacttcttattctgaagtctaacactctgc

SEQ ID NO: 836175 - DNA, 120 bp, Artificial Sequence
  ENSG00000272144_6 (sequence is synthesized)
ttttctttctctccctctcttcattgattcttctagtggctggtgtttgggtattgtgggaactgagctttcatctcctatgttagccatagagatgagggctttgagggcaccatggaa

SEQ ID NO: 836176 - DNA, 120 bp, Artificial Sequence
  ENSG00000272144_7 (sequence is synthesized)
tccgattgctggaaataaatcaatcttaaaggaaaggaaaatttaaaaatcaggtgcaacaaaagcaaaatgagaaaactgctaaactctacaattctataaagaagaattgcataaaaa

SEQ ID NO: 836177 - DNA, 120 bp, Artificial Sequence
  ENSG00000272145_0 (sequence is synthesized)
acacggaccccacgagcgcggcggcggcgacagcagcgggccaggcaagagcacaacatggcggcgggcaggacggaccgagctacagcagcggccgcgcgaggaagtgaggtctctggc

SEQ ID NO: 836178 - DNA, 120 bp, Artificial Sequence
  ENSG00000272145_1 (sequence is synthesized)
gaaggcgggaagcgctgcccctccccccgccgccgcttccctatcaccctcgcacagaaactcccgcacactcacacacctctgctcaggagtccaggaagagcaggagccgcccccgcg

SEQ ID NO: 836179 - DNA, 120 bp, Artificial Sequence
  ENSG00000272145_2 (sequence is synthesized)
ctcctacggagtcgggcaatgcagaggcccaggcgcggcggaggggagggggaagtgtgcgtcacggagaacggagcgcgcgcgaagcgggggcacaagcaagatggcggccacgccgtt

SEQ ID NO: 836180 - DNA, 120 bp, Artificial Sequence
  ENSG00000272145_3 (sequence is synthesized)
tgcaccgtttccccttttcccttccccctcccttggcgcctggactcccagtatcgtgcggtgcgcagaagctgtgctccttgaggtctcgcgagaattgggaaggggcgacgacagagg

SEQ ID NO: 836181 - DNA, 120 bp, Artificial Sequence
  ENSG00000272145_4 (sequence is synthesized)
gaggcggaatgagatctgagagttttaaccccgccccctttcgggagctcgagatctgagttttgaccccgccccctttcgggggatccggaggcgctgcccagtgacctccaccaccct

SEQ ID NO: 836182 - DNA, 120 bp, Artificial Sequence
  ENSG00000272145_5 (sequence is synthesized)
gcctatccttgtggatctccttggtgcgagcttgaattttaggaaataagtaggtgtgtgcgcgtgcccttgagttttaggaactaagtaggggcgtgtgtgtgtatttgtgtttttaat

SEQ ID NO: 836183 - DNA, 120 bp, Artificial Sequence
  ENSG00000272145_6 (sequence is synthesized)
ttggggagaaagaactgggggatgaaggtcgacatggcgttccagattaagcatgccgttcaagtagacagctactggcaccttaaattcataaaagagcatttagcaccaaactgtaaa

SEQ ID NO: 836184 - DNA, 120 bp, Artificial Sequence
  ENSG00000272145_7 (sequence is synthesized)
cctctagaataaagaacagtacttaccaagaatagttagcttgtaaccttacgtcgacatagttgttcttatttgaatgcagattttaaagttttatcacgcagttggaaaccacagcta

SEQ ID NO: 836185 - DNA, 120 bp, Artificial Sequence
  ENSG00000272145_8 (sequence is synthesized)
ctatgagcatggattttttcatacttatctctttcatttccgtgaccacttggtccaaaggcatcaggattgtatccattttacaaatgataaaactgaagctcaaaaaggttaagtaac

SEQ ID NO: 836186 - DNA, 120 bp, Artificial Sequence
  ENSG00000272145_9 (sequence is synthesized)
ttgatctaagtccccacagctagtaagtgtcaaaaccccatccgaataacttcaaaacctgtaggtatagtcatcaaatgtgtcttgaatggaattacctacagtgagagttagtgcatt

SEQ ID NO: 836187 - DNA, 120 bp, Artificial Sequence
  ENSG00000272145_10 (sequence is synthesized)
aggtaacaagcgcagagaggaatgactgcctctgctgatggtaaccttgaattttacaaatgacactggagcctttctgagactagtgttgcatgggtcctcaataaaatcacactgttg

SEQ ID NO: 836188 - DNA, 120 bp, Artificial Sequence
  ENSG00000272145_11 (sequence is synthesized)
ttactcacttcctttgggtttataaccctggtgataaagtaattgagaatagtggagtaaaccctcgacttgaattcaggaaaattgttttcaaatccagtttcaataaatctcacatca

SEQ ID NO: 836189 - DNA, 120 bp, Artificial Sequence
  ENSG00000272145_12 (sequence is synthesized)
ggcactctatttgatgaatgaatgaacaaaacctaactataagacacttgacttcagggagtctcaattccttcatctgtaaaaagatctaattcctaacttttggtaatgttggggaga

SEQ ID NO: 836190 - DNA, 120 bp, Artificial Sequence
  ENSG00000272145_13 (sequence is synthesized)
gtgaatgaaataatgtgagagtgcttcgtaaattgcaaaagtgttataaagaagttactggtaagagctacgagtgtctcgctgcactctagcatgggcgacagtgcgaggccctgtctc

SEQ ID NO: 836191 - DNA, 120 bp, Artificial Sequence
  ENSG00000272146_0 (sequence is synthesized)
gatgggtattccctgatgccatgaacttacacgtttcacacacgggaccagacgcttgctttagttgacgcatgaagaccggtccggtcttttgcggagaaaagtggttaaaagctgact

SEQ ID NO: 836192 - DNA, 120 bp, Artificial Sequence
  ENSG00000272146_1 (sequence is synthesized)
gaccaccacgccaagtgattctgaagatctctaattctgtcaaggcgagagcgctccaacacgtgttcatcggctgttgctttttaaagagaaggtcaggcatggtggctcacacctgta

SEQ ID NO: 836193 - DNA, 120 bp, Artificial Sequence
  ENSG00000272146_2 (sequence is synthesized)
gagactcacttgagcccagaagttccagaccagccttggcaatatagtgagatgccatttctattttaaaaaatattttaaaaataaaatatttttctattcacctttcatcaatacaaa

SEQ ID NO: 836194 - DNA, 120 bp, Artificial Sequence
  ENSG00000272146_3 (sequence is synthesized)
gctgacgagcatctctcgacggcgccaccgcccggacgtggccccaggagccgggagaggccggctgaggcacatgcgtactgggagacggacaaagtcccacaatacctcgcttcgtca

SEQ ID NO: 836195 - DNA, 120 bp, Artificial Sequence
  ENSG00000272146_4 (sequence is synthesized)
ctgccaaatcagactcagggtgagacgcttccgcccggatgaaggtattgtcggggtgatagtccttgcttccggaaaggcgagctgagcattatgggttaggtgaggaacctcgccctc

SEQ ID NO: 836196 - DNA, 120 bp, Artificial Sequence
  ENSG00000272146_5 (sequence is synthesized)
cttgcttccggaaaggcgagctgagcattatgggttagggtctcactttgtcacccaagctgaagtacagtggcatcatctcggcttactcaacctcctgggatcaagtgatcctcccac

SEQ ID NO: 836197 - DNA, 120 bp, Artificial Sequence
  ENSG00000272140_0 (sequence is synthesized)
tttgggttctttttctattcactcatgtcagatagagacatacatgttgtaaattattttgtcagaatgaaagcctggcagattaaatgctttcttctcttcttgctttacttgatatca

SEQ ID NO: 836198 - DNA, 120 bp, Artificial Sequence
  ENSG00000272140_1 (sequence is synthesized)
atctcttgttcatttcttgataatatgtttggttatttttgttttcattgcttttagtgtcagagatggctttggattccccgttctgtgtgctgctgtctggctcctgaacccagctgt

SEQ ID NO: 836199 - DNA, 120 bp, Artificial Sequence
  ENSG00000272140_2 (sequence is synthesized)
agaggtgtgtcaatcccaactggtgaagtactgagaggaagctacacaaaaggcagcaaagtattagtgagtggtgtcattgagcaaacacgaagtcgggctcatccaaggatgagattt

SEQ ID NO: 836200 - DNA, 120 bp, Artificial Sequence
  ENSG00000272140_3 (sequence is synthesized)
tgccagagaaaggacgagcagcaagtcagggagcttaaggtggtggaaaggaaatccctcacagcaactggcaccataatcaagacagaatgtttgcagaataaatggagttacctgctt

SEQ ID NO: 836201 - DNA, 120 bp, Artificial Sequence
  ENSG00000272140_4 (sequence is synthesized)
atggggtcactcatctccagtagaattaagtccacagtgaagttgtccccccatccccaaagagataaacatatatgaatgaactcacatgataacaactactgctgcctgggatcatga

SEQ ID NO: 836202 - DNA, 120 bp, Artificial Sequence
  ENSG00000272140_5 (sequence is synthesized)
gagacctgaactgaactgataggaagtgaaaggtggctgagataatgagaatagacccatctgcagaggatcataaaaccagcaaagacaagatcttgtctaagatgccttcacaaactt

SEQ ID NO: 836203 - DNA, 120 bp, Artificial Sequence
  ENSG00000272140_6 (sequence is synthesized)
tgtccatgagaactctaaggacttctccagacctgttggctgctgctgtgatctctgcccaagaggagcctctgaccaacatccaaagggcttctggacccactggactcctctggaggt

SEQ ID NO: 836204 - DNA, 120 bp, Artificial Sequence
  ENSG00000272140_7 (sequence is synthesized)
accttggtctcccgatccatggctgtggttttttactccgtttatcactcctgtgtgtagaatgataattgcacaattgatagtgtgaacacctcttgataaatggtaaatctgagcata

SEQ ID NO: 836205 - DNA, 120 bp, Artificial Sequence
  ENSG00000272140_8 (sequence is synthesized)
aaaggacgagcagcaagtcagggagcttaaggtaattatgggaaagtgactatctacaattgcttaggtagaaggagacagattggatttttgtgtgtttggtatttgggataagaggga

SEQ ID NO: 836206 - DNA, 120 bp, Artificial Sequence
  ENSG00000272142_0 (sequence is synthesized)
cccaaacctctctcgcacgcggggactgagcacggcccgaaaagccgaggacagccggactcaccctgtagttatagtagtgcgtctgcacaagatgccggtggcgcgacttgtggttgc

SEQ ID NO: 836207 - DNA, 79 bp, Artificial Sequence
  ENSG00000272142_1 (sequence is synthesized)
tgcgtctgcacaagatgccggtggcgcgacttgtggttgccgaagttggatttctcgcaaaccaagatggggtcttgct

SEQ ID NO: 836208 - DNA, 68 bp, Artificial Sequence
  ENSG00000272142_2 (sequence is synthesized)
agtgcgagctaccgtgcgcagccgctgggatcccattttaatcaagccaatttgctacccatggggac

SEQ ID NO: 836209 - DNA, 120 bp, Artificial Sequence
  ENSG00000272142_3 (sequence is synthesized)
gatcccattttaatcaagccaatttgctacccatggggacctcaacagctttgccattgcacactatctttgcagacaagatcttaatcacatccaactttctgcagttgcacagggtac

SEQ ID NO: 836210 - DNA, 120 bp, Artificial Sequence
  ENSG00000272142_4 (sequence is synthesized)
agctggagatgacatcaccttagacaacatcaccctagcccaagacatcgctattagagatacatcacctggacactaaagcctccaacccagtgacactctcaaggtgctgacaaaatg

SEQ ID NO: 836211 - DNA, 120 bp, Artificial Sequence
  ENSG00000272142_5 (sequence is synthesized)
gacatggacatttgttgcttttcttcttttgaattaggaactctattgtgtttcctgaatttactgtctgcttggcccatgatcctggtatgttccttgctctctgccaaaacatgcacc

SEQ ID NO: 836212 - DNA, 120 bp, Artificial Sequence
  ENSG00000272142_6 (sequence is synthesized)
gtcccctccacacctaaaggaaaacctggtagaagctactactctcaatgccattctaaaattgacgaagagtattattttccccaagaggcagctgctgcaggccagtgaatcctctgg

SEQ ID NO: 836213 - DNA, 120 bp, Artificial Sequence
  ENSG00000272142_7 (sequence is synthesized)
accctggggagagggtcatacactccctagtgacttctactgtatgctccagctttccaccaggacctcctgccctgtccccaactgtaacgaccacaaccaccccatccccttggttac

SEQ ID NO: 836214 - DNA, 120 bp, Artificial Sequence
  ENSG00000272142_8 (sequence is synthesized)
acacaaatatcaccagtctttacatgtactttactgacttctcagataataccctccaacaagataactgcaggacttgccaccatgacctgagaaatacaccaagatattattgtccaa

SEQ ID NO: 836215 - DNA, 120 bp, Artificial Sequence
  ENSG00000272142_9 (sequence is synthesized)
agagtgtgccaacagcttagatatagagtgtgagagagaagagtggaggctggttctcaggctccagaagcataagcctgcatggagcatagcgtcactgagcaagacaggtgtggagga

SEQ ID NO: 836216 - DNA, 120 bp, Artificial Sequence
  ENSG00000272142_10 (sequence is synthesized)
tgagaagcgggccacaggatgggaagggaatctgtgtggaggcggtgccctaaacatgctgccttgaggagggacctctacatggggtggccgggcacagccagccgggtgaacataaat

SEQ ID NO: 836217 - DNA, 120 bp, Artificial Sequence
  ENSG00000272142_11 (sequence is synthesized)
ctctctaggacttcgttataaagtaaggcctgtgccctagatgtccctggagacagcgccatctggtggaacttcctgtaacgatcgagatgttccgtctgtgccgtccaacatgggagc

SEQ ID NO: 836218 - DNA, 120 bp, Artificial Sequence
  ENSG00000272142_12 (sequence is synthesized)
catgcaggacacatggtgactgagcactgggactgtgtgccgcgtgaccaagagcagctcagctctaaagtctcctccagctttatgatgtcacttcctgtatcttctctacacattctt

SEQ ID NO: 836219 - DNA, 120 bp, Artificial Sequence
  ENSG00000272142_13 (sequence is synthesized)
ggaaatttcaaatctatttcgtctgctaatgccatgtgaatgggaaacttagatacaggctggcctacaaggactccttatacttcaatttttgttcctcctttcaactctcataaaaaa

SEQ ID NO: 836220 - DNA, 120 bp, Artificial Sequence
  ENSG00000272142_14 (sequence is synthesized)
ctttctaagtctcatccatcattgctgcaaaggtgccttagtttgatgttaaagtgtcacagggccaatgtattgaccatgtttctggcgtctataaagtcgatgttttaatatctgtcc

SEQ ID NO: 836221 - DNA, 120 bp, Artificial Sequence
  ENSG00000272142_15 (sequence is synthesized)
ccaaacattccttgatctggaaaacccaacagtatgctttgcttcagcctcaggcctcccttgtcgcctcctctgtgccaccccccattcctcgggagtcctcctcctcccaggggcgca

SEQ ID NO: 836222 - DNA, 120 bp, Artificial Sequence
  ENSG00000272142_16 (sequence is synthesized)
cttttcaaatacaaaccaaccaatccagagcccacaccccaaccacctcctttattggtctctcacatgctgggccactatccactttccctaatcacccaaagtcaggtaccagacaat

SEQ ID NO: 836223 - DNA, 120 bp, Artificial Sequence
  ENSG00000272142_17 (sequence is synthesized)
tagggacagcccctataccccagagcctgctgaaattagcaaactggccaatcccgagtctgtttactttgccttcctgtttcttcccaaggaaatcacaaaaaaaggctcttgtccaca

SEQ ID NO: 836224 - DNA, 120 bp, Artificial Sequence
  ENSG00000272142_18 (sequence is synthesized)
attgagggcaagacaaaaggctccctaactgcagggaaaggggaggcaagtcatgagctctgagaaggcctggcagtgtctgtgaacacatgagatgtgcctgtcaccccaactctgcca

SEQ ID NO: 836225 - DNA, 120 bp, Artificial Sequence
  ENSG00000272142_19 (sequence is synthesized)
aggcagcgtgcaaacagcccctgttgcacctccactttctgcctggaggcccgagcaaccgaaggctgtcacatcagcccagctactgggaaatgccaatttggaagcccaggacttacc

SEQ ID NO: 836226 - DNA, 120 bp, Artificial Sequence
  ENSG00000272142_20 (sequence is synthesized)
gccaaacctacgggccagtcccccgtacatgtaaaagtacacccaccccagcatggacatgatatttataggagtgtttctcaactgagggcaattttgccccctggggacatttggttg

SEQ ID NO: 836227 - DNA, 120 bp, Artificial Sequence
  ENSG00000272142_21 (sequence is synthesized)
tcacaaatgagggagggggtgctagtggcatctagtgggtggaggccaggggtgctgctcaacctcccacagcccacaggacagcccccacaacggaattacccagctgccccaaacctc

SEQ ID NO: 836228 - DNA, 120 bp, Artificial Sequence
  ENSG00000272142_22 (sequence is synthesized)
ggtagtgctgaggttgtgataccctgatttatggcaacattccctctgaaaacacaaagctctattacttggatccctggagcagaagtaactttttaataaacaaaatggcttattttc

SEQ ID NO: 836229 - DNA, 120 bp, Artificial Sequence
  ENSG00000272142_23 (sequence is synthesized)
cgatctcggctcactgcaacctctgcagtgtggtagaacgcagatgtggtagaaatagccaccgcatcggcccacatcaaagttttaaacaaaggaagcgtcacatattaaaagctgact

SEQ ID NO: 836230 - DNA, 120 bp, Artificial Sequence
  ENSG00000272142_24 (sequence is synthesized)
agttttaaacaaaggaagcgtcacatattaaaagctgacttggtggatgtgaagagaaaaatggaatcagtagctgagtggtaagagatttgcaaaaggagagaagaagatggattagaa

SEQ ID NO: 836231 - DNA, 120 bp, Artificial Sequence
  ENSG00000272142_25 (sequence is synthesized)
caagaataaacaaacagaacaactacaacaacaaaactaaacatacttctccttataccattaaaccagtctccctatcctgggaataggccagtccaatcaaatggttgagactcattg

SEQ ID NO: 836232 - DNA, 120 bp, Artificial Sequence
  ENSG00000272142_26 (sequence is synthesized)
atctgatggagtgttaactttgtttttaaaggtacgaattaaacaccatttgtcctatctgattcacaaggaagcagaatttttcaccaatgattgtgcaagctcctccttgttgggcag

SEQ ID NO: 836233 - DNA, 120 bp, Artificial Sequence
  ENSG00000272142_27 (sequence is synthesized)
tgtatccagggcacaactattttggagtacaacagtggctaaactattcatttctgactggaatacttccaatgtttgcatagtggtattgaactctggttctattaccatgggaatatt

SEQ ID NO: 836234 - DNA, 120 bp, Artificial Sequence
  ENSG00000272142_28 (sequence is synthesized)
taggatcaccttttccaagccatgaattctaaaacttggaaatcaggtcctcgacattgaaaagaacttggagtgaggatatagtgggtattctatgacatctcatctggtatgtttatg

SEQ ID NO: 836235 - DNA, 120 bp, Artificial Sequence
  ENSG00000272142_29 (sequence is synthesized)
tatctgagtccaaactgtcctgaccttttaagtgaaaaccctttacatgccttgttgccacataaaataaaaagagaaaaaaagaccagtgctgttcatggtcaaagtcagagtggaacc

SEQ ID NO: 836236 - DNA, 120 bp, Artificial Sequence
  ENSG00000272142_30 (sequence is synthesized)
tgcaattctccagatctaatgtgtttcatgacccttgtcattggtcatactgggatctgcatacctccatgtgcccctggaagagcagaactgtttgccaaatatctaatacaggaggcc

SEQ ID NO: 836237 - DNA, 120 bp, Artificial Sequence
  ENSG00000272142_31 (sequence is synthesized)
tgcaatctgggtctggaagctgtaaggcctggttttgttacttggccaagttattccaggtttttggtctactcattcataatttttggtgtcgagcatccgaaccgggagcacctgaac

SEQ ID NO: 836238 - DNA, 120 bp, Artificial Sequence
  ENSG00000272142_32 (sequence is synthesized)
tatctcgggctgtgcaagtgtggcctgggaaacagctgaaacatttggtaatttggcaaatatttatgcttaaaaggcagtgccggaaccaattatgacttccttgaggggtttgagaat

SEQ ID NO: 836239 - DNA, 120 bp, Artificial Sequence
  ENSG00000272142_33 (sequence is synthesized)
gctacctatggaatccgactacagggtttgagtgtaacattgccttggtatatctaggaagggtccaggaccatttctgttttcaatgcaaaggggaaaattcctttccaatgacttcaa

SEQ ID NO: 836240 - DNA, 120 bp, Artificial Sequence
  ENSG00000272142_34 (sequence is synthesized)
ctgaattgtttgacatttcccagcccagactccagacctggtgatcagatgatcccagccccagccttcaaaccactgcaaatagagaagagacaagctatccctgagagagccctgccc

SEQ ID NO: 836241 - DNA, 120 bp, Artificial Sequence
  ENSG00000272142_35 (sequence is synthesized)
ccttcagcctgttgtttgtaagtttttatgtaggaaagtagaaaattcagaatatgtttcatcaggtttttgtttggcaaagtgtcaacatgtttataacagagttaaagataaaggaaa

SEQ ID NO: 836242 - DNA, 120 bp, Artificial Sequence
  ENSG00000272142_36 (sequence is synthesized)
ttcagcctgttgtttccacacttttaagttgagaaaaggtgctgttcctacaacacagatcaagccactcccttgcttgaaacactccagtggcagtccacagcttctgggacaagagcc

SEQ ID NO: 836243 - DNA, 120 bp, Artificial Sequence
  ENSG00000272142_37 (sequence is synthesized)
agcctgtcacttggcagcagcctctccatcttcgtctccagccttacagtccgatctcattatttctagattccatacctgcaaattcacctcttcactaaaatgtgtttgtaaaccaaa

SEQ ID NO: 836244 - DNA, 120 bp, Artificial Sequence
  ENSG00000272142_38 (sequence is synthesized)
cttggcccatgatcctgctgggaaacctcttatcctcatcaccagtgccagggtccagcttcaggagggcagggctcacctgctttacttccagatcaccatgtgcagcgtggagcttcc

SEQ ID NO: 836245 - DNA, 120 bp, Artificial Sequence
  ENSG00000272142_39 (sequence is synthesized)
ctctgacgtgtttgttggatttgtttcaaaaaggcggccatggtttctttttttccttcctcggccctgattaatttcaacagaagaaaatgtatcccctctagtttgtgatggaatcca

SEQ ID NO: 836246 - DNA, 120 bp, Artificial Sequence
  ENSG00000272142_40 (sequence is synthesized)
tgtcctgcactggatgacccaatcgcttctgattttccaagcttggctctcagaccatcctggtggaagaaacactagcagtctgcccaatctgaatgcaaatccagaataatcttttct

SEQ ID NO: 836247 - DNA, 120 bp, Artificial Sequence
  ENSG00000272142_41 (sequence is synthesized)
tttgttgttacacagttatgagtgcaatttttaaatggctgctactctacagcctgcctgccttatgctttctcctgggcacgcaggaaagtgagagcttccactccaaagcagagatcc

SEQ ID NO: 836248 - DNA, 120 bp, Artificial Sequence
  ENSG00000272142_42 (sequence is synthesized)
tagtgacactaagtcaggtaataatctctccagctggacctcatgcactcacatggacaacacacttctctccttcagtgatcatcatccttgtaccatgttggtggcatgctgtaatcg

SEQ ID NO: 836249 - DNA, 120 bp, Artificial Sequence
  ENSG00000272142_43 (sequence is synthesized)
tgactcaacatccggttgccaattgctatgtaacaaaccacctcaacattcagtggcttgaattgaaagcagggtcttgaagagatatttgcacatttcatcctcccagcagcattattc

SEQ ID NO: 836250 - DNA, 120 bp, Artificial Sequence
  ENSG00000272142_44 (sequence is synthesized)
acaacagccaataggcagaagcaacccaatgtccaaccatagatgagtggataaccaaaatgtagtccatccatacaatgaaatatgattcagccttaacaaggaaggaagtcccgccac

SEQ ID NO: 836251 - DNA, 120 bp, Artificial Sequence
  ENSG00000272142_45 (sequence is synthesized)
gtgctacaacatggatggaccttgaggacactatgctaagtgaagtaagccaggcacaaaaggacaaatactctatgattccattttatagggtaccaaagagaatcaaactcacagaga

SEQ ID NO: 836252 - DNA, 120 bp, Artificial Sequence
  ENSG00000272142_46 (sequence is synthesized)
tagaaagtagactggggtggccagggactcggggagagaggaaagggcagttattgtttaaaaggtacagagtttcagtttgggaagatgaaaatgttctggaaacggttaatggtgatt

SEQ ID NO: 836253 - DNA, 120 bp, Artificial Sequence
  ENSG00000272142_47 (sequence is synthesized)
ttacattgtttatgttaccacgatttgtaaaagagcagctgcgctgagaatgagcatgcttgtcattggcagctctctgagattttcagtgcctcttactggcttgttaagaagacggca

SEQ ID NO: 836254 - DNA, 120 bp, Artificial Sequence
  ENSG00000272143_0 (sequence is synthesized)
gcgtagcgaagcccccggcgagccgaggctgggagcgcggtgatggccggtccccgtgagcagagggcagcggcggcgggaccggggactctgggccaatgggtaaagccaggaggaagc

SEQ ID NO: 836255 - DNA, 120 bp, Artificial Sequence
  ENSG00000272143_1 (sequence is synthesized)
ccgtgcctggcccgttgggctccctcctcctcagagccgaagcagtccacactcggaacccagcttcacccggattaccgaggggttccacgcctggaggcagagctgcagcgtgggccc

SEQ ID NO: 836256 - DNA, 120 bp, Artificial Sequence
  ENSG00000272143_2 (sequence is synthesized)
gctcgcggctttgcagaaaacaaataatgacacacttctctggaagcccggggcctgggcccagagccgtggcttctgccaaactttctggtcccggacaccaactccccgcctctcagc

SEQ ID NO: 836257 - DNA, 120 bp, Artificial Sequence
  ENSG00000272143_3 (sequence is synthesized)
ccgaggccacagcggcccagcaccctgcaccttttaaagtggctccaaaaaggagaaagccaaatagatcagggtggtaggcgcgagtgcagggagctgcgaagttggaagattactgct

SEQ ID NO: 836258 - DNA, 120 bp, Artificial Sequence
  ENSG00000272143_4 (sequence is synthesized)
aaagagggagtttattttttgcggaatgtcttccttgttaagaagaaaattaaagattaaaaaagaaaatgaagggtctggcaactatgaacctaatggtgccctaacgtttgctattct

SEQ ID NO: 836259 - DNA, 120 bp, Artificial Sequence
  ENSG00000272143_5 (sequence is synthesized)
aaggccgagaatgccagatggggagaacgccatgagcttttgagcttgtgtattttgcgagaggctcgagtgtgaacagtagactacaggccttgagactgagaaggaagctataaaatg

SEQ ID NO: 836260 - DNA, 120 bp, Artificial Sequence
  ENSG00000272143_6 (sequence is synthesized)
tgggccaagggaatgtctgcaggaccgggtttcagagcaccctatcgtggcggataaagagccactaacagcttttttctttatttagtagccaaattcttggttggcgctttgagaaag

SEQ ID NO: 836261 - DNA, 120 bp, Artificial Sequence
  ENSG00000272143_7 (sequence is synthesized)
gagtaagcattaagcgaatttaaccaagtaaaatgtatcgtcctgccctttgtagtcccatagttcactatcctagagatacctatttttcactattttattaaagtgtattgaaaacct

SEQ ID NO: 836262 - DNA, 120 bp, Artificial Sequence
  ENSG00000265975_0 (sequence is synthesized)
gcaaataatctgccagagaaattatgggatgcctgccttctgaaaatggaggaaaactgcaaaagagtggctcattggtgctcactcctagggctctgagcatcccaagaagccaacttg

SEQ ID NO: 836263 - DNA, 120 bp, Artificial Sequence
  ENSG00000265975_1 (sequence is synthesized)
gtcccatcgtacatcccctcagaagtaggcattctcctctccacctacagctgtggcccagatgtggagcctgcatgttatgccacgccgtcaacactgagttctgtctgcgtctccctg

SEQ ID NO: 836264 - DNA, 120 bp, Artificial Sequence
  ENSG00000265975_2 (sequence is synthesized)
aggtgggagcatgcaccagtgaaacctgagttctttctgttcacatgaggtaatcttcccactggctggaagacacttcatttatacaaacagcgattactgtaaaagtgtattcatgtt

SEQ ID NO: 836265 - DNA, 120 bp, Artificial Sequence
  ENSG00000265975_3 (sequence is synthesized)
gttcatcacatgaataggacatgggagaaaaactatataattatcctgagaaaatgccccctaatgcaaattctctgtggttaggaataaaaggagactttgtcaacatgataaatgata

SEQ ID NO: 836266 - DNA, 120 bp, Artificial Sequence
  ENSG00000265971_0 (sequence is synthesized)
acatttctgtctctgctcccactgcaggctgttttgttcctccctgactctgtcaccctcctctgcttctctgtcacagtctctctcccttccctcagtctctgtccttctgtctgagcc

SEQ ID NO: 836267 - DNA, 120 bp, Artificial Sequence
  ENSG00000265971_1 (sequence is synthesized)
ccaggtgatgagacaccggggcagggcgctaagtgaacagaagctgtggtcagattggagcatcctcagagccatgtataaaaatggactagctctctccctctccctctccctctccct

SEQ ID NO: 836268 - DNA, 120 bp, Artificial Sequence
  ENSG00000260338_0 (sequence is synthesized)
gggaggcagagggtggtgctggggttccaggaagccgaaggtcctttcacagatggaccgttaagccagcccaggggacggcagagcagcctgagggagcaagaactgtcaccacggtct

SEQ ID NO: 836269 - DNA, 120 bp, Artificial Sequence
  ENSG00000260338_1 (sequence is synthesized)
gcccgcgaattttagaccacaaatctcagcttctgggagccataatcagggctgcaaccctgtgccatcagcagatatgaaagcaagtggaagatccctacatatatgggatgcaggcac

SEQ ID NO: 836270 - DNA, 120 bp, Artificial Sequence
  ENSG00000260338_2 (sequence is synthesized)
tgaggtgatgctggggttgcagtgagctgtcaaactagatgtgtcagaaatgagaaaggagatgagagaacaaattagaatacagagtgatcgacactttgatgaaggaagtaagtggag

SEQ ID NO: 836271 - DNA, 120 bp, Artificial Sequence
  ENSG00000260338_3 (sequence is synthesized)
cctggggtccatgaaacccactgccaaaccaacccagacagagacaaagtatccctatgtttcccaggctgatctcaaactcctggcctgaactgacctcctgcctcaaccgacctcctg

SEQ ID NO: 836272 - DNA, 120 bp, Artificial Sequence
  ENSG00000260338_4 (sequence is synthesized)
gtttttaatacccctgccaagaccacagttttaggtaaaccgccatcctgcctatacccatgtccctgttccctttcctagctgtgtgaccttgggaagttcccttgcctcacgaggcat

SEQ ID NO: 836273 - DNA, 120 bp, Artificial Sequence
  ENSG00000260338_5 (sequence is synthesized)
caacttgctcttctgttaaacggggacaacagaaccccgtgagacactctgacaatcacatgaagctatgtgaataaaacatgggcctagtacatagcgagtgtacagcagctgctcact

SEQ ID NO: 836274 - DNA, 120 bp, Artificial Sequence
  ENSG00000260338_6 (sequence is synthesized)
agtctttcaacaagtagcgactgagagtctattacatgcaggcacaggcataggtgctggggatacaagaatgagcaaaacactggtaatgggacagactgatggtaacgggacagactg

SEQ ID NO: 836275 - DNA, 120 bp, Artificial Sequence
  ENSG00000260338_7 (sequence is synthesized)
ctggcatattggaaattcagaaaactccctgccctcccagtggcaggaggtacagcaagccggcaagtaagtaaaatacactggatgtcagagggtggtgctcagtgttgtgtgagcatc

SEQ ID NO: 836276 - DNA, 120 bp, Artificial Sequence
  ENSG00000260338_8 (sequence is synthesized)
aaagcaaagaaaagaagaagggtgctaagcagggcttagacatttaaataaagccatcaaggaaaacgttgcagagaagataatatttgaataaaaactcaaagagggtaagagtacaaa

SEQ ID NO: 836277 - DNA, 120 bp, Artificial Sequence
  ENSG00000260338_9 (sequence is synthesized)
acccagacagactcagtgtgacattacaagcatcctgggtggaactgcaagacatagttatttcaagattatgaagagtgtggtagccaaactccaagatggccgcatgatccctcctcc

SEQ ID NO: 836278 - DNA, 120 bp, Artificial Sequence
  ENSG00000260338_10 (sequence is synthesized)
aggtactcgtgcccttgtatggtatgctcccacagtcttccgaggattccgttgtatgactgatcgaatacagcagaggcgatggcataggacatctgaggctacatcatctaagggata

SEQ ID NO: 836279 - DNA, 120 bp, Artificial Sequence
  ENSG00000260338_11 (sequence is synthesized)
tgaggacactcaagcagctctgtggcctcctgacaatagctgttaggtgaaacaccttgggtgcagaccctctagccccactccagccttcagaagacagcagccccagctcacatggga

SEQ ID NO: 836280 - DNA, 120 bp, Artificial Sequence
  ENSG00000260338_12 (sequence is synthesized)
ccctgagccagaccaccaagcaaaccactcccagattcctgacccacagaaactgtgagataatgaaagtctgctgttagaagtcactaagttcagtgtaactgtcacgggcaagagaca

SEQ ID NO: 836281 - DNA, 120 bp, Artificial Sequence
  ENSG00000260338_13 (sequence is synthesized)
gccaatacaatactttcgtgcttcatacatcatttttccatctatccaaaatgggaagaatacttcacagacttgatgtgaagctgcaagactcctggtactccactgatgcaggtgggt

SEQ ID NO: 836282 - DNA, 120 bp, Artificial Sequence
  ENSG00000260338_14 (sequence is synthesized)
cagagggtaagtccaggctgtgtgaccatgggcaattactttgagttttggtttcctaagccacaaaatgaggataaaaacagcacacaccttacggagtcattgagaggatgttaaaag

SEQ ID NO: 836283 - DNA, 120 bp, Artificial Sequence
  ENSG00000260338_15 (sequence is synthesized)
aacagagatcaaacatttggtcaactgaaaagtgggataagaaagttgggtgtgtggttgtcatttttcatcatccctttcctcttcttcctcttcttcttggcatcacaggtaaacact

SEQ ID NO: 836284 - DNA, 120 bp, Artificial Sequence
  ENSG00000260338_16 (sequence is synthesized)
ctaaattgcatctttgactccgctgacactcctgaggcagtgctggtccggatgtttctcagtgtggactcctcgtcccagaccgaggatgctgggggtccctaaccttccaccttccac

SEQ ID NO: 836285 - DNA, 120 bp, Artificial Sequence
  ENSG00000260338_17 (sequence is synthesized)
atgctgggggtccctaaccttccaccttccactccagcaacactttgcatctagggagcatctgcaatgctatgcactactttttttatttatttttttttttttgagacagagtctccc

SEQ ID NO: 836286 - DNA, 90 bp, Artificial Sequence
  ENSG00000260338_18 (sequence is synthesized)
ccctctgtcactcaacctcccaagtttggataagtttttgtatttttagtagatacagggaatcgccatgttggccaggctggtctcgaa

SEQ ID NO: 836287 - DNA, 120 bp, Artificial Sequence
  ENSG00000260338_19 (sequence is synthesized)
caaagtactaacattaccggcctgagccaccacacccagccactgtgtatttcttgtgcattttcaccctgaatccttactagggtattaagaagtaggtcttaacctcagccccgtctc

SEQ ID NO: 836288 - DNA, 120 bp, Artificial Sequence
  ENSG00000260338_20 (sequence is synthesized)
acaggtgaagaagcaaaagagaggctgacggatttgtccaaggtaacacagcactcagcagggttgcagtggagcctcagcttgaactgagcatgcctactgcaaacactgggatgtgaa

SEQ ID NO: 836289 - DNA, 120 bp, Artificial Sequence
  ENSG00000260338_21 (sequence is synthesized)
tcaccgtcgtagtattcccaaagccttcgtccacctttccacgaggtacagcgcaggagcatgttaaagctggccaccatcaactctagggaactgctcctgcctcaaaagtgtcagcaa

SEQ ID NO: 836290 - DNA, 86 bp, Artificial Sequence
  ENSG00000260338_22 (sequence is synthesized)
caactctagggaactgctcctgcctcaaaagtgtcagcaatgcctaaagctctacaatgtcattaatcaaaagtcagcactccaga

SEQ ID NO: 836291 - DNA, 90 bp, Artificial Sequence
  ENSG00000260338_23 (sequence is synthesized)
ctcagctacttgggaggctaacaggttgcagtgagccaagaccaccgccattgcactccagcctgagcgacgagatcaaaaccccaactc

SEQ ID NO: 836292 - DNA, 120 bp, Artificial Sequence
  ENSG00000260338_24 (sequence is synthesized)
ttgcactccagcctgagcgacgagatcaaaaccccaactcaaaaaaaaaaaaaaaaaaaagtcagcaagctttggcctggggtcacccctttaacttcctgggcagagagagggtcgtgt

SEQ ID NO: 836293 - DNA, 120 bp, Artificial Sequence
  ENSG00000260338_25 (sequence is synthesized)
gtgtctcaagcaagaccctgtctcaaaagagagagggcgggagagcaacggagagaaagagggaaggacagagaggtgcagagaaagcgggaggggggtgggaaggagaggtgtataaaa

SEQ ID NO: 836294 - DNA, 120 bp, Artificial Sequence
  ENSG00000260338_26 (sequence is synthesized)
agagagagagacaaagatatagacagacacagatatcaaaagagagagaaacagagggggacagaagctacctactctttcctgtaccagccacaagaattactcagacccacccacaga

SEQ ID NO: 836295 - DNA, 120 bp, Artificial Sequence
  ENSG00000260338_27 (sequence is synthesized)
gttctgggatttctgtttctgtacatcgtttctgaacttataatgagaagacacatattttattgtttctctttttgcagttttctagtagacattggtcatggaaaaatctggtgacca

SEQ ID NO: 836296 - DNA, 120 bp, Artificial Sequence
  ENSG00000260338_28 (sequence is synthesized)
agaaatcaaaaatgtgtttgttcccctccttcctcaacacagagaatggtcctcatgccacatccaccctccagcttattgaagtgaacaaataaacacaaatgatgtcccctgcttcca

SEQ ID NO: 836297 - DNA, 120 bp, Artificial Sequence
  ENSG00000260339_0 (sequence is synthesized)
ctttcacttccggcctggacctgaggctcctgctacgtgcagcggattgtgccgggcgtcggcaactgctcggctcgccagactgttcacgggcccagtagagcagtaaataaccggcca

SEQ ID NO: 836298 - DNA, 120 bp, Artificial Sequence
  ENSG00000260339_1 (sequence is synthesized)
cccctgcggccgtgccggccgtgatggaactagacagctcacccgactcgagaagaacggggtggggaggcgaggacgcagggcgacctggagaagaaagtttcccagatggctctaggg

SEQ ID NO: 836299 - DNA, 120 bp, Artificial Sequence
  ENSG00000260339_2 (sequence is synthesized)
tgaatcttgaatgttgtgatgcagctcgccaggcctacggggaggtaaaggacttgccaggctgaagtaacttcagaagcagaaaaacggaggattaaaaccacaagtcgttgtgatgtg

SEQ ID NO: 836300 - DNA, 120 bp, Artificial Sequence
  ENSG00000260339_3 (sequence is synthesized)
aaatttcgtggggcaagaaagggccggaagtaggtagtctgcacggctctgctagagagaggatcacaagatcacacaaatgtgatctacttatgactggaaaaaatgtgtactttcaga

SEQ ID NO: 836301 - DNA, 120 bp, Artificial Sequence
  ENSG00000260339_4 (sequence is synthesized)
gccagcttgaggcattccattgcctccaatatgagctcttcccttcaagattgactataaatctcttagttacaactcacatcccctttccccagacaaaaccccacatagcccggtgtg

SEQ ID NO: 836302 - DNA, 120 bp, Artificial Sequence
  ENSG00000260339_5 (sequence is synthesized)
tatttactgaaagcagtaagatattgctggggctttgggtgcaagatggagagtgctcagagataatgacaggggcctggtcctgcagggccttacgtagaaagtcaaggaatttattct

SEQ ID NO: 836303 - DNA, 120 bp, Artificial Sequence
  ENSG00000260339_6 (sequence is synthesized)
ctgagcaattgaaaatcatcccgaaagatctgcattttagaaataccatgttgagtagttgcataagaaaccagttaggaggcccctttttattggaggtagagaataatgagagactga

SEQ ID NO: 836304 - DNA, 120 bp, Artificial Sequence
  ENSG00000260339_7 (sequence is synthesized)
actacagaagtggggaaggaagacagctgtagatccaagaaatagtatccggaagagaggcttgagaagtgatcaaggagaattccacagttatcagagaccctgtcttccttgttcacc

SEQ ID NO: 836305 - DNA, 120 bp, Artificial Sequence
  ENSG00000260339_8 (sequence is synthesized)
actatattaccagaacataatacaaataatgctattgttattgggtggcattatttggttagtaggtactttttaaaatttttaaatttaattttagtattaaaatacatgtaaagatca

SEQ ID NO: 836306 - DNA, 120 bp, Artificial Sequence
  ENSG00000260339_9 (sequence is synthesized)
ggaaaatgaacttttaaaaataaagggctttcactgggcatgataacacatccctgtagtcccagctactcccagctattcaggaggctgaggcggcaggatcacttgaaccaaggagtt

SEQ ID NO: 836307 - DNA, 120 bp, Artificial Sequence
  ENSG00000260339_10 (sequence is synthesized)
caagtttagcctgggcagtatagtgaaaccctttctcaaaaacaaataaagggctactgaaataatgataatttatattcaggtcgtaggtacctaattactagttacacatacatggct

SEQ ID NO: 836308 - DNA, 120 bp, Artificial Sequence
  ENSG00000260339_11 (sequence is synthesized)
agattcatcaagcaatttgtctttgaaagttgattattcaaaaacagagcttgtagcaaaagaagcagaaattagatcccacagtcatcaagtttcagatcctaaggcttgcattcttac

SEQ ID NO: 836309 - DNA, 120 bp, Artificial Sequence
  ENSG00000260339_12 (sequence is synthesized)
accaatttcttctttgcttaaatcttaattttcatcagcattaattaagtgtctgggtactctgccagtcaggagagatgttaccaaaggtacaggatttgagaagtattgtcagaagag

SEQ ID NO: 836310 - DNA, 120 bp, Artificial Sequence
  ENSG00000260339_13 (sequence is synthesized)
ccaagttcataatcaggcccacaggatcaataatttgggggagtgtttagagcagtttcaaagatgagagcagtagatcaaagtagaatttcaggactgagcacatgccaaggcaccctt

SEQ ID NO: 836311 - DNA, 120 bp, Artificial Sequence
  ENSG00000260339_14 (sequence is synthesized)
ttatggatattcaacctgtaccagaagggaggagtcatttacttaaaagagttacacaagatgaaagagctagatccaaataaagacgctataaaaattactaatggggctgagcatggt

SEQ ID NO: 836312 - DNA, 120 bp, Artificial Sequence
  ENSG00000260339_15 (sequence is synthesized)
ggattacagggattcagttatttaattattactgaaagagctcttttagacttaaccagatttttaaaccaaatattcttatgcatacataaaagtaagttacacaagataaatttgttg

SEQ ID NO: 836313 - DNA, 120 bp, Artificial Sequence
  ENSG00000260339_16 (sequence is synthesized)
atcttccaaaatatccccccttactatacactagagtggggttttggcataatggcagacaaatagatggaacggaatagagggtccaggaaaagagccatttgattattactccatttc

SEQ ID NO: 836314 - DNA, 120 bp, Artificial Sequence
  ENSG00000260339_17 (sequence is synthesized)
aatgaagacaccaatttaatttagtggggaaggcaagttattttcaataaaaggtgatgaagaaaatagatatccctatgtgggaaaaatgaactatgatcccctacctcacagcataca

SEQ ID NO: 836315 - DNA, 120 bp, Artificial Sequence
  ENSG00000260339_18 (sequence is synthesized)
tgatcccctacctcacagcatacacaaacttaattaaaaatggatcacaggctggggatggtggctcacacctgcaattccagcactgtggaaggccaagatgggaggatcacttgagcc

SEQ ID NO: 836316 - DNA, 120 bp, Artificial Sequence
  ENSG00000260339_19 (sequence is synthesized)
aatacgaggaaatcccatctctctttatttttttcttttttgagatgggggtggttaatgggtacaaaaaaagtagcctgaataagacatactattcgagagcacaatagggtgactata

SEQ ID NO: 836317 - DNA, 120 bp, Artificial Sequence
  ENSG00000260339_20 (sequence is synthesized)
agggtgactatagtcaataataattgtatattttaaaagagtgtaactggattgtttataactcaaaggataaatgattgagggtatggataaccccattctccatgatgtgcttatttc

SEQ ID NO: 836318 - DNA, 120 bp, Artificial Sequence
  ENSG00000260339_21 (sequence is synthesized)
tatatcaaaacatctcaggtaccccataaatatatacacctactatataccaaaaaaacttaaaattaaaattagactgggtatggtagctcatgccttaatcccagcactttgggaggc

SEQ ID NO: 836319 - DNA, 73 bp, Artificial Sequence
  ENSG00000260331_0 (sequence is synthesized)
aagtttgaaatattgctaagcattaccaaaatatgacagagacatgaagtgtgcacaaaccattgaaaaaatg

SEQ ID NO: 836320 - DNA, 120 bp, Artificial Sequence
  ENSG00000260331_1 (sequence is synthesized)
tgacagagacatgaagtgtgcacaaaccattgaaaaaatgtcaccaatggatttgctccatgcagggatgctagaaaccttcagtttgttaaaaaaaaaaaaaaaatgcagtacctgcaa

SEQ ID NO: 836321 - DNA, 120 bp, Artificial Sequence
  ENSG00000260331_2 (sequence is synthesized)
agcacagtcaagtgaagcatgataaaacaaggtattcttgaacaatgtaagaaaatgaaattccaagtgagtccatgctcaaaaaggaaaacaacgaagataccagttgaacccgtagcc

SEQ ID NO: 836322 - DNA, 120 bp, Artificial Sequence
  ENSG00000260331_3 (sequence is synthesized)
caactttttaaatgtaaccaaccaattcaaaataagaatgcttctattgtacagcagaggtatcacttcatatcagaagagttttcgtttggagggatagaaataaatgtgttctgtgtc

SEQ ID NO: 836323 - DNA, 120 bp, Artificial Sequence
  ENSG00000260331_4 (sequence is synthesized)
gtgaagcatgtttttccaaggagttctaatctaaatttgggaatagttttattttttaaaatgcaccagtatattgaattgataacttgatatatttggtcctaaagtgtttttgtagcc

SEQ ID NO: 836324 - DNA, 120 bp, Artificial Sequence
  ENSG00000260331_5 (sequence is synthesized)
agttcttaaaatttagtttcatcatcagatttgtttctctctctctcattttaaaatctcctattaattgtgataaatatgtttctgaatgtttataataaagttatttttcgtatgtca

SEQ ID NO: 836325 - DNA, 120 bp, Artificial Sequence
  ENSG00000260337_0 (sequence is synthesized)
tgtctagaaggtgaggacagtgctgcggccgtgtttctgctggctccggcccgaggctgtctcccagacagctgctgtcccactgaattaggttcaagcgaacacggccattgagatcca

SEQ ID NO: 836326 - DNA, 120 bp, Artificial Sequence
  ENSG00000260337_1 (sequence is synthesized)
aagtatttctggctggtttgggcgtgggtcctttctctagatgaatattttaatgtgggaattcagaggaaagctatggggaaagcagtgttggtcaactgacgacgctaaagaaccacc

SEQ ID NO: 836327 - DNA, 120 bp, Artificial Sequence
  ENSG00000260337_2 (sequence is synthesized)
ttcggtggttgtcacgagaatgtggaaaatacagaaaagtataagcagaagcataaaaattattcacagttgcacccttggagggagctgtcctataaatcttgatggactttcatcaaa

SEQ ID NO: 836328 - DNA, 120 bp, Artificial Sequence
  ENSG00000260337_3 (sequence is synthesized)
ttcaaagaaaaaaaaaagattccactgggatttaattcagattgcatttcaccgaaaaattacaaggattaacaacaaggattaatagcattgctgcattcattatggcaacccaaggtt

SEQ ID NO: 836329 - DNA, 120 bp, Artificial Sequence
  ENSG00000260337_4 (sequence is synthesized)
atgtctctctattgactattctctttaattaatctgtgtaaaaagtttgcatttttaatataggtcttggatatttcttattagtgttctttatatttttttccaatactcttaagaatg

SEQ ID NO: 836330 - DNA, 120 bp, Artificial Sequence
  ENSG00000260337_5 (sequence is synthesized)
catttttctccctatattttctgcttgttgttagaatagaaacagtatttattttggagatttttgtatttttatcttgtatctgaccccttccctaatttttatgaatactaagaattt

SEQ ID NO: 836331 - DNA, 120 bp, Artificial Sequence
  ENSG00000260337_6 (sequence is synthesized)
tacagtcagtacttttatattatcttggtgcataatcataatgtagtctgtaagtaacaaacattttgtttccttctttctattgtagagtttgagaagtcgtcagtgtgtagtcctgtt

SEQ ID NO: 836332 - DNA, 120 bp, Artificial Sequence
  ENSG00000260337_7 (sequence is synthesized)
accttaattgtttctgagttatgggttgaatttattttgaaatttcaaaaaacttcaaagggtagtatgttatttttgtgttaatcaaaatgaacaatgggtttcaaaagcttgaacaac

SEQ ID NO: 836333 - DNA, 120 bp, Artificial Sequence
  ENSG00000260337_8 (sequence is synthesized)
ccctgatgaatcccaggagtactagtccatgatgctcttattccctggtgctttaacatgcagtgcagccggagttggcctgaactttaggaaatgaggtcgtaagtcgaaagaacaggg

SEQ ID NO: 836334 - DNA, 120 bp, Artificial Sequence
  ENSG00000260337_9 (sequence is synthesized)
aattgagaaagcacacagaagcagccagggccaacattttcccctaaacaagccaatcaacaaaaagcaatgccaaacaagcccctttgaaactttcaaagtcctcatcctagtaccttc

SEQ ID NO: 836335 - DNA, 120 bp, Artificial Sequence
  ENSG00000260337_10 (sequence is synthesized)
ctagcactctaggagacatctttcagctgttgatttatgaacgctgagaggcacgtggaggaattaatggaggtaaatatctaacttaaaaaatcttcagtaggcatttttagacaatcc

SEQ ID NO: 836336 - DNA, 120 bp, Artificial Sequence
  ENSG00000260337_11 (sequence is synthesized)
tccttgaaagaaaagtgtggatgctctgtgcgtgtattgactgcacctgcaggggtatagctggagaacacccagtgagcatcttcaggagccaagtcacgcaggggcttagctctcagt

SEQ ID NO: 836337 - DNA, 120 bp, Artificial Sequence
  ENSG00000260337_12 (sequence is synthesized)
ccattgcgacagttgccatgatgccttctgaccattaaacactttgaactcttttctctcatcctctgttatttgctttggacccataacagactcattagttaaaaataagaagcaaag

SEQ ID NO: 836338 - DNA, 120 bp, Artificial Sequence
  ENSG00000260337_13 (sequence is synthesized)
gtaatcctgatgttgaattacaagttaatgcagagcacagacatgaaaataattctatgggtttgctgcagcataatccttgccagatctccaagttccattcatctaatgaaaagcctt

SEQ ID NO: 836339 - DNA, 120 bp, Artificial Sequence
  ENSG00000260337_14 (sequence is synthesized)
agtttgaagaacattttggagaactcttacatcaagaggtctccagtacctcaaaaaccagtgttcaaaaggaaaatgcacacgcgcatttcagggaggtgggaataaaagccttccttt

SEQ ID NO: 836340 - DNA, 120 bp, Artificial Sequence
  ENSG00000260337_15 (sequence is synthesized)
gcgcagcgtgttacatgtggaaatgtggaacgcacacgatcattcttactgttaaaaaaccccacaaagattataaaaatatgtcagtttttttttggtgcaaaaactcacacgattaaa

SEQ ID NO: 836341 - DNA, 120 bp, Artificial Sequence
  ENSG00000260337_16 (sequence is synthesized)
gagtcacgttcttggaaggcgtgaccagcgtgtaatttaagcaaatggaatctttcccaaatgtcttcttttacaactgaaaaaacaaattaagcaacagaggaaaaacaaatccagaga

SEQ ID NO: 836342 - DNA, 120 bp, Artificial Sequence
  ENSG00000260337_17 (sequence is synthesized)
tttgctgcccttcttttttctgtggatctgtctattacatgtgatagtttttaaagctgatgtcatgttattgatgtagttttgcttcttgctttatccattgaagactataatgtgaga

SEQ ID NO: 836343 - DNA, 120 bp, Artificial Sequence
  ENSG00000260337_18 (sequence is synthesized)
cagttcagatcatgccctgtgcatatccagttcccccggtaggcacggctcctcctttcacctcaatgccccgctttccgctcggcccacactggactcttgctacctcttgttttggct

SEQ ID NO: 836344 - DNA, 120 bp, Artificial Sequence
  ENSG00000260337_19 (sequence is synthesized)
tggggctcttcccaaacctgatatttactgaccacaccaatattcaattgaatgagggagtgtcataattcaatcacttatagtttccagaaacgttgtgctcatttacattttccttag

SEQ ID NO: 836345 - DNA, 120 bp, Artificial Sequence
  ENSG00000260337_20 (sequence is synthesized)
cagcatatgagggtgcatgaatcccatcatcacaacgcaatggaattagggagaaatgccagtgaaagatgaagagagatgaggcaggactagcaggagcgcctcagaccctcatttctg

SEQ ID NO: 836346 - DNA, 120 bp, Artificial Sequence
  ENSG00000260337_21 (sequence is synthesized)
caggcaagaaaggaaaggatcctgtggaagggtctcccactgctgtgtgattctaaaagctttgggcaggggatagggagtctccaaaccaaagcctggtggccattctgtgacaggcag

SEQ ID NO: 836347 - DNA, 120 bp, Artificial Sequence
  ENSG00000260337_22 (sequence is synthesized)
gagtgggctgctatgaggaccctggtcatgttgaagctttggcggggggtcaccaagaggtggatagctggagctgtcagtcaactctgcttcccaggggcagattctctcaaaacagac

SEQ ID NO: 836348 - DNA, 120 bp, Artificial Sequence
  ENSG00000260337_23 (sequence is synthesized)
cagaactatagcccttgctctcccatgcccaccccacttcacctgataaacaggaaatataattaaaacatataattatgaactgtgaaaatggtctaattttgctggttttcattcttc

SEQ ID NO: 836349 - DNA, 120 bp, Artificial Sequence
  ENSG00000260337_24 (sequence is synthesized)
tgattaaccttgatgtcaaacatttctcatgaattttgttacatacttgtacttctaagaattgtgtgcctgggttctctgtttgcccgtgattgttttctttattgatgttttaagagg

SEQ ID NO: 836350 - DNA, 120 bp, Artificial Sequence
  ENSG00000260337_25 (sequence is synthesized)
atttgcggcattaagcctgttaactctttctccattctctttcatattttaaccaatttatcacttctctttatattttatgtaggatgtttggatgttttagaataactcactcttctg

SEQ ID NO: 836351 - DNA, 120 bp, Artificial Sequence
  ENSG00000260337_26 (sequence is synthesized)
ttaagatcacttttatttacttcatgttcagaaaattcttgctcatccaggctctagttaaatatatgccagtattttattctagatacttttggattcttttttttacatttaatacac

SEQ ID NO: 836352 - DNA, 120 bp, Artificial Sequence
  ENSG00000260337_27 (sequence is synthesized)
cattaaccatttcttcctggtgattcctttctgagatttaaatttttaaaatatgtatgatagatctcaggactatctgtttctacttcattggatgatctacagaatcttgtaccacca

SEQ ID NO: 836353 - DNA, 120 bp, Artificial Sequence
  ENSG00000260337_28 (sequence is synthesized)
gcaccacactgttttaattattgtatcaagaataatacagttagatatctcttagggacagtatctccttgatattctttaagcagttcttaactcttctcatcctttttttcccttcca

SEQ ID NO: 836354 - DNA, 120 bp, Artificial Sequence
  ENSG00000228288_0 (sequence is synthesized)
agaggccggacctgggcaaccccagcctggaggtgccggggccggagctcccagagggctgggtgcgaggcctaggcggggtcaggttcgggttcctaggccatagcggagctgcagccc

SEQ ID NO: 836355 - DNA, 120 bp, Artificial Sequence
  ENSG00000228288_1 (sequence is synthesized)
aggcggccggagcggaacccagccccgctccgagtgccacgtctccaggaaccccctccttactcttggacaacactccgcccccgcccgggcctccgtcccccaaaccgccctcatttg

SEQ ID NO: 836356 - DNA, 120 bp, Artificial Sequence
  ENSG00000228288_2 (sequence is synthesized)
tcacgtcaaccggctgcaccccactttccagcctgcgccccagatctgcagccttcgcccctagatacacccgcctggtgatgaggcgctcctcgcgttccttccggcacgtggcacacg

SEQ ID NO: 836357 - DNA, 120 bp, Artificial Sequence
  ENSG00000228288_3 (sequence is synthesized)
ctccacaaatatttgttgaaagggagggtaaatggccttgagtttctgtggctaccattggctgaggatggagctttgggctggacaaagaagaatctggttgaccacatgaagcaggaa

SEQ ID NO: 836358 - DNA, 120 bp, Artificial Sequence
  ENSG00000228288_4 (sequence is synthesized)
gtttgctgtcagatgtcccctgtgaaacccacaaacgcttgcgatttggcctccttgttttattttgtgtagtcctacaacgtcttgttactaccccctattacaacacttataactcag

SEQ ID NO: 836359 - DNA, 120 bp, Artificial Sequence
  ENSG00000228288_5 (sequence is synthesized)
ctctcgtctcccccagtctccagtgcaccggctttccctcgtcctctgcgcagtccatctcagctcatctctccaattcaatgccatcatctctcctcaccatctctcggtgccctggaa

SEQ ID NO: 836360 - DNA, 120 bp, Artificial Sequence
  ENSG00000228280_0 (sequence is synthesized)
tgagattatctgagaaacttgcaaaaaggataccaatggtcagggagtacctcagaccaactcgatcagatttctggtggttggcatggggattgggattgtatggaaatgttctccagg

SEQ ID NO: 836361 - DNA, 120 bp, Artificial Sequence
  ENSG00000228280_1 (sequence is synthesized)
ttcatcctttccttcgtgggataaagaatatttcaaccacctctggagaccaaagagttctgagaagttttgaaatagcttgggaaatacaccacgtgcttcacacttcatttttctcct

SEQ ID NO: 836362 - DNA, 120 bp, Artificial Sequence
  ENSG00000228280_2 (sequence is synthesized)
ctctctttcattgtttgacttaattaaaatattgtaatgcaagaaggagagatgaggcaaacgtttagagaaggaaaaggaaatgggttcatgtttaaactgactctgagcaagcatggc

SEQ ID NO: 836363 - DNA, 120 bp, Artificial Sequence
  ENSG00000236333_0 (sequence is synthesized)
attctcgatgagcgcgttgtagataatcttcagattgtaattcctctgcgcgtccagtgtcctattcagcaccaccactaagacctgggtttgcgggtagaggaaaaaaccggctacagg

SEQ ID NO: 836364 - DNA, 120 bp, Artificial Sequence
  ENSG00000236333_1 (sequence is synthesized)
gacagccccgaacgcccggtcctcggccagctgcactttctccaccgccactcgggaagcgtgcagcactacgtagcgggtggcgttccggcacgcgatctccacgttgacctccccgga

SEQ ID NO: 836365 - DNA, 120 bp, Artificial Sequence
  ENSG00000236333_2 (sequence is synthesized)
gaaggtgaagttctccatgaaggcggtgagcatcagattgtagtgcagcggcttcaggtggcccgacaggcgcagctgcgtccacggctcccacggctcccgctcctcctccgacggcgg

SEQ ID NO: 836366 - DNA, 120 bp, Artificial Sequence
  ENSG00000236333_3 (sequence is synthesized)
gccgacgtggtccccggactggccaccccacccgcctcgggctgccaggagtccccgcctgcgtggtggttgcgccgggccgatccagggaggctcccgttgccgccgcgctccggaaag

SEQ ID NO: 836367 - DNA, 120 bp, Artificial Sequence
  ENSG00000236333_4 (sequence is synthesized)
aaagcctgaggggccaccgtcggcgcctggcgtggcactcgccccgcactcgtcgaagcgcaggctgagcagcacagcgagcattgtgaccgcgagcaatgccacgagggacacagcgaa

SEQ ID NO: 836368 - DNA, 120 bp, Artificial Sequence
  ENSG00000236333_5 (sequence is synthesized)
ggccagcacaagccgcttgtgtacggcgatgtggcgctccgtggtgcggggtcgcactcccactgagtctgcccacgggtcggagagccccctgctgccagcccgaagcgcggcgtcgtc

SEQ ID NO: 836369 - DNA, 120 bp, Artificial Sequence
  ENSG00000236333_6 (sequence is synthesized)
ttcccccatcgcggctgcgaaggcggcggcgttcggtcctctgggtggaatgtgctcgcagcagcagtgacggcggccacagcacgggaggcacccgagccatacaccctgcagctggag

SEQ ID NO: 836370 - DNA, 120 bp, Artificial Sequence
  ENSG00000236333_7 (sequence is synthesized)
agaaaaggatggccgaggtgggagagactagagtgaaccagcaggaggaagtcccagggccgcgaagctacgacggagatccgtcctggaaaagccttctccaccctgggcactttaagc

SEQ ID NO: 836371 - DNA, 120 bp, Artificial Sequence
  ENSG00000236333_8 (sequence is synthesized)
ggcggtggcggcaaacggcaggaggttgcagacccgacagcgagactccctcattccagtcttgctctgccctccggagatgacaagtgagaaagaagtgtccggccgggccatcccctt

SEQ ID NO: 836372 - DNA, 120 bp, Artificial Sequence
  ENSG00000236333_9 (sequence is synthesized)
cagagaagcaaccacttcacaagaagattctgaagttggccatttttgatcccagaacagtttctcatagattagaaatattggagtctacacaaaaatcgatattcatttacaagatca

SEQ ID NO: 836373 - DNA, 120 bp, Artificial Sequence
  ENSG00000236333_10 (sequence is synthesized)
tcactaaacttatcttgcataacttaccaagaataactgtaaaatgtgctgggaatgcaatgtcctgagataaggaagaactgcctgaaacagcctggatcttattcctgtacttcctag

SEQ ID NO: 836374 - DNA, 120 bp, Artificial Sequence
  ENSG00000236333_11 (sequence is synthesized)
tcctgagaaggaagattacctccaaagctcatccactgagtcacactgcccctgtggtggagggcgggctgcctttccaggttcctcagctgtggtgtaactgaagcaggcacaatcaag

SEQ ID NO: 836375 - DNA, 120 bp, Artificial Sequence
  ENSG00000236333_12 (sequence is synthesized)
actccatctgctcgaggcagctttctcgaaccttggggaacctactcacaatggatcacaggcttcttttgttttgtttcttgctgcctatcttgggaagcaaaaatcagctgagtgaag

SEQ ID NO: 836376 - DNA, 120 bp, Artificial Sequence
  ENSG00000236333_13 (sequence is synthesized)
atgaggaagaaggtgttaaaggtttgaagaaaaaaggaaaaggatatactaatctaagaggacaagtaagtagaacatagataatgaaaatgctggcccttaggactgttgggcctaaat

SEQ ID NO: 836377 - DNA, 120 bp, Artificial Sequence
  ENSG00000236333_14 (sequence is synthesized)
gctcatattatattggtagtcacaaatttgaactttctctagagccaatttttgcatgtgtgtgcaggcctggagtagttggagagttggatttaatagaattgagggtcaagcaactac

SEQ ID NO: 836378 - DNA, 120 bp, Artificial Sequence
  ENSG00000236333_15 (sequence is synthesized)
aaccagggaagagtgggacaagggagataaaggatattggcaggggagcaattataaacatggaccatgatcaaaactggacaggaaggaaaatagagataagaggggtggaaggttaaa

SEQ ID NO: 836379 - DNA, 120 bp, Artificial Sequence
  ENSG00000236333_16 (sequence is synthesized)
aatagtgaaaatgagatagaatgaataggttgtaggtccctgtaaagttgaagaagtattattatgcagtactcgttattgaaatgaggtcactatgcttaaggcacagtgaatcctaga

SEQ ID NO: 836380 - DNA, 120 bp, Artificial Sequence
  ENSG00000236333_17 (sequence is synthesized)
aaatagtggttttgtttctcattaggcaatacattcctccttgctccagaatgcaacatacatgtatccttttctgtactattttttattaagaattcatacttaattccactgactgcc

SEQ ID NO: 836381 - DNA, 120 bp, Artificial Sequence
  ENSG00000236333_18 (sequence is synthesized)
actcaattttaatgtacagtagggaattcctgtactatgtattatgaatccattcctttgaatttcatttataatacttcatgactgacacctggctttccaccaagactcaattttcat

SEQ ID NO: 836382 - DNA, 120 bp, Artificial Sequence
  ENSG00000236333_19 (sequence is synthesized)
agcaagcctcatcatcataagcccccaaattaacaggatgaggaggaagaattggcaggctaaagaagatgattatatcaattaatgcagaaaaagcatttgataaaatccaatattcat

SEQ ID NO: 836383 - DNA, 120 bp, Artificial Sequence
  ENSG00000236333_20 (sequence is synthesized)
ttgtaattaaaaactctcagcaagttagggataggaattacttcaacttaatgaagagtgtctttaaaaaccttattttcatcagttataacaaatgtaccactctggtggtgaatgttg

SEQ ID NO: 836384 - DNA, 120 bp, Artificial Sequence
  ENSG00000236333_21 (sequence is synthesized)
ctaaggagggaagctatacatgtgtggggaaaggagatgtgtgagcaatttctgtaccttctactcaatcttctgtgagactaaaattgctgtaaaaaataaagttcatttttttaaaaa

SEQ ID NO: 836385 - DNA, 120 bp, Artificial Sequence
  ENSG00000236333_22 (sequence is synthesized)
acttgcttcatgtaacgtgttgcatatgagtgtgttctgtctcatagactcagggaattggtaacactgcagctgaggacgcagtggacagaagtgttcagactcctgttccttgtggtt

SEQ ID NO: 836386 - DNA, 120 bp, Artificial Sequence
  ENSG00000236333_23 (sequence is synthesized)
ctcttgggattggttattggtgaaaccacttcgcaatttattaagatggcaaaagcttacggagggacagatttgaggggaagatcaagatttttctgtcagtattgcaaatagtcaaga

SEQ ID NO: 836387 - DNA, 120 bp, Artificial Sequence
  ENSG00000236333_24 (sequence is synthesized)
atatgtggtccaagaagtgatcattatctttggcattgtgcaagtcattagtgaccttcacatgaacagtctcagtggagtgttggaggaaaaagcctaactgaagaaggttcaagagtg

SEQ ID NO: 836388 - DNA, 120 bp, Artificial Sequence
  ENSG00000236333_25 (sequence is synthesized)
aatggaaaaagagcagtagtatgtggagagtacagacaagtatttccaggagcctttctgtaaagagtggtagagaatgggacatcatttttggatgggggaagagttatttatagcatg

SEQ ID NO: 836389 - DNA, 120 bp, Artificial Sequence
  ENSG00000236333_26 (sequence is synthesized)
ttcatatgctaatggaagtgatctactcatggggaaaatcttgatgatgcaagaaagaaagggatttgttggaatcttgtcctataacgggtgagaggggatgggttctagaagaaaagg

SEQ ID NO: 836390 - DNA, 120 bp, Artificial Sequence
  ENSG00000236333_27 (sequence is synthesized)
catgggtctttgtttgagatcaggcaattcatctgtaggaaccagtaggaagatggttaagtgggtacctgtggtagtggatgtttgtgaacattcttttcttttccattgtttctattt

SEQ ID NO: 836391 - DNA, 120 bp, Artificial Sequence
  ENSG00000236333_28 (sequence is synthesized)
gatggctaaggaactctgacaggaagaggagaggtcccgactagaggagggggcagcattcatcttttggcaccggtgagtcagtttgcgaagttggcggcagcgagaccccgaggcatc

SEQ ID NO: 836392 - DNA, 120 bp, Artificial Sequence
  ENSG00000236333_29 (sequence is synthesized)
tgggagaccccggagttctgactgccctactccgctttcgtttccttccccccacccctggcttcccgggtattggaagccagctgggtccccggggtcgcaggccgcccagaggttcga

SEQ ID NO: 836393 - DNA, 120 bp, Artificial Sequence
  ENSG00000236333_30 (sequence is synthesized)
ggcggcggggcacatgctgcccccgcccctgcgcgcctgcggctcccggctctccctcccctgcgccgcgctctcgcctcgctttccgcgggagccttccaaccggttctcggctaggga

SEQ ID NO: 836394 - DNA, 120 bp, Artificial Sequence
  ENSG00000236333_31 (sequence is synthesized)
acccaaaagtggcaattatttcaggtaaacggacattttacctaattctaagcaagcatactcttttgtcggagactacagcataaatacacacccatttttatctgcctgctgcacacc

SEQ ID NO: 836395 - DNA, 120 bp, Artificial Sequence
  ENSG00000236333_32 (sequence is synthesized)
gtctctgccagccacattaactgcctgcagaaaagtttgttatgactgcctggttttgtaaagtccagacaactttacactaagctgaataatgttcatttactcaaaagctagtctaaa

SEQ ID NO: 836396 - DNA, 120 bp, Artificial Sequence
  ENSG00000236333_33 (sequence is synthesized)
attgtagagttaatgaacactaaaccaaagttagtgctttaactgaaagataatttactgtaccctttggagtccagtccggtaccatcaagatctgggaaaatacaactgggacctggg

SEQ ID NO: 836397 - DNA, 120 bp, Artificial Sequence
  ENSG00000236333_34 (sequence is synthesized)
agcaacaatgcctgagcagcaatgagcaagtttaatgcccagtcttgatttctaaatgctttccactataagaaacaagagtttattgagactctgaaagcagaacaggggaagaataag

SEQ ID NO: 836398 - DNA, 120 bp, Artificial Sequence
  ENSG00000236333_35 (sequence is synthesized)
gatggatggacagctgctgatcttcacctcctgtctgttcccacaattctaaaagaattaggcctgaggaacttaatcttctggtgttccattgtgaactgactttattaaattttttcc

SEQ ID NO: 836399 - DNA, 120 bp, Artificial Sequence
  ENSG00000236333_36 (sequence is synthesized)
aaagttcagtgttcttcagttctttctcagagtacaaattgaagagacacagagccagttccaaatgaactgaaattgttttgtaaaaaattaattcaaacaataatgccatggaaaagc

SEQ ID NO: 836400 - DNA, 120 bp, Artificial Sequence
  ENSG00000236333_37 (sequence is synthesized)
actttgaatttttcaattcccaggctattgattctaaaaaagaaacaattctaaattatccacatgttctcatttattagtctagagctcttgcccaaagaattatttgccaaggtaata

SEQ ID NO: 836401 - DNA, 120 bp, Artificial Sequence
  ENSG00000236333_38 (sequence is synthesized)
tatagaacatcaggatgatttacttgcttttctaataccattttgcccacaaactctatggaactgaaagcatgtcagcagcaaaagaaggtccactagcagctataaaagagagcttac

SEQ ID NO: 836402 - DNA, 120 bp, Artificial Sequence
  ENSG00000236333_39 (sequence is synthesized)
taatgaacaataaatatctaaaagtaaagggaaaggagccaaattccattttcaaaagccaaaattctgcagtaggtaaatatcacagatagcattgcttattatttataatcactacta

SEQ ID NO: 836403 - DNA, 120 bp, Artificial Sequence
  ENSG00000236333_40 (sequence is synthesized)
ctcaagaaaaggaaagaaagggggaaaatatctaaaattttaatctaaatctttcttaaactgtgcatttcaaatacataaaatactgtgtgaaagggtgttaaaagtagtatctagaaa

SEQ ID NO: 836404 - DNA, 120 bp, Artificial Sequence
  ENSG00000236333_41 (sequence is synthesized)
tggcttccaactctataacttggtgtaagccttgtggaaagtaatttaccaacgactgtcaaaattcacaaatctaaagactgtagcaagactcttgagataccttgtaactattggcat

SEQ ID NO: 836405 - DNA, 120 bp, Artificial Sequence
  ENSG00000236333_42 (sequence is synthesized)
gattcctttctactacaatgaaagtttcttcagggcaggaaacacatatattcatttctgtatccacagagtaagcaaagattctgggacatactgtccttcatacgcgtatttcgaatg

SEQ ID NO: 836406 - DNA, 120 bp, Artificial Sequence
  ENSG00000236333_43 (sequence is synthesized)
aacgaaggctccatttggtagtatttatcatcagcttcttggcccttactactcccttctttcatttaaagcttatgtcttatgtcctcttccctgcccagcactctttttggctgtatg

SEQ ID NO: 836407 - DNA, 120 bp, Artificial Sequence
  ENSG00000236333_44 (sequence is synthesized)
cctgataagggtgctcttcagcttggcctcctttgactctattccttccctgttctacttttagagtctcaataaactcttgtttcttatagtggaaaaatgcatttataaatcaagact

SEQ ID NO: 836408 - DNA, 120 bp, Artificial Sequence
  ENSG00000236333_45 (sequence is synthesized)
gggcattaaatttgctcactgctgctcaggcattgttgctcccgtgtccagttgctcccagtgagccactctattggagttggtcccacagtcaagaccctacttttccctagctctagc

SEQ ID NO: 836409 - DNA, 120 bp, Artificial Sequence
  ENSG00000236333_46 (sequence is synthesized)
ctagaaacttgtcaccagagcattaatctacattttagagaggattacctaccaaaaaaaagtatcatttttcctgaataagtaatatgttctagaatcagtgtgtgatcctctcagctt

SEQ ID NO: 836410 - DNA, 120 bp, Artificial Sequence
  ENSG00000236333_47 (sequence is synthesized)
cctttttggaaaccaaatgatggttctcctggagaaagaatttgagtagatgttgaaacaatttaggctatacaatagagtcctacttgatagaagagttagattttgaaatcagcatat

SEQ ID NO: 836411 - DNA, 120 bp, Artificial Sequence
  ENSG00000236333_48 (sequence is synthesized)
aaggtaagaagcacctaatgtcaaatttgcacttgaaaaaaattcctaaactgtgcacacattgcagtaaaccatgattttgtggatcccttcctatacagcaacgtgcatatatagatg

SEQ ID NO: 836412 - DNA, 120 bp, Artificial Sequence
  ENSG00000236333_49 (sequence is synthesized)
tgcatagaaagtatgtgccatcttacaatattttcagtattttaattaagttgaatttaaataaataaaatactcacatgctataactctgctgttttaagaacactgttaccaattcac

SEQ ID NO: 836413 - DNA, 120 bp, Artificial Sequence
  ENSG00000236333_50 (sequence is synthesized)
tacatttacatgatgcctaaatagccagccaatgcagaaaggtcagttagaaaatgaggccagtgcttgcctctctttctttccattgaaagggtgttactgagtgtcagggtccacaca

SEQ ID NO: 836414 - DNA, 120 bp, Artificial Sequence
  ENSG00000236333_51 (sequence is synthesized)
aagcgggagctagagtgggcatgaaggcagtttgatgggagtcagggtctatagagggagggctgctgagcagggcagaggcctggtagaatcagatgcttggctccacacagggagtcc

SEQ ID NO: 836415 - DNA, 120 bp, Artificial Sequence
  ENSG00000236333_52 (sequence is synthesized)
actttcctaatgctggagaaggtacaaacatggaaagaggaaaagttgagatgaatgatgtgttattagattggaattggaagagtggatatataaatatatatgacatgtaaataaaca

SEQ ID NO: 836416 - DNA, 120 bp, Artificial Sequence
  ENSG00000236333_53 (sequence is synthesized)
atatacacaggcttcgggtttagattgccagggctactccagctgcattgagggactgaaactcccagagaaaggcaaaggagagggagcgcgcgaggaggcaggaaaggcgggagggag

SEQ ID NO: 836417 - DNA, 120 bp, Artificial Sequence
  ENSG00000236333_54 (sequence is synthesized)
gggagcgactgagcggcagaggcaggcactgggagattagagagcttttctccgctctgtcacaccagacacccacagccacagagggggttgctgagccgcctgcaagaagtacattgt

SEQ ID NO: 836418 - DNA, 120 bp, Artificial Sequence
  ENSG00000236333_55 (sequence is synthesized)
agatcctgctagggagatgtggctgtgtcagatttcacatcaagctcgccagaggatttggaggattgtatgtaaattgaaataaattctccaaaacctgactacatatattacattata

SEQ ID NO: 836419 - DNA, 120 bp, Artificial Sequence
  ENSG00000236333_56 (sequence is synthesized)
ctgtgcgatgtgtccaggtgtgcagtactaaaataatgttagcaatgaagcattaaaatcctccggaagtaaaggccaaagcaaggtgatgttttccccataggataattcccatcttta

SEQ ID NO: 836420 - DNA, 120 bp, Artificial Sequence
  ENSG00000236333_57 (sequence is synthesized)
gattggagaaacgattaacacacaatgtctacagtgtaacattcaggaccaaaaccctgagactgagaaaagctgggcttattagaacggtgaacgaatacattccatgattggtcagtt

SEQ ID NO: 836421 - DNA, 120 bp, Artificial Sequence
  ENSG00000236333_58 (sequence is synthesized)
tttcatttcacctagccataattactttcttgcagctttccagtgttaccatgaacattgttttaactttgttaggatagttatcaatagaccagtttgctgacagcaggcagcatcaaa

SEQ ID NO: 836422 - DNA, 120 bp, Artificial Sequence
  ENSG00000236333_59 (sequence is synthesized)
ataggttcatagcccattggctggttatggactcttgtctgagtatattggagtttaaaattatactgcagagtatgtataagtatgtgggatatccaaccttcagaatttgtgcgaaga

SEQ ID NO: 836423 - DNA, 120 bp, Artificial Sequence
  ENSG00000236333_60 (sequence is synthesized)
actctaattggaacaatattcagaaaacagccaccccaaaggtgacatctaggaagcaggagtctccagtgtttagtaaaacaaagtgtgattggcttctgggttaattaaaaaagtgaa

SEQ ID NO: 836424 - DNA, 120 bp, Artificial Sequence
  ENSG00000236333_61 (sequence is synthesized)
taatagaaaattaggtaattcctttttacatgtttctttcatgtcttcaaatcttgaaggcattttacaaatcatgtccatagctattttcttacaaaaagaactggttaatgcttctgg

SEQ ID NO: 836425 - DNA, 120 bp, Artificial Sequence
  ENSG00000236333_62 (sequence is synthesized)
ctttggagtactgaaaatagacaattaaaatattgtgtttggctttaaaagcatgaccaaagagaagagaccaattacacattaaccttagcttgataaccactaaaaacacagccctgc

SEQ ID NO: 836426 - DNA, 120 bp, Artificial Sequence
  ENSG00000236333_63 (sequence is synthesized)
tcgaggaagccctttttcatttatccccagatgggatacatgctcaatgccatgcattctaaatgtccatttgaatcatttttaaatgatgatgaaaataagtgccagggtgggattttt

SEQ ID NO: 836427 - DNA, 120 bp, Artificial Sequence
  ENSG00000236333_64 (sequence is synthesized)
taagcatgttgtatgtgggccgttagcaacagaccaagggaaatgccacattctgttcaagttacttttttctgctctgtttttaaatgtctgtactcttgctgtccatatgtatctggc

SEQ ID NO: 836428 - DNA, 120 bp, Artificial Sequence
  ENSG00000236333_65 (sequence is synthesized)
tgtatgcattttaagagttgaggagttggggttcattggtttgttttcacagaatcaggaactatagtgcaagcaagtaagaggagccctgcgatcctcagcaggtcaccagacttctct

SEQ ID NO: 836429 - DNA, 120 bp, Artificial Sequence
  ENSG00000236333_66 (sequence is synthesized)
gactttagggttttaaactggtaatttagtattactgatccaatatccatggattgagtacatttgattatcagaggcttctggaatcatcccggggagtctaagacccactgcctaaag

SEQ ID NO: 836430 - DNA, 120 bp, Artificial Sequence
  ENSG00000236333_67 (sequence is synthesized)
gaagaggttacccactaagggatctttaagactttctctttctaaaacattagtcaagaaaagattcaaagaaggctttttctgtttgtctttttttaaaaatgtgtacaaatttgtggg

SEQ ID NO: 836431 - DNA, 120 bp, Artificial Sequence
  ENSG00000236333_68 (sequence is synthesized)
atacatgagaaattttgttacatgcacataatatgtagtgatcaaaatcagggtatttaaggtgtccatcacctgagtacaatacatttttgcaaggtatagtcaccctactgtgctctc

SEQ ID NO: 836432 - DNA, 120 bp, Artificial Sequence
  ENSG00000236333_69 (sequence is synthesized)
aaacagtgaacagccagattccttctgtcttgctgtgtgtttgtaccctttaacccagttctcttcatctttcccctttccctcactcacggttctcagtctgttatctctttcctctct

SEQ ID NO: 836433 - DNA, 120 bp, Artificial Sequence
  ENSG00000236333_70 (sequence is synthesized)
ttacctccatctgttcttctttgtatttcactaatgtgtttatgtacttctgaaaattactacaaggaaagtctcaaatatttcagaattaaataatacatttaccaattaataaagtct

SEQ ID NO: 836434 - DNA, 120 bp, Artificial Sequence
  ENSG00000236333_71 (sequence is synthesized)
cccgccccctctggcaccccccgcgggcgggccacccgggccacagccagagcaggcatcggagagctcacgcgggccgagggcgcgcgactggggatgctggcccgggttcttttaaga

SEQ ID NO: 836435 - DNA, 120 bp, Artificial Sequence
  ENSG00000236333_72 (sequence is synthesized)
gttcttttaagacgggttctggacacaagcgacggcagcttccgcgacccccatcagccccgcctcactctggacaccgggctgtgagctctgggacgcgcccaacttggaaagcgtctt

SEQ ID NO: 836436 - DNA, 120 bp, Artificial Sequence
  ENSG00000236333_73 (sequence is synthesized)
caagttctagccactgaaatgggggttggggggaagcagaagaagaaaagaaataaaatgtatacagtttcaaaaggaagaattaaaatagtccctgtgtgcagatgacatgattgtcta

SEQ ID NO: 836437 - DNA, 120 bp, Artificial Sequence
  ENSG00000236333_74 (sequence is synthesized)
tttagtaaacccatggattatacaaaaataaaattccgagaacttaaaaagtgatttcagcaagatcacaggatataagatcgagatgaaaaccaatgtcatttctatatacagtaagtc

SEQ ID NO: 836438 - DNA, 120 bp, Artificial Sequence
  ENSG00000236333_75 (sequence is synthesized)
ctctctcttaatatcatcaataggttcttggaaactgactttaagcaaaacaacataaaactaaacccaatttttcatcatcaaagttataacaaaatgatgttgaacaaaactacatta

SEQ ID NO: 836439 - DNA, 120 bp, Artificial Sequence
  ENSG00000236333_76 (sequence is synthesized)
tttcaggacctgccatacatcatgtcacttaaaattacagtttctaagaacctaccaatggcattatgtgagaattactgtagtaacaataaacgtatgaaaaccaaaattaaaacacat

SEQ ID NO: 836440 - DNA, 120 bp, Artificial Sequence
  ENSG00000236333_77 (sequence is synthesized)
atactatctgatgctgaaaattgcaaatgctgatgaaagaaatcagtgatgacaaataaacagagagacatactatagtcacaaattggaagactcaacatagtaaaaatgtcaatttgc

SEQ ID NO: 836441 - DNA, 120 bp, Artificial Sequence
  ENSG00000236333_78 (sequence is synthesized)
ctcaaagtaatctgtaggtataagacaattatcaaaattcagggaagttttttgtaggcattggctagcctattctaaaatttatatgaaaagcacaaaccttagaatatctaagataat

SEQ ID NO: 836442 - DNA, 120 bp, Artificial Sequence
  ENSG00000236333_79 (sequence is synthesized)
ctgaaaagaagaataaagtgagaggaatcactctacctgatattaagctttataatacagtaacagtactcaagactgtgtggtatttgccaaggcatggactcagatcaatggaacaga

SEQ ID NO: 836443 - DNA, 120 bp, Artificial Sequence
  ENSG00000236333_80 (sequence is synthesized)
agagaaaacacaggaatagacccatataaacatttccaactgattgttttccaatcgatttgtgacaaaagtgcagaagtaattcagtgaaggaaggatagccttgcaacaagttgtgct

SEQ ID NO: 836444 - DNA, 120 bp, Artificial Sequence
  ENSG00000236333_81 (sequence is synthesized)
gaagcagtgagcacccataggcaaaaagaaaaagagaacatcaaccttaacctcacatcttatacaaaaattaatccaaaattgataatagacttaaatgtaaaatataaaacatttcac

SEQ ID NO: 836445 - DNA, 120 bp, Artificial Sequence
  ENSG00000236333_82 (sequence is synthesized)
aaaaatagaagaaagtcttcaggatctaggactaggcaaataattcttaaatgatatcaaaagcataattcataaagggaaaagttgataaattagacctcattaaaattaaaaacttat

SEQ ID NO: 836446 - DNA, 120 bp, Artificial Sequence
  ENSG00000236333_83 (sequence is synthesized)
ggaaaatgtgctgttaagaggataaaaaatataagctacagactgaaagaaaatatttgcaagccacataactgacaaaggactagtatctagaatatataaagaattttcaatactcag

SEQ ID NO: 836447 - DNA, 120 bp, Artificial Sequence
  ENSG00000236333_84 (sequence is synthesized)
ttgtaaaaacaaaataattcaaccagaaaattgatatgagcaaacatgtcactgaagaggatgtacagatggcaaaaatgcatgtaaaaagatttcaacttcataaaccgttagggaaat

SEQ ID NO: 836448 - DNA, 120 bp, Artificial Sequence
  ENSG00000236333_85 (sequence is synthesized)
gtgaattaagcaaccaatcagaatggttaaaatgtttaaaaaatagtaacaccaccaaatattggcaaggatataaaggaatcgaatcactcatgcattgctagtaaaaaatgtaaagag

SEQ ID NO: 836449 - DNA, 120 bp, Artificial Sequence
  ENSG00000236333_86 (sequence is synthesized)
gtacagccacactgggaaaccttttcatggttttctaaaaactaagcatggagttaccatacatcccagcagttctactcatcagcatttatcccagagaaataaaaatttatgtttaca

SEQ ID NO: 836450 - DNA, 120 bp, Artificial Sequence
  ENSG00000236333_87 (sequence is synthesized)
ctaaaacctatatatgaatgttcataatagcatttttcatagtagccaaaaattggaaccgtctcaggtgtcctaccatgggtgaatggttaaacaaactatggtgcatctatatctacc

SEQ ID NO: 836451 - DNA, 120 bp, Artificial Sequence
  ENSG00000236333_88 (sequence is synthesized)
atgaagtagaactcagcaataaaaaggaatgaactattcatacaccttataacttggatgcatctccaggtaattgtgctgagtgaaaaaaaaaaaaaaaagccccaattccaaaaggtt

SEQ ID NO: 836452 - DNA, 120 bp, Artificial Sequence
  ENSG00000236333_89 (sequence is synthesized)
atatactctatgattctacttctgcaatgtttattaaatgataaaattacagaagtgggaaaatgattagtggtttccagggggtatatacagtaagggtgagagggccggaagagtgca

SEQ ID NO: 836453 - DNA, 120 bp, Artificial Sequence
  ENSG00000236333_90 (sequence is synthesized)
gttttataagggcaacataagggacccttatggtgatgggactgttctgtatcttgactctgttggtagtcacatgaatctacacatgataaaattgcatagaattaaacatatatacac

SEQ ID NO: 836454 - DNA, 120 bp, Artificial Sequence
  ENSG00000236333_91 (sequence is synthesized)
actcaaatgaatgcatgtaaaaccggtaaaatctgaataaggtaaatggatcataatcaatgtcaattttccatttgtgatattatactatagttatgtaagatgatgttagcattggga

SEQ ID NO: 836455 - DNA, 120 bp, Artificial Sequence
  ENSG00000236333_92 (sequence is synthesized)
gaaactgggtgatggatatacagaatctttctgtattatttcttgtaattgcatatgtatctcaatggtctcaaaataaaaagttaaataaataagagagaccaaaaagtggctttccag

SEQ ID NO: 836456 - DNA, 120 bp, Artificial Sequence
  ENSG00000236333_93 (sequence is synthesized)
taaataaataagagagaccaaaaagtggctttccagtggagaactgagataatctgagcatcttatgctctaaataaagtatgcaataaaaataaaatatatatatatatatatatatat

SEQ ID NO: 836457 - DNA, 120 bp, Artificial Sequence
  ENSG00000236333_94 (sequence is synthesized)
gggaaaagtcaagtaaaaacagcagtatacactattagctttaacattaggctttgagactatctctggccttttctctggccaaagggaaagaaatcctcagatctactctgaagcctt

SEQ ID NO: 836458 - DNA, 120 bp, Artificial Sequence
  ENSG00000236333_95 (sequence is synthesized)
tcttagactgagaagcctctgatagcatttcaaagcagcttagtgccaaacattctttgagcatccagtaagagtctgtttgcaacttaatagaaagattttttaagttgccttttgact

SEQ ID NO: 836459 - DNA, 120 bp, Artificial Sequence
  ENSG00000236333_96 (sequence is synthesized)
atacacaatgagttctctttttatctggttcctgattactctctgacctttatcatacaaagaaagatctttcagcctattccaatctgtactaaaattcagataagaggaagcatcctc

SEQ ID NO: 836460 - DNA, 120 bp, Artificial Sequence
  ENSG00000236333_97 (sequence is synthesized)
aaagctggattatctgactctgaagccagcgtgatcctcctactgccttcagcagcttttcgtagtgttcagccagaactgacatttctacattctacactgccagcctttaatgacctc

SEQ ID NO: 836461 - DNA, 120 bp, Artificial Sequence
  ENSG00000236333_98 (sequence is synthesized)
tctcatctccaaacttctataacaattattacctatactatgcaataaaaaacactcattttaagtataagtttaatgccatgttgacaaatgaattcagccctgtgtgaccattgtcat

SEQ ID NO: 836462 - DNA, 120 bp, Artificial Sequence
  ENSG00000236333_99 (sequence is synthesized)
aatcaagtaacagaacatttccatcaccctaaaaagttcccttggcctcttgctcttttccccagccccaggcaaccattattttgctttttatcactatagttttgtctgttctagaat

SEQ ID NO: 836463 - DNA, 120 bp, Artificial Sequence
  ENSG00000236333_100 (sequence is synthesized)
tttacttaagtgaaagcaaaagtgaatattcttttgtcatctggcttctttaaattcttcagcataattttttatatttatgcagttcttcttatcagtttatttttattggtgagtagt

SEQ ID NO: 836464 - DNA, 120 bp, Artificial Sequence
  ENSG00000236333_101 (sequence is synthesized)
tctgcactacttttatcttttattttctttccttttcttcttaccttccttcctactctcctttatttttggaagctgcattcaccctactggaagaacctattctgaacataaagtaat

SEQ ID NO: 836465 - DNA, 120 bp, Artificial Sequence
  ENSG00000236333_102 (sequence is synthesized)
ttgcctcatcctgcttatccccatgacaaatagtttaagtagcatctggtgagacaagagaaaagagtaactatacatttacccttctgcaccctcatcttctacccagctgtctctcct

SEQ ID NO: 836466 - DNA, 120 bp, Artificial Sequence
  ENSG00000236333_103 (sequence is synthesized)
cccttttcctctttatcaatattttccccttctttggaccaactatttaaactgttcttaaaatttattaaatagaagtggacctccagcaatttttcttgctcctataatctaaagtat

SEQ ID NO: 836467 - DNA, 120 bp, Artificial Sequence
  ENSG00000236333_104 (sequence is synthesized)
tcaaactcctcacttgaaacatgaaagaaaatcaggatgtaaacgttcccctttttaaacttttttattttctaaaccatcttcctctgcataaagtcagtctgccactctaaacagcac

SEQ ID NO: 836468 - DNA, 120 bp, Artificial Sequence
  ENSG00000236333_105 (sequence is synthesized)
ttgtcaggaatgtgtgaagttattaaaagagaaggaactttagaagatctaaattcaaattaccttgactaccattctttagtaataaaaggggagatagaaagaagacagaaaccacca

SEQ ID NO: 836469 - DNA, 120 bp, Artificial Sequence
  ENSG00000236333_106 (sequence is synthesized)
gattttctaaaatctccagcaatattcatccatctaaagcatctgagaaacaatgacccaagttatattgggagagatattttagctctcttgcctgaatctaactcacagaaactgggg

SEQ ID NO: 836470 - DNA, 120 bp, Artificial Sequence
  ENSG00000236333_107 (sequence is synthesized)
aaatatcaaaaatcacttattctaaatgtttcggtcaagaagtgttttggatttcagattttggaatatttgcatatacatagtgagatatcttaggggtgggacccaagtctaaacaca

SEQ ID NO: 836471 - DNA, 120 bp, Artificial Sequence
  ENSG00000236333_108 (sequence is synthesized)
aaattcatttatgttttatatgccctttaaacaccatagcctgaagttaatttaatataatatttttaatagttttgtgcatgaaacaaagttttgactgtttgactgtaacccattacc

SEQ ID NO: 836472 - DNA, 120 bp, Artificial Sequence
  ENSG00000236333_109 (sequence is synthesized)
taaagtcaggtgtggaattttccacttgttacctggagtgcatcatgttggcattgaaatagttttggattttggagcatcggatttcagatttttggattaaggatgttcaacctgtat

SEQ ID NO: 836473 - DNA, 120 bp, Artificial Sequence
  ENSG00000236333_110 (sequence is synthesized)
tagatagcctggtgcttttctcctcataatcactccaataataatgaaaggataatcataaagatgacaacaattacaacaaagatgataaaaaaaattaagccacttggcaacactatt

SEQ ID NO: 836474 - DNA, 120 bp, Artificial Sequence
  ENSG00000236333_111 (sequence is synthesized)
tgtggcctcatgaaaatgactcccaatgtcataattccctctgagatccccacaataaaaaactattggaactagaactgcataccgcagttattggtcatttcacatggtgccatgttc

SEQ ID NO: 836475 - DNA, 120 bp, Artificial Sequence
  ENSG00000236333_112 (sequence is synthesized)
aggcatagctggtatgagtgctatttgctttcatccaggggagccattctcagtaagcttcatctctgtgctgatgagagcctgggtctgttcttctagcccaggatcttcacatctctc

SEQ ID NO: 836476 - DNA, 120 bp, Artificial Sequence
  ENSG00000236333_113 (sequence is synthesized)
aaaggactgcagctctccttagatattctgtgtaccacaggaaggggctgtaccaatttacagcaatctcttttcaacatggtaactaatgcaagtattagaccacaaggcttctctttg

SEQ ID NO: 836477 - DNA, 120 bp, Artificial Sequence
  ENSG00000236333_114 (sequence is synthesized)
gaaacttgtccaaaggctgtcatctctgctattcattcattcattcatttagtcaacaaatatttattaagcaacaaacgtgtgcaaggcactgttcttggcatagtgaacaaaacagat

SEQ ID NO: 836478 - DNA, 120 bp, Artificial Sequence
  ENSG00000236333_115 (sequence is synthesized)
taaaattctgatcttgtggaacttgcattctaataagggagacaatttttttttaaaatgaagtaaaatagatagggcgatagggagtgctgggcccaggaagaaagggttacaatacta

SEQ ID NO: 836479 - DNA, 120 bp, Artificial Sequence
  ENSG00000236333_116 (sequence is synthesized)
aatatgatagttagggaagccctcaaatttgaacaaggatctgcaggaagtgaagtatgttgatatctggggaagagggaacaacaaaagcaaaggaattgatacaggaatgttgctggt

SEQ ID NO: 836480 - DNA, 120 bp, Artificial Sequence
  ENSG00000236333_117 (sequence is synthesized)
gtctgagatatggcaagcaggtctgggtggccagagaggagtaaagtaggaaaaaaggaaaagtaggtggggttggaaaaataatggggagccaagactgggtaaggttttgtaggctat

SEQ ID NO: 836481 - DNA, 120 bp, Artificial Sequence
  ENSG00000236333_118 (sequence is synthesized)
tgtaagtacttagacttctactaagtgatggaaagcaactgataaaagttgactttcaattggaaagagccatgaaagttgatggatggtcaacttttgacctgaggaatgacatgacct

SEQ ID NO: 836482 - DNA, 120 bp, Artificial Sequence
  ENSG00000236333_119 (sequence is synthesized)
attgtaggttttagaaaagtccttccggtagatttaatgaacattcactgaaagataaaaaagagggtaattgaaataatccatgcaagagatgattgtagcttggataaggatggtagt

SEQ ID NO: 836483 - DNA, 120 bp, Artificial Sequence
  ENSG00000236333_120 (sequence is synthesized)
taggtaagaaacctcaaggttgataccaggatgtttgatctgagcagctagatggatgaagttgacatttatcgcaggacagttccctgaatggccctggacccacccagttctccccct

SEQ ID NO: 836484 - DNA, 120 bp, Artificial Sequence
  ENSG00000236333_121 (sequence is synthesized)
attcaacaatatacctgagagcttactgccacaagacactcatgagagctagcatttatggtggatactctatatgccaggcacagggcgccacgtattttccctcgacagtaacttggc

SEQ ID NO: 836485 - DNA, 120 bp, Artificial Sequence
  ENSG00000236333_122 (sequence is synthesized)
acttagtatcatttctacaacaatgtcccatgataattgattctaggtgatttgaaacactgcttagtcctgttttagaaaaagctcccatatctgatttagtctcatatgcagcttact

SEQ ID NO: 836486 - DNA, 120 bp, Artificial Sequence
  ENSG00000236333_123 (sequence is synthesized)
tctaacatcagattgaatttgcattgagttaccttactcggtttattttttaattatgttgcagttacaagggaataaggaaaagtcagtatagtgcattgaaatgtcttttttaattga

SEQ ID NO: 836487 - DNA, 120 bp, Artificial Sequence
  ENSG00000236333_124 (sequence is synthesized)
gacacacaagaaatgtgttataggttcccaaacattcttcatgtattagagatgttataataatcttttgaatagccaagtgaaaaggaatggtttcacctgaacatgttagaatttatt

SEQ ID NO: 836488 - DNA, 120 bp, Artificial Sequence
  ENSG00000236333_125 (sequence is synthesized)
gctacattttttgtgtgttgtggtggagaaataaatttttaaatcgcatttatggagtcatttcagaacaagtagaaaacatgtaatctggtcactttgaatgtgtaagtgtttgtatct

SEQ ID NO: 836489 - DNA, 120 bp, Artificial Sequence
  ENSG00000236333_126 (sequence is synthesized)
gaactcctcctgccctattaagagtggaaggttgtactatatgttactcaaaaagtaattttccccggatatgcaataagacctcagatttgacctataagctgaatgtcataagctatc

SEQ ID NO: 836490 - DNA, 120 bp, Artificial Sequence
  ENSG00000236333_127 (sequence is synthesized)
cattagctatgctggaagcacaccaccaacaacaaaaaagttttaagtatttttataggcttgctaaaatctgattatagaaccaaggcagtcaaataccatgagtaagactgcagaaac

SEQ ID NO: 836491 - DNA, 120 bp, Artificial Sequence
  ENSG00000236333_128 (sequence is synthesized)
cctagaatttaactccctagttattcttaatgagtgaatcctgtgctttgtgtctaaaagcaatgtattgtgctttccaattcaggaaatgcattttaattgctatactcattgatacat

SEQ ID NO: 836492 - DNA, 120 bp, Artificial Sequence
  ENSG00000236333_129 (sequence is synthesized)
caatctgtccatgacattctgacatatatccagtttcctatggattcggtataggagcaaattaaaagatgcactagaatggtaacatttaatctataatcctccatttaacctttatgt

SEQ ID NO: 836493 - DNA, 85 bp, Artificial Sequence
  ENSG00000236333_130 (sequence is synthesized)
agcacacacactagagaaacggcttttttttttttaacctggggaccatgaaaaagttttgaccattccccgacccccatgcttc

SEQ ID NO: 836494 - DNA, 120 bp, Artificial Sequence
  ENSG00000236333_131 (sequence is synthesized)
ccatgaaaaagttttgaccattccccgacccccatgcttcaactttagctttgatagttaaagtatgtcttccttcagtttaagttgaacaaacttctgcataagaccctccagaaaacc

SEQ ID NO: 836495 - DNA, 120 bp, Artificial Sequence
  ENSG00000236333_132 (sequence is synthesized)
tctgaacacatacagttttgggggcaatggggactgaactatgtacaaataggtgatacttcagcacacaattcctgggataaattttatcctcttctcatttttatttttatgaactat

SEQ ID NO: 836496 - DNA, 120 bp, Artificial Sequence
  ENSG00000236333_133 (sequence is synthesized)
atggggttttttaaacaagttacaagaagcaaaacacattttacctttactctgttacatatttcaaattaagcagatcctaattaattgggttacattatgtaacaatagcctttttaa

SEQ ID NO: 836497 - DNA, 120 bp, Artificial Sequence
  ENSG00000236333_134 (sequence is synthesized)
tatcaaatggtttttatgatctgtcttcaatttttcttaaaatgagactgcactaaagattttcttgacatttctgagaatttcattttcagtttcaaaaaattatttattcctttaatc

SEQ ID NO: 836498 - DNA, 120 bp, Artificial Sequence
  ENSG00000236333_135 (sequence is synthesized)
tttcaatgtggaaaagtaatgaatattgattcatttttagaagcgctaacatccaactaggtaaacttcatgagtgatggctattaatgttctctttcatcttatagacagaaaatcaaa

SEQ ID NO: 836499 - DNA, 120 bp, Artificial Sequence
  ENSG00000236333_136 (sequence is synthesized)
gctatttaaagtaaaggatttgtttcaaatcaatgtatgtccacaaattaacattaatgtttacaatactttctgtgataattgtgtcttacttgggtgtatatatgtctttatatctat

SEQ ID NO: 836500 - DNA, 120 bp, Artificial Sequence
  ENSG00000236333_137 (sequence is synthesized)
tatcactatgctaacttgcagtgttataaaatgcaccaatggctctttgtgccactccttcattttcagtggttaccaagatagtcaaattaaactgctgatgtgataatcatccaaaca

SEQ ID NO: 836501 - DNA, 120 bp, Artificial Sequence
  ENSG00000236333_138 (sequence is synthesized)
tttaattttaacactatgattatagaatttttttatttctatgagatttacctatagtagctttctgtttaatgttcaatgttctataggagtttccttttaaatgttcagagcaggagc

SEQ ID NO: 836502 - DNA, 120 bp, Artificial Sequence
  ENSG00000236333_139 (sequence is synthesized)
tataccctctaggatatgcaaataatcaagtcttagcgaccttataaaatataatccacattatgaatcaaacagaatgagccttcagatctgattgcctaaggctcaaaatgttaatgc

SEQ ID NO: 836503 - DNA, 120 bp, Artificial Sequence
  ENSG00000236333_140 (sequence is synthesized)
tcctgaaatgccttgtacatattagctagttgaaattgcattaaaacaagagaacgaattgtagtcttgacctcagtctcatttcaccagcctttgcctgctactgccaacctgagaggg

SEQ ID NO: 836504 - DNA, 120 bp, Artificial Sequence
  ENSG00000236332_0 (sequence is synthesized)
ccttccatttggacatcaaacaagagaagaaggacctttaatgaaataacttacattttttctaccaatatcccatcagccgaaactactctctctccccactcctccaacactctggaa

SEQ ID NO: 836505 - DNA, 120 bp, Artificial Sequence
  ENSG00000236332_1 (sequence is synthesized)
tataaaacagatttatgagtaaccaccactctgttaggtgcactttgaatttagttctttcaaagagaaacgggaatgggactgtagccacctcaagaaatgatactggcaaaagacaca

SEQ ID NO: 836506 - DNA, 120 bp, Artificial Sequence
  ENSG00000236332_2 (sequence is synthesized)
tttggtattcctattttattgccacaatatgctgaattttgtctatattaaggaaaaggtttcagccaacaacctgcgtcaacaaccacacatgtgaggaaagatgtcttctgaagattc

SEQ ID NO: 836507 - DNA, 120 bp, Artificial Sequence
  ENSG00000236332_3 (sequence is synthesized)
atatcaacttgagtgggaaaaggcaatcaacatatgccctttattgtgcaaaactcgggtaacaggtaaacaagattaacagggaccgctaggatcaagaaatggaagatgcctccctac

SEQ ID NO: 836508 - DNA, 120 bp, Artificial Sequence
  ENSG00000236332_4 (sequence is synthesized)
atacatctgagatgaatccacaaagatatcaatcaaacgtcatcgtaatgaagagatcccatccttcatggtcacactcacagcaatatttcatctactcctctctccttcatctgttgt

SEQ ID NO: 836509 - DNA, 120 bp, Artificial Sequence
  ENSG00000236332_5 (sequence is synthesized)
ctgtcttttccgtgacttttccttcaaccttcctgtttttgaatgcattttgatgttatcatatagcataatagctctatgtctccttcactctatataaagctcttcagcaacgggaaa

SEQ ID NO: 836510 - DNA, 120 bp, Artificial Sequence
  ENSG00000236332_6 (sequence is synthesized)
gccttgccgaattccacctgctgtcctgggatctccgccttccccatagaaccaagcgtgggctagtcccctggaggatgagatctcacatagtccataatcaaatgggtctccttccta

SEQ ID NO: 836511 - DNA, 120 bp, Artificial Sequence
  ENSG00000236332_7 (sequence is synthesized)
agatgaatccacaaagatatcaatcattttgttacctggaggccaggtgatgagatctgaaatcatcttatctaaatccagcacacagtttatacccactgtacctatcaaattattcaa

SEQ ID NO: 836512 - DNA, 120 bp, Artificial Sequence
  ENSG00000236332_8 (sequence is synthesized)
aggtcccttctgatacattgcaaaaatggatacaacttttccctccttttagcttctttccttgtgtaatgtgactttgaagctcttactattatatcaagaaataaaatctattgtctc

SEQ ID NO: 836513 - DNA, 120 bp, Artificial Sequence
  ENSG00000236337_0 (sequence is synthesized)
tcttttacaaagctataagatatttaagtacccgttttgtaattttccacttaaactgatatgtttgatgaacttggcagtctaactgcattggttaaaaggatgcacatttatatttct

SEQ ID NO: 836514 - DNA, 120 bp, Artificial Sequence
  ENSG00000236336_0 (sequence is synthesized)
ccgcgctccacttcccagggaagatctactgccagggcacacctgccgggccctggacgtgccccatcggtggcgaaagaaggggcttcctgacccaactcccccagacagccgccaact

SEQ ID NO: 836515 - DNA, 120 bp, Artificial Sequence
  ENSG00000236336_1 (sequence is synthesized)
ctggccgagtttgtctactcttcaccccaccccaactccaaacgatgaccttcagtcagacttcatcttcaaatttgacgctggcccctagcaccattctctatacaggaaataaggtgt

SEQ ID NO: 836516 - DNA, 120 bp, Artificial Sequence
  ENSG00000236336_2 (sequence is synthesized)
tgttcaatgaatggaatttcagtgtccacgagaaagcccaatacctacacatccaattcccattatcaaatgtttgcacaagaatcgcaaattaaagccaccacttcatcaactggtcaa

SEQ ID NO: 836517 - DNA, 120 bp, Artificial Sequence
  ENSG00000236335_0 (sequence is synthesized)
agaatgctagcatgccagtgtcccatcgttaacgggtggaggagaagagcaggcggaggaggagaacgatttctatgggattctcaaagtaaatgggcaattttcatgcacatggagaat

SEQ ID NO: 836518 - DNA, 120 bp, Artificial Sequence
  ENSG00000236335_1 (sequence is synthesized)
ctacttctgcagactgagttcaggccagacctgctctgtcaaagcccgacagagagacccgagatgccacagaaaatggctgaaacatttgggattctggaagggacaggcagagcgaat

SEQ ID NO: 836519 - DNA, 120 bp, Artificial Sequence
  ENSG00000236335_2 (sequence is synthesized)
atgggtccagacttcactgtctaaaaggtcactctagacccccagctcagggtgatgcctgctgcctttgatcagagccctcctgtcattgactgtgactcagatctgccctctccactc

SEQ ID NO: 836520 - DNA, 120 bp, Artificial Sequence
  ENSG00000236335_3 (sequence is synthesized)
catcctcaaccccaagagtcttcacaccaatctgcaccccagctccaagcacaaggcattacaagaaggtccagtggttcctactttagactacacaacaaaagaaatgaaaacccagcc

SEQ ID NO: 836521 - DNA, 120 bp, Artificial Sequence
  ENSG00000265125_0 (sequence is synthesized)
cattgagcatctactgtgtgcctggcactgtggtcaatgccgtgataataagggacttgcagctcaagtatatctgtgcttcactggaagagttgaaagagctggagactgtctgtgatc

SEQ ID NO: 836522 - DNA, 120 bp, Artificial Sequence
  ENSG00000265125_1 (sequence is synthesized)
aatgagcccctgtcactctcatgacactttcctgaaccatttcaccagcactcagaagatgaagactgtgctctacctgttccttctctgaagctagaagatctggtgtttcgactttgc

SEQ ID NO: 836523 - DNA, 120 bp, Artificial Sequence
  ENSG00000265125_2 (sequence is synthesized)
agatgggtgggattgctgtgcatatatattagcaggattttggctggaggccacttgtgacctctattgaatgtaacttcctcactcaggagttgatatggaaccactcactcctattgg

SEQ ID NO: 836524 - DNA, 120 bp, Artificial Sequence
  ENSG00000265125_3 (sequence is synthesized)
ctcagtgcccagaaggcctcagagagagcccacaagatcaacccgacagaccccggctttccaaataaagaaacgcaccccccccaccccagggtaggggtctttgtgggtcctgcctac

SEQ ID NO: 836525 - DNA, 120 bp, Artificial Sequence
  ENSG00000265125_4 (sequence is synthesized)
ataagaagagagcttctcttcctcctctggacgctgtcctgtgtgtagcactcaggactgctgaagacatctaggtaacagcttgaaggtgaaaccagcactgaggtttcctgattcctg

SEQ ID NO: 836526 - DNA, 120 bp, Artificial Sequence
  ENSG00000265125_5 (sequence is synthesized)
tctgttgctggccttgaagatgcaggaggccatgagccaaggaatgcaagcagcctctggaagttgaaaacgacctaagtgctcagtcctacagctgcatggaactgaaatctgccaaca

SEQ ID NO: 836527 - DNA, 120 bp, Artificial Sequence
  ENSG00000265125_6 (sequence is synthesized)
ccctgagtgatccggaagtggattttctcccaaagcctcctgataggagccccagccagctgacagattgacttcagcactatgacatcaaagagcccacccaaggctgttactggaagg

SEQ ID NO: 836528 - DNA, 120 bp, Artificial Sequence
  ENSG00000265125_7 (sequence is synthesized)
agaaggccagctggcttcacgtcttattaacatcctgaactccagggttggtacccacagggtagtaagttgaccaccagaccactttatacagcatccaaactggcatggagaactcag

SEQ ID NO: 836529 - DNA, 120 bp, Artificial Sequence
  ENSG00000265125_8 (sequence is synthesized)
actccattcagatggatatcaattccatctggatctaattaaatgcaaaggacccagcatcacaaatacaggtggcaggcagaagaggaggacagcaggtgaagtcagagagattcaaag

SEQ ID NO: 836530 - DNA, 67 bp, Artificial Sequence
  ENSG00000265125_9 (sequence is synthesized)
gggtttcaccatattggccaggatggtcctgaactcctggcaggtctttttggaaagtcaccatgac

SEQ ID NO: 836531 - DNA, 120 bp, Artificial Sequence
  ENSG00000229881_0 (sequence is synthesized)
tgatcctcctactttggccttaacttcagatgttgccttcctggtgtctgggcttccgcagctgctgcttcttgaaatctgattagcaccataggactgacagtggcataggcattgacc

SEQ ID NO: 836532 - DNA, 120 bp, Artificial Sequence
  ENSG00000229881_1 (sequence is synthesized)
ccacgaagaaactcaccagcagcaagatggtcttggtggcccttttctctggggaggttcttaataaaaagctagtgctgtgaaggtgctgggagcacctctgatgcctggacaagagaa

SEQ ID NO: 836533 - DNA, 120 bp, Artificial Sequence
  ENSG00000229881_2 (sequence is synthesized)
tcaccatgaaggcacttgagagcggcatgattcctacaaggaagacatctctggataacgacagagtaacaaacagccttctgatggtgacattcattggggaaagtgagcagtatttac

SEQ ID NO: 836534 - DNA, 120 bp, Artificial Sequence
  ENSG00000229882_0 (sequence is synthesized)
tctggagctctgatgtacaacatggtgattacagctattaatgcatacttaagaactggaaagagtgggctttaaatgttctcaccacaaaaaaatctccctccggggacctctgagacg

SEQ ID NO: 836535 - DNA, 120 bp, Artificial Sequence
  ENSG00000229882_1 (sequence is synthesized)
gtcggtgtgaggctgtagctctgtggaaaacgcagaccacacagtacagaggcgaggccgtctccagagctggcatcatcaatgtggctaccatcgggcaaggccagaagaaaatacgga

SEQ ID NO: 836536 - DNA, 120 bp, Artificial Sequence
  ENSG00000229882_2 (sequence is synthesized)
aaataggaaaatcgctgctggactcatgtccttgggccttcagcaaattttctcctttaaaaatttcctttaatactgtgtaatgttgcttttgcgaaaataaaattcccgggacaaaaa

SEQ ID NO: 836537 - DNA, 120 bp, Artificial Sequence
  ENSG00000213742_0 (sequence is synthesized)
ggaaacgtgtgtcggcgccgccggatgcggcgacttctcagtggctgtggctggcgttggtccgaagcgtggtgttcttccctggtgtctttctgcttatctctttcctccctgggccct

SEQ ID NO: 836538 - DNA, 120 bp, Artificial Sequence
  ENSG00000213742_1 (sequence is synthesized)
ccggcgcgagggaccgtcatcacctccccgagagaggttgtccgcgctgccaggcgctgggcagcaggctctccgggtggccgggcgggcggcgcggagacgtcggcgggcctgatgtct

SEQ ID NO: 836539 - DNA, 120 bp, Artificial Sequence
  ENSG00000213742_2 (sequence is synthesized)
gccttgagcgcccgcggtcctagcctgcctgtacgcgcaggtcactgtagaatggcaccattgttgtgcggatgctgatgcccagcgttgagcctgtcgtctcctatattaggggaagtt

SEQ ID NO: 836540 - DNA, 120 bp, Artificial Sequence
  ENSG00000213742_3 (sequence is synthesized)
ctcctggcccttcccaactacctcccctgtgcaagtttattacaactgaacggcctcaaggatgaagtctggctctgttgcccaagctggagtgtgttggcaccatcttggttcactgca

SEQ ID NO: 836541 - DNA, 120 bp, Artificial Sequence
  ENSG00000213742_4 (sequence is synthesized)
ggagtgtgttggcaccatcttggttcactgcaacttccacctcccaggctccagtgattctcctgcctcagcctcaagggtagctgagattacaggctggagtgcagtggcatgatctca

SEQ ID NO: 836542 - DNA, 87 bp, Artificial Sequence
  ENSG00000213742_5 (sequence is synthesized)
cctccacctccagggttcaagtgattctgctacctcaacctcccaaatagctgggactacagggcaacatcatagctcactgcagcc

SEQ ID NO: 836543 - DNA, 120 bp, Artificial Sequence
  ENSG00000213742_6 (sequence is synthesized)
cctcctgagtagctggggctacaggcactttccctacattttcaaaggcctgcatcatcacatctgccacagcattctctatcattgaggcattttctcaggaaatcacctgtgaaatat

SEQ ID NO: 836544 - DNA, 120 bp, Artificial Sequence
  ENSG00000213742_7 (sequence is synthesized)
tctgcctctgttatatcttcacgaacaagttatgcagcctcaactaaagcttgtaacaaagcaaagttactctcctgagtgtgtcctctgatggatggtgagatataacttcaagatgaa

SEQ ID NO: 836545 - DNA, 120 bp, Artificial Sequence
  ENSG00000213742_8 (sequence is synthesized)
gcctcacccacactccctgtacaaaaacgcttctcaccagtctcctgtggtcccactgtgaggagtgaggaaagccagtaaaacagcatgaaaagagaagagaggaacacagggcctaac

SEQ ID NO: 836546 - DNA, 120 bp, Artificial Sequence
  ENSG00000213742_9 (sequence is synthesized)
tgtgaactaaaactgctccaagagagaacaagtccaccctagaggtggattaccacacctttcctctttcccctccagcctacttttcctttttaaacaatgaggctctcaaactcatct

SEQ ID NO: 836547 - DNA, 120 bp, Artificial Sequence
  ENSG00000213742_10 (sequence is synthesized)
ttggggaaagccactggcctctttctgtggcatgtcctcaactgtggcaaaataaacatctaaattggtacttgactctgatactttttggtttacatgtagttggagaagaaaaacagt

SEQ ID NO: 836548 - DNA, 120 bp, Artificial Sequence
  ENSG00000213742_11 (sequence is synthesized)
gaaatttcttcctctgacggcagttgaaagtgaaaggaaaataaaaacgttggaacccaaaccactctgccaaaagaaaaatattaagctgaaagctgattcatccaagaagctaccttt

SEQ ID NO: 836549 - DNA, 120 bp, Artificial Sequence
  ENSG00000213742_12 (sequence is synthesized)
atattaagctgaaagctgattcatccaagaagctacctttccttttgttcctaagcggagaactacagataggttaagtaagggtaagtatctctgccgggcgcggtggctcacgcctgt

SEQ ID NO: 836550 - DNA, 120 bp, Artificial Sequence
  ENSG00000213742_13 (sequence is synthesized)
cacctgtgtcactctggaagctttgatcagaaaattgtagttgctgttgcctctgatgtgcaagtccaagattcttgggccgcaggacatgttctgcatatattcctggagaatagacca

SEQ ID NO: 836551 - DNA, 120 bp, Artificial Sequence
  ENSG00000213742_14 (sequence is synthesized)
ctacaggaaaacattctgcctgtgttgcaatatccagaaactcctagatatactgatcaacagcagtttgaatgttttcctgatcagtgccattgacatagtcctgactcaccagagaag

SEQ ID NO: 836552 - DNA, 120 bp, Artificial Sequence
  ENSG00000213742_15 (sequence is synthesized)
caaagcaagcctcgaaagatggctccaattcattcaccaggtactgtgagaaggtctcagagtatctggtgctgcctgaagaagtgaagcctggccccggagctccaatgtgggtagtgg

SEQ ID NO: 836553 - DNA, 120 bp, Artificial Sequence
  ENSG00000213742_16 (sequence is synthesized)
tctggaagctttgatcagaaaattgtagttgctgttgcctctgatgtgcaagtccaagattcttgggccgcaggacatgttctgcatatattcctggagaatagaccaacaatgagactg

SEQ ID NO: 836554 - DNA, 120 bp, Artificial Sequence
  ENSG00000213742_17 (sequence is synthesized)
agtaacgaaaagtcttctatgaaagaaaaacccagaaccatattgctttactgcttaattctaataaactcataaagaacaacaaacaccaattcttctcaaactattccaaaaaattga

SEQ ID NO: 836555 - DNA, 120 bp, Artificial Sequence
  ENSG00000213742_18 (sequence is synthesized)
agcagggcagggaggaattcttcctaactcattctaaaaggccagcattatcctgataccaaaaccagacaaggacacagcaaaaacagagaactacaggccaatatccctgatgatgct

SEQ ID NO: 836556 - DNA, 120 bp, Artificial Sequence
  ENSG00000213742_19 (sequence is synthesized)
aaatggaaaaatcctcaacaaaatactagcaaaaccaatgcaacaacacagaaaagataatacaccatgatcaaatgagatttatcccaagtatgcaatcatgattcaacatacacaaat

SEQ ID NO: 836557 - DNA, 120 bp, Artificial Sequence
  ENSG00000213742_20 (sequence is synthesized)
caatacttgtgatacatcacatcaacagagtgaaggaccaaaagacatatgatcatctcaacagatacagaaaaagatttgatatgattcaaaatcccattatgataaaaactttttttt

SEQ ID NO: 836558 - DNA, 120 bp, Artificial Sequence
  ENSG00000213742_21 (sequence is synthesized)
accagaccatctcccggcgcgggtggaattcccgcgatctgtctcattccctgcgccgccgagaaaagtgagatcccgcgagactcccaggaatggcaccattgttgtgcggatgctgat

SEQ ID NO: 836559 - DNA, 120 bp, Artificial Sequence
  ENSG00000213742_22 (sequence is synthesized)
tgagtggtccccagatccctattttaccacttgttttgtcagactgttcttggtatcagctgtgttggagggagttctctgcaaagaccaatatgggactgcatatacagagattttatt

SEQ ID NO: 836560 - DNA, 120 bp, Artificial Sequence
  ENSG00000213742_23 (sequence is synthesized)
tccagatatgactgtgagagaatgatgaggggagcagttacttagtctatttgagctgttataataaaataccactgactaggaaatgtataaagaggactttattttcccagagttctg

SEQ ID NO: 836561 - DNA, 120 bp, Artificial Sequence
  ENSG00000213742_24 (sequence is synthesized)
gaggctgggaagttcaacatcaaaacatcagtaggtgcagttgtctgttgagggctcatgtctgtttccaagatgatgccttcatgctgcatcttttggaagggaggagcattgtgtcct

SEQ ID NO: 836562 - DNA, 120 bp, Artificial Sequence
  ENSG00000213742_25 (sequence is synthesized)
cacagagcagaaaatagaagggccacaggacaaactccctctatcaagccttttcataagggcacctgatcccattcgcaaagctctatcttcgtgacttgacttaatcacttcccaaag

SEQ ID NO: 836563 - DNA, 120 bp, Artificial Sequence
  ENSG00000213742_26 (sequence is synthesized)
gtcccacctcctaatacttacactgtttcaacagtaaacagtttatgtagagtttcaacataaattaaggaggggacaaaacatccaaaccaaggaaggctgggagggaagccagaggga

SEQ ID NO: 836564 - DNA, 120 bp, Artificial Sequence
  ENSG00000213742_27 (sequence is synthesized)
aagtgcaagaggaggtttggtggaggtgtcctagattgtttgcagtccaaggaggttggggagagtgtaacaggcctgccttggtatccctgctctgcagtcactggctaagagcagtcc

SEQ ID NO: 836565 - DNA, 120 bp, Artificial Sequence
  ENSG00000213742_28 (sequence is synthesized)
ttagaaagcacagcctggcacaaatacaacaagaatatgtgctcagtaggaaagagaccacatttccccaatagcccaggtaatgccctcccctcaactggcatctctgttccctaaaca

SEQ ID NO: 836566 - DNA, 120 bp, Artificial Sequence
  ENSG00000213742_29 (sequence is synthesized)
ctttaagtgcttactgtagtatgacttattgctaaactttcgtccacactcttggcattcataaggcctctctcctgtgtgtattctttcatgcacagtgaggtctgacttactggtata

SEQ ID NO: 836567 - DNA, 120 bp, Artificial Sequence
  ENSG00000213742_30 (sequence is synthesized)
gcctcgcttacactcctggcaaacaaaaggcttctcctttgagtgtatccgccagtggtgtctggtgagacttctcttccagctgaagccttgcccacacacattacacacgaagggctt

SEQ ID NO: 836568 - DNA, 120 bp, Artificial Sequence
  ENSG00000213742_31 (sequence is synthesized)
ctcccctgagtgtgtcctctggtgtgtgaggagatttcccttccagttgaagcctcgcccacactccttgcatacaaaaggctgcttgccagaatgtgcaagctggtgtttcacaagatt

SEQ ID NO: 836569 - DNA, 120 bp, Artificial Sequence
  ENSG00000213742_32 (sequence is synthesized)
tgacttccagataaatccttgcccacattcactacagatgaaaggcttctcccctgagtgtgtcttctggtggaagaggagagttgattttaggatgaagcctcgcccgcaatccttgca

SEQ ID NO: 836570 - DNA, 120 bp, Artificial Sequence
  ENSG00000213742_33 (sequence is synthesized)
attaaatggcctttcccccgagtgtgtccactgatgtctaagaagatttgccttcaaactaaaacttttctcacactgcttgcacatgaagggcttctctcctgagtgtgtcctctgatg

SEQ ID NO: 836571 - DNA, 120 bp, Artificial Sequence
  ENSG00000213742_34 (sequence is synthesized)
cgaaaccttcgcccacactcccgacatccataaggcttctcctctgagtgtgtcctctggtgtaaagtgaaggttgacttttggataaagcctcgtccacagtccttgcacacaaaaggc

SEQ ID NO: 836572 - DNA, 120 bp, Artificial Sequence
  ENSG00000213742_35 (sequence is synthesized)
ttctcctctgagtgtgtgatctgatgtttcacaagggttgacttctgaataaatccttgcccacattctctacaaacaaaaggtttctcccctgagtgtgttctctggtggtagacaaga

SEQ ID NO: 836573 - DNA, 120 bp, Artificial Sequence
  ENSG00000213742_36 (sequence is synthesized)
gttgacttttggctaaagcttcgctcacaatccttgcacacaaaaggcttctcccctgagtgtgttctctggtgtctgaggagacttcctttcacgctaaaactttgcttacactgcctg

SEQ ID NO: 836574 - DNA, 120 bp, Artificial Sequence
  ENSG00000213742_37 (sequence is synthesized)
cacgcaaagggcttctcccctgagtgtgtcctctggtgtgtgataaggtgtgacttattgctaaagcctcggccacactcctggcatctgtaaggcttctctcctgagtgtattctcttg

SEQ ID NO: 836575 - DNA, 120 bp, Artificial Sequence
  ENSG00000213742_38 (sequence is synthesized)
tgcacaacgaagtatgacttattagtatagcctcgcccacactccttgcacacaaaaggcttctcccctgaatgcgccttcaagtgcttgttgtatgaggacttatcgttaaaccttcgc

SEQ ID NO: 836576 - DNA, 120 bp, Artificial Sequence
  ENSG00000213742_39 (sequence is synthesized)
ccacactcctggcattcataaggcttctctcctgtgtgtgttctctcatgcacagtgaggtatgacttactggtatagcctcgtccacacaccttgcacagaaaaggcttctctcctgag

SEQ ID NO: 836577 - DNA, 120 bp, Artificial Sequence
  ENSG00000213742_40 (sequence is synthesized)
tgtgtcctctggtgtctgaggaggttggccttgaggctgaagcctcgcccacacacactgcacacataggacttctctcctgtgtgtgtgttctggtgcaagagcaatgctgactcatct

SEQ ID NO: 836578 - DNA, 120 bp, Artificial Sequence
  ENSG00000213742_41 (sequence is synthesized)
ctaaagccctggtgacactccctgcatgtaaaaagtttctgcctggaatgtgcttttttgtgtatgattaccatcatcttccggctgaagtcttgcccacgctctgcacacttgaatgct

SEQ ID NO: 836579 - DNA, 120 bp, Artificial Sequence
  ENSG00000213742_42 (sequence is synthesized)
ccccatcttgaattttctattcctttcaatactttgtctatttctgtaggattttccctctggccttgactagactctatttccactacactgttcctcctccttgagcttactgcatgt

SEQ ID NO: 836580 - DNA, 120 bp, Artificial Sequence
  ENSG00000213742_43 (sequence is synthesized)
ggctcactgcagcctcgacctcccaggcttacacgatcctcccacctcaactttccaaatagctagactacaggtgcctgcctgtagtcaagccataggtgccattgcctggctaatttt

SEQ ID NO: 836581 - DNA, 120 bp, Artificial Sequence
  ENSG00000213742_44 (sequence is synthesized)
tcgccatgttgtccaggctggtctcaaattcttgagctcaagcaatctgcccatcttgccctcccaaagtgatgagattaaaggcataagccaccgcacccagcctatgataaaaactta

SEQ ID NO: 836582 - DNA, 120 bp, Artificial Sequence
  ENSG00000213742_45 (sequence is synthesized)
agccaccgcacccagcctatgataaaaacttaaatcaggtgtacaggaaacatatctcaacataatatagacaatatgttccaaacccacagcaaacatcttagtgaatggggaaaagat

SEQ ID NO: 836583 - DNA, 120 bp, Artificial Sequence
  ENSG00000213742_46 (sequence is synthesized)
aaaagtctttcctctaagaactggaagaagattcgaatgtctactttcaccactcttattaccatagttcagggagtcctagtcagaactatggtaagagaaaaaaataaggcaagaaaa

SEQ ID NO: 836584 - DNA, 120 bp, Artificial Sequence
  ENSG00000223732_0 (sequence is synthesized)
gaaggcagctgtacggctttcatgagttgtttcaacagagggagaagaagccaggagagccaatttctgacggcaagtgttgaagaaggttcatatgcttgctaccttccaaacagctct

SEQ ID NO: 836585 - DNA, 120 bp, Artificial Sequence
  ENSG00000223732_1 (sequence is synthesized)
aaagcctcttcgggacatttgcaagcatccagagcagagatgttaaaaattcttattatccacgaaagtatgatgcaaaattcacagacttcagcttacctcccagtagaaaacagaaaa

SEQ ID NO: 836586 - DNA, 120 bp, Artificial Sequence
  ENSG00000260806_0 (sequence is synthesized)
cgaagcctcacgggaagcggagttcctaaggccgcctgcggcccggcaattaccccctgggtcctctcacacttagcagtgggtgtcagatggtggaagggaacgctcagggaggccccg

SEQ ID NO: 836587 - DNA, 120 bp, Artificial Sequence
  ENSG00000260806_1 (sequence is synthesized)
ggcggtgagttgtccctcgggcggggacgccctcgtgggcagtgcggcgtggacggcgcaaggaagaacccggagagatcccaagccacgaggcaccgcttccggcgcattgtgaggtcc

SEQ ID NO: 836588 - DNA, 120 bp, Artificial Sequence
  ENSG00000260806_2 (sequence is synthesized)
cacctttcccgccgcctgaggtcgcggcggctgctctttcccggagcagcgtccctggaggcgctgccagggggtgaggcacccacgcgtgcaccgtatgtaccccccagcgcggcgctt

SEQ ID NO: 836589 - DNA, 120 bp, Artificial Sequence
  ENSG00000260806_3 (sequence is synthesized)
agaacgactcgcatgagtcgctgccttgggttggaaccggttactccgccgcttcgtactggactgcaaagtaacaagtacttcgccgggcagcggtgccgaccccgtgtgctacggcga

SEQ ID NO: 836590 - DNA, 120 bp, Artificial Sequence
  ENSG00000260806_4 (sequence is synthesized)
gaggtgcttagcctagagccgacgaaaacatgtccccaggactccctttccctcccagactgcgtcccaccagatggagctttccgtctgttttaaccaccagtgtattcctgatgcctg

SEQ ID NO: 836591 - DNA, 120 bp, Artificial Sequence
  ENSG00000260806_5 (sequence is synthesized)
acccaggcgctgaaatatttgttgaacgaataaatgtgtaggttaggactgacgacagtccgcgaattctggaacacgggctgattttacttttgaacaaatgatgcactggaacttcct

SEQ ID NO: 836592 - DNA, 120 bp, Artificial Sequence
  ENSG00000260806_6 (sequence is synthesized)
taatttccccttgactgtgtttccagcccttaatctatatcgggtgggacctggaagtctaccttctcgccacccctcggcaaaagtttgagaaagtgtttgaggcagagcctcctctct

SEQ ID NO: 836593 - DNA, 120 bp, Artificial Sequence
  ENSG00000260806_7 (sequence is synthesized)
catatgccctccatctgcgaattagaacgaattataagttctacggtgtcacatagggggttagcggagaggaagagggaaagaatcaaatacaggacgctgccttaaccaaagttctaa

SEQ ID NO: 836594 - DNA, 120 bp, Artificial Sequence
  ENSG00000260806_8 (sequence is synthesized)
actctaaatgtaataatgtgcatttgtgagtcctcaggaagtttcacaaaggctttcccttttttcacagaatgtctagtaggactggtgactccgaatgggaaaaacacaggacctaga

SEQ ID NO: 836595 - DNA, 120 bp, Artificial Sequence
  ENSG00000260806_9 (sequence is synthesized)
cctgccctgtccattagtgtagccccttggccacttagggccactgagcacttgaaatgaggctagttcgtttaggaggcactggaagtgcaaaatacgcacgggtgtcagttcgacgaa

SEQ ID NO: 836596 - DNA, 120 bp, Artificial Sequence
  ENSG00000260806_10 (sequence is synthesized)
tgtgaaatacctcactgatcactttttatattgattgcacgttgaaatattttggatatattgcagtaaagaaaatgtaagccgggcacggtgtctcacacctgtgatccagcactttag

SEQ ID NO: 836597 - DNA, 88 bp, Artificial Sequence
  ENSG00000260806_11 (sequence is synthesized)
cctgtgatgcttgggcaggagttagagaccagcctgggcaatatagggaaacccccgtctatacaaaaagttaaaaaaaaaaaaaaaa

SEQ ID NO: 836598 - DNA, 120 bp, Artificial Sequence
  ENSG00000256875_0 (sequence is synthesized)
gagaaccccagttttgttccaataagaggcagaaacctcttggtctcaggaaagatagactccatcccccagccttgtgatgaattctatttgggttgagacagtcacagtaaatccatc

SEQ ID NO: 836599 - DNA, 120 bp, Artificial Sequence
  ENSG00000256875_1 (sequence is synthesized)
ccctttgcctgatttccactttcccagcttccttcaccacaagcaatgccatgagacactcttctggtcaatgagatttgagaagccaggtgggagctctggctgctacaccactgctta

SEQ ID NO: 836600 - DNA, 120 bp, Artificial Sequence
  ENSG00000256875_2 (sequence is synthesized)
agggtgctggaatgtggacatgatgcctggagctgcagcagccttgttgggtcaataagacatcaagtaggagaaacaaaagccaacactgctagtaatattctatttcctgattgttac

SEQ ID NO: 836601 - DNA, 120 bp, Artificial Sequence
  ENSG00000256875_3 (sequence is synthesized)
atttgtaacatgtaacacacaacattttgtgagaattcaaggagctgtgcatttttctgttagtgtgttatacctcaccaaaacagttaggtaaaaatctaacaccctgaggatggcaga

SEQ ID NO: 836602 - DNA, 120 bp, Artificial Sequence
  ENSG00000256875_4 (sequence is synthesized)
gcaaacccctgaaaacatgggtgaactggttaaccagcctcaaatactgtaactcggagcttctgattaagagaatcaaaagcctttgttgcttaattactaggttttctaatacttgca

SEQ ID NO: 836603 - DNA, 120 bp, Artificial Sequence
  ENSG00000260808_0 (sequence is synthesized)
gcagtgaaacccatctgattaagatgctcaacttttctgaagaaaaagctgacaccaagacctgcctaaggtcacaccatcatgagtggctgagttgggctgtgatgagccacccggctg

SEQ ID NO: 836604 - DNA, 120 bp, Artificial Sequence
  ENSG00000260808_1 (sequence is synthesized)
gagagcttgtgccctggttacacgattgccagtgagatgcctatggactcgcatgtagagagtgagtgcagcagtgacagcttggtgggctccagctgacccctccagagcccctgagtg

SEQ ID NO: 836605 - DNA, 120 bp, Artificial Sequence
  ENSG00000260808_2 (sequence is synthesized)
agcagcagcagacgtcacccgtcatacagggccattcactgaagtgtcacctggtgcgcttggttggccagtcctaaggagcaacagacaggcatcggaggcacttgcagcagaaatatg

SEQ ID NO: 836606 - DNA, 120 bp, Artificial Sequence
  ENSG00000260808_3 (sequence is synthesized)
aaaaacaaaacctacttagctgagctccccaagggcagggacaacttattttaacattgttttgaacttagtaagtttttaataaaatgatatgtaaatgaatggagcaaaagctctaga

SEQ ID NO: 836607 - DNA, 120 bp, Artificial Sequence
  ENSG00000260808_4 (sequence is synthesized)
agtcagggaacatctgtcccttcttcgtgaatatctgtgttcaagtctcttgctcatttgttaaattgggcttttcatcttaattttggtttgcagttttctcccctatatccgaggtct

SEQ ID NO: 836608 - DNA, 120 bp, Artificial Sequence
  ENSG00000260808_5 (sequence is synthesized)
gagtcctttgtcaggacacacagtgtgatttcttgcctggcattccgttccttgcttgtccattttcaagagcagaacattttcacgttgatggaagcccgatgtctttcttctacgaca

SEQ ID NO: 836609 - DNA, 120 bp, Artificial Sequence
  ENSG00000260808_6 (sequence is synthesized)
agtgagatgcctatggactcgcatgtagaggtgggtacccagacagctcagagtgagctgcctgcgggcccagcatgcagaggtgtgtactcagtgctgtgtgagatgcctgtgggccca

SEQ ID NO: 836610 - DNA, 120 bp, Artificial Sequence
  ENSG00000260808_7 (sequence is synthesized)
tcgcccatcccacattttagataattttttcttctaaaaacttcactgtttaagcgctcatgtttggatctgcaatctattttggatgaattcttgtgtatgacgtgcagtaggaataaa

SEQ ID NO: 836611 - DNA, 120 bp, Artificial Sequence
  ENSG00000224700_0 (sequence is synthesized)
gaactgtaaaccaactgccaaacaccccaacatgcactcacagcaaatgggctagataattcattcagcccccaagtagggcgtactccacaatgaccacttcagatgtggccatggagg

SEQ ID NO: 836612 - DNA, 120 bp, Artificial Sequence
  ENSG00000224700_1 (sequence is synthesized)
atgctgaacaaagaagaactatccagtgtgtgacgccagggagccaccactaacaatagcttcatgccaatgaatcatccctcagttgaggacgacgtgcctgcagagattcatcaagac

SEQ ID NO: 836613 - DNA, 120 bp, Artificial Sequence
  ENSG00000224700_2 (sequence is synthesized)
ttggagctcttaggtggaaaaatgggtgcccacttaaaagctacacaacctggaacacggtgtcaggacactttaattctttctcctcctgtcctcatctggtagcctcatgcaattcag

SEQ ID NO: 836614 - DNA, 120 bp, Artificial Sequence
  ENSG00000224700_3 (sequence is synthesized)
aggaaacacaaagcggagcattcccaaagggctcacattgtttgggatttgtccacgttgactcttcaggctgcagttgcatttgctggatacctgctatgtgccaaatctcatctccct

SEQ ID NO: 836615 - DNA, 120 bp, Artificial Sequence
  ENSG00000224702_0 (sequence is synthesized)
gtacaatgtcctactgtgattatttcaggaaaccagcaacatggggacagataaaagtaagaagcaggttaccttcgctctctggttttggaaccacacctggacgacacggacactcag

SEQ ID NO: 836616 - DNA, 120 bp, Artificial Sequence
  ENSG00000224702_1 (sequence is synthesized)
ccctgtctctgcagccagagtctctctcaccttggaaaaattgaacgagaaatgtagacacactggcatctcagggtaggaggtagaacatctcctatataatacttgaggaggccaaaa

SEQ ID NO: 836617 - DNA, 120 bp, Artificial Sequence
  ENSG00000224702_2 (sequence is synthesized)
cttcaccaggtaactttgggtgtttcatgaatatccatagtgactgctaccccaagtgagccctgcccaaagagaataaaatgagagccatctggaacccggcagagccaggaagtgtgg

SEQ ID NO: 836618 - DNA, 120 bp, Artificial Sequence
  ENSG00000224702_3 (sequence is synthesized)
ccacaggactacattctggccaacacatatgaggagaaatgatttgagcaacccctggatacatccttaaaaagcagggcgcttgccctccatttcctctttctctacctggtgactgga

SEQ ID NO: 836619 - DNA, 120 bp, Artificial Sequence
  ENSG00000224702_4 (sequence is synthesized)
aacatggtgacaactggagcagtcgcttggacacaggagatggataacagagccacccaccagccttgccttgctcacctctggactgtgacagaagagaataaactcctgtctcattaa

SEQ ID NO: 836620 - DNA, 120 bp, Artificial Sequence
  ENSG00000224707_0 (sequence is synthesized)
cagagtccaagagaaatgccctgcccagggtctggcagaactgatggagagcagccttcgtggctaccaccttcccataaagtctgtgctctccagcggcgcttggtaataagatttatt

SEQ ID NO: 836621 - DNA, 120 bp, Artificial Sequence
  ENSG00000224707_1 (sequence is synthesized)
taccacagatttgactgggtttgagttttgattatagacttcgatggagaaagcaatggcgccacaacccagccagggtgccctgccaggacttcctcatctcttgcagtgaaaccccct

SEQ ID NO: 836622 - DNA, 120 bp, Artificial Sequence
  ENSG00000224707_2 (sequence is synthesized)
tatcaaacattacgtgctatctggccccctttgtcatactttcttgcactccacttactacatatcaaggatttgccatgttgtggaaaagttggtttcataacatattttgaactctta

SEQ ID NO: 836623 - DNA, 120 bp, Artificial Sequence
  ENSG00000280241_0 (sequence is synthesized)
ttatgttctgggatttacaacttcagggagacaaaggaaactccagctcatctcccacatcattgattgagaggaccattttctgactgtctgcacacgtttcctatactaccctttaat

SEQ ID NO: 836624 - DNA, 120 bp, Artificial Sequence
  ENSG00000280241_1 (sequence is synthesized)
gcaacaatgggatgaagagatgaagacttctagcaggctacctcagaaaggttgctgaccaaaggctgtatggaccaaaaagtcataacaccaccctggatgaaaggacatttacctaag

SEQ ID NO: 836625 - DNA, 120 bp, Artificial Sequence
  ENSG00000280241_2 (sequence is synthesized)
ttcttcccaggtgcatgtagtatagattaaataaggtggttgtatggcaacagagacattattagaaacattcttcttgaagtttgacaacaaagcagtagatgtgtatctactacagag

SEQ ID NO: 836626 - DNA, 120 bp, Artificial Sequence
  ENSG00000280241_3 (sequence is synthesized)
ttgttagtgaaaaaaggtatgtttgaagtaatcaattggtattcattttaaacagtaatggtcttactgaagctaagtttaatacatgctgtgtttggaagtaatttctttaccactgtg

SEQ ID NO: 836627 - DNA, 120 bp, Artificial Sequence
  ENSG00000280241_4 (sequence is synthesized)
gtgcaattctacttggagatcttcataacaccttaagggaaaaatcctttttgaaagaaaaacaagtctgggtggtgcttgaaaattcagaaggcagctagaaactctgccaattacaac

SEQ ID NO: 836628 - DNA, 120 bp, Artificial Sequence
  ENSG00000280241_5 (sequence is synthesized)
tggtgattgctgagttctggagacagactgggcttctgctttcttttggtggaggtgtctgcttgcagaaaatttatgttctgggatttacaacttcagggagacaaaggaaactccagc

SEQ ID NO: 836629 - DNA, 120 bp, Artificial Sequence
  ENSG00000280241_6 (sequence is synthesized)
tcatctcccacatcattgattgagaggaccattttctgactgtctgcacacggatgggcatttgaattatttccagtttttggctattatgaaaaaaactgctatgaacattcatacaca

SEQ ID NO: 836630 - DNA, 120 bp, Artificial Sequence
  ENSG00000280241_7 (sequence is synthesized)
agtgtgtgtgtggacccatgttttcactgatcaaggcctaaatacctacgtggtgcttcgtgaaccctggatgctacagtctctggccacagcactaaatgtatgctgagatctggcttc

SEQ ID NO: 836631 - DNA, 120 bp, Artificial Sequence
  ENSG00000280241_8 (sequence is synthesized)
tggttttcaatgtgcctgacataggatcaatggtgaatgcaccagaagcctcatcagtcagaaaatactcagtttgcccattcaggccttcatccttgtccacagctgaaagcacaagaa

SEQ ID NO: 836632 - DNA, 120 bp, Artificial Sequence
  ENSG00000280241_9 (sequence is synthesized)
ccactgttcccacttcagcatcttctctcacagaggactggtaataaagtgtgggaaaagaaggactgtggtcattggcatccaaaactctaacttgcaggtgtattacagagctcctag

SEQ ID NO: 836633 - DNA, 120 bp, Artificial Sequence
  ENSG00000280241_10 (sequence is synthesized)
gtggatctcccaggtcagagcacagaatgacaagggtaaaattgctgatttgctcccggtccaaagcacgagtggttgagagttctcctgacatctcatttatagtaaagcactcatcag

SEQ ID NO: 836634 - DNA, 120 bp, Artificial Sequence
  ENSG00000280241_11 (sequence is synthesized)
tatttccatctattaaagaaaacaattacaaattcatttgaattgaaaaagtagcagctctttgctagcactatctatggtattcatttatacattcattaaaaatatatttattcccga

SEQ ID NO: 836635 - DNA, 120 bp, Artificial Sequence
  ENSG00000280241_12 (sequence is synthesized)
aataactctgtgtgccaatttcccagactctgagaattttataggtttaaagtgccatggagattctgttgtcatttatgctttttttctatttctgttacagttaacaagatcaacctt

SEQ ID NO: 836636 - DNA, 120 bp, Artificial Sequence
  ENSG00000280241_13 (sequence is synthesized)
aatatgattcaatgcctatctttaatcagtcaataattagaacacttgctttcactaatttgcagccgtatgattttttgtgtgcatctacaacttttaattttaatatatttttcctca

SEQ ID NO: 836637 - DNA, 120 bp, Artificial Sequence
  ENSG00000280241_14 (sequence is synthesized)
taagaggatgaagatatatgttttatttaacacaaaacaatagatgaggataaaaaaaacagaatataatgtccttttttaagatatcaatcagaaatgaacagatttgatttgtagtta

SEQ ID NO: 836638 - DNA, 120 bp, Artificial Sequence
  ENSG00000280241_15 (sequence is synthesized)
tacagtattcatgcctgttatactattgcagtaagccttctcttctacatgtccacagcattttgtacaagaatcataacactttggttagagttagttggacacttgactatttcttcc

SEQ ID NO: 836639 - DNA, 120 bp, Artificial Sequence
  ENSG00000280241_16 (sequence is synthesized)
aaaacataaataaggacattgttctattcatctattccttaaaaaaaatctgccctttattatattccatcgtatcaagtagaataaaacttaaaattgaacacagggacaaaaagcttt

SEQ ID NO: 836640 - DNA, 120 bp, Artificial Sequence
  ENSG00000280241_17 (sequence is synthesized)
caaagacatttttaaataaccctgaaaattagtgaagaaaaatgtggttcatatgcttgccagccatattcttggatgaagagcaggcccaatagtgtgggaacttactagagtctgcat

SEQ ID NO: 836641 - DNA, 120 bp, Artificial Sequence
  ENSG00000280241_18 (sequence is synthesized)
atcagaggcatatgaggaccaagtggaatggcattcaaaggaaacaacagcaataggtagctttagggaggaggagagggccctgcatttgtattcatgaggaacagttaatttacacca

SEQ ID NO: 836642 - DNA, 120 bp, Artificial Sequence
  ENSG00000280241_19 (sequence is synthesized)
aaagtagagatgattggacaaacccacatttctgtagtatttgtggctgataaagtgattcagtcattcagcaaacatttgatgagcatctactatgtgccaagtttgtgctcaagatca

SEQ ID NO: 836643 - DNA, 120 bp, Artificial Sequence
  ENSG00000280241_20 (sequence is synthesized)
cagatatgaagggagtaagacatgacctagctccaagagttcacagtctaaaaggaaaggctggtcaatactcgggtattaaagtaccatgtgaaaatcatatgtacagagtgctaaatg

SEQ ID NO: 836644 - DNA, 120 bp, Artificial Sequence
  ENSG00000280241_21 (sequence is synthesized)
agtacatatagatagtgctagccaaggggtgctatttctctgagaagtacagagaaagggcacatagtcctatgttagtaagttcaagaaatgcttattggaaaaagtgacatcaaatct

SEQ ID NO: 836645 - DNA, 120 bp, Artificial Sequence
  ENSG00000280241_22 (sequence is synthesized)
cactcctaaagtggagaaagccatactacaagttttggggagagtgttctatgcagaggaaagagcccgtgggaagttctaggaatataagaattaacaggctgcaaatgtttgggtgtg

SEQ ID NO: 836646 - DNA, 120 bp, Artificial Sequence
  ENSG00000280241_23 (sequence is synthesized)
actagtacacagggttcctgggtgtttgtatgtggcaagtaggaaaagggctggcagtagcggtagaggaaagacatgaatttgggaggtaagcagggggtcaaattgtgaagggctctc

SEQ ID NO: 836647 - DNA, 120 bp, Artificial Sequence
  ENSG00000280241_24 (sequence is synthesized)
tgtatactgctgaagattctatagtttctcctgaaatccatgagggagccccctgaaggattttggacaggaaagtgtcatgaatcaaatttctattttaagaatagtatcgaggcagca

SEQ ID NO: 836648 - DNA, 120 bp, Artificial Sequence
  ENSG00000280241_25 (sequence is synthesized)
atgtcaaagtttgtttagaaaataggatggttcctgtaatcccagaacttttggagaccaaggcgggaggattgcttgagtccaggaatttgagtccagcctgggcaacatagtgagacc

SEQ ID NO: 836649 - DNA, 120 bp, Artificial Sequence
  ENSG00000197251_0 (sequence is synthesized)
agatgcgagcgcctgcgcaggtacgcacgctccgctggagcctggggtggcctggcagtcgtggccgagacgtgtttgctgcacttcggtgcgcacaggcactgcggtgccaacctcttg

SEQ ID NO: 836650 - DNA, 120 bp, Artificial Sequence
  ENSG00000197251_1 (sequence is synthesized)
gttccgccctccccccgcaggcgcccacgcgtgacctcggccgcccacaggccttcgactcttcccggactccaggtcccaggccgccccgctccaccctgcggatgatggagacaaagt

SEQ ID NO: 836651 - DNA, 120 bp, Artificial Sequence
  ENSG00000197251_2 (sequence is synthesized)
cccccacaagcccctcatatggggcaagggggaaggtaccacctggggcggggcctggctccccactgagcagaggtgctggccaaggcgctccccttagtgagacaaggtttcaccatg

SEQ ID NO: 836652 - DNA, 79 bp, Artificial Sequence
  ENSG00000197251_3 (sequence is synthesized)
gcccacctcagcctccccaggtggcaagtctttctgataggcactgctccaaagtgaatcacactgtgctaagcccccg

SEQ ID NO: 836653 - DNA, 120 bp, Artificial Sequence
  ENSG00000197251_4 (sequence is synthesized)
ggcactgctccaaagtgaatcacactgtgctaagcccccgcaagggagtgcctttgcagcttacagctgcacactcgtcatctcaggaggtccttgcaacagtcccctttcacgggtaaa

SEQ ID NO: 836654 - DNA, 120 bp, Artificial Sequence
  ENSG00000197251_5 (sequence is synthesized)
gaaactgaggcctctactcaacctcacagagcaagctaatgccagactaaaacctctggcctccaaaccccatgccctttctttttgtaagctacacagactgtcagggcaaatgtccac

SEQ ID NO: 836655 - DNA, 120 bp, Artificial Sequence
  ENSG00000197251_6 (sequence is synthesized)
tggataaaagcatgagatgatgaatggacggaaattaaccaaaaaggtcatcaacacattttcaacagatccatcaatgtgcactcaaagaagctgagacaggcctaacctttaaaggct

SEQ ID NO: 836656 - DNA, 120 bp, Artificial Sequence
  ENSG00000197251_7 (sequence is synthesized)
gatgtcaaggaaggggagcagcaggatggtactcggtctgacccagcggggtcgctcccctgagcctatgtgtgtttggagtggacgagaatgggagagagattagaaaaacagcagcat

SEQ ID NO: 836657 - DNA, 120 bp, Artificial Sequence
  ENSG00000197251_8 (sequence is synthesized)
aggaaactgaggctcagaaagaggaagggacttgcccaaggccacatagcaaaggaatagcaaagttgagacaaaaataatggacattgtgactctgagtcaagtgagaaacagagagac

SEQ ID NO: 836658 - DNA, 120 bp, Artificial Sequence
  ENSG00000197251_9 (sequence is synthesized)
gtgtgtgtgtgtgtgtgtgtgtgtttatgtgcatgcagtgtgcactcactcagggggccagggtcctgaatttagaaacactaccaccaagaaggcattatgcctaccctacccaggcag

SEQ ID NO: 836659 - DNA, 120 bp, Artificial Sequence
  ENSG00000197251_10 (sequence is synthesized)
taccctacccaggcagtgggggctggagccagggcctgggggctggaaccagggcccagggcctggaggggatggtaagcctccagccccaccttctccaggaaggggttggtggtctgg

SEQ ID NO: 836660 - DNA, 120 bp, Artificial Sequence
  ENSG00000197251_11 (sequence is synthesized)
cacgggccaagcgtacctggccatccacaatgctcacctccaccacggtgatctctggccgggtaagcagctctcggccctcttggctgcctagcttccagaggcgggactcttgctgca

SEQ ID NO: 836661 - DNA, 120 bp, Artificial Sequence
  ENSG00000197251_12 (sequence is synthesized)
ttcccagaagcttcttcaactccgactccaggaaacctgagagccagagagatggcaagggacagggagatggcagggaacaggcaggagtaggatggagcagcccactgggaacccaag

SEQ ID NO: 836662 - DNA, 120 bp, Artificial Sequence
  ENSG00000197251_13 (sequence is synthesized)
gacccggaggtgcaaccgctccctgagcctcatcccagctctgtgtggttcctgctcaccctcagccacagccctctcttcttccaggacgtagagccagccaggtaccacccctccttc

SEQ ID NO: 836663 - DNA, 120 bp, Artificial Sequence
  ENSG00000197251_14 (sequence is synthesized)
gccctgccttccccaggaagctcactctttgagggccttctctggcagcggcagcatgagagcctgcgtcttcacccactggggacagcatgcaaagggcaggtatttgcccccaccacc

SEQ ID NO: 836664 - DNA, 120 bp, Artificial Sequence
  ENSG00000197251_15 (sequence is synthesized)
aaccaactcaagagcctggatctggaacccaaactgcctgcactcaagtcccagctctgcccatcactagctgtgtgacatcgggcaagttctcactgtgaactggagatggcaatagga

SEQ ID NO: 836665 - DNA, 120 bp, Artificial Sequence
  ENSG00000197251_16 (sequence is synthesized)
cctacctcagagtcgtaaaatgcaggattttatgaaaagtgcttaaagagggtctgccccattaatggctatgtaaatgtgaaccacgattttcatcatattatgtatgctatcaccact

SEQ ID NO: 836666 - DNA, 120 bp, Artificial Sequence
  ENSG00000282080_0 (sequence is synthesized)
ggagggatcccctgcagccgccagggctggaccgtgtggtgcgcaggtgagaagccgggagggcctggacaaccccgaccgcgagccggacccctgctctgaccgcaggacacagtacct

SEQ ID NO: 836667 - DNA, 120 bp, Artificial Sequence
  ENSG00000282080_1 (sequence is synthesized)
tgaagagaaattggagagggagtcaattcctaggatagcagagagatggacaacagacagaatgtgagtattaaaactgatgtcagatatcaaattggtttgtcagggttatgttgataa

SEQ ID NO: 836668 - DNA, 120 bp, Artificial Sequence
  ENSG00000282080_2 (sequence is synthesized)
cagccactagacttggtatattcccaaattatttttattcataagtaattactatttgccatttgtggccttttgtgctttaatattatcaagaacaataagaatgataaaatatttatg

SEQ ID NO: 836669 - DNA, 120 bp, Artificial Sequence
  ENSG00000282080_3 (sequence is synthesized)
atcagcattgtaattgcaaacaggcctcagtaaaaattatacacaacttgttttgagcgaatttccttgaaaagaaccatggctatataggtgtgaagagtaacatagcgtaatatatga

SEQ ID NO: 836670 - DNA, 120 bp, Artificial Sequence
  ENSG00000286972_0 (sequence is synthesized)
ggagctgcacagcaatgattcaggaaaaggctgacaaggatatcagcagcgtgggtttttttaatcctgagtccagagaaaatgcacaatcaggaataaaggcgcccaagagagcaagga

SEQ ID NO: 836671 - DNA, 120 bp, Artificial Sequence
  ENSG00000286972_1 (sequence is synthesized)
gaaggagaaataatcagaattagccagctggcgggcagcacaaacaggggatatgcaaccccaacagggttggagcctgtgcaggaccagctgaggaggtggccacggattgggcaggcc

SEQ ID NO: 836672 - DNA, 120 bp, Artificial Sequence
  ENSG00000286972_2 (sequence is synthesized)
cagacaggcgcatgagggaacttgggctggctggagcccagcaagcaggcagaagggaagacaataaaagaagccgtcatcagatctgatctttaaaaaaaatgcccaaagagacattgg

SEQ ID NO: 836673 - DNA, 120 bp, Artificial Sequence
  ENSG00000286972_3 (sequence is synthesized)
ccaagtttcagcatgaggtatcactgaaaccacttcaggaaggataacaccaccacagacttcctgggaagaagagatgtaaacccacctcagaagatgacagcagtgaagaaaatgagc

SEQ ID NO: 836674 - DNA, 120 bp, Artificial Sequence
  ENSG00000286972_4 (sequence is synthesized)
atcacaaactggttcccaaggcctgggcctgagaaacactcaggagagccaattgctgaaaaaataataataataatacccagagagaggaagccttttcttcaggaggaaactgactca

SEQ ID NO: 836675 - DNA, 120 bp, Artificial Sequence
  ENSG00000286972_5 (sequence is synthesized)
cactctctgccctcagatcttcctgttctcacccttacacctccactccaactacagtgcctccttgctgtttctcaagcaaccaggcatgttctcacctcaacacctgtattggttatt

SEQ ID NO: 836676 - DNA, 120 bp, Artificial Sequence
  ENSG00000286972_6 (sequence is synthesized)
tattgctatgtaacatacaactcgaaatagtagctgcttaaaacaagaaactcttttttaaaaaacagtctcagagttcctgtgggtcaggaacctgggagtggcatagctaggttattc

SEQ ID NO: 836677 - DNA, 120 bp, Artificial Sequence
  ENSG00000286972_7 (sequence is synthesized)
aaggtggcccactcacaagcctcagaagttattgctggctgttgtcaggaggcttcagttccttcccatgtggacttctccataggactgactgcttgagtgccctcacaaggcagcagc

SEQ ID NO: 836678 - DNA, 120 bp, Artificial Sequence
  ENSG00000286972_8 (sequence is synthesized)
tggctttccacaggatgggtgatccaagagagagaaaggctgaagctgtcatctcttttatgacccagccatggaacccatatttccacaatatcctattgggtacacgttagccctatt

SEQ ID NO: 836679 - DNA, 120 bp, Artificial Sequence
  ENSG00000286972_9 (sequence is synthesized)
cagtcaggaggggactacacaagaacatgaatactggagtcattggaggccctctttgaggcttaggaccagtgagactttacacttatcacttccgctaccatcctttccccagatatc

SEQ ID NO: 836680 - DNA, 120 bp, Artificial Sequence
  ENSG00000286972_10 (sequence is synthesized)
cccatggcttcttctttttcctccttcgaatctttgctcaaatgtcactttttcaaaaagaccagccttttaaaaactacagctcctcctcttgccccagagcattcccaaatttccttt

SEQ ID NO: 836681 - DNA, 120 bp, Artificial Sequence
  ENSG00000286972_11 (sequence is synthesized)
cccaatttattttattcattgcatttatcatcaaatacacacacacacacacataattttgtgtttttgagttttagatttacagaaaagcaacaaagatagtacagagactcccgtata

SEQ ID NO: 836682 - DNA, 120 bp, Artificial Sequence
  ENSG00000286972_12 (sequence is synthesized)
tgtttcacctggtttctcctaatgtttgttctggttgagtttttttgttattgttgttttgttgtttttttctgtcttcctccattagaatataagcgcaatgaaagcagtgacttttgc

SEQ ID NO: 836683 - DNA, 120 bp, Artificial Sequence
  ENSG00000286972_13 (sequence is synthesized)
ctattttattggctgatgtatcctcagtgcccaaaacattgcctcactcacagtaaacattcaataaatatttgttggatgaatgaaagactatattaccagctcaaagaaaagctgaca

SEQ ID NO: 836684 - DNA, 120 bp, Artificial Sequence
  ENSG00000286972_14 (sequence is synthesized)
cttgccttttgaccttgaagttcttaacagaaacacacaggatatttaacataggatgacccaggggatttaggtagagtatttaaaactcagcagggaaaggtttgggtgagaaagtgt

SEQ ID NO: 836685 - DNA, 90 bp, Artificial Sequence
  ENSG00000286973_0 (sequence is synthesized)
gggttaccgtcaacggatggaagctttgttccttcgctcttcgtgataaatcttggtgtagctcaccctttgggtccacactactgtgtg

SEQ ID NO: 836686 - DNA, 120 bp, Artificial Sequence
  ENSG00000286973_1 (sequence is synthesized)
aagagctgtaacactcactgtgaaggtgtgtggcttctctcctgaagtcaatgagaccacgaaaccaccagaaggaagaaacattggacacacctgaacatctgaaggaacaaactccgg

SEQ ID NO: 836687 - DNA, 87 bp, Artificial Sequence
  ENSG00000286973_2 (sequence is synthesized)
cagtaaacagcacttgattggccaacagaaacctatttcgtttacaaatggtcgttccaaggtgaatggacaatatcctgtttggaa

SEQ ID NO: 836688 - DNA, 120 bp, Artificial Sequence
  ENSG00000286973_3 (sequence is synthesized)
aactgttgaaaaaaccctgattgacgataagaacaaagcagaccaattgccctggctgcaacttccagtacaatgttgaatataagtggcaatagtggacatcttgggaatgtcagcgtc

SEQ ID NO: 836689 - DNA, 120 bp, Artificial Sequence
  ENSG00000286973_4 (sequence is synthesized)
ctggtgaccccgacctctggcggatgtccttggtgttcacagggcagcaatgtgtgcttgggtacattgttgtagaaggacaacatggaaatacaacttgccagtgaacatgtttaatcc

SEQ ID NO: 836690 - DNA, 120 bp, Artificial Sequence
  ENSG00000286973_5 (sequence is synthesized)
tctcctatgttgtggtagtttttcaaataatttgtccatctcccctggcttatgactttttctcttactgatgcatagaggtctcttatgtaatctagttataaaagttgctgatatctc

SEQ ID NO: 836691 - DNA, 120 bp, Artificial Sequence
  ENSG00000286970_0 (sequence is synthesized)
atttctaacatggaacgcagggccagccgggcaaagtcctgtcggatggcaagttttactacaagctcagattctgctaccttctagcacatgacagaaggactcagaactgacacgcct

SEQ ID NO: 836692 - DNA, 120 bp, Artificial Sequence
  ENSG00000286970_1 (sequence is synthesized)
tactgagacgcagctgcaaataatggtgtgcaaccaagacggtggagtccttggggtgccggcccaagcagcggcaagacaggagcagcacaagctcaccagggcgcggaaggccctctc

SEQ ID NO: 836693 - DNA, 120 bp, Artificial Sequence
  ENSG00000286970_2 (sequence is synthesized)
cactacacatggacattccgcagggttgcctgctctgggatggcacctacttccctccggcaggcagtgaagcccaacagaagcagcccgctgtgctgtgatccatgctgggttctacag

SEQ ID NO: 836694 - DNA, 120 bp, Artificial Sequence
  ENSG00000286970_3 (sequence is synthesized)
aaacagcacgcaaggtggggacctgaccatgctgggttctacagaaacagcacacaaggaggggacctgaccaggccgctaagcccctctcctctctggcagcctccaacctaatccctt

SEQ ID NO: 836695 - DNA, 120 bp, Artificial Sequence
  ENSG00000286970_4 (sequence is synthesized)
ctcccggacaaagtttctccccagaagctggagcaggggggctcacagccttgccggaggggatgatcctgggctgctgacaaagagagtggccatggtttcttcacattcacaggaatc

SEQ ID NO: 836696 - DNA, 120 bp, Artificial Sequence
  ENSG00000286970_5 (sequence is synthesized)
agggaaaattattttttttaaagaaattaagggaaacagatttcaaaacttatggaaaagaggcgaatatgatctaatagcaccagagattctaaaagaggctgaaaaactctcagaaga

SEQ ID NO: 836697 - DNA, 120 bp, Artificial Sequence
  ENSG00000286970_6 (sequence is synthesized)
caaattctctcccaacaaccagaaaacaggccacgaggaggaaaacagaaggcatctgaaggcctcatggtccccaggtgtggaagtgggtactggggacagcaaaacgtgcatccatgc

SEQ ID NO: 836698 - DNA, 120 bp, Artificial Sequence
  ENSG00000286970_7 (sequence is synthesized)
cttcacctgagggcaggggtttggaagccagtctcttgcaggtctccctcacccaggtcctgggacgccccacgcagagtcgacctttaagggcttgcagcctggaggatggggccgacg

SEQ ID NO: 836699 - DNA, 120 bp, Artificial Sequence
  ENSG00000286970_8 (sequence is synthesized)
tgtatgtggatgtgcccagcgtacttgccagcaagaagcgagcgccaggagtgcaggagaaggaccccaaacctctgacttctaggaggcgtttcctttccctgtgcctccacctctatc

SEQ ID NO: 836700 - DNA, 120 bp, Artificial Sequence
  ENSG00000286970_9 (sequence is synthesized)
ttgccagctgcgccttccaagaagaggtggccagagcccgggttccactgggatgaggggcactgtaaatactgaaactgtctgtgacctgccactttgcaatggtggggtaggctctgg

SEQ ID NO: 836701 - DNA, 120 bp, Artificial Sequence
  ENSG00000286970_10 (sequence is synthesized)
cggggggaaaaggggcggtgcctgtctgtgccagggagaggttgataaggaagcacctgcctgccaagaagcccgacggggccctcgaggccaaggcagcagccaccaaggcaaagcaca

SEQ ID NO: 836702 - DNA, 120 bp, Artificial Sequence
  ENSG00000286970_11 (sequence is synthesized)
gagcgaggggacactgctgcatgggaagctggagaggcggcccaacacgggcgtgaaaggccatgtcgtcctccgggggcagcggccagtggtgaaggactatctggaaggctgttggcg

SEQ ID NO: 836703 - DNA, 120 bp, Artificial Sequence
  ENSG00000286970_12 (sequence is synthesized)
gatgggtggctactgagagggctcatttcctgaggatctttatcatttccaaatcggccatggctaggagggagaggcgggctgaaggggcagcctggtgcacacaagtgtcatgtctat

SEQ ID NO: 836704 - DNA, 120 bp, Artificial Sequence
  ENSG00000286970_13 (sequence is synthesized)
ggcagggtctatggtggtaccaaacaatgtgtccataagaacgtaagaacccccataagaacaaggtcgggaggtgaaagcccaagtgctcagagtaaaagtgctcagatcaagaaaaag

SEQ ID NO: 836705 - DNA, 120 bp, Artificial Sequence
  ENSG00000286970_14 (sequence is synthesized)
agctgtaaaaaatgtgccacgagaaagaagggaaaagggaaagagctgccaggggccgggggtaccttccaaaccccagctctctctctgccttctccaccaaggagggtcacctcaaaa

SEQ ID NO: 836706 - DNA, 120 bp, Artificial Sequence
  ENSG00000286970_15 (sequence is synthesized)
gttcccagcatgaactcatctgtggtggaaagaaagcttagagaatcagggagaggctgggagcctcgaggttggaaatcctagaagggcccagtccttgactggagcttatgggtctca

SEQ ID NO: 836707 - DNA, 120 bp, Artificial Sequence
  ENSG00000286970_16 (sequence is synthesized)
tgtttatcctgagaacagtgccaagcggctaatttaaaaagcaggtatagccttaggctgcactagggaaagtgatgggctgacgtgttctgctccactgcctaggcgtttgatgatttc

SEQ ID NO: 836708 - DNA, 120 bp, Artificial Sequence
  ENSG00000286970_17 (sequence is synthesized)
agcaatgcatacggccacagctgtgtgggacagggcaacgtggggagagacgagacacacgggaggcccagggagctgcgcgagtgtcacgtgaacaggggtcatgacgggtccctagga

SEQ ID NO: 836709 - DNA, 120 bp, Artificial Sequence
  ENSG00000286970_18 (sequence is synthesized)
agcatcacgtgtgccccacaggacccaggtttctgtggacacgcgggtgttctttctcacctgaggacttcaaaatgttaacatgcttcctgggcccaggtgcaacttcaaattggtcct

SEQ ID NO: 836710 - DNA, 120 bp, Artificial Sequence
  ENSG00000286970_19 (sequence is synthesized)
tactggcattttctactatgtggttgtgtctgtggttctatcagatgtctagtcagaggactcaacctattcattcccctctttttgtgttcactgcagcttgatggagaactggcatct

SEQ ID NO: 836711 - DNA, 120 bp, Artificial Sequence
  ENSG00000286970_20 (sequence is synthesized)
ctgtgttagcaagaagatggggctctggtagcaccatctgtgcctgggactgggaggctgtaaatagcagggggtgacgggtcaactaaagagcttccccgaggagaaaaatggttcata

SEQ ID NO: 836712 - DNA, 120 bp, Artificial Sequence
  ENSG00000286970_21 (sequence is synthesized)
caggggtcacatctgtggcagggtttgtctactgaaggtgtgtgtaaatctaccgatcaagagactggcttttaaaaaaacaacaccccccaccaccaaaacccacacaaatttgaagac

SEQ ID NO: 836713 - DNA, 120 bp, Artificial Sequence
  ENSG00000286970_22 (sequence is synthesized)
tataaactttatatttatctataagatatagatacatatatataattcataaaattattccttggcataaaatatacccctagctacttatgtatatgtgcagccctctttccctatgtt

SEQ ID NO: 836714 - DNA, 120 bp, Artificial Sequence
  ENSG00000286970_23 (sequence is synthesized)
agggaccactgagtgtcccggtggtggagctggtggctgaggagagctgtcattctttgcatatagcacatgccaggtatttcactaagcttttaccccttttaaagtcttaaaaggtga

SEQ ID NO: 836715 - DNA, 120 bp, Artificial Sequence
  ENSG00000286970_24 (sequence is synthesized)
gcaattcttgttgcctctgtgtggcatctggggaaactgaagatggcagttttgagtgactttcctgaagccacttggctagtgagtggtggagcctggatttgaacccaagccctgtgg

SEQ ID NO: 836716 - DNA, 120 bp, Artificial Sequence
  ENSG00000286970_25 (sequence is synthesized)
ctccagggcccacagctataagcaccaagctatgtagccaattccagcttgacctaaatccctctgcctccatccctcttccctcattaaatcaacagacacatacagggcagttagatg

SEQ ID NO: 836717 - DNA, 120 bp, Artificial Sequence
  ENSG00000286970_26 (sequence is synthesized)
tcatgagagccacaggcgtgacagacagcccccccagctgaacccatctccagtttcaaaggagggaacttgtaagagatcagtggtgtcagctccagttcgtgcaccctggccctctgg

SEQ ID NO: 836718 - DNA, 120 bp, Artificial Sequence
  ENSG00000286970_27 (sequence is synthesized)
aaacttcttttttggtaacaatcagttcattcttcaagccacatcagttaagagccatctccagggaggactacaggccactgaaaactgtctggcaccggattcatagtgagcaggttt

SEQ ID NO: 836719 - DNA, 120 bp, Artificial Sequence
  ENSG00000286970_28 (sequence is synthesized)
cgaggcactgttgtttgccatatgtgctgtttcttggcagcgctttgtggttcttttagccttgtactgggctcagaagatacaaaaagaccccagaagaatttcatggcaccattaaaa

SEQ ID NO: 836720 - DNA, 120 bp, Artificial Sequence
  ENSG00000286970_29 (sequence is synthesized)
cccatttaccttactgtgcccgagcaagtgggacatccgacccagagctggggacacagtagtcagcctttaagagaaaatgaagacccttttgagcaaagaccacagactagctaaaag

SEQ ID NO: 836721 - DNA, 120 bp, Artificial Sequence
  ENSG00000286970_30 (sequence is synthesized)
cacttcacaagcactgcccgtaggtgcaggagacacccaggcctgggagagggaagccagtgaagtctctcctgtgcccagagtgttttttgattgttttcttttgttcctgtgtcaaat

SEQ ID NO: 836722 - DNA, 120 bp, Artificial Sequence
  ENSG00000286970_31 (sequence is synthesized)
agacaaagggtcagcatggtgccaccgctggaatatggcctttagcatccgcccaagagggctgagtgacagctatggcttgggggaaggttgccacaggaaggtgagacagggtcattc

SEQ ID NO: 836723 - DNA, 120 bp, Artificial Sequence
  ENSG00000286970_32 (sequence is synthesized)
tgaggtattttgagatcatttacatgggctttgctgggctccctgcctgctgcacctaagtgaatggccggtcatcgggagtttcaggccacggggaaagtgctcgtgtgcggagccccg

SEQ ID NO: 836724 - DNA, 120 bp, Artificial Sequence
  ENSG00000286970_33 (sequence is synthesized)
tgtgcctcacagcctccgagctggtgctgggctcggaaagccaagaggccagaggcgccacatctttgctttctccacgttgatggcgcatgcgtgtcgggagtgtctggactaagcgcc

SEQ ID NO: 836725 - DNA, 120 bp, Artificial Sequence
  ENSG00000286970_34 (sequence is synthesized)
ccgtcaggctgatgtctggtttctgtacactgtctttaagctgagactaagaaaaccaatttttaaaaaacctgtagggaatcataaggtattaatcatggaagtcgatcaatgaagccc

SEQ ID NO: 836726 - DNA, 120 bp, Artificial Sequence
  ENSG00000286970_35 (sequence is synthesized)
tactgagtgacttcaccatttgtgtgggatggcagttcctgactgacctctccctattgctagatatgcgttctaaatttctcttcaaagaatcagtatgtcaatatgttcaattctttg

SEQ ID NO: 836727 - DNA, 120 bp, Artificial Sequence
  ENSG00000286971_0 (sequence is synthesized)
accatcccacgctctcccaggaggcggcggcaggaagtgcagtctacagtaagggaaagccgccggagctggagacaggctggaaagagcagcaattccattttggaaaatttatcctga

SEQ ID NO: 836728 - DNA, 120 bp, Artificial Sequence
  ENSG00000286971_1 (sequence is synthesized)
ggaaataaataaagatgtaaacagagaataacttacagatgtgacgtttgtgatcgttaaaactggaaacagcgcaagagtggacgataggggatgagagagccacacagcgcatagaag

SEQ ID NO: 836729 - DNA, 120 bp, Artificial Sequence
  ENSG00000286971_2 (sequence is synthesized)
atgatcagtctgaagagagggttttcagacatgcaattaactgctattcactgtacttcattttaactgcaaactagcagtctctttccccaggaaaaaagaggtcaactcggaggagcc

SEQ ID NO: 836730 - DNA, 120 bp, Artificial Sequence
  ENSG00000286971_3 (sequence is synthesized)
agggattcagcccactctggacaacactcagagccatggcacctacctgtatgaaaaaaaattgttaagcagctgccactcctagttactggcctctgctcggtgactgatgcacttcta

SEQ ID NO: 836731 - DNA, 120 bp, Artificial Sequence
  ENSG00000286971_4 (sequence is synthesized)
acatccttgtcccaggataaagaccttgtaatggagaaaaaagatggcagggatcctttccatggaatttcggctgttgtctagtggaccttccaggaattgtctgattctatgggagtg

SEQ ID NO: 836732 - DNA, 120 bp, Artificial Sequence
  ENSG00000286971_5 (sequence is synthesized)
gctgagggtgatacagacattttctgtccgtggtaatgcaaaaggtgttcatagcaatgcaaatggattttatccaatgggggagataaatatttgaacgggctctcttgttaattacta

SEQ ID NO: 836733 - DNA, 120 bp, Artificial Sequence
  ENSG00000286971_6 (sequence is synthesized)
gttaatcaaaatatttgacatgtattcattctatatttataggggagtcatgattctacctttttggaaatgaccctctagcagttttattggtcctatgagatacacagtagattcacc

SEQ ID NO: 836734 - DNA, 120 bp, Artificial Sequence
  ENSG00000286971_7 (sequence is synthesized)
agccagagccagatgagctgcacagttgccaaagggaacttcagatgccaccagagcctcagctctgtcctccctcacctcccaagaaagcctggatctttgagttgtgttgatgggcat

SEQ ID NO: 836735 - DNA, 120 bp, Artificial Sequence
  ENSG00000286971_8 (sequence is synthesized)
attcgtgtttgccacttgaaggagtaagaggcccgcgtggatctggaggcaagtggctgtgccctcctgcaatctgctcacctgcagaaatgctcgcgtagggcagctctcaattttctg

SEQ ID NO: 836736 - DNA, 120 bp, Artificial Sequence
  ENSG00000286971_9 (sequence is synthesized)
ccacctcctcagctttttctgtgaaacagaagttggttactttggatgaaaattatctttcatataggtggttggtacacgaagcaatagtgacaaataaaactctgtgtgcgtgcttct

SEQ ID NO: 836737 - DNA, 120 bp, Artificial Sequence
  ENSG00000286976_0 (sequence is synthesized)
ttttttctttttcttccttttttttttatgtaaagatcatactaaaaatcaaaaaaactctaggagtttcaatctttaatgtaatgtttcccaccctctcctttcacactcttccctata

SEQ ID NO: 836738 - DNA, 120 bp, Artificial Sequence
  ENSG00000286976_1 (sequence is synthesized)
tatatgctcaagagccatatgattggggacataaggaggagctgctttactcaaatatatccaagctgtgagccaattttgaaaatagaatctaaaaaaaaggaaaaaaaagaaaagtgt

SEQ ID NO: 836739 - DNA, 120 bp, Artificial Sequence
  ENSG00000286976_2 (sequence is synthesized)
atcatatttcgaagtactataggtccacaatggctagtgaattataatattatatagaattttggacatattaatgataaaccttgcatcattaaatgataaatattttctaaatactta

SEQ ID NO: 836740 - DNA, 120 bp, Artificial Sequence
  ENSG00000286976_3 (sequence is synthesized)
ttcctttggaaatacacattttataccttagaattgctgcaaaaagcacaggtattattttcccattttataagtgaaaaaaactaacatatggagaagttaaatggcttgtctacaaaa

SEQ ID NO: 836741 - DNA, 120 bp, Artificial Sequence
  ENSG00000286976_4 (sequence is synthesized)
tatctatatgtatatataactatctgttggtgaacctaatcataaaatgcacaattaatcggtccagatctctttcattgaaaccatgtctgtatttctaaggggcagtcttctcttgga

SEQ ID NO: 836742 - DNA, 120 bp, Artificial Sequence
  ENSG00000286976_5 (sequence is synthesized)
aatttaaagataatgttttctaggagagattaactctccaatttaagcatagtttcaaagtatttggaagttgggtataaaacttagttcaaaattggcttgcaaaactccgaaatgtct

SEQ ID NO: 836743 - DNA, 120 bp, Artificial Sequence
  ENSG00000286976_6 (sequence is synthesized)
ccagctgacaactaattatctttttccataattttaaaataattttcaaaaatatctgattactaagaacatgccattcagagtacagtactaggtgcaagctcggcagctccgtatcac

SEQ ID NO: 836744 - DNA, 120 bp, Artificial Sequence
  ENSG00000286976_7 (sequence is synthesized)
tcatttgaatttctcattagactatgttcccttctgtttccaaaggcatattttattccaccttcatgagaaggaaaggtcattaactgcaatttgacaaagagacaattaaaatgcgga

SEQ ID NO: 836745 - DNA, 120 bp, Artificial Sequence
  ENSG00000286976_8 (sequence is synthesized)
ttgaccattgctaagataatcacagtggagttaccatgttataacttcagctagtagcatgagctgcaattttttaaactaaatgtatttttgagataatcttgaaacattaaaattttt

SEQ ID NO: 836746 - DNA, 120 bp, Artificial Sequence
  ENSG00000286976_9 (sequence is synthesized)
tgtagtttgaagtgattttcattcctgatccactgcttttactggtatcagttttctactgtggtcacttatagacagttatggataacaaacagcatcaatttattacaagggcacaga

SEQ ID NO: 836747 - DNA, 120 bp, Artificial Sequence
  ENSG00000286976_10 (sequence is synthesized)
taatatccttaccctactaactcgtttctacctacccactgagcaacattattaagatctgcagaatttgagcaagtatattgttgttccctgaataccctaagattggatacagagcca

SEQ ID NO: 836748 - DNA, 120 bp, Artificial Sequence
  ENSG00000286976_11 (sequence is synthesized)
agaccttaagtgccagcccggtaagatgaaaagggtttctggcagcctgaatgggcttctcaaatggaactagtcctcaaatcttcatgatctataaaccatctaacaaatataggtttg

SEQ ID NO: 836749 - DNA, 120 bp, Artificial Sequence
  ENSG00000286976_12 (sequence is synthesized)
atggatgtgtgtgttaaaccgtcatttaaatttagatgaaataattatccttcatttcaaacataccaaagatcaaagaacccagggaaaagaaggtagacacaaaaacagactaggtgt

SEQ ID NO: 836750 - DNA, 120 bp, Artificial Sequence
  ENSG00000286976_13 (sequence is synthesized)
atgcagccaaatatttgagagacaaatgtcaaaaatgcatgtattgagcttgaatagtgcaaaatccttggactgggaagtaaagaaactgaattcgaatcccatctgtcacgaagtaga

SEQ ID NO: 836751 - DNA, 120 bp, Artificial Sequence
  ENSG00000286976_14 (sequence is synthesized)
aagaaatatatcttctagcctaccttcctggattgcatcgggattagatttacctaatttgaaagttaaataagataaaagtgaaggtgcacttattagtagtagtttattagcattaat

SEQ ID NO: 836752 - DNA, 120 bp, Artificial Sequence
  ENSG00000286976_15 (sequence is synthesized)
ttaaaaggtcacattaaaactacaattataggaatatgtaagtattttataacatgcagttttatatctgatactatagtaattgctagtggcaaactaatattaaaaatctttacagaa

SEQ ID NO: 836753 - DNA, 120 bp, Artificial Sequence
  ENSG00000286976_16 (sequence is synthesized)
ctaatattaaaaatctttacagaagaatgttctgaaaactctctagtaaattacatcaaaattcttgaaaattggatcctgtttctcttctaatttctattctattcctatttctgaaat

SEQ ID NO: 836754 - DNA, 120 bp, Artificial Sequence
  ENSG00000286976_17 (sequence is synthesized)
gctcagtgcccatttagccctggagaaaacatagagatagaagacatcccctgacttgaagaactttacaatctaacttcacaggaatgtaggaaaagtgtggaaattgttctgggatta

SEQ ID NO: 836755 - DNA, 120 bp, Artificial Sequence
  ENSG00000286976_18 (sequence is synthesized)
gaagtggagctataatgtgtgtaagatgggattctctgtaatcaccagtagagatgaagagctgtctgtcaatcgttcacccatttcttatcctctcatgtcttaaaatcctgccttcac

SEQ ID NO: 836756 - DNA, 120 bp, Artificial Sequence
  ENSG00000286976_19 (sequence is synthesized)
cctatatattcctctagttacattattatcttattcttcaccttcatccaagattcttggaaatcacttacacaatttttcttctttactttcaactcaggctccagcccactgaaatct

SEQ ID NO: 836757 - DNA, 120 bp, Artificial Sequence
  ENSG00000286976_20 (sequence is synthesized)
gcagccacactcactactcctataaaactgctggttttgaaaatcatcaatgagactccaatggtgcaaatagaatcaaaagttcctgatatagaataagcaaatgatggaagaagccaa

SEQ ID NO: 836758 - DNA, 120 bp, Artificial Sequence
  ENSG00000286976_21 (sequence is synthesized)
gtttcctgagtggccactaggaaaactctgtcttctttatcaaaactatgaggtgagcaacaccaagtcttcaattttcctatgccattgggctttaagattttttaatataagcagcta

SEQ ID NO: 836759 - DNA, 120 bp, Artificial Sequence
  ENSG00000286976_22 (sequence is synthesized)
gcattaattaccctgactaataaatagtacctgttaaaatcctgcctattgctttaaacaatgccactatgaaaccggttacttaaatcagaaaaataggcaccagttttcccttttacc

SEQ ID NO: 836760 - DNA, 67 bp, Artificial Sequence
  ENSG00000286976_23 (sequence is synthesized)
acttaaatcagaaaaataggcaccagttttcccttttacctttttttttttttttctttgagacggt

SEQ ID NO: 836761 - DNA, 120 bp, Artificial Sequence
  ENSG00000286976_24 (sequence is synthesized)
gtgatctgcccgcctgggcctccaaaagtgctaggattacaggcgtgagcctccgtgcctggccgcttttaccattttttattcccttcacttaattacagtgcctctgaaatgtttgca

SEQ ID NO: 836762 - DNA, 120 bp, Artificial Sequence
  ENSG00000286976_25 (sequence is synthesized)
tttctttcactacaagtaaaatatctgatttcagactcccaatactcttttcaaaattacaaaatctcgaagcagcgtatcttccaccccaattcctgatccccaataatatatttttca

SEQ ID NO: 836763 - DNA, 120 bp, Artificial Sequence
  ENSG00000286976_26 (sequence is synthesized)
tgctgcagcttgagtaatcttttaagggtccagccttgtcggatcattttcctgtttaatctttccatggtgtctattgtaacagcatgcgatcttaattatttaggtcagtgtaaggac

SEQ ID NO: 836764 - DNA, 120 bp, Artificial Sequence
  ENSG00000286976_27 (sequence is synthesized)
cttccacgacctggcccttattttcccctttactttacaatgtattgagtatgttgggatcccctggaattctctgagccttagcatatcctcaccttctacctaaagccttcttcatga

SEQ ID NO: 836765 - DNA, 120 bp, Artificial Sequence
  ENSG00000286976_28 (sequence is synthesized)
ctttattgttcctaccatcttcttgtttcattttatcctttgtttcttcttgaatgtcttcaatgactccctaaagtagctgcattatatgtttcattatttatcatcacagaacactga

SEQ ID NO: 836766 - DNA, 120 bp, Artificial Sequence
  ENSG00000286976_29 (sequence is synthesized)
tctcttctgtaaccactgctttctcatcagtctttccctgaaccctgttccttattgttgggaattggattcttagtcaccattgtcttctgaatatctggcacagtgcctgggtcatag

SEQ ID NO: 836767 - DNA, 120 bp, Artificial Sequence
  ENSG00000286976_30 (sequence is synthesized)
tatgttcaacacatactgagtaactgaataactaaccctctcctattgtttgaaggtatgtgtcctccaaattcttatgttggaacttcagccccaaagtgattgtattagaaggtgaaa

SEQ ID NO: 836768 - DNA, 120 bp, Artificial Sequence
  ENSG00000286976_31 (sequence is synthesized)
catttaagagatgattaagtcataagggctctgaccttctgagtgggattaatgttcttataaaagggctggcgagaactagctatgcctttttgcccttctgccatgtgaggacacagc

SEQ ID NO: 836769 - DNA, 120 bp, Artificial Sequence
  ENSG00000286976_32 (sequence is synthesized)
aacaaggagctgtctaaaaagctgagacggagccttcaccagacactgaatctgccggcgacttgatcttggatttcccagcctcaagaactgtgaaaataaacttctgttgcttataaa

SEQ ID NO: 836770 - DNA, 120 bp, Artificial Sequence
  ENSG00000286977_0 (sequence is synthesized)
cagctcccgtctaaacacagccatgctcttacctgaagttacaaccgcccaagaccctacacacttctgtgtaaacactgttcaaaccttccttataccttttccaaacctaacagaaca

SEQ ID NO: 836771 - DNA, 120 bp, Artificial Sequence
  ENSG00000286977_1 (sequence is synthesized)
accctttccagatgccccctttacttagtttgtagatggcagctccttcctacatcaaggacgctggcatgctggctatgctatagtgtcaccccacacacacacactattgaagccaat

SEQ ID NO: 836772 - DNA, 120 bp, Artificial Sequence
  ENSG00000286977_2 (sequence is synthesized)
ctgctcttgctaagcaccacctctaaaaaagctgaactcgtcgctcttcctcaagctctcactctagcagccagacaacaaatcaacatatattcaaattctcgttatacattctacata

SEQ ID NO: 836773 - DNA, 120 bp, Artificial Sequence
  ENSG00000286977_3 (sequence is synthesized)
gtgtactcacactcgtccatctggaaaaaacgaggcttcctaattgcaaaaaacactcctgccataaatggctctctcatcagcaaactccttcaagctgccaggcttctacagaaagtt

SEQ ID NO: 836774 - DNA, 120 bp, Artificial Sequence
  ENSG00000286977_4 (sequence is synthesized)
gccatcatttattgcaggggccaccaaaccccggatgatcctatatcagctggaaataggctagcagatcagataaccaaacaagtagccctccaacccatgcaaggccagtttctgtcc

SEQ ID NO: 836775 - DNA, 120 bp, Artificial Sequence
  ENSG00000286977_5 (sequence is synthesized)
ctgtcctttttctctcctctttactcctcagaagaaaaggaggacttccaagcccaaaaccttcaaaagcaaggaccatggtatgtcaaggaaaggtgctttattcttcctcactctcaa

SEQ ID NO: 836776 - DNA, 120 bp, Artificial Sequence
  ENSG00000286977_6 (sequence is synthesized)
agccttcctcacctccaaagcctccacaaccctttccatatcagttacaacctctcttgcaacttctctgccctattctcacttgccctcacctttccagccatgtttgagaaattacct

SEQ ID NO: 836777 - DNA, 120 bp, Artificial Sequence
  ENSG00000286977_7 (sequence is synthesized)
agtcctgctctgtctgccactcagtgtcaccccaaggctccttccagccaccttttcctacccaccaagcccagggccaggtacccaggcaaaattaacaaatggacttcactcacatgc

SEQ ID NO: 836778 - DNA, 120 bp, Artificial Sequence
  ENSG00000286977_8 (sequence is synthesized)
attcccaacaacttcagaaggtataaatgtcatcacacaaactctcttcatgcatataattctccgttttggacttccaacattcatccagtccaacaacggaccctccttcatcagcca

SEQ ID NO: 836779 - DNA, 120 bp, Artificial Sequence
  ENSG00000286977_9 (sequence is synthesized)
aattatccaaggcatctctacatccttaggtataaaatgggttctccacacaccctataggcctcaattctcaggcaaagttgaaaaaattacgtctgtccttaaagcccaactcaccaa

SEQ ID NO: 836780 - DNA, 120 bp, Artificial Sequence
  ENSG00000286977_10 (sequence is synthesized)
gctggctctaaaaactcaccagtcgtaaacaaaaaatctccctttcacccttataagactccacacaacaccaaaagcaccctctttttatagtccctttgaaatcatatatggccaaac

SEQ ID NO: 836781 - DNA, 120 bp, Artificial Sequence
  ENSG00000286977_11 (sequence is synthesized)
ttttgtcttggggtctccacccttaccagactctgagccactcagatattacctctcctccttaatccagacatggtctttcattcgtgaagcagcaaataaggccatgcctctccctgt

SEQ ID NO: 836782 - DNA, 120 bp, Artificial Sequence
  ENSG00000286977_12 (sequence is synthesized)
taacacctttttgtcctctgaacgtaactgtcttacaggcacagacgtgtttccagacaatccagatgatgcttctgctacagcgacatggtaaataccaacccgtctctcaacaatacc

SEQ ID NO: 836783 - DNA, 120 bp, Artificial Sequence
  ENSG00000286977_13 (sequence is synthesized)
cccaaaattaagattttctttttccaagatgtccacgtcaccccctatgtcatgcctgaagtaattattgagcccagtcccaaggcgcaagggccacttgtgtcagcagtgtgcaccagc

SEQ ID NO: 836784 - DNA, 120 bp, Artificial Sequence
  ENSG00000286977_14 (sequence is synthesized)
agcgtgcgccggcaagatagcagaagcatgaaaagggccggccagaagacacctactctggctggaagacacgtacccctgaagatcaagaaagaagctatctgggaacaatgtagcagt

SEQ ID NO: 836785 - DNA, 120 bp, Artificial Sequence
  ENSG00000286977_15 (sequence is synthesized)
tacgtcagaccaggacacttcctgtttacaggagactataaaacctttgtcctatcatcacttgatgtggacgccattttaggcctcagcccgcctgcacccaggcactgattaaaacag

SEQ ID NO: 836786 - DNA, 120 bp, Artificial Sequence
  ENSG00000286974_0 (sequence is synthesized)
gcaaggggagcctggaaggggcacagagtgaagacggagcccctgtgcccccagaggcatctctcagccatcccagccctgctgaacccttcatctccccatgtgctgccctgacaagga

SEQ ID NO: 836787 - DNA, 120 bp, Artificial Sequence
  ENSG00000286974_1 (sequence is synthesized)
gctgaaaaagagactttgctacagaggagaaatatcccagctgagtgggaacccactacccccagcttcacagtgaggactgggtctctctatcctgctacagacctcaccactgaggtg

SEQ ID NO: 836788 - DNA, 120 bp, Artificial Sequence
  ENSG00000286974_2 (sequence is synthesized)
taacttggccaagtcacgggtgaaaggtacgtgagggagcccatatgtgcttgattctgccacatgggtgacggcccaggtgtctgcacaccaggtcagatccccatggtggcaggtgtg

SEQ ID NO: 836789 - DNA, 120 bp, Artificial Sequence
  ENSG00000286974_3 (sequence is synthesized)
tggtgttcctgggtcagggcgtgcctgcactgcatgtggctgtggccagatgcccagtaagctccatgtggccgagggcaaaggcacacatgggcttttgcgtgggtgtccccgtgtgtg

SEQ ID NO: 836790 - DNA, 120 bp, Artificial Sequence
  ENSG00000286974_4 (sequence is synthesized)
tccgtgtgtctgggtgtgtgtggctgtttttttcctggctttgatggggaggatgaagtcagcatcttggacagagccaggctcagcttccttcctctgccttggcctgaagcccccaga

SEQ ID NO: 836791 - DNA, 120 bp, Artificial Sequence
  ENSG00000286974_5 (sequence is synthesized)
gccagcagtaggtagcagcttcccaaggatctcctggcaggaggtggggagccctgcagtgataggaagagggagggtctggagacagtatcacacagagggcagaacacagggtatgaa

SEQ ID NO: 836792 - DNA, 120 bp, Artificial Sequence
  ENSG00000286974_6 (sequence is synthesized)
tttcctctgacaccttcagatttctgttccatggtcatatcctttagtgtgtgtgtgcacgcgcgtgtgcctatgccctatgtcctggctttattatttaggaagaatggtcaacataag

SEQ ID NO: 836793 - DNA, 120 bp, Artificial Sequence
  ENSG00000286974_7 (sequence is synthesized)
tacatttggcacagagagtggccagggacctcagagaagacagcaagaaggatggtcctgggatgttctggaagcccactgttggggtctcagagagaaatgtgggattccagatgtaca

SEQ ID NO: 836794 - DNA, 120 bp, Artificial Sequence
  ENSG00000286974_8 (sequence is synthesized)
caagcttataaggcatttggggaagccactggaagcttagcagatatagtttcaggttctgaaattatctttgtttaccatttgattcaccctttggtttccaggctcatggagaagctc

SEQ ID NO: 836795 - DNA, 120 bp, Artificial Sequence
  ENSG00000286974_9 (sequence is synthesized)
atgtcttgtatgttcacatcttgtaagaaaagcaccaagccttgcacagtgtaggtgaccaataaatgcaagtcaacactgaaatgtgaaaggactgggagagaggagggggaaagggta

SEQ ID NO: 836796 - DNA, 120 bp, Artificial Sequence
  ENSG00000286974_10 (sequence is synthesized)
aggtcagtgttgtccagaactgtccacaagctccggctgttctctgtaacctcagtccctgtgtcttcagctctgagcctccctccttgaatgatcctccaagttcctgtcctgacctca

SEQ ID NO: 836797 - DNA, 120 bp, Artificial Sequence
  ENSG00000286974_11 (sequence is synthesized)
ggaggaaaagggatgaaagatagagaaaaggaaaggaaagatagggaggagagaaggcagacacataagagtaagggcaattgagggcaaggacctgaaggatgaagacaggggaacaag

SEQ ID NO: 836798 - DNA, 120 bp, Artificial Sequence
  ENSG00000286974_12 (sequence is synthesized)
agatgccaggggctgcggtccaagaaagcagtcccagagaggggaaagatagaaaacacttgtgccgggcttccgtttacaaaacagtttcctacacagtgcgggcattaatcccacttt

SEQ ID NO: 836799 - DNA, 120 bp, Artificial Sequence
  ENSG00000286974_13 (sequence is synthesized)
gtggctgaggaaacggaggctcatagacattaagggtcttgttcaaggggctaagtcagtagtggtgaaggtgggtctcacccaggtgttctcattcctaagcctgtattcgctcttctc

SEQ ID NO: 836800 - DNA, 120 bp, Artificial Sequence
  ENSG00000286974_14 (sequence is synthesized)
cccaaacaactccaggaaaggaaaggattgaagacttagggaacaaatgaagtggcttctttgaagcacttgtacaaagaagggtggagaatccagatttttgaaacttttctgcatcca

SEQ ID NO: 836801 - DNA, 120 bp, Artificial Sequence
  ENSG00000286974_15 (sequence is synthesized)
gttattgtgtagattcacttagaagaaatggcatcagatggggaagggggtggtcaacattccattattgagaactgggggtcgggtgaggatggggaacacagaatgtaaagacagaga

SEQ ID NO: 836802 - DNA, 120 bp, Artificial Sequence
  ENSG00000286974_16 (sequence is synthesized)
gcaggatgaaagatgggagagaactaagaggctacagctgaaaagggggcaagggagcctcagaaggaagggtttggacccttaaaacttcctttgcctagagacatgggtgtggggaga

SEQ ID NO: 836803 - DNA, 120 bp, Artificial Sequence
  ENSG00000286974_17 (sequence is synthesized)
agggaggaggaaggacatttctatctcgtgacaaaagaaagtcacacaattgttttgttctctgctctgaggcgggtgggcgcctgtatttaccagagggacccaggtcgctgtggcaac

SEQ ID NO: 836804 - DNA, 120 bp, Artificial Sequence
  ENSG00000286974_18 (sequence is synthesized)
cacacatctgggccccggaatccagatgtgctgtatccagaagccatagcagaacgatgaggcaaacatcaggctccccagtgctggcccccacagctgggaagaggatggagaactggt

SEQ ID NO: 836805 - DNA, 120 bp, Artificial Sequence
  ENSG00000286974_19 (sequence is synthesized)
gtgggaagtaaagggagtgggggaaggaaggaggaggagaggaccaaagtgggggaaaagagaggacataatggaaaggggcaagaaatgtggacgagggagcagaatgggaaatagaaa

SEQ ID NO: 836806 - DNA, 120 bp, Artificial Sequence
  ENSG00000237735_0 (sequence is synthesized)
aaaagcatgtgaaggaactagccaggataaaatgcgaggaacagaatttcagagcagaaactgaaagagtttcactcttgttgccctggctggagtgtaacagcgtgatctcggctcact

SEQ ID NO: 836807 - DNA, 120 bp, Artificial Sequence
  ENSG00000237735_1 (sequence is synthesized)
acatagcaggcattcaagaaatacatgtgatggaagacatgaatacctatgaagaaaattacgctatgttattgatgaaagctaatacaaatatgctgctaagaacggattcaggggtat

SEQ ID NO: 836808 - DNA, 120 bp, Artificial Sequence
  ENSG00000237735_2 (sequence is synthesized)
ccgttagtaggtagaattggaattataccctgagacaacctatgcataataatttaaaaatgactcaacaataactttatattcagaaatgtgctatgacttttaaaatatctccccaat

SEQ ID NO: 836809 - DNA, 120 bp, Artificial Sequence
  ENSG00000286978_0 (sequence is synthesized)
attggtgcatttacaaacccttagccacaaaagttctccaagtccccacccatcccaaaagcccagccggcttcacctctcaccggcattcaccacaggactttgcggcacctagcctga

SEQ ID NO: 836810 - DNA, 120 bp, Artificial Sequence
  ENSG00000286978_1 (sequence is synthesized)
acactccgacagcccagagggagcttgtcccagacaatcaagaggaaaagacggtaagccataaagagatggagacctgctatcctggcgaagagggaatggtggtccacacacgggatt

SEQ ID NO: 836811 - DNA, 120 bp, Artificial Sequence
  ENSG00000286978_2 (sequence is synthesized)
cagcctcggatcaagcccagcaggttcttgtatcggttcgaaccctgagagcatgccaacagacaacacgaggtggtgtggagcaacatgctgttttaatgagcgcctaggtgctggccg

SEQ ID NO: 836812 - DNA, 120 bp, Artificial Sequence
  ENSG00000286978_3 (sequence is synthesized)
gctgaggcctaaaatggtgtcagccccaggtgaggacagcgcagaagttttatagcctcctgtaaacaggaagtgtcctagtctgatgtaactgctacattgtacccagatggcctcttt

SEQ ID NO: 836813 - DNA, 120 bp, Artificial Sequence
  ENSG00000286978_4 (sequence is synthesized)
tcttccttcctgtaccacccgagtgcagtgccaatatgggaactacaatgaaagattggagggaaaggataaagtggtttattcaagtcaggcgagaaggctatttccttgatagtgttt

SEQ ID NO: 836814 - DNA, 120 bp, Artificial Sequence
  ENSG00000286978_5 (sequence is synthesized)
atcaatagagttcatcattgtatcacgaacttttatagaaatttcttcacactttcgaccttaatcatcaccagtttatactgagggaaataaaaatattgaacctcaaaatatattttg

SEQ ID NO: 836815 - DNA, 120 bp, Artificial Sequence
  ENSG00000286978_6 (sequence is synthesized)
ggatagctgtcagagagacagcaaacagaagtagccttgcaaagcttagttggtatttaagcttttgtggggggaatttgcagagtagggaggagtaaaagtaaatgagagaaaaatact

SEQ ID NO: 836816 - DNA, 120 bp, Artificial Sequence
  ENSG00000286978_7 (sequence is synthesized)
taagaaaggacgtgaacagagggattgagcacataattttaaaaagggtttcagtcaactgaaaaaaatgttcataatgggatccaaagagaaaaagcagaaaagatatacatatatgta

SEQ ID NO: 836817 - DNA, 120 bp, Artificial Sequence
  ENSG00000286979_0 (sequence is synthesized)
gagtgcacagggaatgttcatcaaaataggtccatcatgttttgaaccacagaacaaactgcaacaaatgtttaccactaggtcacctggctgcccttctctctgagttaagtggcctag

SEQ ID NO: 836818 - DNA, 120 bp, Artificial Sequence
  ENSG00000286979_1 (sequence is synthesized)
ctccatccctcctggtaaagatggttcttccatcttgctgataggagtactttaaagttactgcttaaagatgagaagactgtggcttggagacgttaagtgacttacccaagggcacag

SEQ ID NO: 836819 - DNA, 120 bp, Artificial Sequence
  ENSG00000286979_2 (sequence is synthesized)
agctcatgaacctgaatcagggttcacgccaaacagtgtggctctggggccccgggctcctgtacactattctgcatgatctcttggcctggagaacagacccaggtggactggggccat

SEQ ID NO: 836820 - DNA, 120 bp, Artificial Sequence
  ENSG00000286979_3 (sequence is synthesized)
cactctggatgcccaaaagatgaggacttcttaggaagttgagcagcgagcactagatattattaatagatgtcaatagctgctcagacatagtaatcaaatgaattctaaggtcttgaa

SEQ ID NO: 836821 - DNA, 120 bp, Artificial Sequence
  ENSG00000286979_4 (sequence is synthesized)
tgtaaggagactcaccacttatccttcatccctttgctggtgacaagaagagaccaaggtttgtgatggtactgctgggggctgcctgtcagaaaaaggaaggcatcctgcttggaccgg

SEQ ID NO: 836822 - DNA, 120 bp, Artificial Sequence
  ENSG00000286979_5 (sequence is synthesized)
ggaaagaaaggaaacgtcgtcccctggtgggcatcgttggtagcggcagtaggcagccgaccagcattaggtatgaggaggatgttaaggcaaggaggtttctcgagtcctggtgaatta

SEQ ID NO: 836823 - DNA, 120 bp, Artificial Sequence
  ENSG00000286979_6 (sequence is synthesized)
tcatgttgtaactatcccatggccatttaaaaggaatgtgcattctgcttaaaggatatatatgcgtctattaaatcaagatgcttttattgttacattcttcaaatcctctatattcat

SEQ ID NO: 836824 - DNA, 120 bp, Artificial Sequence
  ENSG00000286979_7 (sequence is synthesized)
atataaatccatgcatatgaaaatatatgaatatatagtctaaattcatatatatagtctatattcatatatgtatatatttcttgtgtcaattacgaggggcagagagacatgttaaaa

SEQ ID NO: 836825 - DNA, 120 bp, Artificial Sequence
  ENSG00000286979_8 (sequence is synthesized)
ttacgaggggcagagagacatgttaaaatctcctggctataatttttatttgtctattttccttcatacactgctatggtttgaatatcccttccaaaactcatgttgaaatttaattgc

SEQ ID NO: 836826 - DNA, 120 bp, Artificial Sequence
  ENSG00000286979_9 (sequence is synthesized)
tttaagagataattaggccatgaggactccactgtctcgaatggattagtgttgctatcatgggaatagtttcgctataaaagagtgaagaaagacccccttttctctctcaccctctct

SEQ ID NO: 836827 - DNA, 120 bp, Artificial Sequence
  ENSG00000286979_10 (sequence is synthesized)
aagagtgaagaaagacccccttttctctctcaccctctcttgcccttctgtcttctgccatgggatgacacagaaagaaggcttcaccaaatgctggtgccttgatcttggacttcccag

SEQ ID NO: 836828 - DNA, 120 bp, Artificial Sequence
  ENSG00000266311_0 (sequence is synthesized)
ctggactgtggggttcatcctttcctagggagcttccaagggcccacacagcctgctccccgcaccccatggaggcgcaatgatagcagaattactggcactgttaacctgctggagtgg

SEQ ID NO: 836829 - DNA, 120 bp, Artificial Sequence
  ENSG00000266311_1 (sequence is synthesized)
ttccgaagtccaggttcttccacctgcaactgcagtttccagaattggtcccaccccaggaggatcagccaggcagatgcaacgccaggagcagcatcagccacgctgtaaacaaggggg

SEQ ID NO: 836830 - DNA, 120 bp, Artificial Sequence; identical to SEQ ID NO: 821319
  ENSG00000266311_2 (sequence is synthesized)

SEQ ID NO: 836831 - DNA, 120 bp, Artificial Sequence
  ENSG00000266312_0 (sequence is synthesized)
gagtttgtcaagccagaaagcaaccctccagcatccagattacccttcgaagacggcaaagaaaaagagagctctgaaatcactcaacgcataggagctggttctataatttttagactt

SEQ ID NO: 836832 - DNA, 120 bp, Artificial Sequence
  ENSG00000266312_1 (sequence is synthesized)
taattaaatcaattattaaagcctttcttaatgccttgctgagatattcaggctcgggctgcctcaggagagaggaagtggttgaatgcacagaggtggctaataagaggggacacaaca

SEQ ID NO: 836833 - DNA, 120 bp, Artificial Sequence
  ENSG00000266312_2 (sequence is synthesized)
ttccagaatcccacaggaaagattctaccatctccacagctgccctcgccgcagtcctccctactgttggagaagatgcccccaataactggggtgtctcgagctagtggacacatcatg

SEQ ID NO: 836834 - DNA, 120 bp, Artificial Sequence
  ENSG00000266312_3 (sequence is synthesized)
gagctggagtggactgtgtcattaagatcctcccatggcctcatcctgtgctggccatcgctatgcgtccagtaaggaggtagaacactggatgagccacagaaagcacacaggactttg

SEQ ID NO: 836835 - DNA, 120 bp, Artificial Sequence
  ENSG00000266312_4 (sequence is synthesized)
ctgtggaagagtcaaagatccacgtgggagcatcccgtaggggacttgcgtttcagatcagatgatgcttttcatgtatgtccagcagcaagagagtccttcactggtgaaaaatcacgg

SEQ ID NO: 836836 - DNA, 120 bp, Artificial Sequence
  ENSG00000266312_5 (sequence is synthesized)
gcctcagagcagattttagttcatctttcatttcaaagcactccttagatatctgcaaattaaatcccctaatttggtgaggacgcccagcttcccaaataacaaggcttttcctttgat

SEQ ID NO: 836837 - DNA, 120 bp, Artificial Sequence
  ENSG00000266312_6 (sequence is synthesized)
gcaaaagccggggtgcgtgttctggctccaggcttctgagcagcctttctccccacgctgcagcttttcagttaggaagtcagagagaaggaaagagaactatttccaattcaatcacga

SEQ ID NO: 836838 - DNA, 120 bp, Artificial Sequence
  ENSG00000266312_7 (sequence is synthesized)
gcatgtctacgcaccactgaagacagacctttgtcctgttgctttccaaactttaaatgtgaatttttcttcttatgatgactggtgtactctgttattctgaaaaaagaaaaagccata

SEQ ID NO: 836839 - DNA, 120 bp, Artificial Sequence
  ENSG00000266312_8 (sequence is synthesized)
agcaccctgaagtgaggctttcacctgatactaattttcttcttcgttataaggctattgtttgtttgaacaaagaaataggagccattggtggctgtttacattataggaatgagggca

SEQ ID NO: 836840 - DNA, 120 bp, Artificial Sequence
  ENSG00000266312_9 (sequence is synthesized)
gcgatgggggaggaggaggggaccttttcattaatgagctggggacattgattatggggacacactaaagactaaaagggacacctatatttctacattctttccatgcaagtaatatat

SEQ ID NO: 836841 - DNA, 120 bp, Artificial Sequence
  ENSG00000266312_10 (sequence is synthesized)
gatctttatcatctgttaaacaccactcacatatttcaggtggctgtaggttgattgctaacatttagattaaacaagcagttagagtctgatgtttaaaataaaataagacaagccctt

SEQ ID NO: 836842 - DNA, 120 bp, Artificial Sequence
  ENSG00000266312_11 (sequence is synthesized)
gaactctgggaccaggtatgccccgttatctggtcgtacctgaacgagcctgtgttgagcacccaaggccgctgggcacgtctgtggatgtggggtttcaggctcaacccactcgaggag

SEQ ID NO: 836843 - DNA, 120 bp, Artificial Sequence
  ENSG00000266312_12 (sequence is synthesized)
cagggggcttttgggaggtggcagcctcctatacaaaacgagctgccagtaaatatttatagaacaaagaaatgcatgaatttctcctgaattaaacatgatacatttgtacagagcata

SEQ ID NO: 836844 - DNA, 120 bp, Artificial Sequence
  ENSG00000266312_13 (sequence is synthesized)
tgggtgaggccagaggaccttcctagaaaagggaatatttctctctctctcttagtgatctgcctgggtcaggagtttgggatcactggcaagttgaacaggtcctgtggatcttttcta

SEQ ID NO: 836845 - DNA, 120 bp, Artificial Sequence
  ENSG00000266312_14 (sequence is synthesized)
gcctctgtgtgccctagagaaggagggctggctcacatctccctgtggccgtattcagaaataactggggaatagaacacagtgtattggctcgtacagagtccacggtgaggggccgtg

SEQ ID NO: 836846 - DNA, 120 bp, Artificial Sequence
  ENSG00000266313_0 (sequence is synthesized)
ggcatcccagagctccgctccctggaggcccctccagagagggacccggggccccgccccgcagctggagaaggggtgaatgcctttcctacctaacgcctggtccgcggccctgcttgt

SEQ ID NO: 836847 - DNA, 120 bp, Artificial Sequence
  ENSG00000266313_1 (sequence is synthesized)
cgcctggtccgcggccctgcttgttgcgtctccaagaccacgtgtctgctgcattttaaaaatagttgtgaacatctgactttctccttttgctggagtgcagtggcacaatctctgctc

SEQ ID NO: 836848 - DNA, 120 bp, Artificial Sequence
  ENSG00000266313_2 (sequence is synthesized)
caggcgcgtgccaccatgcccggactttggagtttgctgaaatgtaacctcagaataagtggggtatgactgccctctcctttgagggaaaagaaaaagtattttcaggccaggcacggt

SEQ ID NO: 836849 - DNA, 120 bp, Artificial Sequence
  ENSG00000266313_3 (sequence is synthesized)
taatcccagcactttgggaggctgaggtaccataaatatgaaaaggcaagatattggcaattcagtacaacttgtttgtgtccagaatacatcaataaaagaagaacaattcaagagaaa

SEQ ID NO: 836850 - DNA, 120 bp, Artificial Sequence
  ENSG00000266313_4 (sequence is synthesized)
attcaagagaaacaggaaattcacagaagaggaaaccggaattgtcataaacaaatgaaaaatgctcaacttccctagtaattatgagaattcaaatcaaaataaagacttcatttcaca

SEQ ID NO: 836851 - DNA, 120 bp, Artificial Sequence
  ENSG00000266313_5 (sequence is synthesized)
tggaaggaaggagagtcaggatggtgggggcctcactatggttttgatttgcgtttccctaaagattagtgatgttgaacatcttcccaagtgcttattggccgcttgtttattttcttt

SEQ ID NO: 836852 - DNA, 120 bp, Artificial Sequence
  ENSG00000266313_6 (sequence is synthesized)
ggagaaatgcctattcaagtcctttgcccatttttgaatcaggattgattttctatggtctagctgtagttctttatacactgtggatattgattccttatcagagctatgatttgaaaa

SEQ ID NO: 836853 - DNA, 120 bp, Artificial Sequence
  ENSG00000281195_0 (sequence is synthesized)
cctcctgagtacctgggactacaggtgcaagccaccgcgcatagctaagttttaatttattttttgtagatatgaggtttcactttgttgcccaaggtgatctcacactcctgggctcag

SEQ ID NO: 836854 - DNA, 120 bp, Artificial Sequence
  ENSG00000281195_1 (sequence is synthesized)
tcaggaggattgcttgagcccacacgatggagaggtagcactgagctgagatagcaccatggcaccccagcctgggcaacagagccaggctttgtcttaaacaaacaaagaacatggttt

SEQ ID NO: 836855 - DNA, 120 bp, Artificial Sequence
  ENSG00000281195_2 (sequence is synthesized)
gtccatttagatttccttttatgccctttagcaagttttatttttttttccataaagttcttgaacattttgtggtggttaaatttattattttacttatttttacatatagctattaga

SEQ ID NO: 836856 - DNA, 120 bp, Artificial Sequence
  ENSG00000281195_3 (sequence is synthesized)
gaggatctttattttttagttctcatatgttttctagttagttactactagagtaacctatcatcctagtttatacctgctacatgccatccatttattcccattgtcctggtttggata

SEQ ID NO: 836857 - DNA, 120 bp, Artificial Sequence
  ENSG00000281195_4 (sequence is synthesized)
ataaattaaatcgtgtggccttagttattaacaattttatcatttaggatttcattcagtttcaactaataaaacctcactagtggattgttaacaaataagaggtatatttatctcata

SEQ ID NO: 836858 - DNA, 120 bp, Artificial Sequence
  ENSG00000281195_5 (sequence is synthesized)
acagaaatctgcatgtaggtggtccagtgctcgtgcaacagctccataatatcttcaggaacctcgccttgtcttccagcactactgtctgtagaatgtatctttcatcctcatttgtaa

SEQ ID NO: 836859 - DNA, 120 bp, Artificial Sequence
  ENSG00000281195_6 (sequence is synthesized)
aatgcagagcaaaatgagtttttgttttcttttctggaaagagtgagttccccagcagcatttgcctgcatttgatttaccagaactaccagacacatggccatctagttgcagaggcag

SEQ ID NO: 836860 - DNA, 120 bp, Artificial Sequence
  ENSG00000281195_7 (sequence is synthesized)
ttaaggagaaacaaggattaaatacataatttaagaacttaaactttatcctgtagagaggtatatgttattcaaggtttttgaaccagggcatgacataataaaacggagattagaaag

SEQ ID NO: 836861 - DNA, 120 bp, Artificial Sequence
  ENSG00000281195_8 (sequence is synthesized)
attcatttggaaatggtttggagaatgagttaggcaaatgattttgaaggcaaagaaagcctagcagattgattaaagtggagaagagcactgaagtccaattagaagacttgtttaatc

SEQ ID NO: 836862 - DNA, 120 bp, Artificial Sequence
  ENSG00000281195_9 (sequence is synthesized)
aatatactcagccttttgtgataatggtaatggtttgtgggtagattagtaaccttgaaaacagaaaggaatagtggcttatactagtgactgtccagaaagacctagctgatcattaaa

SEQ ID NO: 836863 - DNA, 120 bp, Artificial Sequence
  ENSG00000281195_10 (sequence is synthesized)
tttttggaattgttgagaaggccagttttctttcattctaaacagttaacatagttaaggaacataggtaaggatacatttaaggaaatagaatgtttcaaatagcttaaaaaattctct

SEQ ID NO: 836864 - DNA, 120 bp, Artificial Sequence
  ENSG00000281195_11 (sequence is synthesized)
tggccaactttttgatgaagttggtaaagtagcagtgtaagtccaagagcccaggcatatttactgtcatgattttcatagcaatgaataggtaaagaaaatacgagcactagaagctag

SEQ ID NO: 836865 - DNA, 120 bp, Artificial Sequence
  ENSG00000281195_12 (sequence is synthesized)
aaaacatgccattttcatggcaaatattaatgttcttcagctaaatgttgtttggatgatgctggaacaagaaggctaactcatgacacctctgttgtgacagagcaacatgcctaggga

SEQ ID NO: 836866 - DNA, 120 bp, Artificial Sequence
  ENSG00000281196_0 (sequence is synthesized)
ttggcattggtgctctctgcctggcaggtatttaaacttccttcaggtttggcaagtgatcaaagctgagtcaattctttgaggtgtattgtggattctttgaggtccctgttagtggcg

SEQ ID NO: 836867 - DNA, 120 bp, Artificial Sequence
  ENSG00000281196_1 (sequence is synthesized)
tccacgctgcacagtcccccaattgttcacctgagaactgtgttcaggtggggattcttcagttcccttcttgtggtgcctctttcccagatcccatgccaggtggtagctgtgagtacc

SEQ ID NO: 836868 - DNA, 120 bp, Artificial Sequence
  ENSG00000281196_2 (sequence is synthesized)
tctttctactcctttcaggtgggatgcttctaagacacctccattccagtttctgcacatctgcttgactcatgggaagctcatgcatccttggcacctggatcagggtaagtcctgctt

SEQ ID NO: 836869 - DNA, 120 bp, Artificial Sequence
  ENSG00000281196_3 (sequence is synthesized)
tcctgagatcttgatagactccagccatggtctgactaatctatacatttttcaggtctcaatcagatgccagtctccccagacttcagggaattcacagcaaactagagatatttcctg

SEQ ID NO: 836870 - DNA, 120 bp, Artificial Sequence
  ENSG00000281196_4 (sequence is synthesized)
taagttcctctcaccaggcaaggctgtggtcaggagtcattgcctctctcctcttccaaggggactgagactaacttcatactggactactttctccagaaaaatcctctccccagtttc

SEQ ID NO: 836871 - DNA, 120 bp, Artificial Sequence
  ENSG00000281196_5 (sequence is synthesized)
caacttcagccttttcagagatggccgttggaccaagagtcagaaaactatttccatttagaccctttgcaaggttggaaatgtcaggtatttgaacatttcattttgtttttggcccat

SEQ ID NO: 836872 - DNA, 120 bp, Artificial Sequence
  ENSG00000281196_6 (sequence is synthesized)
ggagcctcaactgaaaccaatacccaaatattccattttagcatcctgttatatgcatacagttgctgttcagtccatggtgctttgtaacttttacgttgttgtgggagatttactgca

SEQ ID NO: 836873 - DNA, 80 bp, Artificial Sequence
  ENSG00000281196_7 (sequence is synthesized)
atgagaaagaagccaatgacctagaggcacaagatctcggctccctgcaaccttcgcctcccgggttcaagctattctcc

SEQ ID NO: 836874 - DNA, 120 bp, Artificial Sequence
  ENSG00000281196_8 (sequence is synthesized)
accttggcctcccaaagtgctggggttatgggtgtgagccaccgcgcctggcctatacatgatttcttttaatactctcaagaattgcttgttacaggcacagtagcctgaattttatgg

SEQ ID NO: 836875 - DNA, 120 bp, Artificial Sequence
  ENSG00000281196_9 (sequence is synthesized)
tacaggcacagtagcctgaattttatggatgaagaaatggagacccgtttctttatggatgaagaaattgagagaagttaagcaactttccagaggctccccccagcggcttttctctct

SEQ ID NO: 836876 - DNA, 120 bp, Artificial Sequence
  ENSG00000281196_10 (sequence is synthesized)
tgcttattctgaagaaactagctgccttgttgtgagttactctgtggagagacccacatattaaggaactgagagcatgaccactggccaacagccctggagtgattgaatgtttccaaa

SEQ ID NO: 836877 - DNA, 120 bp, Artificial Sequence
  ENSG00000281196_11 (sequence is synthesized)
aaccacactcatgagcttggaagaggatcattccccgttcaaaccttcagctgagactgcagccctgccaataccttgattgcaacctggtgagagatcctgagcctgtggactccgctc

SEQ ID NO: 836878 - DNA, 120 bp, Artificial Sequence
  ENSG00000281196_12 (sequence is synthesized)
agctgtgcctggattcctgacccacagaaactgtcagataatagctgttttaaactaccaagttttggggaaatttgttatgcagtaatagacaacaaatagattatataatgacaaact

SEQ ID NO: 836879 - DNA, 120 bp, Artificial Sequence
  ENSG00000281196_13 (sequence is synthesized)
tcagataaatggaggtacagttcttggagggggcacttttttttctagttcaaacaaagaagtagtatcagtgtgggttagcaatagccctggtcacccctctctcagctcagatgttgg

SEQ ID NO: 836880 - DNA, 120 bp, Artificial Sequence
  ENSG00000281196_14 (sequence is synthesized)
ggaaggggtttgtggttggcttccctaggtcctcaccttttctctgattgctagccaaaggcccaagggagcagagggaggagaggtgagggcagataagggctctcttgaccagtagtg

SEQ ID NO: 836881 - DNA, 120 bp, Artificial Sequence
  ENSG00000281196_15 (sequence is synthesized)
ctatttcccaatccttggatttgggctagtcttgtgattgctttgaccaacagaatgtggcagaaggaacattataccttttctgagcctgggaacaagagaccctgaatgattttggcc

SEQ ID NO: 836882 - DNA, 120 bp, Artificial Sequence
  ENSG00000281196_16 (sequence is synthesized)
tgtctcttggagttctcctgctgtcctgtgaataaacctgtgggcggaatgacagactatgtgaataagagcagaatcagctcagttgtcccagatgtgtgagaaagccccaccaagatt

SEQ ID NO: 836883 - DNA, 120 bp, Artificial Sequence
  ENSG00000281196_17 (sequence is synthesized)
agcagagccacctagcctcaccacagaaatatatgcaaaccccaccaacctcagctcaggtgatcagaactgcccagctgacccactgacttgtgagtgaaaataatcgatggttaccgt

SEQ ID NO: 836884 - DNA, 120 bp, Artificial Sequence
  ENSG00000280486_0 (sequence is synthesized)
gccacaggcaggggaggctttaaacgggtaccgagaaggatctactgccttcacacgcgctccttttaacttaaaacactgctttcaccttaaaagagaaacaagaggaacacacggacg

SEQ ID NO: 836885 - DNA, 120 bp, Artificial Sequence
  ENSG00000280486_1 (sequence is synthesized)
ccagaaagagaatgacggaaacggaggggtcatctccagcagggtccgaatcctcagatggaaccacaggccaccaggccagcacaggggcctccgggagggtccgccctgctccacggc

SEQ ID NO: 836886 - DNA, 120 bp, Artificial Sequence
  ENSG00000280486_2 (sequence is synthesized)
cgcaggggtgtgtgtgcatcagtgagtgtgcctgtgtgcatgcatgccaacaggcacacatgcatgtgtccacacaaggacgtgtgtgcatgtgtgtgagtgtgcatgtgtgtgcatgac

SEQ ID NO: 836887 - DNA, 120 bp, Artificial Sequence
  ENSG00000280486_3 (sequence is synthesized)
tgtgcatatatgtgcacgtgtgtgcgagtgtgcgtgtgcatgtgtatatgtgcgcatgagtgtgcatgagtgcaagtgtgcatgtgtgtatgtgtgcaagcgtgtgtgcacatgtgcttg

SEQ ID NO: 836888 - DNA, 120 bp, Artificial Sequence
  ENSG00000280486_4 (sequence is synthesized)
tgtgtgcatgtgtgtgcaagtgtgcatgtgtgcgagtgtgcatatgtgcattgtgtgcgtgagtgtgcgtgtggtccgtgtacacatctgtccatacatgtgagcttgcatgcacatgtg

SEQ ID NO: 836889 - DNA, 120 bp, Artificial Sequence
  ENSG00000280486_5 (sequence is synthesized)
cgcatgtgagtgtgcatgcatgtgttgtgtgtgtacgtgtctgcacgttggtgtgtgtatgtgtgtgcctgtgagtgtgcagagaggccctggcgctcgaggagggcctacagctcatag

SEQ ID NO: 836890 - DNA, 120 bp, Artificial Sequence
  ENSG00000280486_6 (sequence is synthesized)
tactcacccggcgggcccagttgacgaggtcatccagcttggccaccacatactcgccccggctgctgggtttgggagccacggctctggcctttggcagggcaggctgggtgctggcac

SEQ ID NO: 836891 - DNA, 120 bp, Artificial Sequence
  ENSG00000280486_7 (sequence is synthesized)
agagacacacgggcacaggaggcgtcagccacgcaggtgcttcccagaggcggatgcgagcccccacggccgctgccagaggcctggacccacatgagcaggtcaacagtgtccaagcaa

SEQ ID NO: 836892 - DNA, 120 bp, Artificial Sequence
  ENSG00000280486_8 (sequence is synthesized)
ggacggtcccaggatcatccacagaaggaaactggcagcaggccctccacacatgaccaaggaatctgcagtccgctaagcggggagggcgctgcccacgtcaatctacacagaaaagca

SEQ ID NO: 836893 - DNA, 120 bp, Artificial Sequence
  ENSG00000280486_9 (sequence is synthesized)
cccctagaggagccagcctcaaaggaagcgcagaggagggaacgcgcctgcacgaagtctcctgggagagccttcccgaggcgaagactaaggccagagcagggccttgccacgcccggg

SEQ ID NO: 836894 - DNA, 120 bp, Artificial Sequence
  ENSG00000280486_10 (sequence is synthesized)
gcactcagcgggaggaaacctggaggtgccaggaatcctggctcacaaggaagaatccagaaaggcaggcttggtgctggtgacggctgaactgtgaccctccacccgacctgcatctga

SEQ ID NO: 836895 - DNA, 120 bp, Artificial Sequence
  ENSG00000280486_11 (sequence is synthesized)
tgacagagggagactccatctcaaaaaataaaataaagggtcattataaaggacagtgaggtcacgagggtgggccctcatccgatatgacttatgtccttgtaagaaaaggcgatcagg

SEQ ID NO: 836896 - DNA, 120 bp, Artificial Sequence
  ENSG00000280486_12 (sequence is synthesized)
agaaaaggcgatcaggacacaaacatgtacagaggaaagacgcagggagaagatggccacgggcaagccaaggacagaggcctcagcaggaaccaaccctgctgacccccaatcttggcc

SEQ ID NO: 836897 - DNA, 120 bp, Artificial Sequence
  ENSG00000280486_13 (sequence is synthesized)
ttccagcccccagaactgtgagaacaatcagcttctgttgaagctgcccaggtgatggtactttgtcgctgtgggtgaggtgaggcccgatggagaggctgtgggcagcctccaggggcc

SEQ ID NO: 836898 - DNA, 120 bp, Artificial Sequence
  ENSG00000280486_14 (sequence is synthesized)
agggccagggtttgatgcccctgaatgcagcgatccatggggccttctcctgcctctgagcccctccctcaccccagccttagcctcatccggggttgctgtttcccatggccccgtcca

SEQ ID NO: 836899 - DNA, 120 bp, Artificial Sequence
  ENSG00000280486_15 (sequence is synthesized)
ggccacaactctctgaaggacacaagcctgtgacctacttcttggcatgcctgaggctgggcacagcagacaggctaactgcccagccccaggctctggtgggagctgccccactccagg

SEQ ID NO: 836900 - DNA, 120 bp, Artificial Sequence
  ENSG00000280486_16 (sequence is synthesized)
tgtcagtttcccaagctgaaaatgcaggactttggatgagctcctagcagaggagatactcttctgagaacctctgaggtgatgggattctgtgcctctgggtcagggtttttgttgttg

SEQ ID NO: 836901 - DNA, 63 bp, Artificial Sequence
  ENSG00000280486_17 (sequence is synthesized)
tgggattacaggcgcctgctaccacgctcagctaattttgcactcaggggatccgcccacctc

SEQ ID NO: 836902 - DNA, 120 bp, Artificial Sequence
  ENSG00000228709_0 (sequence is synthesized)
tgctggatgctgagaggaacgcatcagtggaagaaaacaagcggctggacgtggagaggacgtcaagggagcatgccggcggaagagcacaccacagacgccggcaggccaccgagcggc

SEQ ID NO: 836903 - DNA, 120 bp, Artificial Sequence
  ENSG00000228709_1 (sequence is synthesized)
aggaccaggcggagtttggccggggcagtcggaggagagctaggccactaagcagctcaactccaggagataaaccatctcccttgtggctcctccgtcggctgagagctgcttccactc

SEQ ID NO: 836904 - DNA, 120 bp, Artificial Sequence
  ENSG00000228709_2 (sequence is synthesized)
aataacactttgcactcgttctccaagcccccgtgtgatccgattcttctggtacacccaggcaagaacccaggatacagaaaggcctcggtcctttccacaagtacctctacttgaggt

SEQ ID NO: 836905 - DNA, 120 bp, Artificial Sequence
  ENSG00000228709_3 (sequence is synthesized)
ctgtaaacattcacccctgggcactgccgtggggtgggagcctgcctgagtgtatgctcccctagaggtttgagctgcggggcactgaagaagtgagccacactcccatcgcacactgcg

SEQ ID NO: 836906 - DNA, 120 bp, Artificial Sequence
  ENSG00000228709_4 (sequence is synthesized)
agggggacaaaggaacttttcctcttttaactggggcctcatctggaatctcggaaggtgaatgtctgccttcgaaaaccctaccacctgtctttcttgtggaaccatcaaactccaagt

SEQ ID NO: 836907 - DNA, 120 bp, Artificial Sequence
  ENSG00000228709_5 (sequence is synthesized)
ggacaggcaactggagcctcagataatgactcccctttgctaggaacccttagacagacctctgggaggaatttgactgccgttttctcaaaaacaacgccccctgtcagcgggaagcag

SEQ ID NO: 836908 - DNA, 120 bp, Artificial Sequence
  ENSG00000228709_6 (sequence is synthesized)
ctaagacaggtcatcgtccatattctaatagcagttagatgtacgttttcagagaggggaaatgatacaggagtgcggggaagggaagagtgtcatctctttaaatgatacagaagggag

SEQ ID NO: 836909 - DNA, 120 bp, Artificial Sequence
  ENSG00000228708_0 (sequence is synthesized)
agagcaagaaaatggaaacatgttcttctacgaactgtggaacaaggagggatctcagaagacatgtagtaacttcttttaataactacctgtgtcactttgggcaagatttgcactttg

SEQ ID NO: 836910 - DNA, 120 bp, Artificial Sequence
  ENSG00000228708_1 (sequence is synthesized)
tttcttaataagaccctacatgacctgaattacatgagtcccttctctactccttttctgttcaagccagtttcagttaaatttccatgtttgttacttgcaactaaaagccctaaagga

SEQ ID NO: 836911 - DNA, 120 bp, Artificial Sequence
  ENSG00000228708_2 (sequence is synthesized)
gaaatgatatcttataataatggactctatcatttgtatgaactttctatctataaatgtgatggcctttgatgacttctaattgttatttcaagtcacacgaaaaaatgcagaacagcc

SEQ ID NO: 836912 - DNA, 120 bp, Artificial Sequence
  ENSG00000228705_0 (sequence is synthesized)
cccctccttcctgtcccgcccctccttcctgtcccaccccctcctttctgtacctgttgacctcatctgggctgcagttggtgactgctcgaaggggtgggaggaacagtataaagtcct

SEQ ID NO: 836913 - DNA, 120 bp, Artificial Sequence
  ENSG00000228705_1 (sequence is synthesized)
gtccccttcctgccttcaagggcacccctgaaggaccatatccactgtggacccccttgggatcagccgagcttttcacactctctgttgcccttgtccttgggcatctcagtgactcga

SEQ ID NO: 836914 - DNA, 120 bp, Artificial Sequence
  ENSG00000228705_2 (sequence is synthesized)
aggaattgggtcttgagacacagccgagcctgtgagcgctgacctgtgtaaagaagacaccagaatgagatgtctccacacacagagagctgcagccgatgccggccggtgacttgggac

SEQ ID NO: 836915 - DNA, 120 bp, Artificial Sequence
  ENSG00000228705_3 (sequence is synthesized)
gcttaacaggaggctccccctctcttgggaggtagagagcagtgaggaaggggactcagcctccatgcctcccgccagcccagctgcgcccgaatcacctccctcctgaaaggatgtcag

SEQ ID NO: 836916 - DNA, 120 bp, Artificial Sequence
  ENSG00000228705_4 (sequence is synthesized)
cctctgcttggacaccgtggagacagggccctccttgtgcttcagaagcatcaacgtgtcagaaaatcatcttcacgccaagtctggaaaaaatggctttgaggttgtgcacacaaagga

SEQ ID NO: 836917 - DNA, 120 bp, Artificial Sequence
  ENSG00000228705_5 (sequence is synthesized)
aggagggagagccccaggtgtcgcggaggaccatgcggctgacagagccagcagggcggtggcgtgtgagccgtgctctggatatataaggatctgacgctgctggcaatgtctgagctc

SEQ ID NO: 836918 - DNA, 120 bp, Artificial Sequence
  ENSG00000228705_6 (sequence is synthesized)
tatgctcgcccatctgtcggctgctatcatcaccgggtgggattagcggagatccactctttcatatttaaatcttcacaagagaatgaatcacttttataataaaagaaaaagaccgtc

SEQ ID NO: 836919 - DNA, 120 bp, Artificial Sequence
  ENSG00000228705_7 (sequence is synthesized)
gtagaggtgacattgcagcccagcacctccctcctccgccctgccctcctctgtcctccttccacaggtgtggccaagggcactgcccagttggcctgtgacccccagctgaggctgctt

SEQ ID NO: 836920 - DNA, 120 bp, Artificial Sequence
  ENSG00000228705_8 (sequence is synthesized)
cctgggcagctgacttcaagtttgtgacctgagctctccaggcccccgagcggctggtgccttggccctgcagttctgcggccaagactcctcctctgggatctcgtcttaccctgctgc

SEQ ID NO: 836921 - DNA, 120 bp, Artificial Sequence
  ENSG00000228705_9 (sequence is synthesized)
gggtgccagggctgcatgaagcaagggcgaaagtccccttcgcccgggcgctgccctctgcctgctgtcccctgtgctcctgttccccgtggctgcccagggacagcttttcacactctc

SEQ ID NO: 836922 - DNA, 120 bp, Artificial Sequence
  ENSG00000228705_10 (sequence is synthesized)
gaggacacaatctctcccctgaggcagagacccagggctgccccgcacagtcgcgcagatcgtgtactgccctgctcctggggctcattcacacaggttgccatggctgtggggtccctg

SEQ ID NO: 836923 - DNA, 120 bp, Artificial Sequence
  ENSG00000228707_0 (sequence is synthesized)
agtacacaaacacgggtccagattgcttggtttcaaatcttggttctgctactggccagctgtgtgatccaagaaaagctactcgacttctctgtgtcttcatctgctcatctgtcaaat

SEQ ID NO: 836924 - DNA, 120 bp, Artificial Sequence
  ENSG00000228707_1 (sequence is synthesized)
ggatatatgagtagtcctacttcatggagttgttgcgaggaatccattagtacctctcctagtgcctgcagccacgcaatacatatttgaaaagtaagtggaaatctgtcaagtgtaagt

SEQ ID NO: 836925 - DNA, 120 bp, Artificial Sequence
  ENSG00000228707_2 (sequence is synthesized)
agaagaggaagcactggaagatgatcatggaagggagagaaggcaagcttgcaaaatcagcattggctatttaaataatatctgcctatgatgctgtcaaggaaaaatgttgtggagccg

SEQ ID NO: 836926 - DNA, 120 bp, Artificial Sequence
  ENSG00000228707_3 (sequence is synthesized)
ttggaaatgtgacattgaagctcaaaacagaggcctgaggggattgattaatttcccagagccgccataataaggtaccacaaactaggtggtttaaaacaataaacatttattgtatca

SEQ ID NO: 836927 - DNA, 120 bp, Artificial Sequence
  ENSG00000228701_0 (sequence is synthesized)
ttttgttgttgttgttttaagccctgggctttccaggctgaactttctcactaccattacactgaaaaagagcccttgaaagttttgctcggatcttgcacattcttttggaagtcttac

SEQ ID NO: 836928 - DNA, 120 bp, Artificial Sequence
  ENSG00000228701_1 (sequence is synthesized)
tgtggaaattgtccgtgttttcagcttccacatccctttctcctgggagatttcttttccgttttttttactttgtctcttttctttcctccgcaactgctttgttgttgttgttgttgt

SEQ ID NO: 836929 - DNA, 120 bp, Artificial Sequence
  ENSG00000228701_2 (sequence is synthesized)
accacttctcaaaagtgaactagttgccgtttaatagaagtttggatgaactgcccccaaaataaaggaaatccgaacagtcatggaagttgactccaattggagggatggctctgatca

SEQ ID NO: 836930 - DNA, 120 bp, Artificial Sequence
  ENSG00000228701_3 (sequence is synthesized)
attactctttccacaggaattgaacagcttggacttggagacagtgagttaaaacagaaataagaaggcggcagaaaaagactaccagattgaaatgtgttggatattcatatccaccca

SEQ ID NO: 836931 - DNA, 120 bp, Artificial Sequence
  ENSG00000228701_4 (sequence is synthesized)
gcacctcagaatgtggccatggaggatggagacagagattggagtgatgcatcttcaagcctaggaacactaaggattgctggtaatcaccagaagctggaagaggcaagaaagtgtcct

SEQ ID NO: 836932 - DNA, 120 bp, Artificial Sequence
  ENSG00000228703_0 (sequence is synthesized)
ggctgttgttgctgagcggagacatggcgatgccgatctgggccaggtagtacagaaccctggggtcagaaccagagctgcagctggatgcgaagccggctgccctccccatacccagct

SEQ ID NO: 836933 - DNA, 120 bp, Artificial Sequence
  ENSG00000228703_1 (sequence is synthesized)
ctgcgctgcctgctcacgtgctctaagaagagatgcagttccgggtggctggcagggtgcacagtggcctcgaacagtggcaggaagatgttctccagcatctcctggaagttggccagc

SEQ ID NO: 836934 - DNA, 120 bp, Artificial Sequence
  ENSG00000228703_2 (sequence is synthesized)
acgttgggggagtgcacgcggtgcatgacggcccagcgcgccagcttgtcccactcatccctcgagcgcccgtaaatggagagccgcagctctgcattctggtatttgctctcctccagg

SEQ ID NO: 836935 - DNA, 120 bp, Artificial Sequence
  ENSG00000228703_3 (sequence is synthesized)
tctgacatcacctcctagacatgaggtgagctgagtcagacatgaggtgagctgagtcagagctcttcagggggtcatctgcctaccctccttgagtctcaccccctaaaagcccccaga

SEQ ID NO: 836936 - DNA, 120 bp, Artificial Sequence
  ENSG00000228703_4 (sequence is synthesized)
tcctcaggctcgaggcttggcagggaaggctgcctccttaccttgatgatgtgagcaaagtacttcccagataccctgttgtccgtcttgatgaagatctctcggaggacggactcccca

SEQ ID NO: 836937 - DNA, 120 bp, Artificial Sequence
  ENSG00000286356_0 (sequence is synthesized)
acaagttggaggtctccagagtggaagggcttgcaggcaggataaagccaagtctgggggaaagtcagcatgtggaaaagtgcagcaaaaaaggaaagagctagaagacagaggcagctc

SEQ ID NO: 836938 - DNA, 120 bp, Artificial Sequence
  ENSG00000286356_1 (sequence is synthesized)
ccagcgctgccatgacctgctgggctctgagcgccagcctgctgtggctaacagtggctccctactgccatgtgaaaggcacatctccatcagctgtggtaaattgccacttgcaagagc

SEQ ID NO: 836939 - DNA, 120 bp, Artificial Sequence
  ENSG00000286356_2 (sequence is synthesized)
aataaccgggcgctcctcagagggatctgtgtcttggcaaggaggaaaatcaccccaatgctgcctgtgattccagacccagggctagtcagtgggacccaagaccatgaactctgctca

SEQ ID NO: 836940 - DNA, 120 bp, Artificial Sequence
  ENSG00000286356_3 (sequence is synthesized)
cactgcagaagatgcggagcaaggggcctgggtttctagtcaccatgctatccaagagctgctctgtagacgtttcaggccattagtacaaaaataaataaataatgcaggagtccccag

SEQ ID NO: 836941 - DNA, 120 bp, Artificial Sequence
  ENSG00000286354_0 (sequence is synthesized)
atccacaccaggcagaggacaaactccactcctggccttcctgcccagctagatttaaggattgtaaccaggacagtgagtcccttctgggaaaggggcctcgtggaggttatgaaatcc

SEQ ID NO: 836942 - DNA, 120 bp, Artificial Sequence
  ENSG00000286354_1 (sequence is synthesized)
agcaggtcatggaaggagaaacgattgacaatccagacgggatggaggcaggagttggctcagtaaccccatctttcctatccaccagcactcccctgcgcttcccaagtgatttaatta

SEQ ID NO: 836943 - DNA, 120 bp, Artificial Sequence
  ENSG00000286354_2 (sequence is synthesized)
aatttgggtgaagagaaatcagacacaggcatcagcactcctggtttgggggacttaggattcagactgggacctatgccattggtttccctggttctcaggcctctgggcttcattgga

SEQ ID NO: 836944 - DNA, 120 bp, Artificial Sequence
  ENSG00000286354_3 (sequence is synthesized)
ctggaactatactaccagttttcctgggtcttcagcttgcagatggcagattgtggaacttctcagtcttcataattgtgtgagccaatcccccataataaatctctttctctatatcta

SEQ ID NO: 836945 - DNA, 120 bp, Artificial Sequence
  ENSG00000286350_0 (sequence is synthesized)
gagcatagcaaaagttcagggagccaaggaaagatcttgctgaatgtatcacaaagtgaagttttcatcaggacaggacagctagaattttctaccataagggcaggaatcctgtcttct

SEQ ID NO: 836946 - DNA, 120 bp, Artificial Sequence
  ENSG00000286350_1 (sequence is synthesized)
ttatcccctgctatattctcatctccttgaaaggtgcctgcagttactgtcacagcccagattatgccacggaaccattgtggtgaggactctgtggtctccacccctgaacactgaacg

SEQ ID NO: 836947 - DNA, 120 bp, Artificial Sequence
  ENSG00000286350_2 (sequence is synthesized)
gcagcatcagacctttcctgtagaggccaatgacgcctgcctcccactcagacacagaagttccctcctgccctttctcagtcagggtacccgcactcccgacatcacatcatcctgctt

SEQ ID NO: 836948 - DNA, 120 bp, Artificial Sequence
  ENSG00000286350_3 (sequence is synthesized)
tgtgtcaccggctttccataatttctgacactaattttcagttattagtgtcaccttcctcagaggtgccttccctaaccacttgtctggagtagccaagagtaattgcgttgtttgtcg

SEQ ID NO: 836949 - DNA, 120 bp, Artificial Sequence
  ENSG00000286350_4 (sequence is synthesized)
ttactttcaatggcaaaaaccacagttacgtttgcatcaagcgaatacttttgcctgttctggaactcattcatgctctgaaacatttgttattcatataaatggaatcatacagccaca

SEQ ID NO: 836950 - DNA, 120 bp, Artificial Sequence
  ENSG00000286358_0 (sequence is synthesized)
gtgaagcttgtatttatttaccgttccgcaaatcctacagcccttaagatttatattaaatccactctgcctgtgctctataaatggaacacaaaagacttgaagttagtacatgtgttt

SEQ ID NO: 836951 - DNA, 120 bp, Artificial Sequence
  ENSG00000286358_1 (sequence is synthesized)
acagcatgatttcctgaatattttaagcccgctgttgagaactactcctcagaaaatcagtagcttctttcaacatattactgctcattgataatgcatattgtcagcaaagacttctgc

SEQ ID NO: 836952 - DNA, 120 bp, Artificial Sequence
  ENSG00000286358_2 (sequence is synthesized)
tggagatatacgagattaatgtttttctgcctgctaacacaatattcattctgcaacccatggatcaaagactaattctgactttaggttttattatttgagaaatacactatgtaagac

SEQ ID NO: 836953 - DNA, 120 bp, Artificial Sequence
  ENSG00000286358_3 (sequence is synthesized)
tagaataggcagggattcctttgatctaggcaaagtaaattagaaaccttttggaaaagattcaccattctagatatcaacaacattttttattcatggaggatgtcaaaatatcaacat

SEQ ID NO: 836954 - DNA, 120 bp, Artificial Sequence
  ENSG00000286358_4 (sequence is synthesized)
atcaacattagcaggagtttagaagaaattgattccaaccctcatggaggatgaccttgaaaccgtcaagacttcagtggtggatgtaactacagatgtggtagaaatagcaagagaact

SEQ ID NO: 836955 - DNA, 120 bp, Artificial Sequence
  ENSG00000286358_5 (sequence is synthesized)
aactagaactagaagtggagcctgaagatgtgactaagttttcacaatctcgtaataaaacttgaacagatgagaacttgcatctttaggttgagcaaagaaagtggtttcttgagatgg

SEQ ID NO: 836956 - DNA, 120 bp, Artificial Sequence
  ENSG00000286358_6 (sequence is synthesized)
taaaggatgctgtaaacattatcaatatgacaacaaaaaatttagagtattacataaacttatttggtaaaaacagcagcaagtttcaagaggacagaccaattttgaaagaagttctac

SEQ ID NO: 836957 - DNA, 120 bp, Artificial Sequence
  ENSG00000286358_7 (sequence is synthesized)
tgtggataaaatgttatcaaaaaaacaacatcacatatttgttgtttttattttaaatcaaagtatgtttattgttttcttaaccataatgttatttcacacttaatcaactacagtata

SEQ ID NO: 836958 - DNA, 120 bp, Artificial Sequence
  ENSG00000286359_0 (sequence is synthesized)
agaaaccggagccacagaggacagggtagagtcgcagaaaggagagacacacatacatggaaagaggagctttctccaatcttaatgattcccagctctcagcctcgtttctgcaaccca

SEQ ID NO: 836959 - DNA, 120 bp, Artificial Sequence
  ENSG00000286359_1 (sequence is synthesized)
gcctgcaagcaaactgtcctgctttggaccctgctgtgtcactctccgcaccagcctttgcctctgctcttcgctctatgaagtcctcccaggctgcacggaaggacgactttctcaggt

SEQ ID NO: 836960 - DNA, 120 bp, Artificial Sequence
  ENSG00000286359_2 (sequence is synthesized)
tcggatttcctgccatggtgctgccattcccaccgcccgtgccctctgcctaggctgttcctgctgcaccgaacgcctcctcctgccaccgccctccctcctttctttagaagcccctgc

SEQ ID NO: 836961 - DNA, 120 bp, Artificial Sequence
  ENSG00000286359_3 (sequence is synthesized)
cagcacctgagctctctgctgattgctgttcctcccagtctgtggaagctttgcccatatgctttccttaaaagggttctgggcagggcaggcgcccccatttctcagggatcccctcca

SEQ ID NO: 836962 - DNA, 120 bp, Artificial Sequence
  ENSG00000286359_4 (sequence is synthesized)
ggacaacgccttttccttgtgtcttcagctctccttaccagatatctatatatttgtatatattcagtttcaccaacaacgcatcaagtacttttttttttttaagtaaagaaccgaagt

SEQ ID NO: 836963 - DNA, 120 bp, Artificial Sequence
  ENSG00000231204_0 (sequence is synthesized)
aaagctgagtgggaaggggcttcacacaaagatcaggaaagcttgacgtatggctagtgaactttaggagggagaggtactgggatgtggctcaaccagagaaaatcccaggcccatagc

SEQ ID NO: 836964 - DNA, 120 bp, Artificial Sequence
  ENSG00000231204_1 (sequence is synthesized)
tacatgaagactggtctctgtcctcaagttgcttacagtttgcaggtgctacaccaatgggtatcatttgtatctcacataggcccttcgtggccttcctcctgaggcttcctgacttcc

SEQ ID NO: 836965 - DNA, 120 bp, Artificial Sequence
  ENSG00000231204_2 (sequence is synthesized)
cacagctgccctgctttgttccccgacacaccaggacacagcagccggcaggagccagagaccaatcagtatttgataaagataaatctgtgctcagaactggaacagatgtttagccaa

SEQ ID NO: 836966 - DNA, 120 bp, Artificial Sequence
  ENSG00000231204_3 (sequence is synthesized)
ttaggaaatgaaaccctctgttgaagtagttctgcttccatctgaggactttggattgagctgttaaaaggactcatttcttcaaaaatgctttgcagaatctatcaaagcaaggaacgt

SEQ ID NO: 836967 - DNA, 120 bp, Artificial Sequence
  ENSG00000231204_4 (sequence is synthesized)
agtgagatgcgcctaatgggggagttcatcccccacctcaccctggtgtgttataaaagggtaaactgatgctaaaagctacctcaagaagatgcctggagcagggttcaagatcaatct

SEQ ID NO: 836968 - DNA, 120 bp, Artificial Sequence
  ENSG00000231204_5 (sequence is synthesized)
agcttttagtctcagccataaaccatctgagctttgggaggagtatggatctccaggaaccagaagagctgcatacatatgcccaacaattcagcgacagcaccatcagcccagatgggg

SEQ ID NO: 836969 - DNA, 120 bp, Artificial Sequence
  ENSG00000231204_6 (sequence is synthesized)
gttgtgagcaaagtccgagatggtcagaaggaaacgagaacctgggaggtggcgagtgtccactgctctagtctcaggacagcctgctctgttaaagcacctggtccttcttcctgaaga

SEQ ID NO: 836970 - DNA, 120 bp, Artificial Sequence
  ENSG00000231204_7 (sequence is synthesized)
cttcagtcccaccttgcattatgttttgttctgtgtatgtgcgtgtctatctctcctgctaactgctgagcttgctaaggaaaggaaccttgttttatgaaataaatgatatttatgagc

SEQ ID NO: 836971 - DNA, 120 bp, Artificial Sequence
  ENSG00000231204_8 (sequence is synthesized)
agtctgattgcacaattttccattagagaagtttcatacctgttagatctcctgctgccaggaactaacctcctgggagacaggtcttatcgtcatccaggcatataggagggtgttggg

SEQ ID NO: 836972 - DNA, 120 bp, Artificial Sequence
  ENSG00000231204_9 (sequence is synthesized)
aaaacacttgtagtggatgctggattgtgccattcagagccagctccctttgctattgaagaacttatttccctacatgtcaggacttctgctggctgatggcccccagctgtgagctct

SEQ ID NO: 836973 - DNA, 120 bp, Artificial Sequence
  ENSG00000231204_10 (sequence is synthesized)
ttcaggcatcacctttggctgcaaaaggctccctctcctgaagttactacctgcatccctggaggcagacttcatctcatgtcttcatccaaagtttgaacaaattggctaagaaggtgc

SEQ ID NO: 836974 - DNA, 120 bp, Artificial Sequence
  ENSG00000231204_11 (sequence is synthesized)
gagtgggaaggggcttcacacaaagatcaggaaagcttgacgtatggctagtgaactttaggagggagaggtactgggatgtggctcaaccagagaaaatcccaggtcaaatgaagtcag

SEQ ID NO: 836975 - DNA, 120 bp, Artificial Sequence
  ENSG00000231204_12 (sequence is synthesized)
acagcaaaggtgattgaattttcaatcttgaaaatacatcatggaacctgattttccaaagaagtgattcaaactgaacagcaaggaagcttaacttattgctgcctgtctcagaactca

SEQ ID NO: 836976 - DNA, 120 bp, Artificial Sequence
  ENSG00000231204_13 (sequence is synthesized)
agctcacacttctcttttcttcaaatactcgcctgtttctaacaatctgcccactgctctgggtcccgatgcctcgacgctgcatcttgctgccccggtactctctttaacctcaggaga

SEQ ID NO: 836977 - DNA, 120 bp, Artificial Sequence
  ENSG00000231204_14 (sequence is synthesized)
ctttaacctcaggagaagaatccccacctcgtgtcactagaatgtggaacagagaagaaggaagagctgacatagtacagaccaagaagattttaaaaacaaacaaacaaacaaacaaac

SEQ ID NO: 836978 - DNA, 120 bp, Artificial Sequence
  ENSG00000231204_15 (sequence is synthesized)
ccatcagccacacctggcagtaaagccctcagtggccaactcagcagtcccactttgattcttcttagacggcagcatcttcttagataatgctgtgcctgatgcacagtagaagcttaa

SEQ ID NO: 836979 - DNA, 120 bp, Artificial Sequence
  ENSG00000231204_16 (sequence is synthesized)
ctgtttaaaatttgtgttctggataatcagggtatacagaatgctgatgtattaccatagtatcaaactacaataaggcaatgttaatctagcaatatatataatgagaatattggctac

SEQ ID NO: 836980 - DNA, 120 bp, Artificial Sequence
  ENSG00000231204_17 (sequence is synthesized)
aacagaaaaacaggggcttgtctggtctgtatctctcaagtgtgaggaagcagtttagtcaaacaagttgaaaaataaaacaaaatttaaaaaggataaaaaaaaaccctggttctttgt

SEQ ID NO: 836981 - DNA, 120 bp, Artificial Sequence
  ENSG00000231204_18 (sequence is synthesized)
tttccaggggagaccatctctatactgaactaaatttaacttccctattgtgtatgatcgccctccaatatggggctactctgcccagagggacgactttgcccgtgatgaggattaatc

SEQ ID NO: 836982 - DNA, 120 bp, Artificial Sequence
  ENSG00000231204_19 (sequence is synthesized)
ccactcttgacccacacagatggttttagtgactgtatcttttgtgcagctccatttcttctcaaaatgtgcagatgagatgtttcttccagcctctggatattgaggtgcctgggatac

SEQ ID NO: 836983 - DNA, 120 bp, Artificial Sequence
  ENSG00000231204_20 (sequence is synthesized)
ctgagtgagggaagaaaggagcaccaagaagtggcagctgaagccagattgcacaagagagaaaggaagaccatccaaggcagacagaaaaactcaagagagcagccgtctggggctatt

SEQ ID NO: 836984 - DNA, 120 bp, Artificial Sequence
  ENSG00000231204_21 (sequence is synthesized)
tatcacatgaacaaagtcagaagcctttcaatcttcctcctgtattacatcagggttcatttttaaaagatacgcaacttggtgatcacaagttattaaaaaaaagtagaagagatggaa

SEQ ID NO: 836985 - DNA, 120 bp, Artificial Sequence
  ENSG00000231204_22 (sequence is synthesized)
cactagtgagatgcgcctaatgggggagttcatcccccacctcaccctggtgaggagtatggatctccaggaaccagaagagctgcatacatatgtgagtggattctgaaagtgctgaag

SEQ ID NO: 836986 - DNA, 120 bp, Artificial Sequence
  ENSG00000231204_23 (sequence is synthesized)
tgagggggatgcaacattaagttggatgagggaggatttgttaatatgaatgcactcgtctgtgatacagaatttaacaacctggcaagacccccaggagagggttctaacatgttgtta

SEQ ID NO: 836987 - DNA, 120 bp, Artificial Sequence
  ENSG00000231204_24 (sequence is synthesized)
ggatggctctgaaaagcatgaagaaactgatggctcaaatcatgtaaggcagaaataccagaattgctatggcagagggtggatcaaaagtctcagaaaaatgagcatgtaagaatacta

SEQ ID NO: 836988 - DNA, 120 bp, Artificial Sequence
  ENSG00000231204_25 (sequence is synthesized)
tgtactatttaatgtggaaagtccaccatgtggttatatttagtgagaggacacagaagatgctctgtttctcaaagcaatatgagatacatcaaaaaaaaaataaaaagggcaccagca

SEQ ID NO: 836989 - DNA, 120 bp, Artificial Sequence
  ENSG00000231204_26 (sequence is synthesized)
ttagaccacacccgctttgactgttagactcatctgcagtgcttgtgccactagtgagatgcgcctaatgggggagttcatcccccacctcaccctggtgcccaacaattcagcgacagc

SEQ ID NO: 836990 - DNA, 120 bp, Artificial Sequence
  ENSG00000231204_27 (sequence is synthesized)
gagttcatcccccacctcaccctggtcagtgaaaagaaagaaaaaaagactaagccaggaaacctcttgaaggcccagagaagtaggcacgtatataaggttgaagtttgagttagatag

SEQ ID NO: 836991 - DNA, 120 bp, Artificial Sequence
  ENSG00000267049_0 (sequence is synthesized)
tatctttaactggcgttcaatattttcttttgaggtaaactttacatacaatgaaattcacacacttcactaagtttcataagtgcatacacctgtgtaacccaaacccctccccagcat

SEQ ID NO: 836992 - DNA, 62 bp, Artificial Sequence
  ENSG00000267049_1 (sequence is synthesized)
tagggggaaagattggaaactccatttaggacctatggaatttgagatgtcttttaaaccct

SEQ ID NO: 836993 - DNA, 120 bp, Artificial Sequence
  ENSG00000267049_2 (sequence is synthesized)
catttaggacctatggaatttgagatgtcttttaaacccttgggtagaaatggtaatgaggtaggagcccaaggtttcgtggccaggtctaggttacagacagaaatttgaggattatca

SEQ ID NO: 836994 - DNA, 120 bp, Artificial Sequence
  ENSG00000267044_0 (sequence is synthesized)
cagtaatatctccgtgtggactcctcctcctgccaccctgctaggccaggggctctggacccctggtctcatcaagcactgccccattttctaggggaagaagctgaggtctggaggcca

SEQ ID NO: 836995 - DNA, 120 bp, Artificial Sequence
  ENSG00000267044_1 (sequence is synthesized)
tactctgagactgaaggccttattacagctgctgctacatcctatcgcttcacatgtcaattcagtgaggaagagcatttagctaatgatattccaactggcatcctttgcaatcctatt

SEQ ID NO: 836996 - DNA, 65 bp, Artificial Sequence
  ENSG00000267044_2 (sequence is synthesized)
agctaatgatattccaactggcatcctttgcaatcctatttaatgtttcgccttaaaaatcatca

SEQ ID NO: 836997 - DNA, 120 bp, Artificial Sequence
  ENSG00000267042_0 (sequence is synthesized)
agcaggctaccatgacgcccagcggcagcgcgaagcccagggccacctgcgccacggcgctcgcccccttcaccgtctgcgtgaggccctcggggaagatgaggcgacagcgtcgttggc

SEQ ID NO: 836998 - DNA, 120 bp, Artificial Sequence
  ENSG00000267042_1 (sequence is synthesized)
cttcccgctgcccatcctggctgaagagcagcgcaggcagcgccaggagcagtgacagcagccacacgatgacggagaccaagtgtgcgcggccgggagtggagggccgcggcccggctg

SEQ ID NO: 836999 - DNA, 120 bp, Artificial Sequence
  ENSG00000267042_2 (sequence is synthesized)
gcgtggaaggaggccgagtagaggccagagatggtgcggcaggtggcacttcccagactccagccctgaagagcccctgctgccgcgaagggcagagtcagggccagcaagaggtcggcc

SEQ ID NO: 837000 - DNA, 120 bp, Artificial Sequence
  ENSG00000267042_3 (sequence is synthesized)
agggccagctggagcagcgccctctcctggaaggatgcccatatgcaggctttgcctcagacctgagccctggactccaacctccgtctggagatctggattttacgaaaaaaaaaaaaa

SEQ ID NO: 837001 - DNA, 120 bp, Artificial Sequence
  ENSG00000267040_0 (sequence is synthesized)
tcgtggcgccgcgcctccgggtgttggggagtccgggatgatggggaatccggggctcgccctagtcgcggggacaccgccttccaggagctgtccccaggcaaactcacagacatcttc

SEQ ID NO: 837002 - DNA, 120 bp, Artificial Sequence
  ENSG00000267040_1 (sequence is synthesized)
actcacagacatcttcaaagagccttcttggacattctgctttttgctcctcataacaggcttcgatggagtttctctcttattttccaggctgcagtacagtggcgtgatctcggctca

SEQ ID NO: 837003 - DNA, 84 bp, Artificial Sequence
  ENSG00000267040_2 (sequence is synthesized)
actgtatctcttgttcggaggaatatctaatcaagaaaatcatttttactgtttttattttttggtttgttcgtttttttcctg

SEQ ID NO: 837004 - DNA, 90 bp, Artificial Sequence
  ENSG00000267040_3 (sequence is synthesized)
tatctcttgttcggaggaatatctaatcaagaaaatcatttttactgtttttattttttggtttgttcgtttttttcctcctggtgtaca

SEQ ID NO: 837005 - DNA, 120 bp, Artificial Sequence
  ENSG00000267040_4 (sequence is synthesized)
gtctcactgacttcaagaatgaagctgcgcaccctcacggtatacaattttattgccaagcaataaaattggcaagaaaaccaaagttattgttcagtactttgtattgttctactctgt

SEQ ID NO: 837006 - DNA, 120 bp, Artificial Sequence
  ENSG00000267040_5 (sequence is synthesized)
gtactttgtattgttctactctgtgcccaccaaatgtcaaagcactggaaggacagagggacaagagggatggccctttcaggacgggaacccacgtctggctggagagataagaccaat

SEQ ID NO: 837007 - DNA, 120 bp, Artificial Sequence
  ENSG00000267040_6 (sequence is synthesized)
tataatcagcaagacatggccaggagctaaattataaggaagaaactgctactgagggggatcaggaaaggatgcagaagaatgtgctggaaaaacagaggagggtttctcagaaaaagc

SEQ ID NO: 837008 - DNA, 120 bp, Artificial Sequence
  ENSG00000267040_7 (sequence is synthesized)
tgaaaagtctgaggaggtcatcttgggcaaaggaaacggcagctataaatatttgtgaattaacagatatgcttccctgcacaatgaattaccctttttgtctccagtaagcacccagat

SEQ ID NO: 837009 - DNA, 120 bp, Artificial Sequence
  ENSG00000267040_8 (sequence is synthesized)
cttaatgtcagcttttgcaagttttgaaatggtttctggaactccatcctgtagcttgtcttcaatagctgtagctcccaggagctagaatgtatattaaaaaaaaaaaaaaaaggaatt

SEQ ID NO: 837010 - DNA, 120 bp, Artificial Sequence
  ENSG00000267040_9 (sequence is synthesized)
agcaaacaaaccaaaagttttctgtaattacaggttgccaacctgtaaaaagaagggctaattatacatcctggttgctgctctcctggggccaatggccagtgttaacagggaaggctg

SEQ ID NO: 837011 - DNA, 120 bp, Artificial Sequence
  ENSG00000267040_10 (sequence is synthesized)
ccatgtttcacaattactgcaaaccaacacacctaaaaactttttccctaaaggatgaactatttaatttaccaagacaaaaatgcaagtacaaaatcaaggatgttaaaaatacacttt

SEQ ID NO: 837012 - DNA, 120 bp, Artificial Sequence
  ENSG00000267040_11 (sequence is synthesized)
tcttgtgtatttgtggctttatactgacataaaccgtaaaccagttgcaatactagctatttgttgaatattttccacttatctaaaccctacaaaaactatgtattaaatttggaaaac

SEQ ID NO: 837013 - DNA, 120 bp, Artificial Sequence
  ENSG00000267040_12 (sequence is synthesized)
ttttagaaacaatatatttttcttatttcaagattttgcagaatatgaattgtttcggtaattcccccaatgtaataagtattagatgcaggtttgttattgtttaaaaattataataaa

SEQ ID NO: 837014 - DNA, 120 bp, Artificial Sequence
  ENSG00000267040_13 (sequence is synthesized)
ttttaataagtgatatacaaattatggaattaaattagaacttctcctaatgtattttgtcttttggtttctcataatggcaacttctgttctgctcctattttggtgaataaaagaaat

SEQ ID NO: 837015 - DNA, 120 bp, Artificial Sequence
  ENSG00000267040_14 (sequence is synthesized)
aaccttcttccattgtgccagtgtcaaatgctgaagttacaattatctcttaagcatgagatcaaatattcaataaaacttaataaaaatttcaattctgcttagaatatcaaagaaaaa

SEQ ID NO: 837016 - DNA, 120 bp, Artificial Sequence
  ENSG00000267040_15 (sequence is synthesized)
gcacaatctctgctcactacagcctcaacctccaggattcaagtgatctgcccatctcagcaccacccgcagcccccaagtagctgggactacgcaactcgctgccaagccaccaaacaa

SEQ ID NO: 837017 - DNA, 120 bp, Artificial Sequence
  ENSG00000267040_16 (sequence is synthesized)
tttgtgttttttctagagatggggttttgtcatgtttgccaggctcattcttactgttgaactgaataattgattttacctagtaatgatattttttagttcatgaacataaccagattc

SEQ ID NO: 837018 - DNA, 120 bp, Artificial Sequence
  ENSG00000267040_17 (sequence is synthesized)
acacaaacacactatttttctatagcaatctgtaggaatcacatgcagaagaaaaatccttttctccataataaaacaagtgaaagtcaaagtctaatttgaaatgttttcaataataaa

SEQ ID NO: 837019 - DNA, 120 bp, Artificial Sequence
  ENSG00000231107_0 (sequence is synthesized)
gggcctggctctaagtctgaggaaacacactctctctcgaacttgaacttgccagagagaactcaggcactgactgtgacgacgcgggtggggagagactgtgcacctacacgtgtcact

SEQ ID NO: 837020 - DNA, 120 bp, Artificial Sequence
  ENSG00000231107_1 (sequence is synthesized)
tcacaaaggcctccaggggcttatgatcaggcaaaggagacaccaggaaagaggagcagagtggctagggcagtgcactgcagatgcatggacgaaagctcgcagcgacacaggtatggg

SEQ ID NO: 837021 - DNA, 120 bp, Artificial Sequence
  ENSG00000231107_2 (sequence is synthesized)
gtgtctaatcagggatgagtgtgagcagcagaatgaggagcatgctttcccagaggaagagaggaagccactggagagatgaaggatgccatggacaggaggtggtgtctctggagccgc

SEQ ID NO: 837022 - DNA, 120 bp, Artificial Sequence
  ENSG00000231107_3 (sequence is synthesized)
cgagcagcagcctcattgctcagaagatgaagatgctgacgaagacccagacaggaaaaaaggaagaaaaagcatcctgattgttccattagcaaagccacagtcccggagagcaagggg

SEQ ID NO: 837023 - DNA, 120 bp, Artificial Sequence
  ENSG00000231107_4 (sequence is synthesized)
gccgcacccatgggatgcatctgcagcttgtgagcaatgcatgaaagatgaatcacacagcagcaatgccttcagcttccgtgtgctatggctcactcagcaccagctctgcaggctgcc

SEQ ID NO: 837024 - DNA, 120 bp, Artificial Sequence
  ENSG00000231107_5 (sequence is synthesized)
taagccagaagtcagtctctgcctttagacttgctcacttcttttaggaacggagatatcctctgatcccttgtcctacaacctcgattaatatctttccaacagccatctgccaaactc

SEQ ID NO: 837025 - DNA, 120 bp, Artificial Sequence
  ENSG00000231107_6 (sequence is synthesized)
aagaagaccctggaacaacctaattggaaaagtttccatcttatcccttggaaaactatagaaaagtagtgtcacacaaatgtttaatttctgatttctacaatttcagataccagagtt

SEQ ID NO: 837026 - DNA, 120 bp, Artificial Sequence
  ENSG00000231107_7 (sequence is synthesized)
tatctgttaccatgacaactaacagctttataaatgttttctagcctctgctattttctggaacttatctacatttcagtatttgcttaataattttgagctgacactagcaacataatt

SEQ ID NO: 837027 - DNA, 120 bp, Artificial Sequence
  ENSG00000231107_8 (sequence is synthesized)
gtgtctggattgtgtatgtgtatgtcttgtgtgtgttggcagggggtgggtataacctatgtcagtgtttttcaatgtgagcaaattttaataaacttttatatttaatgtgaacattaa

SEQ ID NO: 837028 - DNA, 90 bp, Artificial Sequence
  ENSG00000231107_9 (sequence is synthesized)
ttggtctttcatgtttgtgtccggcccatctttaagagctgaaacactcacggcaaaagtccgcagctccattcttgaagtcagcaagac

SEQ ID NO: 837029 - DNA, 120 bp, Artificial Sequence
  ENSG00000231107_10 (sequence is synthesized)
ctcaggcactgactgtgacgacgcgggtggggagagactgtgcacctacacgtgtcacttcacaaaggcctccagattccaacaagttgacaaacggtgcaaatgtcagagattaaaata

SEQ ID NO: 837030 - DNA, 120 bp, Artificial Sequence
  ENSG00000231107_11 (sequence is synthesized)
tctccttcattgctgataaggctgagttggcgaattcttcttggatccaatacaaaaatgagattgtttccatttctcacctgaattaaacttacagggcagaggtgacctgcttagtga

SEQ ID NO: 837031 - DNA, 120 bp, Artificial Sequence
  ENSG00000231107_12 (sequence is synthesized)
gcaggccacgttcagcaatagcagatcaaagacccgtatgtcttgtgatcttcatgaagtggctggcaaggccagagattctgatcccatcaccacgtgttaatctcctgtcaagagaaa

SEQ ID NO: 837032 - DNA, 120 bp, Artificial Sequence
  ENSG00000231107_13 (sequence is synthesized)
taaggagctactgagagaaaagcagatcctgactcccctctacttgtgagtgactacaaaatcctattttgtggcgtgaggcaggagcctagagagattggagaaaaaagctgctcctct

SEQ ID NO: 837033 - DNA, 120 bp, Artificial Sequence
  ENSG00000231107_14 (sequence is synthesized)
agaatatgaaaataccgtttaaagggaaagagattaattagtgattgagcgcattcagtgctgtctctcctcctatttatctggctgcctgttgtctgcatggcctcctgctactcattg

SEQ ID NO: 837034 - DNA, 120 bp, Artificial Sequence
  ENSG00000263756_0 (sequence is synthesized)
ggtggcctcggttcccctcaccgcccggtccagcataacccgctaagttggggggaggccgttcctcttgggcctccaggcgacaaaccccctgcctggccggcacgaaagcagtctctt

SEQ ID NO: 837035 - DNA, 120 bp, Artificial Sequence
  ENSG00000263756_1 (sequence is synthesized)
tggggcctctcggagagctccgggcagcttggcgcgctctgcagacggcggacagcaagaaaatggcggcggcctcagctgaggcgggcaactaaggagggactgactcttcaaaagacg

SEQ ID NO: 837036 - DNA, 120 bp, Artificial Sequence
  ENSG00000263756_2 (sequence is synthesized)
atggaggtggattgtaatggcggccccggacgactcgaaggctctgtatcggtaggcagaatcctccagctcgttctagaggctgctccactccagcacgaaatggcgccgccgagcccc

SEQ ID NO: 837037 - DNA, 120 bp, Artificial Sequence
  ENSG00000263756_3 (sequence is synthesized)
gcgccagccctttatatataggcggggaggaggagcttcgccgctcatgcgcgccaccctgcttgagcttttccccaccccctccgcgcgcgcgcgctcgctcacgcgggtgaagaagct

SEQ ID NO: 837038 - DNA, 120 bp, Artificial Sequence
  ENSG00000263753_0 (sequence is synthesized)
gagcggggagcaaggcctgcggggaggcgcaggatggacgcgttggctgtcatgatgtaggacctcctgacctagaaccatgcccggcgcagggagaacaacgagcttacggaccgggtg

SEQ ID NO: 837039 - DNA, 120 bp, Artificial Sequence
  ENSG00000263753_1 (sequence is synthesized)
cgggggctgctgtgcgagaaagcctacctgctggcccgggagcgttcgccggcccacctggtggctttccctggacgtttaacggcgactccgcccggcctcccgactttttgatgcagg

SEQ ID NO: 837040 - DNA, 120 bp, Artificial Sequence
  ENSG00000263753_2 (sequence is synthesized)
cgttctcttacatgactttcttcgaggctagattctcgaaagacatcctgaaggtggctttcttaattagctgcctcaccggctggcggagcagttcgtagtcgcctacatcgagaggga

SEQ ID NO: 837041 - DNA, 120 bp, Artificial Sequence
  ENSG00000263753_3 (sequence is synthesized)
gagccccgtcctggctcagtactggggcttcgtggacgcgctgtagcgggtcttcgccgtcgtgggtaggaaacagtcgggccggatccccggtgtctggggagcggctgccggccgggc

SEQ ID NO: 837042 - DNA, 120 bp, Artificial Sequence
  ENSG00000263753_4 (sequence is synthesized)
ccgcgcgagccgcttcactcctacaagcccggctcactagttccaagctgctggactttgaccctcgctgggaagcttgatcgccgcctgttctcgccaatctctatgcctttgcactgc

SEQ ID NO: 837043 - DNA, 120 bp, Artificial Sequence
  ENSG00000263753_5 (sequence is synthesized)
ttttggccacctttgagaatcagggtcaaacttggaagggcctgcatttgtcacacttcctcggacactaatttggatagttcaggcccagagacggcttcccgggttagtgtgcctgac

SEQ ID NO: 837044 - DNA, 120 bp, Artificial Sequence
  ENSG00000263753_6 (sequence is synthesized)
aacactgaagaaaaattgtgacattttccttccccagaattacttcgttttatacatttcacttctcttctgaaatcacagcaatgccagtttgcgccttttggtctgaggaacgcaggc

SEQ ID NO: 837045 - DNA, 120 bp, Artificial Sequence
  ENSG00000263753_7 (sequence is synthesized)
cctggccactaccaggaaaaaatcctttgcacatggcctgctatcaacaatcctctacaatgattctcagcatcacctagggagcttatgtaaaatctcaaattcctgggccctatcccc

SEQ ID NO: 837046 - DNA, 120 bp, Artificial Sequence
  ENSG00000263753_8 (sequence is synthesized)
agagtttcttatcaagtaagtctgcattgggatctgaggatttgcatctctaacaaaaattcctaggcgatgctcacactgttggtgtaaggcttcaagcaaagtcaggtgctatgtaga

SEQ ID NO: 837047 - DNA, 120 bp, Artificial Sequence
  ENSG00000263753_9 (sequence is synthesized)
gtggacactcaaatatccctaggaagaagtctatgtggtgagaaactgagaccttcaacaggctgcatatacttgccacgtgaggacatcattttggaagaagatcctcaagccccagtc

SEQ ID NO: 837048 - DNA, 120 bp, Artificial Sequence
  ENSG00000263753_10 (sequence is synthesized)
aagccttcagatgatagtggtcccaggccaacatcctgaccaaaaccttatgaaagacccttacgccagacgcagctagctaagctgttcctgaattactgatataaaaactgtgaaatc

SEQ ID NO: 837049 - DNA, 120 bp, Artificial Sequence
  ENSG00000263753_11 (sequence is synthesized)
tgtaaggtttccttgatggagaactatcaaagcagtcaaagctatcaaaataaaaaagaattctgattgggtgcagtggctcacacctgtcattccagcactttgagaggccaaggtggg

SEQ ID NO: 837050 - DNA, 73 bp, Artificial Sequence
  ENSG00000263753_12 (sequence is synthesized)
ttgaacctgggaggcagaagttgcagtgaaacaagttggtgccaatgcattccagcctggatgatgctctgcc

SEQ ID NO: 837051 - DNA, 120 bp, Artificial Sequence
  ENSG00000263753_13 (sequence is synthesized)
agcgtcttttaagttatacactggacctatcctttcctcactgacagacattttaaaaattttttggtaaggcctagttcatataaaatgtaatccaagccaaaagttaacaagaataag

SEQ ID NO: 837052 - DNA, 120 bp, Artificial Sequence
  ENSG00000263753_14 (sequence is synthesized)
gggaggaaaggggactccaatagcagagaaaggtatttacctgggatatacactgcaagaaaatcaaagctataagaaacgtccatgaatagtagccataaggcatcagagtgataaaat

SEQ ID NO: 837053 - DNA, 120 bp, Artificial Sequence
  ENSG00000263753_15 (sequence is synthesized)
tcctgtccctaggagggaatattggagtttgccagagaaacagaatgagagagacagagaggtttattgtaggaattggctcatatgattacggaggctgagaagacccacgatctgcca

SEQ ID NO: 837054 - DNA, 120 bp, Artificial Sequence
  ENSG00000263753_16 (sequence is synthesized)
tctgcaagctggagaatcaggaaagctggaggtgtaattcagtcaagtccaatggccagagaagcaagtgtactgatatccaagagcaggagaaaatagatgtcccagaacaagcagaga

SEQ ID NO: 837055 - DNA, 120 bp, Artificial Sequence
  ENSG00000263753_17 (sequence is synthesized)
ggctgattttgtccttcctctgcctttttgtttcatatggggcactgaatggactgatgcccatccacattagtgagggtggatcttctttactcagtctaccagtagaaatgtcaatga

SEQ ID NO: 837056 - DNA, 120 bp, Artificial Sequence
  ENSG00000263753_18 (sequence is synthesized)
acacacgtggaaataatgttttaccaggtatctgggcatcccttggttcactcaagttgacacaaaattaaccatcacagaaggagactggccttactctgaaattaggaaactaaagaa

SEQ ID NO: 837057 - DNA, 120 bp, Artificial Sequence
  ENSG00000263753_19 (sequence is synthesized)
gtgaccagaatggagactaggtagagacaactagttctctaccaaacatgtacagttattcgttggtatctgaaggggattggttccaggaactctcagggataccaaaatctgcaggtg

SEQ ID NO: 837058 - DNA, 120 bp, Artificial Sequence
  ENSG00000263753_20 (sequence is synthesized)
ctcaagtcatttatataaaatattacagtatttgcatataacctttgcacatcttccatatactttaaatcatctctacattacttataataatgaatgtgtaaatgctatgaaaatagt

SEQ ID NO: 837059 - DNA, 120 bp, Artificial Sequence
  ENSG00000263753_21 (sequence is synthesized)
tactacactattgtttatttgtatttttattgaattgttttggggtggggggcagctgtatctttcttagtaatagaacccctggttttagctgggcacatgactgccctcaataaagat

SEQ ID NO: 837060 - DNA, 120 bp, Artificial Sequence
  ENSG00000263753_22 (sequence is synthesized)
taaagtaccccagccttccttgagattgtggccatgtgactgaactttagacagtgagatataagcagatatcttctgtggcagtgttaggaaactattaaagacagtaagaacattgcc

SEQ ID NO: 837061 - DNA, 120 bp, Artificial Sequence
  ENSG00000263753_23 (sequence is synthesized)
ctttgccttctttttcctttcttcatttttctgcctggaatgcaaatgtgatggctaacaccctagcagccattttagattatgaagatgagagtcactccccaggaagggtggacctga

SEQ ID NO: 837062 - DNA, 120 bp, Artificial Sequence
  ENSG00000263753_24 (sequence is synthesized)
aagctggattctagatgtggaatgacaataccagccctggactacctacctgtaggctgtgtgtgtgtgtgtgtgattgacagagagagagagagatagataccacaagtaacacaaagc

SEQ ID NO: 837063 - DNA, 120 bp, Artificial Sequence
  ENSG00000263753_25 (sequence is synthesized)
atcatacctgggactgggaaggttaatgtttaaacattttaaatgtggcattggtttgttgaagacagtcaagcagtaggtgctgcaggctttgttgaggctagaaagctgttggtcttt

SEQ ID NO: 837064 - DNA, 120 bp, Artificial Sequence
  ENSG00000263753_26 (sequence is synthesized)
attaggtgatggcaaaacaatggatcacattttcatgtgctgtgtcttgggaggcaaatgatgagaatgtaggattggggaaaatggtaaggaaaatccaaaatgttcatgttttctaac

SEQ ID NO: 837065 - DNA, 120 bp, Artificial Sequence
  ENSG00000263753_27 (sequence is synthesized)
cccttcttgccaatcttaaaagaaggacaaacaggctagattaagcaagtctacagttacaattggaaggaaacacagccgtactaaggaagtactctgtctgtggcctgcagtctagtt

SEQ ID NO: 837066 - DNA, 120 bp, Artificial Sequence
  ENSG00000263753_28 (sequence is synthesized)
tgactaggtcctgtatttgagctttgaaagagtaaagaatacaagtgctcgtatacccctgaagtagttaccagcagtgactgcaaggaggtaatcttatgggatgaaactataactctg

SEQ ID NO: 837067 - DNA, 120 bp, Artificial Sequence
  ENSG00000263753_29 (sequence is synthesized)
tattaaccatcatatatagcatatatgtgtatatgtatgtgtgtgtgtgtatatgtgtatataaatatatgtgtgtgtatatacacacatgtacacaccctacaacccagtgatttcaaa

SEQ ID NO: 837068 - DNA, 120 bp, Artificial Sequence
  ENSG00000263753_30 (sequence is synthesized)
aaattaaacatttgtttagctcatgaatctgtgggttgggtgaacatttctattggtcttggctgggctcacctgtacccagtcagctgcagggtctagctcttcttatcttggctggga

SEQ ID NO: 837069 - DNA, 120 bp, Artificial Sequence
  ENSG00000263753_31 (sequence is synthesized)
tctcacacatgtctaggatcagctgctttactagtctaggattgtcttggctgagacaggtggactactcagttctcctccactgccttatccttcagctggccagcccagaaatgttgc

SEQ ID NO: 837070 - DNA, 120 bp, Artificial Sequence
  ENSG00000263753_32 (sequence is synthesized)
catgtttacagcataagagcaagcaagaaagaataatatgcaaccacttttccaagcctaaggtgaaagggcgggcagaacctgtggtgttaggaggcaactcataccagcccatgggtc

SEQ ID NO: 837071 - DNA, 120 bp, Artificial Sequence
  ENSG00000263753_33 (sequence is synthesized)
taccgtttaattttcagaaatttggcaagctgattgttaacacagctgttgtttaatttatgtacttgtaattaaataatttacattaaaacaaagataataggtactcaaaactcatga

SEQ ID NO: 837072 - DNA, 120 bp, Artificial Sequence
  ENSG00000263753_34 (sequence is synthesized)
ctttctagttattttattatattttactattgtctgtcctcttaaggtgtttgtttctagtgtatctggtggaaacactacttcatgtttcagttgtgtcaaaccagtagcttgaaatca

SEQ ID NO: 837073 - DNA, 120 bp, Artificial Sequence
  ENSG00000263753_35 (sequence is synthesized)
gccactgttggagtgtttataccacagaaattgatagaagctacaaatgaagtgttgcttgttgatttgttttgttaattgtctggcttaagaaagtggtagagaaaacattaatgcaga

SEQ ID NO: 837074 - DNA, 120 bp, Artificial Sequence
  ENSG00000263753_36 (sequence is synthesized)
ttaaatttaaaagcgtgttgtgtctgcggccgttacattgcaaatacaaaaaataattgaggaaatgttctttgaaaactattatctaattctgcaaagttgtcacctcatttacaaaca

SEQ ID NO: 837075 - DNA, 120 bp, Artificial Sequence
  ENSG00000263753_37 (sequence is synthesized)
aacttgaatgtatatctttaccgtatgcctagtacagtagtgcttggaagaaacagattagtaagacaaaatatatgtcttcaagaacacttacgttctgagaaagaattctgaatgcag

SEQ ID NO: 837076 - DNA, 120 bp, Artificial Sequence
  ENSG00000263753_38 (sequence is synthesized)
attctaatgtctggtaaaatgctttacagtgtaaagaatgcatatatgattcttattttatggcattttaaactttccaccccacggttttaaagtgttaatatatgttaaaaatatatg

SEQ ID NO: 837077 - DNA, 120 bp, Artificial Sequence
  ENSG00000263753_39 (sequence is synthesized)
caatttataaaggagaaggaaagcccagcttgatttttgctgccaaagatggtatatttaaaattaaacgtaactaatggcaaaaaataatgggaatggtgcagtctttgagctgtatcc

SEQ ID NO: 837078 - DNA, 120 bp, Artificial Sequence
  ENSG00000263753_40 (sequence is synthesized)
agttggcattattctcttggactaaaaggaatagtattaacttcctcactttgggtaagccactttagatttttgggctgcagttttctcaggtaattagagactttatattatgaaagt

SEQ ID NO: 837079 - DNA, 120 bp, Artificial Sequence
  ENSG00000263753_41 (sequence is synthesized)
ttggttcacaattctttgagtctcttttgggaacaaagaaggtaagaggaggatatgtgccctcctctcaatcaaggggtttcttgaaaccctctaaggagaaaaatctgaaactgcctt

SEQ ID NO: 837080 - DNA, 120 bp, Artificial Sequence
  ENSG00000263753_42 (sequence is synthesized)
tcctaaaacgttcatgggtttgtcattctgatgatcaatatcgtcccactgaagtatctttttgaattcctagttaggaatctttatgttaagataaactgatcactctctccttcgtgg

SEQ ID NO: 837081 - DNA, 120 bp, Artificial Sequence
  ENSG00000263753_43 (sequence is synthesized)
acagtttatctacctaaagatgataggggaaaacactgtttttgaaagacgaaataaagacatgttgtagcagttattttattgccagttagtattacaaaagttcctaaggaactcccc

SEQ ID NO: 837082 - DNA, 120 bp, Artificial Sequence
  ENSG00000263753_44 (sequence is synthesized)
attaacttggcctcatatgaactacgcttgagtcccgttttaaattgagtcttgatcgtatttactgacagtttcaaagcagcgtttttttttttcctccatagtaaaaaacctacagga

SEQ ID NO: 837083 - DNA, 120 bp, Artificial Sequence
  ENSG00000263753_45 (sequence is synthesized)
taccaccaccaaaggaaaaaacaagtttttttcagtaaacctcacaagagcatacatttgatagaatacacggattttctaatgaaagctcgccgtcaccattttataagtcagaacatg

SEQ ID NO: 837084 - DNA, 120 bp, Artificial Sequence
  ENSG00000263753_46 (sequence is synthesized)
aaagtcaaaatatctcatacagatgtcttttttttttgagaaggtacacaaggcttgcttgtagagatggagttacatggagggacagaaggtcactggtcagtgattttaggtttttat

SEQ ID NO: 837085 - DNA, 120 bp, Artificial Sequence
  ENSG00000263753_47 (sequence is synthesized)
acttctgaaaacaggtaattacagattctgatcagtttatcattttctttagtcttttattttctgctgaatgctctcaagggaacggatccatacctgtttatcaggctcacctggaag

SEQ ID NO: 837086 - DNA, 120 bp, Artificial Sequence
  ENSG00000263753_48 (sequence is synthesized)
tttactagattgggtttcttttatgtgtgggcttttaatgcttggtatctctggtcttcctaatatgtaatgcttagcataataattttagccattattcatttttgtagtaggcttcac

SEQ ID NO: 837087 - DNA, 120 bp, Artificial Sequence
  ENSG00000263753_49 (sequence is synthesized)
tagcttcctgcttctcaaatcccttgaaaagatgagatttttttttcgtggagttcacgtctagtaagttggtcttgattttttttttctttcagaaccttctggatttcagctttggca

SEQ ID NO: 837088 - DNA, 120 bp, Artificial Sequence
  ENSG00000263753_50 (sequence is synthesized)
agcttcctctgtttctgagacacctccatcacctgggttacaatcccatccatgattttccccatctccaggcatttttcatggaaagctcctcatgctttttaattccagtttatccat

SEQ ID NO: 837089 - DNA, 120 bp, Artificial Sequence
  ENSG00000263753_51 (sequence is synthesized)
ttgtgtggctttaacctccacatccaggtctttctggctaaactgcagtatatccacaatggggccaatggacacataagggaggccctatcacaggaacacgaacacccggagtcgcta

SEQ ID NO: 837090 - DNA, 120 bp, Artificial Sequence
  ENSG00000263753_52 (sequence is synthesized)
gaaatcagattccaccggctttgcttcaggccgacttcctaaggaaggcatggtagcatcacagatgctgtttgtctcagtttcctgagaagccagtttcttagagctgtcattcaagag

SEQ ID NO: 837091 - DNA, 120 bp, Artificial Sequence
  ENSG00000263753_53 (sequence is synthesized)
tgggtcaaatttgagatataaaaacctttctcaaggtagactctttggcccctatgcctagtatgtcagctgggcctctgaagctctcctctttgaggtcctggcaggctctggcccctg

SEQ ID NO: 837092 - DNA, 120 bp, Artificial Sequence
  ENSG00000263753_54 (sequence is synthesized)
ttgagaaggggaagcagtcatgtgaactcatgtgctggaagaatccactctaccccttccctggcttctctgctgcaatttttgtctttaaacgtattttcagtttccttgatggagaac

SEQ ID NO: 837093 - DNA, 120 bp, Artificial Sequence
  ENSG00000263753_55 (sequence is synthesized)
tttaaacgtattttcaggtgattccagtttgcatacataattgagaaatataagatttggtccccagtagagagccaggtgaacttaagaaggagtccatctaagaaaattgcacaatta

SEQ ID NO: 837094 - DNA, 120 bp, Artificial Sequence
  ENSG00000263753_56 (sequence is synthesized)
tctagtttcacttgggtttagcttttatggcttacttgatttagtaatcaaatgattttcaaatgattttgatcaggtgactcttcgtaaactagagaatgaacttgagagccgaattag

SEQ ID NO: 837095 - DNA, 120 bp, Artificial Sequence
  ENSG00000263753_57 (sequence is synthesized)
cacagtttaaaaataatcatttagtttttgttctctattgtgtaaattattgaggtttgactgtcttggctaaactaaggctcatctaatatctttatttttgatatcctaatttcttgc

SEQ ID NO: 837096 - DNA, 120 bp, Artificial Sequence
  ENSG00000263753_58 (sequence is synthesized)
caattaattgaaggtaacatactagcagaccagataactacttatgcaaacctcagataaccactaatttaaacaaaattaaatcctttgccttccccagatcctttgcacatggcctgc

SEQ ID NO: 837097 - DNA, 120 bp, Artificial Sequence
  ENSG00000263753_59 (sequence is synthesized)
tccacatccttttctttggtcatttactttaggaaacttaattgtaagctttttctgtgcctctttgaaatgcctgtaaatctttccaaaaactaaattaggcttttgccaattttacaa

SEQ ID NO: 837098 - DNA, 120 bp, Artificial Sequence
  ENSG00000263753_60 (sequence is synthesized)
agcctaactttattaggcaccttgctccattacaaagctatcttctgtcataaagatacaagaaatttatttttcccttggacaaaagcaactaactagcagagggtcaccaaaattacc

SEQ ID NO: 837099 - DNA, 120 bp, Artificial Sequence
  ENSG00000263753_61 (sequence is synthesized)
aggtgaatttagggtgaactctgtgtgacaaatggtgctgccaagttctcttgagtactatagaaagtgcatgacatgaattttttacttcatgatggtgcaaaaccattgcttttcact

SEQ ID NO: 837100 - DNA, 120 bp, Artificial Sequence
  ENSG00000263753_62 (sequence is synthesized)
ttcagtataatattcaagaaattacatattgaatataagatattcaatatcttattctttattataggctttgtgttatataattttgcccaactaactgtaggctaatgtaagtgttct

SEQ ID NO: 837101 - DNA, 120 bp, Artificial Sequence
  ENSG00000263753_63 (sequence is synthesized)
gaacatgttgaaggtaggttagactaagctctaatgttcagtagggtaggtgtattaagtgcattttcaacttacgaaatttaagctgatatccaaagaatgagtaagaatgaggtaaag

SEQ ID NO: 837102 - DNA, 120 bp, Artificial Sequence
  ENSG00000263753_64 (sequence is synthesized)
gagcaagaaaacattgcttcaggcaaaggaatagtatgtgcaaaagccctggggtttaagaatatgatgtttttagagaactgcaaataattcagtatggttggagcagagggatgtgga

SEQ ID NO: 837103 - DNA, 120 bp, Artificial Sequence
  ENSG00000263753_65 (sequence is synthesized)
atgattattgattctgttggagagtagacagaggccagattgctatgcttagatacaatttcaaccacctacaaatccatctaattacctacatgaccatcatcatctggtcatgtttct

SEQ ID NO: 837104 - DNA, 120 bp, Artificial Sequence
  ENSG00000263753_66 (sequence is synthesized)
ccattttatcattatgtataccttaaagacttgctcacattacttaaaattgagataggttaggcatctatccaatctcccatgccagtaattctacagaaacagattaggttagctaga

SEQ ID NO: 837105 - DNA, 120 bp, Artificial Sequence
  ENSG00000263753_67 (sequence is synthesized)
taagcatgtttacaattaaatttatgctgtatccttctaatcaccactttctcatcaaaatgctcacaaatcatctgcatcattgtccattctttaaaaatgtataaacccatctctact

SEQ ID NO: 837106 - DNA, 86 bp, Artificial Sequence
  ENSG00000263753_68 (sequence is synthesized)
acgcctgtaatcccagctgtcggagacggaggttgcagtcagccgagattgcaccattgctctctagcctgggcaacaagagcaaa

SEQ ID NO: 837107 - DNA, 120 bp, Artificial Sequence
  ENSG00000263753_69 (sequence is synthesized)
actccatctcaaaaaaaaaaaaaaaagtataaatttgtatcaagcatgctggcttgagggtttaaggaatttcttttttttatttctgacatacttctgtggagtgtgttttgctttcat

SEQ ID NO: 837108 - DNA, 120 bp, Artificial Sequence
  ENSG00000263753_70 (sequence is synthesized)
acatacttctgtggagtgtgttttgctttcatttttgttgtattgtttgtaatttacactattaacagtttctattagtgctgtggaattaattcctcttgtgctgaagatagaaatata

SEQ ID NO: 837109 - DNA, 120 bp, Artificial Sequence
  ENSG00000263753_71 (sequence is synthesized)
tcgcagctggtatggactggtactgccccaaataagaggaacctaagagcttggctccaagaccccccaccatcccggtgggtttgcttggcctttaggatgtgtgactacagcttttgg

SEQ ID NO: 837110 - DNA, 120 bp, Artificial Sequence
  ENSG00000263753_72 (sequence is synthesized)
gtaggtacagggcaatcaagattgaggaagaacacttcagcaaagcaaccattatttgtccacaaaaacagtgaaaaacagtgatataaaattaacaaaccaaatataaatctaacgcca

SEQ ID NO: 837111 - DNA, 120 bp, Artificial Sequence
  ENSG00000263753_73 (sequence is synthesized)
gtgcagtgttcttggtcaaccactcaccaattttctgcgtctatctgaagtacttttaaagttattaaaactgctcttttgaccataagtcacatagaattgtgattaggaaatcaattt

SEQ ID NO: 837112 - DNA, 120 bp, Artificial Sequence
  ENSG00000263753_74 (sequence is synthesized)
acttattactctgtgcagggcacttgctagggtggtgagtgtaaaggaactaaaaatggaagtctctcacttctaaactggacacaggagttctcaaattaaaataataaaaaaaaaaaa

SEQ ID NO: 837113 - DNA, 120 bp, Artificial Sequence
  ENSG00000263753_75 (sequence is synthesized)
gcagtcagattcctccgccgaccgcggccctctctcctcgggctttgccttcgctctctagcttttcttctttcactcccgctcgccgactccagcccgctgggctcacgctctgccgga

SEQ ID NO: 837114 - DNA, 120 bp, Artificial Sequence
  ENSG00000263753_76 (sequence is synthesized)
caccaatcccggcggccctgcccgacggagctcaaggctaggcctggccttgtccgcggagtccgcccctcgccgccaccgggatccgcccccgcgccgacacgcacttccggcagcgcc

SEQ ID NO: 837115 - DNA, 120 bp, Artificial Sequence
  ENSG00000263753_77 (sequence is synthesized)
ctacctctttattgttttactttcctcttactgacaatgagaatatcaattaacattcatgtcagaactacacttgctcatgaactacaactgtagattggctatggataagaaaattta

SEQ ID NO: 837116 - DNA, 120 bp, Artificial Sequence
  ENSG00000263753_78 (sequence is synthesized)
gtgaaagtcaaataaagcattcagtaagagttggctatatagaacttacagaaaagattattgcatattttcttatttgtcaatgtgtgctacacatattttcagtaaaatttataacat

SEQ ID NO: 837117 - DNA, 120 bp, Artificial Sequence
  ENSG00000254290_0 (sequence is synthesized)
agggtcgagctgttcctgatgtttatcggagactgggatcaaagctatccaggtcataaatctctctctgtggctgttgggccccagggcagctgaagagggttgacagccctttggacc

SEQ ID NO: 837118 - DNA, 120 bp, Artificial Sequence
  ENSG00000254290_1 (sequence is synthesized)
gctctgccaagaagctgtcctctgagaagccatggctgggccgttccattctggggagctgctgaaaagagctgggaggccgagaagaacttgcgtgtgctgggggagaggaagcctggc

SEQ ID NO: 837119 - DNA, 120 bp, Artificial Sequence
  ENSG00000254290_2 (sequence is synthesized)
cttgagggaggggtgcagggcttcccaggaatcaacaatgcccaagaaggaagggattgtagaaatagcttaaccctttcatttaccaacgtggaaattgaagcccagggaagggaaggg

SEQ ID NO: 837120 - DNA, 120 bp, Artificial Sequence
  ENSG00000254290_3 (sequence is synthesized)
cttttctcttgttgagtgcaaatggagaacagctgctcacgctcgtcgtctgacatcagctatttctcaggatgaccctgcgagacaggccagggtcattagacccaatttggttctcag

SEQ ID NO: 837121 - DNA, 120 bp, Artificial Sequence
  ENSG00000254290_4 (sequence is synthesized)
caaatatgtgtttattcctgcatgcgtgggccacaggctggtttcttgggtgcaatgaatagctgcaggtttattagggtgtctttttagatggatgtatgtttcccgatgtctatagaa

SEQ ID NO: 837122 - DNA, 120 bp, Artificial Sequence
  ENSG00000254290_5 (sequence is synthesized)
cactccggaccccggagagtgaagactctgcctgtcggacttgctttgagaagatccttctccacctccccatggcagaagttgcttcacagaggggaacagttttatggatgtggctga

SEQ ID NO: 837123 - DNA, 120 bp, Artificial Sequence
  ENSG00000254290_6 (sequence is synthesized)
gaccttaaacttgaggcaacccatctgaggtggcatccagaggagactggctggcccctccttcaccttggatgtagtgctgtttctaggatctcttttcaatcagcaaaacaggggatg

SEQ ID NO: 837124 - DNA, 120 bp, Artificial Sequence
  ENSG00000254290_7 (sequence is synthesized)
ttccaagagggtgtggattccctgccatcccacatggtcaagtggaggggacgggaaaaagctatgaagggtttgtgaccacacagactctcctggccccctgtccttttggaaagaaga

SEQ ID NO: 837125 - DNA, 120 bp, Artificial Sequence
  ENSG00000254290_8 (sequence is synthesized)
cagggatgaaatataatcaagcaattaaccacccccatcatcaccaagaacaacagtatcaacaagaagaacagggacaacaaaacccacggatgaaacattcctttctcagctcagatc

SEQ ID NO: 837126 - DNA, 120 bp, Artificial Sequence
  ENSG00000254290_9 (sequence is synthesized)
ttatctggtgcgttctctctctgctctgtcttggtgtgtggtttagagaaacatggacaacgctgtttggaagaacaggtgagcgagggtggggaatttcagaggcctgggcccaccgcc

SEQ ID NO: 837127 - DNA, 120 bp, Artificial Sequence
  ENSG00000254290_10 (sequence is synthesized)
tccaccccttccccagtttaacctttgacaggatcttcacctctctctgatcagcattgcttcttgttcaaaggcctcagccacccagctgtgtccctttccccagaaagcaagggcaga

SEQ ID NO: 837128 - DNA, 120 bp, Artificial Sequence
  ENSG00000254290_11 (sequence is synthesized)
tggcagtgggtctgttgatgagagaactttaagggcccaatcagtccctgggcaccccctcctgggctcgttttctccaggaggctgcattctgatccataaaccttctcctcggggttt

SEQ ID NO: 837129 - DNA, 120 bp, Artificial Sequence
  ENSG00000254290_12 (sequence is synthesized)
tttccttgtggctgtgaaatgctttatgagtacttccataggaggatggacagggagtcggggagataaactcagccacaaggccccagggcctcaggaaacttgcacccaaccctctca

SEQ ID NO: 837130 - DNA, 120 bp, Artificial Sequence
  ENSG00000254290_13 (sequence is synthesized)
ttttacagaagaaaactgtgcctggaaggttgaagggtttgttcccagtcacacaaccagggatccttaggacagccagaccaggaaaccatttccaaactgccaagccatggcagagta

SEQ ID NO: 837131 - DNA, 120 bp, Artificial Sequence
  ENSG00000254290_14 (sequence is synthesized)
tcaagacctcaggaaccatcgagacaccatggaagcattgggaaaagcctccttagcttttgaagctcctcattgttcttgagtgtgcatggagcccatgactgcggggttttgtagaca

SEQ ID NO: 837132 - DNA, 120 bp, Artificial Sequence
  ENSG00000254290_15 (sequence is synthesized)
cctcagggattacatgactggtacccctgacaaagtcaaggctgctggacaaaatgagtccgaggatttcaggggcagctgggcgcaggagctggtgggctgttgggagtgcccctttac

SEQ ID NO: 837133 - DNA, 120 bp, Artificial Sequence
  ENSG00000254290_16 (sequence is synthesized)
tgggcaggcttccttcctcctggtgatggggggttcctcagcacaaaagtgaaggggtggaggggctggaggagcaggaatctctcttgttgataggtatgaggccttgaagtccttttc

SEQ ID NO: 837134 - DNA, 120 bp, Artificial Sequence
  ENSG00000254290_17 (sequence is synthesized)
tttgtcccaggattcatggacgcttcggggctgatctttgagttttcaagcatggggtgcagagacgtttaggtaaactcttaccgtcctctctcttcgtcagggcttcccaggaatcaa

SEQ ID NO: 837135 - DNA, 120 bp, Artificial Sequence
  ENSG00000254290_18 (sequence is synthesized)
caatgcccaagaaggaagggattgtagaaatagcttaaccctttcatttaccaacgtggaaattgaagcccagggaagggaagggaccggtcgtggaagggagagccatcagcagaaaga

SEQ ID NO: 837136 - DNA, 120 bp, Artificial Sequence
  ENSG00000254290_19 (sequence is synthesized)
gaccctgagatcttcgcctgggattcccaggaagtccagcccgagctgattcacagaacaaatgcatgcaaaccttgctatcaataaattacacatgcacttacgtaaaacacataaaaa

SEQ ID NO: 837137 - DNA, 120 bp, Artificial Sequence
  ENSG00000254291_0 (sequence is synthesized)
aggggaagctttggtccagcctggcagcctgaggtccagtcctactctgcctaccccgccgttaggcgagtccagccctgcaggagtgccctaagcactaaagagatttccccagcttgc

SEQ ID NO: 837138 - DNA, 120 bp, Artificial Sequence
  ENSG00000254291_1 (sequence is synthesized)
ccggcagcttgcttcccgcaaagctccttccagggctcagggcttccttcggggtttcctgctacgggagatttggagacagatgtgccacatgaaggagaggatggccctctgcaagcc

SEQ ID NO: 837139 - DNA, 120 bp, Artificial Sequence
  ENSG00000254291_2 (sequence is synthesized)
aaggaggcaggcctggaacggacccttccctctggccctcggaagaacccagcctgctgacaccttgatttcagacttctggcctccggagctgtgaggcaataaatgcctgttgtttca

SEQ ID NO: 837140 - DNA, 120 bp, Artificial Sequence
  ENSG00000254292_0 (sequence is synthesized)
agtgaggctccctgctcagctccctgggctgctaatgcactggatgctgtgtgaaccagcctccactctccctgcccatcacccctggaaagccagcctctatctcctgtagatccagtc

SEQ ID NO: 837141 - DNA, 120 bp, Artificial Sequence
  ENSG00000254292_1 (sequence is synthesized)
caggttcagtggcagtgggtcggggacagatttcatgtttaaaataaggaggatggatgctgaggatgttggggtttattgctgccagcaaagtacacattattctcccacaatggtaca

SEQ ID NO: 837142 - DNA, 120 bp, Artificial Sequence
  ENSG00000254293_0 (sequence is synthesized)
gggaccttgcttgtatggatgaaaatgaatttaataactgccaacagttggtttgagtttgaggctgggttccactgtgacttcttgttctttgagccgtgctctggggcaaaactcagc

SEQ ID NO: 837143 - DNA, 120 bp, Artificial Sequence
  ENSG00000254293_1 (sequence is synthesized)
tgcagcgtggaaatagtaaggcagaaagaggctgaaatccagaagggtgctggtaagattgaccatggtaatgaagaggatcagcacagtttaccgtgtttgcagtgttcttactccact

SEQ ID NO: 837144 - DNA, 120 bp, Artificial Sequence
  ENSG00000254293_2 (sequence is synthesized)
cccgtctcctttctgatgccaaggctcttctatccatccttgactttttaacaaaggacttccctcattaaactgaagagacaaaggagactcctgagggatttagaaattcaatggaaa

SEQ ID NO: 837145 - DNA, 120 bp, Artificial Sequence
  ENSG00000254293_3 (sequence is synthesized)
aagcaaaaaaaacaaaacaaaaaaactctcagagcacttaacttctctcccaaaggaccagagagcctgccaattccccagcaatgccagagctaagcattttcccagtgtcaacattaa

SEQ ID NO: 837146 - DNA, 120 bp, Artificial Sequence
  ENSG00000254293_4 (sequence is synthesized)
atcccttttttgtttttctcttttaaagtgtgtttacaattgaccattatgggaaagatgatggatgtggcctggccccgtttaaaataataaggctaataatgatacagttgtttcgtg

SEQ ID NO: 837147 - DNA, 120 bp, Artificial Sequence
  ENSG00000254293_5 (sequence is synthesized)
catacggactctttctgaaagcctgtgagcagaaggaaagggttgaggagcccagtgttttcaacttaagtgtagccagctgccgatcatccccacgacccattgctagctataacactt

SEQ ID NO: 837148 - DNA, 120 bp, Artificial Sequence
  ENSG00000254293_6 (sequence is synthesized)
atgctccggcagacttcggaacctcttggctcctgcatgctcttttggagaaaagagcacagaagttttgaatgaatctccagaccctgtccctgagatagcaaggcttagatggacaag

SEQ ID NO: 837149 - DNA, 120 bp, Artificial Sequence
  ENSG00000254293_7 (sequence is synthesized)
tgatccttaagacagagatatggctcagtcctgtattccaggagaaagtagactcaatgtttgctcatgaaatgtccctgcgtccagctctgctggtcgtgtccctggcgaagactcccc

SEQ ID NO: 837150 - DNA, 120 bp, Artificial Sequence
  ENSG00000254293_8 (sequence is synthesized)
acctatgtagccagcagcatctgtccttggatacaccatcccggctctagcttttccccagtaatcagctggctttcgctggcaggaggacccaggagataggtaaagtgggttgattca

SEQ ID NO: 837151 - DNA, 120 bp, Artificial Sequence
  ENSG00000254293_9 (sequence is synthesized)
gtccttgctgtggaattcagattagactgggaaaggaaaaaattctcctgaccagggatgcaacagtcaggcagtgagaatgaccttcgtgacaatgagccgagataagcctcttggcat

SEQ ID NO: 837152 - DNA, 120 bp, Artificial Sequence
  ENSG00000254293_10 (sequence is synthesized)
gaaacagctcggcaggcaatgatcagtggtctagggattggctacaagtggcccgacccgacccggggagcaaccgagcaccaggaaactaaccagcatgtgaggaacaaaaaaaatctc

SEQ ID NO: 837153 - DNA, 120 bp, Artificial Sequence
  ENSG00000254293_11 (sequence is synthesized)
ccaatatgccgaaaacagcctggtgcacagcaaaacttcgttaacaggcggcctggagctgagtgctgtgaagctgaccagaatgaaattgccctgaaagcaacgggactgggtaaaaga

SEQ ID NO: 837154 - DNA, 120 bp, Artificial Sequence
  ENSG00000254293_12 (sequence is synthesized)
aaccggagtaaaatccacctgcctgctagtgtgcaactaaccactgcgagggatgggagaagggagggtctcggagggccgcagggtggaccgggaggagacaggactcctggtgttctg

SEQ ID NO: 837155 - DNA, 120 bp, Artificial Sequence
  ENSG00000254293_13 (sequence is synthesized)
gagaacctgaccgagctgcttcggggatgggggagggaggtgtccagtgccttttgatttacaatcgctgcgccccaagcgatcccataaatttgggggccgttttcaccaaaaccgtga

SEQ ID NO: 837156 - DNA, 120 bp, Artificial Sequence
  ENSG00000254293_14 (sequence is synthesized)
agattcactcaattagaacacccagtttgagacataatgggttttggcgagctccatagactgataggtttttatacacatgcacagaaagatttgatttcctctgcggaatttatggca

SEQ ID NO: 837157 - DNA, 120 bp, Artificial Sequence
  ENSG00000254295_0 (sequence is synthesized)
ctccaggggtgcgtgacaggttgggagctgtggtgggtccaggcagaaatggcttccctgggaagttgcggaagaggcgtctctggagacgtgcttcgtgaggagagaagctgaagtgtt

SEQ ID NO: 837158 - DNA, 120 bp, Artificial Sequence
  ENSG00000254295_1 (sequence is synthesized)
gcaaacaacactggttgggttgtttcctgtcagttatggagtgatgaggtcacgcacttcattctggccagtcattaatatgatttggcattctctgcatgccaggcaagagtgactgct

SEQ ID NO: 837159 - DNA, 120 bp, Artificial Sequence
  ENSG00000254295_2 (sequence is synthesized)
agatcttccttcgagatggatgttatctcctttttaggaaggaggaaacagagagacctcgtaacttggcatggccacacaatgggaataaactgagtgaccaagaggctgaatatcttc

SEQ ID NO: 837160 - DNA, 120 bp, Artificial Sequence
  ENSG00000254295_3 (sequence is synthesized)
tccaaagccaaagaaccaggcagtggcagagatccaaacccaagcgatttgggtgccagggctcaagcacttccccatgcagccactgcctcgagaaataaaaagactcaccagacactt

SEQ ID NO: 837161 - DNA, 61 bp, Artificial Sequence
  ENSG00000254297_0 (sequence is synthesized)
cacccaggcccatgaaatttggtgcagtgactgggatcgggggacctcccttgggagatca

SEQ ID NO: 837162 - DNA, 120 bp, Artificial Sequence
  ENSG00000254297_1 (sequence is synthesized)
cgttggatcaattaacataatcaactgttacctgttacattccaagccaggacattaaagtagtatgcctcccttccatcaatgctccagttgcagccaatatgtccattgaaactaact

SEQ ID NO: 837163 - DNA, 120 bp, Artificial Sequence
  ENSG00000254297_2 (sequence is synthesized)
taactcgctggaactactctctaaataaattcaccattttggttcaaagtgctacaaacaaattcagtgctttcattccccgtacatggatccgactttaactgcacaaggacagaagga

SEQ ID NO: 837164 - DNA, 120 bp, Artificial Sequence
  ENSG00000254297_3 (sequence is synthesized)
gaagcacatattatgaggtggcagtggacatgtgggaatttgaaagaaagtgcttcagactatttttaaactgaaatgtatcccactgggaccgcaattgcccagtgccgactattcata

SEQ ID NO: 837165 - DNA, 120 bp, Artificial Sequence
  ENSG00000259077_0 (sequence is synthesized)
gcattctgaagtcagctacctgcttagcaagatgtgtgggcagaaattcatcccgaaagtgacgtggacagacagtcctccgatctatgctggaaatgtcaagggctctggagcttgacc

SEQ ID NO: 837166 - DNA, 120 bp, Artificial Sequence
  ENSG00000259077_1 (sequence is synthesized)
acctgggttcaaatgccaccttcactcatgttaacagtgtggcttgggcaaccgactttacctctctgcacctgtttcttcaatgtgcaaatggaaagaacatcacctgcctcttaggtt

SEQ ID NO: 837167 - DNA, 120 bp, Artificial Sequence
  ENSG00000259077_2 (sequence is synthesized)
gttctaaggataaattatatgcaatgcacttagaatacggccagactaaaaggtcatttccagcatttacttttgaactatcaaggcctgattttgaaagactccggactccatgcaaag

SEQ ID NO: 837168 - DNA, 120 bp, Artificial Sequence
  ENSG00000259077_3 (sequence is synthesized)
tacctcagaatgtgactatatgtggagctagggtctttaaagaggtataattaagttaaaataggtcactggggtgggccctaatccagtgtgactggtatccttataagaagagaaaat

SEQ ID NO: 837169 - DNA, 120 bp, Artificial Sequence
  ENSG00000259077_4 (sequence is synthesized)
tagggcatagacatatacagaattgaagatgatgtggggatgcaagaagacagtggtcatctataagcaaaggagagaagcctggaagaaccagtcctgccaacatcttgatcttgaact

SEQ ID NO: 837170 - DNA, 120 bp, Artificial Sequence
  ENSG00000259077_5 (sequence is synthesized)
tctagccgccagaactgcaaaaaaaagataagttcctgtcatttaagcttttttctggcaggcctagcaaactaaaaccatctgcattagtcaaggttctccagaaaaactgaaataata

SEQ ID NO: 837171 - DNA, 120 bp, Artificial Sequence
  ENSG00000259073_0 (sequence is synthesized)
atattaactaatttagaaaacgttgctttcgcagacttcgccgggtgcctttcactgccaaactaaatactccactttaaaatacgcccctgcgtactcatgtgatttctccttttaggc

SEQ ID NO: 837172 - DNA, 120 bp, Artificial Sequence
  ENSG00000259073_1 (sequence is synthesized)
taggaatgtaatgttgacataaatgtcaaataaaattaatgagagaatgggccctcaaatggtgctcctgtgaagggaatttgttagactgggacctttgagcccaaatgtatatataat

SEQ ID NO: 837173 - DNA, 120 bp, Artificial Sequence
  ENSG00000259073_2 (sequence is synthesized)
tgtatatataattatataacactcagacaaggaaggaatctgaatgttaagctttagcaaatgtatcacctttgtcagaaatgctgttacctacaaaaaaaaaaaaacccaaaacaaaac

SEQ ID NO: 837174 - DNA, 120 bp, Artificial Sequence
  ENSG00000259073_3 (sequence is synthesized)
aagtaaattaagatgaaaataccatcagattagaagtctgtcacggcaagctactgcagaattagaagggtggcccatctgctgggtatccaatccttcccttatctgtatagaattcgg

SEQ ID NO: 837175 - DNA, 120 bp, Artificial Sequence
  ENSG00000259073_4 (sequence is synthesized)
atcagatgtcttctgttccccgaacacttccgctgttgactttgcaaatggacctcctcccgcccaacccagctccttccctccctcctccgtctctcccaactggccacttaggaagag

SEQ ID NO: 837176 - DNA, 120 bp, Artificial Sequence
  ENSG00000259073_5 (sequence is synthesized)
gcacagtggctgcctccatccgtatgctgatacataactactttgtcttgtatttgtagtctcaaaaatcttccctaagtatagtagaatcagagaaaatcgctctaatcattgaaaagc

SEQ ID NO: 837177 - DNA, 120 bp, Artificial Sequence
  ENSG00000259073_6 (sequence is synthesized)
gccctgtgctgagtaaagcagccagtcttctcttgtcaccgtaaaaggctgggagtaaaatttcccataaacacaggggaaacctacatttactcacatgccaaggaaaatggcacggaa

SEQ ID NO: 837178 - DNA, 120 bp, Artificial Sequence
  ENSG00000259073_7 (sequence is synthesized)
gacccacgtgtagccacagcagagtctatgcagagggcctgcaaatgcctggggtgcgagtgaatgcctggaggggcggagtttccaagataacagctattgtgttttctttttcacact

SEQ ID NO: 837179 - DNA, 120 bp, Artificial Sequence
  ENSG00000259073_8 (sequence is synthesized)
tcagaagagaatcctaaggactagactccgctcagtgcattcctttttcatacactgatctcaagtacaatcacataattttgaaaatccatgtagtcctccataaataaaattataagg

SEQ ID NO: 837180 - DNA, 120 bp, Artificial Sequence
  ENSG00000259073_9 (sequence is synthesized)
ataggtttctatttccttccgattacctagatacctccgtcttctggaaaaccccaaaaagaccagtagacgaatcaggaaggtcctaggagtgattcctccaatggcaggaatcataaa

SEQ ID NO: 837181 - DNA, 120 bp, Artificial Sequence
  ENSG00000259072_0 (sequence is synthesized)
aggcttcctccttattgccattcccatttcttcacaactggggagactcaactgcaaacatggcttattaaggaatcaccaggagaagttagccatgaaaaggaagaacatggctgctgt

SEQ ID NO: 837182 - DNA, 120 bp, Artificial Sequence
  ENSG00000259072_1 (sequence is synthesized)
tgacatgtgatatctcagtgctgggcatgaagatttttaatgctattgttcttttttaaaaagtggaagtatgtctcatcttagaataattatgctgtgctctagatgtttgtccttggg

SEQ ID NO: 837183 - DNA, 120 bp, Artificial Sequence
  ENSG00000259072_2 (sequence is synthesized)
attcttacctagcctaggaagtcataaaacatcactctgcttcattctgttggatactgatgagtcaaaacttgccattttcaaaggaaaagaatgcagacacctcttaaaagagcaggt

SEQ ID NO: 837184 - DNA, 120 bp, Artificial Sequence
  ENSG00000259072_3 (sequence is synthesized)
agttagaatgcaacactggaagaatgtgagtttgagactagaaagaaaaattgaggtagcattcatatggcaacttcatatgacttgatgtgagtaaaagagatttctgctggaggatgg

SEQ ID NO: 837185 - DNA, 120 bp, Artificial Sequence
  ENSG00000259072_4 (sequence is synthesized)
ggaagtggtctgcatgagacaaaagctaaaattataactttggggaacttttggaggctgaggtcagagaaatctaaggagtttctagtgcagagtcctagaaataaaaggtgaagagat

SEQ ID NO: 837186 - DNA, 120 bp, Artificial Sequence
  ENSG00000259072_5 (sequence is synthesized)
agtttcccttaggccgcgacaggaaatgtgtgcggagcgctgccaggcccggtgcagccctgagttattctggggtcaggaacacagctggcgccgggtacaggggacgcagtcgactag

SEQ ID NO: 837187 - DNA, 120 bp, Artificial Sequence
  ENSG00000259072_6 (sequence is synthesized)
aaggtcaaacaccctgcttagagcaagaggagaaattcgccactgggatgaagtgtgtggtttttctccgttcagggagtttcatcaggaccgcagaacccataacacgtacaaagggga

SEQ ID NO: 837188 - DNA, 120 bp, Artificial Sequence
  ENSG00000259072_7 (sequence is synthesized)
cacattaaatgtgatctcaagtttaaactgtgtatgctgtcaaagaaattcaaatgggggcacctcttattatattggacccaagtagctctgtcactgtcttccccaaacaaggctgaa

SEQ ID NO: 837189 - DNA, 120 bp, Artificial Sequence
  ENSG00000259072_8 (sequence is synthesized)
ttagtgtgttctctctgcaattccagaccccatgaaataaatctctgaagcttgcttgtctcccaaacactgtgtaaacccactgaaaacttaagtaatggagtaaacagctttctgtgg

SEQ ID NO: 837190 - DNA, 120 bp, Artificial Sequence
  ENSG00000259072_9 (sequence is synthesized)
cttcctgcttttactgcttcagtattcaaaatctttcctttgccaagataaataacactaacacaatcataaatggagaaaatttcatgaacatattaaaataatctcatgtattataaa

SEQ ID NO: 837191 - DNA, 120 bp, Artificial Sequence
  ENSG00000259072_10 (sequence is synthesized)
gtaaaccttttcacttcatgggaacgagtgtgctaagtcatcaatctaagcatgtgctggtgtgaattgcataactgcaactcttattagacaattattatttgaatacttattctggta

SEQ ID NO: 837192 - DNA, 120 bp, Artificial Sequence
  ENSG00000259072_11 (sequence is synthesized)
tattctcctaggctatcatatcacttttaaataatacatttaaaattattgcagtaaatatgtatttatgacacaagattgtaattgtcattggcattaagttagtcagtgtctagattg

SEQ ID NO: 837193 - DNA, 120 bp, Artificial Sequence
  ENSG00000259072_12 (sequence is synthesized)
tttctttagattctttatatcaaaacaacgtgttaacaatgggatgaaagaaagtagcttccagtttctgaattggagatttttctttgcaggatttttaatgctattgttcttttttaa

SEQ ID NO: 837194 - DNA, 120 bp, Artificial Sequence
  ENSG00000259072_13 (sequence is synthesized)
ttgctgtgggaataatagtgaagaagatggtaacagtacctattttttttggaacacatattttatgggaagacacagtacccatcccccaaaaaaagacaaataaatatatgcataaaa

SEQ ID NO: 837195 - DNA, 120 bp, Artificial Sequence
  ENSG00000259071_0 (sequence is synthesized)
aaaatgacagtggcaattaccatttatactgtgttatttgtataagctgttaaacacaacattgttaaacacaacgaaaattcatttttctacctgaaagctgtatcatagaaaattatt

SEQ ID NO: 837196 - DNA, 120 bp, Artificial Sequence
  ENSG00000259071_1 (sequence is synthesized)
cccagcctaaagcaatgttaggtttcaagaaaaacctaagcatagcccactagtttttactgtttcctttattatattgcaatctgcaaaactatttgtattcagccaagtatctatgtc

SEQ ID NO: 837197 - DNA, 120 bp, Artificial Sequence
  ENSG00000259071_2 (sequence is synthesized)
cagttttaataaaatagtagcctaagcttacaaaatagacaaattaagcagcaactgttgattctgagtaagtctgtatgctatcaagaacacaagaatgcaggatcatgggaaatgcac

SEQ ID NO: 837198 - DNA, 120 bp, Artificial Sequence
  ENSG00000259070_0 (sequence is synthesized)
caaggtgggggccgcctgctcagcccaggctccctgaacgtgtggctagctgagtttgcggaagaaaccaggagagtgccaacaccaggcttgcaagcaagaggctccctgactgcctga

SEQ ID NO: 837199 - DNA, 120 bp, Artificial Sequence
  ENSG00000259070_1 (sequence is synthesized)
tcctggagcgcaccccatcctccctgtgttccctgggcctcagctgttccccagtgaccttggagacaccctgccccaccctggctccacaggagccctgcccatcaccgcctcagctct

SEQ ID NO: 837200 - DNA, 120 bp, Artificial Sequence
  ENSG00000259070_2 (sequence is synthesized)
gagtctcccctggggacacaaccttcctcctggtgcagaggcgcaggatgctgcccctaaggcccatcttcctctgcagcatgttttgatgtcagctcattcacaggaaagaaacaatca

SEQ ID NO: 837201 - DNA, 120 bp, Artificial Sequence
  ENSG00000259070_3 (sequence is synthesized)
catctcagtgcccagaatggggaccaataggagaggtcactgggaataaagcccacacgcaccccagggtccatgggctccccagaaatgcaggtggcctccgccagagccaacaagcct

SEQ ID NO: 837202 - DNA, 120 bp, Artificial Sequence
  ENSG00000259070_4 (sequence is synthesized)
aagttgctgatcagcccctccctgcttccctgtgtggaagaggaaacagaggcccagactagtagggctctgccgtggtggccggctgcgtccccagacctctggtcccagggctggctg

SEQ ID NO: 837203 - DNA, 120 bp, Artificial Sequence
  ENSG00000259070_5 (sequence is synthesized)
ggagtgcccctccctgtgctcacttcctgctctcctgggaaatggctcagggatggggcgtgtggggacagatgctggcatagctcacaaaatgcttgcacaagggacactccatggcag

SEQ ID NO: 837204 - DNA, 120 bp, Artificial Sequence
  ENSG00000259070_6 (sequence is synthesized)
gtccctgcaggagagcaaagtcacaacattcagagattccctgcactctgaggcccgcagagcctggccgaccaagcgaggctgggaggatgttgcctgctggtcagggcagccctctga

SEQ ID NO: 837205 - DNA, 120 bp, Artificial Sequence
  ENSG00000259070_7 (sequence is synthesized)
tcagggcggccgagtgaggctgggaggatggtgcccgctggtcagggcagctgagcgtggctgggaggatggtgcctgctggtcagggcagccctctggtcagggtggccaagcgaggca

SEQ ID NO: 837206 - DNA, 120 bp, Artificial Sequence
  ENSG00000259070_8 (sequence is synthesized)
gggagggaggtacccaccggtcagggcagccgaacaaagctggaaagatggtgcctgctggtcagggcggctgaatgaggctgggaggatggtgtctgctggtcagggcagctcaggagg

SEQ ID NO: 837207 - DNA, 120 bp, Artificial Sequence
  ENSG00000259070_9 (sequence is synthesized)
tgctgcccaggaggtgctgtccaggcagagcctagggctggtgtgggtgtgccatgctcctgagaagtttctgggttgtggctttaatgttctcctgcagtgagaacgctgacacttggc

SEQ ID NO: 837208 - DNA, 120 bp, Artificial Sequence
  ENSG00000259070_10 (sequence is synthesized)
caaagggtcctcacctctcccctagtacacttctgagatgccaggaaggttctgaacatcagattgattcctgggactcccctccagggtggccttactggagtcaggagcccctgcccc

SEQ ID NO: 837209 - DNA, 120 bp, Artificial Sequence
  ENSG00000259070_11 (sequence is synthesized)
actaggatggctctgcagtggcctgaggacagtgagcactgactggtcactggtgcaaagttgcccactgtgatggttttgaccgttgatgggaaccaagtgaaagccctgcagctattt

SEQ ID NO: 837210 - DNA, 120 bp, Artificial Sequence
  ENSG00000259070_12 (sequence is synthesized)
ctaggcatttcagagggtgcttccctgcatgtactctgctgcagaccatcctccctgggccaggagcccgctacacagtaggagattctttttcttctcttttgagcacttttattctct

SEQ ID NO: 837211 - DNA, 120 bp, Artificial Sequence
  ENSG00000259070_13 (sequence is synthesized)
ttttcttaatctctgctcctcctttgaactgagaaatgtgcaaatcttttttgttagttttgaggttgcttcttatgcatatttcatctggaactttcccctttgggggtgatctgttct

SEQ ID NO: 837212 - DNA, 120 bp, Artificial Sequence
  ENSG00000259070_14 (sequence is synthesized)
atcagcctgcccgctgctagagaggccgaggtggtccggccagccgtgcgctgctgctggtgtctctgtgggcatgacctggtgagatatcattctgcatctgggggtccatcctatcag

SEQ ID NO: 837213 - DNA, 120 bp, Artificial Sequence
  ENSG00000259070_15 (sequence is synthesized)
ccctgtgttctagattccccagtgactgacatttagccagtctcctctgtcactctccagtgacatgtacacactgttggcacgaactgcagatgtcacgttctgtggctgagagcctca

SEQ ID NO: 837214 - DNA, 120 bp, Artificial Sequence
  ENSG00000259070_16 (sequence is synthesized)
actgtgcctggtctacactccaggtctgccaaacgacccagcaaggtccttcacaactcttctgatccaggatcacacatcacttgtgctttgatgcctgcttctgaacaattttacctc

SEQ ID NO: 837215 - DNA, 120 bp, Artificial Sequence
  ENSG00000259070_17 (sequence is synthesized)
ctgagatgtccatttttgggagtgtgagccctcctctcctggtgacagctggctgaggccgtccagcctcaggacacacagggaacggctgcataaggagatctggggcagggggcccac

SEQ ID NO: 837216 - DNA, 120 bp, Artificial Sequence
  ENSG00000259070_18 (sequence is synthesized)
caggatgttctgccctgtggggggcaacaccggctgtggtctgccggcggcatccagggacagtctgtctaggtgaggctgaggccgcccccactcgctccctcacccccatgctgacag

SEQ ID NO: 837217 - DNA, 120 bp, Artificial Sequence
  ENSG00000259070_19 (sequence is synthesized)
cagtgagctgaccacagactgggggagccccacagggagactggcctccccagcacatgccccgcagtgccagacgcggtcatcacagaggcaggtacacgacaccacggacgtgccacg

SEQ ID NO: 837218 - DNA, 120 bp, Artificial Sequence
  ENSG00000259070_20 (sequence is synthesized)
tacccgccatcgggaccaaggaccactgagaaaccatgaaggccatgcagcgactgtggtggcaggaccgtcaggaggccataggtgccacggctcccctctggtggttcacctgcccac

SEQ ID NO: 837219 - DNA, 120 bp, Artificial Sequence
  ENSG00000259070_21 (sequence is synthesized)
ctgtagctggggtggcccctccagtgcgctccccagagcagaacaccccccaggcaacacgtctgatgaaggccaacagcgtcagtcctctggtgtttggtgacatcaaagctgtgccga

SEQ ID NO: 837220 - DNA, 120 bp, Artificial Sequence
  ENSG00000259070_22 (sequence is synthesized)
aaggccttccctcactgctaacacttgaagggcttctgtccggtgtggaccctctgatggcgaatgtggtctgtcttatgcttaaagatccacctccattaactgcactcttagggtttc

SEQ ID NO: 837221 - DNA, 120 bp, Artificial Sequence
  ENSG00000259070_23 (sequence is synthesized)
ttcctctgaaaaggaatgaacacgggaaccccctcaaaggcatttttaaatgaagcgtggaaggcatcaaagatgtgctcttcttcaggactcaggcttctccatcattctctgttcctt

SEQ ID NO: 837222 - DNA, 120 bp, Artificial Sequence
  ENSG00000259070_24 (sequence is synthesized)
ggaagcgtgagggctaaggagctgctgacttctctctcttggccccacttcaagaaaggcttgcttcccacacacctctccacgctcccagtgcgggactgacactctgcaccgggaggc

SEQ ID NO: 837223 - DNA, 120 bp, Artificial Sequence
  ENSG00000259070_25 (sequence is synthesized)
caagggccaccatcgtcttgctgggagaaggtgtgacgtttcttggtcataggagggagtgtgatctgacaccagaggacttaatataacattgcagtgttaacatcttcactggcagat

SEQ ID NO: 837224 - DNA, 120 bp, Artificial Sequence
  ENSG00000259070_26 (sequence is synthesized)
tcatggactttccccctcctgaatgcatttcaacaccttgaaatgaacgatgcctcatgtctctgcagggtggacatagctctaactctctgaagctgagttggacaggtgaaacatcca

SEQ ID NO: 837225 - DNA, 120 bp, Artificial Sequence
  ENSG00000259070_27 (sequence is synthesized)
cagtctttcttgacctgaatcaagctcagagtgacagtgtttaagattatatgtcaagttctgtgtgaaatgagagaccatggggattcattattgctggagttgacggtattgcagttt

SEQ ID NO: 837226 - DNA, 120 bp, Artificial Sequence
  ENSG00000259070_28 (sequence is synthesized)
tataaccatctaataaattagcatttaatactgagagatttcatcttaaactcagaggattgctttgttttaaagaagatttttgcaaggagaagcaatggaaaccattcagaaaatgtg

SEQ ID NO: 837227 - DNA, 120 bp, Artificial Sequence
  ENSG00000259070_29 (sequence is synthesized)
ggagataaaaatcctattcaagaaaacggatcttggatctttgcattcacttgatttgtcagaatattattctgtgctaaaaaatagaagggattaaatgttaaaaatcactgaggcaca

SEQ ID NO: 837228 - DNA, 120 bp, Artificial Sequence
  ENSG00000259070_30 (sequence is synthesized)
attctcttgagttcaccaattttgtactcctatttccagtttcttttcacatacgtcattctccatcctgattaagcttgttctttctgagctcatttctgataccaaaagaagtcataa

SEQ ID NO: 837229 - DNA, 120 bp, Artificial Sequence
  ENSG00000259070_31 (sequence is synthesized)
agttctataagattaagaattctcttagaagtacagatttgcatgaacgtcaaagaaaaaaatatcacattttactcccatatgctttaatgattattttattaggtcaggcatggctta

SEQ ID NO: 837230 - DNA, 120 bp, Artificial Sequence
  ENSG00000259070_32 (sequence is synthesized)
acccctgagacagcaagaccaacaaccccttctcttcctcttcagcctactcagtgtgaagatgataaaatgaaacagttggtgatgtttcagagaacccaactcaaactgacttgaaca

SEQ ID NO: 837231 - DNA, 120 bp, Artificial Sequence
  ENSG00000259070_33 (sequence is synthesized)
agagaaatcagtgtttactgcagagaacacagaagccagcaagcagcagggaagggaggcgaaccaatgcagcagcccaccgggaccgaggaggacacacgcagagcaagtcacaggaag

SEQ ID NO: 837232 - DNA, 120 bp, Artificial Sequence
  ENSG00000259070_34 (sequence is synthesized)
cgcagctgaaaacaaatggacgcttatcccaaatgcacaggacacttaccaagaactgatggtccgtcaaagtaaagctcaacagctttggctggcaggacagtcaaacttttggacgac

SEQ ID NO: 837233 - DNA, 120 bp, Artificial Sequence
  ENSG00000259070_35 (sequence is synthesized)
agaaagtaacagtgggaaatgggacaacatctgccagcaacgcgagaggccaagaccatggctgctacaggaggggtcagcgtcacagtacacgcatggcggcggttgcacatgcatgcc

SEQ ID NO: 837234 - DNA, 120 bp, Artificial Sequence
  ENSG00000259070_36 (sequence is synthesized)
agcctactcagtgtgaagatgattttattttagccccaatattgtatcatttgagatggccatttcttcatcactctggcattgaggagctatatgtagctacggtctgcaagccaacca

SEQ ID NO: 837235 - DNA, 120 bp, Artificial Sequence
  ENSG00000259070_37 (sequence is synthesized)
tcctgggcaagtcaaacagacacttctacttaggtcttccagtggatgtgcctctctctggacatttaaaaaaatctgaatattgcctatggaatgctgccctcagctgtgcctggagca

SEQ ID NO: 837236 - DNA, 120 bp, Artificial Sequence
  ENSG00000259070_38 (sequence is synthesized)
cagggcacctccagttcggcctctccagaagtaaacttgtcttctgcctatcttgtgtttgttgggaggaggtgacctgggactctactactattgatgaagaatccgaaaaagtcttct

SEQ ID NO: 837237 - DNA, 120 bp, Artificial Sequence
  ENSG00000259070_39 (sequence is synthesized)
cttcatgagaagaaactgagggatgcttcagtccaacaatctgtgaggaaatgaatcctgtcaacaccatatgagtgagttggaagtggatcttccctcagttgagccaggtgaaaatac

SEQ ID NO: 837238 - DNA, 120 bp, Artificial Sequence
  ENSG00000259070_40 (sequence is synthesized)
tataaaatgaatggcagtccttagggaaattgagggtggcccagataagaatgaagttggctctgggccccttttgatagaataaaccagagggtggtgaatatgtgacacacgggtcat

SEQ ID NO: 837239 - DNA, 120 bp, Artificial Sequence
  ENSG00000259070_41 (sequence is synthesized)
gttcctcttatggattcatgaggattgttcaaaaactctgagaagtctggagttaaaacagcaatgacaacagtgaaaaccttaattctgtttaatctagcattttccaaacttatttta

SEQ ID NO: 837240 - DNA, 120 bp, Artificial Sequence
  ENSG00000259070_42 (sequence is synthesized)
ccatgtatctcttttttaaaacttagtaacactgagtgttcttaggaatattctttgcctttaaactattaatatttttatagttgtgatcaaacccttcatttataaataatctctaag

SEQ ID NO: 837241 - DNA, 120 bp, Artificial Sequence
  ENSG00000259070_43 (sequence is synthesized)
atacactttagtagagggttttgaaatgtgctaattcttttgaatgccagctctaagaagccgagactttagaattgaaaggcaacatgaggatcttcttatagggcacaggcagggctt

SEQ ID NO: 837242 - DNA, 120 bp, Artificial Sequence
  ENSG00000259070_44 (sequence is synthesized)
ggcatggattaggtatggacggtggagaaagaacagaatcagatgatgctcagattgcagcctggagctactgggtggatggtggagcatttccagggagagggagcatgagaaagggca

SEQ ID NO: 837243 - DNA, 120 bp, Artificial Sequence
  ENSG00000259070_45 (sequence is synthesized)
ggacagaggcgcaaacactgaaaactctcgctgaatccactcggctgagcggtggtcacgagagcacggccctgcgctccccacaaaactgcacctgggccccagggcgagacaggcgtg

SEQ ID NO: 837244 - DNA, 120 bp, Artificial Sequence
  ENSG00000259070_46 (sequence is synthesized)
gaaggtgcaggggtgtgtgtgggggcaggggctcctggctcagagccgtatccaggaaccccccttcaggctggagccctgccctgagccccctgtggagagactgtggagagccccctg

SEQ ID NO: 837245 - DNA, 120 bp, Artificial Sequence
  ENSG00000259070_47 (sequence is synthesized)
caattttatagttgggaaagtcaacactgtgtggccaaatgaacacaactgcatttgatcaaagagatagttggctaacagaaaaaaatttcttcatacaaagagttggacaggtgaaac

SEQ ID NO: 837246 - DNA, 120 bp, Artificial Sequence
  ENSG00000259070_48 (sequence is synthesized)
tttttggaattctatattttgacttttccgttaacctaggtctgttttggagtggggaagagggtaggtcatcatttctatttaaaatgggaattggctaggcgtggtggctcacgcctg

SEQ ID NO: 837247 - DNA, 72 bp, Artificial Sequence
  ENSG00000259070_49 (sequence is synthesized)
gaattgaacaatgagaacacttgggcacatggtggggaaggaacatcccacaccggggcctgttgtggggta

SEQ ID NO: 837248 - DNA, 120 bp, Artificial Sequence
  ENSG00000259070_50 (sequence is synthesized)
aagaatcctgggaagtggaaagagattccaatctcacctcatcagggagcatcgaatgctctcttaagctcaataggaagaagtgaggctactttcagatttctctatcccaatggcttc

SEQ ID NO: 837249 - DNA, 120 bp, Artificial Sequence
  ENSG00000259070_51 (sequence is synthesized)
aattgtactaagagagtgggtgactttgtgcttaagacaactctagaagtgtccttttgtggatgccagttctgcaaaactatttgggactctggatatgtaactctttcgaaacctggg

SEQ ID NO: 837250 - DNA, 120 bp, Artificial Sequence
  ENSG00000259070_52 (sequence is synthesized)
gattagaagtttggcactgcatacctttcagaggagaagaaggctctgctttcggtataactgcacggctctaaagaatggcaatgagcaaagaatgagaaataatttaatccactattg

SEQ ID NO: 837251 - DNA, 120 bp, Artificial Sequence
  ENSG00000259070_53 (sequence is synthesized)
attaacatgtttgttgttaaaagctaattttctgtaacagcagagatgcagcccagggtttctggagacttttaaaaatacctccaggcacagtcaatgtttaaattttctaaagcatcc

SEQ ID NO: 837252 - DNA, 120 bp, Artificial Sequence
  ENSG00000259070_54 (sequence is synthesized)
cacacactgaagatatttgtaagcatccaactaaagacaatcaaaattagaacttagcaaaaatgtacagatcactggtatatattaaattttaattagaaaaatagagactcctacaag

SEQ ID NO: 837253 - DNA, 120 bp, Artificial Sequence
  ENSG00000259070_55 (sequence is synthesized)
taaatttcattgtattagaggttgtctcacattttttgaagtaataatacaatcagggaaaacaaatcttttcagtttgaaattaacaacaaaagccaaagaaccaacctctaaaagctc

SEQ ID NO: 837254 - DNA, 120 bp, Artificial Sequence
  ENSG00000259070_56 (sequence is synthesized)
tttaaaaaactctaattaaaaaaaaattcatctctttggccatgctcgactgatggtacctataaaaactgaggcactctttggtgtatgcgcgttctcagagcagaattagatcaaggc

SEQ ID NO: 837255 - DNA, 120 bp, Artificial Sequence
  ENSG00000259070_57 (sequence is synthesized)
tcgatgcgaaagcacgctgtagttactattatcaaatgcggaatctcattttagctactataaaaggcccctggtattaaaacactgcgtttatagatgatggatgaaaaatgtattttt

SEQ ID NO: 837256 - DNA, 120 bp, Artificial Sequence
  ENSG00000259070_58 (sequence is synthesized)
caaaccatggcctttgtggtagaacatgacttgcttactatggaaatatctccagctgcctagaaatgttgcctagcaaccctggaaacagagaaaacctaatatctctgagttgcttgt

SEQ ID NO: 837257 - DNA, 120 bp, Artificial Sequence
  ENSG00000259070_59 (sequence is synthesized)
atgttggaaagaagtgtgactattcctgaaattgagaccagagagaatttctcccaaatgatcctcacgagaggagtgtgcataattaggcaacaatattttgcatttgaaaatgtcttc

SEQ ID NO: 837258 - DNA, 120 bp, Artificial Sequence
  ENSG00000259070_60 (sequence is synthesized)
acattaaatagaaggagttgttttataggctagttttttaagttatccctaaatattggccaaaggcattatgctaacatggaagtgccagaccttcgctgcccatgtgcagtatgatga

SEQ ID NO: 837259 - DNA, 120 bp, Artificial Sequence
  ENSG00000259070_61 (sequence is synthesized)
gggatgtagcagtgggtcccagggtgctggtgcaccagaggttggggtgtgcagtagggaagagattcatctggtgtggttatgtagtggtcatgtggtgcttcctaaaagaggggctta

SEQ ID NO: 837260 - DNA, 120 bp, Artificial Sequence
  ENSG00000259070_62 (sequence is synthesized)
aactgcataccaaaacaagagtaggcacacccccgctaaacagcctagtatgctattttgtaacaaatttaaatgatacaatattcattttgcttcaattttcttttattattgcgggta

SEQ ID NO: 837261 - DNA, 120 bp, Artificial Sequence
  ENSG00000259070_63 (sequence is synthesized)
tgcgggtaaacatttttttcaaaataacattcttctctttgtcaatttaaaaagtaatacatggttatttagaacatgtaaaaatatgaaagtataataaagaaaataaaaattacccag

SEQ ID NO: 837262 - DNA, 120 bp, Artificial Sequence
  ENSG00000259070_64 (sequence is synthesized)
atggctagtatattcatatcttttcttccagtttttttgtttgtacattatttatgtacatatataacaattgataccatacagtttgtaaaatgttaaatgtaacattgtgtcattttt

SEQ ID NO: 837263 - DNA, 120 bp, Artificial Sequence
  ENSG00000259070_65 (sequence is synthesized)
ccaagtcattactagtctttgaaaactttaaatagctgcatgttacaaactttaataatcatttaggttgtttccatctttttctaaataaaagtgtgcttcagtaaattttttttgcat

SEQ ID NO: 837264 - DNA, 90 bp, Artificial Sequence
  ENSG00000259070_66 (sequence is synthesized)
ctgagacagcaagaccaacaaccccttctcttcctcttcagcctactcagtgtgaagatgatggtcatttttttttttttgctgctcctt

SEQ ID NO: 837265 - DNA, 120 bp, Artificial Sequence
  ENSG00000228559_0 (sequence is synthesized)
actttggcttagagcaggactcagcaaagtatagccctggggccaaatttggcctgccatctctttctttctttctcttaatttaaattgtattttttgaatcggtattatatgcaaatg

SEQ ID NO: 837266 - DNA, 120 bp, Artificial Sequence
  ENSG00000228559_1 (sequence is synthesized)
gtacaacatgcaaaagataaaaatgaatatacagttgaaagtaactctccctcttcctaacttccaactatccagtttccttcctcagctgcatccactcttgctggattcctatgctgc

SEQ ID NO: 837267 - DNA, 120 bp, Artificial Sequence
  ENSG00000228559_2 (sequence is synthesized)
aggagatggtgcgtccatgtctgtctgcacctggatggcatcgcctctccatctcgaggacgccatctggagggggcagggcagggtggctgatcccctgcaggccccagccctgtgact

SEQ ID NO: 837268 - DNA, 120 bp, Artificial Sequence
  ENSG00000228559_3 (sequence is synthesized)
atcatccttccagtcctcttccccttcgccgggctccagcctcagcttggccctcacctccactcctctcccctctcacccctgcccccattccacttcatctccctccctcaccttagg

SEQ ID NO: 837269 - DNA, 120 bp, Artificial Sequence
  ENSG00000228559_4 (sequence is synthesized)
gcacctctgcctgctccttatgctggagttgattttctacaatctcaactcagccaagagatctcatcacctaaaaaagtgatgtgaaccttaagatcacatatgtcatatgggggtgaa

SEQ ID NO: 837270 - DNA, 120 bp, Artificial Sequence
  ENSG00000228559_5 (sequence is synthesized)
ggtgggggtgggaggcactaagggcagggcagcaggtgggtcagccccaggtgctggcaatagatgggggtccaggtcagcagagaacctaaaaacaataaagcaactgattagcccgtc

SEQ ID NO: 837271 - DNA, 120 bp, Artificial Sequence
  ENSG00000228559_6 (sequence is synthesized)
tcctaaacaatgttggtgataaaatgttcctctctcaaaatcttttagttaggatctaagttttatataattgcttaggtcattgttgagagtttctttctttctttctttctttctttc

SEQ ID NO: 837272 - DNA, 90 bp, Artificial Sequence
  ENSG00000228559_7 (sequence is synthesized)
tcttttctttcttttttgaaatgtatgaagcaatctcagctcacagcaacctccaccgcctaggttcaagcgattcccctgcctcagcct

SEQ ID NO: 837273 - DNA, 120 bp, Artificial Sequence
  ENSG00000228559_8 (sequence is synthesized)
catgcccagctaatttttgtagttttaatagaggcggggtttcaccatgttgactaggctggcctggaactcctgacctcatgtgattcgcccgcctcagcctcctgaagtgctgggttt

SEQ ID NO: 837274 - DNA, 120 bp, Artificial Sequence
  ENSG00000228559_9 (sequence is synthesized)
tcagcctcctgaagtgctgggtttataggcgtgagccgctgtgcccagccttgagtttcaattaaaaaaaaactaaaaaacccctctatctgtggggagggagagcatcaggataaatag

SEQ ID NO: 837275 - DNA, 120 bp, Artificial Sequence
  ENSG00000228559_10 (sequence is synthesized)
tgataggttgataggtgcagcaaaccatcatggcacatgtttacctatgtaacaaaactgtatatcctgcacatgtacccaagaacttaaatgaaattattaaccctctatatccttcaa

SEQ ID NO: 837276 - DNA, 120 bp, Artificial Sequence
  ENSG00000228559_11 (sequence is synthesized)
gaaattattaaccctctatatccttcaaattagcacattttaattagttatcctttatattctacatggaagctaattcggaaaattactcccccctcaacaaacacagctacttatttg

SEQ ID NO: 837277 - DNA, 120 bp, Artificial Sequence
  ENSG00000228559_12 (sequence is synthesized)
gagagtaggtccctaaagatttgaaatgctttctgctctcttcagtgtggtttgtgtctttagccccaccgtacaacatacttctgcatttagtgaatatgaaataaatgatggtacaca

SEQ ID NO: 837278 - DNA, 120 bp, Artificial Sequence
  ENSG00000257920_0 (sequence is synthesized)
agagccactgagtttgagactgtaagagcaggacggggctctgaagacccccctcgcccaaccccctcattttacagaagaggcaactgaggcccagagagggagatcccagagtgacaa

SEQ ID NO: 837279 - DNA, 120 bp, Artificial Sequence
  ENSG00000257920_1 (sequence is synthesized)
tgccaattagggctgggactgggacccaggtctccagccaccacagtgccctgcctctgccagaatcaaaacccacccgccagaggacatgcacttgagaacacaccctttagcactttc

SEQ ID NO: 837280 - DNA, 120 bp, Artificial Sequence
  ENSG00000257920_2 (sequence is synthesized)
tgatggtgggatggagcccgtcattcatattaatgagacatgcatggaagtggcaatgagcatgtggagtgtggctaaaagaaatgtggttcttcacttggagctgatgtgaaacacagg

SEQ ID NO: 837281 - DNA, 120 bp, Artificial Sequence
  ENSG00000257920_3 (sequence is synthesized)
caatctgttggcctactgagaggaacttcttttaaaagccaagaacaagaataccacccaaagacatctgttcctctcatcctttagtgaagtgcagatggagattcctacatggttttg

SEQ ID NO: 837282 - DNA, 120 bp, Artificial Sequence
  ENSG00000257925_0 (sequence is synthesized)
ttttacagttgtttgtagtaagagaactcccattttcatcagtggaactggacaactacactggtccaattcaggcaaatggatagagttcacagcaccaaaccagcagccacaggaaat

SEQ ID NO: 837283 - DNA, 120 bp, Artificial Sequence
  ENSG00000257925_1 (sequence is synthesized)
taatataactgcgaaggaaaagatttcccctgctcgagtctccctgcactcctacccatctgagagaaacagaactgttgagtagctgatgcaatttcatccataatattgtggattcac

SEQ ID NO: 837284 - DNA, 120 bp, Artificial Sequence
  ENSG00000257925_2 (sequence is synthesized)
ggcatgatcagattaaggattcatacacactgacctaactcacaggagagagttataaatcagaacaccaatttattgccttgttcatggaaatagaaacactacatgtgtcagcttact

SEQ ID NO: 837285 - DNA, 120 bp, Artificial Sequence
  ENSG00000257925_3 (sequence is synthesized)
cagatcagcagctaaacactgttcagtgttgattgggaaatataaagccagaatgaaggcagctggttcatcttgatagcaaatgttaccaaatctcatagtctggtgccctaatctcca

SEQ ID NO: 837286 - DNA, 120 bp, Artificial Sequence
  ENSG00000257925_4 (sequence is synthesized)
tgggattagaacatgtacatcgaccagagaggttctctttctcctgactatgctgggacattctggcaaattctgactcatcactccctttctagaatccttaaagaccatcatcacgct

SEQ ID NO: 837287 - DNA, 120 bp, Artificial Sequence
  ENSG00000257924_0 (sequence is synthesized)
agaaaagaaaaaggaaactgcaacgatgaacagatcagaataggcgacatgcactgaacaaggtaaaaaagacagaaaattatctggagaggtggccggaggacacatcaagaagcgcct

SEQ ID NO: 837288 - DNA, 120 bp, Artificial Sequence
  ENSG00000257924_1 (sequence is synthesized)
tgtacattgaatcaggcaacatctcatcctataaaataaaatgggttttccgatgagctgagaagacgagcctggctttataggcagaaaagggctgaagaaaacagaaacagagaacaa

SEQ ID NO: 837289 - DNA, 120 bp, Artificial Sequence
  ENSG00000257924_2 (sequence is synthesized)
ttcacaggaatgggaagccgaactcattcccagctccagaagtggatgctgatattttaaaccaatcaccagatgccattcctttgatgatgatgattaatttgtccaggggcaggtatg

SEQ ID NO: 837290 - DNA, 120 bp, Artificial Sequence
  ENSG00000257924_3 (sequence is synthesized)
agacccaacttgaactggtcagacagaagggaaggacataattccaaatggacacctgttctctctcctaccagtgaggaaaaggaaacgagatgtccagctgttggccccagtcataag

SEQ ID NO: 837291 - DNA, 120 bp, Artificial Sequence
  ENSG00000225948_0 (sequence is synthesized)
ggagaagcctggtttgagtgagtttttcctgaagcaaaagggaagagcttaatttcaaaaggaatatcttgaaagacgcatcaactcaccattagaaaacatgaaacgacagattatatc

SEQ ID NO: 837292 - DNA, 120 bp, Artificial Sequence
  ENSG00000225948_1 (sequence is synthesized)
ctaagattgtgtgaacctcttacctggaaacccgtacaattgctttatctaccaatcctaaactattatatcttgatctttactcaatcctaattacacacccacattgaaagacctatc

SEQ ID NO: 837293 - DNA, 120 bp, Artificial Sequence
  ENSG00000225948_2 (sequence is synthesized)
ttacaaacgtccaagtccctcctttgaaatgctactaagactgcagtaagaatacatagcatgcagtgactgagaggaagagagatactaacacttgaagtaatccagtctatcaatagg

SEQ ID NO: 837294 - DNA, 120 bp, Artificial Sequence
  ENSG00000225948_3 (sequence is synthesized)
agatggactgctttgatttaaagcgatttacaaaaggatttggatacctcatctctcctgtttcgccaaggtcttgactcatcgctgcagatgactaaatcccattgagctaaatctcct

SEQ ID NO: 837295 - DNA, 120 bp, Artificial Sequence
  ENSG00000225945_0 (sequence is synthesized)
ttccccctgtctgaagaaggggagcaggtttctgagtactccggggcgcggtgcctccccctaaacgcgaatggaacttttgggaaatgcccctcccccagccccttgtctggggcaact

SEQ ID NO: 837296 - DNA, 120 bp, Artificial Sequence
  ENSG00000225945_1 (sequence is synthesized)
gagccacaagtacattatctatgcccaggcgagtccctatgcccaggctaggagagccgcacttcttcctacagctgacacgtttggtttttggaggggaaaggggagctgtagctgaat

SEQ ID NO: 837297 - DNA, 120 bp, Artificial Sequence
  ENSG00000225945_2 (sequence is synthesized)
cagtaatggaaattgatgaacctgtgatgtgactcctgggagtagtttgcaatcaccattggcccaaaaggagccatctacgtgctcagtggggtctagtaaaggataatattaattctt

SEQ ID NO: 837298 - DNA, 120 bp, Artificial Sequence
  ENSG00000225942_0 (sequence is synthesized)
ccaatgagctgcctgaaggattcagtgtcttggtgttcacaaggccccagcacatcgtctaggacgtgagacccacacgccgccctcagtctcctcagttcactgtttcccccggggaaa

SEQ ID NO: 837299 - DNA, 120 bp, Artificial Sequence
  ENSG00000225942_1 (sequence is synthesized)
caaccgccagggcctgtaggaaaacacagcaaactagaaagtccagttggaagagatttcagatgtgctacagcctccacggcaggagtgaagctggacctccaggctcctgatgacact

SEQ ID NO: 837300 - DNA, 120 bp, Artificial Sequence
  ENSG00000225942_2 (sequence is synthesized)
tcccaccgaactccagggagcaccagcgactgagaggccacatggcgggcggctgtgggttgggggggctgcctgcccgcacactctttacggcagaagcagtgacatttcccttgctgt

SEQ ID NO: 837301 - DNA, 120 bp, Artificial Sequence
  ENSG00000225942_3 (sequence is synthesized)
gcccatggcagggacgggcccgtggcaggtgctgtgagcatgtgcttgccaagttcctgatgcggagcccagccagcccagagggccacattcttgtcactgcttcttggagccgcagct

SEQ ID NO: 837302 - DNA, 120 bp, Artificial Sequence
  ENSG00000225942_4 (sequence is synthesized)
catgccaagttcctcacacccctctctgggctctaactttgtgctgcctcagatgttcagggtactttgcttcaagccatatcaaaagctggtttgaaaaataaagtcctacagaggtgc

SEQ ID NO: 837303 - DNA, 120 bp, Artificial Sequence
  ENSG00000227544_0 (sequence is synthesized)
gtatttccttgttgtgagtctagcgaatatttgattatctttaagttgatccatagtatattcaacagtctcatgagaacataatttttgttgatgatttgtccaaagtttctatcaatc

SEQ ID NO: 837304 - DNA, 120 bp, Artificial Sequence
  ENSG00000227544_1 (sequence is synthesized)
catcttagcagcagagccaagtgttagagttattgctgcctgagttataacagctgccctgggaatcttgtctgaacaacaagttaactgctgttcccagttatatctggtctttcccac

SEQ ID NO: 837305 - DNA, 120 bp, Artificial Sequence
  ENSG00000227544_2 (sequence is synthesized)
ccccaaacatacacaaaagatttttgtcattcttggcactggacaacagaagtgataagacatgccagcagaactctaaaggcagaatgtccttccacctgttttatgctgtaagacaaa

SEQ ID NO: 837306 - DNA, 120 bp, Artificial Sequence
  ENSG00000227544_3 (sequence is synthesized)
cttccaagtgcgaggcagtgtggagggctgttgccttgaatggcagctgaatgcaccagcgggatccttggcagcaatgcccaggcactgaagtcgggcattcaggagagctaaatggag

SEQ ID NO: 837307 - DNA, 120 bp, Artificial Sequence
  ENSG00000227544_4 (sequence is synthesized)
aaaagaaacttgagcaaactgcttcctggaacactgagaacctgaatgggaaattaagaagaaccagattctttctattcttccaccagccaagattttcccacccatcttaaagcagca

SEQ ID NO: 837308 - DNA, 120 bp, Artificial Sequence
  ENSG00000227544_5 (sequence is synthesized)
catggtgaagagattcatttaaagaggacaagtgatttattctacatctcaggagacagttccttaaggtgatgagcacaaaaggatccatcttatacagtgcttgccagcttccataat

SEQ ID NO: 837309 - DNA, 120 bp, Artificial Sequence
  ENSG00000227544_6 (sequence is synthesized)
actactcaccacgatgttgaaatcacctgttccagaaccagtcctgtcctttgacaagaaggatttaattatcagtagtggtggggactggctggagagaggaaaaacacttcaaggact

SEQ ID NO: 837310 - DNA, 120 bp, Artificial Sequence
  ENSG00000227544_7 (sequence is synthesized)
ctgccacctttcgtagatggagagtgcaaagtttgtaccatggaactccttctctaacagttactctgtggcagtgcctatttcaaacctcccttaacttctgattgtatagatgtttgt

SEQ ID NO: 837311 - DNA, 120 bp, Artificial Sequence
  ENSG00000227544_8 (sequence is synthesized)
ttcatttgttcatctgtttgttcacttagtcagagatgttttaagccttaagagaaatagtggactagaaaatgccttggaaaagtacaaagttcaatccaagtaaactgtttttaaact

SEQ ID NO: 837312 - DNA, 120 bp, Artificial Sequence
  ENSG00000227544_9 (sequence is synthesized)
aggaatttatgaagcctaaaatataaaatgtatatacatggatatgctctgaagtgaggtagaggggtagaaatcaacattgtgatattgtactatagttttgcaagatgttaccattgg

SEQ ID NO: 837313 - DNA, 120 bp, Artificial Sequence
  ENSG00000227544_10 (sequence is synthesized)
gggaaaatgtttgaagggtatacgggatatctctgccttatttcttacaactgcatgtgaatctacagttatctcaaaataaaaatttaattaacaattgattacaattaacagcattaa

SEQ ID NO: 837314 - DNA, 120 bp, Artificial Sequence
  ENSG00000227544_11 (sequence is synthesized)
gcctatggattctaagagtcacattccaacaggtgatatcaaaaggacaaggaagcagggaggggtgacttgcacggaaggtgcccagtgagatgtctctgccatggagattgtgctgat

SEQ ID NO: 837315 - DNA, 120 bp, Artificial Sequence
  ENSG00000227544_12 (sequence is synthesized)
gccacaagcaaagcgtttgtacccctctcatccacaagagaagtccctccgggtatttcagatgatacctgaaaggatgataaggcagggaatcagaggctgacaccgctattggatgga

SEQ ID NO: 837316 - DNA, 120 bp, Artificial Sequence
  ENSG00000227544_13 (sequence is synthesized)
attaggaagtacagggataagacagaagccaccaccaataactccacacctacagctccaaagcatgtgattcagaaggatccttgttgatattggccatcaccttgtgtcacaatacca

SEQ ID NO: 837317 - DNA, 120 bp, Artificial Sequence
  ENSG00000227544_14 (sequence is synthesized)
gtggccgcagagatttaaataaatgcatcccagatacagagttaaaagcatgccaacaatgagggctgtgtggtttggagaagagcagaagagcacactgctttcagtcaggcagaggca

SEQ ID NO: 837318 - DNA, 120 bp, Artificial Sequence
  ENSG00000227544_15 (sequence is synthesized)
gattagattgcctgccacctccagtgggatggtggctccggacagtcactcaccttctctaaaacccacctccacctagtctataaaatgcagagaacgaacaatgcctactccactgaa

SEQ ID NO: 837319 - DNA, 120 bp, Artificial Sequence
  ENSG00000227544_16 (sequence is synthesized)
ttgtatgagcattagaaagggtgtgtgcaaatcacctgacatttggcagaattcattacatgccagctgttattgaaagtaattgaaatgttgtcaagctagtcagaggaagatttctaa

SEQ ID NO: 837320 - DNA, 120 bp, Artificial Sequence
  ENSG00000227544_17 (sequence is synthesized)
ctaaaagctatactagcgaaagcactgagaatagagtgtgatatctcctattaaaaaacacatacgtatacataatacatgtatgtaaatactcaatatttttatagatagttgtctaat

SEQ ID NO: 837321 - DNA, 120 bp, Artificial Sequence
  ENSG00000227544_18 (sequence is synthesized)
catgagatgttggccctaacctagattgttccagagactggaagttcaagaccaaggtatagcagagctggtgtctggtgagggctctcctcgtaggtggcagacagctgccttctcact

SEQ ID NO: 837322 - DNA, 120 bp, Artificial Sequence
  ENSG00000227544_19 (sequence is synthesized)
aggatagaaggagacaggcaggccagatggctgttaaccgtgtggtgtgtcccaactttccagcatcaatttaatggccaaattaaaatgtaagtcaacttaagccaaggtcaattttaa

SEQ ID NO: 837323 - DNA, 120 bp, Artificial Sequence
  ENSG00000227544_20 (sequence is synthesized)
tcctatgctttgctggtgatacagaatcattaacggtatcaataatgcccacattcaactcattctacaatgggggcaattgtaattttggtctggatatgtttaacaaaatggaaagga

SEQ ID NO: 837324 - DNA, 120 bp, Artificial Sequence
  ENSG00000227544_21 (sequence is synthesized)
attttggtctggatatgtttaacaaaatggaaaggaagaaggcaaaaccacggaactattttttttttttctttagacggagtcttgctctatctgtcacccaggctggagtacagtggt

SEQ ID NO: 837325 - DNA, 86 bp, Artificial Sequence
  ENSG00000227544_22 (sequence is synthesized)
tcccagctggaactatttttttaaactgatgcacattaataagatttagaaaatcttgagatttaatggacagtgttgagattcat

SEQ ID NO: 837326 - DNA, 120 bp, Artificial Sequence
  ENSG00000227544_23 (sequence is synthesized)
tagaaaatcttgagatttaatggacagtgttgagattcatataactttatgttgagaattctctttccaggaattatttatttcagttagtcacatttttatcttctactgaagtgtaaa

SEQ ID NO: 837327 - DNA, 120 bp, Artificial Sequence
  ENSG00000227544_24 (sequence is synthesized)
cttaatttagtgtaaataactaccatttgaatactaacataatctttttatttgtataaaaaatacaaaaagattgtttatgtgtgtgtacacatatgtgtcaagactaaaaattaagca

SEQ ID NO: 837328 - DNA, 120 bp, Artificial Sequence
  ENSG00000227544_25 (sequence is synthesized)
cggggtaaagtctttggcaaaggacaaatagtcggcaagttcacagattagaatttagaattccatcatgaagtggactaaattgttagtttaaagaagactgtgagtgtcagcacataa

SEQ ID NO: 837329 - DNA, 120 bp, Artificial Sequence
  ENSG00000227544_26 (sequence is synthesized)
aaaggtaatcctgtctcaattgtagctacagattgcaagtcctgtgtcaattcaaatttttgccagcagatactaatgacttcattgaaagcagatgtttagaaatgaaagtataaacac

SEQ ID NO: 837330 - DNA, 120 bp, Artificial Sequence
  ENSG00000227544_27 (sequence is synthesized)
aaacagaaacctacccatgaccaccatctgagattctttggtgcccgtattagtggacataggcaggtgtatcaggaggcatccagtcacgcatactggaagatactgactcaactgatt

SEQ ID NO: 837331 - DNA, 120 bp, Artificial Sequence
  ENSG00000227544_28 (sequence is synthesized)
taagcaaaggaaaatacagtgtattatataatgagacatcttgagtagggtagtcctagggtcagttgattcagcagcttgattgataatcaagggcccaaattctttcccactttctac

SEQ ID NO: 837332 - DNA, 120 bp, Artificial Sequence
  ENSG00000227544_29 (sequence is synthesized)
cctgccatcctcagcctatcagtttcgtcctccagctggcttaaaggtagttgcaaggtggctgctatcatgccatgcaaaatgcaaatgcaaaaagtatgcagatacaaaaagtatctc

SEQ ID NO: 837333 - DNA, 120 bp, Artificial Sequence
  ENSG00000227544_30 (sequence is synthesized)
ttttcataagtctcattttaagggcaaggaaaaacctgcaggcctttctgccactctcttgacccacttacttaactgtggaacaagtcacaaacacctgtttaagtggatcacttggcc

SEQ ID NO: 837334 - DNA, 120 bp, Artificial Sequence
  ENSG00000227544_31 (sequence is synthesized)
aggagggagagattgccattatccttagatggaggagaatgggggtgggggttgttatgcctgaacataatcagtgctctgccagtgagtaagagcagagatggggtgattaataggcaa

SEQ ID NO: 837335 - DNA, 120 bp, Artificial Sequence
  ENSG00000227544_32 (sequence is synthesized)
cccctcaccaaggagccattgtaaagcttcaggccagttcagaaggtgatgaagatggaaagcctccaaagcaaccagaacaaccagaaggaacacgcttttacagcttgcttctgattc

SEQ ID NO: 837336 - DNA, 120 bp, Artificial Sequence
  ENSG00000227544_33 (sequence is synthesized)
cacaccgcgaggacaatgggtccagcatgccacactgatccaggaacttagaactaagtaagaagcaagggagagaggctgctatagctgaaacccagagaatgaactttctcccaggag

SEQ ID NO: 837337 - DNA, 120 bp, Artificial Sequence
  ENSG00000227544_34 (sequence is synthesized)
gttgcaagggctgcccttgtaaaagatcctgtcctgggtttaaaggttagcaaattttctgttttgttttgctttgactgcatgagggttgagttaaagtgaaataatatttaagactta

SEQ ID NO: 837338 - DNA, 75 bp, Artificial Sequence
  ENSG00000227544_35 (sequence is synthesized)
catgagggttgagttaaagtgaaataatatttaagacttattttttaaataagaagagacagggtctcactgtgt

SEQ ID NO: 837339 - DNA, 120 bp, Artificial Sequence
  ENSG00000227544_36 (sequence is synthesized)
tgcctcagcctcccaaagtgctagcatcacaggcatgtgccaccacacccaaccccttaaaagtctttttacaaatgagaacatgaacaattgcctttcagattatttcctggtcatcaa

SEQ ID NO: 837340 - DNA, 120 bp, Artificial Sequence
  ENSG00000227544_37 (sequence is synthesized)
agatttctttctttatttacataaaggggacaggggtcagtctgtgtattggaagatgtgcccatatttggtcacatattggaagagtacaaaattgcccaaataagggatatttattgc

SEQ ID NO: 837341 - DNA, 120 bp, Artificial Sequence
  ENSG00000227544_38 (sequence is synthesized)
cttcctgactgcagactcaaggaggcaggaactttgacattttctccaatgcctatctgtatccacattgcctgtaacatagtatatgctcaataaatattgattgaactaattaaaaaa

SEQ ID NO: 837342 - DNA, 120 bp, Artificial Sequence
  ENSG00000227544_39 (sequence is synthesized)
agatttgttttcttttctgcatctttctcaaccatccatctactaccatcatcatcattttccctaatcttcttaaaccccatccttaatattcttccccctttcttctctctctgcctc

SEQ ID NO: 837343 - DNA, 120 bp, Artificial Sequence
  ENSG00000227544_40 (sequence is synthesized)
ggcactgtgctaaactcaaatggtggggaaagtaaacacagaccctgcctccatgggaccctcaggggaggagacacataaacaaataatcagacaagtatatagccactgggctagaca

SEQ ID NO: 837344 - DNA, 120 bp, Artificial Sequence
  ENSG00000227544_41 (sequence is synthesized)
ggaaaagttcagggtcctgtgagagtaggacagggggtcctaacctagtgggggtgacaggaaagactgagatctgaaggattcattctttcaacaattatttttgaatgcctacctctt

SEQ ID NO: 837345 - DNA, 120 bp, Artificial Sequence
  ENSG00000227544_42 (sequence is synthesized)
aggagtgacagagaagactggcagctgcagagcaggacagaccagattggccagtacaacagcagagggccatgttgggctttgactcaggaatcctggtggaggcaatgatgagagaga

SEQ ID NO: 837346 - DNA, 120 bp, Artificial Sequence
  ENSG00000227544_43 (sequence is synthesized)
tcagatttccaaacttctattgattctaatctttcccaaacagtgctgtggcaatgtatgaaagtaataaaaataatcctttttctgttaaaaaaaaaattgctgttacttgctgttttg

SEQ ID NO: 837347 - DNA, 120 bp, Artificial Sequence
  ENSG00000227544_44 (sequence is synthesized)
caggagacagttccttaaggtgagaggtgttgcctatgccaacttgcttattgcctcttttgatgttatcttagcaataagctggggctaatcgtccccagtttgggagactttgaggca

SEQ ID NO: 837348 - DNA, 120 bp, Artificial Sequence
  ENSG00000227544_45 (sequence is synthesized)
caaaaaacctaggagaatccacaggcttttgttaattttattctatctgcctggtgtttctggaactctagtttcaaagttagaatacccagaatcccagcagctgaggaaagtaataac

SEQ ID NO: 837349 - DNA, 120 bp, Artificial Sequence
  ENSG00000227544_46 (sequence is synthesized)
cagtgtctgggggcgagggtggggagggaagcgagggtataaagaggatgagaattcttctagttattttcagtttttactgaaactgaagctttcctgaaactttaagtttttaggaaa

SEQ ID NO: 837350 - DNA, 120 bp, Artificial Sequence
  ENSG00000227544_47 (sequence is synthesized)
cttaaagataattgtttgtttacttaaaatacagcctcaaggatacttttagtttaaaaaaatttcttgactacttgatttcctcttgggaagattattatttaacaaaaatatgtattt

SEQ ID NO: 837351 - DNA, 120 bp, Artificial Sequence
  ENSG00000227544_48 (sequence is synthesized)
ataaacaaaatatttcagaacaggagtctgtggagaaatagtcttaaaaggacttttcagcagtgataagataagaaacactgccctaaagaaaactgttggctgggcgcggtggctcat

SEQ ID NO: 837352 - DNA, 120 bp, Artificial Sequence
  ENSG00000227544_49 (sequence is synthesized)
agataaaacacactaggtaagccaaggtagttgtcaggatagaaggagacaggcaggccagatggctgttaaccgtgtggtgtgtcccaactttccagcatcaatttaatggccaaatta

SEQ ID NO: 837353 - DNA, 120 bp, Artificial Sequence
  ENSG00000227542_0 (sequence is synthesized)
ggaacaaaggaggcgagcgcagctgcacgcgcagggaggcccacagcgtcccgggcccctcctcccccgccgccgccggggcacaccgcacctgaaccccactccccaggacgccccatt

SEQ ID NO: 837354 - DNA, 120 bp, Artificial Sequence
  ENSG00000227542_1 (sequence is synthesized)
gttctccctccgctttcctgcccggaggaagccacaccgtgtctttccagggggccaggaaacagctgtgggccagaggaatggaggggctgtgggtgaacacgaggacagccgagattc

SEQ ID NO: 837355 - DNA, 120 bp, Artificial Sequence
  ENSG00000227542_2 (sequence is synthesized)
gactctgcccacagaccagcaaagccaaggacagagaggtcttcagggaatacatggctatggtggtttgaagactcccattagagagtggatattaattgccctccttttgaatatggt

SEQ ID NO: 837356 - DNA, 120 bp, Artificial Sequence
  ENSG00000227542_3 (sequence is synthesized)
ggtcataaaaggagatgaagttttcacctggctctcccttgggacactcacccttggaacccagctgccatattgtgaggaagctcaagccacagggaaggccatgtgtaggtgtttggg

SEQ ID NO: 837357 - DNA, 120 bp, Artificial Sequence
  ENSG00000227542_4 (sequence is synthesized)
ctgatggtgccagctgaggacctggtctactgccagtacaacttatatcaagcatgtgagttggcgagcttttgaaagaactccagccacagtcactgaccacgctgcctgagagaccta

SEQ ID NO: 837358 - DNA, 120 bp, Artificial Sequence
  ENSG00000227542_5 (sequence is synthesized)
gagagaaaacctagctgagccaaatcaggccccggaaacataaataaccagcacctctgcctgctttccttactcaaatctttgatgagaccatcttttcagaagaggcaggtgcagcac

SEQ ID NO: 837359 - DNA, 120 bp, Artificial Sequence
  ENSG00000227542_6 (sequence is synthesized)
ctttggaacctgcattaactctcccagcagacaaacagacacatttctttcacaagagccacctcctttctaattgagaagtctgttgctcttggtgttctccggcctgccacgcctacg

SEQ ID NO: 837360 - DNA, 120 bp, Artificial Sequence
  ENSG00000227543_0 (sequence is synthesized)
gcataaggacctacgtagtgagaaatactataaatatccccatttgtgacaggaaggagctgagtcagagagaccgtgtgtaatttgctcagcgtcacacagatagtaaacggcagagcc

SEQ ID NO: 837361 - DNA, 120 bp, Artificial Sequence
  ENSG00000227543_1 (sequence is synthesized)
gctcttcctccctgtcccgccagctcctgccttctgctgtcttggatctcctatgcacgggaaacctgttgaagacgaggtctcactgtgttgctcaagctgtcctggaagtcctggact

SEQ ID NO: 837362 - DNA, 89 bp, Artificial Sequence
  ENSG00000227543_2 (sequence is synthesized)
ccttgatttttctgtcaccccctccactgcaccctgagaatcactgctaatggacttagaggaaaccgaagaaatcccaagccacacca

SEQ ID NO: 837363 - DNA, 120 bp, Artificial Sequence
  ENSG00000227543_3 (sequence is synthesized)
atggacttagaggaaaccgaagaaatcccaagccacaccaaacaggacctcaagactctcccatttttctatcatcaggggcatgtttggtacctctggcgatttgcgaaatgaccttct

SEQ ID NO: 837364 - DNA, 120 bp, Artificial Sequence
  ENSG00000227543_4 (sequence is synthesized)
gaccccagaactccgagtcaaaccctgtgccacacccttcccagggcccagtggtactgcatcatctgttgcaatcagctgccgaggcttcaccactggtattcctatgaaaaagcaagt

SEQ ID NO: 837365 - DNA, 120 bp, Artificial Sequence
  ENSG00000227543_5 (sequence is synthesized)
cagtttggacttatcctcttcatcaccaacttcatcatcttccacacttcggccaggaaagaaaaagcccatcattctgtggaagaactggtgtgtcagctggatggtgagaggcaccac

SEQ ID NO: 837366 - DNA, 120 bp, Artificial Sequence
  ENSG00000227543_6 (sequence is synthesized)
atttacctaaaaaggaaaaagattcaagaagcaattaagctcagataccatcatcagtttacctactcctaatatcgtgtaacacacaggtggcttttgaatgtcccttgttcccaggtc

SEQ ID NO: 837367 - DNA, 120 bp, Artificial Sequence
  ENSG00000227543_7 (sequence is synthesized)
cctaagggactgcttactaacctcaaaatgctccttaacagagatacccccaacagggggccgaactttgctgaagaggcggagagctagctgtcgcccagactggcaggagctctgggg

SEQ ID NO: 837368 - DNA, 120 bp, Artificial Sequence
  ENSG00000227543_8 (sequence is synthesized)
ccgcagtactacctgtaggatagagagtaaagaagagcccaacccaatgtccttcctgccataaagcaacccacaaatcctctgcagaatgagaggagaagcaatggtactgctaagctg

SEQ ID NO: 837369 - DNA, 120 bp, Artificial Sequence
  ENSG00000227543_9 (sequence is synthesized)
ggcaagctttcaccctctcagatcaccacattgttttccatagtggatttatactgaagggccgttataaatgccccgtgctaaaaacatgcaaatggactaggaaaggggaaaaaagac

SEQ ID NO: 837370 - DNA, 120 bp, Artificial Sequence
  ENSG00000227543_10 (sequence is synthesized)
ttgccttatagacagcattggggaggaggttgttcatggtaaaccagcccaactccagaagatgttctgctgtgtcatcagacttattcacctataaagacagattttgccccatctact

SEQ ID NO: 837371 - DNA, 120 bp, Artificial Sequence
  ENSG00000227543_11 (sequence is synthesized)
gttgtcgagcgttttccgctgacggagccctcacctcagacaccggcggtagggctggatgcgggcccggcccaggaccggtcttctgtcctcacaccggggaggaccacgcaggaagga

SEQ ID NO: 837372 - DNA, 120 bp, Artificial Sequence
  ENSG00000227543_12 (sequence is synthesized)
ctaatatgacctaggagagagaccctagtgacattatgttaaccatttcttaaggaccttaaaccctagtgacattatgttaaccatttcttaaggaccttaaaccctagtgacattatg

SEQ ID NO: 837373 - DNA, 120 bp, Artificial Sequence
  ENSG00000227543_13 (sequence is synthesized)
ttaaccatttcttaaggaccttcgcccactgtgctgctgtggccacaaaagccatataatgttgggtgacctgaatatcaattaacacagtattataaaatcctctgcatctgcactttg

SEQ ID NO: 837374 - DNA, 65 bp, Artificial Sequence
  ENSG00000227543_14 (sequence is synthesized)
attaacacagtattataaaatcctctgcatctgcactttgaaaaagcatcacgagtgaattacct

SEQ ID NO: 837375 - DNA, 120 bp, Artificial Sequence
  ENSG00000227543_15 (sequence is synthesized)
gcccccaaccccgggctcgacccaactttccaggacagtagacacggccggtgcccccgcgacagcagcccggcccagttctctccgccagagatctcccgcttaccgtctggggcgaag

SEQ ID NO: 837376 - DNA, 120 bp, Artificial Sequence
  ENSG00000227543_16 (sequence is synthesized)
gcgacaggctgaggctcagttttttcactcgccacatcttcaaccagaaggcaggcctatcacgtctcagaccaagtcgaggacgccatgttcacccgccgtctgtgtttgaacctgctc

SEQ ID NO: 837377 - DNA, 120 bp, Artificial Sequence
  ENSG00000227543_17 (sequence is synthesized)
tgcgcttcctggttggctgcttcaggcgcgcgcgtacgctcgggggtagagcccggggggcggggcccgcgttgaccacgcccccggccctgcctgcccctccgttgtcgagcgttttcc

SEQ ID NO: 837378 - DNA, 120 bp, Artificial Sequence
  ENSG00000227543_18 (sequence is synthesized)
gctgacggagccctcacctcagacaccggcggtagggctggatgcgggcccggcccaggaccggtcttctgtcctcacaccggggaggaccacgcaggtagctggagagtccaggagtcc

SEQ ID NO: 837379 - DNA, 120 bp, Artificial Sequence
  ENSG00000227543_19 (sequence is synthesized)
atccctcctgcttccagcggacctcctcacatccatggtgttcatatccaagttgtctccgtggatggagaagaggaatcctctccctaggtctccctcagtcctctccagccgcagcct

SEQ ID NO: 837380 - DNA, 120 bp, Artificial Sequence
  ENSG00000227543_20 (sequence is synthesized)
tgacgggaaagagccggccagggagtctagaagccgaagcggtgccgagcggcttccctaggcttggtgggcccgcgtccgggacggcccgggccgtggttctcgacctgggctgtaatg

SEQ ID NO: 837381 - DNA, 120 bp, Artificial Sequence
  ENSG00000227543_21 (sequence is synthesized)
tctccagagtttctgggcttttcctgggacttactcaggccggctaccagtttactgggctaaccgcctacatgtattgaacattgagtgtgtgcctggcgctatgccgaatgccgtgta

SEQ ID NO: 837382 - DNA, 120 bp, Artificial Sequence
  ENSG00000227543_22 (sequence is synthesized)
ggctgtcccttttgacagccatggcaaagtctagccatgtccatgtgttgttgtggtactccagacagggcagcaccaggttaaggtcaccccagtccacactgttcttctcaccctgta

SEQ ID NO: 837383 - DNA, 120 bp, Artificial Sequence
  ENSG00000227543_23 (sequence is synthesized)
agaggagggggaggggaaagaaaaaaagaggggtggggaatacatcagctgccattttgagtcccagccagccacttgagtgccaagtcctacaatagtaacctacagatactgatttcc

SEQ ID NO: 837384 - DNA, 120 bp, Artificial Sequence
  ENSG00000227543_24 (sequence is synthesized)
ccttacctcagcctcgtaatgatgctgactcttgaggggagcagagggaacagcagatttatcacccacagctcagcatcacaaacaacctagctgtctccctgtatagaatctctgatc

SEQ ID NO: 837385 - DNA, 120 bp, Artificial Sequence
  ENSG00000227543_25 (sequence is synthesized)
ttatctggttcccttcccaccctgttctacaaagtgcttgagaggtgcagaccttgtagctgacacacagtggaacctgtggaatctttatgtagatgaaggagttgttcatggcagctc

SEQ ID NO: 837386 - DNA, 120 bp, Artificial Sequence
  ENSG00000227543_26 (sequence is synthesized)
gctctttcatcttgtcaatgtcatccacagggtgctaagaaaggcaggcaaggagtgtgagccctgaatccatcagaagaaactcaggaccccaaacatctccctcttcttttatcccta

SEQ ID NO: 837387 - DNA, 120 bp, Artificial Sequence
  ENSG00000227543_27 (sequence is synthesized)
acccatgggggccccaatgtctacagttctcagctccctaacttcttggacttgttggcacttcttattgagactctttctcagacaaagggaaaaaagcacttaactctaccttcacat

SEQ ID NO: 837388 - DNA, 120 bp, Artificial Sequence
  ENSG00000227543_28 (sequence is synthesized)
ctcgatgcatgatgcccaagtcatggagataacctgtggataacaagtatgggtaccagcaccaactcggcagcaaagagacggatggaagcctcaggaaagcagccaacagccgaccaa

SEQ ID NO: 837389 - DNA, 120 bp, Artificial Sequence
  ENSG00000227543_29 (sequence is synthesized)
agggagtacagatctgtgctgcagtagctacacactgcaaagccagtgtggagctacatacattgccagaagtctaggcaatgtttgggagctgcaatgcctgggctcaaggcattgtag

SEQ ID NO: 837390 - DNA, 120 bp, Artificial Sequence
  ENSG00000227540_0 (sequence is synthesized)
cgtcccacccctatcgaggcagtcacaccttaaaaaaaaaaggaggggttattcctgcttttgccgtgctgtgatccagggcagagtttctcgtcaaccagtaaaacatccagtaacaca

SEQ ID NO: 837391 - DNA, 120 bp, Artificial Sequence
  ENSG00000227540_1 (sequence is synthesized)
gccaatggaaataaatgaatgggtctctgtttatagtgaagattctttcgttctccagctccaggcttcatacggtaaaactctctgggaaggaaaggaactcagagtcccatgcagaaa

SEQ ID NO: 837392 - DNA, 120 bp, Artificial Sequence
  ENSG00000227540_2 (sequence is synthesized)
tccaaagccaactgtttcctgtagtgtgtggatctctgcaagcagagcctcatctttcaatttcagctacatgaaagaggaagaaagggaaagatatatgtcatacgtgatatactttat

SEQ ID NO: 837393 - DNA, 120 bp, Artificial Sequence
  ENSG00000227540_3 (sequence is synthesized)
gtggctttgaagacccctcttttgtggggctacggctaaagaacatagttccctgggatggaattggctcttcctatttccctacttcatgaaaactccagtagaagaccttagaacctt

SEQ ID NO: 837394 - DNA, 120 bp, Artificial Sequence
  ENSG00000227540_4 (sequence is synthesized)
gtcctggttacatggatatgtttactttgtgaaaattcatcaagcactatgcacggtcatgatttgtacatttttttgtaagataacttcattaaaatttactttttttatttttaaaaa

SEQ ID NO: 837395 - DNA, 120 bp, Artificial Sequence
  ENSG00000227540_5 (sequence is synthesized)
gagtccctgctggagtcagaagttttaggcgaatcccaggcgcgccaaggaaagtgctacaaaagccatccatcttgcaagcgttggtgccgaggcgcaacgctgagaacgcaaatacta

SEQ ID NO: 837396 - DNA, 120 bp, Artificial Sequence
  ENSG00000227540_6 (sequence is synthesized)
aagggcgctgttctttcctcgtggagctcacagtccgctggggagaccgtgagatgacagcagagaaactagcgcgatcagtagtactcagcgcaaggacagcgagcagagaaggcaaac

SEQ ID NO: 837397 - DNA, 120 bp, Artificial Sequence
  ENSG00000227540_7 (sequence is synthesized)
ctagtgcttgctaaggaagacttcacagaggaggtagtgtcagggccgagactaggagaaggattctccaggcttcatacggtaaaactctctgggaaggaaaggaactcagagtcccat

SEQ ID NO: 837398 - DNA, 120 bp, Artificial Sequence
  ENSG00000227540_8 (sequence is synthesized)
tagtgcttgctaaggaagacttcacagaggagtcacaccttaaaaaaaaaaggaggggttattcctgcttttgccgtgctgtgatccagggcagagctccaggcttcatacggtaaaact

SEQ ID NO: 837399 - DNA, 120 bp, Artificial Sequence
  ENSG00000227549_0 (sequence is synthesized)
accttggcccttcacccagccagaattaacagtcctgctttcatgcctttgcttgccacccagcttagcctcttatctcagcttctgaaacattcttcaatcttctgaaggtggcagctg

SEQ ID NO: 837400 - DNA, 120 bp, Artificial Sequence
  ENSG00000227549_1 (sequence is synthesized)
ttaatacagaacttgatgaggaagatgccagcatctcacctggaattcacaaaaccctagccagccctaactcacaagggcctgcacaccctttaatccagcaaaattaactcaagagca

SEQ ID NO: 837401 - DNA, 120 bp, Artificial Sequence
  ENSG00000227549_2 (sequence is synthesized)
tgtgggacctgaaatccagtctctgcatattattgcaagtgcttcaagcaaagaaaagaacctgatttcacatttgagatgcattttaaaccaaaggtctgttctggtacctccacaagg

SEQ ID NO: 837402 - DNA, 120 bp, Artificial Sequence
  ENSG00000227549_3 (sequence is synthesized)
tctcactgacctacaagaattgaatttgcccgtgtcttcacaacaccttgttagtggtatcaaatcaggagattgaagtgagccatagtgagagtatggacaccacagaaatcaacttac

SEQ ID NO: 837403 - DNA, 120 bp, Artificial Sequence
  ENSG00000227549_4 (sequence is synthesized)
atatcaaggctttttctttatttcaggagagccagttcaatagtacaacacttttatgatcttccctcttttgctcacacctccctgccattcctgttcccagtccatacttgaataact

SEQ ID NO: 837404 - DNA, 120 bp, Artificial Sequence
  ENSG00000227549_5 (sequence is synthesized)
gtgttgcaaataacatcagttcagaaaacttgtgtctccgcaggaagatttatttgttcatttaccttaatacaggaagttcctctgcagcattttttagctggaggtgctgaaagacca

SEQ ID NO: 837405 - DNA, 120 bp, Artificial Sequence
  ENSG00000227549_6 (sequence is synthesized)
ttctacccactgctacagctaggtactgtgctcttgctcagattgctggagggttttgttgtgatgatctccttcaatacatcaatactataagttctataagaatcatctcagagcttg

SEQ ID NO: 837406 - DNA, 120 bp, Artificial Sequence
  ENSG00000227549_7 (sequence is synthesized)
tttagaactcattttttttctttttctgggttatgcaattataatattcatttacatgtgaaagccctggaccatcaatggattttatcaatgtattaaaattgctaactgtgccatgca

SEQ ID NO: 837407 - DNA, 120 bp, Artificial Sequence
  ENSG00000227549_8 (sequence is synthesized)
tggcccttcacccagccagaattaacagtcctgctttcatgcctttgcttgccacccagcttagcctcttatctcagcttctgaaacattcttcaacctctaccagtcttctgaaggtgg

SEQ ID NO: 837408 - DNA, 120 bp, Artificial Sequence
  ENSG00000184608_0 (sequence is synthesized)
atcaatgcacttttatagatacctgcatctgcgtaactgctacccaggatcaagaatacagaatatgtcagctcccagcactctaatgccccgcctcatcattaccaaccctgcctcaga

SEQ ID NO: 837409 - DNA, 120 bp, Artificial Sequence
  ENSG00000184608_1 (sequence is synthesized)
gataactactatcctcacttctgtcactatagatttagacttgcaatctacctggaattgatgtgagtatggtgtgagacagaacttcaggttgacttttggttctctatggatacccat

SEQ ID NO: 837410 - DNA, 120 bp, Artificial Sequence
  ENSG00000184608_2 (sequence is synthesized)
agtagatatagaaccatattcatggcaccagtgactgaagagtccacgcactccccactctgctgcagtgtcaccgtgatcataaatcaagtgggttgggatttccagttccttgatgaa

SEQ ID NO: 837411 - DNA, 120 bp, Artificial Sequence
  ENSG00000184608_3 (sequence is synthesized)
gagaagttacgagactgggcatccttgctttgttcctaaacaggaggtgaaaacattcagtcttctgccattaggtatgatgttagctctggattttttacacatttattcatttattta

SEQ ID NO: 837412 - DNA, 120 bp, Artificial Sequence
  ENSG00000184608_4 (sequence is synthesized)
ttaggttaaagatgtcttctactcttagtttgctaagagtttttttaaacatcaatgggaatgttttcagaatctttttaattttttttctacatctatggagataattttttatagtgt

SEQ ID NO: 837413 - DNA, 120 bp, Artificial Sequence
  ENSG00000184608_5 (sequence is synthesized)
gcaggcgtgaggaccacgcatacataagttgctgtgctttctctacggcttgtgtcaagtcatccagttttcgttcgcagggcttcaggaatagagcagttctcatttcagtgattccaa

SEQ ID NO: 837414 - DNA, 120 bp, Artificial Sequence
  ENSG00000184608_6 (sequence is synthesized)
accagaagggtgggagaaaaatattagtttggagacctgtagccagacatttctggaaacgagaagaattcaggatccagtccagattgtaggttgggatttccagttccttgatgaaga

SEQ ID NO: 837415 - DNA, 120 bp, Artificial Sequence
  ENSG00000184608_7 (sequence is synthesized)
ggatttccagttccttgatgaagagaagttacgagactgggcatccttgctttgttcctaaacaggaggtgaaaacattcagtcttctgccattaggctttggtatcaggatgatgctgg

SEQ ID NO: 837416 - DNA, 120 bp, Artificial Sequence
  ENSG00000184608_8 (sequence is synthesized)
cttattattttcgtcagtgttgtgcaggagaatccacttagaagcctgggtaaaattgtattacatgatcttgggtttggtccctgagaaagagccagattaacgctggcaggaaagaaa

SEQ ID NO: 837417 - DNA, 120 bp, Artificial Sequence
  ENSG00000184608_9 (sequence is synthesized)
tggaggttccggggaaatgtgaagaaagaaacgcaaacacccctaggaaccagattgcatcttggaactgaggaggttctggaagctgtacacccaaggaagacattctgtgccggagag

SEQ ID NO: 837418 - DNA, 120 bp, Artificial Sequence
  ENSG00000184608_10 (sequence is synthesized)
agagtgggagagatgtgactgctgctggctgggtgaggacaggcccagaggacagcatcactggcacccacccctgcatttgggtcctctgcacctcagctcccagcatctgggcctcct

SEQ ID NO: 837419 - DNA, 120 bp, Artificial Sequence
  ENSG00000184608_11 (sequence is synthesized)
ccctgcctgcctccccccctcactcaatctgtctccactcaagaggctgatgggcaggtctccctgcttcttcaaatctttcaaagggaaacttcacaaagacaggagccctgacccatc

SEQ ID NO: 837420 - DNA, 120 bp, Artificial Sequence
  ENSG00000184608_12 (sequence is synthesized)
caccttggcctcaccccaccccagcacggaagccaggcggccagtggaggccggtagtgctgaatggacatggggctggatgaaaagacttccgcctgcctctctcagccccggaatcgc

SEQ ID NO: 837421 - DNA, 120 bp, Artificial Sequence
  ENSG00000184608_13 (sequence is synthesized)
catgagctgctattccggagattctatgctacagaagtacaaggtgaagaatgcataccgattacattggcaagggagagaagagcctggtgctagcacttttgcttctttggtctttca

SEQ ID NO: 837422 - DNA, 120 bp, Artificial Sequence
  ENSG00000184608_14 (sequence is synthesized)
ataatgtctttccccttgattatacatgatatattcctattttggaaacttcgaaaactataaaaaagtcaaaagaataatattaccactcagaaataaagatcatcaagttttggtgta

SEQ ID NO: 837423 - DNA, 120 bp, Artificial Sequence
  ENSG00000184608_15 (sequence is synthesized)
ggagacactgacaacaggcttaactgggaagctgtgccccaaaaggagcttcaaagaagagccccctccacatcctcaggagaaggactcttggttggaaaaggcctggaagtgaccagt

SEQ ID NO: 837424 - DNA, 120 bp, Artificial Sequence
  ENSG00000184608_16 (sequence is synthesized)
atctatggtgcttcgtctctttctcaggcccataaggacagaatttacatttgaaaagaagaacaacacagaaacttttgcaaagggctgccaatactttttctctgaggaacgtgcaat

SEQ ID NO: 837425 - DNA, 120 bp, Artificial Sequence
  ENSG00000184608_17 (sequence is synthesized)
gtgatgaacaaaattttttcccagaaagccagaggctgggcaaaggcagaggggcctggaggctgctcccaggttgggatttccagttccttgatgaagagaagttacgagactgggcat

SEQ ID NO: 837426 - DNA, 120 bp, Artificial Sequence
  ENSG00000286124_0 (sequence is synthesized)
tgctacaacatgatctcagttgctgttaaataagtttcgcaagaaactgaagaatggaaagacaagagatgtgcagctgtgttatcatggatttccagtgaacaagggccacaaaaatcc

SEQ ID NO: 837427 - DNA, 120 bp, Artificial Sequence
  ENSG00000286124_1 (sequence is synthesized)
atctattttcatcatccccagagcaccaggactacaacaataagaacagctctatggaaatgatgaggaacaagtttcagagaacagaaggaatttgtcttgggctgcacagtcactaag

SEQ ID NO: 837428 - DNA, 120 bp, Artificial Sequence
  ENSG00000286124_2 (sequence is synthesized)
gagagagcaggcacccaaactgtgccattccctgtcctcttgggagctatactcttctgtatccctgcttctgttcaacgtatctggctcaagagacatttacaaaggaaggaaacactc

SEQ ID NO: 837429 - DNA, 120 bp, Artificial Sequence
  ENSG00000286124_3 (sequence is synthesized)
gttgtatgaaaaacaaacatgatataaacctgtttcgttagctttcaagactaccctacccaggggtggctaccctaaagagaatagcaaagttgataagagaaagaatgataaaactat

SEQ ID NO: 837430 - DNA, 120 bp, Artificial Sequence
  ENSG00000286124_4 (sequence is synthesized)
agtggtctaaaacgctaaataaaagggatattgtttgtatttattacttcttgaatgcagtgtatatttagaactcagaacaatggttgtatttagcctatacactccttttaagaaatt

SEQ ID NO: 837431 - DNA, 120 bp, Artificial Sequence
  ENSG00000286124_5 (sequence is synthesized)
caccccatgtatgtgggcagccttagatcctagattcatcacagcttctatttgtgaaccattagtttgtatccctcttttgacaaccaccttggaaaataatttctctctcatgcaaac

SEQ ID NO: 837432 - DNA, 120 bp, Artificial Sequence
  ENSG00000286124_6 (sequence is synthesized)
ctgtcccaccttattgaaggcccactgtagcctttacaacttaaaacagttctctgtactgaagtagtcatgttactaactgcacgaatgacactagcaagttaaaacaacgtgaattct

SEQ ID NO: 837433 - DNA, 120 bp, Artificial Sequence
  ENSG00000286124_7 (sequence is synthesized)
taatgtatgtcggatttaaaattcttttgatccccgatttgttgtgctcagcattgtagtctgtgcaaagcaaagttattagctgagaaaattaagatgtttgagtattctatatttcta

SEQ ID NO: 837434 - DNA, 120 bp, Artificial Sequence
  ENSG00000242611_0 (sequence is synthesized)
ctcttcctcttcctaattctcctcctctgcctcctccttgtcctctccctcccccttgtcctcctcgtcttccttttcttcctcctcttctgtcccagggctttcaaactctggctctcc

SEQ ID NO: 837435 - DNA, 120 bp, Artificial Sequence
  ENSG00000242611_1 (sequence is synthesized)
aacgacatggaagagttaaaaggaggaacgccggctcagccaagccccggagactcctacttgatatgggcagtttaaagccactttccctttaaatttttctgtgacaactcttttcat

SEQ ID NO: 837436 - DNA, 120 bp, Artificial Sequence
  ENSG00000242611_2 (sequence is synthesized)
ggagaatggaaagactctcgttaagtgttgccgttcagaagtgttggtggtcgttgctaacatgagatccaacaagaaatggtgaaaatgcacaatgcctcaggacgccttgaggaagga

SEQ ID NO: 837437 - DNA, 120 bp, Artificial Sequence
  ENSG00000242611_3 (sequence is synthesized)
gcagcgtgttgctgctgagggtgaacacacgtggtctctgaggagaggcgacagatctccctgggcgtcagtcatcctgggactgggtgtcgtggaagaaggtgacaccaggcagaaacc

SEQ ID NO: 837438 - DNA, 120 bp, Artificial Sequence
  ENSG00000242611_4 (sequence is synthesized)
aagagcaggggagctgcaggccggtatcagagcccgtatcagagcagagtggcccctgagcggggaggcagctggagctcactgttggaggagggcccggcacctgcacctgaggacatg

SEQ ID NO: 837439 - DNA, 120 bp, Artificial Sequence
  ENSG00000242611_5 (sequence is synthesized)
tctgggccacggcccctcacggctgcatccagtcaccagagttcctctgtgcctcacccacccttgatcatagaagacagcctgcatgtcctcagctctgtcctccaaccggctgcccgg

SEQ ID NO: 837440 - DNA, 120 bp, Artificial Sequence
  ENSG00000242611_6 (sequence is synthesized)
gaggcctccctggctgctccccaaactgcacgtgccctgagtcagccctggggcctcatggactcccctgttcacgcatcccggcagcgcgcaaaccatccctgtcggctcccagtgaaa

SEQ ID NO: 837441 - DNA, 120 bp, Artificial Sequence
  ENSG00000242611_7 (sequence is synthesized)
tgctacaggatctcagggcagctgcaccccgcaggttcagaagggatgggattctgtgtccttttccttcttgcttcagaccttcacctggggctctaacaccgaaagtctgtgccagac

SEQ ID NO: 837442 - DNA, 120 bp, Artificial Sequence
  ENSG00000242611_8 (sequence is synthesized)
agaggcatccacagcgacaggagcctgggccagggcggccatccctgctgcagagacaaatgtcagtgtccatggaatcagttcggtgcggtgagcggcaggtctgatatgaaagctact

SEQ ID NO: 837443 - DNA, 120 bp, Artificial Sequence
  ENSG00000242611_9 (sequence is synthesized)
cgcacttcccgtctgggcaagagcaggaactcggcaggcagagagctggtggagctttccatgggaaaaccagaaccttcaaagagcccggcctccctctgatcagccccttctttctga

SEQ ID NO: 837444 - DNA, 120 bp, Artificial Sequence
  ENSG00000242611_10 (sequence is synthesized)
tcagatgcattattgacgaggcagcctcctccacctgcctctcatcagagcagctcgtttcccaccgtggtaatttatacttgtgattttggccttgatcaataaaggcaacggagaaga

SEQ ID NO: 837445 - DNA, 120 bp, Artificial Sequence
  ENSG00000242618_0 (sequence is synthesized)
ggcatctgtagaaaaccactggctctagatgccccaagccagagtttctgggggtggcgtctgggaatccacttgtaataagccactgagaccaaggctgggaccagaaatgtatcagta

SEQ ID NO: 837446 - DNA, 120 bp, Artificial Sequence
  ENSG00000242618_1 (sequence is synthesized)
aggtcttgaccttggccatggtttggcatcacagcaaacttgaagttctcctctgtggaaacagcctgagctgggccatttgcaattgtgtggcctctagcacgtgtccaactggagcag

SEQ ID NO: 837447 - DNA, 120 bp, Artificial Sequence
  ENSG00000242618_2 (sequence is synthesized)
catgtggtggacaccggtgtttgtcagccccacatccatgtcagggaagagcactttgactttgctttgggtctctccggctctgcttggtgtctgtgttgctggttccccatcctctgc

SEQ ID NO: 837448 - DNA, 120 bp, Artificial Sequence
  ENSG00000242618_3 (sequence is synthesized)
cagcctcctacctctggagggggcctgataaccacacctgtacacatcagactctgttcccagacttctgttggaaccattcacaagctcactttccaaggggattgtgctggggtaaac

SEQ ID NO: 837449 - DNA, 120 bp, Artificial Sequence
  ENSG00000242618_4 (sequence is synthesized)
ggcttctgccacagtccaccacatggagaaaatgaagctaacagggaggaaagcagcctctagagagagggaaaaagaggaagagagacggagtcctgatgatgttttagctcctggata

SEQ ID NO: 837450 - DNA, 120 bp, Artificial Sequence
  ENSG00000242618_5 (sequence is synthesized)
cagctatgcctgaagccctcacgctttcatctatgttagtcaataaatcctgcccgtctccctgcttttttcttcttgagccagtttgggttacgttcatgtcactgcagttcagagtcc

SEQ ID NO: 837451 - DNA, 120 bp, Artificial Sequence
  ENSG00000242618_6 (sequence is synthesized)
tttcatagaaatatcaaatgtagtgagatgcactataagcattgctttttgttttaggttttttgtttgtttgttttgcagcagagagactaaaatgttcttcctcagaggtagcaagtc

SEQ ID NO: 837452 - DNA, 120 bp, Artificial Sequence
  ENSG00000242618_7 (sequence is synthesized)
tccttagagcagatgtgttttggaggaaaataatcaatgattctttggtttgccaaatgcaaggcaaatactaacccagagttctggaaaggacttgaataaaagagttattcaacctaa

SEQ ID NO: 837453 - DNA, 120 bp, Artificial Sequence
  ENSG00000287755_0 (sequence is synthesized)
aggaccaggaagcaggtcacccaagctgctggccctgccatggctcctggtggacgtgagggaggaacaatatcacagggctgtgtacaccccctgcgatattgggagtaatatcatcct

SEQ ID NO: 837454 - DNA, 120 bp, Artificial Sequence
  ENSG00000287755_1 (sequence is synthesized)
aatgaagtcggtggcaagaccagccggtggcactgatgagccggcctgaggtgaaaagattaaccacccccactctaagcgcatgtgctctcaatccatcacgattctttcacgtggaac

SEQ ID NO: 837455 - DNA, 120 bp, Artificial Sequence
  ENSG00000287755_2 (sequence is synthesized)
cccttagagttgtaagcccttaaacgggccaggaactctgtcttcctttgggggtcgggctcttaagacaagagtctgccgacactcccggctgaataaaaaaatctcttcctccttcaa

SEQ ID NO: 837456 - DNA, 120 bp, Artificial Sequence
  ENSG00000287754_0 (sequence is synthesized)
agaagagaattgggccctgaatgggcatgcaagcctgccattcaatcagacattccttttgggattgatggcatgagagactttttggaaggctgaattgctaaaatgggctacttacct

SEQ ID NO: 837457 - DNA, 120 bp, Artificial Sequence
  ENSG00000287754_1 (sequence is synthesized)
aactaatgcaaaaatctgggcagcgtgctgtggcatttcattgggcagtattgtttttggttcagcataatttaactctgaaagaaatcccaaaggagatgctccaaaagtcatcaggac

SEQ ID NO: 837458 - DNA, 120 bp, Artificial Sequence
  ENSG00000287754_2 (sequence is synthesized)
ctcaaaaagatagttctgtggtaattctaggaagttggatagagtggtgatgaaatgccatgcttcatgaggattcttgtctgaagatgccttgaaaactgcagagctctgaggcttcag

SEQ ID NO: 837459 - DNA, 120 bp, Artificial Sequence
  ENSG00000287754_3 (sequence is synthesized)
gggttgttaggctagctggaagatgatcaacatgtcttcccaaagggttctgttctgcttgacatccctggtataattcaaggcattgcagagtggaggaagagggaatcagtgtgatgt

SEQ ID NO: 837460 - DNA, 120 bp, Artificial Sequence
  ENSG00000287754_4 (sequence is synthesized)
tgatgctttgcccatccagatgcagagggaatctgtagctttactacatcttgaatctgggctggccttgcggctgctttgagaaatcaaaagcagtgggactgatgtgggcgacttcca

SEQ ID NO: 837461 - DNA, 120 bp, Artificial Sequence
  ENSG00000287754_5 (sequence is synthesized)
agctaggcctcaagagacatgaagcttgcaccgccaccctctggcaaccaccttgctaagagagaggaaagccttagccaatcagggggaggtaccacgtggaggagaacaaaggtacct

SEQ ID NO: 837462 - DNA, 120 bp, Artificial Sequence
  ENSG00000287754_6 (sequence is synthesized)
catctaaatgttccagccaacagctagacatatgagtgaggccatctgggaccagctgttccccagcagacctgccacatgaccataaatacgagtgagaccagccaaagccacagagag

SEQ ID NO: 837463 - DNA, 120 bp, Artificial Sequence
  ENSG00000287754_7 (sequence is synthesized)
cagggatgatttctgcccacactgccaatccacagaatggagcaaacaaataatctatgctactgatttttagagtgatttgttataaggcaatatataactgatacaataaataaaaac

SEQ ID NO: 837464 - DNA, 120 bp, Artificial Sequence
  ENSG00000287754_8 (sequence is synthesized)
ttcataaataaaaacagataaatgcttcatgagatactctgcacaaagtaaaatgtaagccacagatcaagacaatatttgaatgaatataaattatcagacttactacaaagatatata

SEQ ID NO: 837465 - DNA, 120 bp, Artificial Sequence
  ENSG00000287754_9 (sequence is synthesized)
taatagatatataaatgttgacaactcagaagaaaattaaattaagcattatgaaaatatataaacaagcaattcccaagcaagaagaaagtaatgcccaataaatatatgaaaagttgc

SEQ ID NO: 837466 - DNA, 120 bp, Artificial Sequence
  ENSG00000287754_10 (sequence is synthesized)
ctaacattaggtataatccaagaaattgaaattaaaacagatataaaaaacaatttcatacccattaattcagtaaaaagtagtgtacaacaaattttgctaagaagatggaatgatgag

SEQ ID NO: 837467 - DNA, 120 bp, Artificial Sequence
  ENSG00000287754_11 (sequence is synthesized)
agtctcctacactaattgtgatggaataaattggtgccatcattttggaaaactttggcagtaactagtaaaattgacaatacgtattctggaaagaatattgccaataaacataaggag

SEQ ID NO: 837468 - DNA, 120 bp, Artificial Sequence
  ENSG00000287754_12 (sequence is synthesized)
agagatgtgaaattatcattcatgcattatttacagtaccaaaaaatggaaacagcctcaatgtaatcattgagagaataaatcttgatgtcttagctagagcaatcaggcaagagaata

SEQ ID NO: 837469 - DNA, 120 bp, Artificial Sequence
  ENSG00000287754_13 (sequence is synthesized)
aaataaagggcatccaaatttgaaagaaagaagtcaaattatccttgtttgcaaataataccatcttatatttggaataaaccaaagactccaccaaaaaaaccttagaactgatacaca

SEQ ID NO: 837470 - DNA, 120 bp, Artificial Sequence
  ENSG00000287754_14 (sequence is synthesized)
gaagcaatcccttgacaatagctccaaaaaaaaaaaattggcaataaactcaaccaaagagttgaaagatctctacaatgtaaagtataaaacaatgatgaaagacactgaaagcaatac

SEQ ID NO: 837471 - DNA, 120 bp, Artificial Sequence
  ENSG00000287754_15 (sequence is synthesized)
aaaaaatagaaaaatattttatgttcatggattggaagaatcaatgttgttaagatatccatactacccacagtaatctacagattcaatacaattcctatcaaaataccaatgacattc

SEQ ID NO: 837472 - DNA, 120 bp, Artificial Sequence
  ENSG00000287754_16 (sequence is synthesized)
ctcacagaagtagaaaaaaaaaatcctaaaatgtatgtgcaaccacaaaagacccagaatagctaaagccattttgagcaaaaagaacaaaacgagaggagtcatattacctgaattcga

SEQ ID NO: 837473 - DNA, 120 bp, Artificial Sequence
  ENSG00000287754_17 (sequence is synthesized)
attatactacagagctatagtacacaaaaaagcatagtactggcataaaaggagacacatagactgatggaacagatagagaacccagcaataaatccatacatttacagcaaactcttt

SEQ ID NO: 837474 - DNA, 120 bp, Artificial Sequence
  ENSG00000287754_18 (sequence is synthesized)
tttgataagggtgccaagaacataccttggggaaaggacagtctcttcaataaatagtgctgggaaagctgaatatccatatgcagaagaatgaaactagaaccgtatctatcaacatat

SEQ ID NO: 837475 - DNA, 120 bp, Artificial Sequence
  ENSG00000287754_19 (sequence is synthesized)
acaaaagtaaagttaaaatggattaaatactgaaagctaagacttcaaactataaaactattaagactaaaagaaaacattgggggaaactctccggatgttggcatggacaaagacttt

SEQ ID NO: 837476 - DNA, 120 bp, Artificial Sequence
  ENSG00000287754_20 (sequence is synthesized)
ttgagtaataaccccaaaacacaggcaacaaaagcagaagtagaaaaatgggatcacattaagttaaaaagcttctgcacaacaaataatcaataaagtgaacagacagcccacagaatg

SEQ ID NO: 837477 - DNA, 120 bp, Artificial Sequence
  ENSG00000287754_21 (sequence is synthesized)
ggagaaaatatttgcaaattatctgatgaggaattaatacgaataatatataaggcactcaaacaactcaagagaaaaaaagctaataatctgatttaaaactggacagaatacatgaat

SEQ ID NO: 837478 - DNA, 120 bp, Artificial Sequence
  ENSG00000287754_22 (sequence is synthesized)
acatgaatagatatttttcaaaagaagatgtataaatggcaaccagatgtgtgaaaagatgctcaacatcattgatcatcagagaaatgcagatgaaaactacaatgagatatcatctta

SEQ ID NO: 837479 - DNA, 120 bp, Artificial Sequence
  ENSG00000287754_23 (sequence is synthesized)
aaaatggcttttatccaaaaacagccaacaacaaatgctggagacaatgtggaaaaaagaaaaccctcatataccattcatggaaatgtaaattaatacaaccactatggagaacagttt

SEQ ID NO: 837480 - DNA, 120 bp, Artificial Sequence
  ENSG00000287754_24 (sequence is synthesized)
ggaggttcctcaaaaaactaaaactagaactatcatatgactcagcaatcccactgctaggtatacccaaaagaaaggaaatcagtacattgaagagatatctgcactcccacgtttatt

SEQ ID NO: 837481 - DNA, 120 bp, Artificial Sequence
  ENSG00000287754_25 (sequence is synthesized)
gaagcactactcacaatagtcaagatttgcaagcaatctaagtgtccatcgacagatgaatggataaagaaaatgtatgtatatacaatggagtactatttagtcataaaaaagaataat

SEQ ID NO: 837482 - DNA, 120 bp, Artificial Sequence
  ENSG00000287754_26 (sequence is synthesized)
atcctgtcatttgcaacatggatgggactagatgacattatattaagtgaaataagtcaggtacagaaagacaaattttgcatgttctcattcatttgtgggagctaaacattaaagcaa

SEQ ID NO: 837483 - DNA, 120 bp, Artificial Sequence
  ENSG00000287754_27 (sequence is synthesized)
ttgaactcaataaagcttaccagaggttgggaagggtagtgaggggtgcgggggatggttaatggatataaaaatatagttagatagaataaataaggtcataattgatatcacaacagg

SEQ ID NO: 837484 - DNA, 120 bp, Artificial Sequence
  ENSG00000287754_28 (sequence is synthesized)
tagaataaataaggtcataattgatatcacaacaggaggactatagttaacaatttattgtacatttagaaatgactgaaagtatatgattggattgtttgtaacacaaagaaatgataa

SEQ ID NO: 837485 - DNA, 120 bp, Artificial Sequence
  ENSG00000287757_0 (sequence is synthesized)
actgatcacatagacccgcagcactcagccaggcccctcaccccggctctgctctcaagccgggcttggctccccgcctgcccaaatgcgttcaacatcccccgaaaggccatttccctt

SEQ ID NO: 837486 - DNA, 120 bp, Artificial Sequence
  ENSG00000287757_1 (sequence is synthesized)
ccagtcttcccggagagatgtcagggtgacgagggagcttatctttcggtggctccgaaacagccacgaagccgagctctaccagtaacaaaaatggcgtcattccgccagcgccaggac

SEQ ID NO: 837487 - DNA, 120 bp, Artificial Sequence
  ENSG00000287757_2 (sequence is synthesized)
gtaacaaaaatggcgtcattccgccagcgccaggacctctgtcgctggccgtggtctcgcactgcttctggaggctcccattccagccagaggagaggaagtcagggaccccaaacggag

SEQ ID NO: 837488 - DNA, 73 bp, Artificial Sequence
  ENSG00000287757_3 (sequence is synthesized)
aaaagaacaggataacagcaattgttcggggaataagagagatagccttaaactctgaatgccggtgagccgg

SEQ ID NO: 837489 - DNA, 120 bp, Artificial Sequence
  ENSG00000287757_4 (sequence is synthesized)
aaggaacatccctgagaaagagaatacgcacctggagatataggcctatgaacggcccccccaggtgcacctgtcttttatggtcaagactgcaggggtgaaataaaccccagtctccca

SEQ ID NO: 837490 - DNA, 62 bp, Artificial Sequence
  ENSG00000287757_5 (sequence is synthesized)
cctgataagatgttatcaatgactatggtgcccgaatcttcattagcaattttaatttcacc

SEQ ID NO: 837491 - DNA, 63 bp, Artificial Sequence
  ENSG00000287757_6 (sequence is synthesized)
ctgtgacccacaacggcttgtggggcatcacagaatctaccgacatgtgatgtctcccccgga

SEQ ID NO: 837492 - DNA, 120 bp, Artificial Sequence
  ENSG00000287756_0 (sequence is synthesized)
ggtcaagcagctcaagccatttattcagacccgagtgacaatgaggaggcagagtgacgaggaagtctggatgaagagagttccaagaaggaagagcaattgcaaagtacttgaacatgc

SEQ ID NO: 837493 - DNA, 120 bp, Artificial Sequence
  ENSG00000287756_1 (sequence is synthesized)
ttggctagttcaggggacagaaagaaggtcctaaggaggagagatggaagcagatgctgggtgaagttggagagatagatgctatgagcctaaggctaaatcggtagcttctcaagagga

SEQ ID NO: 837494 - DNA, 120 bp, Artificial Sequence
  ENSG00000287756_2 (sequence is synthesized)
aatgtgatgagcagcatggcgcacgttgaggaagtgtggcgagcagcatggcgcatgttttacgtcctcatattcccctcggagccaccttcctctcagcttctgtctgcccactgagct

SEQ ID NO: 837495 - DNA, 120 bp, Artificial Sequence
  ENSG00000287756_3 (sequence is synthesized)
tgtgtcaggagcccaggttctcatgatctaccttctcctgtgtccacatcacaaggcgtggacgccaaggctgacctggatcatctctgagggccccatgctcaccagctgggtagtcat

SEQ ID NO: 837496 - DNA, 120 bp, Artificial Sequence
  ENSG00000287756_4 (sequence is synthesized)
ggacatgttaattaacctcctcagtgtcttcatcaaacctgacgaaggaacagcatttatttcctccaggggaagcatgacgctggaacaacagaatgctcataaaacccttagcacagt

SEQ ID NO: 837497 - DNA, 120 bp, Artificial Sequence
  ENSG00000287756_5 (sequence is synthesized)
gactgcctagaatgagctgctattaaagccacttctgtgctactgtgttggaaacaaagacacacattactaaagactctgatgtcggaggccacagaacatggaggagaaaaccaaccc

SEQ ID NO: 837498 - DNA, 120 bp, Artificial Sequence
  ENSG00000287756_6 (sequence is synthesized)
ctctgcatctgtaaaatgggatcatacctggttgccaatgtcccaggctgctgagggtcaaacgaggtgatttatgcaccaagcactgtctattgtaaacacccgtgagcctcttaggtg

SEQ ID NO: 837499 - DNA, 120 bp, Artificial Sequence
  ENSG00000287756_7 (sequence is synthesized)
cagagtgtgggtgggccctggtatggtgggatacagctgctctctccaggatctgcctttcccaggcctgggagctccatgagggcaggaccgtgtctgcttttgatcaatcaagtgctg

SEQ ID NO: 837500 - DNA, 120 bp, Artificial Sequence
  ENSG00000287756_8 (sequence is synthesized)
gatattccatgggctctcaatcgataccgtaaggtgaacgaaggagaagggacaatggcaggggatgtcagggaactttccacaggtagatgatgtaccacggacttggaggcagcaggt

SEQ ID NO: 837501 - DNA, 120 bp, Artificial Sequence
  ENSG00000287756_9 (sequence is synthesized)
cctgacttacaggatcagagataagataaaaaaatctgctcaagggctgggcatggtgacttacacctgcagtcccagcactttgggaggccacggtgggaggatcacttgaggtcagga

SEQ ID NO: 837502 - DNA, 62 bp, Artificial Sequence
  ENSG00000287756_10 (sequence is synthesized)
aagaccagcctgggcagcatagtgagaactgatctcttctaaaaaattttaaaatgttaaca

SEQ ID NO: 837503 - DNA, 90 bp, Artificial Sequence
  ENSG00000287750_0 (sequence is synthesized)
ggagcctggcgtctgcctgcgtgacgtggaggaaccgcaggcggcgaccgcggacagaatgtacagccatgtaagacatgcctgctgaaa

SEQ ID NO: 837504 - DNA, 120 bp, Artificial Sequence
  ENSG00000287750_1 (sequence is synthesized)
gactgaaagtttcctaaggcctcctcagaagccgagcagatgccagcatcatgcttcctctaaagcctgtggaaccatgagccaagatttacagtactatgttgaatagaagtggtgaga

SEQ ID NO: 837505 - DNA, 120 bp, Artificial Sequence
  ENSG00000287750_2 (sequence is synthesized)
tatatggcttttactactttcaggatttttcatgggccgatctgctgaattcagcctaggagctgagaccaacatctgagtctcttcagcacacaagtttgaaagaagtcctagcaactt

SEQ ID NO: 837506 - DNA, 120 bp, Artificial Sequence
  ENSG00000287750_3 (sequence is synthesized)
caagctcagaactacgggtggcagcagctccctcttgacgtcgaagcctcccattccagagagagtcaaggcctggatcaaacaaagcccacaagcaccgatgactgagctgctgactac

SEQ ID NO: 837507 - DNA, 120 bp, Artificial Sequence
  ENSG00000287750_4 (sequence is synthesized)
ccccagcatctccaactcaacctcctctttctgcctctacccaaattttaaaactttcaaacatgggtttaaaaatggtaatgagtaaagttgcatccaagtgtatcaaataaaactaaa

SEQ ID NO: 837508 - DNA, 120 bp, Artificial Sequence
  ENSG00000287753_0 (sequence is synthesized)
agtgcgtttaggaagttgtacgcatacccaactgaagctttcttcccttctccagtggagtgcacctggagaggatctgagatggtatagaagtgtttgtatcccagcagcaggtggaag

SEQ ID NO: 837509 - DNA, 120 bp, Artificial Sequence
  ENSG00000287753_1 (sequence is synthesized)
ccaggggatgtctaccaaagttgtaaatgcatgtattctgtggtgtagctgagagatagctgcctcacagagtatgccatggaaaattctaaggatgatgaggccagaccactctgcatg

SEQ ID NO: 837510 - DNA, 120 bp, Artificial Sequence
  ENSG00000287753_2 (sequence is synthesized)
agagccatggactgctgacctttgaaccctgagaggagtgcagagctcactcatattctaatgaagtatttttctacccttattatgattctgactcactatacttcttatcaaaattac

SEQ ID NO: 837511 - DNA, 120 bp, Artificial Sequence
  ENSG00000287753_3 (sequence is synthesized)
atgatgaggaattgtatgtttgaatagcagtcaaatgagaagagactttatcatttagcaaatctatctgcccaatttcgtagcttgagacaatgcaaaaatgtcaacccatgatctcta

SEQ ID NO: 837512 - DNA, 120 bp, Artificial Sequence
  ENSG00000287753_4 (sequence is synthesized)
tcccattttcttttgattatctctacagcttgtaaaaatctctgtactttttttccagtttaattctatctaggttatattatacattgatttagttgaataaaatctattacataataa

SEQ ID NO: 837513 - DNA, 120 bp, Artificial Sequence
  ENSG00000259955_0 (sequence is synthesized)
caaagccaccctgggtcacctacatactaagggaataaacgccactgactccatcctgaagcaactggccatggaaaatcaaatctctgggtttcatctgtaacttcaaaagtcaattaa

SEQ ID NO: 837514 - DNA, 120 bp, Artificial Sequence
  ENSG00000259955_1 (sequence is synthesized)
ccatcccccatcagaacttttccttcagtgtttactgggttactgccgggggttctcaaagagatttttcagacaaaacaagtaaatgaggaaaacaaaaacggtgttctggatttctgg

SEQ ID NO: 837515 - DNA, 120 bp, Artificial Sequence
  ENSG00000259955_2 (sequence is synthesized)
cacccagtgagctctagagttgtgttaagttacttggcacactacagttaggtttctgatgcggtgaacagggactagaagcctcaggaaaagagactgggagatttaacagccagacct

SEQ ID NO: 837516 - DNA, 120 bp, Artificial Sequence
  ENSG00000259955_3 (sequence is synthesized)
gagagcgctggtctaagctgagggcaaggcattagtaacaggatttcagtgacaatacagggattctgccctagctatttggatcaacttcttgacaaaaaaaaaaaaaaaggtacactg

SEQ ID NO: 837517 - DNA, 120 bp, Artificial Sequence
  ENSG00000287759_0 (sequence is synthesized)
cgcgacccctttcgtgctcccttgacaaccctggccccacctccacctggcgcccactcgaatccgcccctcccttctacccccctggaccgccagaccccccgcttctgcacccactcc

SEQ ID NO: 837518 - DNA, 120 bp, Artificial Sequence
  ENSG00000287759_1 (sequence is synthesized)
cgccttcgcccttccctccttcctcctcctcctctgctgccgagcgccctctcttcccactccctctctgtgtagaatcacagggagtgaccttgagccgagagggcctacctcatttta

SEQ ID NO: 837519 - DNA, 120 bp, Artificial Sequence
  ENSG00000287759_2 (sequence is synthesized)
aagagatggcatgtgtgctgagtgcttaattagaatatggaagagagagacatgggcccttcctatgtccagttttaggaaaaggccctaaaactggaggtttggcatgtttcaagaatg

SEQ ID NO: 837520 - DNA, 120 bp, Artificial Sequence
  ENSG00000287759_3 (sequence is synthesized)
gaaacagaggacaaaaacgttcgagtcccctccctgagatgcctgaggctcggaccccaccagggatgaaggctgccgccagcgtgtgttgcagttcctgcgccgcacagaagggggcgc

SEQ ID NO: 837521 - DNA, 120 bp, Artificial Sequence
  ENSG00000287759_4 (sequence is synthesized)
agaagggggcgccattcctgcattatttctcccgacctaactccggtaacgcagctcctagttgtagggcctatcttatattcgttttacagtgtttattttttttcttttttcttttct

SEQ ID NO: 837522 - DNA, 120 bp, Artificial Sequence
  ENSG00000287759_5 (sequence is synthesized)
tggctggggctctgacactctatgctggaccagaccacgccctccaaagacatccttctcaccacttctgggctctgacatcacaggccaggctgcttatgactatgagcattctactca

SEQ ID NO: 837523 - DNA, 120 bp, Artificial Sequence
  ENSG00000287759_6 (sequence is synthesized)
ctctgtgcagactccaaaaccctgagccacactgtactgccgtctacatggagaaatcttcctcactccactcagactctggcacttgtgctgggcagctctcctctgcagatgccctct

SEQ ID NO: 837524 - DNA, 120 bp, Artificial Sequence
  ENSG00000287759_7 (sequence is synthesized)
atagtttaaatgtagacccaacgtgagtccctggtggattcgatggattaaagtgagggaaaaaaagagatttctcctgagctactgggagaatagaattgtcattagctgagattggga

SEQ ID NO: 837525 - DNA, 120 bp, Artificial Sequence
  ENSG00000287759_8 (sequence is synthesized)
agactataagagaaacaggttgggtgaaaatattagagttgttttggaataagttaacttcgagatacctgttggacatccaggcagagaaaataaggaaggaggcagatgtataaattt

SEQ ID NO: 837526 - DNA, 120 bp, Artificial Sequence
  ENSG00000287759_9 (sequence is synthesized)
tgaccacagggtagaggtccaggctggagacataaatttgagagttgtcaatatgtttaaatttttgagatggtacaagctcactagggagcaactttagatagagaggagaggtctgaa

SEQ ID NO: 837527 - DNA, 120 bp, Artificial Sequence
  ENSG00000287759_10 (sequence is synthesized)
atctgagttctgaggttgtctaacattttgaggttggaagatatggaagaaacattgaaaaaacctgaaagagagggagaggccaattaagaagaaaattgggtgagtatggtgtcgtgg

SEQ ID NO: 837528 - DNA, 120 bp, Artificial Sequence
  ENSG00000287759_11 (sequence is synthesized)
aagtcaattgaagaatgtgtttcaagaagaatatgatgaaatgagtcaaattctgctgataggtaggactgagaactgattgaaaattatttctaggctgggcacagtggctcacgcctg

SEQ ID NO: 837529 - DNA, 120 bp, Artificial Sequence
  ENSG00000287758_0 (sequence is synthesized)
agccaagaaaagaaagggcggcctggggcgctctgcaccgcgggtgagccgtgagaacacggcgctccgggagagaagccagcacgagacgctgcctcgggcgcgactccatttacttga

SEQ ID NO: 837530 - DNA, 120 bp, Artificial Sequence
  ENSG00000287758_1 (sequence is synthesized)
agtccagagcccgtaaatccgcgagacagacatggaggagcggcttaccaggagcaaaactatccaaaaacacagaagtgacatcatgatatgccaccttatttcttgcgcctgtctgca

SEQ ID NO: 837531 - DNA, 120 bp, Artificial Sequence
  ENSG00000287758_2 (sequence is synthesized)
gaggcctggggtgactcaaatccgccgctgctgtgtgatctgggacacttcaggatgtgggcaccgtggggaaccagcttggtgcccatcttggaggtgtcattctgagaacctggaagc

SEQ ID NO: 837532 - DNA, 120 bp, Artificial Sequence
  ENSG00000287758_3 (sequence is synthesized)
agctcttgcccaagtcacactcaagagccacggctttgttaggcattgccacattttccagtgagttccatgctcagattgttcctgctttgtacagcccgggataagcctgtcatgatt

SEQ ID NO: 837533 - DNA, 120 bp, Artificial Sequence
  ENSG00000287758_4 (sequence is synthesized)
accagaaagcagagatgtgggccacggaagcatgggtgaatgccgatgatgaatacagctggagagagtgggacgtggtctgtccacccctcattaggtgagcaagcgcagaaaacgcat

SEQ ID NO: 837534 - DNA, 120 bp, Artificial Sequence
  ENSG00000287758_5 (sequence is synthesized)
ctattgctccggtctgcatgttgctgacgccccagaatcccgatgtgacagcctcgtacctgaagtgacagtgttcagggtgggggctttgaggagtgattaaatcatgagggctgcacc

SEQ ID NO: 837535 - DNA, 120 bp, Artificial Sequence
  ENSG00000287758_6 (sequence is synthesized)
aacgtgaatgggatttgtgcccttataaaacaggctggagcatgttcctgtgccccctttggccacgtgaggacaccttgaaaggccactcacgaggaacagtccaggcactgaatccac

SEQ ID NO: 837536 - DNA, 120 bp, Artificial Sequence
  ENSG00000287758_7 (sequence is synthesized)
tggcgcctccagaactgtgagcagtaacattccattgtttataaattactcagtctccagtacttggttcctgcagctagaacaggctaaggcctctgtccgtgttccagggaagcctcc

SEQ ID NO: 837537 - DNA, 120 bp, Artificial Sequence
  ENSG00000287758_8 (sequence is synthesized)
acagggcagtcactgctgaggatactccgagcaaaaggttccgtgatccagcacggtgatgcgcgcccactgtgcgacttccagagatcaccgtggcattcgtaaaccaggaacctcgtg

SEQ ID NO: 837538 - DNA, 120 bp, Artificial Sequence
  ENSG00000287758_9 (sequence is synthesized)
gatctttagccgtattaaacgtttcctaaacctacatgtgtattggccatccataaatctttggaggaacgtctatgtaaatcctttgcccatgtgtaaagttgggttatttggttttta

SEQ ID NO: 837539 - DNA, 70 bp, Artificial Sequence
  ENSG00000282508_0 (sequence is synthesized)
agaacgcaccctgttgtgaactgtgcatgtgagggatctgggttgcgctgtccttatgagacatccagtt

SEQ ID NO: 837540 - DNA, 120 bp, Artificial Sequence
  ENSG00000282508_1 (sequence is synthesized)
gggttctcctcagcacagacgcggagagcatcgcgagggcggagctgcgttctcatctgcacagatttcagtggtactgcgaaggcggagcagagttctcctcagatgatgattattccc

SEQ ID NO: 837541 - DNA, 89 bp, Artificial Sequence
  ENSG00000282508_2 (sequence is synthesized)
gcttccgaggctctgcgggagaatctgtttcctggccgtagaggtggcctgcactcctcagcctgtgctgcccgtctcgaatgactgga

SEQ ID NO: 837542 - DNA, 85 bp, Artificial Sequence
  ENSG00000282508_3 (sequence is synthesized)
aactgaagaattgtctgaaagaaaatatgacatgaacttatgaattcaataggtgaagatttacaacttgataaatcaactttgt

SEQ ID NO: 837543 - DNA, 81 bp, Artificial Sequence
  ENSG00000282508_4 (sequence is synthesized)
ctccaggcccagcctctgcctcccgtcagcctctacagtcccaacgtctgcctcacagcagattcttcacgcccagcatct

SEQ ID NO: 837544 - DNA, 64 bp, Artificial Sequence
  ENSG00000282508_5 (sequence is synthesized)
aagcatatgtcctgcggcgtgggatggttcctttcaaatgcacttgagcagcggtctccaacca

SEQ ID NO: 837545 - DNA, 85 bp, Artificial Sequence
  ENSG00000282508_6 (sequence is synthesized)
cgtatacgtggattctagaggggtgacagcgaaacacgcccactaattctacattatgctcctacctcccggcagcctctccagg

SEQ ID NO: 837546 - DNA, 67 bp, Artificial Sequence
  ENSG00000282508_7 (sequence is synthesized)
tatggtatgtctaaactggaaaagtcttgtaatcttatgttcatgggcgtttacacagagtcatgcc

SEQ ID NO: 837547 - DNA, 81 bp, Artificial Sequence
  ENSG00000282508_8 (sequence is synthesized)
ggggtcttcttatgttgcccaggttggtctcaaattcctaggctcaagtgattctgcccacctctgcctcccaaagtgctg

SEQ ID NO: 837548 - DNA, 120 bp, Artificial Sequence
  ENSG00000282508_9 (sequence is synthesized)
tctccgggcccagaacctcctcaagtcagcctctccagacccacttgcaccctccgggcgttctctccgggcccagctcttcttcctggttgggtctccaggcccgattcctgcctctca

SEQ ID NO: 837549 - DNA, 120 bp, Artificial Sequence
  ENSG00000251518_0 (sequence is synthesized)
acaaattagagacttggcgaggaaaaaggatccagttagcaacagagggtctggaatgctggaaggagccaagagcagatgccatcttggtgatgtgtttcatcttcaggacctgagacc

SEQ ID NO: 837550 - DNA, 120 bp, Artificial Sequence
  ENSG00000251518_1 (sequence is synthesized)
catctggtcaaatatttgtgtgtatatgcaaaattttaggtcatttgttaaaaggagctcatgaatacatgtccttgacttcccagagatggaaaaaacacttctctccgccaaagaact

SEQ ID NO: 837551 - DNA, 120 bp, Artificial Sequence
  ENSG00000251518_2 (sequence is synthesized)
gttgaggaatgaggaaatgtggttgcctccttttattggctgattcgtctgctgagctcctaacttcttagctaatctaggtgaaaccaacccttgtcctggaccctgggcttttgtgga

SEQ ID NO: 837552 - DNA, 120 bp, Artificial Sequence
  ENSG00000251518_3 (sequence is synthesized)
ggactgtcttactgttcacaaatactccgccttttccatgagaagctaatttatccctgcctgttgaaattgggcatggacaatgacttgcttggttgtctaataaaatgtgagcagaaa

SEQ ID NO: 837553 - DNA, 120 bp, Artificial Sequence
  ENSG00000254740_0 (sequence is synthesized)
gtggcacgtacctgcctcttcttggagtatggacgagtcgaaccgggcacaagcatggagctgcgggtgagtcccggctggcgctggcgcggcgcagtgagcaccagctgacgaagaggg

SEQ ID NO: 837554 - DNA, 120 bp, Artificial Sequence
  ENSG00000254740_1 (sequence is synthesized)
ccatgccgtctcttcccggggagctggagcggctgggcccaggggcctgaccctttcccgtctcccacagcgtgtagcggccaatgggtcggtaggttgggctgatgatttcagggactc

SEQ ID NO: 837555 - DNA, 120 bp, Artificial Sequence
  ENSG00000254740_2 (sequence is synthesized)
gtgagggaggggcctgggagggcacctgagatgcactgcccttgcgaccatagttctccaggtagtcgaccaggtattcagggcagctggctgtctggtagagcccctgcagggtgcaga

SEQ ID NO: 837556 - DNA, 120 bp, Artificial Sequence
  ENSG00000254740_3 (sequence is synthesized)
gctccttgcgcgtccgggccagcatggggctgcggcccaggttcctggggtctatccggtagctatctgaggtccggaggctggagaaatcccgggccaggtctgattggctgtccagct

SEQ ID NO: 837557 - DNA, 120 bp, Artificial Sequence
  ENSG00000254740_4 (sequence is synthesized)
gttggtcactccataagggaatccgctgcccccgctgaggccactgcctaaaggccgctcagtaccccgggtctggctctctgcccgcttaccacccccagtgatgtcgggtctcagcag

SEQ ID NO: 837558 - DNA, 120 bp, Artificial Sequence
  ENSG00000254740_5 (sequence is synthesized)
ggggcggccccggtcatagtccaggagggaggaggggccataggtacggggacgggtgaggaagctgctggtggggaccggcttgaaaccaagtttctccttctccagtaaggagtatgg

SEQ ID NO: 837559 - DNA, 120 bp, Artificial Sequence
  ENSG00000254740_6 (sequence is synthesized)
acgagtcgaaccgggcacaagcatggagctgcgggtgagtcccggctggcgctggcgcggcgcagtgagcaccagctgacgaagagggctccccggcctcggctcctgcctgactctctc

SEQ ID NO: 837560 - DNA, 120 bp, Artificial Sequence
  ENSG00000254741_0 (sequence is synthesized)
actgtgtgggaacagcagggcagagatggggctgagacagggagggagacaggccaggtacgagcaggaaatgaccaggacggagccagagggccggtctcagtctttaatcgtggcagg

SEQ ID NO: 837561 - DNA, 120 bp, Artificial Sequence
  ENSG00000254741_1 (sequence is synthesized)
gcacctgaggagaggcggagggtgacggtcagggctgttcccctacagcccactcggagccaggagcctcctctgaggcttgacatccagcaggatggaggacttggccaccagtgcagg

SEQ ID NO: 837562 - DNA, 120 bp, Artificial Sequence
  ENSG00000254741_2 (sequence is synthesized)
cttcttggccttcttctccgcgtactgccgtagccgctcctcccgcagctgtgccgcctccttgtcctcctcctcattgtcactgccaaacaggtcaatgtcatcatcctcgtcatcctc

SEQ ID NO: 837563 - DNA, 120 bp, Artificial Sequence
  ENSG00000254746_0 (sequence is synthesized)
tacccatcccatctcttcatccaagcagagctgtggatcacaccgctgtagtaccccagcctctctactgctcccagagcacatccacacactttgaaccctgaccttgaagctctgatt

SEQ ID NO: 837564 - DNA, 120 bp, Artificial Sequence
  ENSG00000254746_1 (sequence is synthesized)
cctgagtcctagttgaaagggcctcgcaacaacccatgagatcggtgatgactgcccccatttgccagctttgcagggagaggtcaagaccaagacgatcttcaggcccaagggaggcag

SEQ ID NO: 837565 - DNA, 120 bp, Artificial Sequence
  ENSG00000254746_2 (sequence is synthesized)
gaggctcggagatattgaggaatctgtcgagcgtggtagggaggggatgtgggagtcaaatctgggtcagaatggctttaagacattttctttgccttgggccacagctgcctcttcctt

SEQ ID NO: 837566 - DNA, 120 bp, Artificial Sequence
  ENSG00000254746_3 (sequence is synthesized)
gtttatgttgtggttttggaggaggtaaagggaccccatcacttcaagtccctcctctgggaaggagacctcgttcctaggtccttactctgtagctactcaatcaggccagggcctcag

SEQ ID NO: 837567 - DNA, 120 bp, Artificial Sequence
  ENSG00000254746_4 (sequence is synthesized)
gaagagaggaggaagctgaggcttgagctggagctcagaaatggggctggagttcctcatcattatctcaactacccttgcctgctggcctggaggatgaggctgggactgaattctggg

SEQ ID NO: 837568 - DNA, 120 bp, Artificial Sequence
  ENSG00000254746_5 (sequence is synthesized)
gttggcagcttggagtgtgggtgtcgagctgggcatctggtgggctggctggagctggaagaccctgggaaagatgaggcctcgcaacaacccacgagatctgtgatgactgcccccatt

SEQ ID NO: 837569 - DNA, 120 bp, Artificial Sequence
  ENSG00000254746_6 (sequence is synthesized)
ctgaggctcggagatattgaggaatctgtcgagcgtgttgctccacagagctgacagcttcccacagtgtgtgagatgtgccacagccaggggagatctcaggaaaaagaggccctcttc

SEQ ID NO: 837570 - DNA, 120 bp, Artificial Sequence
  ENSG00000254746_7 (sequence is synthesized)
gacagtgtggactaattgtcttatcttccactctctacactaagagtatttacacaggaatgacgcagaggcttttacctctgcaagccaattcccagggctgaaagcccacctgaaatt

SEQ ID NO: 837571 - DNA, 120 bp, Artificial Sequence
  ENSG00000254746_8 (sequence is synthesized)
cccatcccccatcaatgatgccacgatggtttccagagcaaccacgagggatggcatggtatgggggagggaacagtggagatcaggaggacaggagccctcctcagtgtgagcccttcc

SEQ ID NO: 837572 - DNA, 120 bp, Artificial Sequence
  ENSG00000254746_9 (sequence is synthesized)
ccagctccccctgcatcgggagccaggtgggagggaggcaggaagggtgtgtgccttgatgttctgggcaacaaccccactgtttctccccttttctcagtatcgggattgaatgttttt

SEQ ID NO: 837573 - DNA, 120 bp, Artificial Sequence
  ENSG00000254746_10 (sequence is synthesized)
gtgatgcagtctgcacaatggccaggcacttataacactcagagaacatgggtggtttctgcatcatttattcttttcttttttatctccaatgtcccataccattcaagtatttgtgca

SEQ ID NO: 837574 - DNA, 120 bp, Artificial Sequence
  ENSG00000254746_11 (sequence is synthesized)
cccagtcttttccgtatgctaggcactggggactcagaggtgaagagatcagaggtggctcctgctcccgctgagtttacagttagaagtggagatgaaacaaataccctgacatgtgcc

SEQ ID NO: 837575 - DNA, 120 bp, Artificial Sequence
  ENSG00000254746_12 (sequence is synthesized)
gtcctaccttcactcaagacaagggcaagggaagagaaattagggagcagagggaagattttataagagaacctaatctagtctggggattttgagaaagcttcctgatggaggtgacat

SEQ ID NO: 837576 - DNA, 120 bp, Artificial Sequence
  ENSG00000254746_13 (sequence is synthesized)
ttacattgagactggaaatgtgagcaggaactggccagatgagatgtgagatggggaggtgagggttccaggctgaaaggactgtgcagaggcccagtggcaggaaggcaaacctgggga

SEQ ID NO: 837577 - DNA, 89 bp, Artificial Sequence
  ENSG00000254746_14 (sequence is synthesized)
actgtgcagaggcccagtggcaggaaggcaaacctggggagatctcaaagattgtcttgacctactgtctttcctacttcgcctaggct

SEQ ID NO: 837578 - DNA, 120 bp, Artificial Sequence
  ENSG00000254746_15 (sequence is synthesized)
gcatgagccaccgtgcccggcctcctactttatagatgaaaaatctgaggacagtgacttgttcaaggtcacacagagaatgaggaactggactgggattgatcctgggggccattccct

SEQ ID NO: 837579 - DNA, 120 bp, Artificial Sequence
  ENSG00000254746_16 (sequence is synthesized)
gaactggactgggattgatcctgggggccattccctgtcttctagctctttctctggttccatcaggcctaccagttccaaacttctcccaatttctttcttggatcacaagtgatatat

SEQ ID NO: 837580 - DNA, 120 bp, Artificial Sequence
  ENSG00000254746_17 (sequence is synthesized)
ctgacttctctccctcaaccctcagcactgaaggcactgacttggatgtgggtcactggggaatgttcttcaggtgggaggcaagagaggagaagcctttatgtttgaatgggtgctgcc

SEQ ID NO: 837581 - DNA, 120 bp, Artificial Sequence
  ENSG00000254746_18 (sequence is synthesized)
atgaccaggcacatcccccaggctgatggtggcatgcgaagcggagcagggcatgggtgagtcacctcctcaccagcatctgagccaatacctccttgtccatggctctgctgtggccct

SEQ ID NO: 837582 - DNA, 120 bp, Artificial Sequence
  ENSG00000254746_19 (sequence is synthesized)
ggtgtggcccagggactccaatgtccatttccttcagagaggcgagtggaaccttctggttggaggccttgtcagagcagccctgatagacttggggatcccagaggctaaagggagccc

SEQ ID NO: 837583 - DNA, 120 bp, Artificial Sequence
  ENSG00000254746_20 (sequence is synthesized)
tggcaaacaacagacccagcttggagtcatggagcctctccaaaggttctgctggatcttaggcatcttctggtcctcccttcctgctctaatgatgaggaacttgagtccagagaaggg

SEQ ID NO: 837584 - DNA, 120 bp, Artificial Sequence
  ENSG00000254746_21 (sequence is synthesized)
aagggatgttattcaagtccacacagggactcagaggcagagctggtgtcctgcaccttactccaaggctctcagcagctttgaagcagaggactatgggaggccttgaagactccatta

SEQ ID NO: 837585 - DNA, 120 bp, Artificial Sequence
  ENSG00000254746_22 (sequence is synthesized)
tgcgtggtgctgacagcaatgtcaccttccctcaacacctgcagtaccaggcaggctagcagccattcggtcagattctgatctgccctggaagtacataagatactaccaaaaataaga

SEQ ID NO: 837586 - DNA, 120 bp, Artificial Sequence
  ENSG00000254746_23 (sequence is synthesized)
gttagaacctaggggataggcccgtgggcagcatcctcaccctttctccaccgatgcaaatcttacccagggacaagatggcatggggtcaccagctgtgggtcccccctgggtaaatca

SEQ ID NO: 837587 - DNA, 120 bp, Artificial Sequence
  ENSG00000254746_24 (sequence is synthesized)
cttagcctcagtttccccaactctaaaatggggatactgacccatatttcatggtgtggctctgaaatgaaatgaaacgtgagcttccttctctccccagccaccatttggtctatagct

SEQ ID NO: 837588 - DNA, 120 bp, Artificial Sequence
  ENSG00000254746_25 (sequence is synthesized)
agcaatgcctttctctttctctttctcttcctctccctctgcctctctctttctctcctcgtgatggttaattttatgtgtcaacttgactggaccacagggtgcccaggcatttggtca

SEQ ID NO: 837589 - DNA, 120 bp, Artificial Sequence
  ENSG00000254746_26 (sequence is synthesized)
gacattattctggatacgtctgcgagggtggttcaggaggagattaatatttgaatgggtagactgaatagagaagattgtcctccccaatgcgaatgggcctcatccaatcaattgaag

SEQ ID NO: 837590 - DNA, 120 bp, Artificial Sequence
  ENSG00000254746_27 (sequence is synthesized)
acctgagtagaacaaaagggctgaataagagggaactcctgctgcctgatggccttgaatggggacatctgtcttttcttgcctttggacttgaacagaaacatcagctcttctttggtc

SEQ ID NO: 837591 - DNA, 120 bp, Artificial Sequence
  ENSG00000254746_28 (sequence is synthesized)
ttcagcctactggctttgaactacaccatcggctctattaggtcttcagcttgctgactgcggcgaatcttgggacttctcagcctccataattgtgtgagctgattccttataataaaa

SEQ ID NO: 837592 - DNA, 120 bp, Artificial Sequence
  ENSG00000251511_0 (sequence is synthesized)
gggccattgagaatgctcatttttggctttgcaagatacaagttagtttttcaaagtaggcacataagaaaacattcccaacagactctggtggaaaaaaaatatatatatacacatata

SEQ ID NO: 837593 - DNA, 120 bp, Artificial Sequence
  ENSG00000251511_1 (sequence is synthesized)
tttgcttaaaaaatgaattatttgtattcaaaaggagaagaaactttcttctggcatttttggaggtgatctctgcacacgctggctccattttgccttccatcatgagtagaagcagcc

SEQ ID NO: 837594 - DNA, 120 bp, Artificial Sequence
  ENSG00000251511_2 (sequence is synthesized)
caaggccttcaccacatttcctatcttgaaccttccagcaagaagaatcatgaaccaaataaactgcttttctttataaactattcagcttcatgtattcctttacagcaacactaaatg

SEQ ID NO: 837595 - DNA, 120 bp, Artificial Sequence
  ENSG00000251511_3 (sequence is synthesized)
gactaagacaaattgataaagaaaatgtgatatctatacatctctctgtctataaagataagataccaattacaatggaacattgttcagccataaaaagaagaaaattctggaatttca

SEQ ID NO: 837596 - DNA, 120 bp, Artificial Sequence
  ENSG00000251511_4 (sequence is synthesized)
aagaaaaataagctagacacagaaagacaaatactatataatctcacttatacgtggaatctgaaaagttgaactcggaagcagagactgaatggtagttgccaggggctgggagcaggg

SEQ ID NO: 837597 - DNA, 120 bp, Artificial Sequence
  ENSG00000251511_5 (sequence is synthesized)
agaagagaattgaaagaaggaaacgggagatattggtcaaagagacaaacattcagttataaggtgaataagttctggagatctaatatatatagcatggtaacgatcattaattatacc

SEQ ID NO: 837598 - DNA, 120 bp, Artificial Sequence
  ENSG00000251511_6 (sequence is synthesized)
atattgtatacttgaaatttgctgaaagtaaatcttaagggttctcaacaaatacatacaaaaaaaagatcaccttacattactatgaaagatgatggatgtgttaactagcttgatttt

SEQ ID NO: 837599 - DNA, 120 bp, Artificial Sequence
  ENSG00000251511_7 (sequence is synthesized)
ggtaatcatttcacactgtatatgtatatcaagtcatgttatacaccttaaatatataccgttttgtatgtggattacctcaataaagctgtggggtgaggaaagatttgaaaaatataa

SEQ ID NO: 837600 - DNA, 120 bp, Artificial Sequence
  ENSG00000254744_0 (sequence is synthesized)
caaaccggaatcactggggccatccaggaatcacagcagctcatgaagaaattccacatgaacagggctgttaaaagccaacccgccagaaagggtagaacggaggaaggacaagagggt

SEQ ID NO: 837601 - DNA, 120 bp, Artificial Sequence
  ENSG00000254744_1 (sequence is synthesized)
tctaacacctcctggaggcagagcacccacggaagtttctcaacacttctcgttgattcaagtggaacaccttgaagagaggcccttctgtttccctacacggtggacagcagagctctg

SEQ ID NO: 837602 - DNA, 120 bp, Artificial Sequence
  ENSG00000254744_2 (sequence is synthesized)
tatatagatttacactccacgcacgagacttccaaggcaacacctaggatttagagactatgttctcagagacgggcatggaggcaacgtcctggttctcatgtggtcaagaaggtagat

SEQ ID NO: 837603 - DNA, 120 bp, Artificial Sequence
  ENSG00000254744_3 (sequence is synthesized)
ggagagaaacgtgtgctaagcagcccggccctccccagagaagccacgggcagaggctcaccaacacctgcccctccctccatggtgtcgccggctttcagaataaagccttttctagca

SEQ ID NO: 837604 - DNA, 88 bp, Artificial Sequence
  ENSG00000251513_0 (sequence is synthesized)
tctcttttcctgctaccatctcaccgtgattgtgagacctctccagccacgtgaaacggagacgggtttggctctgtgattcatcaga

SEQ ID NO: 837605 - DNA, 120 bp, Artificial Sequence
  ENSG00000251513_1 (sequence is synthesized)
acgtgaaacggagacgggtttggctctgtgattcatcagaaataagaaaaacaaacactgtaaatggagaacttgaaaaagaggtgggcaccatctccccacccaagagaatggatttaa

SEQ ID NO: 837606 - DNA, 120 bp, Artificial Sequence
  ENSG00000251513_2 (sequence is synthesized)
gaggaaatttgtttatgggatgaagttttaaaaggcgacctggaaaatttagcaaagatgtaaataaacaactcttccttggattgcattaggcttcagaataaatatattaaccagctt

SEQ ID NO: 837607 - DNA, 120 bp, Artificial Sequence
  ENSG00000251513_3 (sequence is synthesized)
cagtcaaagtctgcctagaatctgaccctgacaagacccagtgactagtgctgctccgaaccttccccaccaacagcaggcaattttctctgtggcaaagctacctcgaaacaggcatcc

SEQ ID NO: 837608 - DNA, 120 bp, Artificial Sequence
  ENSG00000251513_4 (sequence is synthesized)
aggcttccctcccacgaagtgaagatgagaaaactgagtctcagaatggacaagctcacagatggcaagtggtagagcagacttcacacatagcttctgccacgtcccgggtcccagagt

SEQ ID NO: 837609 - DNA, 120 bp, Artificial Sequence
  ENSG00000251513_5 (sequence is synthesized)
gtgcctgctcagatcccagaaaacttgcaggaacaggaagaggtcacacagtgttaaggggaagggagaacaggaacggcgggtttcttaccgcggtcaagaccctgaagtcatctcggc

SEQ ID NO: 837610 - DNA, 120 bp, Artificial Sequence
  ENSG00000251513_6 (sequence is synthesized)
tcatgtaacgcaacttggccacattcactttccccatggcggccccagtccgaacccagatgcctctccgacgacagccgcaaagcgacttgctgcctcaatgacacgttccgcctcaga

SEQ ID NO: 837611 - DNA, 120 bp, Artificial Sequence
  ENSG00000251513_7 (sequence is synthesized)
caaccaaatctgttaaaggtagaatatggtgatgggtgctgtgcaagaagaaggagggaagaaggaagctgagtgtgcagcaaagacacctgcagggacacatagaaccaggcatttgct

SEQ ID NO: 837612 - DNA, 120 bp, Artificial Sequence
  ENSG00000251513_8 (sequence is synthesized)
gaaggacacctggattgcacaaccagcggctaacttgcatgaaaaaacattctaggtggttttgcttaatgttggtctctccaactgtgctacaagctccatgaggtgaaggaccaagtt

SEQ ID NO: 837613 - DNA, 120 bp, Artificial Sequence
  ENSG00000251513_9 (sequence is synthesized)
aattgtgtcttccatggtatgtcccagtcctgccactttaggcattttaaatatttgctgaatattgtttgaataaataatttgtggagaattggaagagatttgtgggataaatatttt

SEQ ID NO: 837614 - DNA, 120 bp, Artificial Sequence
  ENSG00000251513_10 (sequence is synthesized)
tatatggcatgtggttgaacctgcatatgcttttctattttaacaatattgtcattgggactgtagaatttgactcataaacatcactttgcttttcttggaattctaattcatatttac

SEQ ID NO: 837615 - DNA, 120 bp, Artificial Sequence
  ENSG00000251513_11 (sequence is synthesized)
agtttcaaatgtcacctctcttttaagttccacgtcaacatatttgcctaatccttggatgtcctgccatttgaacttgaaatgtctaaaatctaatttgtcattttttaaaactgactc

SEQ ID NO: 837616 - DNA, 120 bp, Artificial Sequence
  ENSG00000251513_12 (sequence is synthesized)
aaataataatctcacgtgtttcctatgttctaggtcagaaaattgtacacaacttaaatttttccttttgcttcctatgtctgttcataactatatcttattagccatgaagttgtgttt

SEQ ID NO: 837617 - DNA, 120 bp, Artificial Sequence
  ENSG00000251513_13 (sequence is synthesized)
ttctgttcctttttatattttttgcatattcatttcttttccatccctgtcctggaagccctgactacctgacaaccactacatcctggttcccttggctttcctttctcttctttccag

SEQ ID NO: 837618 - DNA, 120 bp, Artificial Sequence
  ENSG00000257219_0 (sequence is synthesized)
gagcattctgtagctgtattttacagaactgtaattgcacagattgttcctcttacaagagaaatatccagagctctaagaaaacaactgatgaaaacgacatgcgtgacatttggtgct

SEQ ID NO: 837619 - DNA, 120 bp, Artificial Sequence
  ENSG00000257219_1 (sequence is synthesized)
acgacatgcgtgacatttggtgctgaagacccaggtcagagagactcctttgggggaccagtccgctgtccttgccctcactctgtgaggagacccacctacgacctcgggtcctcagac

SEQ ID NO: 837620 - DNA, 80 bp, Artificial Sequence
  ENSG00000257219_2 (sequence is synthesized)
cctcgggtcctcagaccaaccagctcaaggaacatctcaccaatttcaaatcgggaccccactggaaaatggactgtcca

SEQ ID NO: 837621 - DNA, 120 bp, Artificial Sequence
  ENSG00000257219_3 (sequence is synthesized)
ctcagcagctgaagactgacactgcttgattgcctgggaagcctataggaccatcacagacactttggataactcttacagtgaaggacaaaaaagcgccactgcagggaggaatgccag

SEQ ID NO: 837622 - DNA, 120 bp, Artificial Sequence
  ENSG00000257219_4 (sequence is synthesized)
ggtcccatagagggagaccgacagtgaagtggagcctgccatgaattcaccaaaggccattctccctttcttccagaagaacagcatttagctgggcctatggctacctacctaaagact

SEQ ID NO: 837623 - DNA, 120 bp, Artificial Sequence
  ENSG00000257219_5 (sequence is synthesized)
gcacctcttagtcacccttgtggccaggtgtggccacgtgacagtggaatgtaagtggaagtgatgtatgcacttgggttcattggtttaaaaaaaaatatgaccgccctccatttccac

SEQ ID NO: 837624 - DNA, 120 bp, Artificial Sequence
  ENSG00000257219_6 (sequence is synthesized)
tctttgtcttatctgtgaatgggaacatggctgtgtctgcagcccgactttgtgcagcaaaggacaaggccctaggggaaggtggagaaacaagatggaacaacttggacccaacaactt

SEQ ID NO: 837625 - DNA, 120 bp, Artificial Sequence
  ENSG00000257219_7 (sequence is synthesized)
ggatccctatgtggccatgtggagtcatctcacccacctgggccactcaccccgaagactgttgtgtgagggtgaaataaacttctgtatcactagcccctgcatttcagaaattctttg

SEQ ID NO: 837626 - DNA, 120 bp, Artificial Sequence
  ENSG00000257219_8 (sequence is synthesized)
taacacagacagcaaagtatcttctgtggccccatgactaatttcgttgtttaaactcattataaaaactatataaataaaatattaaaaatcaaataaaatagcaagataacactgtgt

SEQ ID NO: 837627 - DNA, 120 bp, Artificial Sequence
  ENSG00000257219_9 (sequence is synthesized)
aactatccagttttagatgttattacctttttggcatatttacctcatctattttctccaggggtttttaaagaagagtcatgcttgttattttaaattatctgcagtgctccttggtct

SEQ ID NO: 837628 - DNA, 120 bp, Artificial Sequence
  ENSG00000257219_10 (sequence is synthesized)
tataaaactatgggttatttcaaacttcggtaaatgtctgatacacatgaacttcttgcattgttgaggaaatcagagaaaaatgatgctgtttttcccttgtaagttgacaatggatgg

SEQ ID NO: 837629 - DNA, 120 bp, Artificial Sequence
  ENSG00000257219_11 (sequence is synthesized)
agatgaaaccacctttgcaaaattatggcaataagagaaattggacatggcagactccatcttgcttttagcctcacaggttggctgtcttggctcattcctgggcataagccaagctaa

SEQ ID NO: 837630 - DNA, 120 bp, Artificial Sequence
  ENSG00000257219_12 (sequence is synthesized)
ctttggcagaaattgagtttatagtgtaaacgataatagcctttccccaaaactaaactacccttgtaaaattaatgaaaggccaccaagttaggaggatgagaagggcctgaatgcctg

SEQ ID NO: 837631 - DNA, 120 bp, Artificial Sequence
  ENSG00000257219_13 (sequence is synthesized)
aattcagccattattctggaagtcacaagatgtgcaacctccccagttactcctgtaaataacttcagtattgtagaacctaagattggccttttgacagccttttgcatttctgacaac

SEQ ID NO: 837632 - DNA, 120 bp, Artificial Sequence
  ENSG00000257219_14 (sequence is synthesized)
tagatggccccacgcagacccgtgactcaaccagtcctatagccttcatccaaaaatggactcagtgcatgaggactgttttccacacccttatgattgcatcccaaaccaatcagcagc

SEQ ID NO: 837633 - DNA, 120 bp, Artificial Sequence
  ENSG00000257219_15 (sequence is synthesized)
acccataccctatcccctgcacaccaaactatctttgagaaactcctaacctctgattctttggtgagattgatttaagtaataactctgtctcccacatggcgtggctggcgtcgtgtc

SEQ ID NO: 837634 - DNA, 120 bp, Artificial Sequence
  ENSG00000257219_16 (sequence is synthesized)
agacactttggataactcttacagtgaaggtgtctggagtttcccctatggacgctctctcctgccaccatgtaagtcttgcctctcttttcgtttgccttccaccatgattgtaagttt

SEQ ID NO: 837635 - DNA, 120 bp, Artificial Sequence
  ENSG00000231355_0 (sequence is synthesized)
cctaaatgactgacactgaatagccatcctttcaggagagagtccatttcagacccacaggaagtatgaccttagtctcaagacacctttatcaaaatacaacagttctaatagctgcct

SEQ ID NO: 837636 - DNA, 120 bp, Artificial Sequence
  ENSG00000231355_1 (sequence is synthesized)
aagacttattcagatgaatctttttgttatacaaccacataagcatatggagaaagagaatattttgggaagtacctgtttatgcaacatgttttagcctttcagatagttcctgtggta

SEQ ID NO: 837637 - DNA, 120 bp, Artificial Sequence
  ENSG00000231355_2 (sequence is synthesized)
agccctgagagagaataaactagaacccatggggcgtagcgtgaaggacagcctggattgttcctttctcttaataggcttgtaccaactggactgcattttctgtctagttttaggtga

SEQ ID NO: 837638 - DNA, 120 bp, Artificial Sequence
  ENSG00000231355_3 (sequence is synthesized)
agtagatctttcagaacctgtcctggcccaaacctgaaaatggtcctgaagtcacaatgtctccagaatctaggagtgcctctctgaagtgcttggttgagacggaattttaccatgttg

SEQ ID NO: 837639 - DNA, 120 bp, Artificial Sequence
  ENSG00000231355_4 (sequence is synthesized)
accaggctgatctggaactcctgacctcagcatgaaaatccttacaagatgccagcaccatgctcttggagttcccggcttccagaactgtggaccaaataaaacactattgtttataaa

SEQ ID NO: 837640 - DNA, 120 bp, Artificial Sequence
  ENSG00000277383_0 (sequence is synthesized)
caggtccgaaaagatagcgggagtcgaggatgaaggaaatggaggggatggaggggagttccccccggaggtgggaccgcgccggagcccagagttggagcctgacagggtggaaggcgg

SEQ ID NO: 837641 - DNA, 120 bp, Artificial Sequence
  ENSG00000277383_1 (sequence is synthesized)
cggggacttcggggtgacaggccgggaccccaggcgtggctcgatcactcaccctagctggtctccgtcgagccacggcggcgccggggaggcgggtcgggcctgcctcggagcctgtcc

SEQ ID NO: 837642 - DNA, 120 bp, Artificial Sequence
  ENSG00000277383_2 (sequence is synthesized)
gggacacggattcacgcgttgcccttagcgagcgcttggtgagcgcccactgtgtgcgctgcgcagtgctgggggcccagtggggacacagagcccccggacctgccctcccgatgcttg

SEQ ID NO: 837643 - DNA, 120 bp, Artificial Sequence
  ENSG00000277383_3 (sequence is synthesized)
cagcccagggagatttatactttgttttagtcccttctgcctccccagtgccctagaaaagctcgtgcacacagtaggtgaatgcgggttgaataaatgagtaatcgagacagattgtga

SEQ ID NO: 837644 - DNA, 72 bp, Artificial Sequence
  ENSG00000277386_0 (sequence is synthesized)
acatgctaccatgcccagctaattttttaaaattttttgaagagacagagtctcgccatgttgcctgggctg

SEQ ID NO: 837645 - DNA, 120 bp, Artificial Sequence
  ENSG00000277386_1 (sequence is synthesized)
ttttttgaagagacagagtctcgccatgttgcctgggctggcctcaaactctccggctcaagcaatccttccacctcggcttccccaaatgttgagattacaggtgtgagccaccgaaca

SEQ ID NO: 837646 - DNA, 120 bp, Artificial Sequence
  ENSG00000277386_2 (sequence is synthesized)
tcagccaattctaggccatgttgtaaggaagtggacctgtctttgacagcagggtcctggcacccaagtggacacaggtggtggtcctgtaacagtggcttgattacgctgttttgtgtg

SEQ ID NO: 837647 - DNA, 120 bp, Artificial Sequence
  ENSG00000277386_3 (sequence is synthesized)
tctaatctgaacatagggaagtataagatgtgtaagcagctttatcaaagagttataacaagttttactttccagatatgaaatgctgaatttgtataaataaattaaaccttaatagca

SEQ ID NO: 837648 - DNA, 120 bp, Artificial Sequence
  ENSG00000231358_0 (sequence is synthesized)
gggggttcgtggagtccctggcttgcaccaagggtgcgtgtctacaccaccgtgggcaccgcaaagcggcaagaagtgccccgggacacggggacaggacgccaggcttgcaggggaacg

SEQ ID NO: 837649 - DNA, 120 bp, Artificial Sequence
  ENSG00000231358_1 (sequence is synthesized)
ttgaggcaatgcggtgaaaaaagtggacttccactagacctgaaaacaagacctgaatacccactgaaacggtgctgcctgctttctaaagaagccaacactcctcaatatagttgcttc

SEQ ID NO: 837650 - DNA, 120 bp, Artificial Sequence
  ENSG00000231358_2 (sequence is synthesized)
ctctgattgctcgcttccttcctctgattcgatgtagttataactacttagaggaaccacagctgtatgggagtccatctgcaaaggaatctgaaaatggtgatggactatttatcaact

SEQ ID NO: 837651 - DNA, 120 bp, Artificial Sequence
  ENSG00000231358_3 (sequence is synthesized)
tgctccataatccgtttagagttaaagaggaccacagaaactccacctccaggtgtcacaggttactaaacacaataactaaaacaaattaaaaaacttatctcagattccctcctggag

SEQ ID NO: 837652 - DNA, 120 bp, Artificial Sequence
  ENSG00000231358_4 (sequence is synthesized)
ctgccttgcttatacagttggacgacaaagtcagccactgcctgaattcatattctgcactatgtgattcaggaaacaacgttatgcttctcctatgttcccaatatgctggacatcagg

SEQ ID NO: 837653 - DNA, 120 bp, Artificial Sequence
  ENSG00000231358_5 (sequence is synthesized)
tgtgggtaataacagtaccatgattttcctttggagactccaaatcctcagtccaaatgactttattccacttataactccatagaagccatgaaatccagacctcagtacagacggtga

SEQ ID NO: 837654 - DNA, 120 bp, Artificial Sequence
  ENSG00000231358_6 (sequence is synthesized)
cttccatgaacttagctaaaatttttggacaaagtttactccctctggattctaaatggatagggtaatgttgctggctcagtgaagcaccttctgagcctactgaagcaggagccgatg

SEQ ID NO: 837655 - DNA, 120 bp, Artificial Sequence
  ENSG00000231358_7 (sequence is synthesized)
ctgaggcagaactgaaagatgcagaggcagagtccggataacactgtctgaacacctgaaaacacactgaacactgatgaattttactgttccgttttagcccaaggtcagtaagcatct

SEQ ID NO: 837656 - DNA, 120 bp, Artificial Sequence
  ENSG00000231358_8 (sequence is synthesized)
tctgtaaagggctagattgcaaatattttaggttttatggaacataaggtttgggtgcaactattaagctccagtgtcggatatggctgtgttgcaattaaacttgatttacaaaaacag

SEQ ID NO: 837657 - DNA, 120 bp, Artificial Sequence
  ENSG00000231689_0 (sequence is synthesized)
ggcttacaggcgtgagacactgcgcccggcccatactactacttttttaggaggaaaggagggaattttccatgagtttgaatcctacaaatgccacaaacagcttctgaagctgaagcc

SEQ ID NO: 837658 - DNA, 120 bp, Artificial Sequence
  ENSG00000231689_1 (sequence is synthesized)
atgacaatgaacttccatgacacaaagaagatgaggaattggaagggaacagtgcaggagaaacacagtgacattgtgtcacagtaggtatttatgcctgctatcctcatccgagataag

SEQ ID NO: 837659 - DNA, 120 bp, Artificial Sequence
  ENSG00000231689_2 (sequence is synthesized)
tcacagcagttccatgactgtgtctgcctggtgctaagatactgtgtgcccgagccatgcttccacgaagaagcactccaaatcacaccacctcgaggatgaacacaccttgcatgttcc

SEQ ID NO: 837660 - DNA, 120 bp, Artificial Sequence
  ENSG00000231689_3 (sequence is synthesized)
tgaactcccacaatctctacttcactatctgaagaggcaatattaatttcttcattgagcggtgcattgccggcagatattttgtcacttgctaggaatcctggatgcaaatgacctgcc

SEQ ID NO: 837661 - DNA, 120 bp, Artificial Sequence
  ENSG00000231689_4 (sequence is synthesized)
tctgcattcagctcctctagaagccagctggtcctccaggtagctcctgtgtcctggccgcctatagaattattgtgctcttgaactactgcagccgccgataaattgtacacagttacc

SEQ ID NO: 837662 - DNA, 120 bp, Artificial Sequence
  ENSG00000231689_5 (sequence is synthesized)
acttccgggtcagagctggtgtcagacatatcataatgagctacaactggaggtccatctggtatctctgcagtgattgtcttgctgctccctgaaacctcttcatcatcatctgatgag

SEQ ID NO: 837663 - DNA, 120 bp, Artificial Sequence
  ENSG00000231689_6 (sequence is synthesized)
tcttctcttgcctgctgctgtgtgagacgtgcctttcaccttcctccatgattatgagacctccccagccatgtagaactgaataattgctttaaaaaggtgaaatgagagagcgaaagt

SEQ ID NO: 837664 - DNA, 120 bp, Artificial Sequence
  ENSG00000231689_7 (sequence is synthesized)
acatttggtgccaaaacctggacaggaagactccttcaggagactggtaccctgtcctcgtcatcactccgtgaggcaatccacctatgaccttgggtcctcagacccaccagcccaagg

SEQ ID NO: 837665 - DNA, 120 bp, Artificial Sequence
  ENSG00000231689_8 (sequence is synthesized)
accaatttcatatcggttatgtctatttttaaagaaaactggagctgcctataatgctttattggacaaataatacttcactgtgaaacctttccccaaccacagcctccacgagagcat

SEQ ID NO: 837666 - DNA, 66 bp, Artificial Sequence
  ENSG00000231689_9 (sequence is synthesized)
tcctgagtagctggaactacaggcgccgcgccaccactcccggctagccagaatggtcttgatctc

SEQ ID NO: 837667 - DNA, 90 bp, Artificial Sequence
  ENSG00000231689_10 (sequence is synthesized)
gagtcacatctggaagcggctgccagaatgagaagacttctctcaaaagaaagtctagaattctatggttgtgaaaagttgtgactggaa

SEQ ID NO: 837668 - DNA, 120 bp, Artificial Sequence
  ENSG00000231682_0 (sequence is synthesized)
aaacttcctctcctgtcttcatgtggatgctaacttaaaactcttatttctgggtcagataactccctgctctcagccctgatgactacacctttgacacacactatattgctccattgt

SEQ ID NO: 837669 - DNA, 120 bp, Artificial Sequence
  ENSG00000231682_1 (sequence is synthesized)
cagccactctccctcccactgccctgaagatggaaatgtacccaaccttcaagcccctgtcggtccagctcgcgaagtttccggctgaagattcattatcagatggatgagatgttcatc

SEQ ID NO: 837670 - DNA, 120 bp, Artificial Sequence
  ENSG00000231682_2 (sequence is synthesized)
ctgcaacacaaaattctactctcctcttcactctttattgctaaagcacttatttcactggtttcaagctgctttaaaaggagtgaatatgcaggtgaaaccacctagagaagcactgcc

SEQ ID NO: 837671 - DNA, 120 bp, Artificial Sequence
  ENSG00000231682_3 (sequence is synthesized)
ctaacatgcttaaggatgcttgagaaagccctgagcctacaaaaaggcgtaagaccgtggcaagaatgaaggagtcaagcaatgtgaaaagctcctgaagcccaaggttctcttccccag

SEQ ID NO: 837672 - DNA, 120 bp, Artificial Sequence
  ENSG00000231683_0 (sequence is synthesized)
ctcttcctcctgctactgccatgtgagatacctgcccctactttgccttcttccatgattggaagcttcctgaggccaccccagagtcagaagccgctatgcttcctggacagcttgcag

SEQ ID NO: 837673 - DNA, 120 bp, Artificial Sequence
  ENSG00000231683_1 (sequence is synthesized)
aaccagtattcactgactgctgaaactagagcatcactgagaagcaagagatagactgacctaactagagggagagctgccatccaggatgatgccaccatcacaggaggtgagaaggaa

SEQ ID NO: 837674 - DNA, 120 bp, Artificial Sequence
  ENSG00000231683_2 (sequence is synthesized)
gctctgctgtttgcaagtgtgatctttgggtatgcttcctaatctgtgagcttcaacttcctcctctgtaaaccaagatcaaagacaaacagggaaacctacttgtctggtgcccatccc

SEQ ID NO: 837675 - DNA, 120 bp, Artificial Sequence
  ENSG00000231683_3 (sequence is synthesized)
cttggcagaacactcctctgaaggatgacagtttggctgtgccagggcagagctgccgacaccaaatgagccttcatagcaactatctgatgaggaactcactggcctacctttccttga

SEQ ID NO: 837676 - DNA, 120 bp, Artificial Sequence
  ENSG00000231683_4 (sequence is synthesized)
ttgctgctgatgagcaagctgttttatatttaatccaggtttctgcttggagaggaagaaggtagaggagccagcgaaggtttgtctgaatgatacttgcagaaaaaacactggtaacag

SEQ ID NO: 837677 - DNA, 120 bp, Artificial Sequence
  ENSG00000231683_5 (sequence is synthesized)
tcacaaaactttgaaaattaaagtgccagcgaggtggcttttggtggccagatgaaagctgttaaccccagcttttacaaatgctgggctttgagtaagaggagagtgtctttctggaaa

SEQ ID NO: 837678 - DNA, 120 bp, Artificial Sequence
  ENSG00000231683_6 (sequence is synthesized)
agtttgagacctcttactattgtagcagcaaaagcatccacggctagtgttttccaagctcactgctacttgttgcagtctagcagtgttgtgtctcctgaaattcctacctttcttgat

SEQ ID NO: 837679 - DNA, 120 bp, Artificial Sequence
  ENSG00000231683_7 (sequence is synthesized)
ggatgtaaaagaagtaccaatttattaagctcctagtatgtgccagatgctccatatatgttacttttgatcttcagaaccactcagcaacttactgcttctcctcactcccaattacat

SEQ ID NO: 837680 - DNA, 120 bp, Artificial Sequence
  ENSG00000231683_8 (sequence is synthesized)
agatgatgaaattgaagcagagtagtttgtctaggattacagagctaggagggaccagagttgggattctccctcagttctaatacacagtatgctacatttcctgtcgagtagtaacaa

SEQ ID NO: 837681 - DNA, 120 bp, Artificial Sequence
  ENSG00000231683_9 (sequence is synthesized)
agcttctaagaaatctgagttttcatttgttaaaactgaatttttaagaaatgtagacaggagcactaagtactctatagtttaacgttaataatggtacaagtatataaccagtttctc

SEQ ID NO: 837682 - DNA, 120 bp, Artificial Sequence
  ENSG00000231683_10 (sequence is synthesized)
acatgcacccatgacacagcctcaggtggtcctgacgacatgtgcccaaggtagttagggcaaagcttttttttatacactttagagagacaggagatatcaatcaatatatgtaagatg

SEQ ID NO: 837683 - DNA, 120 bp, Artificial Sequence
  ENSG00000231683_11 (sequence is synthesized)
tacattggttatgtccagaaagacaggacaactaaagcagggagggggcttccaggtcttatgtaggtgagagataaatggttgcattcctttgagtttctgactagcttttccaaagga

SEQ ID NO: 837684 - DNA, 86 bp, Artificial Sequence
  ENSG00000231683_12 (sequence is synthesized)
acagttcccagcttgacttttccgtttagcttagtgatgttggggccctgagatttattttcctttcacacttcttccattttctt

SEQ ID NO: 837685 - DNA, 120 bp, Artificial Sequence
  ENSG00000231683_13 (sequence is synthesized)
cctgagatttattttcctttcacacttcttccattttctttttaaaaatcttttgaagaaagcattttagaagaaaatgagtctctgctctcatggctaggatagtttattcctacaggg

SEQ ID NO: 837686 - DNA, 120 bp, Artificial Sequence
  ENSG00000231683_14 (sequence is synthesized)
gtaggtcccaagttattaggaaagctcatttttagcagattgagaagtctcatgtcctgtgaagagacaatagtaggaggaagggagaaaaacaacaaacaagagaacaatcctagaaaa

SEQ ID NO: 837687 - DNA, 120 bp, Artificial Sequence
  ENSG00000231683_15 (sequence is synthesized)
tctatatagaccacattactttgaagtccatacatcagtaggtaggtatgaaagtggcttatgtacctaaatagtttgcttttattttcttctgaagtttaagttgtctagattcagttt

SEQ ID NO: 837688 - DNA, 120 bp, Artificial Sequence
  ENSG00000231683_16 (sequence is synthesized)
gcaggactttagaaagtacagcttagttttcaattatttcgaattaggaaaaatggggtgaggggaaggaaaagaaggaaaaaaattgaaaacattattttggagacttgtagccaggaa

SEQ ID NO: 837689 - DNA, 120 bp, Artificial Sequence
  ENSG00000231683_17 (sequence is synthesized)
aaattagaattcagtctaaactgtagaaaataataaaaatagaaaaacattaggcaagactaaaatctaacaacaggtgcactatagtttttgaaacgtattttttctctctccagtttc

SEQ ID NO: 837690 - DNA, 120 bp, Artificial Sequence
  ENSG00000231683_18 (sequence is synthesized)
ttctctctccagtttcccattttcactaaaaacaaatcatagaagaaccaatttgctttattatacttggccagattatttgtatgaagtgaagcaagaataattatttttcacataggc

SEQ ID NO: 837691 - DNA, 120 bp, Artificial Sequence
  ENSG00000231683_19 (sequence is synthesized)
gatggacttcttccatagaaggaatctcacataagccttttttaaagccaagcccagccacagatttgtaccatcaaatacctatgagttgggtgaattattctccttttgagttccaac

SEQ ID NO: 837692 - DNA, 120 bp, Artificial Sequence
  ENSG00000231683_20 (sequence is synthesized)
ttctttacttaccacaggtcaggaacaccgttcagggactgtgcagacaaggtatgaggccagtttccccaaggggtttttattggctctataaatcaagtttaataccttaaaggaaag

SEQ ID NO: 837693 - DNA, 120 bp, Artificial Sequence
  ENSG00000231683_21 (sequence is synthesized)
tatgaggccagtttccccaaggggtttttattggctctataaatcaagtttaataccttaaaggaaagcacaccattccagccaaagactcagtaaaataaccagtttctccaattgtgt

SEQ ID NO: 837694 - DNA, 120 bp, Artificial Sequence
  ENSG00000231683_22 (sequence is synthesized)
gtaagtcacgaatacttacaagtagtttccaaattttggagaaatcaggtagagagaaacaaataagctccaaatttcgttcataggagtatacttgttaaaagctgtcaatagctcaaa

SEQ ID NO: 837695 - DNA, 120 bp, Artificial Sequence
  ENSG00000231683_23 (sequence is synthesized)
ctctgaaaaacaaaacaaaggatcagcaacgttttgtgcaaaaagtcaaaaagactacttcagtcttctactggttcagtccatgcagttaatttctgttctgcttgatattcgtgaaca

SEQ ID NO: 837696 - DNA, 120 bp, Artificial Sequence
  ENSG00000231683_24 (sequence is synthesized)
cgtgaacatttcagctctccgtaagtcctgaaagtttttcctcttttctaatgtcacaatctccaaagttatcagaaaactgcattcaagaacacatgttaagagttttatagctgatta

SEQ ID NO: 837697 - DNA, 120 bp, Artificial Sequence
  ENSG00000231683_25 (sequence is synthesized)
taaaactaccttcaaaagaggaacaaaacaagacaacaattgtccatggatgacaaaaaattttagggcagccatagtcaaagacacagttgacaagaaaatttgttacctctgtggcat

SEQ ID NO: 837698 - DNA, 120 bp, Artificial Sequence
  ENSG00000231683_26 (sequence is synthesized)
acaataatttaacataacaattataattactgataacatacactaagtcatatcagaattttaggagtttcctattattttggaacagataccaataacacatttatacaaatacagccc

SEQ ID NO: 837699 - DNA, 120 bp, Artificial Sequence
  ENSG00000231683_27 (sequence is synthesized)
actgaccccagtattctcagagccaacagctaactttgcaggagagccctgagccaattactagatatgtaaactttaaaaaaaatgcttaagtcatcaaaatttatttttttcaatggc

SEQ ID NO: 837700 - DNA, 120 bp, Artificial Sequence
  ENSG00000231683_28 (sequence is synthesized)
gcctggtgggaggtgattggatcatgcgggcagatttctcatgaatggtttagcagcatcccctttgtcctgcccttggaacaatgagttatctgtcagatctggtagttaaagagtgtg

SEQ ID NO: 837701 - DNA, 120 bp, Artificial Sequence
  ENSG00000255503_0 (sequence is synthesized)
agatgaaggaagaatgagagcacgaagaatggaaaggaaagttttatgggccagggctggaggtcttgttgctgagactactgatctccaaagtggaatgtgctcactctagaggtatac

SEQ ID NO: 837702 - DNA, 120 bp, Artificial Sequence
  ENSG00000255503_1 (sequence is synthesized)
acgcctttgttaatcattcctgtatgaaaaatcagtgaatctgaagctttggggagagtgaaagggggttggaaaacaaacggcaaaacaaaaatgcatttcggaggactaccccaactc

SEQ ID NO: 837703 - DNA, 120 bp, Artificial Sequence
  ENSG00000255503_2 (sequence is synthesized)
tgtgggtggaagtgggcttctccgaataaaggcgagggtcgccgcctcgggtcctcgcacctcaacaaaagacaccaactctctcaactgtactgttaacagatctaaatgatactccaa

SEQ ID NO: 837704 - DNA, 120 bp, Artificial Sequence
  ENSG00000255502_0 (sequence is synthesized)
actgcattccatcctgggcaacagagcaagagtctgtcaaaataaaaaagaagaaaaaaagaagaaagattttaattatttttatcaacaattatacattttcagtctactgttatgaat

SEQ ID NO: 837705 - DNA, 120 bp, Artificial Sequence
  ENSG00000255502_1 (sequence is synthesized)
tgccacaacttggaggcttagaacaacacaaattagtactctcacagtcctgaaggctacagctctgcaatcaagatatcagcaaggccatcattccactaaggctctaaggaagaatcc

SEQ ID NO: 837706 - DNA, 120 bp, Artificial Sequence
  ENSG00000255502_2 (sequence is synthesized)
atttttgcctcttcctgcttctgggatgcatccactttattagacggcaaactagaaaatgcttcctacagtcgccacataaaaagaattatcatcatgccaaacaaattatcatcggtg

SEQ ID NO: 837707 - DNA, 120 bp, Artificial Sequence
  ENSG00000255502_3 (sequence is synthesized)
aatgcaacaggttttcttttctggccatgccaaggtggaaggtgatcttaattgaagaaagaatgctcaaagcaatgctatgtcttatcaacaaatacttaccagcatgtacattgctgc

SEQ ID NO: 837708 - DNA, 120 bp, Artificial Sequence
  ENSG00000255502_4 (sequence is synthesized)
tcagaaacacatttgatgatggatcagaagtttcctcctatttaatgtggtgataaaaataacttctaagtaattcagttcatagaaccatgaaggactgggtttgagattatgctttga

SEQ ID NO: 837709 - DNA, 120 bp, Artificial Sequence
  ENSG00000255502_5 (sequence is synthesized)
ataccataaagtgatgaacacagagactgagaaaaaaagaggaggagaaggagtggaaggataaatgtatgtaagaaaaaaagaagcaaataaatattatagctgattctttcttcataa

SEQ ID NO: 837710 - DNA, 120 bp, Artificial Sequence
  ENSG00000255502_6 (sequence is synthesized)
cactgtcactggatttaaggtccactctgattcaccatgatttcatcttaatttctacctcagttacatttacaaagattctatgtcaaaagaaggtcacattctagggcacctggtaga

SEQ ID NO: 837711 - DNA, 120 bp, Artificial Sequence
  ENSG00000255502_7 (sequence is synthesized)
cttaaattctggagggaaacaattcaacccactgtggttggctttagattatttaatctgataatctgtttctattaattacagtattttgttcatttatatttatggaagttacaaata

SEQ ID NO: 837712 - DNA, 120 bp, Artificial Sequence
  ENSG00000255502_8 (sequence is synthesized)
gagttatatttaaacctaaataacatgagctgcttttatttgtcatatacaggcatagcttgaagatattttgggctcagttccagacccactgcaataaaataaatatcatactaaagc

SEQ ID NO: 837713 - DNA, 120 bp, Artificial Sequence
  ENSG00000255502_9 (sequence is synthesized)
aaaaaagaggaggagaaggagtggaaggataaatggtggggcagtaggagacactgaattcacatatcattgaaaaccaaaatattagaagagcttaagttttaaagaatgctggcaaat

SEQ ID NO: 837714 - DNA, 120 bp, Artificial Sequence
  ENSG00000255502_10 (sequence is synthesized)
gtttaagcgatcagcactgctggtttactataaacataatggactacacgttgagtaccttgacatatgagtaaattcatatagtacaaatcattcaacacacatatcttgagaacaagt

SEQ ID NO: 837715 - DNA, 120 bp, Artificial Sequence
  ENSG00000255502_11 (sequence is synthesized)
gagaagacagccatctgcaaaccagagagaaagtcctcataaggaactgaatcaaacttcaccttgatcttgggcttcccagcctttgcaactgtgagaaataaatgtgtctttatgcca

SEQ ID NO: 837716 - DNA, 120 bp, Artificial Sequence
  ENSG00000255502_12 (sequence is synthesized)
accctctccttaatcctggctctcacgtggattgtccttcctatattataatcctccacatgtctttcctttacagagttaatcccgaattacgtatttcaaatatctaatatagttgtg

SEQ ID NO: 837717 - DNA, 120 bp, Artificial Sequence
  ENSG00000255502_13 (sequence is synthesized)
ttagaaaaagaaattctcaagttctgagattatggaatatcctgaaagaatgctaaagcaactataccccttaaagaaagatcattatcaacttgtagaaaactaatcctatagtgtggt

SEQ ID NO: 837718 - DNA, 120 bp, Artificial Sequence
  ENSG00000255502_14 (sequence is synthesized)
gagaatttttggcagtcatattgcaccactctcatacttttaacaatgcatttgtgagaaccacctacaataaaaatatggcaataagattagcaactagtgttatttgttatattttcc

SEQ ID NO: 837719 - DNA, 120 bp, Artificial Sequence
  ENSG00000255502_15 (sequence is synthesized)
cttactagcagctgctgtgatcaggtaactcaaattattgttggttttcagcagcaccaaaaagagttggaaatagtctgctctgagcttcatgcaggtagaacccctgtagtggcatct

SEQ ID NO: 837720 - DNA, 120 bp, Artificial Sequence
  ENSG00000255502_16 (sequence is synthesized)
ctgaactctctgtgttatcagatttcccaaaagctcttttcctctcccttttccccttccaccttaccattgattatatccgtttctattcaatcatattaaataatttcttactcaaaa

SEQ ID NO: 837721 - DNA, 120 bp, Artificial Sequence
  ENSG00000255507_0 (sequence is synthesized)
tcgatccaggggccgccaagcggcggggcgggcactcttccggcatccgccgccgcccccttgccaccacctaccaagcccctgcagcctagaaacccgccacccgagaggcactactgc

SEQ ID NO: 837722 - DNA, 120 bp, Artificial Sequence
  ENSG00000255507_1 (sequence is synthesized)
aacccctccaccccgctgagacccggagcgctcattggcttagccctcaagggggcgggacccaacggcagaaaaggggcgtgctattgggtagaagagagccaccacgcaggatgcact

SEQ ID NO: 837723 - DNA, 120 bp, Artificial Sequence
  ENSG00000255507_2 (sequence is synthesized)
gggacctgagaaccgtcgggcagtcccacgagctctttcatgaccagctccaaccgacaagtacacgccccttcgcactccactagctagtaagctgagctacaaggtgtgccaggcacc

SEQ ID NO: 837724 - DNA, 120 bp, Artificial Sequence
  ENSG00000255507_3 (sequence is synthesized)
agctcaaatgccacctcttccatgaagacttccgtgatccacaatgatagcatctccagcaattgcttctataatgaatagcatgagtcattctgcaggatgttgatcttccttttttta

SEQ ID NO: 837725 - DNA, 120 bp, Artificial Sequence
  ENSG00000255507_4 (sequence is synthesized)
aatcttggctctaccacctttgagctatgtatcccaagagccctctttcttccattcacttacctgtctagtcaaacacccatcagacctttgccaggtgtccagcctgggcactacgtt

SEQ ID NO: 837726 - DNA, 120 bp, Artificial Sequence
  ENSG00000255507_5 (sequence is synthesized)
tcagaaaatgatgcacatagaatccctaactgaaaggagatcgcagctcatttggtacaaagtgcttttagcctgggtaaggagctggagagatgtgaaaatgtggaaagcaagcctaag

SEQ ID NO: 837727 - DNA, 120 bp, Artificial Sequence
  ENSG00000255507_6 (sequence is synthesized)
cacttccgccctcactggttgccgtggtaacaggcctccggtggagggcggggaccctcggaagccagctgggtggcgatcgcttgtctgccttggcaggccccttgtgcagtcttttcc

SEQ ID NO: 837728 - DNA, 120 bp, Artificial Sequence
  ENSG00000255507_7 (sequence is synthesized)
gctctaccacctttgagctatgtatcccaaggcaagtcacttcccctctctcagctttaaaatagtaataggattgctgtagggattaaagtaaatcaacatatgtaaagtgcccacaca

SEQ ID NO: 837729 - DNA, 120 bp, Artificial Sequence
  ENSG00000255507_8 (sequence is synthesized)
ctcatttggtacaaagtggctgattctttgactggtgagccactccccaggcaggcatagcatcacagagtttctgagaaggtacaccctggatgcaaagcagtgttgctgaaagactcc

SEQ ID NO: 837730 - DNA, 120 bp, Artificial Sequence
  ENSG00000255507_9 (sequence is synthesized)
taccctgctctgaataatggatagaacaattaggcagaagaccaacaaagaaagaggatatttgaacaacgtgataagccaatttgacctaataaatatctttatctgtgaaacacccta

SEQ ID NO: 837731 - DNA, 120 bp, Artificial Sequence
  ENSG00000255507_10 (sequence is synthesized)
gacctggcatatagtagttgcattttaaattttttaaacaaaatgtaagcatactatctttccagggtgttcagaagcctgaaaaacaccttggatcttttctcagagctggatcacaaa

SEQ ID NO: 837732 - DNA, 120 bp, Artificial Sequence
  ENSG00000255506_0 (sequence is synthesized)
tcattaaaggtgactgtacagaaaaccagaccatgactacgtgcaaccctttgtggtgccaagaaagaagaaactgcatcagataatatcttaatgagctgaaaattactaagaagataa

SEQ ID NO: 837733 - DNA, 120 bp, Artificial Sequence
  ENSG00000255506_1 (sequence is synthesized)
agaaatggagacccctttcatggatcagaagaagtttcatttcaaatatgttgagtagcaatgaagaaagaagtgaaagcttgctgtgaggatgcccatgtacacgatggcatgattaat

SEQ ID NO: 837734 - DNA, 120 bp, Artificial Sequence
  ENSG00000255506_2 (sequence is synthesized)
ctgcattcctgggaagacaagtgcttcctgccatttctggaaagaaaagtatacacaaacagtaaattaaagggtagatctcaaaggaacagcaactcttgaagataaactttctgaaag

SEQ ID NO: 837735 - DNA, 120 bp, Artificial Sequence
  ENSG00000255506_3 (sequence is synthesized)
gtgaagtcattgaactaaacttaacttgcgctatcacccacggagaaaaagcaaaagaaggcagtattaaactgtctgcccttaatgtcattacatgtggtttctcttatttgacctatg

SEQ ID NO: 837736 - DNA, 120 bp, Artificial Sequence
  ENSG00000243055_0 (sequence is synthesized)
tggagattgagttgtaacccaacccattgacttcatcacagctttcttccatgtagaataacgaatttcactttctagaattagaaggtagaaaaaacacataacgaaaggtagtttgct

SEQ ID NO: 837737 - DNA, 120 bp, Artificial Sequence
  ENSG00000243055_1 (sequence is synthesized)
gagatgttcttagtaccatacttatgatcactcaacattcttgacaaattattgcacacattaaactgcagtagggctttagcaggactcagatttgaaagcacatggttgctgatgact

SEQ ID NO: 837738 - DNA, 120 bp, Artificial Sequence
  ENSG00000243055_2 (sequence is synthesized)
tgcctgtaatcccagcattttgggagggtgaggagggaggatggcttgacctcaggagtttgagaccagcttgagcaatgtggtaaaaccctgcctgtagtaccagctacctgggaggct

SEQ ID NO: 837739 - DNA, 120 bp, Artificial Sequence
  ENSG00000243055_3 (sequence is synthesized)
gtagtaccagctacctgggaggctgaagcaggaggatcatttgagcctgggagccagtaaatgagggctctactcttggttagttagttagtattaatctactagcaggctgttgaaacc

SEQ ID NO: 837740 - DNA, 120 bp, Artificial Sequence
  ENSG00000243055_4 (sequence is synthesized)
tctcaatacatcacattatttctctacaaaatggagattgggctacgtgattgctcaagttcattagtactttgctattattgccattattaagaaatgactaatatattcttccaatag

SEQ ID NO: 837741 - DNA, 120 bp, Artificial Sequence
  ENSG00000247735_0 (sequence is synthesized)
ggtgatgccgagctgaagctgggaagcggatgtgagggaagagttccaggcagagggaaggcaaatgcagagatcctcaggcaggaacactgaactgttctccgtatttgaggagcagag

SEQ ID NO: 837742 - DNA, 120 bp, Artificial Sequence
  ENSG00000247735_1 (sequence is synthesized)
ggcgtgtcagtggtggccgcagcagctgagcaaaggtcttagaatcccagctaatgtcgtgggacctagcacccaatcccaaaagaaagaagaatagataggaacccactgttgacaaga

SEQ ID NO: 837743 - DNA, 120 bp, Artificial Sequence
  ENSG00000247735_2 (sequence is synthesized)
aggtgcactgagaagtgtttttatctgacccgatctgcatccagtttagaagccgatacatcagggatttaacaatctgtcttaatgtctagcaaggggggttgctggagggaaaacaca

SEQ ID NO: 837744 - DNA, 120 bp, Artificial Sequence
  ENSG00000247735_3 (sequence is synthesized)
gagtcagagttctatcttcagccctgccagcaggtccctgggagatgctagacgagtgacttttctctgggcgtggttggtgtaagggatgcacacgcaggaggaaggtcggagtgtaaa

SEQ ID NO: 837745 - DNA, 120 bp, Artificial Sequence
  ENSG00000247735_4 (sequence is synthesized)
tgtgtgacctgggcctgttactgggtataaatgggcctgtagtgaccgggagctcatgttctaccaaaggggttgccaattttctgatttcgagtgtggcggtgtaaaagagaaaagcaa

SEQ ID NO: 837746 - DNA, 120 bp, Artificial Sequence
  ENSG00000247735_5 (sequence is synthesized)
ctgctgccagctgggagctggtttgcaccctcactccagaagccttgatgttgctaggagctgacctggcaccaacagcacggccatggtggtgtcctgttgagcaaaataatttcacaa

SEQ ID NO: 837747 - DNA, 120 bp, Artificial Sequence
  ENSG00000247735_6 (sequence is synthesized)
aaaacatcagacaaggtcactctctgactgatctagaaaaagaccattccataataaagcctcaatacagaaacaagaacattgtccaaaccacaaaaattaccaacacaatcctctctc

SEQ ID NO: 837748 - DNA, 120 bp, Artificial Sequence
  ENSG00000247735_7 (sequence is synthesized)
tatttttagtagagacggggattcaccaagttgcccaggtgcttcctggtggtccttggttggagggtactatcagaaatggaggagcaacaaagattcagctgaagccctcactgcctg

SEQ ID NO: 837749 - DNA, 120 bp, Artificial Sequence
  ENSG00000247735_8 (sequence is synthesized)
aagccctcactgcctgggactgggacccttgactcgtcattgtatgcacacctgaaactgcttatgtcgctgaggtgccaacctgctgatggttggaagctaattgagttctgatattgt

SEQ ID NO: 837750 - DNA, 120 bp, Artificial Sequence
  ENSG00000247735_9 (sequence is synthesized)
acctgctgatggttggaagctaattgagttctgatattgtgttgatacccttaagcattgggtttactttttattttaattaattaattaattaatttttgagacagagtttcactcttg

SEQ ID NO: 837751 - DNA, 120 bp, Artificial Sequence
  ENSG00000247735_10 (sequence is synthesized)
tttactttttgagatagggtctcactctgttgaccaggctggagtgcagtggtacgactcagctcactgcaacctctgcttcccagctcaagtgattctccagtttcagcctcctgagta

SEQ ID NO: 837752 - DNA, 120 bp, Artificial Sequence
  ENSG00000276471_0 (sequence is synthesized)
tgatgtttctgggttcacatgtgatacgtggaacagtggcagccttcagcctttctggaataatgaagagacaagcccaagaacaaagccaacatgatgaggatggcaggacagaaagac

SEQ ID NO: 837753 - DNA, 120 bp, Artificial Sequence
  ENSG00000276471_1 (sequence is synthesized)
ttcctttgatgccttactgcctaaactacattcagagtttgactctttttgttgacacacctttgggcaccagaagagagaaatcactgtttccttggacggccctaagatgtgatgatg

SEQ ID NO: 837754 - DNA, 120 bp, Artificial Sequence
  ENSG00000253829_0 (sequence is synthesized)
agaccagtacaaaagcagactgcataattttggagacgatcacagctagagttgggatactaaccactgacatctgtgagacacgggcctacagggaatgagtttattaatgagatgtga

SEQ ID NO: 837755 - DNA, 80 bp, Artificial Sequence
  ENSG00000253829_1 (sequence is synthesized)
tagctgggactccaacaaaaaatcaagttggataacactccccaggataaactccaaatgtattagatttaaggattaaa

SEQ ID NO: 837756 - DNA, 120 bp, Artificial Sequence
  ENSG00000276476_0 (sequence is synthesized)
cctttagacgaagaaggcaagaatccaggccaaggggattcaacagagttggattgctgagaataaaattacggatttctccataatggacacacgcactttttgtttgtgctgtttcct

SEQ ID NO: 837757 - DNA, 120 bp, Artificial Sequence
  ENSG00000276476_1 (sequence is synthesized)
ttagaatggacgatgagtcaaaattgttcgtttatgcttcttcacagaaggatcttctgtgtcgtaggaggtggcctgcagcaatctggacattcagtggtcctcctgtgattaataggt

SEQ ID NO: 837758 - DNA, 120 bp, Artificial Sequence
  ENSG00000276476_2 (sequence is synthesized)
gaacggatgagctattctgataagaactggggaacttttgccattcaaaagcaaatagaagaactgggagattcctcaacttagcttttcttttttttggttctaaagtgactgcgaatg

SEQ ID NO: 837759 - DNA, 120 bp, Artificial Sequence
  ENSG00000276476_3 (sequence is synthesized)
gaggtagaagagaagaaaagctttcaaaaacatcttccattaagaaaaatatgtatcttcatgaagacctatctgagtaaaattactaaaacataatggctttcttgaaatagaatggaa

SEQ ID NO: 837760 - DNA, 120 bp, Artificial Sequence
  ENSG00000276476_4 (sequence is synthesized)
tgaaaggcatattagggagtatgaaagtatgaagattttattaacatacttctagaagtttattaaatatctgcacaggaactgtaatttgagatcagtggtggaaagagaataaaggaa

SEQ ID NO: 837761 - DNA, 120 bp, Artificial Sequence
  ENSG00000276476_5 (sequence is synthesized)
tcacgtggacatcagctctgaggcctgtggccccacttgcttctgggctttctatagacatttgctggtgacctgcccaggcaggctagagtacccttcctcattgcaccctgtgttccc

SEQ ID NO: 837762 - DNA, 120 bp, Artificial Sequence
  ENSG00000276476_6 (sequence is synthesized)
ttccttccttccttcctttcttcctccatcccttatgaaaccctcgttgtgcagttacttattaggtgctgtgtgagcgtctgaagtctcccctcacccacttttccatttgggccactt

SEQ ID NO: 837763 - DNA, 120 bp, Artificial Sequence
  ENSG00000276476_7 (sequence is synthesized)
ctcacccacttttccatttgggccacttggccagtgattgcatcagtaccagggttctaggagccatgcagggatccccagtgggcagagctggccgtagcatttggaaaggaagagaga

SEQ ID NO: 837764 - DNA, 120 bp, Artificial Sequence
  ENSG00000276476_8 (sequence is synthesized)
ggacagcagaaaacactggtccagagagggcctgcagagccagaagcgatgacgcatccaaggttgtgtttgacttctgcactgcctctgcaacctgtaagcacatctgagccagttcag

SEQ ID NO: 837765 - DNA, 120 bp, Artificial Sequence
  ENSG00000276476_9 (sequence is synthesized)
aaagtaggaaaaccaaagtatatcagaaatggcctcttatcatcaaggagattttggtctagattgcttattgctcaggagaaatcaccactttttaaaaagatatgctgagatagggtt

SEQ ID NO: 837766 - DNA, 120 bp, Artificial Sequence
  ENSG00000276476_10 (sequence is synthesized)
tagttgggatagaaaaggttattaaactacgggacacccttcctttacagagtgtaagcactactaccccttttgtttgtctgtttttcttatttttctcacagatgcagttcctgcatt

SEQ ID NO: 837767 - DNA, 120 bp, Artificial Sequence
  ENSG00000276476_11 (sequence is synthesized)
agtattgataaatgtgtggctgctccacttggagtgttttcaaagcataaatcacagcattgatggtgctgtggtttggctcttccagccctcttaacaacggtctgatggacttggcga

SEQ ID NO: 837768 - DNA, 120 bp, Artificial Sequence
  ENSG00000276476_12 (sequence is synthesized)
gagtctagccacgtgttctggcctctgtcactctcatggctgaaacgcatgcacacccacagatgggggccccgtggtagagatgtgcctctacttgtcaaatagactgactccaaattc

SEQ ID NO: 837769 - DNA, 120 bp, Artificial Sequence
  ENSG00000276476_13 (sequence is synthesized)
ggaaatatgcctcaggaatctagaaagatagaaaaggagtcttcgtcactgtagggtctcattcacaatatggaggagagatggaggggagtttttggtataaattttgcctcataaaaa

SEQ ID NO: 837770 - DNA, 120 bp, Artificial Sequence
  ENSG00000276476_14 (sequence is synthesized)
ttctccacgttgttttgtactgtatgagggtagcgagaaattagttgatggttaacaatcaagctggagaagaatatcctcaatttttcacatggaaaatgaaaaactacaactccttcc

SEQ ID NO: 837771 - DNA, 120 bp, Artificial Sequence
  ENSG00000276476_15 (sequence is synthesized)
aaatatatgtatgtttcttttctgaagatagacgtgtgtgtgtttgtgtgtatcatataacatttattttttgatttctttgttatcaacagtaaaaatacagaaaatgatgccaaagag

SEQ ID NO: 837772 - DNA, 120 bp, Artificial Sequence
  ENSG00000276476_16 (sequence is synthesized)
aagagaaaacctgccacggagcccgggcttctctgatcctcccgccaaactttgtctctcatttagctttctttgtgtctgaggatttagcaaaggcctcaggagtatttttcacagatg

SEQ ID NO: 837773 - DNA, 120 bp, Artificial Sequence
  ENSG00000276476_17 (sequence is synthesized)
agtacttgagctcagtttcgtgcattcctagtccctttgcctttcttgcttttgctgcccgccttgtcaggagaatgaaagaatcaatatgcgtggagtgcccaccctgtgcaaagcaac

SEQ ID NO: 837774 - DNA, 120 bp, Artificial Sequence
  ENSG00000276476_18 (sequence is synthesized)
gacggaagtgactggatgtggagaggagtgtatccgcgaaggaacgcacaagtggcctgacctgcagaagaacgctagctaggcactaggcatgccggcaaggtcagctgagagctgacc

SEQ ID NO: 837775 - DNA, 120 bp, Artificial Sequence
  ENSG00000276476_19 (sequence is synthesized)
ccagtgcaacgtggaggagtttggttggggcagtcggaggagcacctgggccgccaagcggccagacttcgggggaaagccatctctcttctggcgcctttatcggcagagagctacttg

SEQ ID NO: 837776 - DNA, 120 bp, Artificial Sequence
  ENSG00000276476_20 (sequence is synthesized)
accttgcactcattctccaagcccacgtgggtaagattcacccacactgcggagggcgtcggagctccacagcctgcctgtctgtatgctcccatagaggtttgagcagcggggcactgg

SEQ ID NO: 837777 - DNA, 120 bp, Artificial Sequence
  ENSG00000276476_21 (sequence is synthesized)
ggcactggagaagcaagtcacacccccattgcacgccatgggagtaggacaagaattggataattggaatcatgcagaatgtagcctttttggagtggcttctttcacctaccaatatgc

SEQ ID NO: 837778 - DNA, 120 bp, Artificial Sequence
  ENSG00000276476_22 (sequence is synthesized)
aggggctgggcgggccggcccagggcctgcctatggcctgaaagagaaaacctgccacggagcccgggcttctctgatcctcccgccaaactttgtctctcatttagctttctttgtgtc

SEQ ID NO: 837779 - DNA, 120 bp, Artificial Sequence
  ENSG00000230084_0 (sequence is synthesized)
ggcgcggacacgcgtggtgtgcgcggtccccgtgcagcccgccctgccgcaggctgccctccacccccagccccagctccagcccccagcccgtccccactgctcatatccgagcagata

SEQ ID NO: 837780 - DNA, 120 bp, Artificial Sequence
  ENSG00000230084_1 (sequence is synthesized)
gatagaccccggccccaccctcccgtgctgagcctcctttctgccgggaagttcgtccgggagtcaaacatcgctgccctccggttgcgccacggagggggagccaggataggaagctgc

SEQ ID NO: 837781 - DNA, 120 bp, Artificial Sequence
  ENSG00000230084_2 (sequence is synthesized)
cgtgaaatcaggaagctgagcgcgccgggccccggatccgaacagaaaaggcttccacccgctcccctgagggatcccacgctgagggactgaaccccgcaccccagccgcgctcaccac

SEQ ID NO: 837782 - DNA, 120 bp, Artificial Sequence
  ENSG00000230084_3 (sequence is synthesized)
ccaccctctcgcctgggctgctctgacctggggttcactttctgaagatgattctgaagaagaggaggaattggaagaggaatccgagccttctgaatgaattccagaactgccactcaa

SEQ ID NO: 837783 - DNA, 120 bp, Artificial Sequence
  ENSG00000230084_4 (sequence is synthesized)
agtgccctatgaggagctgtggtaacaaggaaatgttctcatgactcaaaaatcagtggaaaaaggtacaggatgagaagccttgtttcccaaccctatcaacagggctgtgctgtttcc

SEQ ID NO: 837784 - DNA, 120 bp, Artificial Sequence
  ENSG00000230084_5 (sequence is synthesized)
ctctaccacgaatgctcttcttaaatacggctcacttcatctccttctgatacctgcttaaatctcatcttctcaaaatggccttgtctgaccaacttattaaaatagtatcccaactac

SEQ ID NO: 837785 - DNA, 120 bp, Artificial Sequence
  ENSG00000230084_6 (sequence is synthesized)
ctttggaagccatcagcaagctctgtgaccatcagagctattatctgtgatcatatacataacctgaagatagcatatcatacttttttttaatactttcaactccaaaaggctttgggc

SEQ ID NO: 837786 - DNA, 120 bp, Artificial Sequence
  ENSG00000230084_7 (sequence is synthesized)
ttgtaaaaacatagtttcaaagatttttattttatcagccaccatctccatttttacctatccttcccataaatgcaaggatatgttttagttctgaaacatgaaagttaatttgatttt

SEQ ID NO: 837787 - DNA, 120 bp, Artificial Sequence
  ENSG00000230084_8 (sequence is synthesized)
atcctgcaactcttgagaactgatctttctagccagcataaagaaagtatactgacacaaaaatcttcagaaaaaatataggaggattaaatactcaattacttccaggattgcttactc

SEQ ID NO: 837788 - DNA, 120 bp, Artificial Sequence
  ENSG00000230084_9 (sequence is synthesized)
cgcaccccagccgcgctcaccacccccaccctctcgcctgggctgctctgacctggggattccagaactgccactcaaagtgccctatgaggagctgtggtaacaaggtaaaaggcagga

SEQ ID NO: 837789 - DNA, 120 bp, Artificial Sequence
  ENSG00000230084_10 (sequence is synthesized)
taagtataaaaattataattgtaatttattgattcaaaattttgtatttggcattccttctcaaaaattgtagtccaatataaaattaggccatgtggaaaacagtaaaggcctttacta

SEQ ID NO: 837790 - DNA, 120 bp, Artificial Sequence
  ENSG00000230084_11 (sequence is synthesized)
gatattcctagaaaacactgaagcaagtactaaataaaataaaaataagatgtttttgaagggagaatctcgtatactgaattttaattagtttatgtttaacgatagcatttttaatga

SEQ ID NO: 837791 - DNA, 120 bp, Artificial Sequence
  ENSG00000230084_12 (sequence is synthesized)
gttttaactctaacattttatgaacaagctaatgtatgtaacaatatcaagaagctgctgctacttgataaatcaaattttaattgtactgatataaaaaaggaaatctaaaagaaactt

SEQ ID NO: 837792 - DNA, 120 bp, Artificial Sequence
  ENSG00000230084_13 (sequence is synthesized)
tagagccctcaaatggtagcttcttgaccaatgaatcattacgtttttcatgttcacagttcagataagcttaaaaatggaaatgggaaacctcaaccaaaggataaacaatttttacat

SEQ ID NO: 837793 - DNA, 120 bp, Artificial Sequence
  ENSG00000230084_14 (sequence is synthesized)
taagttactattaaaaaggctttctgaaaatatttctttctactctgtattggctcttaagaaggttaagaatagaaaatcactctgttaaagaagagtaataacaaataacctatggga

SEQ ID NO: 837794 - DNA, 120 bp, Artificial Sequence
  ENSG00000230084_15 (sequence is synthesized)
ggtcttttacctgtataattctaagcataatcttttatcagctttccatttttaggacattcttaggaacagaatgccccttatctgaactttatcagatcatgtagaaatatatttttc

SEQ ID NO: 837795 - DNA, 120 bp, Artificial Sequence
  ENSG00000230084_16 (sequence is synthesized)
agacaaatttaacatttgagttttgtatgtcagtaatatactcctttaaagacagggaagcgccattcatactcattcattcagaaagatgacaaagaaaatgttttcaataaattatta

SEQ ID NO: 837796 - DNA, 120 bp, Artificial Sequence
  ENSG00000230084_17 (sequence is synthesized)
atgaaatatttctccaacatacataggacaactgagattcacttccaatcaaaagcaataaccctcatgctggacagttatctttcacattttatatgatagaattatgataaaaatagg

SEQ ID NO: 837797 - DNA, 120 bp, Artificial Sequence
  ENSG00000230084_18 (sequence is synthesized)
ttttgaagcagccttagataagaatataactaaaagtatgccaaaggatttatttagaattttcagataataaaaaggtaagtttttggttgtgcaatgcacatccatgtaaatatattt

SEQ ID NO: 837798 - DNA, 120 bp, Artificial Sequence
  ENSG00000230084_19 (sequence is synthesized)
gctttttcaaaagcaaatttagtattcttaagtttcctgagtgacaatctcataaattttggtggaaatgacagcaacattgggttatttcaattatgcatggagacctcataaaatgag

SEQ ID NO: 837799 - DNA, 120 bp, Artificial Sequence
  ENSG00000230084_20 (sequence is synthesized)
ttttttaaaatgctcgctcaacagcaggtcacctatctctatacaacatcagaaaataatagtacctctctcaaaattgcctcaaagagcaacagtaagaggaaaaaacaaccatgcaat

SEQ ID NO: 837800 - DNA, 120 bp, Artificial Sequence
  ENSG00000230084_21 (sequence is synthesized)
ggtttactcaaactgctttccctgttgagggggtacagtaactgaatactcgtctatgaacaatttttacatgttcatcaatagtttatgttccaatctagttttggtaaagtcagcact

SEQ ID NO: 837801 - DNA, 120 bp, Artificial Sequence
  ENSG00000230084_22 (sequence is synthesized)
cgaatttgacaggggcttaaatatgccgtcatcttttctgaagatgacggcatattttgaaaacaatgtataagttttaaattttttaagtcccattcttccaattcaggatatatgctg

SEQ ID NO: 837802 - DNA, 120 bp, Artificial Sequence
  ENSG00000230084_23 (sequence is synthesized)
aatgctgaggcagttgttagaccttataagttactatgatattagaaattaataataaaaataaagctgacagaattttagcattaaacttggtttaactataccatctttcttatgaac

SEQ ID NO: 837803 - DNA, 120 bp, Artificial Sequence
  ENSG00000230084_24 (sequence is synthesized)
agcgcttctctgtttaagaaaagctcatctctgaattatgcctactcacatgaaaaactgggaaccattggtatgtttccctcgatttgccattgataaaaggaacgctctgtcatgttt

SEQ ID NO: 837804 - DNA, 120 bp, Artificial Sequence
  ENSG00000253823_0 (sequence is synthesized)
atggtctggtttcctctcctcctcactctccttgcacactgcacaggatcctgggctcagtctgtgctgactcagccaccctcagtgtcttgggccacaaggcagaggctcactgtctcc

SEQ ID NO: 837805 - DNA, 120 bp, Artificial Sequence
  ENSG00000253823_1 (sequence is synthesized)
ctcaggcatggtgataagaattgggcctcctgggtatctgaccaattctctggttccaagtctggcagcttggcctccctgggcaccactgggctctgggctgaggacaagactgattat

SEQ ID NO: 837806 - DNA, 120 bp, Artificial Sequence
  ENSG00000253823_2 (sequence is synthesized)
cactgccagtcccgtgacatctgctgagtgcttgtacagtgctccaggcttgcaggggagtgagacaagaacccccttcctcctttcccaggagggtgagtgcccagcagctactgcaca

SEQ ID NO: 837807 - DNA, 120 bp, Artificial Sequence
  ENSG00000253821_0 (sequence is synthesized)
cagagagtttccgggcaggtaatgctgccaccatgccaagagggtgatgcaccctaaccacaagacagacaccccagaactcactgtgtgaaactcttcatccagctgttcatcagtatc

SEQ ID NO: 837808 - DNA, 120 bp, Artificial Sequence
  ENSG00000253821_1 (sequence is synthesized)
cttcataacatcctttccaatatgctaatatatagaaagacactgaaggaattaaatcagcttgtccagcagcaagcttcagagccaaatataagcacacctcataattcagagacctcg

SEQ ID NO: 837809 - DNA, 120 bp, Artificial Sequence
  ENSG00000253821_2 (sequence is synthesized)
tgatgggtcctcagaagacacacccagcagctgccaaatgaacagcagatgacggaaaggggcccttggcctgatctctcatgggagacagtgacctttcctgagttgaagatggtgaaa

SEQ ID NO: 837810 - DNA, 120 bp, Artificial Sequence
  ENSG00000253821_3 (sequence is synthesized)
tgccagaaggagctgatgaggctgtcccacacactgacactgctatgatatcatgattgaatttcacttttttctcccaccataatgtaatttctgggcagtgattggggtgttgattca

SEQ ID NO: 837811 - DNA, 120 bp, Artificial Sequence
  ENSG00000253821_4 (sequence is synthesized)
tctttttctcactatttacaaagtacagcaccatgagaatccctgaattttagaataagtttctctccactggaatataacacatattttgggttctttgcctggactggtcatttcttt

SEQ ID NO: 837812 - DNA, 120 bp, Artificial Sequence
  ENSG00000253821_5 (sequence is synthesized)
cttttactaattgttgtgaaagaatgacagagatgtacaacatggtttttgaatggatgctgagtttaactctcccgcttaccagagataaagttggccatacacacacgtctcttatat

SEQ ID NO: 837813 - DNA, 120 bp, Artificial Sequence
  ENSG00000253821_6 (sequence is synthesized)
aagagtttattcattggcagacactttgatgatgacattgagttagatgaaatactggttccagtttgtagcactttatgaattttcatgtaaagtgatcattcaatttaaggtttctgc

SEQ ID NO: 837814 - DNA, 120 bp, Artificial Sequence
  ENSG00000253821_7 (sequence is synthesized)
acacatcttacaaagcatatctgtttatcagagctcatttacttaagaggattaaaatgaaatctctcctcatgagccaagggtgaaatagctagtgtccgctcctaaatatgtgaacta

SEQ ID NO: 837815 - DNA, 120 bp, Artificial Sequence
  ENSG00000253821_8 (sequence is synthesized)
atatgtttttccatgggcaagcaagattttgtttttctcctatttttcttcttcagaaggaaatgattaaaatattaataacacaaaaataaatatacattataaaactcaaaaaaataa

SEQ ID NO: 837816 - DNA, 120 bp, Artificial Sequence
  ENSG00000253821_9 (sequence is synthesized)
atgccctggtagattcctgagaaaaggaacaggaggatgagaggttcaatgttttacacattgctggtctgatagctcagcttcattcacagtgtttgtgaggcaaacatgttccaaaga

SEQ ID NO: 837817 - DNA, 120 bp, Artificial Sequence
  ENSG00000253821_10 (sequence is synthesized)
aggccagaaaaagcccagccaggttgaattctgtggaaaattcaccgaaaagatacaatgcatttgaaacaaaacaaaacaaaaccaaaaaacacctgcagaagtccacttgaaaaacct

SEQ ID NO: 837818 - DNA, 120 bp, Artificial Sequence
  ENSG00000253821_11 (sequence is synthesized)
ggagaggaaaggccattgtgtctcttgttagcagatcaagattggcattagagctcatcgaggagaactgtgtcttgaccagcatccttgatcactgaggacactggtggtcctatgttg

SEQ ID NO: 837819 - DNA, 120 bp, Artificial Sequence
  ENSG00000253821_12 (sequence is synthesized)
gtgaggtgccagcttttcacactcagtctttttctaatgcagtcactccagagccatttcttagccaatgatctctgtcctgttgtctcacataaagtgagcagccccatctctgttaca

SEQ ID NO: 837820 - DNA, 120 bp, Artificial Sequence
  ENSG00000253821_13 (sequence is synthesized)
tttacacattgctggtctgatagctcagcttcattcacagagaaagacactgaaggaattaaatcagcttgtccagcagcaagcttcagagccaaatataagcacacctcataattcaga

SEQ ID NO: 837821 - DNA, 120 bp, Artificial Sequence
  ENSG00000253824_0 (sequence is synthesized)
ctctgtcccatcagcttcctccacagagcctgaaccggcaccagctccactctgcaggaaggaggatgtggaaatgaagaggcaggctctgatgactcaacacagccacccaaacaggca

SEQ ID NO: 837822 - DNA, 120 bp, Artificial Sequence
  ENSG00000253824_1 (sequence is synthesized)
atctccctgggacttgctcaggggatttttacccccctacatgaagcagagaaacagtgagtttcctccaagatgtcaaatccaagatgggtgttcctgatctgcctgtagctctcctcc

SEQ ID NO: 837823 - DNA, 120 bp, Artificial Sequence
  ENSG00000253824_2 (sequence is synthesized)
tttcaaactgtgcctccaccatcttcaatatggagcttccaagattgccctgctgccctgcatcaagcctgcaaaagaggatagggggtcaggccactcatatttcattggcccaaattc

SEQ ID NO: 837824 - DNA, 120 bp, Artificial Sequence
  ENSG00000253824_3 (sequence is synthesized)
agtcacatggccacactcactgcaagggaagctgggaaatggagtctagctctgtgcccaagaagcaaagaaaaacagatttgatgaagacttagtcaatctctgcaacaatgaaacaga

SEQ ID NO: 837825 - DNA, 120 bp, Artificial Sequence
  ENSG00000253824_4 (sequence is synthesized)
agagttgtatcagccctaaaggggattgggcagtgcaccagaagaatctaccacattcccgaggtttacttcaagatgcaattgggcctgcctgtcaagcctttgcagtaaacattccat

SEQ ID NO: 837826 - DNA, 120 bp, Artificial Sequence
  ENSG00000253824_5 (sequence is synthesized)
cctgaggagggagagaaaattcagttaacaaaaagatagactacatgccaaggtagtctgcagaattctacctacccaaattatgtgttaaattgtgaaagaagttatgataaaaatagg

SEQ ID NO: 837827 - DNA, 120 bp, Artificial Sequence
  ENSG00000253824_6 (sequence is synthesized)
cggataaaaccatcctggaaaaactcccagttttacaatctaactgatcatcagtatctcagttatacaaataactccagcctgcatgaaataccttcttgctccccttgacttgtaaaa

SEQ ID NO: 837828 - DNA, 120 bp, Artificial Sequence
  ENSG00000253824_7 (sequence is synthesized)
ataactttgtttcaatggaaaaggtgtagaaaatggacgttgaagccaatcaaactcatagtatcaatactttgtgttaagctttaggagtaagttttgtaatcattgcaatcagcttgt

SEQ ID NO: 837829 - DNA, 120 bp, Artificial Sequence
  ENSG00000253824_8 (sequence is synthesized)
ttttgttatttaagcagcttaaaatgattaagataatctgacatattagccttacgattttattttggaatgataaactaatactcaatttgtaattttcacttgaaagttgcagaataa

SEQ ID NO: 837830 - DNA, 120 bp, Artificial Sequence
  ENSG00000253824_9 (sequence is synthesized)
ttgaatatgttctttaaaagtgtttgaatattcagaagaatctaatttactacatgtataaactagtattattacaagagttcattgagatattgaaggatttttcttgctttgtttgta

SEQ ID NO: 837831 - DNA, 120 bp, Artificial Sequence
  ENSG00000253824_10 (sequence is synthesized)
aatgttgccccatcaggcatttgaagtgtttgagaaagtcaaagttattaaatttgtaaagatagttaaaaatattttaggaaatctttttacatgtataaagatggtcagtttgaagaa

SEQ ID NO: 837832 - DNA, 120 bp, Artificial Sequence
  ENSG00000253824_11 (sequence is synthesized)
atttaatgtttttaagtttgtaagttgattgaacactaatcaaacaagaaaagcaattgttctcatttttatataaaaatcactatatttacaaataaaataaccaggtttatagactaa

SEQ ID NO: 837833 - DNA, 120 bp, Artificial Sequence
  ENSG00000253824_12 (sequence is synthesized)
attgagtcattgacaggatgtgaaaggagcagggtgaggagagaggttggaagtgaagttatatcagagttgtatcagccctaaaggggattgggcagtgcaccagaagaatctaccaca

SEQ ID NO: 837834 - DNA, 120 bp, Artificial Sequence
  ENSG00000253824_13 (sequence is synthesized)
attaccaaagctcccaagagctgagctggaaacacagaaccctgaggggaggcagggagggcagcgctgacccatcaggacagctgttcctgagcaggaccagatatctaccaaagcagg

SEQ ID NO: 837835 - DNA, 120 bp, Artificial Sequence
  ENSG00000253825_0 (sequence is synthesized)
caatgagatatcctacacacctgttagcacagctagcatgaacagtgacaccaaataccggtgtggacatggggaaagtggatcactcatacagtgctggtggaattgtgaagtgataca

SEQ ID NO: 837836 - DNA, 120 bp, Artificial Sequence
  ENSG00000253825_1 (sequence is synthesized)
ctgtacacaaatgtttatagaggatttatttgttataacctcaacctggaaacaaaccagaagtccttcaacagcaaaatcaacctttcccttgccgtgagtaaaagaccaacttgcatc

SEQ ID NO: 837837 - DNA, 120 bp, Artificial Sequence
  ENSG00000253825_2 (sequence is synthesized)
tgcttggtatgcagtaaaaaatggagcagattgcacagtgactggagaaatgaatgagaagtccagctatgaaaaaaagtcagagacaaaaatgaagataataaaatatattttggatga

SEQ ID NO: 837838 - DNA, 120 bp, Artificial Sequence
  ENSG00000230555_0 (sequence is synthesized)
gcctcctctcgcctcagccgctcggtagctgggaccaccagcgggcgccaccactcccggctacatttttttgtatttttagtagagacgtgggtctcgccatgttggctaggctgctgc

SEQ ID NO: 837839 - DNA, 120 bp, Artificial Sequence
  ENSG00000230555_1 (sequence is synthesized)
gcccgcctgggcctcccaaagtgctgagactgcaggcatgagccaccgcgcccggccgagagcctcttttggctcctcctttcgcctttccggggccaggcgtgtgcagctctgtgaagg

SEQ ID NO: 837840 - DNA, 120 bp, Artificial Sequence
  ENSG00000230555_2 (sequence is synthesized)
caggcgtgtgcagctctgtgaagggtcccctccctctgcgggacgtcctcgctgccgaggtcagaggtgcggagaacatgagacccgaggtctcaactgcttcttaccaatattaattcc

SEQ ID NO: 837841 - DNA, 120 bp, Artificial Sequence
  ENSG00000230555_3 (sequence is synthesized)
agcaatccactcatcagagaagctgtttctacactctcctgaatgaccattttatagatgctgggaaaaaattgtattaaagactatgagttagctgggcttggtggctcacgcctgtaa

SEQ ID NO: 837842 - DNA, 120 bp, Artificial Sequence
  ENSG00000230555_4 (sequence is synthesized)
ctttgtgaagccaaggcgggagcatcgattgagcctagcagttcaagaccaaccttggcggcataagcgagaccctgtctctacaaaaattttaaaattagccaggtgtggtggtgtgca

SEQ ID NO: 837843 - DNA, 90 bp, Artificial Sequence
  ENSG00000230555_5 (sequence is synthesized)
cttactcagcctaggaggttgaggttacagtgagctgggatcacaccactgcccttcagcctgggtgacagagcaggaccccgtctctta

SEQ ID NO: 837844 - DNA, 120 bp, Artificial Sequence
  ENSG00000230550_0 (sequence is synthesized)
agccaggccagctcccgttccaacacctctaccttagggacatctgcagaaaggctgggcagtggcaaaaaaggtagccagtgaaaggagggctgatagacaggtgcttggcctcaagag

SEQ ID NO: 837845 - DNA, 120 bp, Artificial Sequence
  ENSG00000230550_1 (sequence is synthesized)
ccctgaatctgagcctcatcactccctctgtcttactgcagggggccttggaaaaatggccaatctcttagaccctcacttttatcatctgtaaaatggcactgaggcgtcctgtccttc

SEQ ID NO: 837846 - DNA, 120 bp, Artificial Sequence
  ENSG00000230550_2 (sequence is synthesized)
tgactcctctggttatgctaggaagctgataaagacatgggcgtcaaagcatgaggcagagcataaaagtcactgactgagggcatccctgctactttgtgaaaggaacaggagggtaag

SEQ ID NO: 837847 - DNA, 120 bp, Artificial Sequence
  ENSG00000230550_3 (sequence is synthesized)
gaaggagacacagggaaaggacaaggcagggtagcaagagcacatagagaaggatgaggatgagaccggccctctctcaccttcccacaggacagaccgatcactccctcacccagccca

SEQ ID NO: 837848 - DNA, 120 bp, Artificial Sequence
  ENSG00000230550_4 (sequence is synthesized)
tcaagaagatctgaggttatctagtccagccccattgggaaactgaggctcaaggaaggaaagagcctccctccaagcctccagatacctcttgcactgctggatcctttacttcttcat

SEQ ID NO: 837849 - DNA, 120 bp, Artificial Sequence
  ENSG00000230550_5 (sequence is synthesized)
ttaaggaaagcagtccttggcccgtccaaggatccaaatcgaacggagtctcctaattgtgaggactgtgcactctctctgaaggcctgggtgcccctcagaggttctgcaaaggcctct

SEQ ID NO: 837850 - DNA, 120 bp, Artificial Sequence
  ENSG00000230550_6 (sequence is synthesized)
ctgagtccagggagtctgctgggagaggtgatatgggggaggcctcccccatgcttcctggagtttatctgtgccgacaggtctgcgtaagatgtgtttcagtcctggctctccttaaga

SEQ ID NO: 837851 - DNA, 120 bp, Artificial Sequence
  ENSG00000230550_7 (sequence is synthesized)
agctaccttttaagattccttttttttttttcttggactgagaccatcaaaagggaagaattaggagggttcctttggtttgctcaggtcccggcctgaaaaacatggctctgacatcca

SEQ ID NO: 837852 - DNA, 120 bp, Artificial Sequence
  ENSG00000230550_8 (sequence is synthesized)
gagagatgcaaaacagacctgatcttaggatgctgggaaaactccccaggaggcggtgcagctccctaagtcgagctgactcccacaaagatcctccccaggaggaagagtagtgccctg

SEQ ID NO: 837853 - DNA, 120 bp, Artificial Sequence
  ENSG00000230550_9 (sequence is synthesized)
tcctggtatgcacccccctctcaccccagcagctgaccatgtcacaggtagaagggatcagagagacggtctggtctaacctctcatctcacaaacagaccatcggctcacatgagaaag

SEQ ID NO: 837854 - DNA, 120 bp, Artificial Sequence
  ENSG00000230550_10 (sequence is synthesized)
caaactaagagcttctttagctcactcctacactgtcaaaggaacattaaagccttcaatgaagagcatgcttgctttgtggctccccattgactcatcccttctaccttgagttatgag

SEQ ID NO: 837855 - DNA, 120 bp, Artificial Sequence
  ENSG00000230552_0 (sequence is synthesized)
ggagagagtgaaggtattaataagctgtgggctgtgtcggggcagccacttggtccaactatgcgtctctccatacccagcttcaatcataagcacgggcccaatcactcagttagaact

SEQ ID NO: 837856 - DNA, 120 bp, Artificial Sequence
  ENSG00000230552_1 (sequence is synthesized)
gaatgaatgaatgaatgaatgaatggagtggacaaattaataatgccgcatggaaacaaagaaggacaggaacatgaaagtaaaggattgctttgtctgaaaaccatacaggcagtaaag

SEQ ID NO: 837857 - DNA, 120 bp, Artificial Sequence
  ENSG00000230552_2 (sequence is synthesized)
catacaggcagtaaagggcacacgtcttcctggcactcggggaagccgcactgccagcagcagctctcgagagctaggacgctgcacagaagctatacatttccgaagacagagaagagg

SEQ ID NO: 837858 - DNA, 120 bp, Artificial Sequence
  ENSG00000230552_3 (sequence is synthesized)
agggtaaacttctgcctagggccatggaaaaaggcaagaaggtcccgtgaccaagaaatgaccagctccacagaggaaatgcagggccactctccgactggaccccactgtgcacaagcc

SEQ ID NO: 837859 - DNA, 120 bp, Artificial Sequence
  ENSG00000230552_4 (sequence is synthesized)
tgctcaatgtgaagatgacgaggatgaaaacctttatgatgatctactcctatttatgtggacttgctctggattagggatgagaagacctgactctactgttttcttgataagtgacct

SEQ ID NO: 837860 - DNA, 120 bp, Artificial Sequence
  ENSG00000230552_5 (sequence is synthesized)
tgaaccagacacatgtgctcaagttccatatctgtaaaatgaagatacctggccttcctacttcacaaggttcttttgaagatcaaatgtaatactgcataataaagtgactcataaatt

SEQ ID NO: 837861 - DNA, 120 bp, Artificial Sequence
  ENSG00000230552_6 (sequence is synthesized)
acttctcccagcagctggataaacatattcgacgacagaccttggcaagaactgcaaagatgctcttgacaatggcatgaataaatattaggtgttatctagaattcaccacatttgagg

SEQ ID NO: 837862 - DNA, 120 bp, Artificial Sequence
  ENSG00000230552_7 (sequence is synthesized)
tcgtgcgcaaagccagatcaaagagaatgcagaacaatagaagcaagaaggatcccaaatatagtgttgcaactctcctcacctgcaggaagggctatacatttccgaagacagagaaga

SEQ ID NO: 837863 - DNA, 120 bp, Artificial Sequence
  ENSG00000230552_8 (sequence is synthesized)
agcctgtttatcagggtttcccttattaaagtatatgtcaaaaaggcctggtagaaatgtaactctgtgatgttaattttggaaagtctcatctagaactttctgggaagtatttgaaag

SEQ ID NO: 837864 - DNA, 120 bp, Artificial Sequence
  ENSG00000230552_9 (sequence is synthesized)
cacagttgtggaatcatttgaagactcaaacatataaattaaacactcttcttggatacagcagttagaatatggaacagatagggtctacattggagaaatgagagatgtggcaagtgc

SEQ ID NO: 837865 - DNA, 120 bp, Artificial Sequence
  ENSG00000230552_10 (sequence is synthesized)
ttagcctctctgagactcagtctcaatgtctccatcagggacagctagctagctcacggaattattgtgagggttcactgttataatttattccaaggtccactgcagcaccgaggacat

SEQ ID NO: 837866 - DNA, 120 bp, Artificial Sequence
  ENSG00000230552_11 (sequence is synthesized)
aggtggcactcaagaagcagtggccagtagtattctctgctaaaatatttgccacctcagccactttgattctgctccagagggctttttcgctcatcccattggcgacacaaggcaggt

SEQ ID NO: 837867 - DNA, 120 bp, Artificial Sequence
  ENSG00000230552_12 (sequence is synthesized)
taactaaagatactctcacctaatctaaaaattcaagacatcagtccacaaaataccagaatcaccatggaggcagctgtttagcactttggatagtctatttctccccctaaaaacagc

SEQ ID NO: 837868 - DNA, 120 bp, Artificial Sequence
  ENSG00000230552_13 (sequence is synthesized)
ctacttaaaacaggggagagttaaggttccaggatcttactcctgagattttttatttaaagaacaccccatctttactcgcagctgagaggctaagattaaaaattagccactgtatag

SEQ ID NO: 837869 - DNA, 120 bp, Artificial Sequence
  ENSG00000230552_14 (sequence is synthesized)
tagctgagcagtgacaatttttcataaaggtttttagtacacatttgggattataatttcaatattatgcaaatgcattttatggatctataatacagaatgtgtactggcgttaatgtg

SEQ ID NO: 837870 - DNA, 120 bp, Artificial Sequence
  ENSG00000230552_15 (sequence is synthesized)
cattagcaggcgagaagaaaaggctccaaatgagccattttggtgtctgctttcaacatgtattatgaataataagtaaaatgttctggtttagaacaaataatataaaatctgaattct

SEQ ID NO: 837871 - DNA, 120 bp, Artificial Sequence
  ENSG00000230552_16 (sequence is synthesized)
tcttgatgtacatcagtgacaaagccctacgcaactcccatggaattattccattggacacaatttaaaactggctcttaaacaatatattcctgtttctggcttctcttcttgaatgag

SEQ ID NO: 837872 - DNA, 120 bp, Artificial Sequence
  ENSG00000230552_17 (sequence is synthesized)
atgtgaaagtaaaataaatatatttaatatgaatacgggatagttccccccattgctcaaaatcaggcatgaactagatgaaggcattgggaaggctgaaacaccatagtggtcaagaga

SEQ ID NO: 837873 - DNA, 120 bp, Artificial Sequence
  ENSG00000230552_18 (sequence is synthesized)
gtggcccaggatacttgtaatttgagaggctctgagtattgaaaagtgaagaagcatctaaatagggttatataacttgcatattttcaatgaataaaattaacaaatataatgccttta

SEQ ID NO: 837874 - DNA, 120 bp, Artificial Sequence
  ENSG00000230552_19 (sequence is synthesized)
acacaaaatatttaatacaagatgactgtattattctgaagatatttaaatgatgtgtaagtaatatttcttaatgtaatgtgctgcaagctttgttccaaaatgggaacttgagttgaa

SEQ ID NO: 837875 - DNA, 120 bp, Artificial Sequence
  ENSG00000230552_20 (sequence is synthesized)
atttgtctgatgtctattttctttcagccttgtcagagtgtttctgtgactgcagattagaataaaattctcacaaactaatttgaggcttttcgtaaaggcagaggactgagccaaaca

SEQ ID NO: 837876 - DNA, 120 bp, Artificial Sequence
  ENSG00000230552_21 (sequence is synthesized)
actagcttctcatgatagagccccaaaatgtttcctttttaattaatatttccatgttgcaattttgcatgtacagaaggtggtagctggttattttagtagtaattcaaactttctatt

SEQ ID NO: 837877 - DNA, 120 bp, Artificial Sequence
  ENSG00000230552_22 (sequence is synthesized)
tgcattgatttagttaagactttcagatctattgaccctgtttcttgaatgcatgtttcacacctgccccattcttgggcagcctgcaggaatacaagatcacactgtccaatgagtatg

SEQ ID NO: 837878 - DNA, 120 bp, Artificial Sequence
  ENSG00000230552_23 (sequence is synthesized)
gactaagcattcagctgagtaacaataatacaatcatcttgtctctcaaacaggtgcccttaacttaatgttttttaaaatgccaccacgtccatgacatcttcaaaatgatactaaaaa

SEQ ID NO: 837879 - DNA, 120 bp, Artificial Sequence
  ENSG00000230552_24 (sequence is synthesized)
tttggagtctaaaaagactaagtaatttgtacaaaatcacaattatacaggtctaattttgcaacccaaactcttgaccagtatataaccctgaatccagtattaatgtagtagataatt

SEQ ID NO: 837880 - DNA, 120 bp, Artificial Sequence
  ENSG00000230552_25 (sequence is synthesized)
gtcttggcttaatttatcatataagttatagaaatggtgttttgtccttactctgacatggggactataattgacactaaaatctgaatcaatttcaaccagtcattgcttcacttcact

SEQ ID NO: 837881 - DNA, 120 bp, Artificial Sequence
  ENSG00000230552_26 (sequence is synthesized)
acttgtctacattgctgcagttggttgctgctttccatttcccccgatgcttttccattcgagatggaggtctgtggaaggaaagatggatacagcaagagggtctatccaagaacccaa

SEQ ID NO: 837882 - DNA, 120 bp, Artificial Sequence
  ENSG00000230552_27 (sequence is synthesized)
taaatatgtactgcataaataaatcagatgttttaaatttggcaatttaaattcagcaaaaagtctttgacaacctgtggagtgtaagctatggtttctatccttgcaaccttaaaattt

SEQ ID NO: 837883 - DNA, 120 bp, Artificial Sequence
  ENSG00000230552_28 (sequence is synthesized)
caaaaagccccaaattcaagcttatcagtagcaaggaagcccttccaaatattaacttacaatcaatattggaaaaaactgagtagtatattgtgtcctattttgaaaacaagctatttg

SEQ ID NO: 837884 - DNA, 120 bp, Artificial Sequence
  ENSG00000230552_29 (sequence is synthesized)
ccatgtgtagataagattcctacactaaagatatctttttaatagttgaaatatgagatgccgagtaataaaacttgaagtacagtggagcagctctgagagaacaagtggcacattgcc

SEQ ID NO: 837885 - DNA, 120 bp, Artificial Sequence
  ENSG00000230552_30 (sequence is synthesized)
ttgaaataatactctcaacgccatttgctgagtcttctatgctcttggccctttgcacaatctcacttaatcttcactgcaccctgtaaggtaaatattattatcttcattttacagatg

SEQ ID NO: 837886 - DNA, 120 bp, Artificial Sequence
  ENSG00000230552_31 (sequence is synthesized)
aggaaattgaagcttacataaattgtctgaggtcacacagttaataagtggttgaatgtggatttaattcgaggtctgctttatttcaaagtgattcagtgagtgagacagagagaaaca

SEQ ID NO: 837887 - DNA, 120 bp, Artificial Sequence
  ENSG00000230552_32 (sequence is synthesized)
aagagaagacagtggtttttaaagaaagaatgaatctcaattttctgaaaccctatagcaattcctgcctttcttgtggctcttaccatattctgctgttatttctggatttcttatata

SEQ ID NO: 837888 - DNA, 120 bp, Artificial Sequence
  ENSG00000230552_33 (sequence is synthesized)
acctttactgaattataagctattctatttgagagaagagaccacacacaaaccatttctgtattcccccaggaccttgttcagtgcctggaacaaagtaggtattcaagatacctttca

SEQ ID NO: 837889 - DNA, 120 bp, Artificial Sequence
  ENSG00000230552_34 (sequence is synthesized)
cttattcctcatatatttgctgggtgtggttaagcccagtaaagaagacaagtcatgccttccaggagcttctagctcaggggagaaagtgattgaagacccagtgttctaaactgggtg

SEQ ID NO: 837890 - DNA, 120 bp, Artificial Sequence
  ENSG00000230552_35 (sequence is synthesized)
tggcaccacagtgatgggaagtaggggaagccaaggggaagctgactgactggtgggctcaaccaaggtttcccgaggaagaggtcatccaaaaccattcttgaagcttcagtaagagcc

SEQ ID NO: 837891 - DNA, 120 bp, Artificial Sequence
  ENSG00000230552_36 (sequence is synthesized)
aagcaaagagggtggggaaagcctcacaaagcgagaaggatcaggaatgcacaaaggccctgaaattagagataagcacaaagcctgtttccaaggattacaaatcacctggagattact

SEQ ID NO: 837892 - DNA, 120 bp, Artificial Sequence
  ENSG00000230552_37 (sequence is synthesized)
ggaggacaagagaaaggggagaaacagcaagacagaaggtggcaaggtatccgctgtgaagtctagaaggactgtgtacaccatggtaaagtatttctctatcctgatctttctggggag

SEQ ID NO: 837893 - DNA, 120 bp, Artificial Sequence
  ENSG00000230552_38 (sequence is synthesized)
ggtttatgcagaggagaggcaagacaaggcatatatttgagaaagaggatcattagctgaattgtggagaacagactcgaagaggatgctactggttgcagggaacaggaaagaaaacca

SEQ ID NO: 837894 - DNA, 120 bp, Artificial Sequence
  ENSG00000230552_39 (sequence is synthesized)
aggaagcaatcactaaagccagtgggagggagggtcttgccattagagaagagaaggccattttgtatacacagctgacgcttgaacaacacaggtttgaactgtgagagtccacttata

SEQ ID NO: 837895 - DNA, 120 bp, Artificial Sequence
  ENSG00000230552_40 (sequence is synthesized)
tctttgaaatgaatagaatggtcttattaagagtttcctagtccttttcttttgtagcttgcctgagaagaggttagacattcagtccacaaagccaggcttctctccgaccttccccta

SEQ ID NO: 837896 - DNA, 120 bp, Artificial Sequence
  ENSG00000230552_41 (sequence is synthesized)
cagcactctgcccaaaacctgctcagttcagcttcctagaggggctccctactcacacactttggaaaggagaacagttcttcacgtagaatgtgaacaatcaagctggactctcacaga

SEQ ID NO: 837897 - DNA, 120 bp, Artificial Sequence
  ENSG00000230552_42 (sequence is synthesized)
acttcctagaggccctactctggcccaagattgaaccacagtgaaatcatcagttctgcattggatgatatcactgatcaattttctttccattccgtcatttggtgcacccttcctcta

SEQ ID NO: 837898 - DNA, 120 bp, Artificial Sequence
  ENSG00000230552_43 (sequence is synthesized)
cctccagagtcatctggacccgtgactaccaccaacagatcttagcaccctgaaatctcagttctggcctgctgactttttatatccatatattttctaactttatccatcctcaaagac

SEQ ID NO: 837899 - DNA, 120 bp, Artificial Sequence
  ENSG00000230552_44 (sequence is synthesized)
ttccctccttgggaccctgttttctaatgataaataagtaatgagtcttataatccaagactcactgacaatggaattgcagaaattccctatccacaggcgtgactattagagtgggaa

SEQ ID NO: 837900 - DNA, 120 bp, Artificial Sequence
  ENSG00000230552_45 (sequence is synthesized)
tttcagacacaccgacagggtaagtagagaaatcttataggaggactgaggatcttataccccagcaaccactctgccattctgaatgggatgtggctggccctagaccagctacaaatg

SEQ ID NO: 837901 - DNA, 120 bp, Artificial Sequence
  ENSG00000230552_46 (sequence is synthesized)
catgtcatgtccttatgtcagattcatcaaatgtcaaatcaggaagtcatttggataacacatttctggttataaataacaaaaactgactcaagctagcctaagggaaaaaattaataa

SEQ ID NO: 837902 - DNA, 120 bp, Artificial Sequence
  ENSG00000230552_47 (sequence is synthesized)
atgtgaagatgacgaggatgaaaacctttatgatgatctactcctatttatgctgccttgcaagaaatggaagggaagcacaaggggattgagtgccttggctgaagcccttggtcagca

SEQ ID NO: 837903 - DNA, 70 bp, Artificial Sequence
  ENSG00000237689_0 (sequence is synthesized)
aggagctggcagaagaaggaaacaaggtcagaggcagagtattgaaccctgcctcccagttaaagaactc

SEQ ID NO: 837904 - DNA, 120 bp, Artificial Sequence
  ENSG00000237689_1 (sequence is synthesized)
gaggcagagtattgaaccctgcctcccagttaaagaactctttcaaaagacctcatgactggtctcacagagattcaaaggtgtttgagtccttccttattatgcccttggaagatgctt

SEQ ID NO: 837905 - DNA, 120 bp, Artificial Sequence
  ENSG00000237689_2 (sequence is synthesized)
cccaagtactctgtctccattatccctggtatagggcacctcatcactctggtgttatccctgaagggccttcataataatgtgcttaaagagtcccctattatgtccttcaggatggag

SEQ ID NO: 837906 - DNA, 120 bp, Artificial Sequence
  ENSG00000237689_3 (sequence is synthesized)
cttgacttgcccaaattgctatgtacatgttaaagagaggctggaactgaagttggtcatttctcactggatcagtcaacaagatttgagtactttctgtgtgctctgcatcattctgag

SEQ ID NO: 837907 - DNA, 120 bp, Artificial Sequence
  ENSG00000248757_0 (sequence is synthesized)
aaggaatccgaagctctggtgtcagcagaattgatgagctctgcccctggggaacaccaacacaacttcattgaaagagttacagggatttcatgtttcggaggaattatatacagaggt

SEQ ID NO: 837908 - DNA, 120 bp, Artificial Sequence
  ENSG00000248757_1 (sequence is synthesized)
gaatgcacaatggtttggagtggtgcaagggcagtgaaaactgaagacccacaactccccaaaatgatgaggaaaagaagaaaaggctgtaaaaaatgggaaatcttgaataccacagta

SEQ ID NO: 837909 - DNA, 120 bp, Artificial Sequence
  ENSG00000248757_2 (sequence is synthesized)
tagctcagattgtgaccaggcccactggaaactgtttcagtacctgacaagagagaccttcctacaggctagaagagaggcaaatgggaatggtgtatctcagcctgctggctgagcatg

SEQ ID NO: 837910 - DNA, 120 bp, Artificial Sequence
  ENSG00000248752_0 (sequence is synthesized)
ctcacatatattgccagccctctccctgcccagaactcttgtgactggccctaaggcagatcaggtgtttattccatatccttgatgacaaagaaactgtgatcgtgttctggggaatgt

SEQ ID NO: 837911 - DNA, 120 bp, Artificial Sequence
  ENSG00000248752_1 (sequence is synthesized)
cccttttcccattcaagtgtatgatcatattttcaagcaatcacgtttacattcagcctggaaactttctgcccagttcttaagttctactgccagcagcttggatactacagaatgctg

SEQ ID NO: 837912 - DNA, 120 bp, Artificial Sequence
  ENSG00000248752_2 (sequence is synthesized)
atttagctcataggatgcattgaaccactttgccatggtaaccagcagacagacctgagagaagcaaggctgcagagaaactgtagccatcaccaaacaacaaatcaaagggaagtgtct

SEQ ID NO: 837913 - DNA, 120 bp, Artificial Sequence
  ENSG00000248752_3 (sequence is synthesized)
gaaattcttactaacttttgaacgtggaaccctacatcttcgttttgtactggtccccacatattttatagctgatctgaaggaggagagagagatgatgggggatgaagggtatggaat

SEQ ID NO: 837914 - DNA, 120 bp, Artificial Sequence
  ENSG00000248752_4 (sequence is synthesized)
tgtatgctatggctgcctgctgtcgaagttctccaggtccagagaggatttaagttgctggaataatccacccagtcttcgagatgtgattatataattgatggtatgtggatatcactg

SEQ ID NO: 837915 - DNA, 120 bp, Artificial Sequence
  ENSG00000248752_5 (sequence is synthesized)
atcacaaaacacaataaaggacctaaggcaacatctttgttctttctcaatgtggggaaaatgtttttgttctacttggtaagtggcctctgcagtgtctcttggagacctcaataaatg

SEQ ID NO: 837916 - DNA, 120 bp, Artificial Sequence
  ENSG00000248752_6 (sequence is synthesized)
aagcatttgctctgtgcagctaagaatccagcttttaattctatcttttcttgtgtttacataaactttcgtttgcatttcagaagccttatggaaagattcctgtggctgacccaggag

SEQ ID NO: 837917 - DNA, 120 bp, Artificial Sequence
  ENSG00000248752_7 (sequence is synthesized)
tagtggtgaatttctccatcaagatcctgactgctacaacatgtaaagtccctggcatgtctggctcctaagaaatgagtctctccctacaaacaatgcctgtcaatgtcttcctcaaac

SEQ ID NO: 837918 - DNA, 120 bp, Artificial Sequence
  ENSG00000248752_8 (sequence is synthesized)
cttgcttggctacgaagtggtgttcacagtcaaggagaagagtcctgaccttaataacctgaatctggacaacaatgaagaacctctgaaaaaagtgggaaaataacagtccccaaagta

SEQ ID NO: 837919 - DNA, 120 bp, Artificial Sequence
  ENSG00000248752_9 (sequence is synthesized)
gagaataatatccacatctttcttggaaattcagccctgaaagcgaacctgcaataagtacagtctatattcattgctcttacatgctgccccttctgtatgccgccatctgcaacactg

SEQ ID NO: 837920 - DNA, 120 bp, Artificial Sequence
  ENSG00000248752_10 (sequence is synthesized)
ctttctcattccgtgttttggataactgcagagtcctctaacacatatgtgatggttaatactgtgtcaacctgattggattgaaggatacaaattattgatcctgggtgtgtttgtgag

SEQ ID NO: 837921 - DNA, 66 bp, Artificial Sequence
  ENSG00000248752_11 (sequence is synthesized)
ttgccagcatgcctagaatgtaaagcaggcagaaaaatgtaaaaagagagactggcctagcctccc

SEQ ID NO: 837922 - DNA, 120 bp, Artificial Sequence
  ENSG00000248752_12 (sequence is synthesized)
aacttggactggctctctttgctcctcagcctgcagtctattgtgggaccttgcgattgtgtgacttcatacttaataaactgatatgtatgtaaatacttaataaactcatatatattt

SEQ ID NO: 837923 - DNA, 120 bp, Artificial Sequence
  ENSG00000248752_13 (sequence is synthesized)
attcatacttaataaactcatacatgtatattccattagttctatccctctagagaaccctgcctaatacaacacgaggagtagtagcagaccacaagaaagaaaagcagtttgttttct

SEQ ID NO: 837924 - DNA, 120 bp, Artificial Sequence
  ENSG00000248752_14 (sequence is synthesized)
gtcactgatctgcaaaatatacatctctaaaggagtttctcccaaagccactggttacatgattgggtaaaattggaacaagaacaatcagaggttgactgagtcctttaaaaacggtat

SEQ ID NO: 837925 - DNA, 120 bp, Artificial Sequence
  ENSG00000248752_15 (sequence is synthesized)
ttaaaagttcagtaaggttttacatggactataaagtctctaaacggttttcttatttataactgctctaccagcatctccttcagtaaaatcaaaatattcatattttggcttgcaaaa

SEQ ID NO: 837926 - DNA, 120 bp, Artificial Sequence
  ENSG00000248752_16 (sequence is synthesized)
aatgaaacgaatgtgaattatgtatctgccaaataatacaggaggatttatgtttttatgtgatacacttctcctattttgttttctttttcctgtgccctggcttttttccacctccac

SEQ ID NO: 837927 - DNA, 120 bp, Artificial Sequence
  ENSG00000248752_17 (sequence is synthesized)
tggcttcatttctacattcatttttcatgtattcaaacatacttttcctaagcttcatgttatattagcctcattccaaataccaaatattttaaatttaatccttgaatatatgcaaga

SEQ ID NO: 837928 - DNA, 120 bp, Artificial Sequence
  ENSG00000248752_18 (sequence is synthesized)
tattaacttttatggtgctgtttccataacccttgacactgtatattttaaaggactttaaaaatttatgacaattgttcttagttttgagaaaatatgtgctcagtattttaaatcatt

SEQ ID NO: 837929 - DNA, 120 bp, Artificial Sequence
  ENSG00000248752_19 (sequence is synthesized)
aattgtgtcaaaggtgagattttctgaaagtctagagcaggggtcacaaactcaaaggcctttaggaaccggaaagacaaggtctcactctgtcaccctcgactagagtacagtggcagg

SEQ ID NO: 837930 - DNA, 120 bp, Artificial Sequence
  ENSG00000248752_20 (sequence is synthesized)
atctccactcactgcaacctccaccttccagggaatcagctggctggaggaattttggaaggggtgaggcatacactttcttctatgttcctgaaaccacaacattgttaggactcatct

SEQ ID NO: 837931 - DNA, 120 bp, Artificial Sequence
  ENSG00000248752_21 (sequence is synthesized)
gttcatgagaccagaccaatagaaaatgagcacttcgtggataaaaaatacagatggaaacttagtggtattccaaagctgagactgagactgaatgctaataggggacacaattatgaa

SEQ ID NO: 837932 - DNA, 120 bp, Artificial Sequence
  ENSG00000248752_22 (sequence is synthesized)
ttgaaaatagtgctgctcctcaaagagataattcggggtaggtttgaagatatttattctgagaattctaatggcattaattttcagttccatctagccaagtgatttacaatggagtct

SEQ ID NO: 837933 - DNA, 80 bp, Artificial Sequence
  ENSG00000248752_23 (sequence is synthesized)
tctagccaagtgatttaccactatctcagctcactgtaacttctacctcccgagttcgagcaattctcctgcctcagcct

SEQ ID NO: 837934 - DNA, 120 bp, Artificial Sequence
  ENSG00000248752_24 (sequence is synthesized)
ccaaaacatcagatcttcctgggtcttgagatagctagttttcagactgcaactacaccatcatctctcctggttctcagaccttcagacttagactgaaacttacataatcagctctcc

SEQ ID NO: 837935 - DNA, 120 bp, Artificial Sequence
  ENSG00000248752_25 (sequence is synthesized)
ataagagcagtgaacaagctcttgctgtaattcaagtcaggtgtagaagctggagctggagcagccattctgaactatgtcgaaaatctacctggaaataaaaagttgactcaccgattc

SEQ ID NO: 837936 - DNA, 120 bp, Artificial Sequence
  ENSG00000248752_26 (sequence is synthesized)
acaccatttccatttgtcttggtctggctttggtgtcggggcatttccagtctcataaaatgactttgcgtaacacatggaaactaatggtgttctacaattgctgaagcaagtgtaaca

SEQ ID NO: 837937 - DNA, 120 bp, Artificial Sequence
  ENSG00000248752_27 (sequence is synthesized)
ctaaaggaatgtaagcttcatgaggccacagatttttgtcctttgtgtctgaatccccaggtcccagaaaagtgaatagacatagagcaggggtccccacttccgggccgtggacctgaa

SEQ ID NO: 837938 - DNA, 120 bp, Artificial Sequence
  ENSG00000248752_28 (sequence is synthesized)
ccagtccccatgacctgttaggaactggctgcacagcaagagaagccttatggaaagattcctgtggctgacccaggagtagtggtgaatttctccatcaaaatctaggctgcaggagca

SEQ ID NO: 837939 - DNA, 120 bp, Artificial Sequence
  ENSG00000248752_29 (sequence is synthesized)
gatctgaaaaggacatgccattcttttgcaacagaaaaataccagactaaggcactcgagattctcaaaacttctgattgaatgtggtatatttcatgtttactcactgcccattagcca

SEQ ID NO: 837940 - DNA, 120 bp, Artificial Sequence
  ENSG00000248752_30 (sequence is synthesized)
aagcaagtcacatggccaagcctaatatcaaaggggttgggacataagctccccctataagatggtgctttatgtcacatggcaacagagagggtagagaataactgaaaatgatggcac

SEQ ID NO: 837941 - DNA, 120 bp, Artificial Sequence
  ENSG00000248752_31 (sequence is synthesized)
tatgtactacagtaactctatcctgttgctctgacaagataagatcaaaacgtactgagctcatctaagtgttagagatactataaggaataaagctatcctttttttatgaaacttaaa

SEQ ID NO: 837942 - DNA, 120 bp, Artificial Sequence
  ENSG00000248752_32 (sequence is synthesized)
gccttccctgtggccatgagttactacaagatctgattgttaaaaaaagattctaggacttcctgtccctctgtcttactcctcttttaccatgtgacatgcctgcttccccttcacctt

SEQ ID NO: 837943 - DNA, 120 bp, Artificial Sequence
  ENSG00000248752_33 (sequence is synthesized)
ttcaccttctgtcatgattgtaagcttcctgaggttcccatcagaagcagagtagttgctggtgtcatgcttgtacagcccatggagctgtgaaccaaataaacttcttttctttataaa

SEQ ID NO: 837944 - DNA, 120 bp, Artificial Sequence
  ENSG00000248753_0 (sequence is synthesized)
agccgagaggcccacctttgcaagggaattggtgccttccaagaagacactcagctctgtgacagccaggaccccagtcaccaggttcaaagccgcacagagatctaataacatgtatct

SEQ ID NO: 837945 - DNA, 120 bp, Artificial Sequence
  ENSG00000248753_1 (sequence is synthesized)
gaggccagagtaaatgaggaactttttgcaaagaagcataaaaggaaagagatcttggaatacctagctaatctcagttgctgtctctgctctgaagccctgcctttgaaagctctattt

SEQ ID NO: 837946 - DNA, 120 bp, Artificial Sequence
  ENSG00000248753_2 (sequence is synthesized)
gctggtatactgactttggtgtggggtttgtacatgtgcctgttgagagctggatccttcccgtgggtggatgctggcatggtggctcttccatctaaggatccatctggaaaagtggcc

SEQ ID NO: 837947 - DNA, 120 bp, Artificial Sequence
  ENSG00000248753_3 (sequence is synthesized)
gatttcatcacttacgtgccaggacctcagatgccgaggcaggggaatgctgcaatctaaacatttacattctaaaaaatgggaaatcatctgcttcgatataaattagccagggcctga

SEQ ID NO: 837948 - DNA, 120 bp, Artificial Sequence
  ENSG00000248758_0 (sequence is synthesized)
aaatgaaggtgacggggtctgtgatggggacttaaatgaacaagaggtttagaaacactaattcaagtctatccccttcataatacaaataaagaacctatgacccattagacctataaa

SEQ ID NO: 837949 - DNA, 120 bp, Artificial Sequence
  ENSG00000237685_0 (sequence is synthesized)
gtctttcaggcagtgcaggtcagcctggagcctggagatccctgtgtagaacagagactccctctcagaagccacagagacgtttgtgaagcagctcagtagctttcttacagcgtcttt

SEQ ID NO: 837950 - DNA, 120 bp, Artificial Sequence
  ENSG00000237685_1 (sequence is synthesized)
gaaagtgactggggccttctgatccacatgaacacagtagatgttttggggagtgtagatggccctcaagagtctttcaaatgtatcagtctttgcggatgaccatgacataggccaaag

SEQ ID NO: 837951 - DNA, 120 bp, Artificial Sequence
  ENSG00000237685_2 (sequence is synthesized)
ggaactcggcttcgtctttggacacaggttccattatgcagtgatttcggatcaagtatcgctggcaggttattatttctcaatggcgtcactggtatattttcatccaagaacattttc

SEQ ID NO: 837952 - DNA, 120 bp, Artificial Sequence
  ENSG00000237685_3 (sequence is synthesized)
ttgcctgtcacaatcatgccacacacttctgcaaggactgaagagtttgagatcttcccccatggaagatatttttgcgggacctaatagttactatacaggaataaaagagttatggac

SEQ ID NO: 837953 - DNA, 120 bp, Artificial Sequence
  ENSG00000237685_4 (sequence is synthesized)
gtggccataagccctaggaccaacccaaatgcctctacctttatttttcctatggtcttttctggattcatcattcacctgattttatgccattgctgaagtcagtctgcaggtccctgc

SEQ ID NO: 837954 - DNA, 120 bp, Artificial Sequence
  ENSG00000237685_5 (sequence is synthesized)
ccagacttgagaaatgtgctctagcaacttatttgcagcaagaagtgcaatatgaccatttacttaaaagaaggaggatcaaccacaagtcggtagctcttctatttaaaaaatcaggtg

SEQ ID NO: 837955 - DNA, 120 bp, Artificial Sequence
  ENSG00000237685_6 (sequence is synthesized)
acttcacaaaagccaggcacagttgggcacctctgtctaggtcaaccacaaattaagaccctagcaaatcggccacagctgccagctcagggtgtttttcccatgtggagtacaggtgga

SEQ ID NO: 837956 - DNA, 120 bp, Artificial Sequence
  ENSG00000237685_7 (sequence is synthesized)
atgtgtgttcatttggcacctctttttcccatgcagagccaccatcaccatcactgatgtcacctttgaatgcaagggacactatatttcttcaacttcaggcaatcacagttgtcctga

SEQ ID NO: 837957 - DNA, 120 bp, Artificial Sequence
  ENSG00000237685_8 (sequence is synthesized)
agtaggtcaccatttacgtggacagcacccagaactcctcgatagtggggtctctttacttaaaaataaagatcaagaatttatagtatttcaggattgaaaggaatcttgcagattatt

SEQ ID NO: 837958 - DNA, 120 bp, Artificial Sequence
  ENSG00000237685_9 (sequence is synthesized)
ctcaccaattgattcagttacaaataaagaacactgacaatgacccataacgactattctatcacattttgtctccattttctcactgatggcctgagagggcctatggctgctttcacg

SEQ ID NO: 837959 - DNA, 120 bp, Artificial Sequence
  ENSG00000237685_10 (sequence is synthesized)
ttacaatggcagggctaagttgttgccacatctgaccaccgaagcttaaaatgttttccatctggcctttaccagagaaggtttgctgaccctctcctctgtatctacggatgtcccttg

SEQ ID NO: 837960 - DNA, 120 bp, Artificial Sequence
  ENSG00000237685_11 (sequence is synthesized)
tataccactgtgcttgcactacatcaagacagcgattgtggacttgataccattttacaactttttgctttattttcaagatttcctcgtgaatgccagaatgacacgatatttggtagc

SEQ ID NO: 837961 - DNA, 120 bp, Artificial Sequence
  ENSG00000237686_0 (sequence is synthesized)
acagctggccagcaggcggggcctccgtgtctgtggcggggatgtcacctttcttcgcaggaagaaacactctgtcttcctgctttgaggacagctgaagtcttgccacttcttctggat

SEQ ID NO: 837962 - DNA, 82 bp, Artificial Sequence
  ENSG00000237686_1 (sequence is synthesized)
tgctttgaggacagctgaagtcttgccacttcttctggatgctctgaccatcagtaagagacacggtctgactttgttaccc

SEQ ID NO: 837963 - DNA, 120 bp, Artificial Sequence
  ENSG00000237686_2 (sequence is synthesized)
atccaccagctactcttccagattcatgaggcaaggcctgcctgctcacctggctggccccaagcacctcttcaacctgttgccaccgtcctgccttgctgcccttctcagctcatccag

SEQ ID NO: 837964 - DNA, 120 bp, Artificial Sequence
  ENSG00000237686_3 (sequence is synthesized)
gcagagcccaggcgcgtgggtcggtgtcgggtgtgtgtgtacgtctgtgtgtgtaatgaaactggacgccttccttcccggcgatcttgacttaacctgtcagcagagggcttgaggtta

SEQ ID NO: 837965 - DNA, 120 bp, Artificial Sequence
  ENSG00000237686_4 (sequence is synthesized)
gaccacaggttgaacctaggtggctgctggagaggagttcctgccagaaacagatgatgaactggaagaacagatgtgaggctgaaagtccccagtccatgtcctcctccaccaggaagt

SEQ ID NO: 837966 - DNA, 120 bp, Artificial Sequence
  ENSG00000237686_5 (sequence is synthesized)
cttccttgatgaactgccttgggattgctctgggattgaccttgaattcctagctgtggcaagatgggcttctttttactttgccatcctgccaaatctgagcactgagcacctacaggt

SEQ ID NO: 837967 - DNA, 120 bp, Artificial Sequence
  ENSG00000237686_6 (sequence is synthesized)
tgtggtgctttcattcaaatcattcattcagtcatcaaatatgccaggtgctcaagatacacgggtgaagccatggactcagctactcttatagagcctggaaaaggagagtcttaaagc

SEQ ID NO: 837968 - DNA, 120 bp, Artificial Sequence
  ENSG00000237686_7 (sequence is synthesized)
aagtagtcacaccaaaaagaattacaaactgtaatgtgtgccaagagggaaaattacatggggctctgggagaatatcctagggacttagtttagatgggggtgtggcctgatatttaag

SEQ ID NO: 837969 - DNA, 120 bp, Artificial Sequence
  ENSG00000237686_8 (sequence is synthesized)
ctcagttcctgtcttgctctaacaaagtcccagcctagctggggacacacacgcacgcgcgcgcacacacacacgcagaaatgtctgggaaaagatgatgtttaactgacagttcactgt

SEQ ID NO: 837970 - DNA, 120 bp, Artificial Sequence
  ENSG00000237686_9 (sequence is synthesized)
ctcaccctccgcagaatgcaggcccactccgttgctgaagggcctcctccttgggccagggcgcctgcttctgccagtggcatcatcaccccactcctcagccgccagtcatcagagaca

SEQ ID NO: 837971 - DNA, 120 bp, Artificial Sequence
  ENSG00000237686_10 (sequence is synthesized)
tctcgccaaggctaggataagtagctaggactacagatgcgccccatcacgcccagctaattttacaacttctgtagagatggagtgttgctgggttgcccaggctggtcttgaattcct

SEQ ID NO: 837972 - DNA, 120 bp, Artificial Sequence
  ENSG00000237686_11 (sequence is synthesized)
acataagcacaccgagaaacaccatcgcagacatgttctcacaagcacatgtgcataacactcactacccctcacgcgtatacacattaatacacacactcatgcacactcagtcttaca

SEQ ID NO: 837973 - DNA, 120 bp, Artificial Sequence
  ENSG00000237686_12 (sequence is synthesized)
cacacagacacacagccataatcactgttgttggttgaattgtgcccccccatccccaccaaaaagataagttggagtcctaacccccagtacctggggatgtgaccgtagttggaaata

SEQ ID NO: 837974 - DNA, 120 bp, Artificial Sequence
  ENSG00000237686_13 (sequence is synthesized)
gtgtccttataaggagaaaaagatttgaaaacagagacatggagacacagagcagaaggccatgtgatgatggagtcagagattggagtgatgcagctatgagccgagaaataccaaggt

SEQ ID NO: 837975 - DNA, 120 bp, Artificial Sequence
  ENSG00000237686_14 (sequence is synthesized)
gctggcagcccccagaagcaaggagagaggcaaggaacaatctccatcagagcctctggaagaaacagactctgccaacaccttgatttcagacttttggcctccttcactgtgcgagaa

SEQ ID NO: 837976 - DNA, 120 bp, Artificial Sequence
  ENSG00000237686_15 (sequence is synthesized)
cctccttcactgtgcgagaatacgtttctgttgttttaaactactgagtcaccaagtctgtggtactgtgttatggcagccccggcaacaaatccaatcacacacacacacacacacaca

SEQ ID NO: 837977 - DNA, 120 bp, Artificial Sequence
  ENSG00000237686_16 (sequence is synthesized)
cacacacacagctggctccaggctcagtgatgagctcagaggagttccccttgggagctgctctttctctgtcttccttccttagtgattggtccagtggatccacaaaagctcatggcc

SEQ ID NO: 837978 - DNA, 120 bp, Artificial Sequence
  ENSG00000237686_17 (sequence is synthesized)
cagagcaggagcccagtcatttttaattcctcttccctggagttcttaaccatgcgttgccctcaaaatctgctctcaagatttgggttgccatatttaggagcaccagaaaacatacag

SEQ ID NO: 837979 - DNA, 120 bp, Artificial Sequence
  ENSG00000237686_18 (sequence is synthesized)
gaatgctgtgtctgcttgcatcatattaattaaaaactggaaataacctaaatgtcccagaataggtacataaactgtggcatatccacttaatggaatactactcagcaatacaaaagg

SEQ ID NO: 837980 - DNA, 120 bp, Artificial Sequence
  ENSG00000237686_19 (sequence is synthesized)
aaaacctagtgttacttgagcaacatggatgaacttcacagacataatattgcacagcacgaggcagacacaaaagtgtgcatatgctatgattccatttacatgagattcaagaacagg

SEQ ID NO: 837981 - DNA, 120 bp, Artificial Sequence
  ENSG00000237686_20 (sequence is synthesized)
caaagcagatctatggggatagaagtcagaatagtggttacctctggaaggtggaattgactgggaggggcttcagggaacctcctggggtgctgaaaacattctgtgcttgcaccgggt

SEQ ID NO: 837982 - DNA, 120 bp, Artificial Sequence
  ENSG00000237686_21 (sequence is synthesized)
ggtggttatgtgggcattacataaaattcaccaagctgcacccttaatgatttgtacaatttgatgcacaaatctaacatctcaagaagaataaattttacaaagtacctaagaagcaaa

SEQ ID NO: 837983 - DNA, 120 bp, Artificial Sequence
  ENSG00000237687_0 (sequence is synthesized)
gaggcagggttggagttggagcaggaagctgagggtcttgtcatgcccgcccttccttccacgtggctccaccaggctgccctctgggaaaggaggccctggaatgcccgcagcttcaca

SEQ ID NO: 837984 - DNA, 120 bp, Artificial Sequence
  ENSG00000237687_1 (sequence is synthesized)
tcagcctggagctcacccaggacgcagagcaggtgcaggtgcaggtgcaggtgcagacggcagacggacgcatcaggggcgtggtgtgaataacgccccgcttgagaagctcagggctgg

SEQ ID NO: 837985 - DNA, 120 bp, Artificial Sequence
  ENSG00000249483_0 (sequence is synthesized)
cagggcacaaccatcagacgaagtgggaggaagaaacattaacttcaacagctgtttcttgaccccggctgtcagtcttcccaagaataaattttggagagtcctatttgaaacaaagag

SEQ ID NO: 837986 - DNA, 120 bp, Artificial Sequence
  ENSG00000249483_1 (sequence is synthesized)
ggagttttgggggagagaaaagttggttggttccagggcgaccgcccaaagaagcagggaacaagatgtttgcagttaccacgcagcctgcaagcctctgccgggtgcagggatggagca

SEQ ID NO: 837987 - DNA, 120 bp, Artificial Sequence
  ENSG00000249483_2 (sequence is synthesized)
agtaacttgaaagctcccctctcggcgccctgtgcctgcagcttccccccctaacgcgcgcccagatccagcgccggtggtaggagccgtagctcgactacagtaattccccagctcggg

SEQ ID NO: 837988 - DNA, 120 bp, Artificial Sequence
  ENSG00000249483_3 (sequence is synthesized)
cggcttgaaactgctcgggctgaatagcatttgctgttccgtcctgcggccgcctcccgccgcggctgccgcgctccctgcaaagcagctctcattatcccggaagttgtgctgacacag

SEQ ID NO: 837989 - DNA, 120 bp, Artificial Sequence
  ENSG00000249483_4 (sequence is synthesized)
tctcgctgccaccagaagtttgtcaacatcaaacttctcctgtgtggggtacgttcaccttccacgagtatttaatcgagccaacaagcaaacaaacaaacccaaataaacctgcccgtg

SEQ ID NO: 837990 - DNA, 120 bp, Artificial Sequence
  ENSG00000261218_0 (sequence is synthesized)
gggtctgcagtcacacagccaacttgcgcttgtggcagtggcaaggttggtgagtatctgagtcttcaggccacggcattttccgctcgagtggagcctgcctcagcctgttcctttaac

SEQ ID NO: 837991 - DNA, 120 bp, Artificial Sequence
  ENSG00000261218_1 (sequence is synthesized)
ctcaagctccaggcgtcaggaaaagaacattccacgaagtccatctggaagacggtcctttccctgctgcccccagcttctagaacattccctggaacacagcaagtgttcagtattgtt

SEQ ID NO: 837992 - DNA, 120 bp, Artificial Sequence
  ENSG00000261218_2 (sequence is synthesized)
catggagtgacagatgtctcagccaagaaggtacaatcacagggaagaatgacttcaactggtcttgacttcaacctgcttccagcctggttcccttctcccacctccctacagcccaca

SEQ ID NO: 837993 - DNA, 120 bp, Artificial Sequence
  ENSG00000261218_3 (sequence is synthesized)
cgccgtcgggccttctccctccaggggcccaagagccactggtactcagtgtctgggtgggggcaggggggatttttgttctcccagcacctgcggctgttgagaccagagaagctggtg

SEQ ID NO: 837994 - DNA, 120 bp, Artificial Sequence
  ENSG00000261218_4 (sequence is synthesized)
gtcgaccacagcctggggtattagttcacccctagcttctccccagcgagaccccagggcccttgggcacaggggattaagcctctatctgcttacgtgcaagcggaagaaataggccca

SEQ ID NO: 837995 - DNA, 120 bp, Artificial Sequence
  ENSG00000261218_5 (sequence is synthesized)
gagagcaacagtggcgggtctgcagtcacacagccaacttgcgcttgtggcagtggcaaggttgctggttcagtggggctgtcgaccacaggtaccaaccctgccctcccctacagagta

SEQ ID NO: 837996 - DNA, 120 bp, Artificial Sequence
  ENSG00000261218_6 (sequence is synthesized)
gggatgaggagagacaatgtggcatggtggttaagcacgtggacttggagccagacggcctggggctgaatcctggctccgcctctcaccaactgtgaccttgggcaaggaagctggttc

SEQ ID NO: 837997 - DNA, 120 bp, Artificial Sequence
  ENSG00000261218_7 (sequence is synthesized)
tcccaacctgcactgatcacttcttcttcttctctttgggattatcacttgtattgtaataaaatcttgttttttttctttaaaaaatattatttgcattcagcaaaattcacccttttt

SEQ ID NO: 837998 - DNA, 120 bp, Artificial Sequence
  ENSG00000261218_8 (sequence is synthesized)
gatatacagttctgaggttttttttagttctataagttttgtcaaatatgtaaagttgtaatctccaacacaatcaaaatataaaacaatttcctcacccctccccaattcccttatgct

SEQ ID NO: 837999 - DNA, 120 bp, Artificial Sequence
  ENSG00000261218_9 (sequence is synthesized)
cttttgtatccaacacttcttcccactccagcccctggcaaccacggatttgctttctgtctgtacaacactgcctcttccagaatgtcatatataaaatcacgctgtttataaccttta

SEQ ID NO: 838000 - DNA, 84 bp, Artificial Sequence
  ENSG00000261218_10 (sequence is synthesized)
tcccaagcaggcagatcgcctgaagtcgggagtttgagaccagcctgggtgaaaccccatctctaataaaagtacaaaaaatta

SEQ ID NO: 838001 - DNA, 120 bp, Artificial Sequence
  ENSG00000261218_11 (sequence is synthesized)
tcgagtggagcctggtaagtggcctctatttctggtacattctctgggagcccccagtattttccagacagagggcactgaagacaggctttgtgctgaggatgggtcacctgaggtcca

SEQ ID NO: 838002 - DNA, 120 bp, Artificial Sequence
  ENSG00000261218_12 (sequence is synthesized)
ctggcttacccagccccaaaggaccccactcccgggggtctggggaccctgaaggctcttgtctgacccctctccccacctgtatttcctggctggccttgcgtgcctctgtgtttagaa

SEQ ID NO: 838003 - DNA, 120 bp, Artificial Sequence
  ENSG00000261218_13 (sequence is synthesized)
actgcactgtgtgaccttgaataagacagttcgcccgtgcctcagtttccctgactttcacgcaaggatcaccacggtttcctctgtcaagttcctgagatggcaggggggatttttgtt

SEQ ID NO: 838004 - DNA, 120 bp, Artificial Sequence
  ENSG00000249487_0 (sequence is synthesized)
aattgttttttgtctccggttggttccctgcaggcccaaccctggacggacacacaaatatctgtgctgcccacatccagccaacacaggcagcaggatatttcctcctagtcagactgg

SEQ ID NO: 838005 - DNA, 120 bp, Artificial Sequence
  ENSG00000249487_1 (sequence is synthesized)
gtgttctaaaccatgtagataaaggccacttgcccaggaagggggagcaagaaggtcctggtttcaccgtgaacataaatcactgttttggcagtctaccatactatccatcagactagc

SEQ ID NO: 838006 - DNA, 120 bp, Artificial Sequence
  ENSG00000249487_2 (sequence is synthesized)
ctttcagaggaaaatgccagaggcagcaactgaaaacagcttgtaggagtcatcagttagtcactgaagcaaatcatttgagagaagataaagacgagctcttgacattcctgggacaag

SEQ ID NO: 838007 - DNA, 120 bp, Artificial Sequence
  ENSG00000249487_3 (sequence is synthesized)
aagacctgccctgtgaggctcgcctgtgagcggctcagcttctcctaccctgggtaaggtaattgatgagttagttaatatgcacaggagatgcagcactgtcaaaagaagatggactgc

SEQ ID NO: 838008 - DNA, 120 bp, Artificial Sequence
  ENSG00000249487_4 (sequence is synthesized)
ttctagtcctcactgtcattactaagatgatctcagcctttcaacttgactgggagaaaccaatttcctgggggaagtctcaataaaattgttttcctatcatcaggtggaaatcttgtt

SEQ ID NO: 838009 - DNA, 120 bp, Artificial Sequence
  ENSG00000249487_5 (sequence is synthesized)
aagtgctccaaggacccttggttttatgggtttgtttttacagcccccagcagccttggctaggatttcattctaaaataacatttcctctctgtaaaaaatgtcttgttgctccaggct

SEQ ID NO: 838010 - DNA, 120 bp, Artificial Sequence
  ENSG00000249487_6 (sequence is synthesized)
ggaggccaaggggtgaaatggaggtttgcaatttatgtcaaatatgcacacagggacacacagttggatctgtcccttctgcttcctcttttttagaagatgagatgatgactcctgctg

SEQ ID NO: 838011 - DNA, 120 bp, Artificial Sequence
  ENSG00000249487_7 (sequence is synthesized)
tgactatcctgacagtacccccattcaacaattcagaattagcagtagatgtacagtaaatttgtttttttccttttaaatagactttatttttttcttagaacagttttaggttcacag

SEQ ID NO: 838012 - DNA, 120 bp, Artificial Sequence
  ENSG00000249487_8 (sequence is synthesized)
caaacttgagcagaaagtagagtttccattacactccctactccaacacatgcacagccttcccccattgtcaacatcgtacaccagagtgatacatttgttacattgatgaacctacat

SEQ ID NO: 838013 - DNA, 120 bp, Artificial Sequence
  ENSG00000249487_9 (sequence is synthesized)
ggacacatcattatcacccaaagtccacagtttgcattagggttcactctcgatgttatacattttatggatttggacaaatgtatagtggcatatatccaccatcatagtaccctacag

SEQ ID NO: 838014 - DNA, 120 bp, Artificial Sequence
  ENSG00000249487_10 (sequence is synthesized)
agtagtttcttggccttaaaaatctgtactccacctattcatcccccctcccttcctaactcctggcaaccactgatctttttgctgtcttcctatttttgctttttctagaatgtcata

SEQ ID NO: 838015 - DNA, 120 bp, Artificial Sequence
  ENSG00000249487_11 (sequence is synthesized)
cagttggaatcttacaataggctacatacaaaggctacagcctttccagattggcttctttcacttagtaaaacacatttaaagtttctctgtgtcttttcatagcttgatatctcacct

SEQ ID NO: 838016 - DNA, 120 bp, Artificial Sequence
  ENSG00000249487_12 (sequence is synthesized)
ttttcatagcttgatatctcacctcttagcacctgattatttggtacaaaataatattcccttgtctggatctaccacagtttatttatcctttcacctactgaaggacatcttggttgc

SEQ ID NO: 838017 - DNA, 120 bp, Artificial Sequence
  ENSG00000249487_13 (sequence is synthesized)
accagacaggacacaaaaatgcccaaccctggacggacacacaaatatctgtgctgcccacatccagccaacacaggcagcaggatatttcctcctagtcagactggtgagtttttattt

SEQ ID NO: 838018 - DNA, 120 bp, Artificial Sequence
  ENSG00000249487_14 (sequence is synthesized)
cacatttggcgggtgccaagcctggccgctcgcttctccggccctccagagcagcctcaggcttagcttcccgaatatcagctccagttggctgcttctccagtcccgagcccttgacct

SEQ ID NO: 838019 - DNA, 120 bp, Artificial Sequence
  ENSG00000249487_15 (sequence is synthesized)
ggaggaggggacgggaccggggacctcggctgggatttttacctggcatgggtcgccgcggctagggaggaagaccacttgctctccgtttctttctggaagaaagcccctcaccaccca

SEQ ID NO: 838020 - DNA, 120 bp, Artificial Sequence
  ENSG00000249487_16 (sequence is synthesized)
gccagcagcgggcagcctgcgactcctgccagggtccagcgctccgctggggtagagtccgtcattagtgctgaatccagttgtgcccggaccagaagagacaccagagccagtcccgtc

SEQ ID NO: 838021 - DNA, 120 bp, Artificial Sequence
  ENSG00000249487_17 (sequence is synthesized)
ccctccccgggctggtcatagcagggccatttcctattcttccaccaccttacctgggcaggtcagacccggttcacctgaccgctcacagacgtattctcactcactctcgaccgacgc

SEQ ID NO: 838022 - DNA, 120 bp, Artificial Sequence
  ENSG00000249487_18 (sequence is synthesized)
atgctggagcagagcacacccaggcagcgcccaagcgggactcacccacctgcccgggtcctcgcctgcacacacgacaaactgaggcttcaaagcagccttgagagcttcagaacatga

SEQ ID NO: 838023 - DNA, 120 bp, Artificial Sequence
  ENSG00000249487_19 (sequence is synthesized)
catctagggggcgcaaactggtgaccaacgaaccagacaggacacaaaaatgtttgtgaggctcccacagtattttaaaaatttgaagtacttgtcaaaaagattggaagagttcacaga

SEQ ID NO: 838024 - DNA, 120 bp, Artificial Sequence
  ENSG00000249487_20 (sequence is synthesized)
gaaatctgggttttccatctctctctccctctctctaaaacaatatccatgtcatggcctttccatgtctcttgaataggggctggcattctgcatgcagggagaagccctgaccagtgt

SEQ ID NO: 838025 - DNA, 120 bp, Artificial Sequence
  ENSG00000249487_21 (sequence is synthesized)
acacagggctggggtccaggcaaaagtagcccctcttcccctttttgtcaatatcaccaagcccatttatcatcaatcttatccttttacgttgttttcctatagtaaagaggaaagtgt

SEQ ID NO: 838026 - DNA, 120 bp, Artificial Sequence
  ENSG00000249484_0 (sequence is synthesized)
tttccaaagtgtggtgtgaagagtactgctcctgtaaatttaacgaaattttccatgggcaagaaaaaaggaactcctgagaactgagaaatgactgtttaatgaacaaagagagaagtg

SEQ ID NO: 838027 - DNA, 120 bp, Artificial Sequence
  ENSG00000249484_1 (sequence is synthesized)
agactgccctgtccagagactcccaaataaagaaggagaatatccatcaatagctgttcccctcatcaatggagtctgaataagtgcatttttgtggatcaaacaaaagctctcagaagg

SEQ ID NO: 838028 - DNA, 120 bp, Artificial Sequence
  ENSG00000249484_2 (sequence is synthesized)
agaaactctggtagaaggaggtagtcatacctttatatttaccttgtaagcttttgcaactccgtggtgctacttcgacagcctcatcttctgttttccaacatgaaattattcctgtga

SEQ ID NO: 838029 - DNA, 120 bp, Artificial Sequence
  ENSG00000249484_3 (sequence is synthesized)
aatctaatcacattttctgcctcaagggactgagcagctcccaataagattttcctgagtgtgtctctgcagcagttggtgggagtgacacgactggtgagactgagacagcctggggct

SEQ ID NO: 838030 - DNA, 120 bp, Artificial Sequence
  ENSG00000249484_4 (sequence is synthesized)
cagagcagatggtagtctgaaagggacagaatgagagagggagctggagaaagaaatgaataaacacgaatgcatctggagaatgaggcatcttggaatctggaaagtgaggcatcctgg

SEQ ID NO: 838031 - DNA, 120 bp, Artificial Sequence
  ENSG00000249484_5 (sequence is synthesized)
tggctgggattacaggttcaagctccaagatgtccagaaccaaacgcgaagaagaattaatgaaatggatatatgcaaaactcgtcaagattctcatttggctacagcaaattatttggc

SEQ ID NO: 838032 - DNA, 120 bp, Artificial Sequence
  ENSG00000249484_6 (sequence is synthesized)
gagttgaaagtttagttgtgttaatgatatgctacaccttctatacctgtaatgtgccaaaaataactgaacactttagatttctctttaaatccagtaataatccattaaagagataaa

SEQ ID NO: 838033 - DNA, 120 bp, Artificial Sequence
  ENSG00000249484_7 (sequence is synthesized)
ggtgccaatgtgcaggcaagtaaaccacattgccaagtatacaagctaatacatttcccaggatggatttagagtttcctatttcaagcaaaatttacagaaagttaaatgcacaaatct

SEQ ID NO: 838034 - DNA, 120 bp, Artificial Sequence
  ENSG00000249484_8 (sequence is synthesized)
tcagtgcacaattacacgagtttagcaactatatacatccatgtaaacaacactatcatgatgcagaacatttttatcacccaggaaattacttcatgtccccttccagtcaatccactc

SEQ ID NO: 838035 - DNA, 120 bp, Artificial Sequence
  ENSG00000249484_9 (sequence is synthesized)
tccacaggaaacaactagagttctgatttttatcattatgtactagaacttcacatcttaggaaatcatatagtgctgtctcatttgtttcttgctagtttaggcagtatcatttttttg

SEQ ID NO: 838036 - DNA, 120 bp, Artificial Sequence
  ENSG00000249484_10 (sequence is synthesized)
aaatccattcatattgttccatgttatcagtaatttgttaccttgatgtagctgaggagtattccattatatgaatataccacaacttatgtacccattgtactcttgacattggctatt

SEQ ID NO: 838037 - DNA, 120 bp, Artificial Sequence
  ENSG00000249484_11 (sequence is synthesized)
ctgctataaacatgctcaagtcttgttgtagaaacattttcatttctcataggtaaatagtcagggatggaatttctgagtcacaacagaggtatatgcttaactttatgaaaatcatca

SEQ ID NO: 838038 - DNA, 120 bp, Artificial Sequence
  ENSG00000249484_12 (sequence is synthesized)
agctgttttccaaactggatgctccattacctacttctctgagtaagatctgggagttccacttactccacatcctcaccaacatttgttgttgccacaacgaagtggtgcaatagttta

SEQ ID NO: 838039 - DNA, 120 bp, Artificial Sequence
  ENSG00000249484_13 (sequence is synthesized)
tttttattttcgtttacatttctctgatgattaatgatatcaagcacattttcatgtgcaattcaccattttttttaaatgtccaaaactttcattcagttgtaaaaaaaaacaacagta

SEQ ID NO: 838040 - DNA, 120 bp, Artificial Sequence
  ENSG00000249484_14 (sequence is synthesized)
tctttttattaatggtttgctcttgttctgggtgaagttcatcatcgaatatatattgctaatattttttcccacattacagctaaacttttaattttcttttgatgggcagagaatttt

SEQ ID NO: 838041 - DNA, 120 bp, Artificial Sequence
  ENSG00000249484_15 (sequence is synthesized)
tgttgttttatttttgtgaaatccgatttattgcttttttgcagctagtgttttttctttcatctctataaaatcttgcctagcctaagattgtaatatagtcttctgtgttttttttct

SEQ ID NO: 838042 - DNA, 120 bp, Artificial Sequence
  ENSG00000249484_16 (sequence is synthesized)
tcataaaacctttacagctttagcttttataattgaatctataatttatctacattaattttgtgaatattgtgaattgtggctaagaagattcattatttccatggttatctagttatt

SEQ ID NO: 838043 - DNA, 120 bp, Artificial Sequence
  ENSG00000249484_17 (sequence is synthesized)
ccagcactgtttgttcaaaaagactttccattgaagtgtctttgagcttttattgaaattaactgactatgtgtgtattgatttctttctgagctttactttgtcccagggatcagcttg

SEQ ID NO: 838044 - DNA, 120 bp, Artificial Sequence
  ENSG00000249484_18 (sequence is synthesized)
tataaccttatgctaatgcaatactatcttgattattgtggcttgctgcaggtcttgatataaagtaataatataatttatctgaatttgttctttttcaagatagctttggaagttctt

SEQ ID NO: 838045 - DNA, 120 bp, Artificial Sequence
  ENSG00000249484_19 (sequence is synthesized)
tatttcttgtattttcatataaattttagaataaacttgtgtatttccaccaaaaaaatgcaaatttcatttagtttgtaattaggtctaatcaaaccatattaaatcttccagttcatt

SEQ ID NO: 838046 - DNA, 120 bp, Artificial Sequence
  ENSG00000249484_20 (sequence is synthesized)
cactttggtggatctggagccttacttaccacagggctgaggggctccttggccctataaagctgtttttcagatgggctgtgggagggagctgctttctaattcatcaggtcctaaagg

SEQ ID NO: 838047 - DNA, 120 bp, Artificial Sequence
  ENSG00000249484_21 (sequence is synthesized)
gactttcacgtgagagaactaatccaaactcagtgatggtgcaagggtacttcttacctctagggacagtctcgggtatgtcttcatcagcagcatgaaaaaggactaatacacccagct

SEQ ID NO: 838048 - DNA, 120 bp, Artificial Sequence
  ENSG00000249484_22 (sequence is synthesized)
acaaactatcccttaagctaaatatgactggcttgaatggagcaactgtagaagtaatcagaatccccaagtgagtggaacaagtcagttctaaaagggagaaaaaccttgggaatgctg

SEQ ID NO: 838049 - DNA, 120 bp, Artificial Sequence
  ENSG00000249484_23 (sequence is synthesized)
agaagagctttggcaattatcaaagcaatccttcctgcattaagaagaaactgtttcctggatgtcactcgagtgactttctggcaagccccaagtcaacctattgatcaccaagatctt

SEQ ID NO: 838050 - DNA, 120 bp, Artificial Sequence
  ENSG00000249484_24 (sequence is synthesized)
gctttctcaatttgctctctgtactatggatgatatgttgctgaaactagccaagatgagaaaagcagactcatattgcctgatttgtatatggatcaattaataaaactttgttaagca

SEQ ID NO: 838051 - DNA, 120 bp, Artificial Sequence
  ENSG00000249484_25 (sequence is synthesized)
aaatgaacatagaggagaggagatccacgggtggcagaaagcttatcagaattggatgaaaagcccagacccacaggaatcagctaagcaggtgtgtcagtcctggttactggaatattg

SEQ ID NO: 838052 - DNA, 120 bp, Artificial Sequence
  ENSG00000249484_26 (sequence is synthesized)
tgaggcatcttggaatctggaaagtgaggcatcctggaagagagatgaagcagatgctacctgatttgtgctccagctaatgtcactcacgtcaggagtgttgccaaatgcaatgaggtt

SEQ ID NO: 838053 - DNA, 120 bp, Artificial Sequence
  ENSG00000249484_27 (sequence is synthesized)
atttgtgctccagctaatgtcactcacgtcaggagtgttgccaaatgcaatgaggtgcgactgacaccagggaagatgatgagcaaagagaatggcagctggctgtgtttccttcttata

SEQ ID NO: 838054 - DNA, 120 bp, Artificial Sequence
  ENSG00000249484_28 (sequence is synthesized)
catcctgatagagtacatctggacatgctagaagccagactctaagatccgagaaccctaaggcggctccatcttcatgacagggaggatgggtcctgaatagagggatgaggcctgaga

SEQ ID NO: 838055 - DNA, 120 bp, Artificial Sequence
  ENSG00000249484_29 (sequence is synthesized)
aatataaaaggcagttgcagtgctatagaaagaactatacattagtggttagaaaacctgagttctctctcactctgtgttactcattagttttttgacttaggcaaaatgtttgtctta

SEQ ID NO: 838056 - DNA, 120 bp, Artificial Sequence
  ENSG00000249484_30 (sequence is synthesized)
ctcgagactcttttaacaataaaaacacactagagttaccaacagggtcccaaaggcagtggataggggatctagaaagctactacaaggggcccattcctctttcattattgcttccct

SEQ ID NO: 838057 - DNA, 120 bp, Artificial Sequence
  ENSG00000249484_31 (sequence is synthesized)
ttcttctctctctctgacaatcagctttttttcctttacctcccagtctgcctggtggaagacaagataatccaagttttcatggtataggtccagccacaaggaaagactgattcctga

SEQ ID NO: 838058 - DNA, 120 bp, Artificial Sequence
  ENSG00000249484_32 (sequence is synthesized)
ttctcatttccatgtttaattcctagctgaaggtatgataggcctagctaattccccctcaccaaaaagtatgaacagagtgtgtatgaattttagacatcatgcctgaggcccactcct

SEQ ID NO: 838059 - DNA, 120 bp, Artificial Sequence
  ENSG00000249484_33 (sequence is synthesized)
ttggcccaatagatggtggatcagttctcatttcaaggggactgtttgtcagctgagatgtttccaaaggtattcatttgcttgtgtaactttatttcctcaaaagtaaaatctgacctc

SEQ ID NO: 838060 - DNA, 73 bp, Artificial Sequence
  ENSG00000249484_34 (sequence is synthesized)
ctcctgagaactgagaaatgactgtttaatgaacaaagagagaagtgacaatgagactgccctgtccagagac

SEQ ID NO: 838061 - DNA, 120 bp, Artificial Sequence
  ENSG00000248285_0 (sequence is synthesized)
tgtgtgacaatgacttttggacatttgttctttcggctttggaatatttacacaagaatggagaaggaacatccaactggagcataattgtcaaggcaatagagaatttagagaaataaa

SEQ ID NO: 838062 - DNA, 120 bp, Artificial Sequence
  ENSG00000272382_0 (sequence is synthesized)
tttatgtaaatctcattaattccatctcttgatgtaatttgctcctaagattaaggtttccacccacctccctgaaatctgatttggacccccaggaggccagaagagtataaaaacgca

SEQ ID NO: 838063 - DNA, 120 bp, Artificial Sequence
  ENSG00000272382_1 (sequence is synthesized)
aaagatgttgacttctgagtcccacatacccggcgtcagctggtgaatgaaagacacgaaggagctgctgtggagctgctgtctcccctcggagtttggcaggcccgggattccgcaaag

SEQ ID NO: 838064 - DNA, 120 bp, Artificial Sequence
  ENSG00000272382_2 (sequence is synthesized)
gagttggcggggccagatgcctccagccctgagctcagtacattcggtgtcctggatgctcccttcctttccttatcactgcgagctctcctgggacggcctagatttccactgggacct

SEQ ID NO: 838065 - DNA, 120 bp, Artificial Sequence
  ENSG00000272382_3 (sequence is synthesized)
ggggcgcagagtcgcccgctctggatcccgcgccagagacccaggaggatccgcaggagccctcgggagagcaggaggctgcatagggtctcaacgtactcccgtccccgcagcctccct

SEQ ID NO: 838066 - DNA, 120 bp, Artificial Sequence
  ENSG00000272382_4 (sequence is synthesized)
cgcaactcgcccctcgctcggtaggcagacaactccagccggacaggtccgtccgaggagacctttcagagtgtcagcctactgctgacctcggagccaccaaccaaagttccaagactg

SEQ ID NO: 838067 - DNA, 120 bp, Artificial Sequence
  ENSG00000272382_5 (sequence is synthesized)
ctggctgcagattgcatgctcttggggcagacgccctaagaatgtgtccaccgagtccaatgtgtctttggagtcctgagccctgagatttccgctaagaccttccattggacgatctct

SEQ ID NO: 838068 - DNA, 120 bp, Artificial Sequence
  ENSG00000272382_6 (sequence is synthesized)
tgtaacagatgttgttacagtaacacgtgagttcgctcaaatgcgatggaagttttgcctttcgatcattttgtgcctttgtctttccccttctcaataaaatcgtacacaaatgtgaaa

SEQ ID NO: 838069 - DNA, 120 bp, Artificial Sequence
  ENSG00000272381_0 (sequence is synthesized)
aaaaatgggaaaacaaaaagtggtcaggatggattccagagtagttggagttatagggaaatcttcactgccaatgttctctagatcctcagcactacgccctggccagccccgaagtcg

SEQ ID NO: 838070 - DNA, 120 bp, Artificial Sequence
  ENSG00000272381_1 (sequence is synthesized)
tggagcccccctcctgccctgggctggccacctctctcactggatgagtgatgtgctctggctcaaaggctgagggggcaggtggaggatgcctgccgcggaacgtgggtgctccctcca

SEQ ID NO: 838071 - DNA, 120 bp, Artificial Sequence
  ENSG00000272381_2 (sequence is synthesized)
tcagaatcttctcactgggagaggatctgcggccgtcacctgcagccccggtcctggcagagcttttggagaaaatggtcttcgctgaaacatgggcactcgtgggaagtgctttctgtt

SEQ ID NO: 838072 - DNA, 120 bp, Artificial Sequence
  ENSG00000272381_3 (sequence is synthesized)
ccccaggctcaggtatggtgcctttctgatgtgtctccctaaaaccactcactcctacgtaacatttgtcatgcagttcggaaatgccactcttgaggtctgtctttccagccagtcaat

SEQ ID NO: 838073 - DNA, 88 bp, Artificial Sequence
  ENSG00000272381_4 (sequence is synthesized)
gaaatgccactcttgaggtctgtctttccagccagtcaatatgctcctcaaagacagggattgggttatgttccggcacctgacacaa

SEQ ID NO: 838074 - DNA, 68 bp, Artificial Sequence
  ENSG00000272381_5 (sequence is synthesized)
ttggccaggctagtcttgaactcttggactcaggtgatgcctggcacaacaactgacacatagagggc

SEQ ID NO: 838075 - DNA, 120 bp, Artificial Sequence
  ENSG00000272381_6 (sequence is synthesized)
tgcctggcctggcacaacaactgacacatagagggcactcgatcaatagtattgaataaattatgagtgaaacagtacaaatgaatgaacgtggacaggtccaataaggctgttggatca

SEQ ID NO: 838076 - DNA, 120 bp, Artificial Sequence
  ENSG00000272381_7 (sequence is synthesized)
taggcagtgtaaagaggcatggttatttagttggttaagtctcaagcccaccgaagaagagtatgtgtttgttgcaggagtcaagggagctttagggaagactgggtggccttggtatcc

SEQ ID NO: 838077 - DNA, 120 bp, Artificial Sequence
  ENSG00000272381_8 (sequence is synthesized)
tggaaattccagcctttcttttcgggtgatttccccaacccctgctgcagcagtctcttatttactttgactcaaacaccgaattccctcctactactccttctcctttctacaacacca

SEQ ID NO: 838078 - DNA, 120 bp, Artificial Sequence
  ENSG00000272381_9 (sequence is synthesized)
tcctactactccttctcctttctacaacaccagctctctagatatttctgttcctaatttttttttttttttgtagagacaggtctccctatggtgttgcccaggctggtcttgaactcc

SEQ ID NO: 838079 - DNA, 120 bp, Artificial Sequence
  ENSG00000272381_10 (sequence is synthesized)
caaagtgctggattacaggtgtaagccacctctggacatcttatctgtgaaattttaggcattgatcagtgcagaaagaaccatgaactgcaggatgttctcagagactctgacattatg

SEQ ID NO: 838080 - DNA, 120 bp, Artificial Sequence
  ENSG00000272381_11 (sequence is synthesized)
gcccacaagaagctgcccactcagcttctagtcagttaggtgtggacttcatcaatcacagaatgaagactcagacagcctcccaggaggacacaaagtcagcctcagagaggcatggag

SEQ ID NO: 838081 - DNA, 120 bp, Artificial Sequence
  ENSG00000272381_12 (sequence is synthesized)
gtgttaaagagggaagtgcctgctagaatttcagtgggttggatatgctctttaacgatgcacaaatcataggtatacattttctgacaattggaatctattattactcttgaaccagct

SEQ ID NO: 838082 - DNA, 120 bp, Artificial Sequence
  ENSG00000272381_13 (sequence is synthesized)
gttccccaggctgtttcctgtaatggaagggatactttgagtttatatcttttcaatcctacatcctcagaaatctacactgatactaataaagggactcatttctcctataagaacccc

SEQ ID NO: 838083 - DNA, 120 bp, Artificial Sequence
  ENSG00000272381_14 (sequence is synthesized)
tatgcgagaaaagtatgtttgggtattgcctaatgcactcataataaatatacacagccataaaacagagtaaaagtcctggtaagcctgttatttgcagtaattgtagattgtgagtgg

SEQ ID NO: 838084 - DNA, 120 bp, Artificial Sequence
  ENSG00000272381_15 (sequence is synthesized)
acattttaaagagaagcttacaagttagttgtactttctggtagtaattacctcccacaacatgactcacttcggcagtttaaatgcaagagttgggtgtcccaaaatcaacagttttat

SEQ ID NO: 838085 - DNA, 120 bp, Artificial Sequence
  ENSG00000272381_16 (sequence is synthesized)
aaataaatctctgaatcatgaactgaatgcataaatgtttaaatatttctccttcttaatctgaaagatagctttagatttaagatattgcacatattttaaataccttaggggaaaaat

SEQ ID NO: 838086 - DNA, 120 bp, Artificial Sequence
  ENSG00000272381_17 (sequence is synthesized)
ctgcagccccggtcctggcagagcttttggagaaaatgatgcagagtcttgctatgttgcccagactgatcttggacccctgatctcaagcgatcctcccaccttggccttccaaagtgc

SEQ ID NO: 838087 - DNA, 120 bp, Artificial Sequence
  ENSG00000272381_18 (sequence is synthesized)
catgagccactacacttggacccaaacaggtctttgaggaatcaccacactgttttcaacaatggctgaactaattcgcactcccaccaacagtgtgtcttcgctgaaacatgggcactc

SEQ ID NO: 838088 - DNA, 120 bp, Artificial Sequence
  ENSG00000272381_19 (sequence is synthesized)
ggctgagcatggctgtcatttctggagtctttctgctgaggccatttctcctgtgaccatgggctaaagggcacagccgcgtgcccccacagctgcttctgaattctgagcacaggccag

SEQ ID NO: 838089 - DNA, 120 bp, Artificial Sequence
  ENSG00000272386_0 (sequence is synthesized)
tttatttttaaaaaatcaatttttgagtaatactctagaggcagtggctctgccaagcagggaagtcaaatgcatcgctttttttcctgtacactgttggcaagcacagataatccacaa

SEQ ID NO: 838090 - DNA, 120 bp, Artificial Sequence
  ENSG00000272386_1 (sequence is synthesized)
atatttctcctcttccagaaagttaaagctcggtgaaacttaaagcagtgatcccaggtttttaaatttttatatttttacttttcttccatctgcctggtcatctgcatgatcccagct

SEQ ID NO: 838091 - DNA, 120 bp, Artificial Sequence
  ENSG00000272386_2 (sequence is synthesized)
ttctgaacaggatttgtgacactgtttcacggtcctaagaactctcaggaaaaaatcctctatattttcatgacaggttttctaggtgggtgaattaaagtctctggagttaagcaaaaa

SEQ ID NO: 838092 - DNA, 120 bp, Artificial Sequence
  ENSG00000272384_0 (sequence is synthesized)
tcgctggaattctcagattcgaagaaatgcacacgcctgcggtgctcgcagagaagtccctcggaagctaggcgggtcgctttcgcaactgggactccaatgttcccagtgggagcggag

SEQ ID NO: 838093 - DNA, 120 bp, Artificial Sequence
  ENSG00000272384_1 (sequence is synthesized)
ctctcaccgcggcagcccccaggttcccctaggcgccttagagcaaaggtggcgggggatcgcgctgcccttcgcccgccggctcggaaccatgaacttgtattccgggcgccgcgctcc

SEQ ID NO: 838094 - DNA, 120 bp, Artificial Sequence
  ENSG00000272384_2 (sequence is synthesized)
tgccacagtgctcggctaaagagctctaaggaattcgggatctgggtacacttcgggatctcaggcggcaacctgtctgcgccgcgcattcctgcccagatgtaccttgtttccccctgg

SEQ ID NO: 838095 - DNA, 120 bp, Artificial Sequence
  ENSG00000272384_3 (sequence is synthesized)
gcagctcccgggcggggacgaggggatgcggtctgggggctagtttagaagcttcgagcgcagcgagaaaacaaagggagcctggggctgggaggctctgcggagtccccgcccgccctg

SEQ ID NO: 838096 - DNA, 120 bp, Artificial Sequence
  ENSG00000272384_4 (sequence is synthesized)
cagattagcaggcgcgtcgcgtcggggcttcccgggcagctctgctctggggaattagaacgaactctagcggccgtttgcaactcggctgtgggcgcgagggcatcaacaggtggccgt

SEQ ID NO: 838097 - DNA, 120 bp, Artificial Sequence
  ENSG00000272384_5 (sequence is synthesized)
gtgcagcggagaggccaatggcgaggacccggactggggtgaggacggctggccttggggctgactgggtggcggatgcgctgggtgaccttttggctttttcatttccgaggccgggga

SEQ ID NO: 838098 - DNA, 120 bp, Artificial Sequence
  ENSG00000272384_6 (sequence is synthesized)
gaaggaagtagctaaaaggtttttgtaagttctgccctagggctctaatttctgacataccccttgactccccagaaatcctttgcaacaaaaattaaaacagctcatatgcaaaacttt

SEQ ID NO: 838099 - DNA, 120 bp, Artificial Sequence
  ENSG00000241369_0 (sequence is synthesized)
aaggcctgctgtaaccactccctggtactgcctgtgttcactcaaggtcccggggctctacaatcagcaaaaggagttttgccccataaccaccacagctggtaacctgaagtcagaaag

SEQ ID NO: 838100 - DNA, 120 bp, Artificial Sequence
  ENSG00000241369_1 (sequence is synthesized)
tctcagaggctcaccaaggcccttgatgtagtacctgggaatacctgggtctcctcacatagcaggacagcattgaattcagagcctcacaattgctgtgttctacttcgcctagcaacc

SEQ ID NO: 838101 - DNA, 120 bp, Artificial Sequence
  ENSG00000241369_2 (sequence is synthesized)
agagatgatccctgcaacatgctgctgttgctgggagtgggaaagaggtggcatcggcggttcaagactgagttttctatctcttcagtgcctctttcaacaatgaagatcaaaccaggt

SEQ ID NO: 838102 - DNA, 120 bp, Artificial Sequence
  ENSG00000241369_3 (sequence is synthesized)
tttgtgcaaatatctgctgagtgaactacttatttgaaaatacatcattggttaatattcccttttgctcattgaaatctcaaagactacagaccccgcacaagacattctgacattccc

SEQ ID NO: 838103 - DNA, 120 bp, Artificial Sequence
  ENSG00000241369_4 (sequence is synthesized)
gtctttgaaatgaatgacagcaatgataaatatggctcacctccagagatacagatctcacaacttcatatttttaatataaattattaatctgagaagcagagagagataagacccatg

SEQ ID NO: 838104 - DNA, 120 bp, Artificial Sequence
  ENSG00000241369_5 (sequence is synthesized)
aagccataaacagatgcatttactagctgaatggccaacaatggaattcaacaaatccatcttgagcacggcagccaggagtgtggtgcaattccattagatgaaagagatctacacatt

SEQ ID NO: 838105 - DNA, 120 bp, Artificial Sequence
  ENSG00000241369_6 (sequence is synthesized)
cagaagcacatgattcttcccccttccatgattccagtggccaatagaatggagtgtagtggcgtgatcttggctcacaacaacttctgcttcccacattcaagcgatcctcccacctta

SEQ ID NO: 838106 - DNA, 120 bp, Artificial Sequence
  ENSG00000241369_7 (sequence is synthesized)
tactcctgagtagctggaaccacagacaaactacaataaagccatgccctgactggatgtgcctaacatttgtctggtgcttaaaggagttggctgcatgcgtgggatggagaaggattc

SEQ ID NO: 838107 - DNA, 120 bp, Artificial Sequence
  ENSG00000241369_8 (sequence is synthesized)
aacatttaatggcagttagaatcaaatttttaactcaagaaggcagaaggaatccacctaaataaatgttggaaagtcaccaaaaatagttctccaagtcagaagcggtgcaaaagctgc

SEQ ID NO: 838108 - DNA, 120 bp, Artificial Sequence
  ENSG00000241369_9 (sequence is synthesized)
ctcagctcttggtggattttcaatttctcccagccatctctgtttcgctaaaggtttctgaagacagtgggtatgtggcaaacttctgcaattctatattaagataaactgttagatcaa

SEQ ID NO: 838109 - DNA, 120 bp, Artificial Sequence
  ENSG00000241369_10 (sequence is synthesized)
agcacatgattcttcccccttccatgattccagtggccaataggacagaatgacattaaggtaattgtgtatttataaaacagaatgggggaaagcagaacaagatggccaaatagaatc

SEQ ID NO: 838110 - DNA, 120 bp, Artificial Sequence
  ENSG00000241369_11 (sequence is synthesized)
acctggatttaacatcatatcaaggaaagagacactgaaggggatagacaagacaagcttgaattgccttcaccaccacttcccatgccccagcagaggtgcagagagagaatctgtgtg

SEQ ID NO: 838111 - DNA, 120 bp, Artificial Sequence
  ENSG00000241369_12 (sequence is synthesized)
cttgagggagggagattgcagttattgtggaactttgcataggaaatcagtgctgcttgtcacagcagaaagcatcatagggcagaatttatctggcacccatggagggagcatttatac

SEQ ID NO: 838112 - DNA, 120 bp, Artificial Sequence
  ENSG00000241369_13 (sequence is synthesized)
cagccctagccccaggggaaccatccattctagtggtcaaaacccaagttccagctggccacatgaccatgagctaaagtgcactggggtcttaaatttgaaagtcagtctaagccaaaa

SEQ ID NO: 838113 - DNA, 120 bp, Artificial Sequence
  ENSG00000241369_14 (sequence is synthesized)
gtactacaattccttgacaaatccttgtgctgtgctgtgcttggaaccggtggacttgggttacacacaacatagtgagacaccagctggagcgaccaaaggagtgcctgcatcacccct

SEQ ID NO: 838114 - DNA, 120 bp, Artificial Sequence
  ENSG00000241369_15 (sequence is synthesized)
ccctgaaccctagggtagtacagctcacagttctgggaaagacttcttcctttctctttcactttctcttgagtagagaaaaggagagaataaaaagggctttattttgcaacttggaaa

SEQ ID NO: 838115 - DNA, 120 bp, Artificial Sequence
  ENSG00000241369_16 (sequence is synthesized)
tctgtttcgctaaaggtttctgaagacagtgggggaagcttttttctcctccccatcctgatcactagtatgagaaggggtgctaatggaccagccttggccttgcagatgaagatgatg

SEQ ID NO: 838116 - DNA, 120 bp, Artificial Sequence
  ENSG00000241369_17 (sequence is synthesized)
aaggaagaagatgtataaagaacctctgaaagagtcccagttttacatttcaaagtctttttccttctgttgtttattgtgttgggttggagtggaggatatttgatggagaattgattc

SEQ ID NO: 838117 - DNA, 120 bp, Artificial Sequence
  ENSG00000241369_18 (sequence is synthesized)
tgaaacttgccaaaatatggataatactttgctccttttccattgtgggttatcacaaagaagagtttcacttttagtcatctatttacagtctagaaacaggaacaaacccaaaccaag

SEQ ID NO: 838118 - DNA, 120 bp, Artificial Sequence
  ENSG00000241369_19 (sequence is synthesized)
cagaaaaacagaaataaccaagatcaaaacggaactaaatgaaattgaaatgaaaaagtacaaagataaatgaaacaaaaacctggtttattgaaaagttaaataaaattgataattcaa

SEQ ID NO: 838119 - DNA, 120 bp, Artificial Sequence
  ENSG00000241369_20 (sequence is synthesized)
ggtttctgaagacagtggataatgaagatattataccattatatgctcttgaatctgtctcattgtgacttggcgaagaggcagtgaatctgccaaaaagaagtagagcagctgtgaaga

SEQ ID NO: 838120 - DNA, 120 bp, Artificial Sequence
  ENSG00000241369_21 (sequence is synthesized)
tgccaacacaattgagtactctttctctacatatttctaaatatggcaatttattggacacttatgagcatggaatgacaatggggtcaatttaaccatacggcaatgctgagacacctt

SEQ ID NO: 838121 - DNA, 120 bp, Artificial Sequence
  ENSG00000241369_22 (sequence is synthesized)
cattatgacctttccctggtataagttatgtgataatgaatgcatgtttagtcacacactgtaggtacagatgggaaaaaagaaagcataaaatataaaacatgatgtccaggtttcaaa

SEQ ID NO: 838122 - DNA, 120 bp, Artificial Sequence
  ENSG00000241369_23 (sequence is synthesized)
agaaagcataaaatataaaacatgatgtccaggtttcaaataagaattctaaaatgttatttaattaatgaaatgaaaatactttactttagaaaaagaatattgaatctctttgatgta

SEQ ID NO: 838123 - DNA, 120 bp, Artificial Sequence
  ENSG00000241369_24 (sequence is synthesized)
gggaaagaggtggcatcggcggttcaagactgagttttctatctcttcagtgcctctttcaacaatgaagatcaaaccaggtactgaggtagtgggagtgctcatctagtttttggcttt

SEQ ID NO: 838124 - DNA, 120 bp, Artificial Sequence
  ENSG00000241369_25 (sequence is synthesized)
cagaagtgctcatcctgataactgtgtacagcactactgctcatattccattggccaatatttaggtagataacttcactaactacaaggtatgctgggaaataaagtccagatatgtgt

SEQ ID NO: 838125 - DNA, 120 bp, Artificial Sequence
  ENSG00000241369_26 (sequence is synthesized)
gccatctctgtttcgctaaaggtttctgaagacagtgggagtttccctgcacaagccctcttctcttgtctgccaccctgtgagacatggcttttgccttccaccatgattgtgtggcct

SEQ ID NO: 838126 - DNA, 120 bp, Artificial Sequence
  ENSG00000241369_27 (sequence is synthesized)
ccaatacatgtttaagcagtaaagtattcatcaggtcacaaaaagaggagcaagaggagctgactctttatgtcatatcttggccttgtaatttgattctttgccaacatgcatggtttt

SEQ ID NO: 838127 - DNA, 120 bp, Artificial Sequence
  ENSG00000241369_28 (sequence is synthesized)
taaatttaaaggagtttaattgagcaaagaattattcatgaatcaagcagtcttccaagccagagtaggctcaaatactccagcacagccacgtggtggaagatttatggacaaaagaag

SEQ ID NO: 838128 - DNA, 120 bp, Artificial Sequence
  ENSG00000241369_29 (sequence is synthesized)
agatgaaatcccactattttgcccaggctcatctataacttctgagctcaagacatcctcctgctttgaccttccaaagtgctgggataggggttttgtgcaaatatctgctgagtgaac

SEQ ID NO: 838129 - DNA, 120 bp, Artificial Sequence
  ENSG00000241369_30 (sequence is synthesized)
tttgtcaaattcaagtatcacctgtcttcaggctaagtgttgaccatatggcaaaatgaagctcatcatactacagagatctacttggggtctaattttcatcattataatccaaaattt

SEQ ID NO: 838130 - DNA, 120 bp, Artificial Sequence
  ENSG00000241369_31 (sequence is synthesized)
tccttcaaagacaaaaagacaaaacagttgataaagccttctataagattattattactgattatttaaattcctttgactgggtcaaataaatattctgtagacaaaattaatttcata

SEQ ID NO: 838131 - DNA, 120 bp, Artificial Sequence
  ENSG00000241369_32 (sequence is synthesized)
tcaaagtgagataatttttgaattgtgctccaaaaagtcatttttaaattataaatttgtatttattaattgacacatttaacaaaaattcattcagtgctatacagcaaccattatgcc

SEQ ID NO: 838132 - DNA, 120 bp, Artificial Sequence
  ENSG00000241369_33 (sequence is synthesized)
aagactgaaacatttccttcccccacaaatcaaaaactatattgtaaatagtcatgagagtttcaacactagctccccaaaaggctattcatcccaaaataaagtcgtgccattgtttca

SEQ ID NO: 838133 - DNA, 120 bp, Artificial Sequence
  ENSG00000241369_34 (sequence is synthesized)
aggtacatgtgaaggtttcttgtataggtaaactagtgtcatgtgggattgttgcacagattattttatcaaccaggtattaaggaagctcagtacccaatagttatattttctgctcct

SEQ ID NO: 838134 - DNA, 120 bp, Artificial Sequence
  ENSG00000241369_35 (sequence is synthesized)
gtacccaatagttatattttctgctcctctccctcatcccactctccaccctgaggtcgaccccagtgtctgttgtttccttctttctgttaatgagttctcatcatttagctcccactt

SEQ ID NO: 838135 - DNA, 120 bp, Artificial Sequence
  ENSG00000241369_36 (sequence is synthesized)
tctgttcctgtgttagttggctaaggataatggcctccagctccatttttgtttccctctccagcatctgtttttttttttaatttttagtaatatccattctgactggtatgagatggt

SEQ ID NO: 838136 - DNA, 120 bp, Artificial Sequence
  ENSG00000241369_37 (sequence is synthesized)
atctcattgtggttctgacttgcatttctgtaatggtcaatgatgttcagcttttcttttcatgtgcttgttgcccacatgtatgttttgttttgaaaagtgtttgttcgtgtcctttat

SEQ ID NO: 838137 - DNA, 120 bp, Artificial Sequence
  ENSG00000241369_38 (sequence is synthesized)
ccacttttcaatggggttgtttgcttttctctcgtaaatttgtttaatttccttatagatgttatgacctagcagctgtaccttttttaatttcaagacattcaataaactaagaaccaa

SEQ ID NO: 838138 - DNA, 120 bp, Artificial Sequence
  ENSG00000241369_39 (sequence is synthesized)
gtaaccactccctggtactgcctgtgttcactcaaggtcccggggctctacaatcagcaagtaccaaagccagccaggctgatgtttttcccttcggggcaatgaggtcccgcaggacat

SEQ ID NO: 838139 - DNA, 120 bp, Artificial Sequence
  ENSG00000241369_40 (sequence is synthesized)
ggtggagtgacataaacacctctgtagccatcaccactatgactgcactgggtcagagatgaagccaacatagctctgtgtctcacccaaggcctgctgtaaccactccctggacagcat

SEQ ID NO: 838140 - DNA, 120 bp, Artificial Sequence
  ENSG00000241369_41 (sequence is synthesized)
tttccatgaacatagaacttaatatatcgaaaatcaccctaccattcactgtgtaaccctatgtgattttattcataacatttatcactaaacacaatttatttcatttgtttattttta

SEQ ID NO: 838141 - DNA, 120 bp, Artificial Sequence
  ENSG00000241369_42 (sequence is synthesized)
gtgtgtgtgtgtgtgtgtgtatacttgaaatgcaacaaaacaatacaatcatatccagctgttaaattaatgaacaagtagagttgagtacaacatgacccagccatccatattttctga

SEQ ID NO: 838142 - DNA, 120 bp, Artificial Sequence
  ENSG00000241369_43 (sequence is synthesized)
tacaacatgacccagccatccatattttctgaggcctggacaaagccagtccccaaaataagacattgactggtttcagcccctcatatctgtaatcccttgatacttcacctgacactt

SEQ ID NO: 838143 - DNA, 120 bp, Artificial Sequence
  ENSG00000241369_44 (sequence is synthesized)
actgaaattataaaacaagccacatcaagtcttgataaagaaagtgtggaaccccttttcaaggctattatatttcaatgaaatgattttttatatatttatatttttacttatctatgt

SEQ ID NO: 838144 - DNA, 120 bp, Artificial Sequence
  ENSG00000241369_45 (sequence is synthesized)
atctaagtttcagaaattctgttaaaatgaaatatgttgaatataccagcaagctgattttagaggagctaaataatctaagaagtatcttcgtctcacaattttggcaaatttaacctc

SEQ ID NO: 838145 - DNA, 120 bp, Artificial Sequence
  ENSG00000241369_46 (sequence is synthesized)
ccttgaagagaaggacccaggtctggcaggatacatcacctgctgcctaaataacccttgagccttgaataccaatagtagccaggtattagtagccatgacccttggatccaatccagt

SEQ ID NO: 838146 - DNA, 120 bp, Artificial Sequence
  ENSG00000241369_47 (sequence is synthesized)
gtgttatccagaatattacaaactgtggtggacacaaggagagatgctttctgcccgagaaaaagaaagggaagagtaaggggactttgtcttgcagcttgagaaccagctcagccacag

SEQ ID NO: 838147 - DNA, 120 bp, Artificial Sequence
  ENSG00000241369_48 (sequence is synthesized)
tgagttggagaacaaagtgtgctcctgagatcaccaccaatttgtggctcctggacagcatctctagacttagctgtgggcaagtggggaacccactacacttaagggagatatccaggt

SEQ ID NO: 838148 - DNA, 120 bp, Artificial Sequence
  ENSG00000241369_49 (sequence is synthesized)
gtggcagcatctacaacaaactgactgaaaatggcttggcccttaaatgaacatcaatggtagccaggcagtacttgctgtgggtctgaggcagtagtggcaatggggagagactcctcc

SEQ ID NO: 838149 - DNA, 120 bp, Artificial Sequence
  ENSG00000241369_50 (sequence is synthesized)
tgcttgagtaaaggatagaaaagagtgaggatgactttgtcttgtggctcgggcaccagctcagctgcaatagaatagagcaccaagagaatactaaaggctcctaatttcaggcgctgg

SEQ ID NO: 838150 - DNA, 120 bp, Artificial Sequence
  ENSG00000241369_51 (sequence is synthesized)
ctcctggatgccatttctggacataccctggcccaagtagaagctcactgtactgaaagggaggacataaggcttggctgaattagccatctgctcatggaagaacacttgagccttgag

SEQ ID NO: 838151 - DNA, 120 bp, Artificial Sequence
  ENSG00000241369_52 (sequence is synthesized)
tgaacataagcagtagccagaaagtggttgccatgtcttgggtgagacccagtgctgtgttggctttggctctaacttattgcagtcgcagtggttatgaccataggattgcttatatca

SEQ ID NO: 838152 - DNA, 120 bp, Artificial Sequence
  ENSG00000241369_53 (sequence is synthesized)
actctcccacagttccaggcagttcagcagggacagagaatcttcatttgtttggggaaaagtaagggaagagaagagtctctgtctggtaatccagataaatatctttgatattaccga

SEQ ID NO: 838153 - DNA, 120 bp, Artificial Sequence
  ENSG00000241369_54 (sequence is synthesized)
aggccatgttgatggtacatctatcactctgcaagactaacatgttactggatttggggtgacccgttatgcaaatatggctcaagtgatcaaagagttatatcactacactgaattctc

SEQ ID NO: 838154 - DNA, 120 bp, Artificial Sequence
  ENSG00000241369_55 (sequence is synthesized)
tttgaatatttggaaagccttcccaggaaggatgggttcaaaggagcctagactgtgaggtctacaatatatacctaactcttcaatgcccagacatagacaaacatccacaagcattaa

SEQ ID NO: 838155 - DNA, 120 bp, Artificial Sequence
  ENSG00000241369_56 (sequence is synthesized)
gattatcctggaaaccatggccttaccaaacagactaaataaggcaccagaggaccaatcctggagtgacagagacatgtgaaccttttggcagagaattcaaaatagctgttttgaaaa

SEQ ID NO: 838156 - DNA, 120 bp, Artificial Sequence
  ENSG00000241369_57 (sequence is synthesized)
agtgagcaatctacaaaataaatcaagaaagtaattatattcacaatagctaccaagaaaataaaatgtctaggaataaactttaccaaagaattaaaagatatctatcatgaaaactat

SEQ ID NO: 838157 - DNA, 120 bp, Artificial Sequence
  ENSG00000241369_58 (sequence is synthesized)
aaaatattgatgcaagaaaatgaaaaggacagaaaaaaggaaatatattcaatgatcatagattggaaaaattaatattgttaaaatgtccatattaccttaagcaatctacagactcgg

SEQ ID NO: 838158 - DNA, 120 bp, Artificial Sequence
  ENSG00000241369_59 (sequence is synthesized)
tgaaattcctatcaaaatgccaatgacattcttcacagcagtagtgaaagaaatcctaaaatttatacagaaccacaaaagattcagaatagctaaaaccattctgagcgataaagtgta

SEQ ID NO: 838159 - DNA, 120 bp, Artificial Sequence
  ENSG00000241369_60 (sequence is synthesized)
aaactggagaaatcacataacctgacttcaaattttatgacatagccatagtattcaaaacagtgtgatactggcataaaaacaaatagaacaatgacactgagtagagaatctagaagt

SEQ ID NO: 838160 - DNA, 120 bp, Artificial Sequence
  ENSG00000241369_61 (sequence is synthesized)
gaatccatacatctagagtgaacttatttttgtcaaaggtgtcaagaacatacattaaggaaagcaagtctcttcaataaatggtaccgggaaaactgaatattcatatgcagaagaata

SEQ ID NO: 838161 - DNA, 120 bp, Artificial Sequence
  ENSG00000241369_62 (sequence is synthesized)
aaactaggtgcctgtctctcaccacatataaaaatgaaacaaaaaaggattaaagttttaactgtcagacctcaaactgtgaaactactgaagtggaaaagtagggaaactctctaggat

SEQ ID NO: 838162 - DNA, 120 bp, Artificial Sequence
  ENSG00000241369_63 (sequence is synthesized)
attggtttgagcaaaatatttcttattacctcagaagcagaggcaatcaaagcaaaaatgaacatttgagatcatgtcaagttcaaaagcttctgcacaggaaagaaaacaatcaacaag

SEQ ID NO: 838163 - DNA, 120 bp, Artificial Sequence
  ENSG00000241369_64 (sequence is synthesized)
atgaagagacaactcaaaatccatctgacaaagaattaataaccagaatacataaggaggtcaaacaattctataggagaaacatctgatgatctgattaaaaaacgggcaaagtatctg

SEQ ID NO: 838164 - DNA, 120 bp, Artificial Sequence
  ENSG00000241369_65 (sequence is synthesized)
aatagacatttctcaatagaagacataaaaaagaccaccaaatatgaaaaagtgttcaatattattgatcatcaggaaaatgcaaatcaaaacaataatgatgtatcatctcaccccatt

SEQ ID NO: 838165 - DNA, 120 bp, Artificial Sequence
  ENSG00000241369_66 (sequence is synthesized)
taaaatggctttcatccaaaagacaggcaataacaaatgctggcaagaatgtggagaaaagggaacctgtgtacaccattggtggaaatgtaaattagtacagccactatgaagaactgt

SEQ ID NO: 838166 - DNA, 120 bp, Artificial Sequence
  ENSG00000241369_67 (sequence is synthesized)
atgaaagttccttagaaaactaaaaaaaataacgaacatatgatccaacaacctcactggtagatatttaccccaaaggaataaaatcagtatatcgaagaggtatcagcactcccatgt

SEQ ID NO: 838167 - DNA, 120 bp, Artificial Sequence
  ENSG00000241369_68 (sequence is synthesized)
ggaaagcaagaatgaaataatttacagatatactattgaaatttcagggaagcttttttctcctccccatcctgatcactagtatgagaaggggtgctaatggaccagccttggccttgc

SEQ ID NO: 838168 - DNA, 120 bp, Artificial Sequence
  ENSG00000241369_69 (sequence is synthesized)
gattcttcccccttccatgattccagtggccaatagaaacttttgcctgacccatgatcacataggtgcctaatatcaagttgagagaaatcttacactacaaatttgctgagagtttgc

SEQ ID NO: 838169 - DNA, 120 bp, Artificial Sequence
  ENSG00000241369_70 (sequence is synthesized)
cgggccacctgttagcttaaacttttgtataattgagaaaatgagggttttctcttaattaaggcactgttgtttgttgtttactaaggcaaccaaataaatcacctagctaataaagaa

SEQ ID NO: 838170 - DNA, 120 bp, Artificial Sequence
  ENSG00000241369_71 (sequence is synthesized)
ctaatacatatacccagtttgagtccgatcctaaaagaataaaattgaccatttcaaaaggaggcagtagctaaaatcagatctcagattgaactatcagattggtgagctaaaagaaaa

SEQ ID NO: 838171 - DNA, 120 bp, Artificial Sequence
  ENSG00000241369_72 (sequence is synthesized)
ccagaccttacagattattaatcaataacttaatctgttttgcctacatataagacatggaaatatcatataattgtcaactttgactcctaattaaaaaaaaaagagcaaaaaactaaa

SEQ ID NO: 838172 - DNA, 120 bp, Artificial Sequence
  ENSG00000241369_73 (sequence is synthesized)
aaggcctgctgtaaccactccctggtactgcctgtgttcactcaaggtcccggggctctacaatcagcaagacagcattgaattcagagcctcacaattgctgtgttctacttcgcctag

SEQ ID NO: 838173 - DNA, 76 bp, Artificial Sequence
  ENSG00000241369_74 (sequence is synthesized)
cggacacagagaggggagcaacacacaccagggcctgttgggggcaagataatgaagatattataccattatatgc

SEQ ID NO: 838174 - DNA, 120 bp, Artificial Sequence
  ENSG00000241369_75 (sequence is synthesized)
atgtagcaactaaaatacaggttaaccacttaaatttgaatttcagataaacagtcaataattctgcataggatatacttatactaaaaactatttgctgtttatcagaaattcaatttt

SEQ ID NO: 838175 - DNA, 120 bp, Artificial Sequence
  ENSG00000241369_76 (sequence is synthesized)
aacaggatgtcctatatttcatctggaatcttacccttgtttcatgacagaataatgcagatctgggagctcttagcaggcattttgtaatcacaataaaaagtcagttttcagaagtgg

SEQ ID NO: 838176 - DNA, 120 bp, Artificial Sequence
  ENSG00000241369_77 (sequence is synthesized)
cagatggcaaaagagaaagattggagggaagaagacagtgatactatgctttagctgaggaaacaaaacagtctccactctttcttatctcctattttaactagccaatgtattttatta

SEQ ID NO: 838177 - DNA, 120 bp, Artificial Sequence
  ENSG00000241369_78 (sequence is synthesized)
gattttggcaaggttcatttgggtattatgtcactctatttcaatataactactctgatacacactaaagaattaccatgaagtattgttaatctcaaaagttgtcgctgttttcctgaa

SEQ ID NO: 838178 - DNA, 120 bp, Artificial Sequence
  ENSG00000241369_79 (sequence is synthesized)
tatggttcagccatttcaaagttatatactctatagatgaaaagagaagtgtcttgggatgtttcagaaatgttatgtcacacaacggaattccttagctttacctgactgataaaatct

SEQ ID NO: 838179 - DNA, 120 bp, Artificial Sequence
  ENSG00000241369_80 (sequence is synthesized)
gaaagttcaagtcagatgtatgaagggttaataaaaattcaatttattttatatcatgcaatgaaaacacaaatcagtaccaaggctagcaatattcaaatataatattttgatctttga

SEQ ID NO: 838180 - DNA, 120 bp, Artificial Sequence
  ENSG00000259852_0 (sequence is synthesized)
atggactggacctgaaggatcatttttttggtggcagcagctacaggtgcccaattccaggtgcagctggtgcagtctggggctgaaggaggaagcttggggcctcagtgaaggtgtccc

SEQ ID NO: 838181 - DNA, 120 bp, Artificial Sequence
  ENSG00000259852_1 (sequence is synthesized)
ggctatgcacagaagtttcagggcagagtcaccatgaccagggacatgtccacgagcacagcctacatggagctgagcagtcagagatctgaggacatagatgtgtactactgtgcgaga

SEQ ID NO: 838182 - DNA, 120 bp, Artificial Sequence
  ENSG00000237027_0 (sequence is synthesized)
aggaaagaaaggttttcagggaagcggtagacaagttccttcagctcaacacgaagtcactggcccggcctggcacccagaggtaaagaatagcagaaaaagagagaggaactctcgcaa

SEQ ID NO: 838183 - DNA, 120 bp, Artificial Sequence
  ENSG00000237027_1 (sequence is synthesized)
tctgcagattttcacggactgctccctcctgccagcagaggacctgtaacactgccccgattgaagtcagggaacaattcacagatcggaggaacatttctgaatgacgctcagatgaca

SEQ ID NO: 838184 - DNA, 120 bp, Artificial Sequence
  ENSG00000237027_2 (sequence is synthesized)
gagaaacgaagtttgcataatttcagcagtaatgcaagaaaagatgagtgtgcgtgttgtaagggagggagggatgcagaaagggttgaaatctgtaataaactgcctccaagaaaacag

SEQ ID NO: 838185 - DNA, 120 bp, Artificial Sequence
  ENSG00000237027_3 (sequence is synthesized)
gtttggcctttgtacgcagctacgagaaggcgctctgaaagtgcagcgaccgcatcttgctggctcatgaattaggaaagaaaggttttcagggaagcggtagacaagttccttcagctc

SEQ ID NO: 838186 - DNA, 120 bp, Artificial Sequence
  ENSG00000237027_4 (sequence is synthesized)
aacacgaagtcactggcccggcctggcacccagagcttccagaacacttcctccttctgagaagatctactcccacaggtagggcccttaacacagtactacctatgaggacactcagca

SEQ ID NO: 838187 - DNA, 120 bp, Artificial Sequence
  ENSG00000237027_5 (sequence is synthesized)
ctgactgctcacggaacctggtgcccaccaggactatttgcgaaagaagggaaatgacagggtggacacgctctgctttagcaagcccatgactcattataaatacaccccactgtcaca

SEQ ID NO: 838188 - DNA, 120 bp, Artificial Sequence
  ENSG00000237027_6 (sequence is synthesized)
ctgcaggaggcatagaggctgttacagtgaaagctgagtgacatctgaatattattcaggaaacctgtgacatacccttccaagaaaagctgcttacagatgtaaaaatcacataggagg

SEQ ID NO: 838189 - DNA, 120 bp, Artificial Sequence
  ENSG00000237027_7 (sequence is synthesized)
aataagcacatatcaccgaataaagatgtgactgacagaaggcttgggaggtagagaccgtccctttttatgtaggacaataacttattgactgaccagcactgctagaccaccagagcc

SEQ ID NO: 838190 - DNA, 120 bp, Artificial Sequence
  ENSG00000237027_8 (sequence is synthesized)
tccaagtcagggctgggcactcccatcacttggcaaatgaccatgcgcatactcaaagttcagaccaagtgttatctctgctaagccttctgctgtccctgccttgccctagacaagatg

SEQ ID NO: 838191 - DNA, 66 bp, Artificial Sequence
  ENSG00000277400_0 (sequence is synthesized)
ccgcagcgcctccaccccagagacccggaccaagttcacacaggacaatctgtgccacgcccagcg

SEQ ID NO: 838192 - DNA, 120 bp, Artificial Sequence
  ENSG00000277400_1 (sequence is synthesized)
ggaccaagttcacacaggacaatctgtgccacgcccagcgcgagcgcctggactcggccaacctgtgggtgctggtggactgcatccttcgcgacacctccgaggacctgggactccagt

SEQ ID NO: 838193 - DNA, 120 bp, Artificial Sequence
  ENSG00000277400_2 (sequence is synthesized)
gtgacgccgtgaacctggccttcgggcgccgctgtgaggaactggaggacgcgcggcacaagctgcagcaccacctgcacaaggtggggcaccctgaaccccgaagacggctccggcgcc

SEQ ID NO: 838194 - DNA, 120 bp, Artificial Sequence
  ENSG00000277400_3 (sequence is synthesized)
tgcccaccactctgccccctctcatcacctggcctgggccctcaacacctttctcctctgtcccacttatcccgagggaccccagaagcaagtgtcacctctccgtaaacctatgtaaaa

SEQ ID NO: 838195 - DNA, 120 bp, Artificial Sequence
  ENSG00000277400_4 (sequence is synthesized)
ccaggtgacactgggtatgatcgcagtgtgttgcaacccccatgactgagaaggaggagctgtggggaggatggaggcaggagctggtctggggagcattgactgcctgggaggtcccca

SEQ ID NO: 838196 - DNA, 120 bp, Artificial Sequence
  ENSG00000277400_5 (sequence is synthesized)
agagtcctggcctggcaggcagggctctgactctagggcctcagcatggcctttaccacctctgagtccccagtccttgagcaggatttgggtcctggtgaccaccaaggatgggggttc

SEQ ID NO: 838197 - DNA, 120 bp, Artificial Sequence
  ENSG00000277400_6 (sequence is synthesized)
ttggaccagagctaagagacaacaggctgcctgactctccagagcccgctgggggccccgtgcacattgttcccctcacccacgcctccccagggccactggtcaggaccaccctctgga

SEQ ID NO: 838198 - DNA, 120 bp, Artificial Sequence
  ENSG00000277400_7 (sequence is synthesized)
cacagccccaggagctgggtaggaccagactggtctctacattccatatgcccgggcatgggggcacaggcccaaggggcactgtcctgtctgcagatgctgcgggaaatcacagatcag

SEQ ID NO: 838199 - DNA, 120 bp, Artificial Sequence
  ENSG00000277400_8 (sequence is synthesized)
gaacacaacgtggtggcactgaaggaggccatcaaggacaaggaggaacctctgcacatagcccagacccggctgtagctgctctcacaccggcccaacatgcagctgtgccgcgatgca

SEQ ID NO: 838200 - DNA, 120 bp, Artificial Sequence
  ENSG00000277400_9 (sequence is synthesized)
tgggcctctgaggcagtcccaggtgcccccgtccacctcctcgctgcgaccctctccaataaacactccaatctccacacacacatcccccacaggtgctgagaggggagggagactctg

SEQ ID NO: 838201 - DNA, 120 bp, Artificial Sequence
  ENSG00000277400_10 (sequence is synthesized)
cggccacacacaacatgcaagcacgccttaaacacacagatatagacatgacactgggcaggtcatgggtcgggggcctccccgtgccagggacctgtgcccacgtggtctcaccccacc

SEQ ID NO: 838202 - DNA, 120 bp, Artificial Sequence
  ENSG00000277400_11 (sequence is synthesized)
ctgtgctacctcatcttcccgggaggaagctccttcagacaaggtgagctcctggaggccacggggccagagaggccagagagggccattccctgctgccctgagggtgctgtccccacc

SEQ ID NO: 838203 - DNA, 120 bp, Artificial Sequence
  ENSG00000277400_12 (sequence is synthesized)
tctggtggaaagtatgacctacgcctgggctacaggcatagatgggccgtccttttgtttcccttgttaacggatgcctggtggccccttctgagcctaagtacctttcttccttccctg

SEQ ID NO: 838204 - DNA, 120 bp, Artificial Sequence
  ENSG00000277400_13 (sequence is synthesized)
cccctcagttccttcaaggaactgggtgcctccttccgtcaaatatcaggaatggaaagaactgagcctggtcggctgaggccagtcctgtcctgtcagggtcgagattgcacgcgggtc

SEQ ID NO: 838205 - DNA, 120 bp, Artificial Sequence
  ENSG00000277400_14 (sequence is synthesized)
actcattcccactcaggtccgcgctccctgggaggaccctcgtaatttatgctctgccctagagccgctttcctggtaggatcctttcatggcgtcttcccaggacctcctgccagctcc

SEQ ID NO: 838206 - DNA, 120 bp, Artificial Sequence
  ENSG00000277400_15 (sequence is synthesized)
cattgggagttttgggtcccctccaccccagtaggtgcatacttctgccctccccagccccagctcacaccccccaacacccccaagctggtgagtgaggtggaggagctgtacaagtcc

SEQ ID NO: 838207 - DNA, 120 bp, Artificial Sequence
  ENSG00000277400_16 (sequence is synthesized)
atcacagcgctgcgggagaagcttctacaagcggagcagtccctgcgcaacctcaaggacatccacatgagcctggagaaggacgtcaccgccatgaccaacagtgtcttcatcgaccgc

SEQ ID NO: 838208 - DNA, 120 bp, Artificial Sequence
  ENSG00000277400_17 (sequence is synthesized)
cagaagtgcatggcccatcgtacttgctaccccaccattctgcagctggctggctaccagtgagcagcggcacggtgcttccccccaatcccccaaataaacagtgcgttagctttctgc

SEQ ID NO: 838209 - DNA, 120 bp, Artificial Sequence
  ENSG00000271122_0 (sequence is synthesized)
atggacctcccccgtccccgccatccctgccgatcctgttgctgccgccttcccgccgtgctcgggctgcccgggactctagccgccaggcttcgcgtcgcccagcggcagatcgggctc

SEQ ID NO: 838210 - DNA, 120 bp, Artificial Sequence
  ENSG00000271122_1 (sequence is synthesized)
ctgggagcctctcccctggccgtttgctcggcctcggccccagctgccctggggcctagccactagctcccctggcgctagcctaccctgtcttgaccgcaccctgaagatttgggaagt

SEQ ID NO: 838211 - DNA, 120 bp, Artificial Sequence
  ENSG00000271122_2 (sequence is synthesized)
ctttctccatcccaagagtcgtctctgcaaaagttggtgtccttcctggtgctgaaccacgcttctgctcaaaatgtgttgagcgtcgtctgtctgcaaagcacggtgccaggagctttg

SEQ ID NO: 838212 - DNA, 120 bp, Artificial Sequence
  ENSG00000271122_3 (sequence is synthesized)
gtggagaaggcatggggtacatgtgtaaagagtacaggcttttggttaaacctgaagtcctcctctactttctgggggaccctggccgtccttgctgagcctccgttgacttctctaatg

SEQ ID NO: 838213 - DNA, 120 bp, Artificial Sequence
  ENSG00000271122_4 (sequence is synthesized)
gggacggtaatgcctacctgaccacaagctgatgagtaaatgagctatgagtgcaaagtgtggtgcagttctggcgtgtgccagcctctcaagtgtcagtttccgtctcattcctcttaa

SEQ ID NO: 838214 - DNA, 120 bp, Artificial Sequence
  ENSG00000271122_5 (sequence is synthesized)
tcttcactaaaatggacaagtattcattgagcacctaatgcgtgttcagtatggtgggagatgagggatgacagtattatttttctattttataggttagacatagaacaaaaggttgag

SEQ ID NO: 838215 - DNA, 120 bp, Artificial Sequence
  ENSG00000271122_6 (sequence is synthesized)
tctattgcccatagccgaacttttcttcattttctactgtggtttagaagtcggtatagtaagttaagggttgttagatgtgcattttcacagctcccagcttccacttaggagtagata

SEQ ID NO: 838216 - DNA, 120 bp, Artificial Sequence
  ENSG00000271122_7 (sequence is synthesized)
acataggggactttgcgagctggtctctttccctcttagcttcagaagggcttcgaggtagccaccactgaattagttgagagacaaggcacccctacggaggaaatctcaactgcacaa

SEQ ID NO: 838217 - DNA, 120 bp, Artificial Sequence
  ENSG00000271122_8 (sequence is synthesized)
caaggcacccctacggaggaaatctcaactgcacaacccctactgtgccccaattcagcaggaagcagttagagcggtggtcaaacctccccaatagcacttgggttttcctgttgagag

SEQ ID NO: 838218 - DNA, 120 bp, Artificial Sequence
  ENSG00000271122_9 (sequence is synthesized)
gacaggactagttggatttcctaggctggctaagaatccctaagcctagctgggaaattgaccacgtccacctttaaacacggggcttgcaatttagctcacacccgaccaatcaggtag

SEQ ID NO: 838219 - DNA, 84 bp, Artificial Sequence
  ENSG00000271122_10 (sequence is synthesized)
gagagctcactaaaatgctaattagggaaaaacaggaggtaaagaagtagccaatcatctatcgcctgagagcacaacaaagcc

SEQ ID NO: 838220 - DNA, 120 bp, Artificial Sequence
  ENSG00000271122_11 (sequence is synthesized)
tctgttttcactctattaaatcttgcaattgcacacttttctggtacgtgtgtgtcacagctcaagctgagctttcgctcaccgtccaccactgctgtctgccgctgtcacagacccaca

SEQ ID NO: 838221 - DNA, 120 bp, Artificial Sequence
  ENSG00000271122_12 (sequence is synthesized)
gtctgccgctgtcacagacccacagctgacttccatccctctggatccagcgaggcgcccattgctgctcctgatcgggctaaaggcttgcccttgttcctgcagggctaagtgcccagg

SEQ ID NO: 838222 - DNA, 81 bp, Artificial Sequence
  ENSG00000271122_13 (sequence is synthesized)
taaaggcttgcccttgttcctgcagggctaagtgcccaggttcgtcctaatctagctaaacactagtcactgggttccacg

SEQ ID NO: 838223 - DNA, 120 bp, Artificial Sequence
  ENSG00000271122_14 (sequence is synthesized)
gccaagaaccccaggtcagagaacacaagacttgccaccatctcggaagtggcccgtcaccatcttggaagcgacctgccaccatcttgggaacttggggagcaaggacccccagtaaca

SEQ ID NO: 838224 - DNA, 120 bp, Artificial Sequence
  ENSG00000271122_15 (sequence is synthesized)
aacatagtgaccaggaggaaattcttcctctcaacagctaatgcagcaggatctcttacaccgtaccctccctcaccttgctcttgctcttcatggtagaacacgtaccatatcttagct

SEQ ID NO: 838225 - DNA, 120 bp, Artificial Sequence
  ENSG00000271122_16 (sequence is synthesized)
gtactctatcaactgcgcatctgaagtaaagagtgaagtcttctttgtttccagtcatggagcaacaacttgctatgatactggccttctgtagctgactcttctttgtctacccaggca

SEQ ID NO: 838226 - DNA, 120 bp, Artificial Sequence
  ENSG00000271122_17 (sequence is synthesized)
ctctaatggaactttaattctagctaaagttattttctcagactcctttgaagcaaggggcagccatttgacacacttcaagccaatgagttgaatgttgaacttattgctgaggcttct

SEQ ID NO: 838227 - DNA, 120 bp, Artificial Sequence
  ENSG00000271122_18 (sequence is synthesized)
aagaaagcatatagatggaagggctctgcgaatcagagctcatctttgccctacacctgtcttccaggaggaacgtgaagagctacagcactcatagttcagtcatgaaacaacaaacag

SEQ ID NO: 838228 - DNA, 120 bp, Artificial Sequence
  ENSG00000271122_19 (sequence is synthesized)
gagaacaatggcctgcattccaaggatggcagagcagaaaactgtaaagaggctgggcatttgatggcattgtggtgccaccagacaagccctaagctatcttccctaagacttcttgtt

SEQ ID NO: 838229 - DNA, 120 bp, Artificial Sequence
  ENSG00000271122_20 (sequence is synthesized)
ttgggtcaaattcctgtttaagccaggaagttttcacaaccttcaccacccagtcctgcagctgttgtctcatgcttgtgactcagacttccaggaatcctttagaagtgatgtggtgat

SEQ ID NO: 838230 - DNA, 120 bp, Artificial Sequence
  ENSG00000271122_21 (sequence is synthesized)
ctcgtttggcactatgcaatgtacactattaatgaaggtaccctaataattataaatattaagacagaatgtgcatttcacagtgatttaaacactctttaacactctttaaaacagtcc

SEQ ID NO: 838231 - DNA, 120 bp, Artificial Sequence
  ENSG00000271122_22 (sequence is synthesized)
ctttaacactctttaaaacagtccatcaaaggttcgctaacacagagaaaaacatttaaaattgtaataaaggctgggcgcagtggcttgcctctaatcccagcacttcaggaggccgag

SEQ ID NO: 838232 - DNA, 120 bp, Artificial Sequence
  ENSG00000271122_23 (sequence is synthesized)
actttaagaccagactgggcaacacggagaaaccccgtctctacaaaaaaattcaaaaataagccgggcgtggtggtgcacgcctgtgttcccagctactctgaaggctgaggtgggagg

SEQ ID NO: 838233 - DNA, 79 bp, Artificial Sequence
  ENSG00000271122_24 (sequence is synthesized)
accataccgaaagaataaaaagtaaaaataaaattgtaatgaacattcaagaaattgaaatatacgggtacaaagatga

SEQ ID NO: 838234 - DNA, 120 bp, Artificial Sequence
  ENSG00000271122_25 (sequence is synthesized)
tgaacattcaagaaattgaaatatacgggtacaaagatgatatagtatcagaaaaaatgattttttttaaattttacagccacttgaattaagtacctaaaaatgcttttgatgctgttg

SEQ ID NO: 838235 - DNA, 120 bp, Artificial Sequence
  ENSG00000271122_26 (sequence is synthesized)
agcttggctatgataacaacagtatgtaaatattccacttttgttaaaatatgtataaacaggtatgtgtacagagcagtgtatgaaagggtggtccccagaatattgatagtgtttgac

SEQ ID NO: 838236 - DNA, 120 bp, Artificial Sequence
  ENSG00000271122_27 (sequence is synthesized)
gtggaatttgggctaggaaaaataattaccaatgaggagatacaagatagcagcagttagggagaggccgtccatgcagctgcctatttaaatcactgtccatgttaacagataagaact

SEQ ID NO: 838237 - DNA, 120 bp, Artificial Sequence
  ENSG00000271122_28 (sequence is synthesized)
tcactgtccatgttaacagataagaactggaaatgtcaaagaacaattgcccagctcagttaccatctgctactaaagatagccccagctgggtgcgatggctcacacctgtaatcccaa

SEQ ID NO: 838238 - DNA, 120 bp, Artificial Sequence
  ENSG00000271122_29 (sequence is synthesized)
tgagaactctcaagagtaccatggtaatataatatggtaatagataataaaagagtcatgatcattaataataaatataatacttctacttcaactgaggaatggaaaactaaacatcat

SEQ ID NO: 838239 - DNA, 66 bp, Artificial Sequence
  ENSG00000271122_30 (sequence is synthesized)
tacttctacttcaactgaggaatggaaaactaaacatcatatgttctcatatgtcctcagggaaag

SEQ ID NO: 838240 - DNA, 120 bp, Artificial Sequence
  ENSG00000271122_31 (sequence is synthesized)
gctcgggtgatgggtgcaccaaaatcttaaaaatcgccaaagaacttatgtaactaaataccacctgttccccaaaaaactatggaaattaaaaattaaaaaataagtataatttctgct

SEQ ID NO: 838241 - DNA, 120 bp, Artificial Sequence
  ENSG00000271122_32 (sequence is synthesized)
ataatttctgctttagcgatattaactattcagtacacaataagtgagtttagcaattcagtgatttctgactgttgggtagctctctttgttaacaaataaaatataaatttgaagaaa

SEQ ID NO: 838242 - DNA, 86 bp, Artificial Sequence
  ENSG00000279714_0 (sequence is synthesized)
aaattttaaaaaaatttatctaaccccaggagaggcagtcactccccagccaggaaggtttctggatgccaaaacatcataagaca

SEQ ID NO: 838243 - DNA, 120 bp, Artificial Sequence
  ENSG00000279714_1 (sequence is synthesized)
aagaattggctaaccccaggagaggcagtcactccccagccaggaaggtttctggatgccaaaacatcataagacacagaaaataaaaaatatagggctgggcgcagtggctcatgccta

SEQ ID NO: 838244 - DNA, 120 bp, Artificial Sequence
  ENSG00000279714_2 (sequence is synthesized)
aagaaaaaatataaactatacacatcacaaattgcccccaaaacaaccaacaacaaacgttgatcatctcacagtttctgtgggacaggaacctgggtgcagattgcagggtcctccagc

SEQ ID NO: 838245 - DNA, 120 bp, Artificial Sequence
  ENSG00000279714_3 (sequence is synthesized)
ccagggtgtctcccagggcagcaatcatgaggttgcctgggaccacagccccctcaaaatccatctgagcaggattcactgtcaggctcactcgagtggcaggactgagttgttccaggg

SEQ ID NO: 838246 - DNA, 120 bp, Artificial Sequence
  ENSG00000279714_4 (sequence is synthesized)
cttttggcctaagggcttcggttccctgccatctgagcctttccacaaagcagctcacactatacagctggctttctcaaagggagcgagtgggagcaagggagacggcaccagcaagac

SEQ ID NO: 838247 - DNA, 120 bp, Artificial Sequence
  ENSG00000279714_5 (sequence is synthesized)
agggagcgagtgggagcaagggagacggcaccagcaagacagagtcacagtctctttttattttaattaatttttttaatttttttttttttagacagtctccctctgttgcccaggctg

SEQ ID NO: 838248 - DNA, 120 bp, Artificial Sequence
  ENSG00000279714_6 (sequence is synthesized)
attacaggcgtgagccaccacgaccagcctattaattttttttttaatagtggccaaatatatataacacaaaatttattgttttaaccattttaaagtgtaccatgaaaatgtacacca

SEQ ID NO: 838249 - DNA, 120 bp, Artificial Sequence
  ENSG00000279714_7 (sequence is synthesized)
atgaaaatgtacaccattgtacatacacattcacagtggcggcactgggcatattcagaatgttgcacaatcataatttctatgcatttccagaacttcatcatgatcccaaaaagaaac

SEQ ID NO: 838250 - DNA, 120 bp, Artificial Sequence
  ENSG00000279714_8 (sequence is synthesized)
tctgtacccattaaacaatacctccccattcccccttctcctcagtccctgctggccactattctactttctgtctccatgaatttgactactccaagtatctcatatgagtggaaccct

SEQ ID NO: 838251 - DNA, 120 bp, Artificial Sequence
  ENSG00000279714_9 (sequence is synthesized)
gagtggaacccttcaatatttgtctctttgactggcttatttagcttcacataaggtcctcagggtttgtccatattgtagcatatgtaagaatttacttcttttttttttttttttttt

SEQ ID NO: 838252 - DNA, 120 bp, Artificial Sequence
  ENSG00000279714_10 (sequence is synthesized)
tttttatttgacagggtgttgctctgtctgtcacccagactgaagtgcggcagtgcgatctctgctcattgcagcctggacctcctgggctccagtcatcctcccacctcagcctcctga

SEQ ID NO: 838253 - DNA, 120 bp, Artificial Sequence
  ENSG00000279714_11 (sequence is synthesized)
atcctcccacctcagcctccagagtagccaggactacaggcatgtgccacctcgcccagctaatttttgtagagagggggtttcactgtgttggctaggctggtctccaactcgtgacct

SEQ ID NO: 838254 - DNA, 61 bp, Artificial Sequence
  ENSG00000279714_12 (sequence is synthesized)
tttcactgtgttggctaggctggtctccaactcgtgacctcaagcgatccatccacgtcag

SEQ ID NO: 838255 - DNA, 120 bp, Artificial Sequence
  ENSG00000249159_0 (sequence is synthesized)
ggtcttgggtttttcatcggggagtgggagtggactgaaggcttggccgctccgcctcactgagccggctcagccagcgcagctgttcctggaacgccagtcccttaggatgggagagag

SEQ ID NO: 838256 - DNA, 120 bp, Artificial Sequence
  ENSG00000249159_1 (sequence is synthesized)
aaaagtctcttctgtctaacaaatggagctccctgattcaactgaggactgcagtcagaggccaggcattgtcttggaaggccacactgcagaggccctgggtcagatggtgcaagttca

SEQ ID NO: 838257 - DNA, 120 bp, Artificial Sequence
  ENSG00000249159_2 (sequence is synthesized)
gactgtggtgctagacactgaagtccagttcattatttctgtctttaggctacatcctggtgggaggcaggacactgaagtacttagaacccctcagaatggccagatcctgctcatgct

SEQ ID NO: 838258 - DNA, 120 bp, Artificial Sequence
  ENSG00000249159_3 (sequence is synthesized)
gcagttcagggactaggaagtgggaactctagagatgacagacattctgctgggtggtttttaaagtttcttccagagtcatctgcctcattaacaacaatttttgtggaagaagtctgt

SEQ ID NO: 838259 - DNA, 120 bp, Artificial Sequence
  ENSG00000249159_4 (sequence is synthesized)
ctttgattttatgaactcacgtgactccttggtctgttacgaatgcacaatgctccagtccttcaataagcccattacatactttcaccatgtcatctataggtgctttttctccagtgt

SEQ ID NO: 838260 - DNA, 120 bp, Artificial Sequence
  ENSG00000249150_0 (sequence is synthesized)
gctctaggacagagggtaggacagtgcctgctggacagggttaaggtttgtgccactgtgtgtctttcttgcatccatagctcttgcctgtccctcaagagcagaaaaattggaaactac

SEQ ID NO: 838261 - DNA, 120 bp, Artificial Sequence
  ENSG00000249150_1 (sequence is synthesized)
atttcccaggcttccatgacagcagggctctagctagatttcatcagtgtcaagcagtcatgtacaatttggagggatgagaaaaagaagaagccatatttctccagcagcagcagattc

SEQ ID NO: 838262 - DNA, 120 bp, Artificial Sequence
  ENSG00000249150_2 (sequence is synthesized)
tggcaggatgctaaagatgaagtgagtaagtagtaggaaacaagaaactgctgacagcgtctgatgataccatcctgcatgtttccaggcctcatacagtggaatctgctttcagtttac

SEQ ID NO: 838263 - DNA, 120 bp, Artificial Sequence
  ENSG00000249150_3 (sequence is synthesized)
actctacaagtcactctgctgctaaagaaaagaaaaggaagaaagaaataccagagactgagtaatttacttttttaaaaaagaggtttaattagctcacggctctgcaaacaatacaga

SEQ ID NO: 838264 - DNA, 120 bp, Artificial Sequence
  ENSG00000249150_4 (sequence is synthesized)
aaacatgatgctggaatctgcttggcttctggggaagggtaggtagggtggtgggatggtagtgtgctaggagaagccttagtgaaggctaataggaatggtctttgcttttcccaaatg

SEQ ID NO: 838265 - DNA, 120 bp, Artificial Sequence
  ENSG00000249150_5 (sequence is synthesized)
actgatccaggggttttgccattctcaggtggcgtcatgttaagggacaaaaatcaaatattattttcttccactgtcatcttcctcttggggcattatttttcctggcctcactttaaa

SEQ ID NO: 838266 - DNA, 120 bp, Artificial Sequence
  ENSG00000249150_6 (sequence is synthesized)
tcacttgttcattagattgagccatttagagatgttttaaaaatttttagccattttatatcaaaacatgccaaaatatcaatacagggcatgtctggatctagcatttggtaacacatc

SEQ ID NO: 838267 - DNA, 120 bp, Artificial Sequence
  ENSG00000249150_7 (sequence is synthesized)
atttttaacatttttattacttagtaagaggtaaagatttggttttgctcattagtcatcttttaaaaaatgttccatatagttatattgattttttttatgagaaataactctttcaac

SEQ ID NO: 838268 - DNA, 120 bp, Artificial Sequence
  ENSG00000249150_8 (sequence is synthesized)
caacgttccttaatggggaatattttaggaaattccatgccatagcatcatataaattgtttgtaaaattgcaccatttcaaggtttgctctaaaaggaagaaaaacgcagtagtaaagg

SEQ ID NO: 838269 - DNA, 120 bp, Artificial Sequence
  ENSG00000249150_9 (sequence is synthesized)
ttcattaaaatcagctttttacctcattatgaagtttgcctttttccaaaatacggtgagatctattatatacctaataaatgttcagagctgagctaaaggccctgaagttaacggttc

SEQ ID NO: 838270 - DNA, 120 bp, Artificial Sequence
  ENSG00000249150_10 (sequence is synthesized)
agaaaagcctgcaaagatccttaatatgtatctcccttccatctaccttcttctaatcattcactgctcaaaaactatttcattaataattactatgagccaggcctaagagttataagt

SEQ ID NO: 838271 - DNA, 120 bp, Artificial Sequence
  ENSG00000249150_11 (sequence is synthesized)
acatcttccaaaaacatttggatggtgattctcaaaatcatatatctgagctctatctctgccttaatttctatcaagaaaacaaaaacaaacaaacaaacaaaaagcaggctgaaaaga

SEQ ID NO: 838272 - DNA, 120 bp, Artificial Sequence
  ENSG00000249150_12 (sequence is synthesized)
caaacaaaaagcaggctgaaaagagaaggcctgatttagccatatttattcacacattctttcacagctatgttgttgttgttgtttggtttggttttttttgagacaggatctcactct

SEQ ID NO: 838273 - DNA, 120 bp, Artificial Sequence
  ENSG00000249150_13 (sequence is synthesized)
cagaaacatatagctcattataaccccgaactcctgggttcaagcaatcctcccactccagtcctagtacctgagactacaggcaagtgccactacgtccaaatagtttattttattttt

SEQ ID NO: 838274 - DNA, 63 bp, Artificial Sequence
  ENSG00000249150_14 (sequence is synthesized)
attacaggtgtgagccactgcacccggctcacaatcatgattttgattgacttcttatattcc

SEQ ID NO: 838275 - DNA, 79 bp, Artificial Sequence
  ENSG00000249150_15 (sequence is synthesized)
aactttttgtatttttagcagagacggtgtttcaccatgttagccacgatggtcttgatcgcctgacctcatgatctgc

SEQ ID NO: 838276 - DNA, 62 bp, Artificial Sequence
  ENSG00000249150_16 (sequence is synthesized)
taactttttgtatttttagcagagacggtgtttcaccatgttagccacgatggtcttgatcg

SEQ ID NO: 838277 - DNA, 120 bp, Artificial Sequence
  ENSG00000249150_17 (sequence is synthesized)
aaccttgttaagtataatgtatttttctccttcaaatattggtttatattttgagtgttgcatgcatagtgtttgcttttatcttaagcaatttttcttttgccgaagaagtagatcagc

SEQ ID NO: 838278 - DNA, 120 bp, Artificial Sequence
  ENSG00000249153_0 (sequence is synthesized)
agaaaacaaatttgagcagaaaacggaaatgactttttttttcgttttctgtgaatcagctgttgcgaattttaaaaatcatttaaaattatttaaacaattgatttttacacgtgggga

SEQ ID NO: 838279 - DNA, 120 bp, Artificial Sequence
  ENSG00000249153_1 (sequence is synthesized)
gtatttgttaattaatgtcatatgatccatgatttcctatgcaccagaatatagtattattcagatattttattttggtttctgtattttcataatttatgtcagttctgaaatgcttaa

SEQ ID NO: 838280 - DNA, 120 bp, Artificial Sequence
  ENSG00000249153_2 (sequence is synthesized)
accaaataagacaaatcacaatattatataattatatacatgggtttattattatcacagtagtaagattaaagtatacagcacagtaaaatgattatcatgacttctataatccttagg

SEQ ID NO: 838281 - DNA, 120 bp, Artificial Sequence
  ENSG00000249153_3 (sequence is synthesized)
cataacaagcctttttatcatttttaagcataataaggcctttaaactctatttatttatacacatttgcaggtgtgtgtaaataaataatttcctacagaaaaacaatgtaatccttga

SEQ ID NO: 838282 - DNA, 120 bp, Artificial Sequence
  ENSG00000249153_4 (sequence is synthesized)
ggtaaagatttcagatgcaattgttgcactctagatgtttccctttacacctatttcaaaattgtattggtcagctattactgtgaagcaaacaaacaaaaatctcagtgccattcaaca

SEQ ID NO: 838283 - DNA, 120 bp, Artificial Sequence
  ENSG00000249152_0 (sequence is synthesized)
ggaacatctcaccaattttaaatcagtttttcaagtggtacctgagattcagcacttctaaaaagctccaaggtgatgaaggtgctgctagttggaggccatactttgagttgccagatg

SEQ ID NO: 838284 - DNA, 120 bp, Artificial Sequence
  ENSG00000249152_1 (sequence is synthesized)
ctaaaaattcaacagatggggtatgtaagcagatagtgtagcatattgaaaacaactctcagtttgaatcagaagcctgggtctgtgatattatgacactaactagcttaatattttgtg

SEQ ID NO: 838285 - DNA, 120 bp, Artificial Sequence
  ENSG00000249152_2 (sequence is synthesized)
atatatccatttaaatatcatactttcaatttaaattatgggtttcaactttgccaggcaaatataatcaacaatatattcaatagtatgccacagctaaagacacaaatgaaaacaatg

SEQ ID NO: 838286 - DNA, 120 bp, Artificial Sequence
  ENSG00000249152_3 (sequence is synthesized)
atctcagacttttgatccaggtgccaagttagaaaaagaagttaaaacagtgtagtttatttctgttcaatgtcctgtataggtggaaactaatttcagggttaatttttggttaaacaa

SEQ ID NO: 838287 - DNA, 120 bp, Artificial Sequence
  ENSG00000249152_4 (sequence is synthesized)
ctagcttggaaatttataattatttgggattgaggaccaaacaaggtgaggcacgataaagaaattagaaggggatcgctatgaaaatcaagatgaataaaacgaagggagtgtttacgg

SEQ ID NO: 838288 - DNA, 120 bp, Artificial Sequence
  ENSG00000130600_0 (sequence is synthesized)
agttagaaaaagcccgggctaggaccgaggagcagggtgagggagggggtgggatgggtggggggtaacgggggaaactggggaagtggggaaccgaggggcaaccaggggaagatgggg

SEQ ID NO: 838289 - DNA, 120 bp, Artificial Sequence
  ENSG00000130600_1 (sequence is synthesized)
tgctggaggagagcttgtgggagccaaggagcaccttggacatctggagtctggcaggagtgatgacgggtggaggggctagctcgaggcagggctggtggggcctgaggccagtgagga

SEQ ID NO: 838290 - DNA, 120 bp, Artificial Sequence
  ENSG00000130600_2 (sequence is synthesized)
gtgtggagtaggcgcccaggcatcgtgcagacagggcgacatcagctggggacgatgggcctgagctagggctggaaagaagggggagccaggcattcatcccggtcacttttggttaca

SEQ ID NO: 838291 - DNA, 120 bp, Artificial Sequence
  ENSG00000130600_3 (sequence is synthesized)
ggacgtggcagctggttggacgaggggagctggtgggcagggtttgatcccagggcctgggcaacggaggtgtagctggcagcagcgggcaggtgaggaccccatctgccgggcaggtga

SEQ ID NO: 838292 - DNA, 120 bp, Artificial Sequence
  ENSG00000130600_4 (sequence is synthesized)
gtcccttccctccccaggcctcgcttccccagccttctgaaagaaggaggtttaggggatcgagggctggcggggagaagcagacaccctcccagcagaggggcaggatgggggcaggag

SEQ ID NO: 838293 - DNA, 120 bp, Artificial Sequence
  ENSG00000130600_5 (sequence is synthesized)
agttagcaaaggtgacatcttctcggggggagccgagactgcgcaaggctggggggttatgggcccgttccaggcagaaagagcaagagggcagggagggagcacaggggtggccagcgt

SEQ ID NO: 838294 - DNA, 120 bp, Artificial Sequence
  ENSG00000130600_6 (sequence is synthesized)
agggtccagcacgtggggtggtaccccaggcctgggtcagacagggacatggcaggggacacaggacagaggggtccccagctgccacctcacccaccgcaattcatttagtagcaggca

SEQ ID NO: 838295 - DNA, 120 bp, Artificial Sequence
  ENSG00000130600_7 (sequence is synthesized)
caggggcagctccggcacggctttctcaggcctatgccggagcctcgagggctggagagcgggaagacaggcagtgctcggggagttgcagcaggacgtcaccaggagggcgaagcggcc

SEQ ID NO: 838296 - DNA, 120 bp, Artificial Sequence
  ENSG00000130600_8 (sequence is synthesized)
acgggaggggggccccgggacattgcgcagcaaggaggctgcaggggctcggcctgcgggcgccggtcccacgaggcactgcggcccagggtctggtgcggagagggcccacagtggact

SEQ ID NO: 838297 - DNA, 120 bp, Artificial Sequence
  ENSG00000130600_9 (sequence is synthesized)
gagtcaagggcatggggcgagaccagactaggcgaggcgggcggggcggagtgaatgagctctcaggagggaggatggtgcaggcaggggtgaggagcgcagcgggcggcgagcgggagg

SEQ ID NO: 838298 - DNA, 120 bp, Artificial Sequence
  ENSG00000130600_10 (sequence is synthesized)
cactggcctccagagcccgtggccaaggcgggcctcgcgggcggcgacggagccgggatcggtgcctcagcgttcgggctggagacgaggccaggtctccagctggggtggacgtgccca

SEQ ID NO: 838299 - DNA, 120 bp, Artificial Sequence
  ENSG00000130600_11 (sequence is synthesized)
ccagctgccgaaggccaagacgccaggtccggtggacgtgacaagcaggacatgacatggtccggtgtgacggcgaggacagaggaggcgcgtccggccttcctgaacaccttaggctgg

SEQ ID NO: 838300 - DNA, 120 bp, Artificial Sequence
  ENSG00000130600_12 (sequence is synthesized)
tggggctgcggcaagaagcgggtctgtttctttacttcctccacggagtcggcacactatggctgccctctgggctcccagaacccacaacatgaaagaaatggtgctacccagctcaag

SEQ ID NO: 838301 - DNA, 120 bp, Artificial Sequence
  ENSG00000130600_13 (sequence is synthesized)
cctgggcctttgaatccggacacaaaaccctctagcttggaaatgaatatgctgcactttacaaccactgcactacctgactcaggaatcggctctggaaggtgaagctagaggaaccag

SEQ ID NO: 838302 - DNA, 120 bp, Artificial Sequence
  ENSG00000130600_14 (sequence is synthesized)
acctcatcagcccaacatcaaagacaccatcggaacagcagcgcccgcagcacccaccccgcaccggcgactccatcttcatggccaccccctgcggcggacggttgaccaccagccacc

SEQ ID NO: 838303 - DNA, 120 bp, Artificial Sequence
  ENSG00000130600_15 (sequence is synthesized)
acatcatcccagagctgagctcctccagcgggatgacgccgtccccaccacctccctcttcttctttttcatccttctgtctctttgtttctgagctttcctgtctttccttttttctga

SEQ ID NO: 838304 - DNA, 120 bp, Artificial Sequence
  ENSG00000130600_16 (sequence is synthesized)
gagattcaaagcctccacgactctgtttcccccgtcccttctgaatttaatttgcactaagtcatttgcactggttggagttgtggagacggccttgagtctcagtacgagtgtgcgtga

SEQ ID NO: 838305 - DNA, 120 bp, Artificial Sequence
  ENSG00000130600_17 (sequence is synthesized)
gtgtgagccaccttggcaagtgcctgtgcagggcccggccgccctccatctgggccgggtgactgggcgccggctgtgtgcccgaggcctcaccctgccctcgcctagtctggaagctcc

SEQ ID NO: 838306 - DNA, 120 bp, Artificial Sequence
  ENSG00000130600_18 (sequence is synthesized)
gaccgacatcacggagcagccttcaagcattccattacgccccatctcgctctgtgcccctccccaccagggcttcagcaggagccctggactcatcatcaataaacactgttacagcaa

SEQ ID NO: 838307 - DNA, 120 bp, Artificial Sequence
  ENSG00000130600_19 (sequence is synthesized)
aacaccttaggctggtggggctgcggcaagaagcgggtctgtttctttacttcctccacggagtcggcacactatggctgccctctgggctcccagaacccacaacatgaaagcttggaa

SEQ ID NO: 838308 - DNA, 120 bp, Artificial Sequence
  ENSG00000130600_20 (sequence is synthesized)
catcagaggaccatggccccgtatcacctgggtcaggcactgaagctgggacaggagagcagagacttccaaaatgagggatccctgtgttctgaggtgatcatgactgggacccaagga

SEQ ID NO: 838309 - DNA, 120 bp, Artificial Sequence
  ENSG00000130600_21 (sequence is synthesized)
ctcaagcgcatgctccagagggaatcgtttcccacaaggcctttggcaggaacagggatcctgggagcctgccaagcagagcgcacagtgttcctggagtctcgctgcccagatgccacg

SEQ ID NO: 838310 - DNA, 120 bp, Artificial Sequence
  ENSG00000236648_0 (sequence is synthesized)
gaggcccatgcactaaagaccacacgctccattgaacatttatggctgcaaatggctcctccgtgcaggtgaggacatggaagcacagggaggttatgccactcgcccaaagacaactaa

SEQ ID NO: 838311 - DNA, 120 bp, Artificial Sequence
  ENSG00000236648_1 (sequence is synthesized)
tcagtgacagctgagacttggactgcagaacctacactttataactattttacagttctgggcgtcacggaatcttgcatgaagagcccctaacctggcccgggtggaggtcagggaggt

SEQ ID NO: 838312 - DNA, 120 bp, Artificial Sequence
  ENSG00000236648_2 (sequence is synthesized)
gtccctcctgcctccaagagagtcaccagcagcttcctcctccacatctagagatattattccccccatttcatggaggaggaaactgacgatcagagcagccaggaaacaggatggcgt

SEQ ID NO: 838313 - DNA, 120 bp, Artificial Sequence
  ENSG00000236648_3 (sequence is synthesized)
tgtctgctgagggacggtgtgttccctggagaggagatccagcttgccattgtgggtttcttacagcaaaaatcctgtgtgtacacatatgctgaacaaggcgcacacagtcttcatact

SEQ ID NO: 838314 - DNA, 120 bp, Artificial Sequence
  ENSG00000236648_4 (sequence is synthesized)
tctttccccaaatccactgttgtacctcactctggaaaccaaagaatacaaatggagatgaggctaatttttgcccctcaaattggcaaaggtgaataaaaccatgtttcttgggctgtg

SEQ ID NO: 838315 - DNA, 120 bp, Artificial Sequence
  ENSG00000236648_5 (sequence is synthesized)
tcactgtggctgaagaggtgggagacactgattggtctaagccagtcaagcactctcaaggccaaagtgcatgggcaagaaatttaggacaaggggaggaagaaagaaaagaaaagagaa

SEQ ID NO: 838316 - DNA, 120 bp, Artificial Sequence
  ENSG00000236648_6 (sequence is synthesized)
agcaggcatgtccctcctgcctccaagagagtcaccagcagcttcctcctccacatctgttctctctctctctctggccattcactgtgggggaagtcagttccatgccctgagtccatt

SEQ ID NO: 838317 - DNA, 120 bp, Artificial Sequence
  ENSG00000236648_7 (sequence is synthesized)
caggcagcttgtgaagaggcccacatggccaatagccagtgaggaactgaggcctgcagtgaccacttggatgagcttggaagcacgtcctccagccccagtcaagtcttgaggtgagac

SEQ ID NO: 838318 - DNA, 120 bp, Artificial Sequence
  ENSG00000236648_8 (sequence is synthesized)
cacagtcctggccaacaggtgactacaacatcacgggaaacccaaagccattcagctaagccactctcagattgctgatccccagaagctgcatgagataataaatgtttgttgttttaa

SEQ ID NO: 838319 - DNA, 120 bp, Artificial Sequence
  ENSG00000236643_0 (sequence is synthesized)
aagaaagaggagaactgagactaagaggtggggaccgggacctgccgggcagaagccgggaggaggcaggtgtccggggccccggggcgggctggagccctcggccagggaaagccgttg

SEQ ID NO: 838320 - DNA, 120 bp, Artificial Sequence
  ENSG00000236643_1 (sequence is synthesized)
cctggcggagaggggagctgagcaggggcggagaccggccagagcgcgcggggcgttgaggaagttccctaagagtcctcgtaaccccccaccccaacaatgagtctttgcgaggaggtg

SEQ ID NO: 838321 - DNA, 120 bp, Artificial Sequence
  ENSG00000236643_2 (sequence is synthesized)
gtgagcacgtgcaacgaagcccagccctgtgggcggggccctggaggcggggcttgaaggtactcacgtgggcctctccctgccgctgcgggacaaattggaccggagattaaaggaccg

SEQ ID NO: 838322 - DNA, 120 bp, Artificial Sequence
  ENSG00000236643_3 (sequence is synthesized)
gagtttaactcgagcactgatgaagtccaccagaagtgatggggattccagctccattctgtcacacaccagaaccttaatccttggctccttcaagctggaacgcggctgacttcacct

SEQ ID NO: 838323 - DNA, 120 bp, Artificial Sequence
  ENSG00000236643_4 (sequence is synthesized)
gacccactcccaaactcctattcatctttcaagatcctgttcaaatgtttcttcagtggcatcttccttaataccttccaccgagggacaactagatcccctctgctaggtagcagtgtt

SEQ ID NO: 838324 - DNA, 120 bp, Artificial Sequence
  ENSG00000255145_0 (sequence is synthesized)
ccgcccccgccccgcagggcccccaggccgggcgctgggggcgcacaggcatacagattctctctcctcaccacgcggctgctgctggaggatggaggaggggtggtgtcagcaattcaa

SEQ ID NO: 838325 - DNA, 120 bp, Artificial Sequence
  ENSG00000255145_1 (sequence is synthesized)
gactgtctttcctaccctcttcagtgcccttccttgataagctgtttaaaccagaaccgactgtttctggaaaaggtaaacatctattctccaaagggcagtgactttctacctgtgaaa

SEQ ID NO: 838326 - DNA, 120 bp, Artificial Sequence
  ENSG00000255145_2 (sequence is synthesized)
ataaaaagtaaacttcagaagaaaattctgaaagaggaatttagagatgttccaaataaaggcaatatagtttcactggaactgaaatgttgccttccaattctactacagaaggcagag

SEQ ID NO: 838327 - DNA, 120 bp, Artificial Sequence
  ENSG00000255145_3 (sequence is synthesized)
tggcacatgtggcacctggtcaggatggactcactaaaggatttaacccagacttctgatcaacaaatattgctgctacattaactgattcgcaacaaagaaagaaaatatcatccagtt

SEQ ID NO: 838328 - DNA, 120 bp, Artificial Sequence
  ENSG00000255145_4 (sequence is synthesized)
gattttattatttaaatatgggctcaaatcttaaatctgacaaactaataaataaatatgtctgaaaagtaaatagtaaatggtgaactggtatggctgaggcatttgtactgaacccat

SEQ ID NO: 838329 - DNA, 120 bp, Artificial Sequence
  ENSG00000255145_5 (sequence is synthesized)
gctgcttcctggagatcactgcattcttttctgtgctcagtaatctacttaaactatgtcagagattcgcctgagacttactttcctgtcctttctggctcatattatttctttatttag

SEQ ID NO: 838330 - DNA, 120 bp, Artificial Sequence
  ENSG00000255145_6 (sequence is synthesized)
tgtgtttcttgcacattatggtataatttatctgtgtctagagatctgaagtcaggcaaagtagttaagggcactctttcttcttcctcatgtatcttgagacacagttctctgctcttg

SEQ ID NO: 838331 - DNA, 120 bp, Artificial Sequence
  ENSG00000255145_7 (sequence is synthesized)
tggtttgtctgacccttttgagttcctgttatgcttccatttgcaccagaagacaatggaaatcaagtgaaattaaatataaaatgtcagaactagaaacgctattagatcaagtttaga

SEQ ID NO: 838332 - DNA, 120 bp, Artificial Sequence
  ENSG00000255145_8 (sequence is synthesized)
taaagaaatgagagggatttaatctgctttgttccttactaagacatgtacatggggctgtatccaagataaagctatgaaacacttgaaacactaactccccttgtactgagtctatgc

SEQ ID NO: 838333 - DNA, 120 bp, Artificial Sequence
  ENSG00000255145_9 (sequence is synthesized)
ttatgtgcaacagacttttgatagtaatttggctttctgtgtagatccacctatagataaaaaaaaatacttaccggaagatccaagacccagttataagttaatagatgaacttctaat

SEQ ID NO: 838334 - DNA, 120 bp, Artificial Sequence
  ENSG00000255145_10 (sequence is synthesized)
ttatacatcagagcttgttagtggatgtctatctgggggtcggagagagggagagattgatccactgtcattatgctgctacatcaggttcctgagatatagcccttggaacatggagat

SEQ ID NO: 838335 - DNA, 120 bp, Artificial Sequence
  ENSG00000255145_11 (sequence is synthesized)
cacaccagggtactgccccttcaaagcctctttgggcacctagcaacccttctccatggtgtactttgactccatcttgttgctagttgtccacaaatgcctgttctgtgagatggtcca

SEQ ID NO: 838336 - DNA, 120 bp, Artificial Sequence
  ENSG00000255145_12 (sequence is synthesized)
tctgtgagatggtccacctcttggtttgtaaggccagacagacataagcacagctacttctcaagaggctgttactgaccacaataggtcttttctgttttgttttgttttgttttgttt

SEQ ID NO: 838337 - DNA, 120 bp, Artificial Sequence
  ENSG00000255145_13 (sequence is synthesized)
tcttggtggaaggatcccagttagtgtccttcacagctgtgactggcatatggaagaaacctggaaaaaggacatgtctcttcgctgatgacatgccccaaagacttatttctaaagaac

SEQ ID NO: 838338 - DNA, 120 bp, Artificial Sequence
  ENSG00000255145_14 (sequence is synthesized)
cagttcctactgttgcattccttcctactgctaaagaaattccctaggttgtcctgggtcctgagattacatctttctcaagtaatgtgtaaaacagacaccctgactctttccgtatcc

SEQ ID NO: 838339 - DNA, 120 bp, Artificial Sequence
  ENSG00000255145_15 (sequence is synthesized)
gatggtgtaaagtttgaagatggagcaaatatatctgtggactcttttgcacattactttccccccctctattcagggtagaaatagggctggtggacggaagctaccaaaaaatatttt

SEQ ID NO: 838340 - DNA, 120 bp, Artificial Sequence
  ENSG00000255145_16 (sequence is synthesized)
aatcaatactaataaaaactttctaaaaatgagggtaacaaaaaagatgggagctgcttcctggagtggcactgagtggttcctgacatattgtagatttctcaataaattactaactct

SEQ ID NO: 838341 - DNA, 120 bp, Artificial Sequence
  ENSG00000255145_17 (sequence is synthesized)
tatatatcttacagttgtttcaaaaactttcagagtaagaaagtatcaaggttatgctggcctcaccaaagtgatttagaaaacattatatctttttctatactcaggaagagagtacat

SEQ ID NO: 838342 - DNA, 120 bp, Artificial Sequence
  ENSG00000255145_18 (sequence is synthesized)
cgactgtttctggaaaagctgacagctcaactgaagtcccagccacagccagcatcaactgcaaagacacctccagatgactgcaaccccagccatcaagtcattcccagccttcaagcc

SEQ ID NO: 838343 - DNA, 120 bp, Artificial Sequence
  ENSG00000255145_19 (sequence is synthesized)
ttcccagctgaggcccagacatcagagaaggtaaacaagccacctctgctgtgctctgttcacattcctgatccacagaaaccatgaggacaataagattgttgttttatgccactaagt

SEQ ID NO: 838344 - DNA, 120 bp, Artificial Sequence
  ENSG00000255145_20 (sequence is synthesized)
ttttagagtggtttgttacatagcaagaacaatagaaatggtatcatatttagtatgttcctcacaaattgtgagcaagtatcccaagatgggtgcagagcccaacttccttctagttca

SEQ ID NO: 838345 - DNA, 75 bp, Artificial Sequence
  ENSG00000255145_21 (sequence is synthesized)
atcccaagatgggtgcagagcccaacttccttctagttcatatgtaagtttcttgtcatcctgaggcattttttg

SEQ ID NO: 838346 - DNA, 120 bp, Artificial Sequence
  ENSG00000255145_22 (sequence is synthesized)
acagtgcctactacctagcagccattcatgttccaggaagtcatggcaattgagaaggcgtaggaggaaatgctctcaagctgggccagtggccaactgcagaacggagagtggccgagc

SEQ ID NO: 838347 - DNA, 120 bp, Artificial Sequence
  ENSG00000255145_23 (sequence is synthesized)
agggaaggtcatagaaggcacaggatggggaaggacactggagaccaggttcctgtaggcttccagagaccacctgcatttgttggttgatagcctcttcctcgaatcaccctgatcctc

SEQ ID NO: 838348 - DNA, 120 bp, Artificial Sequence
  ENSG00000255145_24 (sequence is synthesized)
tgcttctgtggccacattttcatctctccaaatctgagtcttctgcctgtctcctctagggacccttgagatgactttgggcccatccagatcatccaagataatctccccttctcaagt

SEQ ID NO: 838349 - DNA, 120 bp, Artificial Sequence
  ENSG00000255145_25 (sequence is synthesized)
ttcttaatcacttcggcaaggtcttttttgccacataaagtaatatttgcactgggttcaggaatcaggatgtgggcatctttgtggggggagtcactattccacctaccacacagagcc

SEQ ID NO: 838350 - DNA, 120 bp, Artificial Sequence
  ENSG00000255145_26 (sequence is synthesized)
ccttcaacaagtgagattagatgagaaaatgttggtgaagcactgagcccagagatagagcatagtaggtgtggatgctggtgatagtgaaggggtgaatggctgacaaagaccaggtga

SEQ ID NO: 838351 - DNA, 120 bp, Artificial Sequence
  ENSG00000255145_27 (sequence is synthesized)
ctaatttcacagctgccagaaatcagcctccagggacacacaaggagctttgccacacgctgaatcagataaggcctctgactttgttttgccccagaagcagacctcaagaagaggact

SEQ ID NO: 838352 - DNA, 120 bp, Artificial Sequence
  ENSG00000255145_28 (sequence is synthesized)
ccagtgcaagtagtttatttagaaggcaagcccacaaaaagtgggaaagcgagacaggcaaggcaaggcaaggaaaccaatggagaatgccatgaagctagttaccaccataggcaggtg

SEQ ID NO: 838353 - DNA, 120 bp, Artificial Sequence
  ENSG00000255145_29 (sequence is synthesized)
aaacagtgtggagctctgcacctcagagttaacctacctgagaggtgacagggctggggtatggatgcaccaattcccttcagtctgttgcaagttgttccagggagggggagagtggag

SEQ ID NO: 838354 - DNA, 90 bp, Artificial Sequence
  ENSG00000255145_30 (sequence is synthesized)
cagtctgttgcaagttgttccagggagggggagagtggagttaattcacctacacacccatctgcacacacatatataaagcaggctctg

SEQ ID NO: 838355 - DNA, 88 bp, Artificial Sequence
  ENSG00000255145_31 (sequence is synthesized)
ctcactcataagtgggagctgaacaatgataacacatggacatagggaggggaatatcacacactgaagcctgtcagggggtgggagg

SEQ ID NO: 838356 - DNA, 120 bp, Artificial Sequence
  ENSG00000255145_32 (sequence is synthesized)
cccagaacttaaagtaaaataaaataagtaatgatagaaaaaaaattaaaaagtaaagcaggctctgatggccagagaatgcctacctgcaaatatccataggtgctggcaactggaagt

SEQ ID NO: 838357 - DNA, 120 bp, Artificial Sequence
  ENSG00000255145_33 (sequence is synthesized)
ctggctgcgtgcactgaaatggcaaagataggggtgctgcggccaggtactggtggtgtctgctaccccaccttgagcctatagtcttcatttcttgtggacactatccacaggccaaga

SEQ ID NO: 838358 - DNA, 120 bp, Artificial Sequence
  ENSG00000255145_34 (sequence is synthesized)
taatgcagaaagatgagaaaatcaaggagtcagcgtctgcccaaagtgaaggtaagaggatggcttggaattcacagctggcaactgaagctgttgaaagacatcaccttaatgttgctc

SEQ ID NO: 838359 - DNA, 120 bp, Artificial Sequence
  ENSG00000255145_35 (sequence is synthesized)
tccagggcttgcagccctcttaggacaggtgctgtctgcagggcggccttgcggtgacagtggtcgccccgctgaatccccaatgctgtcttatattgccactttcctgggaggctgtca

SEQ ID NO: 838360 - DNA, 120 bp, Artificial Sequence
  ENSG00000255145_36 (sequence is synthesized)
tccatctctgatttagactaccccgaggtcttacggttaagctgttgagtaggttttgtcattctgtattattttcctttgtactttttgttcaggaaggttcctggctgtctttggtgt

SEQ ID NO: 838361 - DNA, 120 bp, Artificial Sequence
  ENSG00000273419_0 (sequence is synthesized)
gcaggggagcgggctggcacctgggcacaggtgtagacatggctgaaacgccggcctgaggaggtcaggtaccagtgctggatggcgggctgggggtcgtactccgtgacggccacgccg

SEQ ID NO: 838362 - DNA, 120 bp, Artificial Sequence
  ENSG00000273419_1 (sequence is synthesized)
ttcacagctgtcatcatgagcatgttgagcacctcgttggagagcttggtcctctcatcggtcctgattcggttcatggccttgaacccccgctcacagcaagaggtggagatgggcaca

SEQ ID NO: 838363 - DNA, 120 bp, Artificial Sequence
  ENSG00000273419_2 (sequence is synthesized)
cagaccaccacggccatgagcttgcttagcagggggaagcggcagtgctgggccagggcgtttttgcagagcatggagaacgggaggtgctgggcaatggttttcaggcccagccactcc

SEQ ID NO: 838364 - DNA, 120 bp, Artificial Sequence
  ENSG00000273419_3 (sequence is synthesized)
tccagcagagcttcctcactgtatcctgttgggagggagcactcgaaatacctggccaggttgagaatgtcatcattcccaaaactggcaagttcaatcccacttggccaggccatggtg

SEQ ID NO: 838365 - DNA, 120 bp, Artificial Sequence
  ENSG00000273419_4 (sequence is synthesized)
tcaaacacctccatgttcttcagctgtgggggtcggtctgcgtcaaacctctgctggaggtactcaatccccgtcaggactgtcctctccctatccgcctggaaccgctgttccgctacc

SEQ ID NO: 838366 - DNA, 120 bp, Artificial Sequence
  ENSG00000273419_5 (sequence is synthesized)
tccagtttgtccaagcagatgccgtggagccgcccatccttgaagctggcgttgaattcttcctctttgggccctgcctggtgacggaggctctccagtgccacgtaggcgcggcccagc

SEQ ID NO: 838367 - DNA, 120 bp, Artificial Sequence
  ENSG00000273419_6 (sequence is synthesized)
gtggcgttcacctctgtaatcagcacgatctccttctggcacacctcggacagaggcctgtagatgctcaggaagtccaacaggaagtggcagaacttgacaaagtggaagccgcgcatg

SEQ ID NO: 838368 - DNA, 120 bp, Artificial Sequence
  ENSG00000273419_7 (sequence is synthesized)
agcttcagcatccctttggcccggtgcccaatctggcccccagcctctgccaccctctggaggtgcctggccagggcgggccagctcacgagcagcgcgtgcagcgtgcgcctcctgctg

SEQ ID NO: 838369 - DNA, 120 bp, Artificial Sequence
  ENSG00000273419_8 (sequence is synthesized)
gccacccagcggaccgcattcagatccttcaggcggatgatctcctgctccagaggcgccgcaccttcctgcagctcgttcagcctcttgtttgaggactgataaaacttgaagacggtg

SEQ ID NO: 838370 - DNA, 120 bp, Artificial Sequence
  ENSG00000273419_9 (sequence is synthesized)
cggatgtgccggtcacacttcttcaccagatcgatgctcccgcaggcgtccaccacagccaggtgcagccggtgggccacgcagtggacaggcagcagctgcgggatgacctcctggaac

SEQ ID NO: 838371 - DNA, 120 bp, Artificial Sequence
  ENSG00000273419_10 (sequence is synthesized)
ttttccacaaggcctcctctgcagctcaacatggctgagccatccgtccccagccccaccacccagccaggcttccggaaggggatgtccagctcatccagggcagaaacgatggtctcg

SEQ ID NO: 838372 - DNA, 120 bp, Artificial Sequence
  ENSG00000273419_11 (sequence is synthesized)
aagtacccatctgctgtctcactgtagagaggggccagagtgatgtaggactctttcacctccatctgcttgaagtagcggatgtaaatccccacgcaggcctgctcggaggcgtcggtg

SEQ ID NO: 838373 - DNA, 120 bp, Artificial Sequence
  ENSG00000273419_12 (sequence is synthesized)
gagctgtccagcagcacgctcacacagggcgagttccgcacgtcctccaggatctccctcttcagggtctctgagatgtacttgatgaactgagtgcacgccgtgcgattgcggtacttg

SEQ ID NO: 838374 - DNA, 120 bp, Artificial Sequence
  ENSG00000273419_13 (sequence is synthesized)
cctaatatcacggtccccgtgctttggaggagctgcaggatcttctcaaagtcattcaggggccttgagtggtatgcaatggagtaggcggcattgaaaaagtgctccatgttggccatg

SEQ ID NO: 838375 - DNA, 120 bp, Artificial Sequence
  ENSG00000273419_14 (sequence is synthesized)
aggtcgctggagatctctggaacgagggcagtgtgaggggtgtcttccttgatttcaaccgtgttgacacagagcctgtgcgctttgctgacttcatggtattttaaagtctccacttta

SEQ ID NO: 838376 - DNA, 120 bp, Artificial Sequence
  ENSG00000273419_15 (sequence is synthesized)
aaaggccccgtgtaacctctgactaaccgagatgatttatcatggagattaggtctttctatgcaggctgagcagaagagtttggtctctttggggtcaattactaaccatgggaactgc

SEQ ID NO: 838377 - DNA, 120 bp, Artificial Sequence
  ENSG00000273419_16 (sequence is synthesized)
ccaaaccatgacctctgaatggaacggggcctgtatgtcctcttgattctcctaggtccatctccttcctcacaaatgctggaactgcagcaggaggcacgggcctccacgggagagcct

SEQ ID NO: 838378 - DNA, 120 bp, Artificial Sequence
  ENSG00000273419_17 (sequence is synthesized)
agtctgcagccgaggcctgtgtgtctgcctctctcactgccaccatcttcttgttccctttggagaaaattgaatcatgcttggttctgctacccagaactctgccatcttctatcagct

SEQ ID NO: 838379 - DNA, 120 bp, Artificial Sequence
  ENSG00000273419_18 (sequence is synthesized)
aagacacccccaaatttaataagtatcccttaagcaaggcagagaagatgaatgcaatccttctttctagagaaagtggcgtccacttaaaccctcacccattctcatctgtgaaagttc

SEQ ID NO: 838380 - DNA, 120 bp, Artificial Sequence
  ENSG00000273419_19 (sequence is synthesized)
atctggctcccccagagttgttgctaatccttgtgggttctttcaccagcgccccaaccaccctatccacacagctaccctgggatcatgtgacaccagataccaataagttcaattaac

SEQ ID NO: 838381 - DNA, 120 bp, Artificial Sequence
  ENSG00000273419_20 (sequence is synthesized)
ccccttggccacagagactgttggataagcaggtggctttcactctcgtgtgaggctccacaatagaataggttaaacacctgccaaggcttttacaagcctcagaaggaagtaggtaca

SEQ ID NO: 838382 - DNA, 120 bp, Artificial Sequence
  ENSG00000273419_21 (sequence is synthesized)
gaagtaagtgtagcaactacaagccaagaaattactgattgagataggcaagacaacgaattctcacaaaccaatagtgctgtcaccgagcactggagaaggagggagaagggatgagag

SEQ ID NO: 838383 - DNA, 120 bp, Artificial Sequence
  ENSG00000273419_22 (sequence is synthesized)
gctcacagatctctgggtcccctggctcctcgagaccagtgtccccacgtacctgctcccaccagctctgccacagcctccatcagtacttctgcttacaaaaggacctgttttttccct

SEQ ID NO: 838384 - DNA, 120 bp, Artificial Sequence
  ENSG00000273419_23 (sequence is synthesized)
gtttcccagactactctacactctgtgggcagggttagttgcttattcatcttgtctacccagggcctcctgccaggcttggtgcccaatcggcccccatcagatgagcacagctgagct

SEQ ID NO: 838385 - DNA, 120 bp, Artificial Sequence
  ENSG00000273419_24 (sequence is synthesized)
catgctgtttgactcatcatagccgcctgggccctggcacatgtccttcagaatgctgtaggtttacactcacctggaggacgacctttcccccactttggcccatttgggtccttgatc

SEQ ID NO: 838386 - DNA, 120 bp, Artificial Sequence
  ENSG00000273419_25 (sequence is synthesized)
cagggtgcagccctccgctccagtttggagatcaagtctggcttggcagcggcaggtcctgttgtaaggatgaagaatcatgctgatgtcactgctgtggccaaatcgagtagccccctc

SEQ ID NO: 838387 - DNA, 120 bp, Artificial Sequence
  ENSG00000273419_26 (sequence is synthesized)
aagctagacccagtccctgaagtacacagaggtgtctctgggttctgtccttataaagtctagtcggccaggggcaggctgagcgcaaacccagagtgccaaagaggcagtaaggggagg

SEQ ID NO: 838388 - DNA, 120 bp, Artificial Sequence
  ENSG00000273419_27 (sequence is synthesized)
ggcagccctcagctaggatagggcttcctcagatccatgggccagccatacacaccagagggggaagggtggaaacaggaagaaacatagggactaagcaggagagagaggcagggggaa

SEQ ID NO: 838389 - DNA, 120 bp, Artificial Sequence
  ENSG00000273419_28 (sequence is synthesized)
acagcagccatatgagaagtggaaggtgccacccacagctggcccacgcgtgtgcccctctgcccccacagctggcccacgcgtgtgcccctctgcccccacagctggcccacgcgtgtg

SEQ ID NO: 838390 - DNA, 120 bp, Artificial Sequence
  ENSG00000273419_29 (sequence is synthesized)
cccctctgcccccacagctggcccacgcgtgtgcccctctgcccccacagctggcccacgcgtgtgcccctctgcccccacagctggcccatgcgtgtgcccctctgcccccacagctgg

SEQ ID NO: 838391 - DNA, 120 bp, Artificial Sequence
  ENSG00000273419_30 (sequence is synthesized)
cccatgcgtgtgcccctctgcccccacagctggcctttgtgaaggtgaccaactacatgggtttttgaaaggggcacttggagggccccctgaaatacctaccacctgcaatggagcctg

SEQ ID NO: 838392 - DNA, 120 bp, Artificial Sequence
  ENSG00000273419_31 (sequence is synthesized)
aaatctgactaaaggagatttgtgtctttggattaagcactaacctttacttaaaataggaatattgttcaggggtatgcagataaaccatttcctctattgaaaataaaatccatcact

SEQ ID NO: 838393 - DNA, 120 bp, Artificial Sequence
  ENSG00000273419_32 (sequence is synthesized)
atctacatcatgcttttgtgtgtgtctatgtgaatgtgtgcataaactttctgtggagagccacacaagcaactgggcctgtgggtgctcctggggaggaagtgaaggacaaaggaaaag

SEQ ID NO: 838394 - DNA, 120 bp, Artificial Sequence
  ENSG00000273419_33 (sequence is synthesized)
ggagattggtttccactactcatctttggatcgcttgaatatacttatatatataatgatacatatatgtgtgtgtcaatatctacatatttactactaataaaaatataaataagtaaa

SEQ ID NO: 838395 - DNA, 120 bp, Artificial Sequence
  ENSG00000224541_0 (sequence is synthesized)
ctagctggaaggccttcccaggaatgcaagtctgaaccatctagagttctctcagccagaatgaaggctcagctcttggatgtttctaccataaaaatgagaaagcatttcctacctcct

SEQ ID NO: 838396 - DNA, 120 bp, Artificial Sequence
  ENSG00000224541_1 (sequence is synthesized)
gtggctggctagcagataagagaagaaccgtgtgctaactcctcatcaaagaccagaagtagatcctgaattgtattcattctcatctctttctacctcctccaagacagaaggacatga

SEQ ID NO: 838397 - DNA, 120 bp, Artificial Sequence
  ENSG00000224541_2 (sequence is synthesized)
ttaacttctttatctcaatgtcagccttcaatagctacaaaagtctaaactgtaaatagcgttgaagctttgcataataaaattcttttccccagtgatgggcagtttttcacatagtaa

SEQ ID NO: 838398 - DNA, 120 bp, Artificial Sequence
  ENSG00000273415_0 (sequence is synthesized)
ttcatatgtattatctctgtttaatattcacagtttgtctccatgaggtcatacagctgcttgaggttgctcggagagtaagaagcagaatgagaactagaacagaagctcactttggcc

SEQ ID NO: 838399 - DNA, 120 bp, Artificial Sequence
  ENSG00000273415_1 (sequence is synthesized)
tgaaggctcatgtgctgagcatcttcccttgtctgtctccacccctagcctggtgcccagcatgtagaagaccttcatcctagatgcaatgggattaaacttggagaaaatgggattaaa

SEQ ID NO: 838400 - DNA, 120 bp, Artificial Sequence
  ENSG00000273415_2 (sequence is synthesized)
cttggacaaacactacctatttggacttgtgatgatggctttcaaacttcttaaagcaatgaagtattttttccagaagaaaccttacacaagaagcccagcacactgagtcaagcatat

SEQ ID NO: 838401 - DNA, 120 bp, Artificial Sequence
  ENSG00000273415_3 (sequence is synthesized)
cacaggaggtcagggcacacagcttgaaaccggaaggcagaagagtgacagggaagggtcatggactctgaaattagagctatctgtgttttaatactagttccaataggcacatggtct

SEQ ID NO: 838402 - DNA, 120 bp, Artificial Sequence
  ENSG00000273415_4 (sequence is synthesized)
tggataaatggtttaaattatctgagtctcaatttctttctctgcaaaaagggatgattagtacatatgtaatagggtttttatagaaaattgtataacttgttaaacacacatgtacta

SEQ ID NO: 838403 - DNA, 120 bp, Artificial Sequence
  ENSG00000273415_5 (sequence is synthesized)
agtgcttggtgcccagtatgcactgaataaatgctagctccttgcctttcatctctatgacccttcccaaatctctcagccccatattgcttcatgtagtgtgtgtatatttgggaaaat

SEQ ID NO: 838404 - DNA, 120 bp, Artificial Sequence
  ENSG00000273415_6 (sequence is synthesized)
ttgtgtgcatatttacagatgggatcctactcttctattgacagactgtcttttcagatgtgccttactttcattgcattggtttttcaactgaaagtgaacataaaggttttaagcatg

SEQ ID NO: 838405 - DNA, 120 bp, Artificial Sequence
  ENSG00000273415_7 (sequence is synthesized)
agaggatggaatgcttcaccaggagacacaagaataatttccttgacctgggagttaagactgccacccagccaccttgtgctctccatgctgctgattcaacaggcaaataaggaagtt

SEQ ID NO: 838406 - DNA, 120 bp, Artificial Sequence
  ENSG00000273415_8 (sequence is synthesized)
atggtgtgggctacagtgattgatctgactaacaagagggaaattgctccaccatgggggtgagggagagtacatctggaatacagaagttcccttaggacacccttagtgttcccacac

SEQ ID NO: 838407 - DNA, 120 bp, Artificial Sequence
  ENSG00000273415_9 (sequence is synthesized)
attgcgattaaggccagtggaaaactacaataactcagttcaggcggaacaactcatggggcagaatcttcaaggaatgaagatttgagtccttctaccaggttttgcagagtgcctcca

SEQ ID NO: 838408 - DNA, 120 bp, Artificial Sequence
  ENSG00000273415_10 (sequence is synthesized)
gaaataaaagtgttacaaaagaatcacttcagaaaacctacacttagagagtccatttgaaaattgccctatttgaaatgaagtggagatcagtaataacaaggacttccccatataacc

SEQ ID NO: 838409 - DNA, 120 bp, Artificial Sequence
  ENSG00000273415_11 (sequence is synthesized)
caaggtcctactgggttagtgtgatcttctgcggaaggctgcagctgctgtcaggaggccctctgtctacactcctctctggagaagtgtcccttttaaactgaagcatagtgagaacaa

SEQ ID NO: 838410 - DNA, 120 bp, Artificial Sequence
  ENSG00000273415_12 (sequence is synthesized)
gtgtaaagcacaacacagacggaagattgcaccttagctcactgccccgtgcaccccggttacaccgtctaagaaaacactctggattcaatccttggaaaatatgtgctgagctaccac

SEQ ID NO: 838411 - DNA, 120 bp, Artificial Sequence
  ENSG00000273415_13 (sequence is synthesized)
ttctggaagagtctttcctggttaattacttgaaacctgttgcattgggaatttctcagaaagtctgccttgatgagctttactcaagagccgcaacttcacggatcggacaacagaaaa

SEQ ID NO: 838412 - DNA, 120 bp, Artificial Sequence
  ENSG00000273415_14 (sequence is synthesized)
gacttcggcagttaccaaatctgaagtactcattgtgcatgctagcaatctgggactaataaggttaaattgtctgagacctcaaggtggaagtgacagctcctgtgaatgatgcatgaa

SEQ ID NO: 838413 - DNA, 120 bp, Artificial Sequence
  ENSG00000273415_15 (sequence is synthesized)
gccgctgacattgcaacagatggcgctttggaagagattcctttctgaactgcctggccctcttatggaaatcctgtgaggggtgatctctggtgaccaggctcagcaggaagaggaatg

SEQ ID NO: 838414 - DNA, 120 bp, Artificial Sequence
  ENSG00000273415_16 (sequence is synthesized)
acctaaatgatgagaagccagctatgtaagaggagcatttgacacagaaggaaccataagtacaaatgtaatgagatgagaaatttctttggtatgttgaagacatcaggacaggtccct

SEQ ID NO: 838415 - DNA, 120 bp, Artificial Sequence
  ENSG00000278445_0 (sequence is synthesized)
ggtgctgactgccacaggagagcagaggcaaggcagccactgaatgttccagaatggagaggagggaaaacgttgtgtttaaaacttcttgtgggaaatggctacccggcacaggcacaa

SEQ ID NO: 838416 - DNA, 120 bp, Artificial Sequence
  ENSG00000278445_1 (sequence is synthesized)
cttcaaaagcaggatggtagaaatggaaacccgagggagagactccaaggttattgaggaaaagaatcacaagatgtttttctctgatcgtctctttattgtcctcgttcctggttgaat

SEQ ID NO: 838417 - DNA, 120 bp, Artificial Sequence
  ENSG00000278445_2 (sequence is synthesized)
atacggagtttgataaatgcaagaagtcaaagccaacatctgaagaaatttcagctgggatgctgatgcaatctctcttagacgaaatgcttgctttgcttctatttcatgctcctacca

SEQ ID NO: 838418 - DNA, 120 bp, Artificial Sequence
  ENSG00000278445_3 (sequence is synthesized)
agcaggtgaaattctaaggatttagataccattaccctagagatcccagaataaaattcgagtatgaaattacagatgatcgccactgggaggccccagtgatctgcaaaatgaactttt

SEQ ID NO: 838419 - DNA, 120 bp, Artificial Sequence
  ENSG00000278445_4 (sequence is synthesized)
ccttctggataaataagtgaaaataaaagaaatgatttaagcaagtgaattgaattataaaagatgatatgcaaatgcatcaaaagcggcaaggggtaaatacacaacaatgtaatgtga

SEQ ID NO: 838420 - DNA, 120 bp, Artificial Sequence
  ENSG00000273416_0 (sequence is synthesized)
caaagtggatccatccacggttctgggtcctggctgtgcgtccgatcgcctttgtcagctgggggaagactcagggtgacttgagccaggaggaccgcggagtggacagccggtaccgcg

SEQ ID NO: 838421 - DNA, 120 bp, Artificial Sequence
  ENSG00000273416_1 (sequence is synthesized)
gctgtgagcgttttcatcagggcagcagcagacgcgaaggagcgcgctggcgccctctggcggcgatcctagggtgcgtccgcgccgtgcctaccccccggcctccgggagcctcgagcc

SEQ ID NO: 838422 - DNA, 120 bp, Artificial Sequence
  ENSG00000273416_2 (sequence is synthesized)
ccagcgcgactgtgattctgccaattacagcgatcatcatagcgaaatgaaaatgctccgattatttgtttataaataaaaccgttcctcctggaaaatgtgccaggatgacattttgtg

SEQ ID NO: 838423 - DNA, 120 bp, Artificial Sequence
  ENSG00000224549_0 (sequence is synthesized)
ttggctggctatgcagtgaagctccatatgtcccacattcattcttcagaataacttgggcaagttctcatggtgaaagtagaggtgcaaaggatttcatctgaataccaaattactttt

SEQ ID NO: 838424 - DNA, 120 bp, Artificial Sequence
  ENSG00000224549_1 (sequence is synthesized)
tctagagtacagtcaggtatttcccacaatgagagttgtatgatgctttcctataattagactgggatgatggggatacatggagggaaggcacagaagtaaggcatggaggtaaatcat

SEQ ID NO: 838425 - DNA, 120 bp, Artificial Sequence
  ENSG00000224549_2 (sequence is synthesized)
cgtggaaaagctattttatcacagtatgccaagtgtacataacattgtagatgtaaaccatgattacctggatgaggtagcaattgcagattttcttactgtaaagttattctttttcct

SEQ ID NO: 838426 - DNA, 120 bp, Artificial Sequence
  ENSG00000264167_0 (sequence is synthesized)
gaagtgattgcaagttcagcagcatgaaactgctctttatccgtgcactgctgtcaggaacaaatgctgaatggagagtccggaggcagaggcctgcgattctccatgctggagagcccg

SEQ ID NO: 838427 - DNA, 120 bp, Artificial Sequence
  ENSG00000264167_1 (sequence is synthesized)
tagaagccaagagggagggagttctggaatggtctgcagcagctggaggtgaggcctgagggggctggggcggggcctgggaagaggggccagtgcacagagtattctgaaccgcagaaa

SEQ ID NO: 838428 - DNA, 120 bp, Artificial Sequence
  ENSG00000264167_2 (sequence is synthesized)
gtattctgttcactctgggagaaaaacaagagtgttgttcaaaacagctggacgccaggcccagttgccctcgcctggtttttactcttaaacaccttcgcatttcatggctgttccaaa

SEQ ID NO: 838429 - DNA, 120 bp, Artificial Sequence
  ENSG00000229807_0 (sequence is synthesized)
agatagccaattattaaaaacagtcaagacaattgcacctctaagcagtagtagcagttgccacaccaccttgaatcttgaagtattttcagcaacaggatgaccattagccacaaattt

SEQ ID NO: 838430 - DNA, 120 bp, Artificial Sequence
  ENSG00000229807_1 (sequence is synthesized)
agtgtcagcccttaaggtcggtattggtttgacccatattttcatgtagttctttttcttcacttgtctaatcttcccgtgtactgccagggcttgtcattagaggactttagggagacc

SEQ ID NO: 838431 - DNA, 120 bp, Artificial Sequence
  ENSG00000229807_2 (sequence is synthesized)
aagcaggctagaaagtagagacaggagatacctatgtctaatgcttcagtttatacttcctaggtttttttcattggggtttttgtaactcttttggtatcctaccggtgctttggtagc

SEQ ID NO: 838432 - DNA, 120 bp, Artificial Sequence
  ENSG00000229807_3 (sequence is synthesized)
tctggccaagctccagctaatctacttggatgggttgccagctatctggagaaaaagatcttcctcagaagaataggcttgttgttttacagtgttagtgatccattccctttgacgatc

SEQ ID NO: 838433 - DNA, 120 bp, Artificial Sequence
  ENSG00000229807_4 (sequence is synthesized)
cctaggtggagatggggcatgaggatcctccaggggaaaagctcactaccactgggcaacaaccctaggtcaggaggttctgtcaagatactttcctggtcccagataggaagataaagt

SEQ ID NO: 838434 - DNA, 120 bp, Artificial Sequence
  ENSG00000229807_5 (sequence is synthesized)
ctcaaaaacaaccaccacacgtcaagctcttcattgttcctatctgccaaatcattatacttcctacaagcagtgcagagagctgagtcttcagcaggtccaagaaatttgaacacactg

SEQ ID NO: 838435 - DNA, 120 bp, Artificial Sequence
  ENSG00000229807_6 (sequence is synthesized)
atgttaattatgaatgaacccttttcttttaatattaatgtcataattgtatttgtggacctgtgtaggagaaaaagaccctatgttcctcccattaccctttggattgctgctgagaag

SEQ ID NO: 838436 - DNA, 120 bp, Artificial Sequence
  ENSG00000229807_7 (sequence is synthesized)
tgttaactactcataatctcagctcttggacaattaatagcattaataacaattatcaagggcactgatcattagataagactcctgcttcctcgttgcttacatcgggggtactgaccc

SEQ ID NO: 838437 - DNA, 120 bp, Artificial Sequence
  ENSG00000229807_8 (sequence is synthesized)
actaaggccccttgtactgttaatgtgaatatttgcaattatatatgtctccttctggtagagtgggatattatgccctagtatcccctttgcattactgcaggggctgctgactactca

SEQ ID NO: 838438 - DNA, 120 bp, Artificial Sequence
  ENSG00000229807_9 (sequence is synthesized)
aaacttctcctgggactgttaataggcacaatggcagttatcaatggttttctccctccctgaccttgttaagcaagcgccccaccccacccttagtttcccatggcataataaagtata

SEQ ID NO: 838439 - DNA, 120 bp, Artificial Sequence
  ENSG00000229807_10 (sequence is synthesized)
agcattggagtattccatgcacttgtctatcaaacagtggtccatactcccaacccttttgcattgcgccagtgtgtaaaatcacaggtagccatggtgtcatgctttatatacgaagtc

SEQ ID NO: 838440 - DNA, 120 bp, Artificial Sequence
  ENSG00000229807_11 (sequence is synthesized)
ttccctctctctgccccttgtgtgcccttggcccctttttacagactattgctcacaatctcaggtgtccatatttgcagctattaggtaagattgtgctgtctccctcttcccttccct

SEQ ID NO: 838441 - DNA, 120 bp, Artificial Sequence
  ENSG00000229807_12 (sequence is synthesized)
ctgccctgccccttttgcctctttgctgggtaatgttgaccagacaaggccctttctcttggacttaaacaattctcagttgcactttccttggtcccacccattatacatgaacccctc

SEQ ID NO: 838442 - DNA, 120 bp, Artificial Sequence
  ENSG00000229807_13 (sequence is synthesized)
tacttcctttcgcattgcttctgagtatgctgactacccaaagccccttctgtgttattaataaacacagtactgattgtcccatttttcagcccatcagtccaagatctccctaccact

SEQ ID NO: 838443 - DNA, 120 bp, Artificial Sequence
  ENSG00000229807_14 (sequence is synthesized)
ttggtgtgttggtgcagtgttgactatgaaaagcaggcctgaactaggtggataagccttcactcattttctttcatttattaatgatcctagtttcaattattgtcagattctggggac

SEQ ID NO: 838444 - DNA, 120 bp, Artificial Sequence
  ENSG00000229807_15 (sequence is synthesized)
aagaaccattcttgcccacctgtgttactgctttactgtgcaaaatactgaaggcaagtcagacccagggagctggattgccatcctttattttgtgtttccagtgtacactataaaatt

SEQ ID NO: 838445 - DNA, 120 bp, Artificial Sequence
  ENSG00000229807_16 (sequence is synthesized)
gtctccccaggaaggaaggttggcactttctctgcattcttctttccagagcagattgcctggttaagaatctcttgttgtcccctttgtatattgttattgtaaagtgccaaatgccag

SEQ ID NO: 838446 - DNA, 120 bp, Artificial Sequence
  ENSG00000229807_17 (sequence is synthesized)
gatacagccagaaaaattgcttattattattaaaaaaatttttttaagaaagacatctggattgtagggtggactcgataacctggtcattatttttttgaagccaaaatatccatttat

SEQ ID NO: 838447 - DNA, 120 bp, Artificial Sequence
  ENSG00000229807_18 (sequence is synthesized)
actatgtacctggtgaccagtgtctctcattttaactgagggtggtgggtctgtggatagaacactgactcttgctattttaatatcaaagatattctagagtggaactcttaagaccag

SEQ ID NO: 838448 - DNA, 120 bp, Artificial Sequence
  ENSG00000229807_19 (sequence is synthesized)
tatctttgtgtgggctttaccagcattcacttttagaaaaactacctaaattttataatcctttaatttcttcatctggagcacctgcccctacttatttcaagaagattgcagtaaaac

SEQ ID NO: 838449 - DNA, 120 bp, Artificial Sequence
  ENSG00000229807_20 (sequence is synthesized)
gattaaatgagggaacatatgcagaggtgcttttaaaaagcatatgccaccttttttattaattattatataaaatgaagcatttaattatagtaataatttgaagtagtttgaagtacc

SEQ ID NO: 838450 - DNA, 120 bp, Artificial Sequence
  ENSG00000229807_21 (sequence is synthesized)
acactgaggtgaggacttaaaaatgataagacgagttccctattttataagaaaaataagccaaaattaaatattcttttggatataaatttcaacagtgagatagctgcctagtggaaa

SEQ ID NO: 838451 - DNA, 120 bp, Artificial Sequence
  ENSG00000229807_22 (sequence is synthesized)
tgaataatatcccagccactagtgtacagggtgttttgtggcacaggattatgtaatatggaactgctcaagcaaataactagtcatcacaacagcagttctttgtaataactgaaaaag

SEQ ID NO: 838452 - DNA, 120 bp, Artificial Sequence
  ENSG00000229807_23 (sequence is synthesized)
aatattgtttctcggagaaggatgtcaaaagatcggcccagctcagggagcagtttgccctactagctcctcggacagctgtaaagaagagtctctggctctttagaatactgatcccat

SEQ ID NO: 838453 - DNA, 120 bp, Artificial Sequence
  ENSG00000229807_24 (sequence is synthesized)
tgaagataccacgctgcatgtgtccttagtagtcatgtctccttaggctcctcttggacattctgagcatgtgagacctgaggactgcaaacagctataagaggctccaaattaatcata

SEQ ID NO: 838454 - DNA, 120 bp, Artificial Sequence
  ENSG00000229807_25 (sequence is synthesized)
actctagcacttgaggatagctgaatgaatgtgtatttctttgtctctttctttcttgtctttgctctttgttctctatctaaagtgtgtcttacccatttccatgtttctcttgctaat

SEQ ID NO: 838455 - DNA, 120 bp, Artificial Sequence
  ENSG00000229807_26 (sequence is synthesized)
ttctttcgtgtgtgcctttgcctcattttctctttttgttcacaagagtggtctgtgtcttgtcttagacatatctctcatttttcattttgttgctatttctctttgctctcctagatg

SEQ ID NO: 838456 - DNA, 120 bp, Artificial Sequence
  ENSG00000229807_27 (sequence is synthesized)
tggctcttctttcacgctttatttcatgtctcctttttgggtcacatgctgtgtgctttttgtccttttcttgttctgtctacctctcctttctctgcctacctctcttttctctttgtg

SEQ ID NO: 838457 - DNA, 120 bp, Artificial Sequence
  ENSG00000229807_28 (sequence is synthesized)
aactgtgattatttgttaccccttccccttctcgttcgttttaaatttcaccttttttctgagtctggcctcctttctgctgtttctactttttatctcacatttctcatttctgcattt

SEQ ID NO: 838458 - DNA, 120 bp, Artificial Sequence
  ENSG00000229807_29 (sequence is synthesized)
cctttctgcctctcttgggctattctctctctcctcccctgcgtgcctcagcatctcttgctgtttgtgattttctatttcagtattaatctctgttggcttgtatttgttctctgcttc

SEQ ID NO: 838459 - DNA, 120 bp, Artificial Sequence
  ENSG00000229807_30 (sequence is synthesized)
ttccctttctactcacctttgagtatttcagcctcttcatgaatctatctccctctctttgatttcatgtaatctctccttaaatatttctttgcatatgtgggcaagtgtacgtgtgtg

SEQ ID NO: 838460 - DNA, 120 bp, Artificial Sequence
  ENSG00000229807_31 (sequence is synthesized)
tgtgtcatgtgtggcagaggggcttcctaacccctgcctgataggtgcagaacgtcggctatcagagcaagcattgtggagcggttccttatgccaggctgccatgtgagatgatccaag

SEQ ID NO: 838461 - DNA, 120 bp, Artificial Sequence
  ENSG00000229807_32 (sequence is synthesized)
accaaaacaaggccctagactgcagtaaaacccagaactcaagtagggcagaaggtggaaggctcatatggatagaaggcccaaagtataagacagatggtttgagacttgagacccgag

SEQ ID NO: 838462 - DNA, 120 bp, Artificial Sequence
  ENSG00000229807_33 (sequence is synthesized)
gactaagatggaaagcccatgttccaagatagatagaagcctcaggcctgaaaccaacaaaagcctcaagagccaagaaaacagagggtggcctgaattggaccgaaggcctgagttgga

SEQ ID NO: 838463 - DNA, 120 bp, Artificial Sequence
  ENSG00000229807_34 (sequence is synthesized)
tggaagtctcaaggcttgagttagaagtcttaagacctgggacaggacacatggaaggcctaagaactgagacttgtgacacaaggccaacgacctaagattagcccagggttgtagctg

SEQ ID NO: 838464 - DNA, 120 bp, Artificial Sequence
  ENSG00000229807_35 (sequence is synthesized)
gaagacctacaacccaaggatggaaggcccctgtcacaaagcctacctagatggatagaggacccaagcgaaaaaggtatctcaagactaacggccggaatctggaggcccatgacccag

SEQ ID NO: 838465 - DNA, 120 bp, Artificial Sequence
  ENSG00000229807_36 (sequence is synthesized)
aacccaggaaggatagaagcttgaagacctggggaaatcccaagatgagaaccctaaaccctacctcttttctattgtttacacttcttactcttagatatttccagttctcctgtttat

SEQ ID NO: 838466 - DNA, 120 bp, Artificial Sequence
  ENSG00000229807_37 (sequence is synthesized)
ctttaagcctgattcttttgagatgtactttttgatgttgccggttacctttagattgacagtattatgcctgggccagtcttgagccagctttaaatcacagcttttacctatttgtta

SEQ ID NO: 838467 - DNA, 120 bp, Artificial Sequence
  ENSG00000229807_38 (sequence is synthesized)
ggctatagtgttttgtaaacttctgtttctattcacatcttctccacttgagagagacaccaaaatccagtcagtatctaatctggcttttgttaacttccctcaggagcagacattcat

SEQ ID NO: 838468 - DNA, 120 bp, Artificial Sequence
  ENSG00000229807_39 (sequence is synthesized)
ataggtgatactgtatttcagtcctttcttttgaccccagaagccctagactgagaagataaaatggtcaggttgttggggaaaaaaaagtgccaggctctctagagaaaaatgtgaaga

SEQ ID NO: 838469 - DNA, 120 bp, Artificial Sequence
  ENSG00000229807_40 (sequence is synthesized)
gatgctccaggccaatgagaagaattagacaagaaatacacagatgtgccagacttctgagaagcacctgccagcaacagcttccttctttgagcttagtttctggcatcactaccacta

SEQ ID NO: 838470 - DNA, 120 bp, Artificial Sequence
  ENSG00000229807_41 (sequence is synthesized)
ctgattaaacaagaataagagaacattttatcatcatctgctttattcacataaatgaagttgtgatgaataaatctgcttttatgcagacacaaggaattaagtggcttcgtcattgtc

SEQ ID NO: 838471 - DNA, 120 bp, Artificial Sequence
  ENSG00000229807_42 (sequence is synthesized)
cttctacctcaaagataatttattccaaaagctaagataaatggaagactcttgaacttgtgaactgatgtgaaatgcagaatctcttttgagtctttgctgtttggaagattgaaaaat

SEQ ID NO: 838472 - DNA, 120 bp, Artificial Sequence
  ENSG00000229807_43 (sequence is synthesized)
attgttcagcatgggtgaccaccagaaagtaatcttaagccatctagatgtcacaattgaaacaaactggggagttggttgctattgtaaaataaaatatactgttttgaaaactttgta

SEQ ID NO: 838473 - DNA, 120 bp, Artificial Sequence
  ENSG00000229807_44 (sequence is synthesized)
tatgggcgtgagccaccgcgcccggcagttctggtctttaactaaggtataaggctatgactggtagtggtgtctctagtgactcatcaagtgatatttggcaagacattttcccattta

SEQ ID NO: 838474 - DNA, 120 bp, Artificial Sequence
  ENSG00000229807_45 (sequence is synthesized)
catcaagtgatatttggcaagacattttcccatttatgccagtttcctattctgttgaatgaggaaattttctctctaaagacctaaaagttttgactttataggtttcaaagttctgtg

SEQ ID NO: 838475 - DNA, 120 bp, Artificial Sequence
  ENSG00000229807_46 (sequence is synthesized)
gaaacattttctattgcttattaatttgaatcttatgtaactctagcacagtactcaatatttatggcatttacatggtttatctcatgtttttttatagctcttcattgttcctatctg

SEQ ID NO: 838476 - DNA, 120 bp, Artificial Sequence
  ENSG00000229807_47 (sequence is synthesized)
caacgctactcctgggtttaatacccatctctaggcttaaagatgagagaacctgggactgttgagcatgtttaatactttccttgatttttttcttcctgtttatgtgggaagttgatt

SEQ ID NO: 838477 - DNA, 120 bp, Artificial Sequence
  ENSG00000229807_48 (sequence is synthesized)
taaatgactgataatgtgtatgaaagcactgtaaaacataagagaaaaaccaattagtgtattggcaatcatgcagttaacatttgaaagtgcagtgtaaattgtgaagcattatgtaaa

SEQ ID NO: 838478 - DNA, 120 bp, Artificial Sequence
  ENSG00000229807_49 (sequence is synthesized)
tcaggggtccacagtttttctgtaaggggtcaaatcataaatactttagactgtgggccatatggtttctgttacatatttgttttttaaacaacgtttttataaggtcaaaatcattct

SEQ ID NO: 838479 - DNA, 120 bp, Artificial Sequence
  ENSG00000229807_50 (sequence is synthesized)
tagtttttgagccaattggatttggcctgctgttcatagcttaccaccccctgatgtattatttgttattcagagaaaatttctgaatactactagtttccttttctgtgcctgtccctg

SEQ ID NO: 838480 - DNA, 120 bp, Artificial Sequence
  ENSG00000229807_51 (sequence is synthesized)
tgctaggcactaaaaatgcaatgattattgatatctaggtgacctgaaaaaaaatagtgaatgtgctttgtaaactgtaaagcacttgtattctactgtgataagcgttgtggatacaaa

SEQ ID NO: 838481 - DNA, 120 bp, Artificial Sequence
  ENSG00000229807_52 (sequence is synthesized)
gaaaggagcaagcataaaaaagtgctctttcaaaaggatatagtactatgcagacacaaggaattgtttgataaatgaataaattatatgtatatttgaggccaatttgtgtttgctgct

SEQ ID NO: 838482 - DNA, 120 bp, Artificial Sequence
  ENSG00000229807_53 (sequence is synthesized)
ctggtaattttgagtaaaaatgcagtattccaggtatcagaaacgaaaacacatggaaactgcttttaaactttaaaatatactgaaaacataagggactaagcttgttgtggtcaccta

SEQ ID NO: 838483 - DNA, 120 bp, Artificial Sequence
  ENSG00000229807_54 (sequence is synthesized)
taatgtgccagataccatgctgggtgctagagctaccaaagggggaaaagtattctcatagaacaaaaaatttcagaaaggtgcatattaaagtgctttgtaaactaaagcatgatacaa

SEQ ID NO: 838484 - DNA, 120 bp, Artificial Sequence
  ENSG00000229807_55 (sequence is synthesized)
atgtcaatgggctacatatttatgaatgaatgaatggatgaatgaatattaagtgcctcttacataccagctattttgggtactgtaaaatacaagattaattctcctatgtaataagag

SEQ ID NO: 838485 - DNA, 120 bp, Artificial Sequence
  ENSG00000229807_56 (sequence is synthesized)
gaaagtttatcctctatactattcagatgtaaggaatgatatattgcttaattttaaacaatcaagactttactggtgaggttaagttaaattattactgatacatttttccaggtaacc

SEQ ID NO: 838486 - DNA, 120 bp, Artificial Sequence
  ENSG00000229807_57 (sequence is synthesized)
aggaaagagctagtatgaggaaatgaagtaatagatgtgagatccagaccgaaagtcacttaattcagcttgcgaatgtgctttctaaattataaagcacttgtaaatgaaaaatttgat

SEQ ID NO: 838487 - DNA, 120 bp, Artificial Sequence
  ENSG00000229807_58 (sequence is synthesized)
gctttctgtatgaataaaactttctgtaagctaggtattgtctctacaaaattctcattgtatagttaaaccacagtgagaagggttctataagtagttatacaaaccaagggtttaaat

SEQ ID NO: 838488 - DNA, 120 bp, Artificial Sequence
  ENSG00000229807_59 (sequence is synthesized)
acctgttaaatagatcaattttgattgcctactatgtgaactcactgttaaaggcactgaaaatttatcatatttcatttagccacagccaaaaataaggcaatacctatgttagcattt

SEQ ID NO: 838489 - DNA, 120 bp, Artificial Sequence
  ENSG00000229807_60 (sequence is synthesized)
tgtgaactctaaggcaccatataaatgtaactgttgattttctcacttggtgctgggtactaggtttataaaattgtatgatagttattatattgtgcaaataaagtaggaaaatttgaa

SEQ ID NO: 838490 - DNA, 120 bp, Artificial Sequence
  ENSG00000229807_61 (sequence is synthesized)
taacaatgattatcttttgaatacgcatacgcaagggattggttgtctgaagaatgccactatagtagttatctattgtgtgccaatctcattgctaggcattggggatgcaaagataaa

SEQ ID NO: 838491 - DNA, 120 bp, Artificial Sequence
  ENSG00000229807_62 (sequence is synthesized)
ccatctttattgtgtcttgggtagcagaagaaaatatgtgtaaaatcaatttataatttgtaaactgccacccatatataagctatatctgctgaatgatcattgattactcttatcctt

SEQ ID NO: 838492 - DNA, 120 bp, Artificial Sequence
  ENSG00000229807_63 (sequence is synthesized)
agagataacaactgggggcacaaacatttattatcattattgaacctacaacagagatctatgtgtagatttacaaagcctacagttctatacagataggaatgaactattggcttactg

SEQ ID NO: 838493 - DNA, 120 bp, Artificial Sequence
  ENSG00000229807_64 (sequence is synthesized)
aatggtgattactttctgtggggctcggaactacatgccctaggatataaaaatgatgttatcattatagagtgctcacagaaggaaatgaagtaatataggtgtgagatccagaccaaa

SEQ ID NO: 838494 - DNA, 120 bp, Artificial Sequence
  ENSG00000229807_65 (sequence is synthesized)
agtcatttaacaagtttattcagtgatgaaaacatgggacaaatggactaatataaggcagtgtactaagctgagtagagagataaagtcctgtccagaagatacatgcttcctggcctg

SEQ ID NO: 838495 - DNA, 120 bp, Artificial Sequence
  ENSG00000229807_66 (sequence is synthesized)
attgaggagatggaaaatttttgcaaaaaacaaggtgttgtggtcttccatccagtttcttaagtgctgatgataaaagtgaattagacccaccttgacctggcctacagaagtaaagga

SEQ ID NO: 838496 - DNA, 120 bp, Artificial Sequence
  ENSG00000229807_67 (sequence is synthesized)
gtaaaaataaatgcctcaggcgtgctttttgattcatttgataaacaaagcatcttttatgtggaatataccattctgggtcctgaggataagagagatgagggcattagatcactgaca

SEQ ID NO: 838497 - DNA, 120 bp, Artificial Sequence
  ENSG00000229807_68 (sequence is synthesized)
gctgaagatagaagaacatctttggtttgattgtttaaataatatttcaatgcctattctctgcaaggtactatgtttcgtaaattaaataggtctggcccagaagacccactcaattgc

SEQ ID NO: 838498 - DNA, 120 bp, Artificial Sequence
  ENSG00000229807_69 (sequence is synthesized)
gggagaaaattgatattctcactaccatattttgggctgtaggcaagtagcattttacacaggtttccttcaaaaatccaactcaagttggagctcatgtatttaagacatagctggcct

SEQ ID NO: 838499 - DNA, 120 bp, Artificial Sequence
  ENSG00000229807_70 (sequence is synthesized)
gctgaatttaacaagttaaacttcagtggccatgtacagttatatatcactatatatatgtgtattaggctgtcgagttggtcatgtttttgttggtgacttaggctttacttgatagct

SEQ ID NO: 838500 - DNA, 120 bp, Artificial Sequence
  ENSG00000229807_71 (sequence is synthesized)
cttccttgacctttccaaattgagtactgatacatggagcttgggcttcttctgcatcttatacaaatgagtttggtaaagaagcctctcctttactgttttgatgtttatattagaaat

SEQ ID NO: 838501 - DNA, 120 bp, Artificial Sequence
  ENSG00000229807_72 (sequence is synthesized)
aacttttgattattttttttcatgttaggatgagaaactgaaacaaaatgtaaatttgaccggtgctagacttcttaaattatgggtagacttaaagtattattttccttaaccaattag

SEQ ID NO: 838502 - DNA, 120 bp, Artificial Sequence
  ENSG00000229807_73 (sequence is synthesized)
aatgctagtcttctagtgttcccggaaacatgagaggttatgcagtagacccaagcaataccctcttattacataatcaagtgcgtataagaatttaaaaatagggatatgactggaaca

SEQ ID NO: 838503 - DNA, 120 bp, Artificial Sequence
  ENSG00000229807_74 (sequence is synthesized)
tcactgtactttaccaggtcccattataaaattatctatgttactttacccatagctttgaaaactagtggcatagtatattttatagtatgctgttagtgtgattggcattgaacagtg

SEQ ID NO: 838504 - DNA, 120 bp, Artificial Sequence
  ENSG00000229807_75 (sequence is synthesized)
atgggatataatcactctacaatctatatgttattaaagttttccagccttatagatctcccttgactgaaaattagctactaacttacgacttattttttacagcagattgactaggtc

SEQ ID NO: 838505 - DNA, 120 bp, Artificial Sequence
  ENSG00000229807_76 (sequence is synthesized)
tttccaggaaatctgttgatgtacaaaaacaaagtttaattgctaatgtttttttaaaaaataactttttgatattacggatacctggttatttgggccttgtatattttaacatcaaaa

SEQ ID NO: 838506 - DNA, 120 bp, Artificial Sequence
  ENSG00000229807_77 (sequence is synthesized)
ttacctattataaatccatataaacagaaaagaaagagagtaagtctttagatcagatctgcaaacaatgatggtacgtactgtagaaaaatctggaacatagacttaccagttcttagg

SEQ ID NO: 838507 - DNA, 120 bp, Artificial Sequence
  ENSG00000229807_78 (sequence is synthesized)
ttccattttgcttgctttttaaaaactgtgtcttataagtcttcagcaactggttgggagatttttagaaaaaataaccttttaatgttagaacagtgtagagatttacagaatgattct

SEQ ID NO: 838508 - DNA, 120 bp, Artificial Sequence
  ENSG00000229807_79 (sequence is synthesized)
gaagatagagtttctgtgtacttcacacccagtttttcccagtgttaacattttacattagtttggtacatttgtcacaacaaaccaatattgatacattattattaactagagtccata

SEQ ID NO: 838509 - DNA, 120 bp, Artificial Sequence
  ENSG00000229807_80 (sequence is synthesized)
accactgctgggcagcaggagggatgatgaccaactaattcccaaaccccagtctcattggtaccagccttggggaaccacctacacttgagccacaattggttttgaagtgcatttaca

SEQ ID NO: 838510 - DNA, 120 bp, Artificial Sequence
  ENSG00000229807_81 (sequence is synthesized)
atctgaataaggccttactctcagaccccttttgcagtacagcaggggtgctgataaccaaggcccattttcctggcctgttatgtgtgtgattatatttgtccaggtttctgtgtacta

SEQ ID NO: 838511 - DNA, 120 bp, Artificial Sequence
  ENSG00000229807_82 (sequence is synthesized)
gacaaggaagcctcctctgccccatcccatctacgcataatctttcttttcctcccagcagggagtgctcactccataagacccttacatttggacaatcaaggtgcacaattgtaagtg

SEQ ID NO: 838512 - DNA, 120 bp, Artificial Sequence
  ENSG00000229807_83 (sequence is synthesized)
accacaaccatgcatcttggaaatttatgtgcataactgcacatggcttatcctatttgaataaagtcctactctcagaccccctttgcagtatagctggggtgctgatcactgaggcct

SEQ ID NO: 838513 - DNA, 120 bp, Artificial Sequence
  ENSG00000229807_84 (sequence is synthesized)
ctttgcttggcttgtctatattcttgtgtactagataagggcaccttctcatggactccctttgcttttcaacaaggagtacccactactttttaagattcttatatttgtccaaagtac

SEQ ID NO: 838514 - DNA, 120 bp, Artificial Sequence
  ENSG00000229807_85 (sequence is synthesized)
atggttttaattgaccacaacaatgtcccttggacattaatgtatgtaatcaccacatggttcatcctaattaaacaaagttctaccttctcaccctccatttgcagtataccagggttg

SEQ ID NO: 838515 - DNA, 120 bp, Artificial Sequence
  ENSG00000229807_86 (sequence is synthesized)
ctgaccccctaagtccccttttcttggcttgttgacatgcataattgcatttatgttggttcttgtgccctagacaaggatgccccacctcttttcaatagtgggtgcccactccttatg

SEQ ID NO: 838516 - DNA, 120 bp, Artificial Sequence
  ENSG00000229807_87 (sequence is synthesized)
atctttacatttgaacagttaatgtgaataattgcagttgtccacaaccctatcacttctaggaccattatacctcttttgcattactgtggggtatactgtttccctccaaggcccctt

SEQ ID NO: 838517 - DNA, 120 bp, Artificial Sequence
  ENSG00000229807_88 (sequence is synthesized)
ctggtggactatcaacatataattgaaattttcttttgtctttgtcagtagattaaggtcataccccatcacctttcctttgtagtacaacagggtgtcctgatcaaccaaagtcctgtt

SEQ ID NO: 838518 - DNA, 120 bp, Artificial Sequence
  ENSG00000229807_89 (sequence is synthesized)
gttttggactgttaatatgtgcaattacatttgctcctgatctgtgcactagataaggatcctacctactttcttagtgtttttagcaggtagtgcccactactcaagactgtcacttgg

SEQ ID NO: 838519 - DNA, 120 bp, Artificial Sequence
  ENSG00000229807_90 (sequence is synthesized)
aatgttcatgtgcacaaactcaattctctaagcatgttcctgtaccacctttgctttagagcagggggatgatattcactaagtgccccttcttttggacttaatatgcattaatgcaat

SEQ ID NO: 838520 - DNA, 120 bp, Artificial Sequence
  ENSG00000229807_91 (sequence is synthesized)
gctgcagccatatttcttactctctcggggctggaagcttcctgactgaagatctctctgcacttggggttctttctagaacattttctagtcccccaacaccctttatggcgtatttct

SEQ ID NO: 838521 - DNA, 120 bp, Artificial Sequence
  ENSG00000229807_92 (sequence is synthesized)
ttaaaaaaatcacctaaattccataaaatatttttttaaattctatactttctcctagtgtcttcttgacacgtcctccatatttttttaaagaaagtatttggaatattttgaggcaat

SEQ ID NO: 838522 - DNA, 120 bp, Artificial Sequence
  ENSG00000229807_93 (sequence is synthesized)
ttttaatatttaaggaatttttctttggaatcatttttggttgacatctctgttttttgtggatcagttttttactcttccactctcttttctatattttgcccatcggggctgcggata

SEQ ID NO: 838523 - DNA, 120 bp, Artificial Sequence
  ENSG00000229807_94 (sequence is synthesized)
cctggttttattattttttctttgcccaacggggccgtggatacctgccttttaattcttttttattcgcccatcggggccgcggatacctgctttttatttttttttccttagcccatc

SEQ ID NO: 838524 - DNA, 120 bp, Artificial Sequence
  ENSG00000229807_95 (sequence is synthesized)
ggggtatcggatacctgctgattcccttcccctctgaacccccaacactctggcccatcggggtgacggatatctgctttttaaaaattttctttttttggcccatcggggcttcggata

SEQ ID NO: 838525 - DNA, 120 bp, Artificial Sequence
  ENSG00000229807_96 (sequence is synthesized)
cctgctttttttttttttatttttccttgcccatcggggcctcggatacctgctttaatttttgtttttctggcccatcggggccgcggatacctgctttgatttttttttttcatcgcc

SEQ ID NO: 838526 - DNA, 120 bp, Artificial Sequence
  ENSG00000229807_97 (sequence is synthesized)
catcggtgctttttatggatgaaaaaatgttggttttgtgggttgttgcactctctggaatatctacacttttttttgctgctgatcatttggtggtgtgtgagtgtacctaccgctttg

SEQ ID NO: 838527 - DNA, 120 bp, Artificial Sequence
  ENSG00000229807_98 (sequence is synthesized)
gcagagaatgactctgcagttaagctaagggcgtgttcagattgtggaggaaaagtggccgccattttagacttgccgcataactcggcttagggctagtcgtttgtgctaagttaaact

SEQ ID NO: 838528 - DNA, 120 bp, Artificial Sequence
  ENSG00000229807_99 (sequence is synthesized)
agggaggcaagatggatgatagcaggtcaggcagaggaagtcatgtgcattgcatgagctaaacctatctgaatgaattgatttggggcttgttaggagctttgcgtgattgttgtatcg

SEQ ID NO: 838529 - DNA, 120 bp, Artificial Sequence
  ENSG00000229807_100 (sequence is synthesized)
ggaggcagtaagaatcatcttttatcagtacaagggactagttaaaaatggaaggttaggaaagactaaggtgcagggcttaaaatggcgattttgacattgcggcattgctcagcatgg

SEQ ID NO: 838530 - DNA, 120 bp, Artificial Sequence
  ENSG00000229807_101 (sequence is synthesized)
cgggctgtgctttgttaggttgtccaaaatggcggatccagttctgtcgcagtgttcaagtggcgggaaggccacatcatgatgggcgaggctttgttaagtggttagcatggtggtgga

SEQ ID NO: 838531 - DNA, 120 bp, Artificial Sequence
  ENSG00000229807_102 (sequence is synthesized)
catgtgcggtcacacaggaaaagatggcggctgaaggtcttgccgcagtgtaaaacatggcgggcctctttgtctttgctgtgtgcttttcgtgttgggttttgccgcagggacaatatg

SEQ ID NO: 838532 - DNA, 120 bp, Artificial Sequence
  ENSG00000229807_103 (sequence is synthesized)
gcaggcgttgtcatatgtatatcatggcttttgtcacgtggacatcatggcgggcttgccgcattgttaaagatggcgggttttgccgcctagtgccacgcagagcgggagaaaaggtgg

SEQ ID NO: 838533 - DNA, 120 bp, Artificial Sequence
  ENSG00000229807_104 (sequence is synthesized)
gatggacagtgctggattgctgcataacccaaccaattagaaatgggggtggaattgatcacagccaattagagcagaagatggaattagactgatgacacactgtccagctactcagcg

SEQ ID NO: 838534 - DNA, 120 bp, Artificial Sequence
  ENSG00000229807_105 (sequence is synthesized)
aagacctgggtgaattagcatggcacttcgcagctgtctttagccagtcaggagaaagaagtggaggggccacgtgtatgtctcccagtgggcggtacaccaggtgttttcaaggtcttt

SEQ ID NO: 838535 - DNA, 120 bp, Artificial Sequence
  ENSG00000229807_106 (sequence is synthesized)
tcaaggacatttagcctttccacctctgtcccctcttatttgtcccctcctgtccagtgctgcctcttgcagtgctggatatctggctgtgtggtctgaacctccctccattcctctgta

SEQ ID NO: 838536 - DNA, 120 bp, Artificial Sequence
  ENSG00000229807_107 (sequence is synthesized)
ggctgtgtggtctgaacctccctccattcctctgtattggtgcctcacctaaggctaagtatacctccccccccaccccccaacccccccaactccccacccccaccccccaccccccac

SEQ ID NO: 838537 - DNA, 120 bp, Artificial Sequence
  ENSG00000229807_108 (sequence is synthesized)
ctctggtctgccctgcactgcactgttgccatgggcagtgctccaggcctgcttggtgtggacatggtggtgagccgtggcaaggaccagaatggatcacagatgatcgttggccaacag

SEQ ID NO: 838538 - DNA, 120 bp, Artificial Sequence
  ENSG00000229807_109 (sequence is synthesized)
gtggcagaagaggaattcctgccttcctcaagaggaacacctaccccttggctaatgctggggtcggattttgatttatatttatcttttggatgtcagtcatacagtctgattttgtgg

SEQ ID NO: 838539 - DNA, 120 bp, Artificial Sequence
  ENSG00000229807_110 (sequence is synthesized)
tttgctagtgtttgaatttaagtcttaagtgactattatagaaatgtattaagaggctttatttgtagaattcactttaattacatttaatgagtttttgttttgagttccttaaaattc

SEQ ID NO: 838540 - DNA, 120 bp, Artificial Sequence
  ENSG00000229807_111 (sequence is synthesized)
cttaaagtttttagcttctcattacaaattccttaacctttttttggcagtagatagtcaaagtcaaatcatttctaatgttttaaaaatgtgctggtcattttctttgaaattgactta

SEQ ID NO: 838541 - DNA, 120 bp, Artificial Sequence
  ENSG00000229807_112 (sequence is synthesized)
actattttcctttgaagagtctgtagcacagaaacagtaaaaaatttaacttcatgacctaatgtaaaaaagagtgtttgaaggtttacacaggtccaggccttgctttgttcccatcct

SEQ ID NO: 838542 - DNA, 120 bp, Artificial Sequence
  ENSG00000229807_113 (sequence is synthesized)
tgatgctgcactaattgactaatcacctacttatcagacaggaaacttgaattgctgtggtctggtgtcctctattcagacttattatattggagtatttcaatttttcgttgtatcctg

SEQ ID NO: 838543 - DNA, 120 bp, Artificial Sequence
  ENSG00000229807_114 (sequence is synthesized)
cctgcctagcatccagttcctccccagccctgctcccagcaaacccctagtctagccccagccctactcccaccccgccccagccctgccccagccccagtcccctaaccccccagccct

SEQ ID NO: 838544 - DNA, 120 bp, Artificial Sequence
  ENSG00000229807_115 (sequence is synthesized)
agccccagtcccagtcctagttcctcagtcccgcccagcttctctcgaaagtcactctaattttcattgattcagtgctcaaaataagttgtccattgcttatcctattatactgggata

SEQ ID NO: 838545 - DNA, 120 bp, Artificial Sequence
  ENSG00000229807_116 (sequence is synthesized)
ttccgtttacccttggcattgctgatcttcagtactgactccttgaccattttcagttaatgcatacaatcccatttgtctgtgatctcaggacaaagaatttccttactcggtacgttg

SEQ ID NO: 838546 - DNA, 120 bp, Artificial Sequence
  ENSG00000229807_117 (sequence is synthesized)
aagttagggaatgtcaattgagagctttctatcagagcattattgcccacaatttgagttacttatcattttctcgatcccctgcccttaaaggagaaaccatttctctgtcattgcttc

SEQ ID NO: 838547 - DNA, 120 bp, Artificial Sequence
  ENSG00000229807_118 (sequence is synthesized)
tgtagtcacagtcccaattttgagtagtgatcttttcttgtgtactgtgttggccacctaaaactctttgcattgagtaaaattctaattgccaataatcctacccattggattagacag

SEQ ID NO: 838548 - DNA, 120 bp, Artificial Sequence
  ENSG00000229807_119 (sequence is synthesized)
cactctgaaccccatttgcattcagcagggggtcgcagacaacccgtcttttgttggacagttaaaatgctcagtcccaattgtcatagctttgcctattaaacaaaggcaccctactgc

SEQ ID NO: 838549 - DNA, 120 bp, Artificial Sequence
  ENSG00000229807_120 (sequence is synthesized)
gctttttgctgtgcttctggagaatcctgctgttcttggacaattaaagaacaaagtagtaattgctaattgtctcacccattaatcatgaagactaccagtcgcccttgcatttgcctt

SEQ ID NO: 838550 - DNA, 120 bp, Artificial Sequence
  ENSG00000229807_121 (sequence is synthesized)
gaggcagcgctgactacctgagatttaagagtttcttaaattattgagtaaaatcccaattatccatagttctgttagttacactatggcctttgcaaacatctttgcataacagcagtg

SEQ ID NO: 838551 - DNA, 120 bp, Artificial Sequence
  ENSG00000229807_122 (sequence is synthesized)
ggactgactcattcttagagccccttcccttggaatattaatggatacaatagtaattattcatggttctgcgtaacagagaagacccacttatgtgtatgcctttatcattgctcctag

SEQ ID NO: 838552 - DNA, 120 bp, Artificial Sequence
  ENSG00000229807_123 (sequence is synthesized)
atagtgtgaactacctaccaccttgcattaatatgtaaaacactaattgcccatagtcccactcattagtctaggatgtcctctttgccattgctgctgagttctgactacccaagtttc

SEQ ID NO: 838553 - DNA, 120 bp, Artificial Sequence
  ENSG00000229807_124 (sequence is synthesized)
cttctcttaaacagttgatatgcataattgcatatattcatggttctgtgcaataaaaatggattctcaccccatcccaccttctgtgggatgttgctaacgagtgcagattattcaata

SEQ ID NO: 838554 - DNA, 120 bp, Artificial Sequence
  ENSG00000229807_125 (sequence is synthesized)
acagctcttgaacagttaatttgcacagttgcaattgtccagagtcctgtccattagaaagggactctgtatcctatttgcacgctacaatgtgggctgatcacccaaggactcttcttg

SEQ ID NO: 838555 - DNA, 120 bp, Artificial Sequence
  ENSG00000229807_126 (sequence is synthesized)
tgcattgatgttcataattgtatttgtccacgatcttgtgcactaacccttccactccctttgtattccagcaggggacccttactactcaagacctctgtactaggacagtttatgtgc

SEQ ID NO: 838556 - DNA, 120 bp, Artificial Sequence
  ENSG00000229807_127 (sequence is synthesized)
acaatcctaattgattagaactgagtcttttatatcaaggtccctgcatcatctttgctttacatcaagagggtgctggttacctaatgcccctcctccagaaattattgatgtgcaaaa

SEQ ID NO: 838557 - DNA, 120 bp, Artificial Sequence
  ENSG00000229807_128 (sequence is synthesized)
tgcaatttccctatctgctgttagtctggggtctcatcccctcatattccttttgtcttacagcagggggtacttgggactgttaatgcgcataattgcaattatggtcttttccattaa

SEQ ID NO: 838558 - DNA, 120 bp, Artificial Sequence
  ENSG00000229807_129 (sequence is synthesized)
attaagatcccaactgctcacaccctcttagcattacagtagagggtgctaatcacaaggacatttcttttgtactgttaatgtgctacttgcatttgtccctcttcctgtgcactaaag

SEQ ID NO: 838559 - DNA, 120 bp, Artificial Sequence
  ENSG00000229807_130 (sequence is synthesized)
accccactcacttccctagtgttcagcagtggatgacctctagtcaagacctttgcactaggatagttaatgtgaaccatggcaactgatcacaacaatgtctttcagatcagatccatt

SEQ ID NO: 838560 - DNA, 120 bp, Artificial Sequence
  ENSG00000229807_131 (sequence is synthesized)
ttatcctccttgttttacagcaagggatattaattacctatgttacctttccctgggactatgaatgtgcaaaattccaatgttcatggtctctccctttaaacctatattctacccctt

SEQ ID NO: 838561 - DNA, 120 bp, Artificial Sequence
  ENSG00000229807_132 (sequence is synthesized)
ttacattatagaaagggatgctggaaacccagagtccttctcttgggactcttaatgtgtatttctaattatccatgactcttaatgtgcatattttcaattgcctaattgatttcaatt

SEQ ID NO: 838562 - DNA, 120 bp, Artificial Sequence
  ENSG00000229807_133 (sequence is synthesized)
gtctaagacatttcaaatgtctaattgattagaactgagtcttttatatcaagctaatatctagcttttatatcaagctaatatcttgacttctcagcatcatagaagggggtactgatt

SEQ ID NO: 838563 - DNA, 80 bp, Artificial Sequence
  ENSG00000229807_134 (sequence is synthesized)
atatcttgacttctcagcatcatagaagggggtactgatttcctaaagtctttcttgaatttctattatgcaaaattgcc

SEQ ID NO: 838564 - DNA, 120 bp, Artificial Sequence
  ENSG00000229807_135 (sequence is synthesized)
gtttgagaccagcctggccaacattaaaaaaaaaaaaaagtaagacaattgccctggaatcccatccccctcacacctccttggcaaagcagcaggagtgctaactagctagtgcttctt

SEQ ID NO: 838565 - DNA, 120 bp, Artificial Sequence
  ENSG00000229807_136 (sequence is synthesized)
ctcttatactgcttaaatgcgcataattagcagtagttgatgtgcccctatgttagagtagaatcccgcttccttgctccatttgcattactgcaggagcttctaactagcctgaattca

SEQ ID NO: 838566 - DNA, 120 bp, Artificial Sequence
  ENSG00000229807_137 (sequence is synthesized)
ctctcttggactgttaatgtgcatacttatatttgctgctgtacttttttaccatgtaaggaccccacccactgtatttacatcccagctggaagtacctactacttaagacccttagac

SEQ ID NO: 838567 - DNA, 120 bp, Artificial Sequence
  ENSG00000229807_138 (sequence is synthesized)
tagtaaagttagcgtgcataatcttaggtgttatatacacattttcagttgcatacagttgtgccttttatcaggactcctgtacttatcaaagcagagagtgctaatcaatattaagcc

SEQ ID NO: 838568 - DNA, 120 bp, Artificial Sequence
  ENSG00000229807_139 (sequence is synthesized)
cttctcttcgaactgtagatggcatgtaattgcagttgtcaatggtccttcaattagacttgggtttctgacctatcacaccctctttgctttattgcatggggtactattcacttaagg

SEQ ID NO: 838569 - DNA, 120 bp, Artificial Sequence
  ENSG00000229807_140 (sequence is synthesized)
cccctttctcaaactgttaatgtgcctaatgacaattacatcagtatccttccttttgaaggacagcatggttggtgacacctaaggccccatttcttggcctcccaatatgtgtgattg

SEQ ID NO: 838570 - DNA, 120 bp, Artificial Sequence
  ENSG00000229807_141 (sequence is synthesized)
tatttgtcgaggttgctatgcactagagaaggaaagtgctcccctcatccccacttttcccttccagcaggaagtgcccaccccataagacccttttatttggagagtctaggtgcacaa

SEQ ID NO: 838571 - DNA, 120 bp, Artificial Sequence
  ENSG00000229807_142 (sequence is synthesized)
ttgtaagtgaccacaagcatgcatcttggacatttatgtgcgtaatcgcacactgctcattccatgtgaataaggtcctactctccgaccccttttgcaatacagaagggttgctgataa

SEQ ID NO: 838572 - DNA, 120 bp, Artificial Sequence
  ENSG00000229807_143 (sequence is synthesized)
cgcagtccccttttcttggcatgttgtgtgtgattataatcgtctgggatcctatgcactagaaaaggagggtcctctccacatacctcagtctcacctttcccttccagcagggagtgc

SEQ ID NO: 838573 - DNA, 120 bp, Artificial Sequence
  ENSG00000229807_144 (sequence is synthesized)
ccactccataagactctcacatttggacagtcaaggtgcgtaattgttaagtgaacacaaccatgcaccttagacatggatttgcataactacacacagctcaacctatctgaataaaat

SEQ ID NO: 838574 - DNA, 120 bp, Artificial Sequence
  ENSG00000229807_145 (sequence is synthesized)
cctactctcagaccccttttgcagtacagcaggggtgctgatcaccaaggccctttttcctggcctggtatgcgtgtgattatgtttgtcccggttcctgtgtattagacatggaagcct

SEQ ID NO: 838575 - DNA, 120 bp, Artificial Sequence
  ENSG00000229807_146 (sequence is synthesized)
cccctgccacactccacccccaatcttcctttcccttccggcagggagtgccctctccataagacgcttacgtttggacaatcaaggtgcacagttgtaagtgaccacaggcatacacct

SEQ ID NO: 838576 - DNA, 120 bp, Artificial Sequence
  ENSG00000229807_147 (sequence is synthesized)
tggacattaatgtgcataaccactttgcccattccatctgaataaggtcctactctcagaccccttttgcagtacagcaggggtgctgatcaccaaggccccttttcttggcctgttatg

SEQ ID NO: 838577 - DNA, 120 bp, Artificial Sequence
  ENSG00000229807_148 (sequence is synthesized)
tgcgtgattatatttgtctgggttcctgtgtattagacaaggaagccttccccccgcccccacccccactcccagtcttcctttcccttccagcagggagtgccccctccataagatcat

SEQ ID NO: 838578 - DNA, 120 bp, Artificial Sequence
  ENSG00000229807_149 (sequence is synthesized)
tacatttggacaatcaaggtgcacaattataagtgaccacagccatgcaccttggacattattggacattaatgtgcgtaactgcacatggcccatcccatctgaataaggtcctactct

SEQ ID NO: 838579 - DNA, 120 bp, Artificial Sequence
  ENSG00000229807_150 (sequence is synthesized)
cagatgccctttgcagtacagcaggggtactgaatcaccaaggccctttttcttggcctgttatgtgtgtgattatatttatcccagtttctgtgtaatagacatgaaagcctcccctgc

SEQ ID NO: 838580 - DNA, 120 bp, Artificial Sequence
  ENSG00000229807_151 (sequence is synthesized)
cacaccccacctccaatcttcctttcccttccaccagggagtgtccactccatatacccttacatttggacaatcaaggtgcacaattgtaagtgagcataggcactcaccttggacatg

SEQ ID NO: 838581 - DNA, 120 bp, Artificial Sequence
  ENSG00000229807_152 (sequence is synthesized)
aatgtgcataactgcacatggcccatcccatctgaataaggtcctactctcagaccctttttgcagtacagcaggggtgctgatcaccaaggccccttttcctggcctgttatgtgtgtg

SEQ ID NO: 838582 - DNA, 120 bp, Artificial Sequence
  ENSG00000229807_153 (sequence is synthesized)
attatatttgttccagttcctgtgtaatagacatggaagcctcccctgccacactccacccccaatcttcctttcccttctggcaggaagtacccgctccataagacccttacatttgga

SEQ ID NO: 838583 - DNA, 120 bp, Artificial Sequence
  ENSG00000229807_154 (sequence is synthesized)
cagtcaaggtgcacaattgtatgtgaccacaaccatgcaccttggacataaatgtgtgtaactgcacatggcccatcccatctgaataaggtcctactctcagaccccttttgcagtaca

SEQ ID NO: 838584 - DNA, 120 bp, Artificial Sequence
  ENSG00000229807_155 (sequence is synthesized)
gtaggtgtgctgataaccaaggcccctcttcctggcctgttaacgtatgtgattatatttgtctgggttccagtgtataagacatggaagcctcccctgccccaccccaccctcaatctt

SEQ ID NO: 838585 - DNA, 120 bp, Artificial Sequence
  ENSG00000229807_156 (sequence is synthesized)
cctttcccttctggcagggagtgccagctccataagaaccttacatttggacagtcaaggtgcacaattctaagtgaccgcagccatgcaccttggtcaataatgtgtgtaactgcacac

SEQ ID NO: 838586 - DNA, 120 bp, Artificial Sequence
  ENSG00000229807_157 (sequence is synthesized)
agtttctttcaaaataaagagacatttttcctagtttcaggaatcccccaaatcacttcctcattggcttagtttaaagccaggagactgataaaagggctcagggtttgttctttaatt

SEQ ID NO: 838587 - DNA, 120 bp, Artificial Sequence
  ENSG00000229807_158 (sequence is synthesized)
cattaactaaacattctgcttttattacagttaaatggttcaagatgtaacaactagttttaaaggtatttgctcattggtctggcttagagacaggaagacatatgagcaataaaaaaa

SEQ ID NO: 838588 - DNA, 120 bp, Artificial Sequence
  ENSG00000229807_159 (sequence is synthesized)
agattcttttgcatttaccaatttagtaaaaatttattaaaactgaataaagtgctgttcttaagtgcttgaaagacgtaaaccaaagtgcactttatctcatttatcttatggtggaaa

SEQ ID NO: 838589 - DNA, 120 bp, Artificial Sequence
  ENSG00000229807_160 (sequence is synthesized)
cacaggaacaaattctctaagagactgtgtttctttagttgagaagaaacttcattgagtagctgtgatatgttcgatactaaggaaaaactaaacagatcacctttgacatgcgttgta

SEQ ID NO: 838590 - DNA, 120 bp, Artificial Sequence
  ENSG00000229807_161 (sequence is synthesized)
gagtgggaataagagagggctttttattttttcgttcatacgagtattgatgaagatgatactaaatgctaaatgaaatatatctgctccaaaaggcatttattctgacttggagatgca

SEQ ID NO: 838591 - DNA, 120 bp, Artificial Sequence
  ENSG00000229807_162 (sequence is synthesized)
acaaaaacacaaaaatggaatgaagtgatactcttcatcaaacagaagtgactgttatctcaaccattttgttaaatcctaaacagaaaacaaaaaaaatcatgacgaaaagacacttgc

SEQ ID NO: 838592 - DNA, 120 bp, Artificial Sequence
  ENSG00000229807_163 (sequence is synthesized)
ttattaattggcttggaaagtagaatataggagaaaggttactgtttattttttttcatgtattcattcattctacaaatatattcgggtgccaataggtacttggtataaggtttttgg

SEQ ID NO: 838593 - DNA, 120 bp, Artificial Sequence
  ENSG00000229807_164 (sequence is synthesized)
ccccagagacatgggaaaaaaatgcatgccttcccagagaatgcctaatactttccttttggcttgttttcttgttaggggcatggcttagtccctaaataacattgtgtggtttaattc

SEQ ID NO: 838594 - DNA, 120 bp, Artificial Sequence
  ENSG00000229807_165 (sequence is synthesized)
ctactccgtatctcttctaccactctggccactacgataagcaggtagctgggttttgtagtgagcttgctccttaagttacaggaactctccttataatagacacttcattttcctagt

SEQ ID NO: 838595 - DNA, 120 bp, Artificial Sequence
  ENSG00000229807_166 (sequence is synthesized)
agcaaaatggagatggagacatgatttctcatgcaacagcttctctaattataccttagaaatgttctcctttttatcatcaaatctgctcaagaagggctttttatagtagaataatat

SEQ ID NO: 838596 - DNA, 120 bp, Artificial Sequence
  ENSG00000229807_167 (sequence is synthesized)
cagtggatgaaaacagcttaacattttaccatgcttaagttttaagaataaaataaaaattggaaataattggccaaaattgaaaggaaaaatttttttaaaatttctctaaatgtaggc

SEQ ID NO: 838597 - DNA, 120 bp, Artificial Sequence
  ENSG00000229807_168 (sequence is synthesized)
ctggctgggctttgaccttttccgtttttaaatcactcacagagggtgggacaggaggaagagtgaaggaaaaggtcaaacctgttttaagggcaacctgcctttgttctgaattggtct

SEQ ID NO: 838598 - DNA, 120 bp, Artificial Sequence
  ENSG00000229807_169 (sequence is synthesized)
taagaacattaccagctccaggtttaaattgttcagtttcatgcagttccaatagctgatcattgttgagatgaggacaaaatcctttgtcctcactagtttgctttacatttttgaaaa

SEQ ID NO: 838599 - DNA, 120 bp, Artificial Sequence
  ENSG00000229807_170 (sequence is synthesized)
gtattatttttgtccaagtgcttatcaactaaaccttgtgttaggtaagaatggaatttattaagtgaatcagtgtgacccttcttgtcataagattatcttaaagctgaagccaaaata

SEQ ID NO: 838600 - DNA, 120 bp, Artificial Sequence
  ENSG00000229807_171 (sequence is synthesized)
tgcttcaaaagaagaggactttattgttcattgtagttcatacattcaaagcatctgaactgtagtttctatagcaagccaattacatccataagtggagaaggaaatagataaatgtca

SEQ ID NO: 838601 - DNA, 120 bp, Artificial Sequence
  ENSG00000229807_172 (sequence is synthesized)
aagtatgattggtggagggagcaaggttgaagataatctggggttgaaattttctagttttcattctgtacatttttagttagacatcagatttgaaatattaatgtttacctttcaatg

SEQ ID NO: 838602 - DNA, 120 bp, Artificial Sequence
  ENSG00000229807_173 (sequence is synthesized)
tgtggtatcagctggactcagtaacacccctttcttcagctggggatggggaatggattattggaaaatggaaagaagaaagtaactaaaagccttcctttcacagtttctggcatcact

SEQ ID NO: 838603 - DNA, 120 bp, Artificial Sequence
  ENSG00000229807_174 (sequence is synthesized)
aatctttttcctattctattttctttctcttagatgccacctatagaaaagtcagagggtccagtaagtttctttccttcttcccacctcatctgcaatatatatatatagagagagaaa

SEQ ID NO: 838604 - DNA, 120 bp, Artificial Sequence
  ENSG00000229807_175 (sequence is synthesized)
tagatacatacatacatgcataaatacacatatgtgagttaaccagcagaactgtagaattaatattgtggacccagctctatgctaggttacactgataacctgggtaggaatgatatc

SEQ ID NO: 838605 - DNA, 120 bp, Artificial Sequence
  ENSG00000229807_176 (sequence is synthesized)
atcctatataatttcattcctgagatgattttatcgttgaggagctaatgtgagcacatttgaaataactttagaaaataataagtgctgttttgtgtgaatcataagtagtagttttag

SEQ ID NO: 838606 - DNA, 120 bp, Artificial Sequence
  ENSG00000229807_177 (sequence is synthesized)
gaagggaacccacaaggatttgaagttgatagaataaacttaaggaagtgggtttgctttttctctttaagccaagataggattaatattgcagccatctggatagtccagttggtttat

SEQ ID NO: 838607 - DNA, 120 bp, Artificial Sequence
  ENSG00000229807_178 (sequence is synthesized)
tttaatttcatttgttttttacctcttttggagccatggaaagagatgaaagggatagagcatagccattgtgtttggctatttgcgaaggttggcaaattagtgattgctaaatctcat

SEQ ID NO: 838608 - DNA, 120 bp, Artificial Sequence
  ENSG00000229807_179 (sequence is synthesized)
aagcttgagtattttaaagttcagagattgagggcataaatctaatacttcggctccttccacaattttactacatttctgcccaagaacagatgaccatggataatgcatatcgtagat

SEQ ID NO: 838609 - DNA, 120 bp, Artificial Sequence
  ENSG00000229807_180 (sequence is synthesized)
actttttaagtttggaacctttttgccaagagggtagtggagaagtgaagtcaaaaccttgaccttccttgcctactttatgctgtagtttatataccttctttcctcccacctttcgta

SEQ ID NO: 838610 - DNA, 120 bp, Artificial Sequence
  ENSG00000229807_181 (sequence is synthesized)
aagctaaaagaagcttagcctccttaatgttttccagctgacaaaatattgtttaacataacattcgaaactttttttctggtgcacattcatgcatcacagcaggagcaacaagaacca

SEQ ID NO: 838611 - DNA, 120 bp, Artificial Sequence
  ENSG00000229807_182 (sequence is synthesized)
tataagtgaactggcttcacttatagcccgttttaattcatatccatatttcctcagggcttgtttccatgcctcccagccccactccatatgcttaacaacattgtctggctgactgag

SEQ ID NO: 838612 - DNA, 120 bp, Artificial Sequence
  ENSG00000229807_183 (sequence is synthesized)
ggttatatacatcatggtcttgaaccttcttggaaacatggtctgtgccattgtttctcaaacccaagtaatgcttcatgatgaaacaccttctaaaggaacaaaattttctgagatcct

SEQ ID NO: 838613 - DNA, 120 bp, Artificial Sequence
  ENSG00000229807_184 (sequence is synthesized)
aaaaaaatgtgttttgaggaacactgacttaacaaagatatttgaaatgtaaatatgttttccaatttcacgttgtctttgtcaaagatgtgttttatataacttatgtagaacttgggg

SEQ ID NO: 838614 - DNA, 120 bp, Artificial Sequence
  ENSG00000229807_185 (sequence is synthesized)
atccattagaatatattcacaaatccccagggttatcaccccaatttgagaaaccctggtctatgcttatgaaatcttctattggtaattaaattgtcattcattgtcaacatacaatta

SEQ ID NO: 838615 - DNA, 120 bp, Artificial Sequence
  ENSG00000229807_186 (sequence is synthesized)
taattattattggaatttgttttaaatgaatgaatttggaggtgattctgtaccttaagtcaagaggaaggatggcttgattttaggtggattgattatactagatagcatccaaaggtg

SEQ ID NO: 838616 - DNA, 120 bp, Artificial Sequence
  ENSG00000229807_187 (sequence is synthesized)
aatcttgaagctgtatttaaattcattgcttgaaataatttccacccttaagaaaaatctctagcaattgtaaaaagggatgctctggaaatgtgggcatcttcaaaatagagataattc

SEQ ID NO: 838617 - DNA, 120 bp, Artificial Sequence
  ENSG00000229807_188 (sequence is synthesized)
ttgtgttagttcaacaaatattattgtaccaggtgctggaataaatagcaaaaccaaagacaggatttatatcaaggaatttgctttcttatggaggatgcagaaggaaatcattatggt

SEQ ID NO: 838618 - DNA, 120 bp, Artificial Sequence
  ENSG00000229807_189 (sequence is synthesized)
tttgggcagaaatgcttagactttagtcctggctctgagtttggttcagatcaccatcaatctgaccatctcgagactgctagtgaaataagataggggcttatatcaaatacctaaatc

SEQ ID NO: 838619 - DNA, 120 bp, Artificial Sequence
  ENSG00000229807_190 (sequence is synthesized)
cctgaaaatgacattttgtgatttggaaaattttcaaaagtctaatgaaggaaacttttttggcatttctttaaatgattattgtcatttcttttctgacttttccctttataaaacctt

SEQ ID NO: 838620 - DNA, 120 bp, Artificial Sequence
  ENSG00000229807_191 (sequence is synthesized)
aacatgtaggattggaggaagttttctgaccattttctcatatcctctttcagctttatctttctgtaacttccatttctctagccacctccctaaattacagaagactgtgagacccag

SEQ ID NO: 838621 - DNA, 120 bp, Artificial Sequence
  ENSG00000229807_192 (sequence is synthesized)
ggctgctgtgattaggcattcataatttcttttcagggtgtttgtgccctgattatcaaatgtacagcttgaagggagttcatgtcttaaagtaatgaattaagagttgacctttgttga

SEQ ID NO: 838622 - DNA, 120 bp, Artificial Sequence
  ENSG00000229807_193 (sequence is synthesized)
ctgctaaaatattcttatatgtgaaagcatcctggaaaaatacgttaccagcttaaagagaaagaaactaatgattatatctgaactgagctaatgcctcttctcttcccccaaacctta

SEQ ID NO: 838623 - DNA, 120 bp, Artificial Sequence
  ENSG00000229807_194 (sequence is synthesized)
gcgtgagccaccacgcctggccagctgttgttataactggagttctatgtgcttgtgaccattcttggtttctccgaatatcctagaactttggtggcgccctattatacaggttgttga

SEQ ID NO: 838624 - DNA, 120 bp, Artificial Sequence
  ENSG00000229807_195 (sequence is synthesized)
ctttggtggcgccctattatacaggttgttgaagaaatgttaccatgtggattgagtaggaaacaattctctttatcttggcaatattatggcatggcactacttaaagtacaaattaaa

SEQ ID NO: 838625 - DNA, 120 bp, Artificial Sequence
  ENSG00000229807_196 (sequence is synthesized)
agagggggatgctacagaactagctgacaggcactttgatagaggtggatttctcagttcttaaaatagctctttataaaggaagccagaggcattgtggaggagaattcttacataact

SEQ ID NO: 838626 - DNA, 120 bp, Artificial Sequence
  ENSG00000229807_197 (sequence is synthesized)
catagggttagaccacatccgaccttttctgtgtggcttcatggctctcttggttgagaaagcattagtttctccttccattagtttcaacctcttgatttcttgacccccctactatat

SEQ ID NO: 838627 - DNA, 120 bp, Artificial Sequence
  ENSG00000229807_198 (sequence is synthesized)
tttgtgctgagaacacaagggtattaacaacccacattgtagaggatcgctcagtaataaagactggagaataaaatgcagcatgggaatattggcaattactcagttctaaatttctct

SEQ ID NO: 838628 - DNA, 120 bp, Artificial Sequence
  ENSG00000229807_199 (sequence is synthesized)
tggaaatgagggaaagcatacagaatagagctggaatgaataggataattttttttttttttgctaagttggtagccagaatataacagctccgcacaactgtaaatgtccactcttcaa

SEQ ID NO: 838629 - DNA, 120 bp, Artificial Sequence
  ENSG00000229807_200 (sequence is synthesized)
tccacatgaagaaaagggtaaaaatatggttgaactcaaccactagttgcccattagaacagactttcccagtgtactgcatttcaatactttttcttttatctcttttcagatcttcct

SEQ ID NO: 838630 - DNA, 120 bp, Artificial Sequence
  ENSG00000229807_201 (sequence is synthesized)
gcaggattctggggtttgggatttctagtgatggttatggaaagggtgactgtgcctgggacaaagcgaggtcccaaggggacagcctgaactccctgctcatagtagtggccaaataat

SEQ ID NO: 838631 - DNA, 120 bp, Artificial Sequence
  ENSG00000229807_202 (sequence is synthesized)
tcaaaaacaaccaccacacgtcaaggagaacatggacaactgtcacatcagtgacattgatcacatgggcaaatcattctgttccatgtggtccccaaagtctctcttaaagccttacag

SEQ ID NO: 838632 - DNA, 77 bp, Artificial Sequence
  ENSG00000229807_203 (sequence is synthesized)
tggaggctgaggcagcattagccactgcactccagcctaggtggcagagcgggacccagtctcttaaaaagaaagaa

SEQ ID NO: 838633 - DNA, 120 bp, Artificial Sequence
  ENSG00000224091_0 (sequence is synthesized)
agtgtaagcgaggtcaggccctcaagagtcttgggatggctgaagagaggagatcatgactatatcaataatggagcctgggcccagacaactggttaagagagaggtcattctgacctc

SEQ ID NO: 838634 - DNA, 120 bp, Artificial Sequence
  ENSG00000224091_1 (sequence is synthesized)
agaacataggagagatggatattgtacaccacagagtccaggatgactagcagtgaaggattcaaatgcctggcgaaatctcctatacaaccggagagacccaagtccccaaagacaaga

SEQ ID NO: 838635 - DNA, 120 bp, Artificial Sequence
  ENSG00000224091_2 (sequence is synthesized)
agccctcccattgctataaggatggggatcttagcacagtgccttgtgtgaacagtaatgctagccttgattttaccatggcaagtttgtttagggaaaaattcaacccacccattgaaa

SEQ ID NO: 838636 - DNA, 120 bp, Artificial Sequence
  ENSG00000224091_3 (sequence is synthesized)
ttccaacctcaaccaaatgagggatggctggggatgcaaccacaaagatactgtatcttaggaggggagttttttttttttatagaaactcgtcaggatattattgctaggatgtgttgt

SEQ ID NO: 838637 - DNA, 120 bp, Artificial Sequence
  ENSG00000224090_0 (sequence is synthesized)
acttttccacccacctgcctctgggagggaggagccgagaagcagaggacagaagctcccgggcgggggttaggaggaaccgagagaggacttggctgccaggagaaggcaatttcctcg

SEQ ID NO: 838638 - DNA, 120 bp, Artificial Sequence
  ENSG00000224090_1 (sequence is synthesized)
ttcttggagatgttgttgaggaagagcaggcggctgcacttgctctgcacaggactcaggctcccagccttggggctgatggagaagaggcaattgtcctgcacgcgcatctggtggagc

SEQ ID NO: 838639 - DNA, 120 bp, Artificial Sequence
  ENSG00000224090_2 (sequence is synthesized)
tcagtggaattcaactctgcttgctctgcccagagctccacgtcaatccgctggtcacttggaaggaggaaggccctgggagaggggtgcaaagccatacaaagaaactggtcaggcaga

SEQ ID NO: 838640 - DNA, 120 bp, Artificial Sequence
  ENSG00000224090_3 (sequence is synthesized)
acagagaggcaggggctctgagaccctgatgggcaggtggaggcttcttccatgactcccgcacttcatgcacccatttggcaaactgtcccatgtgtgcctgagcaaatgtggctgttg

SEQ ID NO: 838641 - DNA, 120 bp, Artificial Sequence
  ENSG00000224090_4 (sequence is synthesized)
tggattctcgtttcataatggccccaaaacccaggaacagactctgggccacggcgactcaagaagtgaagagtggggctcccactgtggatgccaggagtcaaggtgttgcttgaatat

SEQ ID NO: 838642 - DNA, 120 bp, Artificial Sequence
  ENSG00000224090_5 (sequence is synthesized)
gggggccactttgagctggccatgaacccttctgtgacaaagctcttgggaaagggccatttgggacacctaggaaggctggcagcaccaaccagcagccccagggagtggggtgtccag

SEQ ID NO: 838643 - DNA, 120 bp, Artificial Sequence
  ENSG00000224090_6 (sequence is synthesized)
gccaacttgggcacagggtggagaacagatgccccagcagggctggcactcttgaaacagaagcaaggctgtgcacagagttaatgcccctgacatgcctaggactgcggtaaagtagat

SEQ ID NO: 838644 - DNA, 120 bp, Artificial Sequence
  ENSG00000224090_7 (sequence is synthesized)
aatgcaccttaagtagccgacaaaactagtgacaaagggtcctgaggtcacaatctgaaaggagaacccatttcactctcggagatggcacagaactggttccagctgcaaaccgggtgg

SEQ ID NO: 838645 - DNA, 120 bp, Artificial Sequence
  ENSG00000224090_8 (sequence is synthesized)
cacacctgagagaaagcacgcaacgcgcacctgagagaaagcacgcaacacacacctgagagaaagcacgcaacacacacctgaaagtgcgcaacacacacccgaagagaatgcgcgcaa

SEQ ID NO: 838646 - DNA, 120 bp, Artificial Sequence
  ENSG00000224090_9 (sequence is synthesized)
caaacacctgagaggaagtgtgcaacgcatacctgagagcacgcaacacacacctgaggagaatgcatgcaacacacacctgagaggaagcacgcaacacacacctgaggagaatgcatg

SEQ ID NO: 838647 - DNA, 120 bp, Artificial Sequence
  ENSG00000224090_10 (sequence is synthesized)
caacacacacctgagagaaagcgcacaaaagcaacctgagagaaaatgcacaacacacacccgaggagaatgcgcacaacacacacctgagaggaagcgtgcaacacacacctgaggaga

SEQ ID NO: 838648 - DNA, 120 bp, Artificial Sequence
  ENSG00000224090_11 (sequence is synthesized)
atgcacgcaacacacacctgaggagaatgcgtgcaacacacacctgaggagaacgcgtgcaacacacacctgagagaaagcacacaacacacacctgaggagaatgcacacaacacacac

SEQ ID NO: 838649 - DNA, 120 bp, Artificial Sequence
  ENSG00000224090_12 (sequence is synthesized)
ttgagaggaagtgcacaacacacacctgaggagaatgtgcgcaacacacacctaaggagaacgcgtgcaacacacacctgaggagaatgcacgcagcacacacctgacgggaagtgtgca

SEQ ID NO: 838650 - DNA, 120 bp, Artificial Sequence
  ENSG00000224090_13 (sequence is synthesized)
acacgcacctgaaagaaggcacgcaacacacacctgagagaaagcacacaacgcacacctgagagaaagcgtgcaacacgggcctggaagcctcagtaggagtcagggaggcctaagtcc

SEQ ID NO: 838651 - DNA, 120 bp, Artificial Sequence
  ENSG00000224090_14 (sequence is synthesized)
aaaccctcagaaggaaccagtcttaacttttttcacatctgaagcatgaagaatagtaatattcaacactggtaagttcagaaagaacagactcaaacataggtgggtggagagggaact

SEQ ID NO: 838652 - DNA, 120 bp, Artificial Sequence
  ENSG00000224090_15 (sequence is synthesized)
gctcaacctcttggacggaagtttggcagcttatgccctttgacccagaagtgtctgtttgggaaaccaattcataggaataaaagcacatatgtgtgcatgcttatgtgcacgcaacgc

SEQ ID NO: 838653 - DNA, 120 bp, Artificial Sequence
  ENSG00000224093_0 (sequence is synthesized)
accattctggacgggtccaattgcaggaaccttccatggctccctgaacaaaacatccctcatgtcctgcctccatgcctttgtcttgtggtccagcagacagtgacacatctgtagagg

SEQ ID NO: 838654 - DNA, 120 bp, Artificial Sequence
  ENSG00000224093_1 (sequence is synthesized)
gggtcatcaatctgtacattgcctgagagcagccgtgtatgctctggaagggacaagaccaggtacctgtcgggggatgcggccgtggtaccaggcatggctgcgcaggtcctcgctgct

SEQ ID NO: 838655 - DNA, 120 bp, Artificial Sequence
  ENSG00000224093_2 (sequence is synthesized)
caggagcagctcctcctccagctccttcttcagtttctcgggggtcctgtccatgatgtgcctctccttggagaactgcaacacagagtcaaccatgagctcaccctgcccaggccacac

SEQ ID NO: 838656 - DNA, 120 bp, Artificial Sequence
  ENSG00000224093_3 (sequence is synthesized)
caggccatgccagctggaggtgaccgcctgcttcactaatccaaccagttatgctacagcctgcattcagggagatgtggccacaggactcagttctgaccaaggagctgagatgtgatg

SEQ ID NO: 838657 - DNA, 120 bp, Artificial Sequence
  ENSG00000224093_4 (sequence is synthesized)
tggagactcaacaccattctggacggtgagtggggagccacaccaaggaattggctgggtggaaggtctgattgaggctgggtccctgatgactgtggggccaacacaccagccctggac

SEQ ID NO: 838658 - DNA, 120 bp, Artificial Sequence
  ENSG00000224093_5 (sequence is synthesized)
cgccagcctccaggtcttctaggtgatctaccttatggaagcctgtgatttgtgggtgttcccgtcactggcagctgaactaaatcctaacccatattgtgacctgacccccattgagtc

SEQ ID NO: 838659 - DNA, 120 bp, Artificial Sequence
  ENSG00000224093_6 (sequence is synthesized)
accctgacaggcagtctgcaggcttagcctaaatcccttgtgctgcaccctgggcccacttcttggtctgacctctgaaaatgtggagatctgaaaatatacagcaggtcttgcacagtt

SEQ ID NO: 838660 - DNA, 120 bp, Artificial Sequence
  ENSG00000224093_7 (sequence is synthesized)
actcagttctgaccaaggagctgagatgtgatggctggagactcaacaccattctggacgccaaaaagagctggccttggctggaaggttctggctaggaggagagggctaaagcatgcg

SEQ ID NO: 838661 - DNA, 120 bp, Artificial Sequence
  ENSG00000224093_8 (sequence is synthesized)
aaggcacaacaatgatggaactgagcgaagaagatactctatcccacttcagtgaaaacatcatgaggcttgaagcatggaagttgcctcacccccgtgtttcctgccaggtggaacaaa

SEQ ID NO: 838662 - DNA, 120 bp, Artificial Sequence
  ENSG00000224093_9 (sequence is synthesized)
tgtgacctaggctagtatgagtggaatccctgtcacttgtgaccaaagcagtcctgacccagaaacgcagggactggctgagggcagcccaacattggtggctgagggtttagaccatca

SEQ ID NO: 838663 - DNA, 120 bp, Artificial Sequence
  ENSG00000224093_10 (sequence is synthesized)
cactccagaaagtcagagtcacggaaaatctttgcccaggaaggcaacaggtatataaaaagatacttttagagagatctggctgcagtgagagcaatgggctggatggggccagggctg

SEQ ID NO: 838664 - DNA, 120 bp, Artificial Sequence
  ENSG00000224093_11 (sequence is synthesized)
gaggcacaggtcagagtcttttgaaatgtgctgacaacgcccagatctccatctccagcccttagggtcggtgcctggtagggatatttactggaatccgcattaaagctcagatgtcaa

SEQ ID NO: 838665 - DNA, 120 bp, Artificial Sequence
  ENSG00000224093_12 (sequence is synthesized)
tgagttcagcagcaagattacactcagtaatagtagtgctttcttaacatctttaaagaatgaaaagaacaaagactgccctggctaaggcagaccctaataaaagagtttgaaaaccgg

SEQ ID NO: 838666 - DNA, 120 bp, Artificial Sequence
  ENSG00000224093_13 (sequence is synthesized)
cctcagcctcccaggtagccaggactacaggtctgcaccaccacacccggccattggtctaatttctaagcaaggccagtgtcttccaatgagctcagggtgggaaaccccacgggggtt

SEQ ID NO: 838667 - DNA, 120 bp, Artificial Sequence
  ENSG00000224093_14 (sequence is synthesized)
gggctgtgaactgtaccaggtggcccaagctgggggtccaaaaagacagatccacatctcaaatccactgaactctgggaatccctgtgatgacctgagacctgcatcatcactgccccc

SEQ ID NO: 838668 - DNA, 120 bp, Artificial Sequence
  ENSG00000224095_0 (sequence is synthesized)
gaattcttctcccatcttgtggttgaatatgctgagacagaggatattgtcctactttccacctcattcaagaagaagaaaatgctaagtatgaatttccagttttctccagtccctttc

SEQ ID NO: 838669 - DNA, 120 bp, Artificial Sequence
  ENSG00000224095_1 (sequence is synthesized)
caggaattctttccaagtgagaaagccaccataaaagaagaaggccaccattgtatttatgaactatgccctgatatatttcaggaggctggtgaacactcattgtaacatttaagactt

SEQ ID NO: 838670 - DNA, 120 bp, Artificial Sequence
  ENSG00000224095_2 (sequence is synthesized)
tgtacaatttaatcacattcaggagtaatgaatgaagttaagactgacataaagcccagtattctcagcaggatggcatgtggcaaattcacagcaataaaataacaacatacattgaaa

SEQ ID NO: 838671 - DNA, 120 bp, Artificial Sequence
  ENSG00000224099_0 (sequence is synthesized)
ccaccatgtgaagaaggtccttgcttcctcttcatcatctatcatgattgcaagtttaggcctcctcagccacgtgcaacttttatttcaccctgaagccaaagagaactttctgaaaga

SEQ ID NO: 838672 - DNA, 120 bp, Artificial Sequence
  ENSG00000224099_1 (sequence is synthesized)
caaatttgctcatgctataatagttactgacaaatatttaaaggactaagttgtgtaaggaatctacactgtcaggcagaaccaggattcctggaagtagaactgggctgcttcataagt

SEQ ID NO: 838673 - DNA, 120 bp, Artificial Sequence
  ENSG00000224099_2 (sequence is synthesized)
ctgacttcatatgacagctagattcaaaaggatgaaatcagtagaggtgagacctcttgatgccttggcttggaagtcacatattctattggccaaagcaaatcacaaggccaccacaaa

SEQ ID NO: 838674 - DNA, 120 bp, Artificial Sequence
  ENSG00000224099_3 (sequence is synthesized)
ttcaaggagatgaagaaatagactctacctctcttgattggcttataatatggtcagttcttcagaggaagaggaaaatttcatctggcctcaaatctcagtgatcgcatttgtgggaac

SEQ ID NO: 838675 - DNA, 120 bp, Artificial Sequence
  ENSG00000224099_4 (sequence is synthesized)
gtctgacaagcaaaaaaagaaaaaaagacaaagacactccaagcaagagaaacaacctgagcagaagcacccaggtatgacagaaaacgtagagaggaaaggcttccaaaagcaacagag

SEQ ID NO: 838676 - DNA, 120 bp, Artificial Sequence
  ENSG00000224099_5 (sequence is synthesized)
attcacaggaagctccacagaaaaacgggtggtgcaaaaaattaggcaagagggaaaatggggttaggccatgtaccaacatgttcatcattatacagtgattggacttggaaaggcaga

SEQ ID NO: 838677 - DNA, 85 bp, Artificial Sequence
  ENSG00000224099_6 (sequence is synthesized)
atgttcatcattatacagtgattggacttggaaaggcagaagagaagcaagagccagcatcctcatcttataaacagaaaagctg

SEQ ID NO: 838678 - DNA, 120 bp, Artificial Sequence
  ENSG00000224099_7 (sequence is synthesized)
agagctgcctctggcagctctctggtgaggtggcaggatcccagaagggatatgttaagcactcgggcaaaggaggctggttccctatgtccccatgtgacacagaagccatagagagag

SEQ ID NO: 838679 - DNA, 120 bp, Artificial Sequence
  ENSG00000224099_8 (sequence is synthesized)
aggattacctttgcagaggtaatcaagttaaaatgaggtcaatatagtgagtcctaatccagtatggttgatgtcctcatgaaaaggagaaatttgaagacagacacaccaaaggagaat

SEQ ID NO: 838680 - DNA, 120 bp, Artificial Sequence
  ENSG00000224099_9 (sequence is synthesized)
ccaacgagaatagcctggaacaaattcttccatcacacccctcagaaggaatcaaccctgactgcacctccattgcagagttgtagcctccagaactgtgagacaatacatttctgttgt

SEQ ID NO: 838681 - DNA, 120 bp, Artificial Sequence
  ENSG00000224099_10 (sequence is synthesized)
ttaagacgctaagtttacggagtaaatttctgcttgttacagcagccccaggaaactattacactccacctcagcattttcctccaggcatccctcaaccctgttcttccaacatttccc

SEQ ID NO: 838682 - DNA, 120 bp, Artificial Sequence
  ENSG00000224099_11 (sequence is synthesized)
aagaaagaaagaaaaaaatattacttcacatatgtatattataaatcttgccatttcatttgccttcttttaacatcagtgggtaatcttacctcacaaagttagatgtaatatggaaaa

SEQ ID NO: 838683 - DNA, 120 bp, Artificial Sequence
  ENSG00000224099_12 (sequence is synthesized)
acctctacaattttcaaacccataataatcaagttctataatcaccaaaaaagaaaagtacaaaagaaaaccaatggtgagaactcttataaagcaagtacaaagacaaaattggctatg

SEQ ID NO: 838684 - DNA, 120 bp, Artificial Sequence
  ENSG00000224099_13 (sequence is synthesized)
cactatcattaacagaagctatcacggctcctttgtaatcttaagcagctattccatgatcttttctctcgcaatgatgaaccgaacttttgataaaatatttgatctccttttagccaa

SEQ ID NO: 838685 - DNA, 120 bp, Artificial Sequence
  ENSG00000224099_14 (sequence is synthesized)
aactcttctttataagcccatttaatattccagaaggattttctttcgtttgaagaaatataagtttgacattctaaaggcatttgtattttaaagcctacaaaaagatttttggagagt

SEQ ID NO: 838686 - DNA, 120 bp, Artificial Sequence
  ENSG00000224099_15 (sequence is synthesized)
acctggtgaagtaccgacttgcccctgtggctcaaaagttcaattattatagacatttcactcagaacagcatttctgtcttttaaccttcatctaaataaatgttcatttttataaaaa

SEQ ID NO: 838687 - DNA, 120 bp, Artificial Sequence
  ENSG00000275719_0 (sequence is synthesized)
ctcgaaggcagcggcgcacctggtcccgggaaccgcagtagccgcctgctgccgcgccttggtcctcgatggaggccagcgccaggcccccgttggcggtgggctccgccgctgcgagcc

SEQ ID NO: 838688 - DNA, 120 bp, Artificial Sequence
  ENSG00000275719_1 (sequence is synthesized)
ccttggagtctcgaggaggatcggccaccatgatgggaagcaccggggtttcttagcgcctggaagctggctgggagcgcttgggctccttcccaggacccgacgttcctaggactgagt

SEQ ID NO: 838689 - DNA, 120 bp, Artificial Sequence
  ENSG00000275719_2 (sequence is synthesized)
tgagtaacagcacctggagactggaactttggagggctccttagagttgtgagttcacagcactgaagttccttggctcttggaagctggagtgtttaaattccccaggctgggcgctga

SEQ ID NO: 838690 - DNA, 120 bp, Artificial Sequence
  ENSG00000275719_3 (sequence is synthesized)
ggcttctctgctctgccccgtgtgccagatgtccgaaagctgggagttcggagcgcccgggttccttggccctaggagctgggaatacgagagtttctctgggtgggacgtggggccctt

SEQ ID NO: 838691 - DNA, 120 bp, Artificial Sequence
  ENSG00000275719_4 (sequence is synthesized)
ggctccaggaggttgagtgcccccagatggcggaggtctgcaggaggctaggttctggtggcgcagatcccggacgcctggatccgggaggcggggacccgggctgcctgggtcttggac

SEQ ID NO: 838692 - DNA, 120 bp, Artificial Sequence
  ENSG00000275719_5 (sequence is synthesized)
gggggccgggaagcggacctccggaaacaggggacccaggctcttaggtccgggagggtgggatgcgggcccctgtgtacggaaggcggtggtctggtgtccgggagtagcggttaccag

SEQ ID NO: 838693 - DNA, 120 bp, Artificial Sequence
  ENSG00000275719_6 (sequence is synthesized)
ccagagaaagcctcccgggcgtgccgcgtggctctgagcccgtttagcggaagctgccagggataagggtagggggcggggcttgagaaggcggggaccgaccctcgggcgccgattggc

SEQ ID NO: 838694 - DNA, 120 bp, Artificial Sequence
  ENSG00000275719_7 (sequence is synthesized)
tgcagagcgttcggagactggacgagtaggggcggggctgatacccgagatgggccaggtcccccatagaaggcagattaataatacccatctccaggagccgggcccagagacgacggg

SEQ ID NO: 838695 - DNA, 120 bp, Artificial Sequence
  ENSG00000275719_8 (sequence is synthesized)
gcggggccaggaaggggcggggccttgggagggtgctgtttcccgccaaaggaactgggttgtgggttggagcccttaaaccacaggggttcgttccctggtgcgagggtcgctagaaag

SEQ ID NO: 838696 - DNA, 120 bp, Artificial Sequence
  ENSG00000275719_9 (sequence is synthesized)
ctccggtggtcctcggtgattcatttgcaactcaactcagctttggaactcctcagccctgagtttggtctttagtcgcctctgagaactttaattcctcgaatataaagtgcaggtgtt

SEQ ID NO: 838697 - DNA, 120 bp, Artificial Sequence
  ENSG00000253755_0 (sequence is synthesized)
ctccaccaagggcccatcggtcttccccctggtgccctcctccaggagcgtctctgagggcacagcggccctgggctgcctggtcaaggactacttccccgaaccggtgacggtgtcgtg

SEQ ID NO: 838698 - DNA, 120 bp, Artificial Sequence
  ENSG00000253755_1 (sequence is synthesized)
gaactcaggggccctgaccagaagcgtgcacaccttcccggctgtcctacagtcctcaggactctactccctcagcagcgtggtgaccgtgccctccagcagcttgggcacccagaccta

SEQ ID NO: 838699 - DNA, 120 bp, Artificial Sequence
  ENSG00000253755_2 (sequence is synthesized)
cacctgcaacgtagatcacaagcccagcaacaccaaggtggacaagacagttgacccggaggcctctgcccgccccactcatgctcacaactgaacccctggggggaccgtcagtcttcc

SEQ ID NO: 838700 - DNA, 120 bp, Artificial Sequence
  ENSG00000253755_3 (sequence is synthesized)
tcttccccccaaaacccaaggataccctcatgatctcccggacccctgaggtcacgtgcgtggtggtggacgtgagccacgaagaccctgaggtcaagttcaactggtacgtggacggcg

SEQ ID NO: 838701 - DNA, 120 bp, Artificial Sequence
  ENSG00000253755_4 (sequence is synthesized)
aacggcaaggagtacaagtgcaaggtctccaacaaaggcctcccagcccccatcgagaaaaccatctccaaaaccaaagggcagccccgagaaccacaggtgtacaccctgcccccatcc

SEQ ID NO: 838702 - DNA, 120 bp, Artificial Sequence
  ENSG00000253755_5 (sequence is synthesized)
cagaagatgaccaagaaccaggtcaccctgacctgcctggtcaaaggcttctaccccagcgacatcgccgtggagtgggagagcaatgggcagccggagaacaactacaagaccacgcct

SEQ ID NO: 838703 - DNA, 120 bp, Artificial Sequence
  ENSG00000253755_6 (sequence is synthesized)
cccatgctggactccaacggctccttcttcctctatagcaagctcaccgtggacaagagcaggtggcagcaggggaacgtcttctcatgctccgtgatgcatgagggtctgcagaaccac

SEQ ID NO: 838704 - DNA, 120 bp, Artificial Sequence
  ENSG00000253755_7 (sequence is synthesized)
tacacgcagaagagcctctccctgtccccgggagctgcaactggaggagagctgtgcggaggcgcaggacggggagctggacgggctgtggacgaccatcaccatcttcatcacactctt

SEQ ID NO: 838705 - DNA, 120 bp, Artificial Sequence
  ENSG00000253755_8 (sequence is synthesized)
cctgctaagcgtgtgctacagtgccaccgtcaccttcttcaaggtgaagtggatcttctcctcggtggtggacctgaagcagaccatcgtccccgactacaggaacatgatcgggcaggg

SEQ ID NO: 838706 - DNA, 120 bp, Artificial Sequence
  ENSG00000234647_0 (sequence is synthesized)
gtgtggctctgtgaccggcaagcaggaggccacggctgtcccaccctcagggctctcacatggtgagtggcttggaggacaccctccatgtggagctcagggccaccaccccgacaaggc

SEQ ID NO: 838707 - DNA, 120 bp, Artificial Sequence
  ENSG00000234647_1 (sequence is synthesized)
tgcccaacgcagagcagagggcagaggcagcctgggtggcccagccactgccccaacctgaggtctcccagcagcaccaggtctggaaaatgcgaatcccaagaaacataaaagaaaccc

SEQ ID NO: 838708 - DNA, 120 bp, Artificial Sequence
  ENSG00000234647_2 (sequence is synthesized)
tgaggatcacaaagaaagctgcgctcttgagaaacaaatacataaacaaaaataaaaaggagaagagaagcaagttcggcttagtacttgtgatttttctttaaacctcaaatattatcg

SEQ ID NO: 838709 - DNA, 120 bp, Artificial Sequence
  ENSG00000234647_3 (sequence is synthesized)
gttcctcttcaaccccagcatccccctgggttcctgtgcaggcctcggcttccaggaaccctgccttggagtgtgtgtgtggctctgtgaccggcaagcaggaggccacggctgtcccac

SEQ ID NO: 838710 - DNA, 77 bp, Artificial Sequence
  ENSG00000234647_4 (sequence is synthesized)
ggctctgtgaccggcaagcaggaggccacggctgtcccaccctcagggctctcacatgtagagacggggttttaccg

SEQ ID NO: 838711 - DNA, 120 bp, Artificial Sequence
  ENSG00000234647_5 (sequence is synthesized)
cgcgcccggccgagaagtcaagtctttcaggacatacctaaagaagatagcatccatggtgcatggagcatgtgcctcaccaggcatcaccatacccaccacagctcatgcgtgcggatg

SEQ ID NO: 838712 - DNA, 120 bp, Artificial Sequence
  ENSG00000234647_6 (sequence is synthesized)
cctttgctacccaggacggccatacaaggaagccattgggtcagtcctgtgcacaaacggcatgtcaagaaattaaatgatttcctcagggccccgcaattaccttcagcaaagctgaga

SEQ ID NO: 838713 - DNA, 120 bp, Artificial Sequence
  ENSG00000234647_7 (sequence is synthesized)
ttcccagccttctctccgctccctgagactgactctgaattgcttttctgctggagatgaaaacaagaacagaaacagtggaaactaatcacatttttaaaagttttacataaccactta

SEQ ID NO: 838714 - DNA, 120 bp, Artificial Sequence
  ENSG00000234647_8 (sequence is synthesized)
attataatacgcctgccccaaaagcactcctaacgtcctaacacatgtacttgtgatttttctttaaacctcaaatattatcgtcatggaagaaatactcacagtccatcaagcttgcct

SEQ ID NO: 838715 - DNA, 120 bp, Artificial Sequence
  ENSG00000234647_9 (sequence is synthesized)
gtcaggagcatttccaccctacagaccagccatggaggcagagtgcagcccgggtctgtgggtcaccaggcctcaaatgccatcccagcgccagtgaaagtttgctgtgttcctttacac

SEQ ID NO: 838716 - DNA, 120 bp, Artificial Sequence
  ENSG00000234647_10 (sequence is synthesized)
tgtcccctgtgggcctggcttccctgtgagaaggttaaagagccccaaacaaaacacgcattgaaacctgcctccacagccctctcgggcctgcacagggctgaccggcacccctggagc

SEQ ID NO: 838717 - DNA, 120 bp, Artificial Sequence
  ENSG00000234647_11 (sequence is synthesized)
ctgtccacctctggaagggcagttgcatggctctgagcaccgacggaaacccctcgacctggagaggccgcctgcgtggggccgacgttgcacaggctgaccttgtagggcggtgggtgg

SEQ ID NO: 838718 - DNA, 120 bp, Artificial Sequence
  ENSG00000234647_12 (sequence is synthesized)
gttctttgggtccattggtaataatatctcccgcatggatgggctcttcccagagcctcgtgggtgctgaatgaagcccaaggaatggccttcaccagacactttgttttgttttttctg

SEQ ID NO: 838719 - DNA, 120 bp, Artificial Sequence
  ENSG00000234647_13 (sequence is synthesized)
tttataaaaggcagggcccagatagtttcattttcacagggacatctgtaagcacacactttgatttacactgggaagagccaatggttctcatttacagagggtcaagctccaggaggg

SEQ ID NO: 838720 - DNA, 120 bp, Artificial Sequence
  ENSG00000234647_14 (sequence is synthesized)
aggcaaggggacgctttggaaaataaagttcttccttttactcctgtgggcctgatgtgctctgtgaagttcaaacactgtatcgaccatctcaactctcaggacagcatgtgacacctc

SEQ ID NO: 838721 - DNA, 120 bp, Artificial Sequence
  ENSG00000234647_15 (sequence is synthesized)
catcactgggagcaaactctgtgcaggagcacctgattctgccagggcaggaaattcactctcagaagcatgttccactcaagcggacttggcctgcgctgtgagtcaatgtaaagaggg

SEQ ID NO: 838722 - DNA, 120 bp, Artificial Sequence
  ENSG00000234647_16 (sequence is synthesized)
tgtgttggcttcggctggttgaccttcagaagtcggagaaggccaaagtcccactgaataaactgcagatgaaagagactcatgggtcctcagaaggaggcatatggctgctctcgggat

SEQ ID NO: 838723 - DNA, 120 bp, Artificial Sequence
  ENSG00000234647_17 (sequence is synthesized)
cttgacttttgaaatatttgtttaaagcaaacacttgcagtggccgtggaaagcctcccgtttcctctggaccctcagcctctccctcgcagggcaccgggctctctccctcggggacaa

SEQ ID NO: 838724 - DNA, 120 bp, Artificial Sequence
  ENSG00000234647_18 (sequence is synthesized)
ccgggctctctccctcggggacaatgaggcgagagaggcttttgtttattcttcaggagtctctgagagttcacagtcatgttaaaaattaacctggggccaggcgcggtggctcatgcc

SEQ ID NO: 838725 - DNA, 120 bp, Artificial Sequence
  ENSG00000234646_0 (sequence is synthesized)
aggactgcactgcccagcttggcagccacagcctcacatgaccactgagcacttgaaatgtagttaatatgctaagaaagcccatttaaatttttattttcaacttacttaaattcaaag

SEQ ID NO: 838726 - DNA, 120 bp, Artificial Sequence
  ENSG00000234646_1 (sequence is synthesized)
agccacaggggtctagtggctcctgtattgacagcacagggccaccttgttagtggcatcatttataaccctgggcagcattgctataggaatagccatatcctgtaggtctataatgct

SEQ ID NO: 838727 - DNA, 120 bp, Artificial Sequence
  ENSG00000234646_2 (sequence is synthesized)
gtagaaatggaatgtgtggtgcgaatgaaatttaaaatttaagtagccacggtgaaaaaaaaagagaaacaagtaaaattcatttcataatatgctttatctctatttccaaaatattat

SEQ ID NO: 838728 - DNA, 120 bp, Artificial Sequence
  ENSG00000234646_3 (sequence is synthesized)
catctcaacatgtaagaaatataagaagtattcatgagatattttacattcctttgttcatcataagtgtttgagatcccatgtgtgtctgacacagcacctgactttgaactcaccaca

SEQ ID NO: 838729 - DNA, 120 bp, Artificial Sequence
  ENSG00000234646_4 (sequence is synthesized)
agcccatgtggccatggtttagagatttcagaaagcattcatggaaaattctctttcctgatcctcattcactatcctgggaagtggccagataaggaagcaaggcccagaagggcccag

SEQ ID NO: 838730 - DNA, 120 bp, Artificial Sequence
  ENSG00000234646_5 (sequence is synthesized)
ccagtggctctcagactccagagtcatcgagtccctcactcgagggcaggttaactcacagatggctggcccccaccctctgcatttgccatccagcaggtctgggtgggtaccaggatg

SEQ ID NO: 838731 - DNA, 120 bp, Artificial Sequence
  ENSG00000234646_6 (sequence is synthesized)
cggattcgtaacaggagaggctgatgctgccagtctgggtccacattttgagaagcattcctccaagggtcccacccacgctcataccccatgtctgacaatgcctgccaggatgggcac

SEQ ID NO: 838732 - DNA, 120 bp, Artificial Sequence
  ENSG00000234646_7 (sequence is synthesized)
tgatgaatatggttgaacggaactccaaggaccacccaggttgatagtagtgagtttgtgtacagaagactgcaatgaattgaagtcatgagacatacagccaggatcctgaaagccacc

SEQ ID NO: 838733 - DNA, 120 bp, Artificial Sequence
  ENSG00000234646_8 (sequence is synthesized)
aacatatgtcacctgcctgggaggcttgcttcgatggtcatcttgttctgcctgctaagaccaggagtcacagctgttgacatcatggtgaataaaaacattttctgccacaggtagaaa

SEQ ID NO: 838734 - DNA, 120 bp, Artificial Sequence
  ENSG00000234646_9 (sequence is synthesized)
gggtttattgcaaggcataaaaccagtgtctgacaatgcctgccaggatgggcactgatgaatatggttgaacggaactccaaggaccacccaggttgatagtagtgagcaacgaggtgc

SEQ ID NO: 838735 - DNA, 120 bp, Artificial Sequence
  ENSG00000287258_0 (sequence is synthesized)
aatcataataacaagaaactcaagggaacgacatggtcagggctcaggttgtgagtggcagatgtggatgaagggggagcagtcaaagagcctgcagtcatgtctgcattctaacgcatt

SEQ ID NO: 838736 - DNA, 120 bp, Artificial Sequence
  ENSG00000287258_1 (sequence is synthesized)
ctaacagtgggacagctatgagaaagtgtattgtaaaatcttaaagacagagtcatcatgtatggcgcagtccctgacacatgaagctgactctgagatgaagcttcaagtatagatagt

SEQ ID NO: 838737 - DNA, 120 bp, Artificial Sequence
  ENSG00000287258_2 (sequence is synthesized)
ttatctgcacaatacagggaaccatggcaaaggactggggaatagaaacaaggaacagaaaacagccaatcaagagtgcattatgaaaccagctaccactagaggagatggaattctagg

SEQ ID NO: 838738 - DNA, 120 bp, Artificial Sequence
  ENSG00000287258_3 (sequence is synthesized)
atcatcatgacagatgggaggcaggactagagtgcagctccggacagaacagcttgcagaagcttgcattgtgaattttagctccagatcaagtgcaagaacaaaccagcaatcccgaga

SEQ ID NO: 838739 - DNA, 120 bp, Artificial Sequence
  ENSG00000287258_4 (sequence is synthesized)
ggacccacagatcctctaaaggaagtggactgctcctgcaggaccctggagataccccaaaaactgtgagtgccccaactgcagaagtgggaaagggaaaccttcctctcccgaacacac

SEQ ID NO: 838740 - DNA, 120 bp, Artificial Sequence
  ENSG00000287258_5 (sequence is synthesized)
atatccactggaaaagttgaaggtctgtttgcgggagaagtttccgaccttacctggagctgagccaatttagagagccaagtgagggtaaaactacatagggagaaagaaatccctagc

SEQ ID NO: 838741 - DNA, 120 bp, Artificial Sequence
  ENSG00000287258_6 (sequence is synthesized)
agaactttgtaataatatgaacccgatgagaagcctccttgccagaacttgggggaaggtgtgcaaatctggtgtgcagactccaccagcaggggaagaaccaagccttcttctctcaca

SEQ ID NO: 838742 - DNA, 120 bp, Artificial Sequence
  ENSG00000287258_7 (sequence is synthesized)
gctgggaggcgggagatttcaagcctgtcttcccctctgcctggaaacagacttggggctgttgtcgcggggaacagtgggagtgagactgacccttcggtttgcatgggagctgggtga

SEQ ID NO: 838743 - DNA, 120 bp, Artificial Sequence
  ENSG00000287258_8 (sequence is synthesized)
cccccacttccctgacaacctgcatggctcagcagaggcaggcataatcttcctaggtacacaactccagtgacctgggaatctcactcctatcccctacagcagccgcagcaagaccca

SEQ ID NO: 838744 - DNA, 120 bp, Artificial Sequence
  ENSG00000287258_9 (sequence is synthesized)
agcagccgcagcaagacccacccaaggagagcctgagctcagacatgcctagtcctgcccccgcctgatgttccttccctaccctccctggtagcagaagacaaagggtattaatcttgg

SEQ ID NO: 838745 - DNA, 120 bp, Artificial Sequence
  ENSG00000287258_10 (sequence is synthesized)
tctatactcctacagctgatgctttctggaaagcgccaccacctgacagtaggccaaccagcacaaaaatagagcattaaaccactaaagctaagaactctcatggagtccattgcaccc

SEQ ID NO: 838746 - DNA, 120 bp, Artificial Sequence
  ENSG00000287258_11 (sequence is synthesized)
cctgccacctccaccagaacaggcactgagacacacagctgagagacccaagggcagttcacatcacaggactatgtgcagacaacccccagtactagcccagagccaggtagacttact

SEQ ID NO: 838747 - DNA, 90 bp, Artificial Sequence
  ENSG00000287258_12 (sequence is synthesized)
gacaacccccagtactagcccagagccaggtagacttactgggtggctagacccagaagagggacaacaatcactgcagtttgaatgaga

SEQ ID NO: 838748 - DNA, 75 bp, Artificial Sequence
  ENSG00000287258_13 (sequence is synthesized)
agagcctaccaaaagctcttcaacacccgtgaaaaatcacagtagtgcaccagcaatggatccaaaccaagaaga

SEQ ID NO: 838749 - DNA, 90 bp, Artificial Sequence
  ENSG00000287258_14 (sequence is synthesized)
cttgatttacctgaaaaagaatcaggaccagagaaaggtgaagcccaatgcaaggaaataaaaaaaaaaatgataccagaagtgaaggga

SEQ ID NO: 838750 - DNA, 120 bp, Artificial Sequence
  ENSG00000287258_15 (sequence is synthesized)
caaggaaataaaaaaaaaaatgataccagaagtgaagggagaaatattcaaagaaatagatagcttaaggaaaaaaacaatcaaaaattcagaaaactttggacacacttttagaaatgt

SEQ ID NO: 838751 - DNA, 120 bp, Artificial Sequence
  ENSG00000287258_16 (sequence is synthesized)
ttttagaaatgtgaaatgctctagaaagtctcagcaatagaattgaacaagttgaataaagaaattcagagcttgaagacaaagccttctaattaacccaatccaataaagacaaagaaa

SEQ ID NO: 838752 - DNA, 120 bp, Artificial Sequence
  ENSG00000287258_17 (sequence is synthesized)
agaaaatatgaacaaagtctccaagaagtctgggattacgttaaatgaccaaacttaaggataattggcattcctgtggaagaagagaattccaaaagcttggaaaacatatttggggga

SEQ ID NO: 838753 - DNA, 120 bp, Artificial Sequence
  ENSG00000287258_18 (sequence is synthesized)
cttgctagagacctagacatccaaatacgaaaagcacaaggaacacctggaaaattcatcacaaaaagatctttgcataggcactttgtcatcagattatccaaagttaagacgaaggaa

SEQ ID NO: 838754 - DNA, 120 bp, Artificial Sequence
  ENSG00000287258_19 (sequence is synthesized)
acaaaaagatctttgcataggcactttgtcatcagattatccaaagttaagacgaaggaaaaaatcttaacagctgtgagacgaagcaccaagcaacctataaaggaaaacctatcagat

SEQ ID NO: 838755 - DNA, 120 bp, Artificial Sequence
  ENSG00000287259_0 (sequence is synthesized)
tggtgccgctgaaagcttgcagagcccaaacgctgcgaggaggtcgcaccagcaagtgaggaagcagaagggatggcttcctgcgcctcccacacaattttcaacttttcaggaagtacc

SEQ ID NO: 838756 - DNA, 120 bp, Artificial Sequence
  ENSG00000287259_1 (sequence is synthesized)
ataggagaagtcaaggcttggaaattgtggtgaaagaagctacgaatgagataaatgtgtgttctttccacccctaaaaacagtgtcaccaccactcatccttgaaaccatcaggtacag

SEQ ID NO: 838757 - DNA, 120 bp, Artificial Sequence
  ENSG00000287259_2 (sequence is synthesized)
gcaggagaggacaacaaatttggaaaaaaagaatgtggaaatggagacacaggcttgacatcgtttgtttttcactttccagcagcagggaaacctgtgagcgacgttcacgtctagtgt

SEQ ID NO: 838758 - DNA, 120 bp, Artificial Sequence
  ENSG00000287259_3 (sequence is synthesized)
ccagtgccttgcgtggtcccaatcacaaacccctagctcaggggcagcggggccatgaactagggaggccgccgtaatgacagcctggcaggaaccctatgtccaaaccagaggagcccc

SEQ ID NO: 838759 - DNA, 120 bp, Artificial Sequence
  ENSG00000287259_4 (sequence is synthesized)
ctcagagcaacctccacaggcagtgctgctgtcaaggaaatgccagagccgggtggtagttaacatggtaagaggagacttcattcaggaccattgcagtaggggaaacaggtcctcagt

SEQ ID NO: 838760 - DNA, 120 bp, Artificial Sequence
  ENSG00000287259_5 (sequence is synthesized)
atagaagtgggctcaattcagaatacagcataagcaactgggactctacaggcaaagagcaaggtgaggctgggtgggtggaaaattacatcaggggtaaggggtcctagttcaaccaac

SEQ ID NO: 838761 - DNA, 120 bp, Artificial Sequence
  ENSG00000287259_6 (sequence is synthesized)
ccccacacctcgagcgaacaatcaattctgcagtggacctccacttggtcctccaactgggtattctccaattcaattctgacattatccacctgagtgtcagatcctgcagggtgaggg

SEQ ID NO: 838762 - DNA, 120 bp, Artificial Sequence
  ENSG00000287259_7 (sequence is synthesized)
atcagtctccatgactgccccccgactttcaaagccaattggaagccccaagttctttaacctgtccttcaatgaacagctctaaattaagctataaactgaggttcccatggctccatc

SEQ ID NO: 838763 - DNA, 120 bp, Artificial Sequence
  ENSG00000287259_8 (sequence is synthesized)
ttcccatggctccatcttcaggttccactaatttgctggagcagctcacagaactcagggaaacattatatttacatttatgggtttatgactgtcaggtctctgagcccaagctaagcc

SEQ ID NO: 838764 - DNA, 77 bp, Artificial Sequence
  ENSG00000287259_9 (sequence is synthesized)
accacaaaagaagttgatttgttcctgtcccactctaactgatcaattgaccttgtgacattccttctcctggacag

SEQ ID NO: 838765 - DNA, 120 bp, Artificial Sequence
  ENSG00000287259_10 (sequence is synthesized)
actgatcaattgaccttgtgacattccttctcctggacagtgagtctcaggggctccccaccaagcaccttgtgacccctgcccctgcctgcaagagaaaatcccctttaactgcaattt

SEQ ID NO: 838766 - DNA, 69 bp, Artificial Sequence
  ENSG00000287259_11 (sequence is synthesized)
tccactacctacccaaatcctataaacttgcacccaagtgaaaataaacagccttgttgctcacacaaa

SEQ ID NO: 838767 - DNA, 120 bp, Artificial Sequence
  ENSG00000287254_0 (sequence is synthesized)
agctgaaaggggagcccggctgggctgcgcttccttccccggccgctaggggccgcttccccgctgctctgcggccgccagcctcagggccaggattcattgtgtaatgaattgagtggt

SEQ ID NO: 838768 - DNA, 120 bp, Artificial Sequence
  ENSG00000287254_1 (sequence is synthesized)
gggaaaacagcaatgaatgagacagatccagtcccggcactggccagtcctggcacaaagaaggctgcccagccctggggaagtgacaggcacccgcttgctaccactcagctccagctg

SEQ ID NO: 838769 - DNA, 120 bp, Artificial Sequence
  ENSG00000287254_2 (sequence is synthesized)
tgcgctaccacgtgggaactcaggctcaatgttgccaaaatagcttcttcaagagaagccagaaatcacggttgttgcgcaaaattccctgagctttaaatatcccatggggatctacta

SEQ ID NO: 838770 - DNA, 120 bp, Artificial Sequence
  ENSG00000287254_3 (sequence is synthesized)
aagttaaattgctgccacccagcaattccattcctgggttgattcccagtgggaacaggagcttagggtcacctaaagacatatccatggatgtgcctagcagcttcattcatgatcacc

SEQ ID NO: 838771 - DNA, 120 bp, Artificial Sequence
  ENSG00000287254_4 (sequence is synthesized)
aatatactactgacgcattcacagcatggatgaatcccagagacataatgttcagtaggagaagcaagataacaaagagaataccccgagtgatttcattctgtgttgttcaaggccagg

SEQ ID NO: 838772 - DNA, 120 bp, Artificial Sequence
  ENSG00000287254_5 (sequence is synthesized)
cagaagtaacctatgaaaagagttggggaagcccagggtttccttacttcggcctcattgacatttgtggctaaatgatcctgcgtgatgggggctgtcctgtgcactgtaggacgttga

SEQ ID NO: 838773 - DNA, 120 bp, Artificial Sequence
  ENSG00000287254_6 (sequence is synthesized)
gcagaatccctggcctccaaccattacgtaccagcagcaccccccagttgcgacaaatttctgttgttaggggcataatcaccatcagatgggagccactggtccgggtgtagtggctca

SEQ ID NO: 838774 - DNA, 120 bp, Artificial Sequence
  ENSG00000286882_0 (sequence is synthesized)
aagtattcactttcagaattagatcctgtgaacagttttaaaaaatcatctgtgtttttcaagatgaagagaagatgaggattttataaatgtgaattcaatatgaggattttataaatg

SEQ ID NO: 838775 - DNA, 120 bp, Artificial Sequence
  ENSG00000286882_1 (sequence is synthesized)
tgaattcaatagggaaataaaaatgaatatgagtcatattcttttaccgtctgttggttggcagtgtttcagcagtgcattgggtagtgtgtaaaggtaggagaaggtagaaaggaagtt

SEQ ID NO: 838776 - DNA, 120 bp, Artificial Sequence
  ENSG00000286882_2 (sequence is synthesized)
agaaaggcatcttccttcatccacttctacaaccatgcccctcactggggaccagacattagggcacagtattttatcacgagctttctttttgtcgagactgtatgctacacaagtgca

SEQ ID NO: 838777 - DNA, 120 bp, Artificial Sequence
  ENSG00000286882_3 (sequence is synthesized)
tgcaagcctgtcaccattacttagttattcccatctatggtctaggaaccccaaagggtttcttcagaagtgctacaatgttgtcatattctcaaagacttcctgaagactaactgcatt

SEQ ID NO: 838778 - DNA, 120 bp, Artificial Sequence
  ENSG00000286882_4 (sequence is synthesized)
tcaattgggaatattatttaaaaggaggtttatctggcatagaatacaagagtttgagaaacaccaccctatttctcttaacgacagtgaacagcacaatcctgcagctgtcatgccaga

SEQ ID NO: 838779 - DNA, 120 bp, Artificial Sequence
  ENSG00000286882_5 (sequence is synthesized)
tgttagataaatctgcttctgaaccccagagatggtctcataacacaaccaaacagtatttaacacacccctcctcaagcagacacactataagcactgcctacccctggggctggacat

SEQ ID NO: 838780 - DNA, 120 bp, Artificial Sequence
  ENSG00000286882_6 (sequence is synthesized)
gaacactaacaatgaatgtacttggctcacctctttctacttgctctcttgcttgctgatttgtcattccagggtacggacaaacccctaagctgaaggtctcccagagaaggatgccaa

SEQ ID NO: 838781 - DNA, 120 bp, Artificial Sequence
  ENSG00000286882_7 (sequence is synthesized)
agctccacacgtcactctctgaactgtatctccctggaagaggaacaacaaccataaccacatgaggcacagtagacaagctaacctagcagaatgtggtagaagtgatggtatgaagtt

SEQ ID NO: 838782 - DNA, 120 bp, Artificial Sequence
  ENSG00000286882_8 (sequence is synthesized)
ctggagtgtaggccacaagagaccttgcagcttccaacttttgtctttctggaacattcctgataccatgtaaagaagcccaggaactgcttcttggaatacctctggcgccagcaaatg

SEQ ID NO: 838783 - DNA, 120 bp, Artificial Sequence
  ENSG00000286882_9 (sequence is synthesized)
ccatactccgaggattctactactaccacttttagtctgatataaagagaagaaaaatttaaacctggcatattgaaactatttaatttagaggcactcaaattagagcaatagagataa

SEQ ID NO: 838784 - DNA, 86 bp, Artificial Sequence
  ENSG00000287256_0 (sequence is synthesized)
actcactcttctctctcttgctgccttgtgaagaaggtgactgcttccccttctgccatgattatgcagctcactatgaggctatc

SEQ ID NO: 838785 - DNA, 120 bp, Artificial Sequence
  ENSG00000287256_1 (sequence is synthesized)
ctctgcccccaccccctacattagctttatatccaaatgtgactcggaggctggtgagctcaaggtgatcaatgacagctccaatcaaagccacccagtagacagtgcactcaccactcc

SEQ ID NO: 838786 - DNA, 120 bp, Artificial Sequence
  ENSG00000287256_2 (sequence is synthesized)
ttgatataaaaggtgttttatttctcatccttttatttttgtcactgaaagaatgcttcccatgtgtggattaattaaagtgtaaacattaaatattgattgatgcattatcagcatgga

SEQ ID NO: 838787 - DNA, 120 bp, Artificial Sequence
  ENSG00000287257_0 (sequence is synthesized)
aagctgggctggaggtgacggcagagccacagtggccacagagcccccacgtgaacctacacggatctgcctggtttaggttctgctgaactccagggtgaggaggacctggtctccatt

SEQ ID NO: 838788 - DNA, 120 bp, Artificial Sequence
  ENSG00000287257_1 (sequence is synthesized)
ctcaaagacatgaagaggttgacaaagaagagtcacagaagtgacaagtgtcctgctcccagccccgttcacacactcacccatcaagtgtggcagggacagccgcctcttaccatccac

SEQ ID NO: 838789 - DNA, 120 bp, Artificial Sequence
  ENSG00000287257_2 (sequence is synthesized)
cttgggacctggacctaagtggaggtttctggaggggcagatccaggggaaagggtctcctcagaagcagccgccattcagaggacctgagatgagaacctcatcacgccctcatcagac

SEQ ID NO: 838790 - DNA, 120 bp, Artificial Sequence
  ENSG00000287257_3 (sequence is synthesized)
agaggagatccgcggtgtctccgagcctggtctcccactccccacccagcagcgttccctccgctcaccccaagcttagaacattctgcttcccctaagatcagctgccgcagtggactg

SEQ ID NO: 838791 - DNA, 120 bp, Artificial Sequence
  ENSG00000287257_4 (sequence is synthesized)
atcctggatttagggtgggctctaaatgcaatgacaagcatccttacgagacacagagacacagagaaaaggccatgtgaagacggagcagggagtggcgtgacgcatctacatgcccag

SEQ ID NO: 838792 - DNA, 120 bp, Artificial Sequence
  ENSG00000287257_5 (sequence is synthesized)
gagcacccgggagccaccagaagctgggagagaggcctgggccggagcctcccgcagaggccccaaaggatcagcctggtcgacaccttgattttggacttctggcctctagaaccatct

SEQ ID NO: 838793 - DNA, 120 bp, Artificial Sequence
  ENSG00000287257_6 (sequence is synthesized)
tcagcccccaaagttcgtggggctttgttgcagcagccccagcaaactgtcacgggggccctcctcccctgctaagcctggtacccaaagctccccagctatctggggctaaccacactg

SEQ ID NO: 838794 - DNA, 120 bp, Artificial Sequence
  ENSG00000287257_7 (sequence is synthesized)
accctgggactttcaggtcacccgtgtgtcccactcttctgcttaaccttcagtgcctgtgtggtcacagcttctctctcgtgatatgagtcctctgggcctctgagtgctcatctgccc

SEQ ID NO: 838795 - DNA, 120 bp, Artificial Sequence
  ENSG00000287250_0 (sequence is synthesized)
ttttaagtcttccgtggatgaaggtttagagccattagaaggaaaaaattctttaaaagatgagcaatattctcaaggggaggctagctggagttggaattacccagtgaagttgttctt

SEQ ID NO: 838796 - DNA, 120 bp, Artificial Sequence
  ENSG00000287250_1 (sequence is synthesized)
aagaaggctactgtaaaaccagtaacatgaaggtgaatctgtggtttggagctccccctacagtttgtttgaagactggtctctctcatctccaagaaaaatgaccactttggaaaatga

SEQ ID NO: 838797 - DNA, 120 bp, Artificial Sequence
  ENSG00000287250_2 (sequence is synthesized)
gttcttacgcatgcttggaaatatttttaatgtgtatatattgtttaaatttatgtttaaatgtgtacatgaggaatccgttttatgttagacatatttttttcgtttgttacctgcttg

SEQ ID NO: 838798 - DNA, 120 bp, Artificial Sequence
  ENSG00000287250_3 (sequence is synthesized)
ctagctgtggactgtataatttattttccaataagtcaaagtctttgttttaggtcagagtgccattttcaaggttgcgaatttcaacaagagttaaatgacacgtgaaactttatggct

SEQ ID NO: 838799 - DNA, 120 bp, Artificial Sequence
  ENSG00000287250_4 (sequence is synthesized)
gggcctgaattatgaccaagcactataacttttaatgagggataaagaattgcatgccactatgtgtgtactctgaaaaatactcatttagttagtcatttgacaaatactgattatcat

SEQ ID NO: 838800 - DNA, 120 bp, Artificial Sequence
  ENSG00000287250_5 (sequence is synthesized)
ctatgtgcccgacactgtttaaggcattaggcacatatcaatgaacaaagcagacaaaaatttccctgcccttggggatcttgtagtttagtgatggatggaggagtagtggattataaa

SEQ ID NO: 838801 - DNA, 120 bp, Artificial Sequence
  ENSG00000287250_6 (sequence is synthesized)
aattatcatgataaagaagtcaattacatagtgtattaaaaggttcaaagtactgtgaaagcaatgggccctggcacaggaaatcagattgaaggaagggagaagcagtgaggcaactgc

SEQ ID NO: 838802 - DNA, 120 bp, Artificial Sequence
  ENSG00000287250_7 (sequence is synthesized)
aattccaaatagtgtggtcaaggaaactcccattgaaaagatttgagaaaagacttggaggtaagaagagctttccaggcagggaatagcaagtacagaggccttcaatcaggagcttgc

SEQ ID NO: 838803 - DNA, 120 bp, Artificial Sequence
  ENSG00000287250_8 (sequence is synthesized)
tggtgcattcaaggcacagtaaaggggctcagcgtgcctggagtggagtgaaggggagtgtagctgtaaatcatatagggcaagagtcagcaaaccagtgcagcctgtttttgtaaataa

SEQ ID NO: 838804 - DNA, 120 bp, Artificial Sequence
  ENSG00000287251_0 (sequence is synthesized)
agtagaggaagcggcagcctgaggctgatgtgagcactgggctgggagtcagcggttctaagtgtgagcactgggctgggagtcagcggttctaagtgtgagccccagctctgcaaccta

SEQ ID NO: 838805 - DNA, 120 bp, Artificial Sequence
  ENSG00000287251_1 (sequence is synthesized)
ccaacctatttgggactctccacttctcatctgaaaatgcataggccagaaatagctgctgccctgtctgctgttatcatctcagtcagtgaacaagtgtgtggggatcatcagtctgta

SEQ ID NO: 838806 - DNA, 120 bp, Artificial Sequence
  ENSG00000287251_2 (sequence is synthesized)
ccaggtacccctgtagacatgggactggcattgtgcgttcagacatgggccctgactgcacgtctcacatcccagtggcgaggagacagacagcaaacaggacaatgagctccaagcaag

SEQ ID NO: 838807 - DNA, 120 bp, Artificial Sequence
  ENSG00000287251_3 (sequence is synthesized)
gatggtgcaggaagagctcaggacggatcttgccacctccatcttagccagagggttttcctgagctcaggagccaagcttctcagacccattcttgcacactgcaaatttctaatccat

SEQ ID NO: 838808 - DNA, 120 bp, Artificial Sequence
  ENSG00000287251_4 (sequence is synthesized)
tgctaagggccactaatcccaaactgaatttagagaaacaaacaggaatagatgctttttaaaatacttaccaacattcatatttcttctctgattttgaaaaacataattaataataaa

SEQ ID NO: 838809 - DNA, 120 bp, Artificial Sequence
  ENSG00000287251_5 (sequence is synthesized)
acacttgggatcatgcagcaaagatactttatgggaatatttattatgcaaataactaaattaattgcatacatttgcatcctattaagcattgaaaagtaaagcagctttaatagaatt

SEQ ID NO: 838810 - DNA, 120 bp, Artificial Sequence
  ENSG00000287251_6 (sequence is synthesized)
aaatctacttttaccaaaatgatctcatctggcaggaagagttagggcaagattggtttggattgagattttccatcctgcttaggaattctaaagttctatagaatgaaagtttttctt

SEQ ID NO: 838811 - DNA, 120 bp, Artificial Sequence
  ENSG00000287251_7 (sequence is synthesized)
gataataatttttaaatcataaaaatgaaagaaatgttattagaagtcctacgatttcaccaccaacttcaatgccctaatgtggctatccatactgcttttccaatatcttccaaacgt

SEQ ID NO: 838812 - DNA, 120 bp, Artificial Sequence
  ENSG00000287251_8 (sequence is synthesized)
cgattatggatttatataagttttttctactaaattatgtcttacagacattattgaaacagtatacttgctaaacatctgtgaattttgtgtaagagtaaggtcccaagattttctaaa

SEQ ID NO: 838813 - DNA, 120 bp, Artificial Sequence
  ENSG00000287251_9 (sequence is synthesized)
atgcgatggtgcccaacgaatacctccagcctgctggggctggagctcctgtctcagtctaaccctgcccagtaaggagctgactcagcccacactgctcaggaggccctggggccctct

SEQ ID NO: 838814 - DNA, 120 bp, Artificial Sequence
  ENSG00000287251_10 (sequence is synthesized)
gggcttgcaggtattcctgccctcagctggggccagcccaggcttcggtgatgcggtttcctcttcagagggcactctcgggcctctctcaggacgtctccaccccacacacgctgctgc

SEQ ID NO: 838815 - DNA, 120 bp, Artificial Sequence
  ENSG00000287251_11 (sequence is synthesized)
ccacacctcctttcagggaaggggcgcagatacctcccatcttctttcctacacctcagctttgctcccttccccttttactctgcacaccatggcaattttcacccctttttggacaaa

SEQ ID NO: 838816 - DNA, 120 bp, Artificial Sequence
  ENSG00000287251_12 (sequence is synthesized)
aatttcctgacaggacttaacctccctggcacttaaaatctgaactctaacctatgttatttgcaacagaaagaaaagtgcttttatctgtcctttcaggtaaattatttatttatgttt

SEQ ID NO: 838817 - DNA, 120 bp, Artificial Sequence
  ENSG00000287251_13 (sequence is synthesized)
ttctttatagcgccaccgttcagatttgctggatttggagacaaaatccaggtttgaattgtgattctatttcttactgctccgtggcctggggcagccaggtcagctctctgagccctg

SEQ ID NO: 838818 - DNA, 120 bp, Artificial Sequence
  ENSG00000287251_14 (sequence is synthesized)
tggtctgcatggctgagtgagaatgcccacctccactgagaaccagccagtgaggtgccagcaacccatctaacacaggcaaagaggatttcttaatgaaaacattttgtcttgcacaaa

SEQ ID NO: 838819 - DNA, 120 bp, Artificial Sequence
  ENSG00000287251_15 (sequence is synthesized)
acaatactcaatttaagaaacagcaaatgcagaaaaggaaaaagaggattagaaaactatagaaagagctcagtgcatggcaagagtttaatgaatattagttcttcccatttagttttg

SEQ ID NO: 838820 - DNA, 120 bp, Artificial Sequence
  ENSG00000287251_16 (sequence is synthesized)
ctttccaacccactaagcatgcttcgaaagacagagaagaaagaggggttacagcaaaagcagtgataagagtttcttgcatcttcacagatcaagcatcttggtctgcaaccaggtttg

SEQ ID NO: 838821 - DNA, 120 bp, Artificial Sequence
  ENSG00000287251_17 (sequence is synthesized)
tctgaacaaagggttaggagccaaagtttggggtggtgaaagccatggggcccatgttaggctgaggacaagtgtgcatatgggtggcaggtggctttgcccagaatgaactggagggtg

SEQ ID NO: 838822 - DNA, 120 bp, Artificial Sequence
  ENSG00000287251_18 (sequence is synthesized)
acgatcctggatctggcagtgaagcggcagtgtctctgctcagccggagcgggaggtgtggagccacttcgtcacactctcagctgcacggctttgggccacagcctgtagacaccggtg

SEQ ID NO: 838823 - DNA, 120 bp, Artificial Sequence
  ENSG00000287252_0 (sequence is synthesized)
atgcctgagctcaatcttgtgtgttttaaggaaacagaaaaaaagggaaaagaaaaagtcttttcctgccttgtacctctgtctaactaaaaagagaggcagcttcctcacagaaaaata

SEQ ID NO: 838824 - DNA, 120 bp, Artificial Sequence
  ENSG00000287252_1 (sequence is synthesized)
tcactgatcttaaaactgaattcaaagaactgaagaaggaagtttctagtgtttcacttctgtggatttggcccagaaaaatccacagagaaggtgttaaagtcaggtaatttatcctgc

SEQ ID NO: 838825 - DNA, 120 bp, Artificial Sequence
  ENSG00000287252_2 (sequence is synthesized)
atcccttagaaagccctagagccaatcaaaactctccccaaagggctgaaatcaggctctgagggttgtgggagtgacagagccatgtaagctctctggattcacaggtttaggtcactg

SEQ ID NO: 838826 - DNA, 120 bp, Artificial Sequence
  ENSG00000287252_3 (sequence is synthesized)
ctgatggattcaattactatgggaggacatttcatgctgtctaattttcattcaattggatgattctcccaaatccttcgttctttaccataagtttactcattattttagctttacctc

SEQ ID NO: 838827 - DNA, 120 bp, Artificial Sequence
  ENSG00000287252_4 (sequence is synthesized)
aaggcactttcccctgggaatttttctgagaccagtgtgagttaggtgtacttcctgtgttttgatttgtcatactaaaaatcttacaagtatgaatttctacatgaaataaaggtaaga

SEQ ID NO: 838828 - DNA, 120 bp, Artificial Sequence
  ENSG00000287252_5 (sequence is synthesized)
tcttaatcttaacaatctaggtcttagatttcacggtatgggcattaaacaagtgtttatttctgtatagcctttttgatgagtacccagcaatcccacttctacgaatgtctatcagtg

SEQ ID NO: 838829 - DNA, 120 bp, Artificial Sequence
  ENSG00000287252_6 (sequence is synthesized)
aaattccagcttagctctgtagtggcttcatagaatccagtcattgcagcaatttcaggcagcagagagttggggcaacctgcatgtccatcaccagaatgagtaagtactgcagtgaat

SEQ ID NO: 838830 - DNA, 120 bp, Artificial Sequence
  ENSG00000287252_7 (sequence is synthesized)
acaagtttgtgtgaagtttcatgctctgcaggagtcacaactaatgaagcagaggtacatgtataccaaaaacaggtggatttttcagtgcaaagtaaaatctaagaaacaaaatgtata

SEQ ID NO: 838831 - DNA, 120 bp, Artificial Sequence
  ENSG00000287252_8 (sequence is synthesized)
tcaggatgtatagtacaataccaaaattaaaattacagagttacacaaaatacagtgggtgaggcagtagctgaatgactaatgccagagggaatggtggcaaattgtgtgaagagggga

SEQ ID NO: 838832 - DNA, 120 bp, Artificial Sequence
  ENSG00000287252_9 (sequence is synthesized)
agaaactaagttaaattatctgattggcacacttgccacctcttggaagacacctgattacactcagtcccctgccctcttgctggccaggaagataattggtcacaggtggccccctga

SEQ ID NO: 838833 - DNA, 120 bp, Artificial Sequence
  ENSG00000287252_10 (sequence is synthesized)
ccccacctcactccacagtttcttatggcaaagcgtttccttgacagaaaatgctaaatgtcgccaaagcccctcccttggggtcctggtttctaaaaagtctttttttctgtaatcaag

SEQ ID NO: 838834 - DNA, 120 bp, Artificial Sequence
  ENSG00000287252_11 (sequence is synthesized)
gacatggtatttatgaggatgtgggtcactgggcgaaagccttccttggtcttgaatcatggattttgggtattgttggttttggtgaatggaatatataaggaaagaaaaaaagggcca

SEQ ID NO: 838835 - DNA, 120 bp, Artificial Sequence
  ENSG00000287252_12 (sequence is synthesized)
caaatatgaaaatgctctaaaagaaacaataatttcacaatactgaacgtgagccattcaggaaatgtccattttaaattttaaagatagctcctgggtgaacggtggtttttgtaatgc

SEQ ID NO: 838836 - DNA, 120 bp, Artificial Sequence
  ENSG00000287252_13 (sequence is synthesized)
agtggttgtcacgtgtgccacccacgcgaaatggaaactgggcagaaatatctccttatgggtctctctctctccctctctcgctctctacttcagcttgggtaatttgtttcactaaac

SEQ ID NO: 838837 - DNA, 120 bp, Artificial Sequence
  ENSG00000287252_14 (sequence is synthesized)
tcaactcaagctctcttaaacccaggtctggtgcttaaaacaatatgtctttattcccttacaggtctaggggtcagaaatctgcaatcagtttcggtggaccaaaatgaaaatgtcaaa

SEQ ID NO: 838838 - DNA, 120 bp, Artificial Sequence
  ENSG00000287252_15 (sequence is synthesized)
cagggtgtctgacaccctccagaagcaccagaggagaagcagctttccttggccttcccagccaaatctccctctgcctctctcccctggtgacgacaatggctggggtcttgacttgcc

SEQ ID NO: 838839 - DNA, 120 bp, Artificial Sequence
  ENSG00000287252_16 (sequence is synthesized)
aagtgcagcgtggcccgtactggtcacctgggtatagctttactgaatttcgcagatctggaaacggagaagggactggatctccaaacttggactgccttggactgaccctggcctgga

SEQ ID NO: 838840 - DNA, 120 bp, Artificial Sequence
  ENSG00000287252_17 (sequence is synthesized)
aggtgtgggctcaggactccgagctcaagtcagtctgttcccccaacccctaacccactgcatccgggtgaggagttgggcccgagcgccacagcgcagatagggttgttaggagcgaaa

SEQ ID NO: 838841 - DNA, 120 bp, Artificial Sequence
  ENSG00000287252_18 (sequence is synthesized)
gactggagacccagggactgtggggctgggctggtggggccactgctaccgactaagcagtacgggccgcctggaagaccgaaggcggagttcgctgatgcggaagccaaggcacagggc

SEQ ID NO: 838842 - DNA, 120 bp, Artificial Sequence
  ENSG00000287252_19 (sequence is synthesized)
aataaggatccgcgccatttcttgtgatgtcacctgaagccttggcgggtagctgcctctcatccattcggaggacagggctccagccaccggcagctctgaaagagtttgaagaattta

SEQ ID NO: 838843 - DNA, 120 bp, Artificial Sequence
  ENSG00000287252_20 (sequence is synthesized)
ttgttcacagatggtatttaaatggacttatttctaaaagtcacattcctttattacttatttgttattagaagtacccattttcatatgtgtttaaaactatttgtgtctcaaattctc

SEQ ID NO: 838844 - DNA, 120 bp, Artificial Sequence
  ENSG00000287252_21 (sequence is synthesized)
aggagattgatgcatcccagtttactctttttggcatatgtttttactcataaattaggttaaatttcatacttgttttataaaatttagttatttggttacattaaaatatttgtatcc

SEQ ID NO: 838845 - DNA, 120 bp, Artificial Sequence
  ENSG00000287253_0 (sequence is synthesized)
agcttcgcatagatcgcgcccgcttccggctgctcccggtgtgagctgctttcgaggagtccaggaggctttacccggcctcggatgtctggcttttcatgctggggtctccttggccgg

SEQ ID NO: 838846 - DNA, 120 bp, Artificial Sequence
  ENSG00000287253_1 (sequence is synthesized)
ggtcctttaaagttttggcaactttggggacaaggactcgttggcgctaagaagaagcatactaggacccgtacacagagaggtcttttgctgcctattcagccggtaataccagctgcg

SEQ ID NO: 838847 - DNA, 120 bp, Artificial Sequence
  ENSG00000287253_2 (sequence is synthesized)
atgagaaaatcatgacaacctctccaagtccaacaaggcccaacagaaagttattttcggaaaggattacaggaagaacgattttgcgtatctcagacgaagaaattgaagagaacatta

SEQ ID NO: 838848 - DNA, 120 bp, Artificial Sequence
  ENSG00000287253_3 (sequence is synthesized)
ttctagttgcctaaggctgctttacattcacattactcaatctcctcttacttgaaacaattttaaaaatctcactgaagctaagcgagggtatggactgcacaggagttcgaaggaaca

SEQ ID NO: 838849 - DNA, 120 bp, Artificial Sequence
  ENSG00000287253_4 (sequence is synthesized)
aaaacacgtcccaaagattggagaatgtttcgtcttttctctatgtctgaaaagttgtcatttacaggagggtggtacttctcaatcgcatgagattgcctcttgtttctacgctgaagc

SEQ ID NO: 838850 - DNA, 120 bp, Artificial Sequence
  ENSG00000287253_5 (sequence is synthesized)
ggaaagtaaaacacagctaaatttgatcccctttactctcccagccattcaaaccaccagcacattatcaaggttgaagaagttagatttagattcagagtcttgggaatgggctacagg

SEQ ID NO: 838851 - DNA, 120 bp, Artificial Sequence
  ENSG00000287253_6 (sequence is synthesized)
ttgagaaaattatctttccttccctctggagtcctcttcctcaagaagagactgaaaaacaaacagatgtccctgaatttgggcccgaagcccccagtgagataaactgttcccagttgc

SEQ ID NO: 838852 - DNA, 120 bp, Artificial Sequence
  ENSG00000287253_7 (sequence is synthesized)
gtggaattggcttttaactccttaactgggcagagggagtatcaaaacttctctttgaaaagaatttcactttatgatcgattaatggccatttattgaactgctaggaaagagctatat

SEQ ID NO: 838853 - DNA, 120 bp, Artificial Sequence
  ENSG00000287253_8 (sequence is synthesized)
gaaagtaaattgcaccaaaatttcttttttaatatcctagttctattctgcaattctaacagcatctatactgtgaaaataaagacacctttagtcttgaagttaataagtgaaattaaa

SEQ ID NO: 838854 - DNA, 120 bp, Artificial Sequence
  ENSG00000230947_0 (sequence is synthesized)
atcggtttatttcaaaggatgttttattttattttctcctcagacatactttatcatcccttaaagtcagtagctcaaaggaaactttaaaagctataaataggccgggcacggtggctc

SEQ ID NO: 838855 - DNA, 120 bp, Artificial Sequence
  ENSG00000230947_1 (sequence is synthesized)
aatcccagcactttgggaggtcgaggaggcagcagtcgcagccggcctgcagagtgagatgcagtgccagagggcttcaggaggaggtggcattgtgattgatgtctgaagagtgtctcc

SEQ ID NO: 838856 - DNA, 120 bp, Artificial Sequence
  ENSG00000230947_2 (sequence is synthesized)
ctccatgataatggagtcagtgcaaagtcccaaagactgggaaggagcaagaggaaaggatagctcatatccagctgccccactccaaaaaaaaaaaaaaaaagaggaaaggacgggcac

SEQ ID NO: 838857 - DNA, 120 bp, Artificial Sequence
  ENSG00000230944_0 (sequence is synthesized)
atattgggagttggagctgcaacatctgaatgagggcgtacagaattcaatctacagctaccttcctatgaactgtacccatcaaagaatgctacagaaactgtgggatctgaacggcac

SEQ ID NO: 838858 - DNA, 120 bp, Artificial Sequence
  ENSG00000230944_1 (sequence is synthesized)
cttgaagagaaaggattattcttggaaagaagagggaggatgtcccagtttaaaagaggcactcatcaaatgggaagctacaatcaaacatcttcaaggcattttcacccataaatatat

SEQ ID NO: 838859 - DNA, 120 bp, Artificial Sequence
  ENSG00000230944_2 (sequence is synthesized)
gagttcaagtgatcctcccacctcaggggaggtagaattctcagaggggccccatgatctccactcccagatgtcactcccatgattatgtaggttaaaggaattttgcagctgtgagta

SEQ ID NO: 838860 - DNA, 120 bp, Artificial Sequence
  ENSG00000230944_3 (sequence is synthesized)
tgtaggttaaaggaattttgcagctgtgagtaaaattactaatcaagtaacctttagttaggaagattgcccaggtgggtgtaacctaatcacctgagtcctttaaaacagggaattttt

SEQ ID NO: 838861 - DNA, 120 bp, Artificial Sequence
  ENSG00000230945_0 (sequence is synthesized)
cataggagctgactgagttggcttggctgtacataggaggaagaccctgatccctggtgctcaacacagaaatgcttcaatgataccctgagattgttttaccttgcaacactctctgga

SEQ ID NO: 838862 - DNA, 120 bp, Artificial Sequence
  ENSG00000230945_1 (sequence is synthesized)
ctggctgggatactggtatcttgagtgagtcacagcaggagatacgtgctggagctgaagaggttggagaggcagcagaaaaggtaggagacagcaagagaaggagagcagcctacagat

SEQ ID NO: 838863 - DNA, 120 bp, Artificial Sequence
  ENSG00000230945_2 (sequence is synthesized)
gagaagacaagtaatttaccctaaagttctaggactgctgttggtcaaaggaaaaatccttctgagagattttgattttaggttttgattctacttctgtttctatgaatgctagagaga

SEQ ID NO: 838864 - DNA, 120 bp, Artificial Sequence
  ENSG00000230943_0 (sequence is synthesized)
gagttaggaacagactataagaaatggttggtctggaggaaaaagggtaaaacttatgagggcccttgtgaattgatgaatatgaagacactaagaaagcagaaatagaactgagaagaa

SEQ ID NO: 838865 - DNA, 120 bp, Artificial Sequence
  ENSG00000230943_1 (sequence is synthesized)
tggcttagaatctacttggagagagtcaaacacagaatccctttgaatttaatggccattccaggtgatttgaacagccaaataagaaacaggtcctcttcaatgtacaatctgccaagt

SEQ ID NO: 838866 - DNA, 120 bp, Artificial Sequence
  ENSG00000230943_2 (sequence is synthesized)
cgggacttgacagccctacggctcgatcagctttctgttttcattgccttacgatgccatgagtggaactattgtcaaatcagagttcactccccagcttttcagtctttcccctaattc

SEQ ID NO: 838867 - DNA, 120 bp, Artificial Sequence
  ENSG00000230943_3 (sequence is synthesized)
ttgctctatcagaggtcgaggacaacagtataatgattcataggttctacttcctggcaagtaatcattttcccacgggcccttgtgaattgatgaatatgaagacactaagaaagcaga

SEQ ID NO: 838868 - DNA, 120 bp, Artificial Sequence
  ENSG00000230943_4 (sequence is synthesized)
ttaagaatctacttggagagagtcaaacacagaatccctttgaatttaatggccattccaggtgatttgaacagccaaataagaaacaggtcctcttcaatgtacaatctgccaagtatg

SEQ ID NO: 838869 - DNA, 120 bp, Artificial Sequence
  ENSG00000230943_5 (sequence is synthesized)
aagtctgaatgaccatcattattatgtatttaatgtgcatagaaaatctatctgcaaccttccagagtgtaccagaagtttggaatgtacattattattggctccatctcaaaccactca

SEQ ID NO: 838870 - DNA, 120 bp, Artificial Sequence
  ENSG00000230943_6 (sequence is synthesized)
taaatcaaagaaaatagcagttccagaggaatcatcatagaggcttctaggcccccatgctgtgtgaacctggtgagaaagggaagtctgctctcactggacactggaactgtttgtctc

SEQ ID NO: 838871 - DNA, 120 bp, Artificial Sequence
  ENSG00000230943_7 (sequence is synthesized)
aggcagaagccaggaggagttaggaacagactataagaaatggttggtctggaggaaaaagggtaaaacttatgagccattcactgatgtattggtaagaggacaggagtcctggggaaa

SEQ ID NO: 838872 - DNA, 120 bp, Artificial Sequence
  ENSG00000230943_8 (sequence is synthesized)
gactgcctcatttacactccaaagacttgggttctgatctccatgtcgtggcttatcatagtgtaagccagttatgtacctctagaaatggaagtttctgctgtttataaactggaaata

SEQ ID NO: 838873 - DNA, 120 bp, Artificial Sequence
  ENSG00000230943_9 (sequence is synthesized)
atgatacatgtcctgactcctattgggttgttgcaaaggaatcaattgaaataagacaagactttctgaaggcactttgccaactttcagaactgtaaagattaagggactgctactatg

SEQ ID NO: 838874 - DNA, 120 bp, Artificial Sequence
  ENSG00000230943_10 (sequence is synthesized)
tgctgctcaggaaataacaggcacctgggaaaacccacgaagtaaggttttgtaagaagttgctctgctccctgggagaaaacgcggagctcaacactgccaagaggaacaagtctggga

SEQ ID NO: 838875 - DNA, 120 bp, Artificial Sequence
  ENSG00000230943_11 (sequence is synthesized)
ctcgaattgtctaatatggaaagaatgaaagacagctaataagcaactctctgcaagaagacatatggcttagagatgggatcttgctatgtggcccaggctggcctcaaactcctggcc

SEQ ID NO: 838876 - DNA, 120 bp, Artificial Sequence
  ENSG00000230943_12 (sequence is synthesized)
ccaataaggctgagaaaggggaaaacccacatctggatttaaatacaaggtattgggccagctgctggggattaaactttgaacaaaacagatagaatctatgtcctcatgggagtggct

SEQ ID NO: 838877 - DNA, 120 bp, Artificial Sequence
  ENSG00000230943_13 (sequence is synthesized)
aatgggagagtcggaacaaaaaaatagccaaggataatccagcaaatgatttggtgaatgctatcaaagagagaaatacacatgctctgggaacaccaagtagacagagtcttgctcttg

SEQ ID NO: 838878 - DNA, 70 bp, Artificial Sequence
  ENSG00000230943_14 (sequence is synthesized)
ctcggcctcccaaaatgctgggattaacaggcatgagccacagcacctggctgactttgcctgttttata

SEQ ID NO: 838879 - DNA, 120 bp, Artificial Sequence
  ENSG00000230943_15 (sequence is synthesized)
gcatgagccacagcacctggctgactttgcctgttttataatttcacacaataaaatcatgcactgtgcatttctttgtattgtctcctttcactcagcataatgtctgtgtgattcaac

SEQ ID NO: 838880 - DNA, 120 bp, Artificial Sequence
  ENSG00000230943_16 (sequence is synthesized)
cctgtggtgatgtgtcatttttttaaaaaaaattaagatattttattatatgaacataccataatttgtttattcatttggtgaacattgtgttgatgccaggtttgggccattatgaat

SEQ ID NO: 838881 - DNA, 120 bp, Artificial Sequence
  ENSG00000230943_17 (sequence is synthesized)
aggcattaacaagtaggttgactgtcgggacaagcccagggatggcattgtttctatttgctgataaatgactctggggctgtgaagactcagacccaaggagtgactcagaaagtcagg

SEQ ID NO: 838882 - DNA, 120 bp, Artificial Sequence
  ENSG00000230943_18 (sequence is synthesized)
agcaactctctgcaagaagacatatggcttaggttctgctgagctattggtgatttgattccatgcatatgtattcactactggtataagtatatacaatatatgtgtttctgcaaagaa

SEQ ID NO: 838883 - DNA, 120 bp, Artificial Sequence
  ENSG00000230941_0 (sequence is synthesized)
aggtgatggaaattagagtcctgcttaaaaaatacagatgttctggaatatcaagcaacaatttcaagctttcacacttctggattgaaacacagtttaaagagggaataaaaacctgaa

SEQ ID NO: 838884 - DNA, 120 bp, Artificial Sequence
  ENSG00000230941_1 (sequence is synthesized)
atagccatgttctagagaaacgatctatgaactcctctgctgaggtccccacacctgtccttgttctctttcttcccgaggctgagtgtctttcctgctgttctgtgatgcttttgcaac

SEQ ID NO: 838885 - DNA, 120 bp, Artificial Sequence
  ENSG00000230941_2 (sequence is synthesized)
actaatgaataaatctctctccaggaattgttttctttttcatgaaacacctctctcctcccttatctcaccacaaaaaagtaaaaaaataaaagaatatttaatgttcagaatccacaa

SEQ ID NO: 838886 - DNA, 120 bp, Artificial Sequence
  ENSG00000265692_0 (sequence is synthesized)
agagaccacccgtttctatttatggtggagccggcgatcggcgtgcggttggaagtggtgtccctgaggcacctgctcgcccttttcctgcgcctccgcaacgtcggctgcgaatgagtc

SEQ ID NO: 838887 - DNA, 120 bp, Artificial Sequence
  ENSG00000265692_1 (sequence is synthesized)
tcctaaaggacgcccgggaggatcggaaacagccgagtcccggcgcgggcagtgtcctgcgctcctccccggggtctggccggggtgggcccgaggcccccgggcccccggttaccgccg

SEQ ID NO: 838888 - DNA, 120 bp, Artificial Sequence
  ENSG00000265692_2 (sequence is synthesized)
cgggcgcgtctgcgtcctgacccggagggacccgcgggccgggccgtaccagtgatgcaagatggtcctttctgagcagagctcccctcgctcagtgctcctttgtttcacgtagaagat

SEQ ID NO: 838889 - DNA, 120 bp, Artificial Sequence
  ENSG00000265692_3 (sequence is synthesized)
cttcttgaggggactgtgtggccagtgcagcccaggcctccccaccctgcaccgttcaacagaagagcagctgacgcagggggccctcaacatgctcacccaaaagtcagcgagattctg

SEQ ID NO: 838890 - DNA, 83 bp, Artificial Sequence
  ENSG00000265692_4 (sequence is synthesized)
gggccctcaacatgctcacccaaaagtcagcgagattctgcaccggcccactagccttccaattgtaaactaaaaataaaatc

SEQ ID NO: 838891 - DNA, 120 bp, Artificial Sequence
  ENSG00000265692_5 (sequence is synthesized)
aaaaaagaaaaaaaaatcctaagccccccaactactgaaaagacccctcttggccaaggggtcccagagacaccttaaaaactgagtttccagccagacgtggtggctcacacctgtaat

SEQ ID NO: 838892 - DNA, 61 bp, Artificial Sequence
  ENSG00000265692_6 (sequence is synthesized)
ccaaaaaactgagtttccagccgtgacgggatggtaggtcagaggcacctcattctacccc

SEQ ID NO: 838893 - DNA, 120 bp, Artificial Sequence
  ENSG00000265692_7 (sequence is synthesized)
cgtgacgggatggtaggtcagaggcacctcattctaccccctcccttgtgtggtttagacagaattgaccggtgttcatgttaaaatagagatcataagactaagaacaggctctgtggc

SEQ ID NO: 838894 - DNA, 120 bp, Artificial Sequence
  ENSG00000265692_8 (sequence is synthesized)
aataaaataccaaattataaacaggacctcaggccaggcctggtgaaagtaagtcgtgcatccctgcacgtgaagaatcaactctgttctaaaggccgcaggtttctctttttctgtagc

SEQ ID NO: 838895 - DNA, 120 bp, Artificial Sequence
  ENSG00000265692_9 (sequence is synthesized)
agctaaacaagcactagcctcaagataagcagcattgaaacaaccgcagctcctccccctgccgaccctggccccacacccctgctccaccagccgtaactagagctttccttggacaag

SEQ ID NO: 838896 - DNA, 120 bp, Artificial Sequence
  ENSG00000265692_10 (sequence is synthesized)
agactcgtttcagtaacttttccctgataagagaccctgaccatagacgggttctggctggtttacagagattgcaccctcatgtgccttcatgtcctgaaagtactttttgaggtatac

SEQ ID NO: 838897 - DNA, 120 bp, Artificial Sequence
  ENSG00000265692_11 (sequence is synthesized)
cacctaattgtaatacgcttacatgctgccttcaccccaaggtgaacatgggtcatatgtaacatgcatgtttatccagcacacgtgtccgaataaacatgcatgtatattcgcaacgcc

SEQ ID NO: 838898 - DNA, 120 bp, Artificial Sequence
  ENSG00000265697_0 (sequence is synthesized)
aaattgaaccccagagctcagctcccaagaaggttaacataatggttttgctactcatcgtaacaacacctcacatcatgccttcagatcactccccagcatcattcttcaaattcaaac

SEQ ID NO: 838899 - DNA, 120 bp, Artificial Sequence
  ENSG00000265697_1 (sequence is synthesized)
gcgaaccagaagtgacaaatgattcttgtaatgcgctctttgacacaaatcatttctgattgctcgggaccccagacaaccttgagcatgcagaatcaagctgagagggagaagtcttag

SEQ ID NO: 838900 - DNA, 120 bp, Artificial Sequence
  ENSG00000265697_2 (sequence is synthesized)
gatcatttttaaaatgatgcagatctgtgggggattggtccgtgtggtgatgtgtctcatcttacaatgtcctatgcagccttcaaagcgtttttagatcctggcaaggaaacagacatt

SEQ ID NO: 838901 - DNA, 120 bp, Artificial Sequence
  ENSG00000265697_3 (sequence is synthesized)
catgtgcgtagggtttgcaaggcctctgcatatgatgttgctcttcatcctcccagcaagcttgggtttgctctgagaaaagcaggattttgtagccctggccccaatctttggacttct

SEQ ID NO: 838902 - DNA, 120 bp, Artificial Sequence
  ENSG00000280382_0 (sequence is synthesized)
acgccccagggggaggcctggtgaccttgagggaagtagggccctgtccttgaccacttaccagggcctgtccctcattcacccgacccaactttgctggggggtgtgaggtggggtaat

SEQ ID NO: 838903 - DNA, 120 bp, Artificial Sequence
  ENSG00000280382_1 (sequence is synthesized)
gactgcaggtgcctccttagactcctccatcccggtgctggatctggcatgacctctgaagtgcccggtgtccagcctggcagagtggacgacgagaaacagcagggggcccaggcccca

SEQ ID NO: 838904 - DNA, 120 bp, Artificial Sequence
  ENSG00000264598_0 (sequence is synthesized)
gagaactagtcacgtgcctctcctagattcaaggagagctgggaaaagcagtcagcctaggaagaaggagacagaggctctaaggcagttgtcaagaattactgcagcccagagaaagga

SEQ ID NO: 838905 - DNA, 120 bp, Artificial Sequence
  ENSG00000264598_1 (sequence is synthesized)
tttagctacccaaagggatagcaggataaattacagccagaagaattaacaattttgtaattggcatcttacattgtgaaggctcattccagtcacctgtcactgagcttttaaagttta

SEQ ID NO: 838906 - DNA, 120 bp, Artificial Sequence
  ENSG00000264598_2 (sequence is synthesized)
ggggaaagcatttggcggtgcctgactctgtgtgttcatatcttgctttcaacaactgaaggatgggtttctgagaacaagggtgagatacgtatttataaatgaaatcttttccatggg

SEQ ID NO: 838907 - DNA, 120 bp, Artificial Sequence
  ENSG00000227210_0 (sequence is synthesized)
gcggacgtcgatgggtttgtgggcgcagggcgcgaggcgcgaggcggtagctgggctagtcctgttccctggcgtctgggcctttctgctctccgcaaggagctgggtcgcgacctgtca

SEQ ID NO: 838908 - DNA, 120 bp, Artificial Sequence
  ENSG00000227210_1 (sequence is synthesized)
ctgccagccgtgcgctcgccctctgcgccccgtctcgtggtcactgccgccctccctcccgccacacctgtgatgatcgctatggagccgcgcctcaggtggcattactataaacctaag

SEQ ID NO: 838909 - DNA, 120 bp, Artificial Sequence
  ENSG00000227210_2 (sequence is synthesized)
aggagaggcgcccgttcgaataagggcaaattatttagtattttgtcttcaatgttcctggcagcttaaagtaccaactgggacacttgtcactagtttgagaagtgcagccatagtgac

SEQ ID NO: 838910 - DNA, 120 bp, Artificial Sequence
  ENSG00000227210_3 (sequence is synthesized)
ctcttttgaaagatgaatcaatgaattaagtcatttctgagaaaccaaggaggcctgttgaaggaggctggccctcctgtggcaggtaacccaacctccactgcccttggcaacaggaca

SEQ ID NO: 838911 - DNA, 120 bp, Artificial Sequence
  ENSG00000227210_4 (sequence is synthesized)
gttgactacaacaagctgccgctcagtcttttttccatagagaggacgtttttcccccagaacaagcaggtcttttgtaccagaaggaaaagattgccactcaccacttgttactttata

SEQ ID NO: 838912 - DNA, 120 bp, Artificial Sequence
  ENSG00000227210_5 (sequence is synthesized)
gccttcgaagcccaaccccaggtgctagctttgaaacccaactttgccacagaccagcatgttgatggagaggctctcacccacaagcatggagtgggagggtgatttcctgggagaaag

SEQ ID NO: 838913 - DNA, 120 bp, Artificial Sequence
  ENSG00000227210_6 (sequence is synthesized)
aaagccactttctttttggaagccaacgaatgccaagtagatgccaccaaagccagtgatggcttgtgaaagcccagtgtcctgggacaggaaagacaaggggatcccagccaagtctga

SEQ ID NO: 838914 - DNA, 120 bp, Artificial Sequence
  ENSG00000227210_7 (sequence is synthesized)
ctgcaatgaggccaaacgttgccccagagcaagacttcatctcccttttcctgacaaaccattgatggctgcgtttcacattaacctagattaaaagtctccttgaaatgtataattgta

SEQ ID NO: 838915 - DNA, 120 bp, Artificial Sequence
  ENSG00000227210_8 (sequence is synthesized)
attaattattggttcatttgtttgtctcacccccacccccagaatgttacttaatggtatggagggattacctttatctttgtatcatcagagatcaataaatgcatgctgaataaataa

SEQ ID NO: 838916 - DNA, 120 bp, Artificial Sequence
  ENSG00000227210_9 (sequence is synthesized)
tccaatccaggattccacattgcattcagtttcacatctccgtcctctccaacctgggacacttcctaagtctttctttgtcttttatgactttcacgtttctgagaagtactggaaaac

SEQ ID NO: 838917 - DNA, 120 bp, Artificial Sequence
  ENSG00000227210_10 (sequence is synthesized)
tattttgtgaactgagagtgtctctcaggtttttctaatctttcctcataatcctgaatttttagcaagaatactacaggtgtgctgttgtgtccacagtattgagcacagcatgtcagg

SEQ ID NO: 838918 - DNA, 120 bp, Artificial Sequence
  ENSG00000227210_11 (sequence is synthesized)
tcatacatgatgtcactatgtgtcatcactgatgatgttaactttgatcacttagttaaggtgatgtctgccagtttctccactataaagttactgtctttccctttgtaagcaacaggt

SEQ ID NO: 838919 - DNA, 120 bp, Artificial Sequence
  ENSG00000227210_12 (sequence is synthesized)
aacttgtgggttgttatgtgatttcaacctactgaattgtctgtagcatttgggaaggattgttcaggctggctacagagaaggaaatgagcaacatatttatgtatttgggccgagata

SEQ ID NO: 838920 - DNA, 120 bp, Artificial Sequence
  ENSG00000227210_13 (sequence is synthesized)
catacatgttaccatttctaacattttggataagacttaaaaatgggaaaagctcaaggtggcaagagaggaaaacacaccaacttcccagtcaatgtgacctgcccttccatcaccggg

SEQ ID NO: 838921 - DNA, 120 bp, Artificial Sequence
  ENSG00000227210_14 (sequence is synthesized)
taggtaggcagagagctaagtagcaatagtaaagactcctccctcacttacctgaacaagttttcctgtcttcattcaaggtataaccttcatagcactcacaatgataagagccacttc

SEQ ID NO: 838922 - DNA, 120 bp, Artificial Sequence
  ENSG00000227210_15 (sequence is synthesized)
tgtcattcacacagatgtgctcacatccgtgggtgttaagagcacacctatcaagagctatcaaaagatgattgggacaaatgtaaatgcatgcagagcatggcagaaataattgtgggc

SEQ ID NO: 838923 - DNA, 120 bp, Artificial Sequence
  ENSG00000227210_16 (sequence is synthesized)
acacacacacacacacacacagagctaatgaaacaagggaggggcagctgggagttgggaaccaaccctccggtcttggctctttcactaagagaccctgtgacataggtaagttttttc

SEQ ID NO: 838924 - DNA, 120 bp, Artificial Sequence
  ENSG00000227210_17 (sequence is synthesized)
agaccctgtgacataggtaagttttttcccttctgtccatctcaatttcattatctataaaattaagttatctctaagctttcttcctcccaaaaacttttttctaggattaaaaacaaa

SEQ ID NO: 838925 - DNA, 120 bp, Artificial Sequence
  ENSG00000227210_18 (sequence is synthesized)
acaaaaaaatatataattcccattcctcattgactccatgtatgtatctatgtaccagaccagtgagtacccctctaacttctttgctacttctagattccatgagcatctatgactaga

SEQ ID NO: 838926 - DNA, 120 bp, Artificial Sequence
  ENSG00000227210_19 (sequence is synthesized)
gaggaagagggtagcttgcatgtaatgaaataaaatccaggaaaattttcaaatcctcaaaagggctaagaatcttggacccgtttcttttcctttttgtgtgtgtgggttctgttttct

SEQ ID NO: 838927 - DNA, 89 bp, Artificial Sequence
  ENSG00000227210_20 (sequence is synthesized)
ccgtttcttttcctttttgtgtgtgtgggttctgttttctgaaagaaggtctccctctgtggcagtgcagcagaggcatttctcaaaca

SEQ ID NO: 838928 - DNA, 120 bp, Artificial Sequence
  ENSG00000227210_21 (sequence is synthesized)
ccaaaatgtgggaattataggcatgagctactgcactcagcctggacctctttcttagtagccttttctcctacgattttatttaaaacttacaaagtatggaaataagctgatttatct

SEQ ID NO: 838929 - DNA, 120 bp, Artificial Sequence
  ENSG00000227210_22 (sequence is synthesized)
atcatttcacttttctccctaagctccttttcagggaaaactgctgatgaacaccagtaaaccagccaaaaggcagttaggtaaaaaggggtcagagagtcaaagcacaaggccagtcca

SEQ ID NO: 838930 - DNA, 120 bp, Artificial Sequence
  ENSG00000227210_23 (sequence is synthesized)
aaacctggagcataggttcccaagtatttgattcagtcacggccccctacacaggcctcacctgaacacgttttcttgtcggcattcaaggtgtatccttggctacactcacagtggtgc

SEQ ID NO: 838931 - DNA, 120 bp, Artificial Sequence
  ENSG00000227210_24 (sequence is synthesized)
ttgccttccccatcactgatgcagacgtgctggcactggtgtgttccaagcacacaggggtccagcgctgtgagaggaagtttacaacagtcagcactgacacttaggaaacatctcaga

SEQ ID NO: 838932 - DNA, 120 bp, Artificial Sequence
  ENSG00000227210_25 (sequence is synthesized)
taccgtctcccatgtcaatagacattgctctctgggctcctttccgagtccatctttacttcactataaaaaaatggttatttgttttctgcctctggcttattagcaatgctactctta

SEQ ID NO: 838933 - DNA, 120 bp, Artificial Sequence
  ENSG00000227210_26 (sequence is synthesized)
aactagaaattgttgctaatttaaaagtacacatcttgctatatagactttctcaagggagaaagggaatttggagtttggagctgaagccaaacacttacataggccaggcaattggat

SEQ ID NO: 838934 - DNA, 120 bp, Artificial Sequence
  ENSG00000227210_27 (sequence is synthesized)
gttttatttggcttatccgcctccccatgaaaaaaagatttgtgcttccccaccacaagaaatgggagaacaataaatgcacagcctgaagtgacgtgagctagttgtcccattgtagcc

SEQ ID NO: 838935 - DNA, 120 bp, Artificial Sequence
  ENSG00000227210_28 (sequence is synthesized)
agaatctgatttccaaggttctatagcctatgtctaaacagaattctcacacaagtctgggtctaagcctagaacgaactcacaggtgggcagtggtacatatttgaacatgcaaatggt

SEQ ID NO: 838936 - DNA, 120 bp, Artificial Sequence
  ENSG00000227210_29 (sequence is synthesized)
agaggacagttcgggtaactgtcttctgaatatgtaaggtgggtgaagtcatccatacgctaaatccatagtgaactcatatgctaatacaaacaggtaaaaagaaaagaacaaaataaa

SEQ ID NO: 838937 - DNA, 120 bp, Artificial Sequence
  ENSG00000275830_0 (sequence is synthesized)
agtggaactctcaggtcacagagattcagggtggtcagaggcggtttgatgttttggggagaaagaacagccgtgaaggattctgtgatgcaggagaaggtgggaggcctcaggacagaa

SEQ ID NO: 838938 - DNA, 120 bp, Artificial Sequence
  ENSG00000275830_1 (sequence is synthesized)
tcagcaggtcaccatgctttcctgcgtcatccacctgtgggcctctaatgtgtttctatgaagtttgcattaaagtttcagccactatttttcagaaacatggtcaacctctccttccct

SEQ ID NO: 838939 - DNA, 120 bp, Artificial Sequence
  ENSG00000275830_2 (sequence is synthesized)
cctctatctgctgatagagttctacagaaaacaagggaatgacttgaggagggggattctgaaggttgttggtggattcctagaatgtagcccgcagaactgtgcctggaacgataccgg

SEQ ID NO: 838940 - DNA, 120 bp, Artificial Sequence
  ENSG00000275830_3 (sequence is synthesized)
atcactgcaaaagtacagcgaacagggtcgctttgaatattaaaggaggactttttcaaagtgtatagagagcagtcaaaagatcgccacagttgctctgtgttttcgtgagccagcttt

SEQ ID NO: 838941 - DNA, 120 bp, Artificial Sequence
  ENSG00000275830_4 (sequence is synthesized)
ctcggaaggactaagccagtggatcacaaacatcctggagagcagtgactctgtgattccatcacaagaatatgaaggactgagaagatctccagctctgcccattgcaccttcccattg

SEQ ID NO: 838942 - DNA, 120 bp, Artificial Sequence
  ENSG00000275830_5 (sequence is synthesized)
tcacaggacatgggatgagcccactgtgtgacacagggagcgggacacagtctgttaagtcttgcacagccatgctctgccacgcaggcaggcctttccttggcctccctctccctgttc

SEQ ID NO: 838943 - DNA, 120 bp, Artificial Sequence
  ENSG00000275830_6 (sequence is synthesized)
gtgctcatgtgaacatccacctacgtggatagactgggctttggttcattattgctctgtgaattcctcgaacttccgcatctgcccaacctcccccaccccattgttttcattgtgttt

SEQ ID NO: 838944 - DNA, 120 bp, Artificial Sequence
  ENSG00000275830_7 (sequence is synthesized)
caccaaatggaaattctagagtaagcatgtgagtcctctcccaaacttgttcactgttgagagtgctaaaatgctaaccccagatgctaactgaggggtagggttaccttatctttagag

SEQ ID NO: 838945 - DNA, 120 bp, Artificial Sequence
  ENSG00000275830_8 (sequence is synthesized)
cactgcgaattgtatgttaagtggaacttaatgaaaaaatagttaattgaccaacatgaatatcccctgaacagaatctcccctgaacagaatcctacaatgaaactaagggagataaat

SEQ ID NO: 838946 - DNA, 120 bp, Artificial Sequence
  ENSG00000275830_9 (sequence is synthesized)
aaagctgtttacctgaaagctctctctaatcaagatcctttgaaatttataaaacatggtcaatatttgcactggactttgtaaaaataaagcttgataagagaagagtttgaagtgaaa

SEQ ID NO: 838947 - DNA, 120 bp, Artificial Sequence
  ENSG00000275830_10 (sequence is synthesized)
gatagagttctacagaaaacaagggaatgacttgaggaggtgaggtaatgcgaaagggagacaggtcttttgggtttctttctccatcggctcagctgtcagaattgcaattttgtttaa

SEQ ID NO: 838948 - DNA, 120 bp, Artificial Sequence
  ENSG00000275830_11 (sequence is synthesized)
ataatttcttatgctcaaatttattcatccattaaaaggtgccataaatgaaatgcaactgccatttcttatagggggattctgaaggttgttggtggattcctagaatgtagcccgcag

SEQ ID NO: 838949 - DNA, 120 bp, Artificial Sequence
  ENSG00000275830_12 (sequence is synthesized)
gacctgagccttcacaaatgtccttcctgcagaactcttcaagctcggtttccgttgagtgctctcgccttctttataaggacagaagttaaagacacaaccaatcccccaagggcttct

SEQ ID NO: 838950 - DNA, 120 bp, Artificial Sequence
  ENSG00000275830_13 (sequence is synthesized)
taagtaaaggactcacgagggaacagctgattcccactggggaccttcacttgctcatttgcaaggaggaggctgagatgttcttttccagtttgagctgagtgggcagataaaacattt

SEQ ID NO: 838951 - DNA, 120 bp, Artificial Sequence
  ENSG00000275830_14 (sequence is synthesized)
tttcaggcaagcgtgctgagaaagctttaaaatcaccttcgtttttttcctcaagattgttttggctgtttggggtcgtttgtggttccataaacattttagaattacttgtttctactt

SEQ ID NO: 838952 - DNA, 120 bp, Artificial Sequence
  ENSG00000275830_15 (sequence is synthesized)
gttctttggctcttgtgtgagtggatggtgacaccaggccagctggggattcttcccaggctgggctcacaggctggggctgggcacacggagcagctgcgggaaaaggatctggacacc

SEQ ID NO: 838953 - DNA, 120 bp, Artificial Sequence
  ENSG00000275830_16 (sequence is synthesized)
gggggctgccacacatgtgccgaagctttgggaacgttccgtttaaataccaatttcgatgccaatgcctaacatggagcacaaatatccagggggaagagattctgttggccaacctta

SEQ ID NO: 838954 - DNA, 120 bp, Artificial Sequence
  ENSG00000275830_17 (sequence is synthesized)
tcgctgtgaccagctgatcaggtctaggaagacaagctatgggcggagaagctaaagaagagagggacggggcacacacagaaggggagatgaaaagaaatggtctattttgtccctttc

SEQ ID NO: 838955 - DNA, 120 bp, Artificial Sequence
  ENSG00000275830_18 (sequence is synthesized)
ggggagaccgcactgcacacctgcattcaacagggacacagaacggcacgcgccgtgcacgggtctctctcagctgccaggtagggctatgcggggacttctccagttaaacttacaggg

SEQ ID NO: 838956 - DNA, 120 bp, Artificial Sequence
  ENSG00000275830_19 (sequence is synthesized)
aagcctgcgaaagtcagccagtcccaccgataaattcactgctgaccaagcaaaactcagcagcccttacatctgactgatgtccatatgagagaaaagagaggaggacttcagagacac

SEQ ID NO: 838957 - DNA, 120 bp, Artificial Sequence
  ENSG00000275830_20 (sequence is synthesized)
ccacagctccaacgacagagtgcagcatttcagcaggatggcatcctataatgttaaacgcacaattaaaacaatcgctagaggtgaaaagaagcagggagatgaacaccataaccagga

SEQ ID NO: 838958 - DNA, 120 bp, Artificial Sequence
  ENSG00000275830_21 (sequence is synthesized)
ggggaaaaggtcagtggagacctacctggatgtagtgggaatgtgggaatgagcagacgaggacttaaagcagctgatatttcagagacttgaagcaaaagagaaacaaaaaggtgaatg

SEQ ID NO: 838959 - DNA, 120 bp, Artificial Sequence
  ENSG00000275830_22 (sequence is synthesized)
gctggggattttaacaaaaattccaaactattaaaaagaataaaacacaaattctaaagctgagaaatataatatgggaaataaaaaaatttactggactggcttacaacagcttggata

SEQ ID NO: 838960 - DNA, 120 bp, Artificial Sequence
  ENSG00000275830_23 (sequence is synthesized)
tgagagaagaaaagaatagtgcctttggatgcagggcaatagaaattatccaaatgaagaacagggaaaaactgacaataattctagatgtgtgtgtgcctgatagcagagcttgaaaat

SEQ ID NO: 838961 - DNA, 120 bp, Artificial Sequence
  ENSG00000275830_24 (sequence is synthesized)
acacgaagaaaatggcataactggtggagaaatagacaaaatccaccaagacaattccatggcttcaacatttctctttcagtgattggtagaaccaacagaccaaaatttggtgagaat

SEQ ID NO: 838962 - DNA, 120 bp, Artificial Sequence
  ENSG00000275830_25 (sequence is synthesized)
aaagcatatttgaacatcatggcagaaagaaagtaagttattttcagaaatcatgctggaactggatatccatgtggaaaaaaggaacctcaacttccacttcctactcactgggttgac

SEQ ID NO: 838963 - DNA, 120 bp, Artificial Sequence
  ENSG00000275830_26 (sequence is synthesized)
gtaattgaagatcttaagatgactcatcctgaatttcggatgaatcctaaatccagtgactgatgtccatatgagagaaaagagaggaggacttcagagaaacacataggaagaaaccca

SEQ ID NO: 838964 - DNA, 120 bp, Artificial Sequence
  ENSG00000275830_27 (sequence is synthesized)
tctgcctgggtttactgtttcagaggagtggttctcagctgccggactggcatagtcctgtgttcacacagtttcctaatcctgaaaccagcaatcacaaagtcagttcctcatcaagag

SEQ ID NO: 838965 - DNA, 120 bp, Artificial Sequence
  ENSG00000275830_28 (sequence is synthesized)
gacctcgttctaattaattacatctgcaaggaccttatttccaaataaggtgacattctgaggtcctgggggttaggacttcaacatcatttttggagaaaaccattcgacctttgacaa

SEQ ID NO: 838966 - DNA, 120 bp, Artificial Sequence
  ENSG00000275830_29 (sequence is synthesized)
tgcccaagtaaaacggtttcatttttagcgagtggacgttcgagttctctatttgaggcatttttctcaaggatttctaacaatagctcacgttataggttgcgtttatttttcaccata

SEQ ID NO: 838967 - DNA, 120 bp, Artificial Sequence
  ENSG00000275830_30 (sequence is synthesized)
atgtggttcatgtatcaaagcactcagcattatttatcgcggccttaaatacacagtgagcttacatgtgaatgaatacatatattatgtatctctctctatatatatactatatagata

SEQ ID NO: 838968 - DNA, 120 bp, Artificial Sequence
  ENSG00000269859_0 (sequence is synthesized)
agttgtggtcgcggactccagttgtcaggtcttgggggccgaggccccggtgagcccaaggccagggacggccagctcgagacgcggggtcgcaagttccccttattaatcccgattccc

SEQ ID NO: 838969 - DNA, 120 bp, Artificial Sequence
  ENSG00000269859_1 (sequence is synthesized)
tctcatctgcaaaaaaatccttccatgcaccacggttgtacaaaaatccctcccgtgaagcgggccccgcccccagggtgtaatcgctccagcgggaaaacgaggcctggagcgcttcca

SEQ ID NO: 838970 - DNA, 120 bp, Artificial Sequence
  ENSG00000269859_2 (sequence is synthesized)
gctcaggattttcgggcgtgtgcttcgtgcacgctcatccagacgctgcagaaacctggttcctgctgggcaaaggtctgttctgggaggctggaatccacagactccttgtggggccta

SEQ ID NO: 838971 - DNA, 120 bp, Artificial Sequence
  ENSG00000269859_3 (sequence is synthesized)
gggttttagtgggagaccgagctgctccaaagcccctctccacgctcaacccccgcccaacccagcgttccagccacactggcttttctgagggtcattaaacgcagtttctcaaccaga

SEQ ID NO: 838972 - DNA, 120 bp, Artificial Sequence
  ENSG00000181798_0 (sequence is synthesized)
gggcaatagctgagagggcgtcaccagcgtgtcggcgcctgcggttttcttcgggctgtccccaggcgtcgtgcccgcgtccgtcacgcgcggtggcttgcaggggcgcaccgcgacagc

SEQ ID NO: 838973 - DNA, 120 bp, Artificial Sequence
  ENSG00000181798_1 (sequence is synthesized)
cttaaaggaaaacctgttagggacaagggctgctgtgggcagcgagggttatagactcatgtgtgttctgaattctggtgggggtagtgatggacgctgacccagttcacagaattatct

SEQ ID NO: 838974 - DNA, 120 bp, Artificial Sequence
  ENSG00000181798_2 (sequence is synthesized)
gactggcgaagtaaaggaaaaaaggtcaaggtgaactgaagaaaataagtctttccccaaaggaggtagaagatggggaagatgagatgtcagaagctaaggacaatggcagtagagatg

SEQ ID NO: 838975 - DNA, 120 bp, Artificial Sequence
  ENSG00000181798_3 (sequence is synthesized)
aggttcttgtccctcataagaattgcaggaagaataccactgtcccgggaaagaaaggggaggaaaagtctctggctcctgtgtttgctgagaagttaatatcaccaagcaggaggggag

SEQ ID NO: 838976 - DNA, 120 bp, Artificial Sequence
  ENSG00000181798_4 (sequence is synthesized)
ccaagctcaaggaccgtgagagccaccaggagaatgaagacaggaacagtgagttggaccaggatgaggaagataaagaatccttctgtagggggttcccgatgagtggctgtgagttag

SEQ ID NO: 838977 - DNA, 120 bp, Artificial Sequence
  ENSG00000181798_5 (sequence is synthesized)
ttggcaattcccggctgattcttcgggatgggcctcattgatggggagtctcagtggatgtttgacttttgctttctacctgaccctagtcagagattttttctttttcctttttttttt

SEQ ID NO: 838978 - DNA, 62 bp, Artificial Sequence
  ENSG00000181798_6 (sequence is synthesized)
atggggtttcgccatgttggccaggccatcttgaactcctgacctgaagtgacctagaaatt

SEQ ID NO: 838979 - DNA, 120 bp, Artificial Sequence
  ENSG00000181798_7 (sequence is synthesized)
gccaccatgcctagcccagaaattttctctttgaatactatacattgatgagttctgtctttatgcttatgatccacgcaggtaggtcgtctcagatttaattttcagtggtttttttct

SEQ ID NO: 838980 - DNA, 120 bp, Artificial Sequence
  ENSG00000181798_8 (sequence is synthesized)
gtcttgatggagtctgtgtaacatttaaaatattgctaccaaagcagtaattcttactatagttattaaaatgcaagaacaatatatttaaaattatttcataataaagttaaaatgagg

SEQ ID NO: 838981 - DNA, 120 bp, Artificial Sequence
  ENSG00000265349_0 (sequence is synthesized)
ggggaagtgaagacactggaaggtgatatggcctttccaaagtggcatggctgattgatgacagaccaccattggaaacaaggtggtttgactccagagcccgcaccctccaccacaacg

SEQ ID NO: 838982 - DNA, 120 bp, Artificial Sequence
  ENSG00000265342_0 (sequence is synthesized)
ctgaaaggaaggcctcaccctggggatggcacctgtctcttctcggttaaacaggcctgtctccctcccttccccaccgccatcctttctggtcttctgagaatgctggcttccctactg

SEQ ID NO: 838983 - DNA, 120 bp, Artificial Sequence
  ENSG00000265342_1 (sequence is synthesized)
caagcaaagcaaaactctttggtctcgagctgctgcactcttctcgaaactaaaccatgatctgctcccaggagagcaggagaaagtaaatgtaaaagattctgtgagaaccctgagata

SEQ ID NO: 838984 - DNA, 120 bp, Artificial Sequence
  ENSG00000265342_2 (sequence is synthesized)
ctgtatcagacgatgaggaactggcagtagtacaatgaacggtgtagtgaagcgtctccagccatgaatataggacacaacctagatctgtggataactaaataaaaataaagccccgtt

SEQ ID NO: 838985 - DNA, 120 bp, Artificial Sequence
  ENSG00000260482_0 (sequence is synthesized)
gaacccctactaactgtgagctcctgaggagtcaggcctgagtctgtgggtcatctagcacatccttaatagaatgattgcctggatgtgaccaccctcacccccaaccctcacacaccc

SEQ ID NO: 838986 - DNA, 120 bp, Artificial Sequence
  ENSG00000260482_1 (sequence is synthesized)
tgccagcatgcctcagaccttaccccagctcaagataagtctcagattgcaggatacctgctgcagggaacaaaggtgaatgattgtcttgtgagcctcctgttgactgattctgtttta

SEQ ID NO: 838987 - DNA, 120 bp, Artificial Sequence
  ENSG00000260482_2 (sequence is synthesized)
catggctgcacagagcccttgtggttatttggggttggggtggtggcttctgtattagtcacttctgcatgaaccatttcactcaggatctgaggccacagttcctttcttagtcactga

SEQ ID NO: 838988 - DNA, 120 bp, Artificial Sequence
  ENSG00000260482_3 (sequence is synthesized)
tacatctggcagacttgaaattaatcagacaaacattgttcatagttaacatatccttggaagtttctcagctataaggaagaggtcttggtggctagggaggcctttctctgtatcctg

SEQ ID NO: 838989 - DNA, 120 bp, Artificial Sequence
  ENSG00000260482_4 (sequence is synthesized)
ttctatccagtgagagcctagagggtgctgcccagccatattctggctagcctcagcggttctcctgaaaaaaaattggcatctgacaacctggatggtgactataggtagtcaaatcca

SEQ ID NO: 838990 - DNA, 120 bp, Artificial Sequence
  ENSG00000260482_5 (sequence is synthesized)
gctggctggtctcctgggggttagcttccatggagctgcaagtcccctgaaatgatactggcagtgttgggacagcgtgtccgaaggcctggttttttcagaactggtctcagcaaaatg

SEQ ID NO: 838991 - DNA, 120 bp, Artificial Sequence
  ENSG00000260482_6 (sequence is synthesized)
tctcgccaacttctacagttcccataagtacatgataactgaaacacttctagagccccccagcaatgggcttgtgcttttagtagaatatgtgcttgcttccatttaggggtaagaagg

SEQ ID NO: 838992 - DNA, 120 bp, Artificial Sequence
  ENSG00000260482_7 (sequence is synthesized)
tgggcccctcaccatatgctgcacagagaagagagacaccatcactcatttattcatttaacaagtgctttccaagccactactaggtgccaagcacttcctaggtcctggggatacagt

SEQ ID NO: 838993 - DNA, 120 bp, Artificial Sequence
  ENSG00000260482_8 (sequence is synthesized)
ggagactaagatggagccagttctttctcatagggatctcacagcttagtgagtgagaaagccaaagagtcaaaatacagagagggtctgaggggcccattttgagagccatcatagtgg

SEQ ID NO: 838994 - DNA, 120 bp, Artificial Sequence
  ENSG00000260482_9 (sequence is synthesized)
tgaggagtgtgagtgctagagtcaggctgatcaaatcccagcctgccattggctagccttgtgactttgagcaagttatcttacttcgtggaacctcaggtttctcatccataaaatggg

SEQ ID NO: 838995 - DNA, 120 bp, Artificial Sequence
  ENSG00000260482_10 (sequence is synthesized)
gaagttggatagggtattatgatgattgaaatgcatttatacatgtaaagcataagtactggctcagggtgagcactcaataaacggcagtttattaggcacttttattaggaagtgata

SEQ ID NO: 838996 - DNA, 120 bp, Artificial Sequence
  ENSG00000260482_11 (sequence is synthesized)
caccttgagcaaaaccccttagagtataaggcatagcattcttacatatttttaaaatttaaaataaaatttaaaacatcttgccctttataatcagtccgccacaaacaagagatggag

SEQ ID NO: 838997 - DNA, 120 bp, Artificial Sequence
  ENSG00000260482_12 (sequence is synthesized)
ttccttgttttgtatctatggggtgcaaacatttaatcctcccaactgtcaaaaaagtgagagtttcacagcctgttttacagcagaggaaactgatattcagagaggttaagtaaattt

SEQ ID NO: 838998 - DNA, 120 bp, Artificial Sequence
  ENSG00000260482_13 (sequence is synthesized)
gcccaatgccacacatctaataaatggctgagctggaatcaaggccagctcttacttggctgcaaaatccatgttttatgcagctcctccactatcttggcctccaaggcagctggcttt

SEQ ID NO: 838999 - DNA, 120 bp, Artificial Sequence
  ENSG00000260482_14 (sequence is synthesized)
gaacactacccttgcagcccagtcagccaatcccttgctctcctgaagcttttgctggtgggccagccccacctgctttccttgtgcactctgacttggaccctgaagtgagaagagttg

SEQ ID NO: 839000 - DNA, 120 bp, Artificial Sequence
  ENSG00000260482_15 (sequence is synthesized)
gcacaggacatcttacttccctgaaaacagtacctggacttttctgtatcttcacatccattgggcattgggcaaatgggtcatgcagatgaaaaccatccaagataagagacatgggag

SEQ ID NO: 839001 - DNA, 120 bp, Artificial Sequence
  ENSG00000260482_16 (sequence is synthesized)
tgaaattcacacccactctggctttcataccatgggtctgaacattagcccatggtgtttcttggccatactgacctgtgccatttcagctgcattcatctcagttggtgttgtctgctg

SEQ ID NO: 839002 - DNA, 120 bp, Artificial Sequence
  ENSG00000260482_17 (sequence is synthesized)
gctgctctttctgatttcccacaggagcagtaagaacctgaggaagagtagggtcagaggagtctgggagaatgaggaaatatgagagccccaggaactgaaaaggcctgtgagagactc

SEQ ID NO: 839003 - DNA, 86 bp, Artificial Sequence
  ENSG00000260482_18 (sequence is synthesized)
caacaacaacaacaaaaattccatgttgacaaggatgggaatatgagaacatggaaacagctatgaaaagacataagagaattagg

SEQ ID NO: 839004 - DNA, 120 bp, Artificial Sequence
  ENSG00000260482_19 (sequence is synthesized)
gaacatggaaacagctatgaaaagacataagagaattaggaggattttctttaatatatcattttttaaaaaaaaacttgcttgtatttgtttattttttaaatagagacagggttttac

SEQ ID NO: 839005 - DNA, 90 bp, Artificial Sequence
  ENSG00000260482_20 (sequence is synthesized)
atcttggcctcccttgccccgccattttttaataaacctttctaatggaacaagtaaaacacatgcagtggatgctcagcaggccttgag

SEQ ID NO: 839006 - DNA, 120 bp, Artificial Sequence
  ENSG00000260482_21 (sequence is synthesized)
caagtaaaacacatgcagtggatgctcagcaggccttgagtgtgtgaatgaaaaatatttgaacttgtttttactggttgatttcattgcttaaaaaacataccttagctggacgcagtg

SEQ ID NO: 839007 - DNA, 120 bp, Artificial Sequence
  ENSG00000260482_22 (sequence is synthesized)
gcgtgcgcctgtagtcccagctactcatctcttaaaaaaaaagttttatgcttgttaatttcataaatgctagagggatcaccctaatcaaataaagctactcaaaaataaaatatgaaa

SEQ ID NO: 839008 - DNA, 120 bp, Artificial Sequence
  ENSG00000260482_23 (sequence is synthesized)
tgaggaaatatgagagccccaggaactgaaaaggcctgtgagagactctgagcttcctgggaacaggatgatagttaaaaaaaaaaatgttggccaggcgcagtgatggatgcatatgat

SEQ ID NO: 839009 - DNA, 120 bp, Artificial Sequence
  ENSG00000260482_24 (sequence is synthesized)
ggagttcaagaccagcctggcaacatggtgaaatcctgtgtctacaaaaaatgcaaaaattagctggacatgatggcatgtgcctttggttccagctacttaggaggctgaggtaggagg

SEQ ID NO: 839010 - DNA, 120 bp, Artificial Sequence
  ENSG00000260487_0 (sequence is synthesized)
ttacagggtcttgttctgtctcccaggctggagtgcacggtcacaatcatagctcactgcagcctcagcctcccaggctcgagccatcctccctcgtcagcctccgaagtagctgggact

SEQ ID NO: 839011 - DNA, 73 bp, Artificial Sequence
  ENSG00000260487_1 (sequence is synthesized)
gcttcaagtgatcctcccggctatcaatctcttcttatgcaggacctgggcaacccaactccacatccttgcc

SEQ ID NO: 839012 - DNA, 120 bp, Artificial Sequence
  ENSG00000260487_2 (sequence is synthesized)
cttatgcaggacctgggcaacccaactccacatccttgcctcagataattcttttgaaaatgaggcaatatacaaataaacacagaaataaaatgaaataaaccttgctccctcatgtaa

SEQ ID NO: 839013 - DNA, 120 bp, Artificial Sequence
  ENSG00000260484_0 (sequence is synthesized)
caataaccccagcattggagagagtggagcagcccttcaagaagttccaacctctgcccaggactggttttaccaacttcactaggcttagaatcgtaggaagtctatttgggacttgcg

SEQ ID NO: 839014 - DNA, 120 bp, Artificial Sequence
  ENSG00000260484_1 (sequence is synthesized)
agtctcacgtattcctgcctaaatgtttatggatacctgtttagagctgaaatcttttcagctcccataatatgagggaattaggtctcaaagaagatcatgtattttgatcagacctta

SEQ ID NO: 839015 - DNA, 120 bp, Artificial Sequence
  ENSG00000260484_2 (sequence is synthesized)
tagctgagcagtggaaagaaaaaaaatcagtgtgagatctcccagggttccgcaggagtggcttccttagtccaactggcagcctatcctggaatattgcctgggagagaggttagttgc

SEQ ID NO: 839016 - DNA, 120 bp, Artificial Sequence
  ENSG00000260484_3 (sequence is synthesized)
ttttcctggtgctaggaactgaatggttttacatattgatcaatgaaaatacttatttggcctacaataggtgcaaaaatactgctaattactaacagtatctcttctttgctgcgtgcc

SEQ ID NO: 839017 - DNA, 120 bp, Artificial Sequence
  ENSG00000260484_4 (sequence is synthesized)
agacactccactgggcattatgcagttaatatgtaccatgaatttcccgtggttagcaatgatgtcaggcatagaaaagacatgaaattatgatgtcaaatgaataaactggaaaaagga

SEQ ID NO: 839018 - DNA, 120 bp, Artificial Sequence
  ENSG00000260484_5 (sequence is synthesized)
atttcttgaattttctccagctgtcctaagaatgtatctatactttgatcctggcctaccttttcaacatctaaactttattcccccaagcttctagatattcaaagttaagtattaaat

SEQ ID NO: 839019 - DNA, 120 bp, Artificial Sequence
  ENSG00000260484_6 (sequence is synthesized)
aaaatcagtaaatatatacaagcttgtttggccattctgaataaggttatatttccaccacacaatctccaaattctctagcagaagggatcagtatgttatagataccccctttccttc

SEQ ID NO: 839020 - DNA, 120 bp, Artificial Sequence
  ENSG00000260484_7 (sequence is synthesized)
cctccctggcaagccaccacatctgttatgggtactcaatgcagtggctgcacctgggcctcactcattaagcagttgttgattgagtgactgaattgaatgcctgatgagctcgcaagt

SEQ ID NO: 839021 - DNA, 120 bp, Artificial Sequence
  ENSG00000260484_8 (sequence is synthesized)
aagattcagactgtgcctgcaaactaataggatccctccgctttttattcactactgctgaggtagatctcaggccagcctgaagtttaggtctactgagaaataataagcctcaaaaat

SEQ ID NO: 839022 - DNA, 120 bp, Artificial Sequence
  ENSG00000260484_9 (sequence is synthesized)
cacccagtctcccagtaaacactaagaaatgttcacattatttacacatcctagactgcctgtcttatggaccaaatgtttgtgttctccccgcaatttatacattggaatcctaaccct

SEQ ID NO: 839023 - DNA, 120 bp, Artificial Sequence
  ENSG00000260484_10 (sequence is synthesized)
caatgtaatagcattaggtgctggggtctttgggaggtgattggctaatggacctggagccctcatgatgggatgagtccccttatcagaagagacctgagaaggcttgcttcctctccc

SEQ ID NO: 839024 - DNA, 120 bp, Artificial Sequence
  ENSG00000260484_11 (sequence is synthesized)
tgtgctcttcatgatgtgaagacacaagaagacagccatctgtgggccaggaagaggtcctcactggaacccaaccatgctggcaccccaatcttgaatttctagcttcaagaacttggg

SEQ ID NO: 839025 - DNA, 120 bp, Artificial Sequence
  ENSG00000260484_12 (sequence is synthesized)
aaataaatgtaagccagccagcttatggatttgttacagcagcctaagctaagtcagagtctctagaacagctggtctggggcagcggtgaagggaggtgggtgggcatatgaccctgcc

SEQ ID NO: 839026 - DNA, 120 bp, Artificial Sequence
  ENSG00000260484_13 (sequence is synthesized)
ctgcacatgaatggcaaaggcaactggagagcctctcccttttggtgagatccccagtccacaagggcatgttcatccatagctttacttcccgaagcaaattctggttcctggggcctg

SEQ ID NO: 839027 - DNA, 120 bp, Artificial Sequence
  ENSG00000260484_14 (sequence is synthesized)
tgcctccatagatggcatgatctgcagcctcctgtggtaatttaccctcttcctaaatttctgagtcttcacatttaagcaatcctagttagatatcctctacctgtatccatggctgtc

SEQ ID NO: 839028 - DNA, 120 bp, Artificial Sequence
  ENSG00000260484_15 (sequence is synthesized)
tttcagtcacattacagactcattgtgatgaccatgtagggacaatgtgatttcagaaacatggcctcatttgattttaatgtaaatataaatcagtgaagcagaaaaagagaatctcca

SEQ ID NO: 839029 - DNA, 120 bp, Artificial Sequence
  ENSG00000260484_16 (sequence is synthesized)
gaaaaacaagggatgaggctgtacagcaagttaaagtggaatcagaacccaactgtagtccattatttgtttcaatcctgctcttttctaccatatcacccagtttccaaatcgttcagc

SEQ ID NO: 839030 - DNA, 120 bp, Artificial Sequence
  ENSG00000260484_17 (sequence is synthesized)
aaattgccatggtcaatgggattaacctttcccttttattctcaggaaatctcccttgtccattttgcaagactgtgtgattctttctactgttacaaggaataaaagccttcctaaaaa

SEQ ID NO: 839031 - DNA, 120 bp, Artificial Sequence
  ENSG00000260488_0 (sequence is synthesized)
agtcaggggagagctgagaggcttccctgagtcactcccatctccacatacaacacccaggaatgacttagcaccaaaacaccaataagactcctcagaggaaaggagggtagagtcaag

SEQ ID NO: 839032 - DNA, 120 bp, Artificial Sequence
  ENSG00000260488_1 (sequence is synthesized)
ggactaaacttcagaaaacattgaggacgagctgcccacacccacctccctctcacttccagcatccccatcaacaccaccccctcgatggtgagaggaagaagtttggactgggaagaa

SEQ ID NO: 839033 - DNA, 120 bp, Artificial Sequence
  ENSG00000260488_2 (sequence is synthesized)
aaggacgaagtgacggtccccagatgggctgggcacgggacaagaagggaagggctgcaggacaaggcaagagagatcttaaatgataatgatgagccaggataagacatggacaaggat

SEQ ID NO: 839034 - DNA, 120 bp, Artificial Sequence
  ENSG00000260488_3 (sequence is synthesized)
ggaatatgcaaggatcatcgaaatgtaaaagccaggaccggagagggaagccgagagtcaggagaccaggagtgccccgccacgggagatcagagacccgcaggtgagcaggggccacga

SEQ ID NO: 839035 - DNA, 120 bp, Artificial Sequence
  ENSG00000260488_4 (sequence is synthesized)
gccgggagtcctgggggccaggggtctggaaaagggagcgactgggagggggtctgcgagggagcggggcgcgaggacgcaggggccggagtgtgcagctggagcggcgggagccggggc

SEQ ID NO: 839036 - DNA, 120 bp, Artificial Sequence
  ENSG00000263594_0 (sequence is synthesized)
agacttaatctggttcatacatctcctcactctgcagtcagattgccctctcaccctcagcaggaccccacatcccacattactggcaaagtgaagaggattcaagatggcaacagtgct

SEQ ID NO: 839037 - DNA, 120 bp, Artificial Sequence
  ENSG00000263594_1 (sequence is synthesized)
caaagggaaggaagataattaaaatggaagacagagccatcaaaaaccatgtggaggaaagtcactacatgagcctagactgaaagaatgtacacaggcagatataaatgcctatttcat

SEQ ID NO: 839038 - DNA, 120 bp, Artificial Sequence
  ENSG00000263594_2 (sequence is synthesized)
gtaggaatggctctcctgacaccagttcttgaactataaatgtgtttggattcccagaggtttttacactctactaacatttatgatttgtgagagatacccgttccctgaggggcatgc

SEQ ID NO: 839039 - DNA, 120 bp, Artificial Sequence
  ENSG00000263594_3 (sequence is synthesized)
atcatgcacaggaaaaccacaggatctgcgaaatgcaagatgacccaacttccaacagtgttaatcaatggagtagtcatgaattactatgtactcaattaaactttgttgcaaaaatca

SEQ ID NO: 839040 - DNA, 120 bp, Artificial Sequence
  ENSG00000245105_0 (sequence is synthesized)
gcccatcagcccagcctgcaaggaggcgccaccggacctgcacactcaggagcaggctcataaaatcccccagactcagctagattggaagagaggatgggaagacaatggatgacctac

SEQ ID NO: 839041 - DNA, 120 bp, Artificial Sequence
  ENSG00000245105_1 (sequence is synthesized)
ctgtggagagaaactacccattccagaacctcctctctgctgaaagctgaacactcaatgggaagacctgtttgcagagaggagccagccactccagggtctccgttctgctagaagctg

SEQ ID NO: 839042 - DNA, 120 bp, Artificial Sequence
  ENSG00000245105_2 (sequence is synthesized)
aacactcgttgggacacccttgctgtggaaaggacatccttactgtggaaatgagctactaactgcaggtctccttcctcttcatcttccttatccttctgttccattgctcagtaatgc

SEQ ID NO: 839043 - DNA, 120 bp, Artificial Sequence
  ENSG00000245105_3 (sequence is synthesized)
tcctcttcatctgtctcattctccacttgtctgcttgatgcaggagctgaggagctgcacagcaaggttaaaagagctgtaacacaaacagggctgcaacatgccccttgctccccacag

SEQ ID NO: 839044 - DNA, 120 bp, Artificial Sequence
  ENSG00000245105_4 (sequence is synthesized)
ggagagaagagctctggccctcggagaagcccagacctgggagctccttgagcccgggctgtgactccctctttggggccctggttggcgtcactgcattcgccagtgccactgttggaa

SEQ ID NO: 839045 - DNA, 120 bp, Artificial Sequence
  ENSG00000245105_5 (sequence is synthesized)
gctgcttgtgatgcgcctggtccagggggaagctgtttgttgtgtgcctggtccagccacctcatggagagcctgtgctggcacctggagctgcccaacctgggcagcagcttgtgtgtg

SEQ ID NO: 839046 - DNA, 120 bp, Artificial Sequence
  ENSG00000245105_6 (sequence is synthesized)
tgactgcacagtggccacgcttgctcacacacccctagcacacccctctgctccacccgtctcaatctcccttggatccgggatccaggttggtagcaagtgcgagtgggcagaagcagc

SEQ ID NO: 839047 - DNA, 120 bp, Artificial Sequence
  ENSG00000245105_7 (sequence is synthesized)
ccagtgggcccagagcaaaactcaggcaaaggtgccactagactggccaggaaagcgacaccctaaagatcccataatgctgatatgttaattctattctataagcaccacacagaagtg

SEQ ID NO: 839048 - DNA, 120 bp, Artificial Sequence
  ENSG00000245105_8 (sequence is synthesized)
atagcttttatttcttattttgtctagcctggagacagagctaaggattccttgaactgcaaagtcttttccagttcttagtttatacaatccatactcaccttctgcctaactaagcat

SEQ ID NO: 839049 - DNA, 120 bp, Artificial Sequence
  ENSG00000245105_9 (sequence is synthesized)
tgtcatttttgtgccaaatgaagagtaggactcctacgattgtcctcagactctcttggctcaatcctcctgctttaacctttcctacttcaaaaactcctgaagttttgcttccccttc

SEQ ID NO: 839050 - DNA, 120 bp, Artificial Sequence
  ENSG00000245105_10 (sequence is synthesized)
tatagaatggaaatatatgtcgcaatacttactgcaaagaaaattatatattttaaaaatagactaaagagatgttgtgagacatcagacatcaatcagatgttgtgagaactgatttct

SEQ ID NO: 839051 - DNA, 120 bp, Artificial Sequence
  ENSG00000245105_11 (sequence is synthesized)
gcatcagaatatctccttgactttacagctatcctttaatcctggctcaaagttccagaagaaagatgatccaatataatactcctatttggactttgagtcatacacattccttcttct

SEQ ID NO: 839052 - DNA, 120 bp, Artificial Sequence
  ENSG00000245105_12 (sequence is synthesized)
ttcattattttcagctcatctattattgaatctgaaaccccaggttaactgactgatcactctcatcagtggcagattttggtgtaacataggacacatcactcccaattcaggtcaagt

SEQ ID NO: 839053 - DNA, 120 bp, Artificial Sequence
  ENSG00000245105_13 (sequence is synthesized)
cccaattatcttgcctctcaatatgacatgttcaatgttgtatttcattctacttcattttaatgtaaaaagtcttttctggtgaagtcagtcttttattttctcataaaaattcaccct

SEQ ID NO: 839054 - DNA, 120 bp, Artificial Sequence
  ENSG00000245105_14 (sequence is synthesized)
ttgggtttttcatagggtattcccataaccaaacacactttacactttcctagtacataacccaatactttcttctttccccacagtccttacatgaagcctactcagaccgacatcact

SEQ ID NO: 839055 - DNA, 120 bp, Artificial Sequence
  ENSG00000245105_15 (sequence is synthesized)
gtatcatttttttgtattctgaagtccttcagcacttgattcctttaagtttaatcttggtattctattgggaatcatatggaaatgtacaatgatatttattgaatgaacaggaaacag

SEQ ID NO: 839056 - DNA, 120 bp, Artificial Sequence
  ENSG00000245105_16 (sequence is synthesized)
ggaaagacattgaccagaaaaagtgtttattcatcaagtctttaaagatacaaaaacacgtgtcttctgtggagctctgagaacaggactccagcaaagcacttttcagccttgtggtct

SEQ ID NO: 839057 - DNA, 120 bp, Artificial Sequence
  ENSG00000245105_17 (sequence is synthesized)
tcaagcatttccaagatctgtgacattggaaagaaaaaaaattaagacagatttgggtctccatgagcagagagtattctttcccttagttctgggtagcatagtgcccaaggaaaccta

SEQ ID NO: 839058 - DNA, 120 bp, Artificial Sequence
  ENSG00000245105_18 (sequence is synthesized)
atcagtacagtgggaaaccaaatctattccaaatcattacccataagcaatcctatggactctctgaggtttgacagagtcagcggccctctccaataaatgtgtttttctataataatg

SEQ ID NO: 839059 - DNA, 120 bp, Artificial Sequence
  ENSG00000245105_19 (sequence is synthesized)
tgcagtgtgagtaatttgatgtttttgacaaatatttacccagcgttttatgaaggagaaggtttggggggcaagctgaaggagctctgactgccttttggaggagtgtgagtggcttac

SEQ ID NO: 839060 - DNA, 120 bp, Artificial Sequence
  ENSG00000245105_20 (sequence is synthesized)
ctttgctgcaaggagcattgtactcagcaattgcaaactcatctgaaaaaaaaaaaaccaacaaaaaaccagaaatcattacatgaagtgagaaagaaagcaaacatctgtgggatacag

SEQ ID NO: 839061 - DNA, 120 bp, Artificial Sequence
  ENSG00000245105_21 (sequence is synthesized)
gccaaggaaggagtttgttgtgggaagaacagtattgtaccagaaacataagcatcattcatctgatgtgttgcttgctaccttatattctcctttcaaatatagtgttttatatattct

SEQ ID NO: 839062 - DNA, 120 bp, Artificial Sequence
  ENSG00000245105_22 (sequence is synthesized)
tttatcccaaactcctgaaggactcttcagatgttctacttacttaaatctcatattgtcatacagtccatttatctgatgaaaagggaactaaatatcccacaggtgttttgtattagt

SEQ ID NO: 839063 - DNA, 120 bp, Artificial Sequence
  ENSG00000245105_23 (sequence is synthesized)
agttgataaatttataatgtaggttgtttctataatgtatgtataagagacaaaaagaggggcatcagacttgatggagacaaaatgaagtgataatgtaattacttaatgtaataaata

SEQ ID NO: 839064 - DNA, 120 bp, Artificial Sequence
  ENSG00000213963_0 (sequence is synthesized)
caacatgcatacaaatcaagaaggggtgggggtgttacatgcaaattctgcttcagtgggtgttggagcctgagattctggctttctaacaagctcccagtagagatggggtttcaccat

SEQ ID NO: 839065 - DNA, 120 bp, Artificial Sequence
  ENSG00000213963_1 (sequence is synthesized)
cctgaggcctccccagacatgtggaactaacaggtttctcttattgcctggatccaagagcatctcctgggttcttcctgttagaatactgaatgtccatggagagtttaacataaggaa

SEQ ID NO: 839066 - DNA, 120 bp, Artificial Sequence
  ENSG00000213963_2 (sequence is synthesized)
aagtagagcagagggcctgggtgtctgtcagctccaagcggaagatttccccagctttctaggtaactgtgcttccactgagcaagccagacacagacttgaatgtcatcacaatctgtg

SEQ ID NO: 839067 - DNA, 120 bp, Artificial Sequence
  ENSG00000213963_3 (sequence is synthesized)
cctgtgacatctttccccaagaatagcacaaattgaacttttacattcttcataatatggaaggaaaggtattgactgagccacttctttatgcctcaagacatctcatatgtatttata

SEQ ID NO: 839068 - DNA, 120 bp, Artificial Sequence
  ENSG00000213963_4 (sequence is synthesized)
tggatacatacatgaatgtatatattctgtcataataacatattctatttttcttattatagcacagtgttaggataggctacataggctgcattaaaccctcaaatagaagtttatatt

SEQ ID NO: 839069 - DNA, 120 bp, Artificial Sequence
  ENSG00000213963_5 (sequence is synthesized)
aggtaagtgctgatgctgctgctttgagggccacacaccttgaggagtaggaagagtactcatactggaagagtattcagcacggactggaatcctgcatacatatctgagctctgtgtt

SEQ ID NO: 839070 - DNA, 120 bp, Artificial Sequence
  ENSG00000213963_6 (sequence is synthesized)
acccagtctcaggtagtatctttatagcggtataaaaacagactaatacaaacaggtagctctaaattgtgagtttttcttaactcctttgatcttctgtgatagcgatttttcacattt

SEQ ID NO: 839071 - DNA, 120 bp, Artificial Sequence
  ENSG00000213963_7 (sequence is synthesized)
tcctttgatcttctgtgatagcgatttttcacatttcacacttccctaatgccaaaaatccacctccagcagctgttttgcctctttcttatcctgccccttggaagaatgtcatcatta

SEQ ID NO: 839072 - DNA, 120 bp, Artificial Sequence
  ENSG00000213963_8 (sequence is synthesized)
agccaccgcggcgacttggcggcgggtgccatgcgtctggagcttcacattctctgccccccacccaccgcgccggcgctcccttgtcacgcctcgggaagcgcgcacctgccaagcagg

SEQ ID NO: 839073 - DNA, 120 bp, Artificial Sequence
  ENSG00000213963_9 (sequence is synthesized)
caagaaagaaccctcaagtggattgcctctggcagttggagccacaccggtgttctcagaatacaccctgtcctttccaatttccttcatatgcggtaaccaccaacagtcttggagtaa

SEQ ID NO: 839074 - DNA, 120 bp, Artificial Sequence
  ENSG00000213963_10 (sequence is synthesized)
caagtcttaaattctgattctcagtcggctaaagatgaataatctgatatcatgtgaaatgaggaaataagaagctttctgctgacttcattttgacccagggtccaaaaggtgatgtaa

SEQ ID NO: 839075 - DNA, 120 bp, Artificial Sequence
  ENSG00000213963_11 (sequence is synthesized)
tcctgtggcaagaagattcaaaactgtggactatcttgcaaaaaatacaagaagatattgaaagttttcatgagtgcctaccacctaatctcaaacactatcattcatatgtgcctcatt

SEQ ID NO: 839076 - DNA, 120 bp, Artificial Sequence
  ENSG00000213963_12 (sequence is synthesized)
gagcaaatctttaatgaggatctatatgccagcaatatcttttgcttgggagcagaaacagaaagtacatgatggacttcattgaaggatggagatttggaagacatgaatggatgaaga

SEQ ID NO: 839077 - DNA, 120 bp, Artificial Sequence
  ENSG00000213963_13 (sequence is synthesized)
accaagtgcgtgagggcacctatcaggattattgctgaaatccttatggagttaactggctgagaggaaggcaagcaagcgaggactgatgggcccttggcactgtgagaacagtggagg

SEQ ID NO: 839078 - DNA, 120 bp, Artificial Sequence
  ENSG00000213963_14 (sequence is synthesized)
aggagggagcagggttcataaggaggagcacaaacagaaagttcagtggccccaataaaaataacaccagaatcttccagatactttctccataaggcgaaaagaacaggtttctcttat

SEQ ID NO: 839079 - DNA, 120 bp, Artificial Sequence
  ENSG00000213963_15 (sequence is synthesized)
tcttcagcatttggcctcaacagttgccagagagggagaagagagtatgtataagaccacactgcaggatctgtgttaggtctgcaagcactgctgtcacctctgccaaatcccgttagc

SEQ ID NO: 839080 - DNA, 120 bp, Artificial Sequence
  ENSG00000213963_16 (sequence is synthesized)
cagaacccaatcatatggccccatcctaactgcaagggaagcctgggaaaggtcttcttgtatgccaggaaaagaaaatgaaatcgacaagtatctagccagtctttgctacaagtttct

SEQ ID NO: 839081 - DNA, 120 bp, Artificial Sequence
  ENSG00000213963_17 (sequence is synthesized)
acatgttggaattattatctatatttttcttctgatcatgcttagcatttgatactatgtagactgccttgttgagtcctgctgtattttgtgacatccacatgcagcatcccattcctc

SEQ ID NO: 839082 - DNA, 120 bp, Artificial Sequence
  ENSG00000213963_18 (sequence is synthesized)
acaacaggactaggagtggtcagaagttttatcacccactttatggacggaaaccctgagacccagagcagttacatggcttgtccaaagttacatagtactgttaacttaaaaacacaa

SEQ ID NO: 839083 - DNA, 120 bp, Artificial Sequence
  ENSG00000213963_19 (sequence is synthesized)
tttataaatttagacaaagaaagaggagactttatttcttataaagggttatagccttcaaagtggctatctcacaggctgggaagctcagccttcagcagaagcccagagacaagcatt

SEQ ID NO: 839084 - DNA, 120 bp, Artificial Sequence
  ENSG00000213963_20 (sequence is synthesized)
ttgaaggcagaggggttgggatggagctttatgctgaacaggttgactaaatatacatattcaacaggttacaggaggagctatgaatattcatgagggtggtcctgacacatgcgtatt

SEQ ID NO: 839085 - DNA, 120 bp, Artificial Sequence
  ENSG00000213963_21 (sequence is synthesized)
gaacaaacatacatgtaacacatgacccatgttcactttgggatggagacttaacatttcaatgtattacagttaggccctacacatcaaaaggtcatttcaggacacaaaagctcacaa

SEQ ID NO: 839086 - DNA, 120 bp, Artificial Sequence
  ENSG00000213963_22 (sequence is synthesized)
gtacacaatctctgtaaactagtcagaaccagtccatggttggtggtcttatcaggaaaaagttactaaaattagtctctcatccaatgaaagctgtagttatggctggtggaacagggg

SEQ ID NO: 839087 - DNA, 120 bp, Artificial Sequence
  ENSG00000213963_23 (sequence is synthesized)
ttcagttgggcagagtctatgagcaggatgatttgcaattgtttaaatattgcttatcttgaggccagtgcttgtttagctgctggagaaaaagaaaatccttgtggcagttagagcata

SEQ ID NO: 839088 - DNA, 120 bp, Artificial Sequence
  ENSG00000213963_24 (sequence is synthesized)
catgtgatctctattggaacattaatgctgctcagttgttgtgtctaaaccataaaagagaaggagagtataattaggcatgtctgacctctcatcatagctgggaactaagtctttaaa

SEQ ID NO: 839089 - DNA, 120 bp, Artificial Sequence
  ENSG00000213963_25 (sequence is synthesized)
tttttttctggggtcctcttggccacaagggggtccatttagtcagtgggggccttgggatttatttttagtttacattgctaagtgacagagctttgcttctttcactctgaggttagt

SEQ ID NO: 839090 - DNA, 120 bp, Artificial Sequence
  ENSG00000213963_26 (sequence is synthesized)
ggtctctctgctgtgccacattgtcttccccagaagctcaaactggatgcccagccctcagtgtacaaactcaagtatgcaagaaatacatctttattcttttatgaatatacctaattt

SEQ ID NO: 839091 - DNA, 120 bp, Artificial Sequence
  ENSG00000213963_27 (sequence is synthesized)
atatgttggaaggtgtcagcaatgaatttgatcactttggtatttctctacctttaaagatatgtttacatttggggtgggatgaaggtttggtggaggggaaggtggtcaggttgggcc

SEQ ID NO: 839092 - DNA, 120 bp, Artificial Sequence
  ENSG00000213963_28 (sequence is synthesized)
aaggtattgggaaatccatttgttcctcatgtcagctgtttgaggaggcaccaacccagatgtccacagttccttctggccttcctttaccgatactgatgcacctgtgcctccttcctg

SEQ ID NO: 839093 - DNA, 120 bp, Artificial Sequence
  ENSG00000213963_29 (sequence is synthesized)
tgtgcatggcccatttgtgcccagcatctccctgctattttggggccactccagggtctgggaagttctgtaggcttataacatacagtcattcttctccccagcttgctgcctccctga

SEQ ID NO: 839094 - DNA, 120 bp, Artificial Sequence
  ENSG00000213963_30 (sequence is synthesized)
gacacagaggtagagaagtaggaaaggacctaccgtacccaggcctttgccctctcacttttcatccatccttcttcccaccagtggagggatgtgtttctagtcttccagggaagctcc

SEQ ID NO: 839095 - DNA, 120 bp, Artificial Sequence
  ENSG00000213963_31 (sequence is synthesized)
tctctcctcaaaccattttcttccaaatactttggctttattccaaatcctctctagtcctctgagatttttttataacacaaaacacaacttacagaagttgtgttgttgttttgctgt

SEQ ID NO: 839096 - DNA, 120 bp, Artificial Sequence
  ENSG00000213963_32 (sequence is synthesized)
ttatcttgtcacattatttctctaccttgaggcaacaggacaagggcctgctgtccagcgcacggaggcagggaggaaggggtaggggaatactaagaaaaaaaaatttctcgatcacat

SEQ ID NO: 839097 - DNA, 120 bp, Artificial Sequence
  ENSG00000213963_33 (sequence is synthesized)
gtgtaccacatttaactttatcaggtccttgtgaggtgagtatctgtgtgtcattgttctgaaactaacagtgaggggacaaagcattgataggagttcttacaatatatttgggaactc

SEQ ID NO: 839098 - DNA, 120 bp, Artificial Sequence
  ENSG00000213963_34 (sequence is synthesized)
gcaggtgagggcctctcctgcctgattggtctttcaatgtaccatcccaacccacccacctcaatccccatggcttgatcctgctgtctcggtgatcaagctttcagttaagaattgggt

SEQ ID NO: 839099 - DNA, 120 bp, Artificial Sequence
  ENSG00000213963_35 (sequence is synthesized)
gataatgagctagttaatccaatttaaaaaaaaagaattaggatctgggctcagaagccccacagctgtgaaagcctggccgtagattactagtcttctagatgtagaaaagatttttcc

SEQ ID NO: 839100 - DNA, 120 bp, Artificial Sequence
  ENSG00000213963_36 (sequence is synthesized)
tttctctggctatttaagtctttatcagtcaccctgcctcagttatcaacacacaccctagagtaaatctgttccctgggggtggaaatagaaggggcatgtcattgtacatccacactg

SEQ ID NO: 839101 - DNA, 120 bp, Artificial Sequence
  ENSG00000213963_37 (sequence is synthesized)
atgaaaggaaaggaaacattaagatggcttaagtggaaaggtcacatacggcttgtactagagagacaccatgctaaagcaaaacatcgtttaaaaaaattctgacttatcatgtgctca

SEQ ID NO: 839102 - DNA, 120 bp, Artificial Sequence
  ENSG00000213963_38 (sequence is synthesized)
gaaatgctcaaatgggtacaaccatcaccaagggtgggatgggagggcaggggaaaaaaatatgaagcatcaaaaaaaattctgatttgtatttgtgaaattcaatagtaaccctattca

SEQ ID NO: 839103 - DNA, 120 bp, Artificial Sequence
  ENSG00000213963_39 (sequence is synthesized)
ttaactggattttaaaatcatttcaaagcacattcggctttcaaaagatgtttgtttaaataatacagttggcttttggtcaaaaaatgaagtttcggtaatgcatagtaacaactgtag

SEQ ID NO: 839104 - DNA, 120 bp, Artificial Sequence
  ENSG00000213963_40 (sequence is synthesized)
tgtaattactggccacaaaataccaggtgccagaccaacccttttcgaaccatttaagagaaccaagccaagcaaaaatgcccagcctagccttacccagaagttcaaaagctcagcctt

SEQ ID NO: 839105 - DNA, 120 bp, Artificial Sequence
  ENSG00000213963_41 (sequence is synthesized)
tgtcaccaggaaaaaattaattcaaagagcaaagccattattcggcacaaccaggtattctgttgtaaacatcttttgttaatacatgttgaaagctgaactttctcacgtttgagtgaa

SEQ ID NO: 839106 - DNA, 120 bp, Artificial Sequence
  ENSG00000213963_42 (sequence is synthesized)
agagggctgcttaaagagagtttaaaccaagccaggttcaaggtttttttcttttctttctttttagatttctgacttcatatctgtgggatccacacaatggggaggtactggccttgg

SEQ ID NO: 839107 - DNA, 120 bp, Artificial Sequence
  ENSG00000213963_43 (sequence is synthesized)
aatccatggttccccagctatcattttactttagaattacagtgttctctgttagtgtcaagggaatgaacctgacgagaaaagaccaaacataggactgttacagggaagaaaaatatg

SEQ ID NO: 839108 - DNA, 120 bp, Artificial Sequence
  ENSG00000213963_44 (sequence is synthesized)
aaaagacctaaagatgcacgtcctcattatatgtaaggaatctatttcctagaatcctataaaaagctcaagtgaatttgcttcagttaataaatgtgatttaattataatgataatgcc

SEQ ID NO: 839109 - DNA, 78 bp, Artificial Sequence
  ENSG00000213963_45 (sequence is synthesized)
ggagcacaaacagaaagttcagtggccccaataaaaataacaccagaatcttccagatactttctccataaggcgaaa

SEQ ID NO: 839110 - DNA, 120 bp, Artificial Sequence
  ENSG00000213963_46 (sequence is synthesized)
accgcggcgacttggcggcgggtgccatgcgtctggagcttcacattctctgccccccacccaccgcgccggcgctcccttgtcacgcctcgggaagcgcgcacctgccaagcaggatga

SEQ ID NO: 839111 - DNA, 120 bp, Artificial Sequence
  ENSG00000213963_47 (sequence is synthesized)
taggcattgttcctaagtcatgcagaggggttgtgtaagcatggtcatttgcatcattatcctgcacgtctgatacagccaaactccacgccacctggtttgctcaacagcaaaagacac

SEQ ID NO: 839112 - DNA, 120 bp, Artificial Sequence
  ENSG00000213963_48 (sequence is synthesized)
gcccagccaacttataacttttatatcattagacacatggaatatgggcctccgtttgtactcttgcccttggccccacaaacgttagggagaggcctggctcctgcaatgtactattta

SEQ ID NO: 839113 - DNA, 120 bp, Artificial Sequence
  ENSG00000213963_49 (sequence is synthesized)
cctgttgtaaagaatagcccttcaaaagtattattctaagtctgtttgacataataggtccaaattgtattacaacatggtaaaaaaacaacaatccattaacaatcctctttggatttc

SEQ ID NO: 839114 - DNA, 120 bp, Artificial Sequence
  ENSG00000213963_50 (sequence is synthesized)
taaaaaagttttggtagcctaaactctttccccaatttttgatatcacttcatgtcattttagagagtaagttttcctgttttattaatgtttatatttaagctgaattttctaaaagaa

SEQ ID NO: 839115 - DNA, 120 bp, Artificial Sequence
  ENSG00000213963_51 (sequence is synthesized)
gtggcaatttggagcttcaataaaatgagggaaaaatgaaaacagcttaataggtgcttgtgctggaaacctaattacataaagattattccaggtgtccaaggcagggttgatgaaaga

SEQ ID NO: 839116 - DNA, 120 bp, Artificial Sequence
  ENSG00000213963_52 (sequence is synthesized)
atcgcctaggaaagttacgctgaaaattgtcgggaaatggaaggattcaagagacatttgaaagacagaattggtactattgaatgaccacttggacacaggggatgaaaatgaggaaat

SEQ ID NO: 839117 - DNA, 120 bp, Artificial Sequence
  ENSG00000213963_53 (sequence is synthesized)
actattcttactgagtatcaccactcatttttatgatacttctagcaggatgaataatctgatatcatgtgaaatgaggaaataagaagctttctgctgacttcattttgacccagggtc

SEQ ID NO: 839118 - DNA, 120 bp, Artificial Sequence
  ENSG00000213963_54 (sequence is synthesized)
caaaaggtgatgtaatcctgtggcaagaaggtaaagctatattcttgtccgtaccagatgaaagtgaactatctctgcttcatcattcacaactgtcctaataaatggccacaagtccct

SEQ ID NO: 839119 - DNA, 120 bp, Artificial Sequence
  ENSG00000213963_55 (sequence is synthesized)
ttgtattccaggaggtagactcaagtaggcacttcctcgagggtactcagatttcctttaactgtgtctgagaacgcattcatatctggaaattggataccgtctctcttttctagacat

SEQ ID NO: 839120 - DNA, 120 bp, Artificial Sequence
  ENSG00000259504_0 (sequence is synthesized)
cacatggcagagccggtgcgctggctgtatggagtgaggactaatggggaatcaaggacgtccagctgtggatggcagaagggccactgtctgaagtgggaagtctggacattcccaaag

SEQ ID NO: 839121 - DNA, 120 bp, Artificial Sequence
  ENSG00000259504_1 (sequence is synthesized)
gagtctttgaaagactgggtcttctcctgagcctgagagcagtgcttcttccaatggcactgcttccattttaagcatcagcatggcccgggagcttgttggaatgaagaatctccagct

SEQ ID NO: 839122 - DNA, 120 bp, Artificial Sequence
  ENSG00000259504_2 (sequence is synthesized)
aggagtcctgcggaatgaaaaatgactacccagatttgccaccaaaatccagcaggagtgccttagaaagcagggtaacatactcacaggatctgtggatcaggacgtgaacatctctgg

SEQ ID NO: 839123 - DNA, 120 bp, Artificial Sequence
  ENSG00000259504_3 (sequence is synthesized)
aagccattatctaccccacaccatctctctagcacttagtacacggcctgtacagagcagatgctcggcaaggatctggagaaagaaagaatgaatgaataaataaacaaagaaatcagg

SEQ ID NO: 839124 - DNA, 120 bp, Artificial Sequence
  ENSG00000259504_4 (sequence is synthesized)
gtggtaggatcaagacactgttttctgttccagctcattttgcgaacaatgttatgtcacaggtcacttggctgtccttggctcaactgtgagtaaggaggagtcctgcggaatgaaaaa

SEQ ID NO: 839125 - DNA, 120 bp, Artificial Sequence
  ENSG00000259504_5 (sequence is synthesized)
acacagacacacagagacagcatgtgaagacaggcaagattgtgtgatgctgccacgagcccagggatgctgggaaccagaagctggaagagacaaggaaggattctccctctcagggtt

SEQ ID NO: 839126 - DNA, 120 bp, Artificial Sequence
  ENSG00000259504_6 (sequence is synthesized)
attgtggtgaccacagaatgcatttggaagtggctttgtaaactgcagagtgataagccaattcaatatttggagttgtgttttatcttccaaaggcctcagtaaacatttgtagaactg

SEQ ID NO: 839127 - DNA, 120 bp, Artificial Sequence
  ENSG00000259503_0 (sequence is synthesized)
attattcaagaggaaaggatgcaaatgaagatcattcaagaaagcagaagccaacccagaaaggcaaggactcttcctctgtgtggccacagtatgtcacagcagagccctggctctcct

SEQ ID NO: 839128 - DNA, 120 bp, Artificial Sequence
  ENSG00000259503_1 (sequence is synthesized)
ggtggcctccctctcacaccatgaaacttctggactccagggacccacagctgcacccaacgaatttcactttggcctgatcttggatccactgagcaacagaaatttgggatgtgaatt

SEQ ID NO: 839129 - DNA, 120 bp, Artificial Sequence
  ENSG00000259503_2 (sequence is synthesized)
atcatggagagaagtggatgaggggaagtcggggacctgagaactcacttctatgtttgcagtgttcagcccctggtaagagacctcctcctgacatccaaggggaagcatggatgtggt

SEQ ID NO: 839130 - DNA, 120 bp, Artificial Sequence
  ENSG00000259503_3 (sequence is synthesized)
acagagagccccacaactctggtctgggctcccgcagaaggccaggggccagcacacaaaggccactgtgaggagcagacatccgatggaccagcttctgaggtgtcagagagagactga

SEQ ID NO: 839131 - DNA, 120 bp, Artificial Sequence
  ENSG00000259508_0 (sequence is synthesized)
ttgatgtagcattacatgttctgcttgctgcatttttggagaagtgcatgcagatactcaagtgactcacagacatgcaacagctcagaaggccatcctgtttgtctttcagtgagaagg

SEQ ID NO: 839132 - DNA, 120 bp, Artificial Sequence
  ENSG00000259508_1 (sequence is synthesized)
aaaagatccaactccatcatactcctaagaaaaagcatcttctgctgaaggcatcatgggagaccgggaagaggatcgggatgaagcaaaactcacgaagcccactgtgaacacctcatg

SEQ ID NO: 839133 - DNA, 120 bp, Artificial Sequence
  ENSG00000259508_2 (sequence is synthesized)
gcccccaaccccaacctaatcccgagcaactcagccccagccctcagcagcctgctccactcagccagcaaagccagtggttggtgggcccttggagggcccaactcgtcgcatgtggca

SEQ ID NO: 839134 - DNA, 120 bp, Artificial Sequence
  ENSG00000259508_3 (sequence is synthesized)
acagccaaggaagtgagccctggtcctccctgcacactggaaattaggaggggggaaattattgggtccaaattaagtcttggattaatgaaacaaaatgtttgaaaagtacagaaatta

SEQ ID NO: 839135 - DNA, 120 bp, Artificial Sequence
  ENSG00000259508_4 (sequence is synthesized)
aggcgaatccctctcaacccagtgaccccacatctgggactcttcaagaggaataacaccaaacactggaaaccattaggtgcctccgcccctgaggcagagcaagggggcgatggggca

SEQ ID NO: 839136 - DNA, 120 bp, Artificial Sequence
  ENSG00000259508_5 (sequence is synthesized)
agggggcgatggggcatcgcccttcatctggtggctgccacagaagtgatggtgggtgcccaataggcagggcctattgatctggtttgtttatttgagacagggtctcactctgtttcc

SEQ ID NO: 839137 - DNA, 120 bp, Artificial Sequence
  ENSG00000250626_0 (sequence is synthesized)
ggtggcgcagattctgacgtcattctgcacgccattgttctgcaatgcgccctgcccccaacactgccagtgcttgcaaacttagaggatttaaattcatcactagtgttttgaaatccc

SEQ ID NO: 839138 - DNA, 120 bp, Artificial Sequence
  ENSG00000250626_1 (sequence is synthesized)
aggatgtgttcctgagacagtcttcgttgttttattgtcctgggcattctgcgtcctttcagtctggagatttttagcttcctttgcttctgagtctctatttgcagtgccccgatgcta

SEQ ID NO: 839139 - DNA, 120 bp, Artificial Sequence
  ENSG00000250626_2 (sequence is synthesized)
gaaacctgagatcccatggcttctccagaatggaggcttgggcattgtcagcaccctccttccaagagttgaaagttcctctcttctggaagacaaactgatgtgaggatgaggaggagt

SEQ ID NO: 839140 - DNA, 120 bp, Artificial Sequence
  ENSG00000250626_3 (sequence is synthesized)
ttgacagcttgggagactcacacaggctagtgaatttcaggaattaacagaaactgaacagcttctataatcctgcaggaagtaacctctggatggcacaatggagtctcactctgttgc

SEQ ID NO: 839141 - DNA, 80 bp, Artificial Sequence
  ENSG00000250626_4 (sequence is synthesized)
tctcagctcaccacaagctccgcctcctgctattacaggtgcctgctaccatggccagctaagttttgtatttttagtag

SEQ ID NO: 839142 - DNA, 120 bp, Artificial Sequence
  ENSG00000250626_5 (sequence is synthesized)
tgagccgccgcacccggcctctgctaagtttacaacctgcaaattctatccaaaatatatacatattttcttgtatttttcatttaatgcaccaaaataaaaaaaaaattgtttttcatt

SEQ ID NO: 839143 - DNA, 120 bp, Artificial Sequence
  ENSG00000250626_6 (sequence is synthesized)
ggcgcggcgtctgtgatgggcgcagggtctgtgaggtgcaaaggccatttagtgtgtggccttagttaattttttgttttcaattttctgtctctcatgttattgatctgtaaaaggagc

SEQ ID NO: 839144 - DNA, 120 bp, Artificial Sequence
  ENSG00000250626_7 (sequence is synthesized)
ataatcgtaagtgtctcttcttattaggttacttgtgaggcgtaagtgaagtactatgtgttaactagtatcatgaaactacagcctcactctccggaggaaatagtgtaatgatagcgc

SEQ ID NO: 839145 - DNA, 120 bp, Artificial Sequence
  ENSG00000250626_8 (sequence is synthesized)
cgtttacagggtgcaccgtaacaggaggcaaaaacagaggtggatacgtgcagagaagtctttaggtggtcttgacactagagctgaatttgaaggaagttgagaacttgttagatgaag

SEQ ID NO: 839146 - DNA, 120 bp, Artificial Sequence
  ENSG00000250626_9 (sequence is synthesized)
ggacctgagaacaggaacaagtgttcaccaagaccggtctgtgtgaacacacagaggcggaaatcatgccaaaacttgcagagtggcaggaaactccattcagctggagaaagcatacat

SEQ ID NO: 839147 - DNA, 120 bp, Artificial Sequence
  ENSG00000250626_10 (sequence is synthesized)
atggagggagtgaaaggagataacagtggagaggtctgggcaaatttaggctgacttcaagaaggcaggagtttcctgtgaagaaaattgactgatacagatttgtgttttagaaaagtc

SEQ ID NO: 839148 - DNA, 120 bp, Artificial Sequence
  ENSG00000250626_11 (sequence is synthesized)
agtctgtcagcagctgggaaggtgaaggggaggtgtcacaccagatgtaataaaattggttagtgggatttagccattgttttaaagagtggtgaaggtaaggggagtgtggagagagag

SEQ ID NO: 839149 - DNA, 120 bp, Artificial Sequence
  ENSG00000250626_12 (sequence is synthesized)
aactttttggaagttggttatattgatgggacatgtggatgtgactatgaagagacggaatcaaaaatgggccagaagtcctaaatctgagcaacctgtggcatgtgcacataaatatga

SEQ ID NO: 839150 - DNA, 120 bp, Artificial Sequence
  ENSG00000250626_13 (sequence is synthesized)
cccggggacatgtgggtgtgagagtctttatttcagcaaaatatactaagctagaggtatagattttggaatcttcaacaattaattggccattgtggccaagtgaaaacattaggagtc

SEQ ID NO: 839151 - DNA, 120 bp, Artificial Sequence
  ENSG00000250626_14 (sequence is synthesized)
aagaaaatatcactataaaaatgtttgagaagcatggtactagtcatcagtgttaaatgtgcttctggtgaggggttcaggaagtttccaatcatgacggaaggtgaagaagagtaggca

SEQ ID NO: 839152 - DNA, 120 bp, Artificial Sequence
  ENSG00000250626_15 (sequence is synthesized)
tcacatagcaagaggggatgcaagacacagggagagagagaagagggaggcaccaggatgctttcagcaatcaatgtcaggaaaactgatagagcaagaagtcactcattgtcacaagga

SEQ ID NO: 839153 - DNA, 120 bp, Artificial Sequence
  ENSG00000250626_16 (sequence is synthesized)
cggcaccaagccctttctgaggaatctgccccatgacccaaacacctcccaccaggccctaccaccaacacaggggatcacagttcaatgtgcgatttggaggcaaaacatatacaaact

SEQ ID NO: 839154 - DNA, 120 bp, Artificial Sequence
  ENSG00000250620_0 (sequence is synthesized)
gaagggaaaaccaactactcaagcctcagtaatggtggacaccccgccccccaccaagctcgagcgtcccagatcgacttcagactgctgtgttggcagcgagaatttcaagccagtgga

SEQ ID NO: 839155 - DNA, 70 bp, Artificial Sequence
  ENSG00000250620_1 (sequence is synthesized)
cagactgctgtgttggcagcgagaatttcaagccagtggattttggcttgctggcctccacctttttagg

SEQ ID NO: 839156 - DNA, 61 bp, Artificial Sequence
  ENSG00000250620_2 (sequence is synthesized)
cagggaatatcctggtctgccggttgcaaagaccgtgggaaaagcgtagtatctgggccga

SEQ ID NO: 839157 - DNA, 120 bp, Artificial Sequence
  ENSG00000250620_3 (sequence is synthesized)
ggttgcaaagaccgtgggaaaagcgtagtatctgggccgaatgcaccgtccctcagggcacagtccctcatggcttcccttggctggcggagggacttctctgaccccttgcgcttcctg

SEQ ID NO: 839158 - DNA, 120 bp, Artificial Sequence
  ENSG00000250620_4 (sequence is synthesized)
ggacttctctgaccccttgcgcttcctggatgaggcaacaccccaccctgctttggcttgccctccatgtgctgcacgcactgtctaaccagtctcagtgagatgagccaggtacctcag

SEQ ID NO: 839159 - DNA, 120 bp, Artificial Sequence
  ENSG00000250620_5 (sequence is synthesized)
gcccatctcgaacatcatctaaaaggactggacctacatctgcagttaactgcacaatggaagaaacggcctctcctgggcagcctcatggatggggtgaagagacaaagcttgggagtg

SEQ ID NO: 839160 - DNA, 120 bp, Artificial Sequence
  ENSG00000250620_6 (sequence is synthesized)
tagcatgttgagcacatctgctcagaggtaacatttaagcatttaggttgtctccaagcataaaaatggaaatactgatcctgtgacaacacagcctgaattttctgctttgcagatgcc

SEQ ID NO: 839161 - DNA, 120 bp, Artificial Sequence
  ENSG00000250620_7 (sequence is synthesized)
agatttatttttaaatggtgtgaatcaaatctgtgctgagaggccaacttcaaaatataaaagaaaaattggcaatgggaggattgtgctggtttggctgaaatgaagtgctctacggca

SEQ ID NO: 839162 - DNA, 120 bp, Artificial Sequence
  ENSG00000250620_8 (sequence is synthesized)
tttcattctagtggagcgtctgactgtgaaaatccttccaattgtaattttctttggcttgtcaaaagaggattatgaactaaagtcagtgttgcaggaaatgtcacctgtcctttgaaa

SEQ ID NO: 839163 - DNA, 120 bp, Artificial Sequence
  ENSG00000250620_9 (sequence is synthesized)
gaaaataataaatcaaaatggcttttgttcatcatgtttaaaatgaaaaaaaaaaaaaagttgatccacttggagtcttctctcatttcttgacaaggcagttaaataaataaaacggaa

SEQ ID NO: 839164 - DNA, 120 bp, Artificial Sequence
  ENSG00000250623_0 (sequence is synthesized)
gcagatttagcagtaattatgtggtatatgaacaccttgctaataaatcttttgatagatatttaaattatatgggaggaatattcatcaggaaagcagaaaaataacatggcaacaacg

SEQ ID NO: 839165 - DNA, 120 bp, Artificial Sequence
  ENSG00000250623_1 (sequence is synthesized)
taaaggccttgattagaattacttcagaatagcacttatatcatttatgtgggtcctaatgaaaacagagcctaaagactacatcaggaaagaaaggcagagctctccatctgggggtgc

SEQ ID NO: 839166 - DNA, 120 bp, Artificial Sequence
  ENSG00000250623_2 (sequence is synthesized)
ctcaaaagaaaatggcactcggatcttcatgacggtgcccaccacccccctcctttaagccaaccagcagacttcatcgtcaggccgtggagacacagggagacacttgccaaggcatct

SEQ ID NO: 839167 - DNA, 120 bp, Artificial Sequence
  ENSG00000250623_3 (sequence is synthesized)
gtgagacgcacttcttcatccttctgtgaagctgcatgaggcgctctgcatccccactggagagaaacccagcaagcaccgcccaggcctgctgggacccgtggggaggctatgcaagaa

SEQ ID NO: 839168 - DNA, 85 bp, Artificial Sequence
  ENSG00000258450_0 (sequence is synthesized)
tgctctctacttcattcttttaataactatacagtttgctaatgttacgctggagtatcccagtgcttaaaaatataatacactt

SEQ ID NO: 839169 - DNA, 120 bp, Artificial Sequence
  ENSG00000258450_1 (sequence is synthesized)
tcccaaagtgctggaattacaggcgttagctgccacaccaggccccaaaaatgtaaaaattagctgggcattatggcatgcacctgtagtcccaggtacccaggcacttgggggcacagg

SEQ ID NO: 839170 - DNA, 84 bp, Artificial Sequence
  ENSG00000258450_2 (sequence is synthesized)
tagctgggcattatggcatgcacctgtagtcccaggtacccaggcacttgggggcacaggtggggctatgagtgtgcgactgca

SEQ ID NO: 839171 - DNA, 120 bp, Artificial Sequence
  ENSG00000258457_0 (sequence is synthesized)
agggatagctggtgtgcgtgcagcggaaggcgctaactgccctggatgtggagacccgcggactggacgtgagaggcgggcaggggcagttggggcagctgcccctacaacactgaagaa

SEQ ID NO: 839172 - DNA, 120 bp, Artificial Sequence
  ENSG00000258457_1 (sequence is synthesized)
ttggaataggaaagagtgtgggggtaggggacggggactctttgtctgcagttggaatgcgcggaggggcatggtggaatgtgtcgcgtcccgggaccggacgacaggaggcatgttctg

SEQ ID NO: 839173 - DNA, 120 bp, Artificial Sequence
  ENSG00000258457_2 (sequence is synthesized)
cgctagcaccgtgactttgttcccagcgtggggactgtgggagagatggagagagactggtacagaaatggtgagacaaggagagagccataaagaggaagacagagagaaagaagacaa

SEQ ID NO: 839174 - DNA, 120 bp, Artificial Sequence
  ENSG00000258457_3 (sequence is synthesized)
atgcataaagaggttcagagacgtgtgactgtggagatcgaaggcctggttttagggctagcgaacaccttctccctttggttttggtccacagaagactggtgatacagactccttatc

SEQ ID NO: 839175 - DNA, 120 bp, Artificial Sequence
  ENSG00000258457_4 (sequence is synthesized)
actgaaatattccaagaggacttgatgctgccacaaagagaagagaatgaataaagttgtcggctttgtaagagccagacaaacagagatacccagcactaatcaactttgtggcaaatc

SEQ ID NO: 839176 - DNA, 120 bp, Artificial Sequence
  ENSG00000258457_5 (sequence is synthesized)
cctccacagcctaagaaggatccctagcagcaatcctcaagagcctcagcagattggagagatgcctctttgattctgtcccagagctaaagattggaataactgtccctccccctctaa

SEQ ID NO: 839177 - DNA, 120 bp, Artificial Sequence
  ENSG00000258457_6 (sequence is synthesized)
acccacagtctgccacaagaacattttaaaccttcctccatgatgggcagcagaactccctgactagtcctccagatccttctcaagcacagaatagagagagcatgatggtgagtgagg

SEQ ID NO: 839178 - DNA, 120 bp, Artificial Sequence
  ENSG00000258457_7 (sequence is synthesized)
atactgtccttcctgcaggtcttcagttccaccacactctcctaagggaaggaagaagccaggcctcaatgctgtacctctctctggaggcagcaggcacaagtggaatggaagtgatgg

SEQ ID NO: 839179 - DNA, 120 bp, Artificial Sequence
  ENSG00000258457_8 (sequence is synthesized)
cagcagcagcatctggcctcgctgccactgggaggggagaagagaatggtggcactgaaggacatggcggatggggcagtaacaaccacgcttacactgctgggccgctccaacaggtag

SEQ ID NO: 839180 - DNA, 120 bp, Artificial Sequence
  ENSG00000258457_9 (sequence is synthesized)
agagagagggaagggcaccccatcactacacacagcaaaaaatgaccttctgccaaagaagctgatggttcaggaagaaaatagagctgactatccctgaaggaaaaggaaacgtggtac

SEQ ID NO: 839181 - DNA, 120 bp, Artificial Sequence
  ENSG00000258457_10 (sequence is synthesized)
tgttttgctttatcacaaatacaaacaaaaggtttaaagatggaaagaaaagaacagaaaggaaaaagagtgaaaagccaggaaaagcacctaggaggaatagccctctgctgccatact

SEQ ID NO: 839182 - DNA, 120 bp, Artificial Sequence
  ENSG00000258454_0 (sequence is synthesized)
cttcccccatgatctccttgcagcctgcccacactggccttagggtgactttctggagaggcaagcatcttcatgtgagacctgccaaagggtgtataccttctcaaaagaccctgcagt

SEQ ID NO: 839183 - DNA, 120 bp, Artificial Sequence
  ENSG00000258454_1 (sequence is synthesized)
ttcttctccaatgtggacaacgctgagcatatgatctttcggtgtctatctgcactttctttgacctctggtcattgttggtgaaagctaaggagcaagtaggagttctcaagatgaaat

SEQ ID NO: 839184 - DNA, 120 bp, Artificial Sequence
  ENSG00000258454_2 (sequence is synthesized)
agctgcctgccgacttcacaaagacgtattcctctcattaatgactgttagtgtagcatcatgcaatgctcctgagaaactgcagaaatagtaatgaccatgtgatggccaaggctgatt

SEQ ID NO: 839185 - DNA, 120 bp, Artificial Sequence
  ENSG00000258454_3 (sequence is synthesized)
ggaagatgctcctggggagagatgaagtttggatttacagcatcagcatgaaggagttgcaagcattggtgttgtaaaccgcactggcacctgacactaaatgtgggaaagggatggggt

SEQ ID NO: 839186 - DNA, 120 bp, Artificial Sequence
  ENSG00000258455_0 (sequence is synthesized)
ggaattcctaaagccatataaaaaggataatggcttcgacaaaggatacagagcacctagtttcaaggaaatggctgaagataactgaacatacacagactcaagatgaacaaaaagcca

SEQ ID NO: 839187 - DNA, 120 bp, Artificial Sequence
  ENSG00000258455_1 (sequence is synthesized)
gaaagcattacctaccatcaactccttaagggcaggatcccagatcctgaaaccaatggaccagaatcctgccccacttcaagaatgagttggctccttgttaccacggtaataagcgcc

SEQ ID NO: 839188 - DNA, 120 bp, Artificial Sequence
  ENSG00000258455_2 (sequence is synthesized)
ccatgaatggggataatttgccactttgctgaaaattcaagcattctatagttttggttttttaactgagaaacgaggtgggaggagcagcagaaccaattatagagtacatttaaacaa

SEQ ID NO: 839189 - DNA, 120 bp, Artificial Sequence
  ENSG00000258458_0 (sequence is synthesized)
agctcaggagtttgagaccaaccttggtaacatgagtgattggacttcagctgatagtgttattgaggatcacttgtacattatgagttgcttctctcttgctgctgtcaagattctctg

SEQ ID NO: 839190 - DNA, 120 bp, Artificial Sequence
  ENSG00000258458_1 (sequence is synthesized)
tctttcaacagtttgattataatgtgtctcagtaagccagagaatatcatctaaatattgacatttcaagaaaccggatgtaaaggaaaccaaagtgagatatgaaacaatccagtgagg

SEQ ID NO: 839191 - DNA, 120 bp, Artificial Sequence
  ENSG00000258458_2 (sequence is synthesized)
agaataagaaacctgcctaaaaatgagttttgaagggtgtagatgaaggggttgagcatcagggtcaccacggtgttaagcaatgccgccaccttgttcctgtcttccttctggtcactc

SEQ ID NO: 839192 - DNA, 120 bp, Artificial Sequence
  ENSG00000258458_3 (sequence is synthesized)
ttgcctgactgaatgtacatgaagatgcagctgccatagaagagagacacgacaatgatgtgggaggagcaggcggagaaggctttctgcttctctttggctgaggggatgtgcagaatg

SEQ ID NO: 839193 - DNA, 120 bp, Artificial Sequence
  ENSG00000258458_4 (sequence is synthesized)
gcgtggaggatgtggccatagcaagtggccgtcatagacagagtgcccagtaagctgacgttggctataacaaaacccaggagctctatcagagtcatgtctgcacaaatgagtttcaag

SEQ ID NO: 839194 - DNA, 120 bp, Artificial Sequence
  ENSG00000258458_5 (sequence is synthesized)
aggggaaagttgtcacagaagaaatggttaatgatgttggggccacagaatggctgctgaaggacaagaaaacttggaataatgatgagaaggaatcctgtcatccactaacagaggact

SEQ ID NO: 839195 - DNA, 120 bp, Artificial Sequence
  ENSG00000258458_6 (sequence is synthesized)
agctggacacagacccttttgctcatgatggtggcataatgcaaagggttacatacggccacgtacctgtcaaaggacatcaccgccaggaggaagaactctgtggtgcccaagaaaaaa

SEQ ID NO: 839196 - DNA, 120 bp, Artificial Sequence
  ENSG00000258458_7 (sequence is synthesized)
ttgcaggaagcagcctgggagggaatggtcttgtatcctgtgaggatgttggccagcaccttgggaaagatgaccgaggtgaaccagatctccgggacagcaaagttgcggaggaagtag

SEQ ID NO: 839197 - DNA, 120 bp, Artificial Sequence
  ENSG00000258458_8 (sequence is synthesized)
tacatggtggtgtggaggcgcctgtccatgagggtgatgaccacgatgaccagattccccagcagtgtgaggaggtaggtcaggaggagccccaggaagatgagcatctgcagctcacag

SEQ ID NO: 839198 - DNA, 120 bp, Artificial Sequence
  ENSG00000258458_9 (sequence is synthesized)
gtctctgagagccccagcaggacaaactcggtgacggtggtgtggttccccatggctcctctgacctttgctggggagggctgatcaaaggtgttcagcatcaagaatcgtgatgttggg

SEQ ID NO: 839199 - DNA, 120 bp, Artificial Sequence
  ENSG00000258458_10 (sequence is synthesized)
gacctgagaacaacctggaactgaaaggagagagggctgaaggtgtactttatttctgtgaaggatgtatcttcccaccactgactactcaggcttatctgcagagcctctggggttacc

SEQ ID NO: 839200 - DNA, 120 bp, Artificial Sequence
  ENSG00000258458_11 (sequence is synthesized)
tgtttcacgtgtggtttctggtgcatctgtgtgttagacaagagtgtgatgatgtgcaaggtggcccaagaaaggctcagaaccaaaatttatcctttcttacttttcttaaccaaaact

SEQ ID NO: 839201 - DNA, 120 bp, Artificial Sequence
  ENSG00000258458_12 (sequence is synthesized)
tttactcctaatttctcaatgaatccctttgcctatactaatattacctgctttcaataacttttgttcttgtgtttataccaatattgggtcttcatccataaagagttcatattcgag

SEQ ID NO: 839202 - DNA, 120 bp, Artificial Sequence
  ENSG00000258458_13 (sequence is synthesized)
ggtgttgctgtttaaacattgccagaatctttgatacctttcattagtttttggattgataaaaagactagaggaaatctgtgagagaaaagcacacctctcacaaatcaaataaggaaa

SEQ ID NO: 839203 - DNA, 120 bp, Artificial Sequence
  ENSG00000258458_14 (sequence is synthesized)
aatccaagtagtatccacataaatcaacactccttaatgggagtttgatattcaacattcttaatgacctgttgccaaggttctcctttcattatctccttccacaaactctgagctttg

SEQ ID NO: 839204 - DNA, 120 bp, Artificial Sequence
  ENSG00000258458_15 (sequence is synthesized)
atttgaagtgggtaaaaatctgtaaagccacgttaccattagcacgcagagagccttttctggagattgaaaggaagttgaagagctgggttagctatcatcgtaagctatcatcgttag

SEQ ID NO: 839205 - DNA, 120 bp, Artificial Sequence
  ENSG00000258458_16 (sequence is synthesized)
tgtgttgttggctttatctgtcttgactctgcaagcacatctacccgttacctgtggcttctccctccctcagggctatgtggatgtgagagaggtgacagggtgtagatgaaggggttg

SEQ ID NO: 839206 - DNA, 120 bp, Artificial Sequence
  ENSG00000258458_17 (sequence is synthesized)
cgttaccattagcacgcagagagccttttctggagattgaaaggaagttgaagagctgggttagctatcatcgtaagctatcatcgttagtgatggcgtaaacctggccagctgctgtgt

SEQ ID NO: 839207 - DNA, 120 bp, Artificial Sequence
  ENSG00000258458_18 (sequence is synthesized)
cttactgcctgtgaaaagcccaaccaaccatgtgaagaagaactgaggtttgggccaacagcctcagttgaactcccagccagcagtcaacaccaacttttgccagccacgtgaagaagg

SEQ ID NO: 839208 - DNA, 120 bp, Artificial Sequence
  ENSG00000258458_19 (sequence is synthesized)
ccatttaaaaagtggattctccagcccactggagccacctcaggtgactgcgtgtggagcaaagaaaggctatttgagcccacattgcaaaattacaagcaaataaataaaattattgta

SEQ ID NO: 839209 - DNA, 120 bp, Artificial Sequence
  ENSG00000258458_20 (sequence is synthesized)
tttttttttagagattacttttaaaactcaatacaattagaagtaattacaaatatacagctacagaacacttggcagggtgactatcttacagtacactgctactttggtggccccaaa

SEQ ID NO: 839210 - DNA, 120 bp, Artificial Sequence
  ENSG00000258458_21 (sequence is synthesized)
tgaaccaggcttcccaatatttgcacctttaggagttctcttctcttgagtctgattgggcctgtcacttgctttaatcaatagtagaatgcgttggaagtgatgttatgccagtttggg

SEQ ID NO: 839211 - DNA, 120 bp, Artificial Sequence
  ENSG00000258458_22 (sequence is synthesized)
tgggttccagaccactacaataaagccaatatcataataaagtgagtcacagggatttttttgttttgcagtgcatataaaagttatgttgggccggcatggtggctcaggcctgtaatc

SEQ ID NO: 839212 - DNA, 74 bp, Artificial Sequence
  ENSG00000258458_23 (sequence is synthesized)
gatcgcttgagctcaggagtttgagaccaaccttggtaacatggtaagaccccatctcttaaaaaaaaaaatac

SEQ ID NO: 839213 - DNA, 120 bp, Artificial Sequence
  ENSG00000258459_0 (sequence is synthesized)
ctggctgcggctgcaccctcgagggttgttatagtaaccacacagacgcacgcagcttcgcgtgtgtgccgaggaattcacgggcagtacataaactggactccctgcttcattcggagt

SEQ ID NO: 839214 - DNA, 120 bp, Artificial Sequence
  ENSG00000258459_1 (sequence is synthesized)
aacaaaaacacatacagaatttaatctacggccccacctgcaatttctgcaagatcggcttgacttcttcctcttcatcagccatcatctcccggccactccacccccaactttataacc

SEQ ID NO: 839215 - DNA, 120 bp, Artificial Sequence
  ENSG00000258459_2 (sequence is synthesized)
acagagacgcacgccctctctcaccgcggaaccacagcgacatctggcgttctggaggcttttctgccccagaagggctttgcttcaaaccgacttaaccatttatttccacagagatgc

SEQ ID NO: 839216 - DNA, 120 bp, Artificial Sequence
  ENSG00000258459_3 (sequence is synthesized)
atatataagaaaggatgactgtctctgcagagggaaacacagaaactggggaactgtgggtgagcgaagaaaattttcactgcctgcccttttgaattttcttgccatctatatgtatca

SEQ ID NO: 839217 - DNA, 120 bp, Artificial Sequence
  ENSG00000258459_4 (sequence is synthesized)
cctattcaaatataaacatttttaaataaaaaattatttgcttctacatagtctctggaaagagacacaagacactggcaagactatcgcttacaaagagcagaagtgagtggctggagc

SEQ ID NO: 839218 - DNA, 120 bp, Artificial Sequence
  ENSG00000258459_5 (sequence is synthesized)
aaaaatgagtgaccagggaactggggtagacttttcactctatgccttttttgtaactttaaagtttgtaccttgtgaatatattaaacttctgaataaatcttttaaagtgtcatgtaa

SEQ ID NO: 839219 - DNA, 120 bp, Artificial Sequence
  ENSG00000235899_0 (sequence is synthesized)
acacacacacaaaaaatctttaggagccagacaaccactgtggacaccaataagagagctccaacattggtgaggtatagacccgtcaaagttgttggtaataacagcaaggtccatctg

SEQ ID NO: 839220 - DNA, 120 bp, Artificial Sequence
  ENSG00000235899_1 (sequence is synthesized)
gcaagattggtcacctgtggtggaagtggtggtgacagcagggatgcaactgcagcaatcaatgatgatgatctcactagggtggggaggtgttaaaggcatcttcacagcagcacagtg

SEQ ID NO: 839221 - DNA, 120 bp, Artificial Sequence
  ENSG00000235899_2 (sequence is synthesized)
cccagaatgccaaagagcagcaggatggatccagcatcctctcctgataaaagagggctagaagacgggaggctccgggaagtctactggagtcatgaagacactgaaaagtgatgaatc

SEQ ID NO: 839222 - DNA, 120 bp, Artificial Sequence
  ENSG00000235899_3 (sequence is synthesized)
cacataaccatgacactggaaatgaagtttgagtggcagtcagaatctgggaggaagcattgctaagtgaaaatcttatggagcttgactaaaaatccctgtcaggaaccgtcaaaagct

SEQ ID NO: 839223 - DNA, 120 bp, Artificial Sequence
  ENSG00000235899_4 (sequence is synthesized)
gtgtccctgacatgaaaaatcttgctggaagttgagagaggtttatgcctactccgtgatccgggaacacaagacctttaccaaccaaaaaagtggatagctgttcttctgctgtgaagg

SEQ ID NO: 839224 - DNA, 120 bp, Artificial Sequence
  ENSG00000235899_5 (sequence is synthesized)
attaacaaccccagaagcaacccttaaccaatgattaaataaagtggatgattacatacccaagctccttcaactcccagggacataattctgagggatggaaaacaaactgaaactggc

SEQ ID NO: 839225 - DNA, 120 bp, Artificial Sequence
  ENSG00000235899_6 (sequence is synthesized)
tcaagtgaatgctcactggaaggcttactggaaaacttactggaaggatgtgaggacatgttcgggaatctatttgcagaaaacatattcagccctgtccaccacagccagctggctgaa

SEQ ID NO: 839226 - DNA, 120 bp, Artificial Sequence
  ENSG00000235899_7 (sequence is synthesized)
gagctcaaaaggcaagaaatcagcaagagagagagatgaagcatgagaaatgagcaaaaaacacccagcacatcataatcttggacagtttagcagtacatgaaaatagatggtcctcgc

SEQ ID NO: 839227 - DNA, 120 bp, Artificial Sequence
  ENSG00000235899_8 (sequence is synthesized)
cccaagggactgcagtaaccctgaataaacaggatgtctctcacttttagcagttctttctgtgctagtattggggaaatatatttttggctgcatgcaaaatggtaaaagacatctatt

SEQ ID NO: 839228 - DNA, 120 bp, Artificial Sequence
  ENSG00000235899_9 (sequence is synthesized)
aagaaaatgaaaacaatgcttctgttttagacgaagcttttgaaggtttaaggatcacctatttattgacaaaattgtttccgtggcttaaaaataaaatacaaacaaatactacaggta

SEQ ID NO: 839229 - DNA, 120 bp, Artificial Sequence
  ENSG00000235899_10 (sequence is synthesized)
gatatgggtagatggctctgttaggcagaagtgtcagagctggttataggaaaaccaggcggcacatacatgatcccagacaccgaagtaacctctgtctcactcctccacttccagcaa

SEQ ID NO: 839230 - DNA, 120 bp, Artificial Sequence
  ENSG00000235897_0 (sequence is synthesized)
tagacgcggggcctgaggctcctggacttgagaaaggattcaagacagccgatgatgaaaacacccatgcttgcaagtgaaggttctgcctgtcacttctcgcagaggctgcagaaaagg

SEQ ID NO: 839231 - DNA, 120 bp, Artificial Sequence
  ENSG00000235897_1 (sequence is synthesized)
gggctccaggcagacggagttccagagcgaacggtcatacagataattcctatcccaaaaaataaggagaccaggggtcaggcgataagtaaggaaagccaaacaggcaaccccagtaga

SEQ ID NO: 839232 - DNA, 120 bp, Artificial Sequence
  ENSG00000235897_2 (sequence is synthesized)
aaactggggtctcccctgaccgggtcatgggactgggctcatgagggtgaccgttactgctccatttgcaattttctgagtatcagaggagcaagatgctaggatgtgtgacccaaagga

SEQ ID NO: 839233 - DNA, 120 bp, Artificial Sequence
  ENSG00000235897_3 (sequence is synthesized)
gcgcgacagcttccacccgcctcaggcagtatcagccgcgccgcagtcggaggaaatagacgcggggcctgaggctcctggacttgagaggctgcagaaaaggcccaggaggctgttgat

SEQ ID NO: 839234 - DNA, 120 bp, Artificial Sequence
  ENSG00000235897_4 (sequence is synthesized)
ctctctctctctgtctgaaaagaccaagcccaagcctccacccatttacctactatgcaggtctttgaatgggtaaccatatttccaagcttgtgtctgattgaaggatgaaacatcaaa

SEQ ID NO: 839235 - DNA, 120 bp, Artificial Sequence
  ENSG00000235897_5 (sequence is synthesized)
catgcaaaaaggaccatctttcagagcaactccagaagtgacaaagcaaatcagggctccaagtaaagccaggccacctgacaacagagcagtaagcacctgcggagggaggagaaacac

SEQ ID NO: 839236 - DNA, 120 bp, Artificial Sequence
  ENSG00000235897_6 (sequence is synthesized)
tgagctaagacggggtcgcagctggggagcctgcggagggaggagaaacgctgagctaagacggggtcgcagctggggagtctgtggggcggtctgcacaggtctgacttctctggtctc

SEQ ID NO: 839237 - DNA, 120 bp, Artificial Sequence
  ENSG00000235897_7 (sequence is synthesized)
attctgtccatggcaccccctttgaagcataacccatggtggggaggccgtgaggggtttctaggagagaaaggaccaagaagcagaatcgcaggccccggatctccctgaccgtgagtt

SEQ ID NO: 839238 - DNA, 120 bp, Artificial Sequence
  ENSG00000235897_8 (sequence is synthesized)
cgcctgagctgctcagcagcttggcatcacaaaccttttgcacattacagccattcagcctctgagctaaagaagaagctaccacaggcccaccactgactcttctaaggaaaagctgca

SEQ ID NO: 839239 - DNA, 120 bp, Artificial Sequence
  ENSG00000235897_9 (sequence is synthesized)
ttttcaaaagttccaggttcccaactctgattcttctctatttcaaatcaaggataaaaaaaaggaagggagggaaggaaggaaagaaagaagcaggaaagaagggaaggagagaagtgg

SEQ ID NO: 839240 - DNA, 120 bp, Artificial Sequence
  ENSG00000235897_10 (sequence is synthesized)
gagggagggaaagaagggagagaaacagcgagagagaagctgcagccaagctctgaaatgactccacttctgtcgctgtgtttctccagctgagagctttcttggccatcagtctgtgct

SEQ ID NO: 839241 - DNA, 120 bp, Artificial Sequence
  ENSG00000235897_11 (sequence is synthesized)
cccactgccctcccagaaaataactgggtttccttccttgacaggtttctagcctgcttctacattggcttctttctcgttccttccttccttcccttccttccttctttctctctctct

SEQ ID NO: 839242 - DNA, 68 bp, Artificial Sequence
  ENSG00000235897_12 (sequence is synthesized)
attggattctttcttagggttctagatttttttctccctcccccaaaaatgcctattttaaaaatgtg

SEQ ID NO: 839243 - DNA, 120 bp, Artificial Sequence
  ENSG00000235897_13 (sequence is synthesized)
ggaactggtcgcgtccggacgcgcgacagcttccacccgcctcaggcagtatcagccgcgccgcagtcggaggaaatagacgcggggcctgaggctcctggacttgagcaagcctgttac

SEQ ID NO: 839244 - DNA, 120 bp, Artificial Sequence
  ENSG00000235897_14 (sequence is synthesized)
ggaggatattttatggactataaattcctaaacaattataataacttagttatttatcctatccatggatcacctggaagtttacaatgtgatttaaaatgcattctatcattccaccga

SEQ ID NO: 839245 - DNA, 120 bp, Artificial Sequence
  ENSG00000227039_0 (sequence is synthesized)
atttctcacatgaggtcccggcgagaaggacctgcttccatcagattcacacttgggagaggggcccggcctccaggagcgccaggcagaaagggcacccattaggaagaagaacacaga

SEQ ID NO: 839246 - DNA, 120 bp, Artificial Sequence
  ENSG00000227039_1 (sequence is synthesized)
ggccatgggagtgaaaagtttgatgctggaaagcaacagtagcacattctgctacagagcggaatgaaaaaccctggggagcaaattcctgagccagagaatggagcggaggaaccagcc

SEQ ID NO: 839247 - DNA, 120 bp, Artificial Sequence
  ENSG00000227039_2 (sequence is synthesized)
ggaggataaagaggtgggaacaggcaagaaaacctggaaaactacctgctgtcatcaggggttggttggttgagcctttccctgtgcttgcctggcagacctgcgtgctctgaggctgcc

SEQ ID NO: 839248 - DNA, 120 bp, Artificial Sequence
  ENSG00000227039_3 (sequence is synthesized)
cgaccctgagctccagaacagaccatcgaggctggtcccaggccaccaggctgggtgcaatgcagaaatggagatctgccccggggaaggcaggtgagtgtaggaaggagggagggctgc

SEQ ID NO: 839249 - DNA, 120 bp, Artificial Sequence
  ENSG00000227039_4 (sequence is synthesized)
aggtgggaacaggcaagaaaacctggacctgcgtgctctgaggctgcccgaccctgagctccagaacagaccatcgagttcaggagacaagcatgtcagccatgacacaaggcagatgag

SEQ ID NO: 839250 - DNA, 120 bp, Artificial Sequence
  ENSG00000227039_5 (sequence is synthesized)
aatgcagaaatggagatctgccccggggaaggcaggtgagtgtaggaaggagggagggctgcgagaagctgggggcagcctccatccccctgtggcctgggtgggcctgtgcccccccaa

SEQ ID NO: 839251 - DNA, 120 bp, Artificial Sequence
  ENSG00000227039_6 (sequence is synthesized)
gctgaggaggtggcattcttgcttccctgactcacccaaaggaagatttcacagcccctggcaagggctgccagacaggctcacctgtcaccccctgtccagggacagactgaccggtag

SEQ ID NO: 839252 - DNA, 120 bp, Artificial Sequence
  ENSG00000227039_7 (sequence is synthesized)
ccttggctgggtggggagttatgctgggaagtcttccaggccccctgggggtgggaagatgctcaatgttcaaaggagatggaacgaggaaaacagttaagcaacgatggactccagggg

SEQ ID NO: 839253 - DNA, 120 bp, Artificial Sequence
  ENSG00000227039_8 (sequence is synthesized)
gaaaaccggagaagaagaaactgtaattccagtccgtccacatggcccagcagtgaacgacaattgcatggtcagagagagcaaaagcaccacgccgactgaaagcagctcgaatgtggt

SEQ ID NO: 839254 - DNA, 120 bp, Artificial Sequence
  ENSG00000227039_9 (sequence is synthesized)
ggcagtgggagataatgccctcatctaccaaaacaagatctgccaccttcgcagaccactaaacctcattcctccacccacctccccacccccatgaaggccaactgaccagagagcagg

SEQ ID NO: 839255 - DNA, 120 bp, Artificial Sequence
  ENSG00000227039_10 (sequence is synthesized)
gctcccgagggtcgggtcgggtcgggtcgggttgggtcgggtgggtgcctcttaccctaactgaggctctgccctggactcggagtccacttgctgtcaaagcatgccactcttctttct

SEQ ID NO: 839256 - DNA, 120 bp, Artificial Sequence
  ENSG00000227039_11 (sequence is synthesized)
gatacttgacatatttcttttcccgttcaattcatggtttctgcccaaacggagccacgtgaggacttctttggggatgtgtctccaagaaaagtgtgggctgccttcctcaccctggat

SEQ ID NO: 839257 - DNA, 120 bp, Artificial Sequence
  ENSG00000227039_12 (sequence is synthesized)
gcctgtgggcagccttcctcaccctggatgcctgtgggcagccttcctcaccctggatgcctgtgggctgccttcctcaccctggatgcctgtgggcagccttcctcaccctggatgcct

SEQ ID NO: 839258 - DNA, 120 bp, Artificial Sequence
  ENSG00000227039_13 (sequence is synthesized)
gtgggctgccttcctcaccctggatgcctgtgggcagccttcctcaccctggatgcctgtgggcagccttcctcaccctggatgcctgtgacttggtttccatgggggcttcctaagctc

SEQ ID NO: 839259 - DNA, 120 bp, Artificial Sequence
  ENSG00000227039_14 (sequence is synthesized)
agggaccccaagcctccatcaaatctaatgacccgccttgtctctgaacacacctgtgttgtccccgagcccctcaccaaccccctctgcaacccggcccacgcatttcccatcctgaag

SEQ ID NO: 839260 - DNA, 120 bp, Artificial Sequence
  ENSG00000227039_15 (sequence is synthesized)
ggtccagctcataggccggcccatgtgttccctttacccctgctttgtccctacctggtggggagctgtcccttctgggccctagtgtggcacttcacacacaaatgtgtcctgtgggtg

SEQ ID NO: 839261 - DNA, 120 bp, Artificial Sequence
  ENSG00000227039_16 (sequence is synthesized)
gtatctgggcctccccctgcagtgaggggatgaccaatgtgcagagctcactgggcctggatatgggctcgggtggcacagaacagagagaaagtgctccgtaaaagtgagctgcgatgc

SEQ ID NO: 839262 - DNA, 120 bp, Artificial Sequence
  ENSG00000227039_17 (sequence is synthesized)
ggaggtgggcaagctcttccctggagggggaagagctctcaacccagagggatctgaccaggaaggttcaccccccctccacccaggaagcccctgcagacagtatgtgttttaggcttt

SEQ ID NO: 839263 - DNA, 120 bp, Artificial Sequence
  ENSG00000227039_18 (sequence is synthesized)
gctggccaaatggtctctgccgcgactactcagctctgccattgtggctgcagagtgaccatagaccttctgaaagtgaatgagtatgactgtgttccaataaaactttattgacaaaaa

SEQ ID NO: 839264 - DNA, 120 bp, Artificial Sequence
  ENSG00000227039_19 (sequence is synthesized)
ccacacgtggaggcagcgggggcagccgtgacttccttctgcagtgttgattcagctccctttgaaggcggatccatacaaacaggctgaccatcagggctggtcccaggccaccaggct

SEQ ID NO: 839265 - DNA, 120 bp, Artificial Sequence
  ENSG00000227036_0 (sequence is synthesized)
gttaaccaccaaactagatgctccctaagatagtatgagtcttacctgatgtgagcaaaatgggggccctgtggcttgccaggtggtcactggtaaattgcacaaggcttactccagtgg

SEQ ID NO: 839266 - DNA, 120 bp, Artificial Sequence
  ENSG00000227036_1 (sequence is synthesized)
tgactgggtggggagaagggaagcgcacttatatagactcatgtataaatagatacttgtaatatacgagcatctgctctgtggaagatgtttttttccaggcccagaagtgtaagatcc

SEQ ID NO: 839267 - DNA, 120 bp, Artificial Sequence
  ENSG00000227036_2 (sequence is synthesized)
ggtgcctatcttcaggcgggtggcaaacaaacatcacataaaggagagtgtctggcttgtgtcttctgggtacgtgatccccctgacttcagtgtgagaatgtggccagagcgtctgggg

SEQ ID NO: 839268 - DNA, 120 bp, Artificial Sequence
  ENSG00000227036_3 (sequence is synthesized)
aagacagggagagttgtcagagaggagttttgaggaggccctgaaggctcgccggctgttaaggcctgagctgtagtgggcaagaagagatggccagttcaggtagaggaagcctgcttt

SEQ ID NO: 839269 - DNA, 120 bp, Artificial Sequence
  ENSG00000227036_4 (sequence is synthesized)
gagctgaagaccggaggtgaatctggacagggcttcccaggaccagtggaatcagaggtttctggctgactcggtgggtgctttgaaccaggaaaggacaagaaagaggatgggaaggac

SEQ ID NO: 839270 - DNA, 120 bp, Artificial Sequence
  ENSG00000227036_5 (sequence is synthesized)
tgatccacattcccaccaggaagtttagcagaacccccgcgtgccacctggaccccttggaaggacctggctcaggctggaccacctcttgagaggcaggagctctggatttgatcaaga

SEQ ID NO: 839271 - DNA, 86 bp, Artificial Sequence
  ENSG00000227036_6 (sequence is synthesized)
accacctcttgagaggcaggagctctggatttgatcaagaattctttgctgagcatggtgcgtgtgggaggatctcttgagcccag

SEQ ID NO: 839272 - DNA, 77 bp, Artificial Sequence
  ENSG00000227036_7 (sequence is synthesized)
gagttcaagactagcctgggcaacacagagagaccccatctctaaaataataataataataaaataaaaaattagca

SEQ ID NO: 839273 - DNA, 120 bp, Artificial Sequence
  ENSG00000227036_8 (sequence is synthesized)
caaaagagcgagagaccctgtctcaaataataataataataataatcttattttggagaataaagagacctctggatttgaggtgccatttgggtagaaagaaaagacgtttacaccgag

SEQ ID NO: 839274 - DNA, 120 bp, Artificial Sequence
  ENSG00000227036_9 (sequence is synthesized)
aaatagtctgtgttgccctgaaggagcagagggatgcatcgctggaggtgacctacagttgaagaagactcattatgacagaccttgtccttcttccttgtggaaagtgtttcctctgct

SEQ ID NO: 839275 - DNA, 120 bp, Artificial Sequence
  ENSG00000227036_10 (sequence is synthesized)
gctactgctcatgagactcttccccctccctgtcccagggaaccaaagggctttctaccacaccctttcttgccccccgcctcccatgtctgctgtgcctttgtactcagcaattcttgt

SEQ ID NO: 839276 - DNA, 120 bp, Artificial Sequence
  ENSG00000227036_11 (sequence is synthesized)
ttgctccattatcttccagccggatacagagtgaatagttaaccacacttaggtcaaataggatctaaatttttgttcctgctccgtgtaaagaggccagtgtttgtgtgttgcaagcag

SEQ ID NO: 839277 - DNA, 120 bp, Artificial Sequence
  ENSG00000227036_12 (sequence is synthesized)
ccttggaatagtaactcttctcatttgtttgggatctggccaccaagttccagaatgatacacggatcagtgcagaagttcatcaggctctcggaccttagggctgttggagaaggcttc

SEQ ID NO: 839278 - DNA, 120 bp, Artificial Sequence
  ENSG00000227036_13 (sequence is synthesized)
agcagcagaactgatggtgaaggctcgtgttctccatcctcaactttctttgcttcgatcatacacaagaatacatttggaagggcaaaaaatgaacactgtcgttcattgcagccgtgt

SEQ ID NO: 839279 - DNA, 120 bp, Artificial Sequence
  ENSG00000227036_14 (sequence is synthesized)
tttgtgacacagatgcacagtctgctgtgaagaccttctctcaagtggcatttgggagtccatgccagatcatggtgcttcatgagagactgacagctatcaggggttgtggcacttagt

SEQ ID NO: 839280 - DNA, 120 bp, Artificial Sequence
  ENSG00000227036_15 (sequence is synthesized)
gaggactctcctcccccagtgtgtgctgatgacacatacacacctgacaatagcttgagtcttctctgttccttttactctgtagccaacatacacatgatttaaaaccctttctaaata

SEQ ID NO: 839281 - DNA, 120 bp, Artificial Sequence
  ENSG00000227036_16 (sequence is synthesized)
tctatcatggttcatccttgtccaaatgcagagtcagagctatttgtacttcattattatttccaaggcgaatagttggctttctttttgcaaaaataattaaagtttttgtatgttgca

SEQ ID NO: 839282 - DNA, 120 bp, Artificial Sequence
  ENSG00000227036_17 (sequence is synthesized)
ggcgcccaccgtaagcctcccgggccttgtgaacctgcaaacccaagtctgagagacgatccgccttcagcgctttccagcttggcagagaggctttcccggcggggatctttggttggc

SEQ ID NO: 839283 - DNA, 120 bp, Artificial Sequence
  ENSG00000227036_18 (sequence is synthesized)
gctggcgatgcgcggggaagaaaggcgaggagcggcgtccaggctgggtgatgtcccagcacgagtaggcgggatgcgctcgcttggtcctccgggcgcccggtccctgcccgcgtcgcg

SEQ ID NO: 839284 - DNA, 120 bp, Artificial Sequence
  ENSG00000227036_19 (sequence is synthesized)
gagaaggcggccgcctgaggacccccgcccgcgacctccgcgagtctggagcgcagaggacagggtctggctgctctttggccttggatggaaagtggggaattgggtggggggctgcgg

SEQ ID NO: 839285 - DNA, 120 bp, Artificial Sequence
  ENSG00000227036_20 (sequence is synthesized)
accccttaacgtggattacttggtgtgtatcagctgggctcagaagacccacgacctcttctccatccgtggattgatttgttctgcttaacagctgggtcgccaagctggagaccagac

SEQ ID NO: 839286 - DNA, 120 bp, Artificial Sequence
  ENSG00000227036_21 (sequence is synthesized)
ttctttaggggatccaggactaagccgaggaaggtgtttctgaacctcagggaatctgtggccactggcaagccagcggaaaattcaggtggaatcagaggtttctggctgactcggtgg

SEQ ID NO: 839287 - DNA, 120 bp, Artificial Sequence
  ENSG00000227036_22 (sequence is synthesized)
catctgtaagatggggaagtgtaatcagttctgaacccacatatacctcactgggcttgaacaggcctgagcaggcatgtggggctttactagctagccatcctttctgccgctctccct

SEQ ID NO: 839288 - DNA, 120 bp, Artificial Sequence
  ENSG00000227036_23 (sequence is synthesized)
cattctccttcaagccccccaaagtccttggtggaggaggaagtggagacagaacgtttggtgttgggtgaggtacgtgaggaggctgatttcagaacctccaggaaacaaagctttagt

SEQ ID NO: 839289 - DNA, 120 bp, Artificial Sequence
  ENSG00000227036_24 (sequence is synthesized)
gcctgcccttgtgacctgctcactggaaaggaagaaatgaccgagggagaagggagggcatttgagtagggaagctgcagctgtagctggggagccctgtgtggtgcttgtcaggagtgg

SEQ ID NO: 839290 - DNA, 120 bp, Artificial Sequence
  ENSG00000227036_25 (sequence is synthesized)
ccaggggagccgctggtcttaggcatatactgtccaccatttgctcatgataatttttcagccacttctcttcaggccaaagggaggagaaagctgccttggtcttgtcaggtatttttc

SEQ ID NO: 839291 - DNA, 120 bp, Artificial Sequence
  ENSG00000227036_26 (sequence is synthesized)
cctctccaccctggtcttctcctgtaacgtgtggccgccttttccagcacggcctcctgccttcctggtgcactttttggagaacgtggtggaatcagaggtttctggctgactcggtgg

SEQ ID NO: 839292 - DNA, 120 bp, Artificial Sequence
  ENSG00000227036_27 (sequence is synthesized)
tatatttcctcactggtgaaatcctgcaatgtatacaactttttctcctcctctttttttgtgtaattttatttgaacgtttcccccatgtcatgacggcatggtaactgtattctgctg

SEQ ID NO: 839293 - DNA, 120 bp, Artificial Sequence
  ENSG00000227036_28 (sequence is synthesized)
caggcgttgactcataattggcttggcaatttccctattgttggatactaagttgtttccaaagttttaccattagaagtaatacagtgagcatcttttgtacataaagatttatccaca

SEQ ID NO: 839294 - DNA, 120 bp, Artificial Sequence
  ENSG00000227036_29 (sequence is synthesized)
agggccttctgccaagggcccgctttgatctcccttaaaggacagcattatctgaccagagacccatgcaggagacctctccaggtacacatatttcctgctactgaatggcttagactg

SEQ ID NO: 839295 - DNA, 120 bp, Artificial Sequence
  ENSG00000227036_30 (sequence is synthesized)
ggatttgcaaggaactacgaagtccaagacctttgcctttcttttagaagaaggcaccagctggttctccaatgttgaaggtcttctccagagataccttaaggtgtggggagattacaa

SEQ ID NO: 839296 - DNA, 120 bp, Artificial Sequence
  ENSG00000227036_31 (sequence is synthesized)
cttgctcaaggtctcatagctagaagatgtcagagtgataactcaaaccatgtcacatgactctaagcccaaagcagcctctagaaggttgtttgatcttctgatggaagcacaaatcac

SEQ ID NO: 839297 - DNA, 120 bp, Artificial Sequence
  ENSG00000227036_32 (sequence is synthesized)
ttaagtctagagagatttaaaggacttgtcaaaggcaatgaaacaagtgatgaggaaactgaggcccagagaggataaatgacttgctcaaggttagccagttggtcaatggcaaagatt

SEQ ID NO: 839298 - DNA, 120 bp, Artificial Sequence
  ENSG00000227036_33 (sequence is synthesized)
aaaccagaacccagatctcctctctccagccagagtcttcaagcaaagtccctaggaggaactctgaaagccacatgttgagatggccccattacaggatggagagcacctgaaccccca

SEQ ID NO: 839299 - DNA, 120 bp, Artificial Sequence
  ENSG00000227036_34 (sequence is synthesized)
agttatggactagaagaagacagttgccctggaaaatcatctgacccacattggactttatgtgagggggaaataaacctttattatgttaagctacacaataataaataacaacaataa

SEQ ID NO: 839300 - DNA, 120 bp, Artificial Sequence
  ENSG00000227036_35 (sequence is synthesized)
cctccctcctttcctctccccaaacctacagtgggaatgtgtcattgagtgaaattgggttattagccggtctgccctgacacgtctttttgggggtagacgtttgccatctggtgtgcg

SEQ ID NO: 839301 - DNA, 120 bp, Artificial Sequence
  ENSG00000227036_36 (sequence is synthesized)
tgagagcaagctgctgagccactgaatccgtggttgacaagtacaccgtgcaatgcctgcgtgggtgactcatgccggctggagtagcaggtgtgtcgggagctaaacgtgcagacccag

SEQ ID NO: 839302 - DNA, 120 bp, Artificial Sequence
  ENSG00000227036_37 (sequence is synthesized)
ttagcagcctgtgtggaagcgggggttctgttgcgctttacaaagtgaaaggaaggtgtctgaggtgctggcctttggggacaatttcactatgtgagtaaaacccttattgagctttaa

SEQ ID NO: 839303 - DNA, 120 bp, Artificial Sequence
  ENSG00000227036_38 (sequence is synthesized)
gtcgctggtcagacctcatgactcacttggactcttgagccacctctgggggtggagtctctctcctggcatctggacccttggtgctatcgacgaagcttggctggcgctcttagctgc

SEQ ID NO: 839304 - DNA, 120 bp, Artificial Sequence
  ENSG00000227036_39 (sequence is synthesized)
tatgtgcaagacgtgtgtcccagggaaagcccctctctctctgcagaggtcaagtgaaagccacggccgcagccaacagagttcaaaatgcaggcttggaaagtccagggggctctgtgg

SEQ ID NO: 839305 - DNA, 120 bp, Artificial Sequence
  ENSG00000227036_40 (sequence is synthesized)
tgagtgtcagcggcagtgcagatgagctcacccggggaccagagccatttagaggatttgcagatggaacttcccctcggggtccaactgtgagtcactgtggttcctgtccctgcagcg

SEQ ID NO: 839306 - DNA, 120 bp, Artificial Sequence
  ENSG00000227036_41 (sequence is synthesized)
tgaaggcctttgggaagcgtgggttatgtgggtccaggggtcccatcctcccgtggaggcccttgacctgaggatcactaactcacaccccaccgacttccggcccccaacaagggcagt

SEQ ID NO: 839307 - DNA, 120 bp, Artificial Sequence
  ENSG00000227036_42 (sequence is synthesized)
gttcctcttgctccattctgctctgaagtcccccaaaccgcttcctggggctgcttagtgaaatacaaggctcatctctgaggacctctacagggctggtgagttgagccaggagttcaa

SEQ ID NO: 839308 - DNA, 120 bp, Artificial Sequence
  ENSG00000227036_43 (sequence is synthesized)
gccacctgacgaatgtgggtgctcagagccttggactcgatgacctacctctcctgcctcccacctgactcctgaagtaggggagtgtattaacagtcacaggcctcagtttacctgctt

SEQ ID NO: 839309 - DNA, 120 bp, Artificial Sequence
  ENSG00000227036_44 (sequence is synthesized)
tcagcctctgcccttcccgagagggttgaagctgacttgctgcatcgcagttttgtcctttagttcatcagctctggaactttccacttctggtgtttttggtttccaaacagaggattg

SEQ ID NO: 839310 - DNA, 120 bp, Artificial Sequence
  ENSG00000227036_45 (sequence is synthesized)
aggacgtatgagagcaatgtttagaaagatcaggttcaagttgccagccagactctgggcttccaggaggagtgggctgtggatggcctggcctcatttgcatgtccctctcctcccggc

SEQ ID NO: 839311 - DNA, 120 bp, Artificial Sequence
  ENSG00000227036_46 (sequence is synthesized)
tcctgccagggccctgcccctccacttccaaactgtcaagcaggaggagggaggatgattgaacagaaagacacaggagttttagtgagtcaggctccccagtgtccaaaaagggaccca

SEQ ID NO: 839312 - DNA, 120 bp, Artificial Sequence
  ENSG00000227036_47 (sequence is synthesized)
gggcccagggggaagagacatccctggtatttgttgccacctttgtaaaaccctcaagtgctggcaggcagcacagagggagtggcgatgccacttgcctgcctagtctatgggaggaat

SEQ ID NO: 839313 - DNA, 120 bp, Artificial Sequence
  ENSG00000227036_48 (sequence is synthesized)
tgggacatgtgctccctgggtggccctgagcaagccatcgaactgctcccccagagttttccccatctgtaaagtgggaataataacaacacctgtcctgcttacttgacagggtttatg

SEQ ID NO: 839314 - DNA, 120 bp, Artificial Sequence
  ENSG00000227036_49 (sequence is synthesized)
tgaggccggctgagatcactgagcatgtgacagggctttgggagtggttaagggccacccagatcggggttgaggcaccggggtgcttatggtgattagcagcagagcaaggcctgaggt

SEQ ID NO: 839315 - DNA, 120 bp, Artificial Sequence
  ENSG00000227036_50 (sequence is synthesized)
ctgtgctccccagggagggtggctttacaggcacccacctgcggcttaagagcttcttgggcctcccacggctgataaatcaccaccgggtgggtgtgctttgtctgggctccagcatga

SEQ ID NO: 839316 - DNA, 120 bp, Artificial Sequence
  ENSG00000227036_51 (sequence is synthesized)
gcagacagcctgcccttggcagctgcagagagcagctcctctgccttctctccctttcttagtgggttgggcaggcgcaaaaatagatcccagaaccccatctcttaggttttgccaagg

SEQ ID NO: 839317 - DNA, 120 bp, Artificial Sequence
  ENSG00000227036_52 (sequence is synthesized)
gaccctccaactgctcatctagacattctggtggcatggagttcctttctcaggtcacataaccattgggggtgctgatttaggtgtctcctggcataggatttgccctggtttatcacc

SEQ ID NO: 839318 - DNA, 75 bp, Artificial Sequence
  ENSG00000227036_53 (sequence is synthesized)
taggtgtctcctggcataggatttgccctggtttatcacctgctgcttctgctgctgctttttaaaaaaattgag

SEQ ID NO: 839319 - DNA, 120 bp, Artificial Sequence
  ENSG00000227036_54 (sequence is synthesized)
attacaggctcatgcgaccatgccctgcttgtcaccttgccatcaaagaagagagacttgcagaagagtgtcagattctatcccatagtgcagtataccaaggaggtggtctgcaaatgg

SEQ ID NO: 839320 - DNA, 120 bp, Artificial Sequence
  ENSG00000227036_55 (sequence is synthesized)
ccattgaatatacaaatagtctcagacttagcattttctttctcatggtttattttgctttgtatagttccatgcatttgttgaaaggaggaagattgagatttaaaggaacatccctag

SEQ ID NO: 839321 - DNA, 120 bp, Artificial Sequence
  ENSG00000227036_56 (sequence is synthesized)
tgggataatacccatctgcttagtgccttttcagtgctcagcactgtgctaagttatttgagtacagtctttgttctcatatttaataaaatcagactctttttgaccacctcattccat

SEQ ID NO: 839322 - DNA, 120 bp, Artificial Sequence
  ENSG00000227036_57 (sequence is synthesized)
ggtaacagcattctcagggccttctgccaagggcccgctttgatctcccttaaaggacagcattatctgaccagaggtaaattgtaaccactgaaagtccgctgtttcgattctgggcaa

SEQ ID NO: 839323 - DNA, 120 bp, Artificial Sequence
  ENSG00000227036_58 (sequence is synthesized)
gatgctatggcagaacagggaccatgatgaactacttagaaaaatacataaggccataaataatgtgtgattatttgatgaatgcctgtctctcccactgggaccatcagcttagaaaag

SEQ ID NO: 839324 - DNA, 120 bp, Artificial Sequence
  ENSG00000227036_59 (sequence is synthesized)
caagcaaagtccctaggaggtcaagccaactcttgctgctgctgctaatctaaggacagatgtggccactttctccaaaggatctcagagagctaactttatggcgttttacagaagtcc

SEQ ID NO: 839325 - DNA, 120 bp, Artificial Sequence
  ENSG00000227036_60 (sequence is synthesized)
tatctttccttcaggggaaccccattcatttgcaagatggaaggctatttttagcattgacttttattttctcctaagtgacttcctctctcatgtaccatttggccttcacagtggctg

SEQ ID NO: 839326 - DNA, 120 bp, Artificial Sequence
  ENSG00000227036_61 (sequence is synthesized)
aggcccagggtgccggggcctcggatgaacttgcctggagtgggtcagaaaactttcagtagagcccagagtaaaaaggatgtacctatgggaggcaggtggggatgggtcccctggctc

SEQ ID NO: 839327 - DNA, 120 bp, Artificial Sequence
  ENSG00000227036_62 (sequence is synthesized)
tggcccacaagtctggctatgccattggaaagacctggatttcaatccaccttctggcatttttacagtggtttatgagcaacttaattaacctctcttgggctcagttttctcacatat

SEQ ID NO: 839328 - DNA, 120 bp, Artificial Sequence
  ENSG00000227036_63 (sequence is synthesized)
gggcagatgccaaggccagtgggccccggacagagtcaggctccctgggcggccttgtgtcttggtggccctgatcatcctgccaatgcaaaaagccagcaggcaagagacccctactcc

SEQ ID NO: 839329 - DNA, 120 bp, Artificial Sequence
  ENSG00000227036_64 (sequence is synthesized)
ctttaaggaccagagcagaaacaaaccattgtgctgaatgcagtgatccaggtgcacttcagggtacaaggtggactgcttggaacaggattacaggaaaggggaaagggggcagctgtc

SEQ ID NO: 839330 - DNA, 120 bp, Artificial Sequence
  ENSG00000227036_65 (sequence is synthesized)
tcttgggacatgagtaatgtctcttacccagttggcactcgagaagtcaactgggcatgtctctggggcctcctggaaaagagttttccaccccagaggagaaagctgtggctggaggtg

SEQ ID NO: 839331 - DNA, 120 bp, Artificial Sequence
  ENSG00000227036_66 (sequence is synthesized)
aagacaaggaagacattgttttggctgctgacatttcctgaaagatctgaggcgtccccttcacttcgggcatgggacccagacggctgagtgatggaccttaaggtgtggggagattac

SEQ ID NO: 839332 - DNA, 120 bp, Artificial Sequence
  ENSG00000227036_67 (sequence is synthesized)
gatgctatggcagaacagggaccatgatgaactacttagaaaaatacataaggccatcttagaaaagaaatgatgtggatgtgctcaccaagttatttgcagagcttagcagagtgggat

SEQ ID NO: 839333 - DNA, 120 bp, Artificial Sequence
  ENSG00000227036_68 (sequence is synthesized)
ggactgggaagtcccagtaggataggccaggaaagaccatgcccgcccgcccagcagtcccttctgatgattgagtggggatttcagggcatgctttttgagctagccatggagtgttcc

SEQ ID NO: 839334 - DNA, 120 bp, Artificial Sequence
  ENSG00000227036_69 (sequence is synthesized)
ttctctaatgatagatgtatttccaatcatttgcctatggacttcctcttaccttaattctacaaatattcagtgcctgctggatgcttttttaggcattggtgcagccgctttggttct

SEQ ID NO: 839335 - DNA, 120 bp, Artificial Sequence
  ENSG00000227036_70 (sequence is synthesized)
ccgagtagctgtgatcacagttgtatgccatcatgcccagaaacagcttgatggattgctgaggcagagtgcaccgagcaagggttcagtcctccatagagctcagagcaaaaggaatga

SEQ ID NO: 839336 - DNA, 120 bp, Artificial Sequence
  ENSG00000227036_71 (sequence is synthesized)
cccagccgggatgaacttgaacctatggccacctagctctggtttctgcttggacattttatttcaatcttatggcctgccttgcgctccaagggttacttatttcctctgcacatattt

SEQ ID NO: 839337 - DNA, 120 bp, Artificial Sequence
  ENSG00000227036_72 (sequence is synthesized)
tattttgatgccaaaatttcagatctgttttcttaagagcagaaggtcttgacctcaaagcccgggccatcacacagctctctgtggagtggggtgagggaggccagctgccggtcacct

SEQ ID NO: 839338 - DNA, 120 bp, Artificial Sequence
  ENSG00000227036_73 (sequence is synthesized)
tctgctccagcaccgtgggaggcctgagtggcaaagctccagccccgctgctcccgggcggtgtccgcaacaagaggcttccgccccatcccaccagccatccacggagacgccctcccc

SEQ ID NO: 839339 - DNA, 120 bp, Artificial Sequence
  ENSG00000227036_74 (sequence is synthesized)
agaggtcaggagggtagcgggggaaggaaatgccaatcaatccatcaaagccccgccctcccggggctcctaggccccgggagctgcgtctgcgcatccttgacccactcctgggggcca

SEQ ID NO: 839340 - DNA, 120 bp, Artificial Sequence
  ENSG00000227036_75 (sequence is synthesized)
atctgtatcaggaatgatggcagaagacgcttaaaattctggcattgccactgagaagaatgaaggatggagctgattagaaaattgtaggattgctgagcactgtgagaggtttgtctg

SEQ ID NO: 839341 - DNA, 120 bp, Artificial Sequence
  ENSG00000227036_76 (sequence is synthesized)
aaactggctcttgacactccgtaccctccccatgtgtaggggtctgtgagcagactagtggtatgcagccactctcatatgggagggaagcagaccttttgttggcttggtccataagtg

SEQ ID NO: 839342 - DNA, 120 bp, Artificial Sequence
  ENSG00000227036_77 (sequence is synthesized)
cggttagaagtggaatgatgggaagcactgttagagttattggcataagaatgaccatggtcaaatgggctgggttgggaagaaaatggcactaggagtgaggtggcaaatttaaacaaa

SEQ ID NO: 839343 - DNA, 120 bp, Artificial Sequence
  ENSG00000227036_78 (sequence is synthesized)
agggaggggtctagagtgtggagatgataatgaggtgagagaatgggcatagagaaaatgctggaaagataggacattgagtcagagacctcagattttaaaaggtcagaggtaggacta

SEQ ID NO: 839344 - DNA, 120 bp, Artificial Sequence
  ENSG00000227036_79 (sequence is synthesized)
ttttgggtgatgaaaaatccaagacatgccgtgagagtgagttgggaagaatatagacagcgaaaagcattcaaataatggtcaaggaaccagaaagtcttagtgttcattggacattga

SEQ ID NO: 839345 - DNA, 120 bp, Artificial Sequence
  ENSG00000227036_80 (sequence is synthesized)
ccccttctaggatggttgcagaggttggcttcgaaagaacccatgaggcagcaagtgtgagacggaagaacccaagagctcagagataacacttgttttagggatgaagactaacccaac

SEQ ID NO: 839346 - DNA, 120 bp, Artificial Sequence
  ENSG00000227036_81 (sequence is synthesized)
tctcaaggtagaattcttgataaacacggtctcctaggcaaagaagatgaagggcagggagggtctgttcctctttgttttattaccaagttatgctaggcctgaactggtggaactcgg

SEQ ID NO: 839347 - DNA, 120 bp, Artificial Sequence
  ENSG00000227036_82 (sequence is synthesized)
cttgttttaacagtgaagcggcaaagtgagttattttcagtatacagagaagtggaaacttcgacaagaagagtgtcaatgacttgcccaaaatgacaccatcaaagtgctggcctcagt

SEQ ID NO: 839348 - DNA, 120 bp, Artificial Sequence
  ENSG00000227036_83 (sequence is synthesized)
ttgtcacttcatctccctcttccttccccttggctgcttttcttgcatgtaacctattacagcagagcccgatcagcatgggcctccctgttgcgtgccccctggagctttggcatttag

SEQ ID NO: 839349 - DNA, 120 bp, Artificial Sequence
  ENSG00000227036_84 (sequence is synthesized)
atttgatgcagggaggtggaggggaattttcccatttggcagaatgtgtgaaaatcaggagggaatgttattcctgcacagcaacaaacagtatcaaatcagtacttctttctttcatcg

SEQ ID NO: 839350 - DNA, 120 bp, Artificial Sequence
  ENSG00000227036_85 (sequence is synthesized)
gactctgttgctatttatgtagatttaacagttccataacaatacctttcgcttggaaaggtccttctcttaccaaaaatgcaaaaagaaacctgctatatttttcatttcagaagtaga

SEQ ID NO: 839351 - DNA, 120 bp, Artificial Sequence
  ENSG00000227036_86 (sequence is synthesized)
ggaataccaacagaataaacagactttagtcctgccatctgccctggcccatgcagcctggcattgtttaggggatcatacctggcttcccacccaggccacatgactctagagggcaag

SEQ ID NO: 839352 - DNA, 120 bp, Artificial Sequence
  ENSG00000227036_87 (sequence is synthesized)
acttagtaaggtcacgtagtaggagctcaatataatttattggttagacaagaggaaaccacttcttctcttgacaagccatgtaaattgtaaccactgaaagtccgctgtttcgattct

SEQ ID NO: 839353 - DNA, 120 bp, Artificial Sequence
  ENSG00000227036_88 (sequence is synthesized)
atcttccagagcctcctgactgctaggaaggcagcagccagggtcaagtgacatgaagacatggggttggtggcgggggcgccttgtgagaatgcaagggaaaggggattcttcctggcc

SEQ ID NO: 839354 - DNA, 120 bp, Artificial Sequence
  ENSG00000227036_89 (sequence is synthesized)
gggaaggaaggtcgtggacaacaaagtaatgaacaaaaatatgtttcacgcatgagaagctgtccgagatggcagtgagggagaggtcatggcaaacggtgtttatggcatggaaaagtg

SEQ ID NO: 839355 - DNA, 120 bp, Artificial Sequence
  ENSG00000227036_90 (sequence is synthesized)
aagattcaaaaaaaaacccaaggagaggccaagatagtgtggaaaatatccaccccctcccagagacagctcattaggaaggttttggagggagactcgcaggaggtcaggggctgctgt

SEQ ID NO: 839356 - DNA, 120 bp, Artificial Sequence
  ENSG00000227036_91 (sequence is synthesized)
gttatctttggaggaaaggccatcccttctcttcccctccgcagacgtatccagtgagacaactctctccccagcaagcttttctcagggagcaggcagtttcttgaaaaaatgaaccag

SEQ ID NO: 839357 - DNA, 120 bp, Artificial Sequence
  ENSG00000227036_92 (sequence is synthesized)
atgaggatccacccacctccagaaacaaagactgtggctgtctccaagaatgaagcaccagtctcttagttgtgagtaggtattacaaatataatcagggaaaagaagctattttaaaaa

SEQ ID NO: 839358 - DNA, 120 bp, Artificial Sequence
  ENSG00000227036_93 (sequence is synthesized)
atcggtcattgggcaggatgttccaaagggcagatgaatgtaacttccaagatgaagtaaccggatgtctgtcaactcagaaaacaaggtaaattgtaaccactgaaagtccgctgtttc

SEQ ID NO: 839359 - DNA, 120 bp, Artificial Sequence
  ENSG00000227036_94 (sequence is synthesized)
ggactgaggattggagaactggtctgcctcaacgtgggagggaagaggggacactttgcgcttggtgcccatgccccaccctttccgaggagctgtcagatgctaggccctgtgatccca

SEQ ID NO: 839360 - DNA, 120 bp, Artificial Sequence
  ENSG00000227036_95 (sequence is synthesized)
gaataagctgagatggaggacacaggaggggttctggtggaatcagaggtttctggctgactcggtgggtgctttgaaccaggaaaggacaagaaagaggtgccacctcctgagtcctgg

SEQ ID NO: 839361 - DNA, 120 bp, Artificial Sequence
  ENSG00000227036_96 (sequence is synthesized)
actggaaaggaagaaatgaccgagggagaagggagggcatttgaggaggagaaatatttttcaaagtcatttgaatattaaagagctgggcccagaagccctccatgtccaggatggaga

SEQ ID NO: 839362 - DNA, 120 bp, Artificial Sequence
  ENSG00000227036_97 (sequence is synthesized)
aagtacaaacagtcatcacaattaattcaggccaggctgtgtgctcctggcttttagttgaatcaactcattttcacctctcacaactctagcagtcaggtcctgttatgcccaacctac

SEQ ID NO: 839363 - DNA, 120 bp, Artificial Sequence
  ENSG00000227036_98 (sequence is synthesized)
agatggggagactgaagtttggtcactcgcccaaggtcacacagttaactagtgagggagccaggcctagactgttgctgggatctattgctgttttgagtgaccatgaattttcccagc

SEQ ID NO: 839364 - DNA, 120 bp, Artificial Sequence
  ENSG00000227036_99 (sequence is synthesized)
tccccggggcaccatgcaacagctcctgctacctgccctgaacacgccgagtctactgcagggcacagaggtctcgcagtttgcagggagaacatgaagcaggtgactcaaagcctgcgg

SEQ ID NO: 839365 - DNA, 120 bp, Artificial Sequence
  ENSG00000227036_100 (sequence is synthesized)
gtccaggagataaacaggtggattgcacctgctggccttcaggagcgcagagactgtccatggggttaaatgggatatcagggctttctggcatgctgccgactgaagtctgctcccaat

SEQ ID NO: 839366 - DNA, 120 bp, Artificial Sequence
  ENSG00000227036_101 (sequence is synthesized)
aaaacaggatgtggaacaaggggccgctctcctactgcaagggctgggtttgcccagggctgtctagattccaccatccacagcagttacagcactgggtgtaagtctcagtcgtaagta

SEQ ID NO: 839367 - DNA, 120 bp, Artificial Sequence
  ENSG00000227036_102 (sequence is synthesized)
ctaagcaacagatcatctctactagtatgaagcctgggagagggttgtccccgctgcctgcagagccaccaggggtcataatggcagatagcaggcccagcagcaaaaaaaaaaaaaaaa

SEQ ID NO: 839368 - DNA, 120 bp, Artificial Sequence
  ENSG00000227036_103 (sequence is synthesized)
agagttcttgttcacagagcacagctgcgggggctgtcaggggcatggactccctctatgggcaggaggatatgggcctttccccagtctggctgagcccaccttatcccattggaggac

SEQ ID NO: 839369 - DNA, 120 bp, Artificial Sequence
  ENSG00000227036_104 (sequence is synthesized)
ttgaggtccttccaataaggccctgcctatagagtgtgaaccgggaccatccgagggggtgatgagattcatcctaaaacaatatagagtggtggaggagagatgttggtgaaacttgac

SEQ ID NO: 839370 - DNA, 120 bp, Artificial Sequence
  ENSG00000227036_105 (sequence is synthesized)
ctgtacatggacaacctgcaggaggaagggggacccagtctctgaagcacagtgcactaccgagaaaagatgcttccctgtccgtgcaggcacctgggtgcagcagaacaggtatttttc

SEQ ID NO: 839371 - DNA, 120 bp, Artificial Sequence
  ENSG00000227036_106 (sequence is synthesized)
gctgtgatcacagttgtatgccatcatgcccaggtaattttttttatttttatttttttgtagagacagggtctcaccatcttgcccaggctcgtcttgaactcctgggctcaagcaatc

SEQ ID NO: 839372 - DNA, 120 bp, Artificial Sequence
  ENSG00000227036_107 (sequence is synthesized)
ttggcctcctgaagtatgtgagccaatgcgcctggccctctcttttcttatctccttatccatatgcaatcacagaacctgagaggctgaagtggtctaaagcatcactcttctctagat

SEQ ID NO: 839373 - DNA, 120 bp, Artificial Sequence
  ENSG00000227036_108 (sequence is synthesized)
ttatctctgactaatgcaggaatcccctttcaaatcaggcaagggatcgttcagcccaggggagagaggactatgagagaggctgagtgatacccagcctgatggggaagcagttgaatt

SEQ ID NO: 839374 - DNA, 120 bp, Artificial Sequence
  ENSG00000227036_109 (sequence is synthesized)
ttaaagagtgtttcatacactatcaggtggccatgaatgtcaatttcttaatgagattttgtgctaaatgctttttgccctcttccccatgtttgttctggtttaaaaaaaaaaaaaaaa

SEQ ID NO: 839375 - DNA, 120 bp, Artificial Sequence
  ENSG00000227036_110 (sequence is synthesized)
tggtccccagcatttatttaaagctaagaattcacaggtcaaccaaatcactccctgaaaactaaaatcaaccaaaagcagaggaagaatcactgagaccctcctagcatgtctttctta

SEQ ID NO: 839376 - DNA, 120 bp, Artificial Sequence
  ENSG00000227036_111 (sequence is synthesized)
actctcatacctgaaaggatgggtaattgggtgtttcatattggcatggaccctaacatggtgtgactcaatctcttgcaatgctgtgcattgctagggcactgatttcattgttgagag

SEQ ID NO: 839377 - DNA, 120 bp, Artificial Sequence
  ENSG00000227036_112 (sequence is synthesized)
tctcactggtaagaaatatttccttattcagtatcaatttcttcagctgattggctctattccacatcccattgttatggctcctcacctaagtacagctgcaatgcttgagaaaaaaat

SEQ ID NO: 839378 - DNA, 120 bp, Artificial Sequence
  ENSG00000227036_113 (sequence is synthesized)
gcccaggaaaattcttgcctttgagcaggcccaccttatattgaaaccaaaagtctgcaagaaaaatggtagggaatgacctttaagccttggaggaagaatttatgagcacaactatag

SEQ ID NO: 839379 - DNA, 120 bp, Artificial Sequence
  ENSG00000227036_114 (sequence is synthesized)
cttcttcttggcataaagttgtgttctgtattcttcaaaattctcagattttgtgcactgttggttcaaggtcacaacaaaaagcccctatgctctgaggacagaagcatgctgggattt

SEQ ID NO: 839380 - DNA, 120 bp, Artificial Sequence
  ENSG00000227036_115 (sequence is synthesized)
caagggcatggccagatttgagagaaaggagacctcagagcttacgacttggaaaggcagagtccaacgacaatgggtcattctcctgtttaggataagggcatgcaaatagcatgtgaa

SEQ ID NO: 839381 - DNA, 120 bp, Artificial Sequence
  ENSG00000227036_116 (sequence is synthesized)
ttgcacattacatttctcagatgtgagtatttggttgaggaatgggggctgttggcaacacttctggaaattgaactatctttatcctgattcacagagttgtagctgagcagggcatag

SEQ ID NO: 839382 - DNA, 120 bp, Artificial Sequence
  ENSG00000227036_117 (sequence is synthesized)
ctcaccactgatcccagccaccttgggcggctggggagcgaggctgaccgctaagtggacctgaccttcagaatgagggctttctgaggcaagggcagggaggggtgtggctcgtggaag

SEQ ID NO: 839383 - DNA, 120 bp, Artificial Sequence
  ENSG00000227036_118 (sequence is synthesized)
acagagagaagggttggggtagggacccagggatagatctctagaagggtctggattccctaggggcctgcgatgaaacttgcactctgtggaatagttccagggttgaggaggtatttt

SEQ ID NO: 839384 - DNA, 120 bp, Artificial Sequence
  ENSG00000227036_119 (sequence is synthesized)
aaagagacagacactaaatcactgcacttttgacaattcctctcttctctcccaccacccatcctcccccacctacaccgatcagatctttgtggtggacttaagactttaagacttttg

SEQ ID NO: 839385 - DNA, 120 bp, Artificial Sequence
  ENSG00000227036_120 (sequence is synthesized)
ttgctgtttccatgagcctggggagaggctcctgtgtacctcgtgggggtacttttggagcccatggaacagacttacggcgtatgacctcatcggagacttgtacatggggccaacccc

SEQ ID NO: 839386 - DNA, 120 bp, Artificial Sequence
  ENSG00000227036_121 (sequence is synthesized)
cattttcccacaggaaacccacactctaattaagggctgaccctgaacttgaatctgagtcttctctttcttcaacagagagccatctctccagcccagctggcaaggagacaggtgatg

SEQ ID NO: 839387 - DNA, 120 bp, Artificial Sequence
  ENSG00000227036_122 (sequence is synthesized)
ctggaaaggaagaaatgaccgagggagaagggagggcatttgaggggagaagaagaggatggagaaaaaaactggatcatctcgtgacatggaaagaaaggtctgagctctgacgatccc

SEQ ID NO: 839388 - DNA, 120 bp, Artificial Sequence
  ENSG00000227036_123 (sequence is synthesized)
tgtttgaaaattgaatggactggctcacaccttctgaaatttcttggaagctctggagtaactattccactaaagaacagcgtgtttttggctgaaatctgtgactgtttgtttttgagt

SEQ ID NO: 839389 - DNA, 120 bp, Artificial Sequence
  ENSG00000227036_124 (sequence is synthesized)
tattttaatctctgtgtcaagcatgaaaacctcagcagcctgggatttataattagatcccactggcatgccctctcacctctcaaacatgccacagtgctttggctctctccttgtgca

SEQ ID NO: 839390 - DNA, 120 bp, Artificial Sequence
  ENSG00000227036_125 (sequence is synthesized)
aacctccctttgatatttttggatatcgataccaagtgtatctgcatattttaaccaactgatatgcatatcctgtgatctgaggcattcgctcaatgtggggcatcaggccagctgtga

SEQ ID NO: 839391 - DNA, 120 bp, Artificial Sequence
  ENSG00000227036_126 (sequence is synthesized)
acttcctttaaaatttattttgtgtcaaatgattccctaatgctatagctcccttgaactgctagatttatgaaaattctgcacaacacatagctcagagaaaaaaaaaaaagagtgttg

SEQ ID NO: 839392 - DNA, 120 bp, Artificial Sequence
  ENSG00000227036_127 (sequence is synthesized)
caagaccagatataggatatcatttgatttgtttaaaacactctgtccagggggttttgacttgctaatttaaaaataattctaaaattaggtacagttgacccttagtatccatggggg

SEQ ID NO: 839393 - DNA, 120 bp, Artificial Sequence
  ENSG00000227036_128 (sequence is synthesized)
attggttccaggatgccctgtggataccagaatccaaggatgctcaagttcctgacataaatggcttagtgtttgcatataacctactcccctcttcctatatactttaaataatctcta

SEQ ID NO: 839394 - DNA, 120 bp, Artificial Sequence
  ENSG00000227036_129 (sequence is synthesized)
gattacttataatgcctaacacaacgcctgtgcatcacttcattcatgtggattcaatgtagtacttggtgtgaagaaaatttaagtcttgctttttggaactttgtggatttttttttc

SEQ ID NO: 839395 - DNA, 120 bp, Artificial Sequence
  ENSG00000227036_130 (sequence is synthesized)
tggaatgtttttgatctgcagttggttgaatccacaggtgcagaactatggacacagggggctgactatgtatatttatatccacttgcaaaattaagaataaaaataatgtgcatcagc

SEQ ID NO: 839396 - DNA, 86 bp, Artificial Sequence
  ENSG00000227036_131 (sequence is synthesized)
gaatgccaggattacagataaacagcttgatggattgctgaggcagagtgcaccgagcaagggttcagtcctccatagagctcaga

SEQ ID NO: 839397 - DNA, 120 bp, Artificial Sequence
  ENSG00000227036_132 (sequence is synthesized)
ggggctttgggataggctaactcgtattatatgtgtacacatgcacatttcattcctccttgtctgttttttttttttcctttgctacttttcctcctctatggcttgtgttttttgttg

SEQ ID NO: 839398 - DNA, 120 bp, Artificial Sequence
  ENSG00000227036_133 (sequence is synthesized)
aggctctgtctggactcctgggatttggcctgtcggccagggagattctctcccaagacatggatcatgataaagctgtaaagaatctatttaggtaagcaaacatttatttagtgctta

SEQ ID NO: 839399 - DNA, 120 bp, Artificial Sequence
  ENSG00000227036_134 (sequence is synthesized)
ctgtctgcatgggatacaaaggcacgaaaaaaagctcagtcttgccttctaagaggtgaaagagagagaagaagaggggcaaggaaagagaggatgtcaaagtagtttggtaaatgcgat

SEQ ID NO: 839400 - DNA, 120 bp, Artificial Sequence
  ENSG00000227036_135 (sequence is synthesized)
ggcagaaataggctcggatagagatggggggacattgtgtggtcacataacctttggttcagctctctcttccatgcaggacccagccttagttatccaagatgttgagggcacctctca

SEQ ID NO: 839401 - DNA, 120 bp, Artificial Sequence
  ENSG00000227036_136 (sequence is synthesized)
ccaaaataacaatccaagaaataaacccaggcatcactgccaagcccctccccaccccctcaacacaccatcctgctgcctgtgtctccagccttatgtggtctggcaaggttgggctac

SEQ ID NO: 839402 - DNA, 120 bp, Artificial Sequence
  ENSG00000227036_137 (sequence is synthesized)
ttccggcagccaccgtttgctccctaggatgcaatcttagcctccatggggctggcctgctggaatctgggaccacgtgagcctatgagcctcagggaggctgggatgccagggaggagc

SEQ ID NO: 839403 - DNA, 120 bp, Artificial Sequence
  ENSG00000227036_138 (sequence is synthesized)
cagcactcctggaggctctgtgatctgctctggccacattaaataaaggctttgatccctccaatggggagaagggagagctctcccttttcagcaccttctaatatccttcccccttgc

SEQ ID NO: 839404 - DNA, 120 bp, Artificial Sequence
  ENSG00000227036_139 (sequence is synthesized)
tgtgcccggccccactgtcacctcaccgaggaggagacaggatgtgtttccagcggggccttttttcttcccgatttagactgggagtgaatgaagctcattaaactgattgtggttgta

SEQ ID NO: 839405 - DNA, 120 bp, Artificial Sequence
  ENSG00000227036_140 (sequence is synthesized)
agtcaggtatggagccccgagtccttgagctccactgccggttgtccaagacaaaaagctttagaggcatcaaagaccacttctttgctgagatggatcagaattggcctgaaaacctgt

SEQ ID NO: 839406 - DNA, 120 bp, Artificial Sequence
  ENSG00000227036_141 (sequence is synthesized)
ttgcctttccagagagttttctttttggtttatttagtggctagcggcagtctctccaagggaaaccactggatttattaatgagaaaatgaaggcttgtgtttaagcctcgtctctgag

SEQ ID NO: 839407 - DNA, 72 bp, Artificial Sequence
  ENSG00000227036_142 (sequence is synthesized)
ccttccgagtagctgtgatcacagttgtatgccatcatgcccagaccagatttcgccatattgctcaggaga

SEQ ID NO: 839408 - DNA, 120 bp, Artificial Sequence
  ENSG00000227036_143 (sequence is synthesized)
agtctagtaatttttaaaactttgcatgttattctgctcatgagccaagttcgggtgcctgtggaacagctatattcctcaaactagatatgcaccccagtccctggggattctgtcaaa

SEQ ID NO: 839409 - DNA, 120 bp, Artificial Sequence
  ENSG00000227036_144 (sequence is synthesized)
aggcagattcacattcagcaggtctagggtggggggcctgacattcggcacgtctcacaagctcccaggcgatgctgatggtgctggtccctggacgccctcttgagtagtaaggaacaa

SEQ ID NO: 839410 - DNA, 120 bp, Artificial Sequence
  ENSG00000227036_145 (sequence is synthesized)
aaggactctcccctgttcttttcagctacgtagcccagtggttctccacttaggcttcacactggaatcatccagggagttttaaactatagtgatgcctggcggtgtcttactcgcaga

SEQ ID NO: 839411 - DNA, 120 bp, Artificial Sequence
  ENSG00000227036_146 (sequence is synthesized)
atagtgatgcctggcggtgtcttactcgcagagcttctggtttgattggtctaggttgcagcctgggcaaggagatttaaaaacttctcagatgggccaggcatggtggctcaagcctgt

SEQ ID NO: 839412 - DNA, 120 bp, Artificial Sequence
  ENSG00000227036_147 (sequence is synthesized)
tacaaaaattgctgggcttaatgctgattggaatagagttcactaacagttggaaaagaagaaaatgcaagtatctttggtattttaaaataacagaagtaaaaaggaaacagggactga

SEQ ID NO: 839413 - DNA, 120 bp, Artificial Sequence
  ENSG00000227036_148 (sequence is synthesized)
gtttttgagaatcctgtactgttgatgatgtcactttttcagaagtaatctctaagtttcagtacacaggctgtaggtatttgcagagggtgtgtgttctaagattcccttaagcaggga

SEQ ID NO: 839414 - DNA, 120 bp, Artificial Sequence
  ENSG00000227036_149 (sequence is synthesized)
actccctaggctgttgaatgggtcagggtgggggttgacagtggggagtggaagggggaggcttgactcatgtccaccctcctcatccctctgcctttccacaagtgggagctgcctgta

SEQ ID NO: 839415 - DNA, 120 bp, Artificial Sequence
  ENSG00000227036_150 (sequence is synthesized)
gaaacagagcattgcttaagaagctcaagttttatttcacctgttgggtgtatttgtctgtttatactctgcctcattccactttcttctagaaaggatttaaggcagccaggacccttc

SEQ ID NO: 839416 - DNA, 120 bp, Artificial Sequence
  ENSG00000227036_151 (sequence is synthesized)
agtgtcaaaaatcccagatcctagaagaagcaatgcctaggggctgtgtttgaggggagtacgcagagtgaggtgtcactgatgatttcaaagaggtgaccctggagctgaactgttttt

SEQ ID NO: 839417 - DNA, 120 bp, Artificial Sequence
  ENSG00000227036_152 (sequence is synthesized)
caacgaagggaacattcttttcttgcctttatctctctgtcccctgtcaccccgatctctgctcccactcccaactcctcaaagggcaaattgtgttgccttgggtctcatggaggagag

SEQ ID NO: 839418 - DNA, 120 bp, Artificial Sequence
  ENSG00000227036_153 (sequence is synthesized)
aaggcagggacagagaagagtctgcccgaagcaaatgccaatccttgcagagtgccgagcgagctgggagcagcggtgagctgggttgaggggcagccataggaacaagcgcagggagaa

SEQ ID NO: 839419 - DNA, 120 bp, Artificial Sequence
  ENSG00000227036_154 (sequence is synthesized)
ggctgagtaatggacgggaggcacagtgggtgacagggctgagagcacaatttatgagtcaccccgagcagctgctctttgccccaggggagcaactcacacattcccaagggagccagt

SEQ ID NO: 839420 - DNA, 120 bp, Artificial Sequence
  ENSG00000227036_155 (sequence is synthesized)
gcctgggagacgtgacgtcgttgtcactgggagaggagtttcaaccatgtgtggcttcggaggagcttgttcccatgggtaacacccaagattctcaggatgcaaaatcccagccaaaag

SEQ ID NO: 839421 - DNA, 120 bp, Artificial Sequence
  ENSG00000227036_156 (sequence is synthesized)
gagatggggctctaagacttcttgtgcatgcttgtatgtatgtatgtatgtgtgtgcaggtgtgcatatgtgtgtgtgtgcatgtgtgtgaaagaatgtgtctcctccatgctgagacct

SEQ ID NO: 839422 - DNA, 120 bp, Artificial Sequence
  ENSG00000227036_157 (sequence is synthesized)
cattattaactgctgatctgtgcatccagggtggtaagaactttcatcgttcatggaggaggtggtggctctgtgactaatagcccgccagtccgtagccatcccaacatttttctcaag

SEQ ID NO: 839423 - DNA, 120 bp, Artificial Sequence
  ENSG00000227036_158 (sequence is synthesized)
gatgctccctccacaaaatcctgctccaaacccatgatttgcatgaaacattccctgttcaaccacgacggctcctcatctggcatgtacatttggatcatggttagagggggctggcca

SEQ ID NO: 839424 - DNA, 120 bp, Artificial Sequence
  ENSG00000227036_159 (sequence is synthesized)
cctctgattgaattcagaaagccagcccggtgccgcccactgactctctcccaggcatcagccttaaagttctggcagctattcccagctaaatgggtgcatcaggccttcttactgcat

SEQ ID NO: 839425 - DNA, 120 bp, Artificial Sequence
  ENSG00000227036_160 (sequence is synthesized)
agatagttaataggggaaggaagagagctcactcacagcctctcactgctgcagtttgttttataaacctgataggcacacagcaaacccaatgaccagatacaatggaagcagcctttc

SEQ ID NO: 839426 - DNA, 120 bp, Artificial Sequence
  ENSG00000227036_161 (sequence is synthesized)
cttttgcactgtcaccagccgtggctttataaaaccgttgtttttccttacctgggaagcccttgggctgtcccttacttccttgataagccaggcaaggacatgacaacctttaaaata

SEQ ID NO: 839427 - DNA, 120 bp, Artificial Sequence
  ENSG00000227036_162 (sequence is synthesized)
gtatgcctccttaacaatgaaatgaaaaacacagggagccaaaaccaagtttaaatgagggtcagtggataacgcatgaactgggaacacaatttggttggggaagcttgtctatccgtg

SEQ ID NO: 839428 - DNA, 120 bp, Artificial Sequence
  ENSG00000227036_163 (sequence is synthesized)
gtgttttctggatagctgttttccagcacacacaagtatacaacacttatttaaaacaggccaagtgcggtggcttacacctataaccccagcgcttcgggaggccgaggcgggaggatc

SEQ ID NO: 839429 - DNA, 88 bp, Artificial Sequence
  ENSG00000227036_164 (sequence is synthesized)
tcaagaccagcctgggcaatgtagtgagacctcatctctacaacaaatttgggtcccaggcacttgggaggctgaggcaggaggattg

SEQ ID NO: 839430 - DNA, 74 bp, Artificial Sequence
  ENSG00000227036_165 (sequence is synthesized)
gaaaaccctgtctcaaagaaataataaaagaaaagaaataaaacagacttccccaagaatagtaaaccacagtt

SEQ ID NO: 839431 - DNA, 120 bp, Artificial Sequence
  ENSG00000227036_166 (sequence is synthesized)
gaaataaaacagacttccccaagaatagtaaaccacagttacaagttcatatttgtaagtttattgttttattgaatctattttttggggtggatacttgttgatagtccctgtgggtac

SEQ ID NO: 839432 - DNA, 120 bp, Artificial Sequence
  ENSG00000227036_167 (sequence is synthesized)
ctgggatgttcctcctagcatagacggcaaaaatttccagtgaattcctcatttcctcctgtttctttgtgaatgcccgtagctttaagggcctctcacctcctcagaggcagaggaggt

SEQ ID NO: 839433 - DNA, 120 bp, Artificial Sequence
  ENSG00000227036_168 (sequence is synthesized)
ttgtggactgggtgctaagctaatacccaggaactgaattttgttttgtttgctccacccactcttgggtagaggtgccgataggatggccacactgtggccacagcaaacagaaatgac

SEQ ID NO: 839434 - DNA, 120 bp, Artificial Sequence
  ENSG00000227036_169 (sequence is synthesized)
cagcactacccagataggaagcacacgtgcccagctgatccttcggtcctggggagctacctgaatctcatgggaaacccactttcctttttccccaccacagacttggctttctgcttc

SEQ ID NO: 839435 - DNA, 120 bp, Artificial Sequence
  ENSG00000227036_170 (sequence is synthesized)
ctttctgctctgctctttctgaaaatgcaaatgtgtgttgggcagatctcctatgcagggagattggcagagcccctagggacacttgactgaccaaggcttcttcgtggagagctgttt

SEQ ID NO: 839436 - DNA, 120 bp, Artificial Sequence
  ENSG00000227036_171 (sequence is synthesized)
tctggtttattctgtcttgtgatcgataggaaacactggccaggcttcttattttccaaggctgctgctttctgacaggctttaagggattaagggttgaatacaggtgggtttcttccc

SEQ ID NO: 839437 - DNA, 120 bp, Artificial Sequence
  ENSG00000227036_172 (sequence is synthesized)
cctcctgactctgtcacctggacattgccatggcaataatcctccctgaaacaaaaataaagggcagaaccggttggacagaaagtgtagccgaaaagtcttccagggacactgagagtt

SEQ ID NO: 839438 - DNA, 88 bp, Artificial Sequence
  ENSG00000227036_173 (sequence is synthesized)
tctggaagataatttttccgtggatgtggtggggtggggtggggtgggggtagtttctggatgattcaagcacattacacttattgtg

SEQ ID NO: 839439 - DNA, 86 bp, Artificial Sequence
  ENSG00000227036_174 (sequence is synthesized)
aaataattatacaattcaccataacatagaatctgtgggagccctgagcttgttttcctacaactagacagtcccatctgggggcg

SEQ ID NO: 839440 - DNA, 79 bp, Artificial Sequence
  ENSG00000227036_175 (sequence is synthesized)
ttatacaattcaccataacatagaatctgtgggagccctgagcttgttttcctacaactagacagtcccatctgggggc

SEQ ID NO: 839441 - DNA, 120 bp, Artificial Sequence
  ENSG00000227036_176 (sequence is synthesized)
aatagggttctcgctcctataagaatttgatgccatcactgatcttacaggaggtggagctcaggtggtaatgtgagcaatggggagcggctgtcaatacaaatgacactttgctcactc

SEQ ID NO: 839442 - DNA, 120 bp, Artificial Sequence
  ENSG00000227036_177 (sequence is synthesized)
acccaccactcacctcctgctgtgcagcctggttcttaacaggccatggagcagtaatgcgtccatggcctgggggttaggaacccctgctatagatcatgtccacaagagcaaggaggt

SEQ ID NO: 839443 - DNA, 120 bp, Artificial Sequence
  ENSG00000227036_178 (sequence is synthesized)
gcgcctgcccttgtgacctgctcactggaaaggaagaaatgaccgagggagaagggagggcatttgaggcattggtgcagccgctttggttcttcagcatgtgggctgtggtggtcttcg

SEQ ID NO: 839444 - DNA, 120 bp, Artificial Sequence
  ENSG00000227036_179 (sequence is synthesized)
tcttgctttgaggtttgctccttcttcagtgcaaccctttgcccagacatccctaatgcccccagctcagagcagcagttggcaggcaggagctttgcagttagccatcggagagcccca

SEQ ID NO: 839445 - DNA, 120 bp, Artificial Sequence
  ENSG00000227036_180 (sequence is synthesized)
ggaggaagagtttcgctcagctgcttgggtgtgggactgaatgtggttccagaactggtcgctgccttcacccgctgactctggtctcggcgatgacaagcccatggaacagacttacgg

SEQ ID NO: 839446 - DNA, 120 bp, Artificial Sequence
  ENSG00000227036_181 (sequence is synthesized)
ccagctgtgggatccccagtggggtgagtccgttgctttgcttggctgttggagctgaacccacttttgtttcctaaaggagtagccttttagttttaattgaaaaagcaagcaccgtac

SEQ ID NO: 839447 - DNA, 120 bp, Artificial Sequence
  ENSG00000227036_182 (sequence is synthesized)
aaggggcgatgcgccccggagggggagggacgcaaggggcgactactgttacctcgcttggagataccaaggccggtcggaccccccgctggccgaatgtggggagcgagcagatccagc

SEQ ID NO: 839448 - DNA, 120 bp, Artificial Sequence
  ENSG00000227036_183 (sequence is synthesized)
ctgtttggacgtggtgaggacccagccgtggggtttaaggccaagttagcctctcccttcactgattacaagagccattgttacaggtgctcacatgccaggagaaataagctggtgatt

SEQ ID NO: 839449 - DNA, 120 bp, Artificial Sequence
  ENSG00000227036_184 (sequence is synthesized)
ctagatgcctggaggcaacttggcttttcacagcttgcaactgtccactcaccttcccttgctgtggctcctctctgcctgaccccaaatgcagaggagccccttgaactcttagttgct

SEQ ID NO: 839450 - DNA, 120 bp, Artificial Sequence
  ENSG00000227036_185 (sequence is synthesized)
gagcgagcagagttcacccaaaaggccaacggctggcagggtgtcacgtttcccaccacacccggggctcagcctctgctgtcatttctcctccttggttttcatcttctaagggaagaa

SEQ ID NO: 839451 - DNA, 120 bp, Artificial Sequence
  ENSG00000227036_186 (sequence is synthesized)
atagtgtcatcttttctcaacctgtcagtctcacacctgcctggagcccctggcagtgagacacccagtgctgtttaatctgatgtcatctctgttgattgtctgttttagaaaccaggt

SEQ ID NO: 839452 - DNA, 120 bp, Artificial Sequence
  ENSG00000227036_187 (sequence is synthesized)
agcaagagggactttctgaggattaaaaaaaaaaaagtaaatccccaaactatttcggggaggtttttttttttttaacctcctgttttttagtttcattatttctttttctcttacata

SEQ ID NO: 839453 - DNA, 120 bp, Artificial Sequence
  ENSG00000227036_188 (sequence is synthesized)
cactcttttttaattaagaaaaattaattttttaaattaaaaaagaccaaatgcaccccttgggttgaggagttatgagagcaatgtttagggtaaaggtcaaaggtgagatggatgtca

SEQ ID NO: 839454 - DNA, 120 bp, Artificial Sequence
  ENSG00000227036_189 (sequence is synthesized)
ctgggtcttgggcatgggtacccacctgctggcaaacataagagaggccatacgagagtggggaaagaagggttactgaaaaatgcatatgagcttgttttctctaatgatgtttatttg

SEQ ID NO: 839455 - DNA, 120 bp, Artificial Sequence
  ENSG00000227036_190 (sequence is synthesized)
tcagactctgtccttctcagacagctgcccaggcaggagctgcctcttgggacagtgagtgggccatctccattgagagagtagggggacaaagggaaaaggcagggactgggtcactcc

SEQ ID NO: 839456 - DNA, 120 bp, Artificial Sequence
  ENSG00000227036_191 (sequence is synthesized)
tggggatgctgtttgacatagaccatgagggtcagccccactgggcctggctgacctggtagatgggtaggtctagggtatgaacatggatattagttggccagggtgtgagaacttgtg

SEQ ID NO: 839457 - DNA, 120 bp, Artificial Sequence
  ENSG00000227036_192 (sequence is synthesized)
tgaaagggtcggcccctgggtgactcagtctcctagcaaactataaaagggaagtgactcatttccagccctgaacaagaactcctaaggctaggccgccagcacctgtctgggacgtgg

SEQ ID NO: 839458 - DNA, 120 bp, Artificial Sequence
  ENSG00000227036_193 (sequence is synthesized)
catgttattctgtaatgcaggaatgagacaacctcatagaagctcttgagtgacagatttcagcacgattcagggagagcttgattggcaagaatctcagttacttttgtcattagtttc

SEQ ID NO: 839459 - DNA, 120 bp, Artificial Sequence
  ENSG00000227036_194 (sequence is synthesized)
aatctgctgccttgcaaaacccctccaaacgggaaataagctcctcggactgagtttccattattctcctttatccagagggctcgtcggtggagccagcttccataaccgtgtggcgga

SEQ ID NO: 839460 - DNA, 120 bp, Artificial Sequence
  ENSG00000227036_195 (sequence is synthesized)
acctgtggcaatttaaaaattatgtatgtatgtatgtatgtgtgcgctttttgctgaagaataatgtttataaagtacacaaatcttagggacagctcaatgaatttttacgtatgtaca

SEQ ID NO: 839461 - DNA, 120 bp, Artificial Sequence
  ENSG00000227036_196 (sequence is synthesized)
catccacggaaccaccatccaaaccaggataccattgaacattgccgtcagtctggaagctgccatcttgtcacctgtcagtcagcagttccctcccgccttctcccctaggtatttttc

SEQ ID NO: 839462 - DNA, 120 bp, Artificial Sequence
  ENSG00000227036_197 (sequence is synthesized)
ggcgcgggtccgcctggtatataagggccgaatggcccagccgactgcagggcgcgcaggcggcgcgggtgcgcggtgcggcgctggtatccagaggacgcggtcaccgcctctggcatt

SEQ ID NO: 839463 - DNA, 120 bp, Artificial Sequence
  ENSG00000227036_198 (sequence is synthesized)
agcctgtgtgtgtcctgtggggcgagagggggagtgctctgctcaccaccctgcacccgctgcccggctctgcttcccactcttggctggtgccccgtgggcctttcaggcgatctgggc

SEQ ID NO: 839464 - DNA, 120 bp, Artificial Sequence
  ENSG00000227036_199 (sequence is synthesized)
agggccccataagcaggttttggcttcctggcttagttgatttagaacaggtctattaggttgaactgaatgacatgtcctaccttctttggatagcctgggctgctgataggcccactg

SEQ ID NO: 839465 - DNA, 120 bp, Artificial Sequence
  ENSG00000227036_200 (sequence is synthesized)
cggccgttgtccttcagcctctagcgctgccaagccttggctgcctggagggaccgaacctcagctgggggagacgcccccgcgtcctcggcgcacccgctcggccccttgcacttgcct

SEQ ID NO: 839466 - DNA, 120 bp, Artificial Sequence
  ENSG00000227036_201 (sequence is synthesized)
taacgcctgggcgccctccgggctccgttacttcgggagcggtgccgcctccgtgagctcctggcgtccgcccactggcgaccggggacgctgctggggcgcagcggttggagaacgcga

SEQ ID NO: 839467 - DNA, 120 bp, Artificial Sequence
  ENSG00000227036_202 (sequence is synthesized)
ctcagccgagcccctctcaccgttggggctagggggtgagcgggggcgtttggcaagcagctttccggcgaggactgggccacccgtcaggctgacgctggtacgcgtttggccagggtg

SEQ ID NO: 839468 - DNA, 120 bp, Artificial Sequence
  ENSG00000227036_203 (sequence is synthesized)
tggacgggctttctgaataggtgggaggtggcaggaattcagtccagtgagaccacccgccacctcccctttccggcgcaacttgctaatggaagtcgtttcttggccaatgtggggaga

SEQ ID NO: 839469 - DNA, 120 bp, Artificial Sequence
  ENSG00000227036_204 (sequence is synthesized)
tcgctcagctgcttgggtgtgggactgaatgtggttccagaactggtcgctgccttcacccgctgactctggtctcggcgatgacactgtgttttttctacagagcccatggaacagact

SEQ ID NO: 839470 - DNA, 120 bp, Artificial Sequence
  ENSG00000227036_205 (sequence is synthesized)
aaaaaaaaaaaaaaaaaaaaaattgtattttacaattacagtgatacaaggatgaatagaatccaggctggattcattgttatctaggcattcatattaccgtcattgtattcattcttg

SEQ ID NO: 839471 - DNA, 120 bp, Artificial Sequence
  ENSG00000227036_206 (sequence is synthesized)
ttttcaaaggaattagaacattttcttgggccccctaaaagtattgggggcccagtggatgtgttggccttgggtaggtttctagaagttggacccagtggtttggcttcttgactactt

SEQ ID NO: 839472 - DNA, 120 bp, Artificial Sequence
  ENSG00000227036_207 (sequence is synthesized)
tgattttggacccatcaagaatgtccaaaattcccccaacctgcaactcttattctggccaaagagggggctctagctcataaagtgttgacatcccatttcccgttccaggtatttttc

SEQ ID NO: 839473 - DNA, 120 bp, Artificial Sequence
  ENSG00000227033_0 (sequence is synthesized)
tttggattctacatattcagagaatagccttccagtagattttaagcacctggatgagtgttcctctcttcaagccttctgaaacatcctccttggacatgtaaagaagcactgggccac

SEQ ID NO: 839474 - DNA, 120 bp, Artificial Sequence
  ENSG00000227033_1 (sequence is synthesized)
tgcccaaggcgaggtaaaagaggaaaaagctaacacccccttgaagagctcctctgcaatgggttccagagtgaggatggtggagtgcatggagacagaatgccttaaaggagactggtt

SEQ ID NO: 839475 - DNA, 120 bp, Artificial Sequence
  ENSG00000227033_2 (sequence is synthesized)
tctttttatccactaggaaatcattctcttttacttccacaagaccgaaacatataaatcatattctctgagatgaataaggaaaattactacaaaataaacttatacgtctatgtggaa

SEQ ID NO: 839476 - DNA, 89 bp, Artificial Sequence
  ENSG00000222000_0 (sequence is synthesized)
cttcttccctccctccttccttcattccttccaccttttcttgtttcagtttttattctttctttctccttcttctacctcgagccaag

SEQ ID NO: 839477 - DNA, 120 bp, Artificial Sequence
  ENSG00000222000_1 (sequence is synthesized)
gcttggccttgttgctctagctgggttcaccctctctactccccacccccacccctgccacagcatctaccttccctggggaggagggcttctctgctgttttcccctgcctggtgtgag

SEQ ID NO: 839478 - DNA, 120 bp, Artificial Sequence
  ENSG00000222000_2 (sequence is synthesized)
aggtttgttcggagtcactggctgcagcaagtctcctcccacacagccgaccccattcctcagacctgcactctgtacagcatggctactgaccaactcatggttaaatggaagctgggc

SEQ ID NO: 839479 - DNA, 120 bp, Artificial Sequence
  ENSG00000222000_3 (sequence is synthesized)
ctccaagcccttctcggactcagaatcctcccagcagatacccaggcagaggagtgtgaactctcagcccctaaaaaggactgccctgtgaggcaggctcacaagtgcctagaggatctt

SEQ ID NO: 839480 - DNA, 120 bp, Artificial Sequence
  ENSG00000222000_4 (sequence is synthesized)
gacattcctacagccggcaaagaggcctggtgatttgaagcagagtcctaggcttatggagagagaaaaccctgagtgaaatatcttttgtttgactcaaatcacatttgaaaggcagta

SEQ ID NO: 839481 - DNA, 120 bp, Artificial Sequence
  ENSG00000222000_5 (sequence is synthesized)
taagtggttaagggcactggcctgagaggaaggagagatggcttctcttcccagcttagcctccaatgtgggcctcataaccatcagttgttactgatgcttgttttggttgtcaaagaa

SEQ ID NO: 839482 - DNA, 120 bp, Artificial Sequence
  ENSG00000222000_6 (sequence is synthesized)
aacttgaggatgctcacggctcaggcctgagaggggagaagcatagtgggcaggcatctcctctctgatcacctacttaggttttggttccccaaggatgatttgctgccatcctgctca

SEQ ID NO: 839483 - DNA, 120 bp, Artificial Sequence
  ENSG00000222000_7 (sequence is synthesized)
ggagtgtgtgaaaaacacagaatgacaggtgccactccaggcccactaaattcaaatctcttgggacagggcttgggattctgcattgtcaccagggccatgcataggcaagttaaagtt

SEQ ID NO: 839484 - DNA, 120 bp, Artificial Sequence
  ENSG00000222001_0 (sequence is synthesized)
actggcgtcgtgggtgtggggcctgggcagtcacagggccctgttcttagaaggtgccccggcttgctttaatgctgtgttgttgtccttttgaaagccttactattttaacaaggggcc

SEQ ID NO: 839485 - DNA, 120 bp, Artificial Sequence
  ENSG00000222001_1 (sequence is synthesized)
ctgcatttttatattgcacagggccctgcaattatgcagccattcctgcttttgatctcacttaccccacagccataatggaagagcgcctggaaggagtccttatcctgattcccagat

SEQ ID NO: 839486 - DNA, 120 bp, Artificial Sequence
  ENSG00000222001_2 (sequence is synthesized)
agacaggatccctcgggtggaatccagggctgctgtttctcttgggggctcctcctcagtgaatggatgggtggcacctgcgagcaggatggtgtgtccccggctaaatccacaggcgct

SEQ ID NO: 839487 - DNA, 120 bp, Artificial Sequence
  ENSG00000222001_3 (sequence is synthesized)
ccactctgtcccagagagcccacagccaaaaacttcgtcctgtcctggaaaagcttcactgccttccaacagagccttcctgcatgccgaggttgaagaggtgtccgctgagtgctctgt

SEQ ID NO: 839488 - DNA, 120 bp, Artificial Sequence
  ENSG00000222001_4 (sequence is synthesized)
cttctgggaattttggctgtttcctgcaacctatcatcagatgccacacttatgagaccctcatccttctgctcactctcttccattgtttcactcattaaaaatatatattttaagcaa

SEQ ID NO: 839489 - DNA, 120 bp, Artificial Sequence
  ENSG00000222001_5 (sequence is synthesized)
agaccagacaggatccctcgggtggaatccagggctgctgtttctcttgggggctcctcctcagtgaatggatgggtggtaatctcctttcctacctgtcctagcggtagcctctgttcc

SEQ ID NO: 839490 - DNA, 120 bp, Artificial Sequence
  ENSG00000222001_6 (sequence is synthesized)
ttctcttgttttatctcattttatttttttaaaaaataccaaaaccattctctcacctgccagagaggagctcataggagttgggcttcctcagagagtgttcctccctcgtcccctgtc

SEQ ID NO: 839491 - DNA, 120 bp, Artificial Sequence
  ENSG00000222004_0 (sequence is synthesized)
agcagtaggatctcggtttccagcccagtgcaatttctgctctatcccgctgacctcattgttgaggtatgtccttatagcagtgtgagaaccgactaatacagttccttaggaagcccc

SEQ ID NO: 839492 - DNA, 120 bp, Artificial Sequence
  ENSG00000222004_1 (sequence is synthesized)
tgctgggtatggatggggagtgaagcaaggtgggcccagaagctgccgctggctgagagaccatgaagaaagtgtatagaatctccaccatcaccagaggaagagagcttggcaggaaag

SEQ ID NO: 839493 - DNA, 120 bp, Artificial Sequence
  ENSG00000222004_2 (sequence is synthesized)
ttacttccatgaatggatgagttgaagtgaacagcgtcttgggcaaaactgaagggtagttagtcgggtttgtctctggtgggctttcagctccactccctgcatcccattcccacatcg

SEQ ID NO: 839494 - DNA, 120 bp, Artificial Sequence
  ENSG00000222004_3 (sequence is synthesized)
tgatggtcccctcataggcccagggctaccaccttggagcataggtggggatcctccagccagggtccttccttcacagggagtcagagccctctgctccggaattgccctgccccaggt

SEQ ID NO: 839495 - DNA, 120 bp, Artificial Sequence
  ENSG00000222004_4 (sequence is synthesized)
cggccatctatcaaaagccccactatcccctaaagacccaccctcaagcagcagatgtgcagcaagggagccgcaaatgtcattcctgtgaccccgaagcagtctagtgtgttacctctc

SEQ ID NO: 839496 - DNA, 120 bp, Artificial Sequence
  ENSG00000222004_5 (sequence is synthesized)
tcagggctgctatgggctgaattgcttttccccaaaatttctatgctgcttccctaacccccagcgcctcagaatctaactctggataggacctgtgaataagtgattaagttaaaatgg

SEQ ID NO: 839497 - DNA, 120 bp, Artificial Sequence
  ENSG00000222004_6 (sequence is synthesized)
ggtcctgtggatgggccctaacccaatctgactggtgtccttttaagaagaggaagagacaccagagatgtgcacactcagagacaagacacatgaggacacagagacaaggcggctacc

SEQ ID NO: 839498 - DNA, 89 bp, Artificial Sequence
  ENSG00000222004_7 (sequence is synthesized)
gagacaagacacatgaggacacagagacaaggcggctacctgcaagccagggagaggggcctcggggaagccaaccctgcctacgccag

SEQ ID NO: 839499 - DNA, 120 bp, Artificial Sequence
  ENSG00000222004_8 (sequence is synthesized)
catgtgggactctcggcctcattatgagtggcatctttgacaatccagggcccattaaaaacaccttgaagaaagcattcaccatgctgtggagcttcacagtctataccaggctggaat

SEQ ID NO: 839500 - DNA, 120 bp, Artificial Sequence
  ENSG00000222004_9 (sequence is synthesized)
ccttgagggtggcattatcaaatgaggaaatggttcctttcatttttcatctgaagactcagacagcaaacatgttatctggccctataagcaccccgatgcttctgtgaaacccaagca

SEQ ID NO: 839501 - DNA, 120 bp, Artificial Sequence
  ENSG00000222004_10 (sequence is synthesized)
agttctgcatcaccacgacagccgcggatgtcaaatcatcaaaacagcagcagaggaaggggtttattcctcctccaaatcttcagctggttttatagggttaccagtttaaagtttctt

SEQ ID NO: 839502 - DNA, 120 bp, Artificial Sequence
  ENSG00000222004_11 (sequence is synthesized)
tgttttcagagcatcagacctcccatttgtagctgatagccatttttcaaaggtttctggctcacccaggaattcattagggtggacgagaaaagaacagtggatagaatagaccagcag

SEQ ID NO: 839503 - DNA, 120 bp, Artificial Sequence
  ENSG00000222004_12 (sequence is synthesized)
ggcaatctaagccccattccctgtctctttacattggttcttggtccccgtgactcatccaaactcccttatattcctatctggaatgcgaaagctggaaatacaagtgctctgtaatca

SEQ ID NO: 839504 - DNA, 120 bp, Artificial Sequence
  ENSG00000222004_13 (sequence is synthesized)
caggcagtggttttcttggagtctggtgtgatttctgtagcttgcagcaatatgtgggacacacttgcactgaagaatttaatgacttgttttactgctgtctgccatcaatatttatct

SEQ ID NO: 839505 - DNA, 120 bp, Artificial Sequence
  ENSG00000222004_14 (sequence is synthesized)
atattaactgaagaaaggcattactcgaaatggcatttcacacctctgagcattatacagtaattctaaagtcatacgttgtaccaaattctctgggcaaacacagagatacagtatgaa

SEQ ID NO: 839506 - DNA, 120 bp, Artificial Sequence
  ENSG00000222004_15 (sequence is synthesized)
tggaaagaatccaagttgaagtttttaaaacttgaattgtctgcagtaatctggaaaaccaaagtcaaaatgactcgaattgctatggctgggaatgactggattaaaagcaatggaaac

SEQ ID NO: 839507 - DNA, 120 bp, Artificial Sequence
  ENSG00000222007_0 (sequence is synthesized)
gtccggccaaggatgagcaaggaacaaagagcttttagaacattaagcatacatctaaatttatttgacctgaggatccagcctggcctctcaagagcagacgctcacatgataaaacgt

SEQ ID NO: 839508 - DNA, 120 bp, Artificial Sequence
  ENSG00000222007_1 (sequence is synthesized)
aaaaagttggctgaatggaccagcaggtgagatgaagagttgattgtcttcaaacgtaaaatatctcaagcaagaaaagaagaaaaaagtctcttcaataaatgttggcaatattttcga

SEQ ID NO: 839509 - DNA, 120 bp, Artificial Sequence
  ENSG00000222007_2 (sequence is synthesized)
aggggtattaatcaatgttttgattaattacacgtacatagaatttaagacaaagtaaaggctcttccatccccgcaagtccccagagaaaatttataacagcaaagtatcatcattact

SEQ ID NO: 839510 - DNA, 120 bp, Artificial Sequence
  ENSG00000222007_3 (sequence is synthesized)
gaagtactcaacccgacagactcagccctttttaaaaactggaagcaggggtgagtcatggaactccctctgcagcagcacctctatcttcccagccctgggctggcgacagagggggaa

SEQ ID NO: 839511 - DNA, 120 bp, Artificial Sequence
  ENSG00000267452_0 (sequence is synthesized)
aataaaactccggtctcccacacagcaggctctgcagtgaattactctttctctattgtaattcccctgtcttgatatatcagctgtgtctaggcagcgggcaaggtgaacccattgggc

SEQ ID NO: 839512 - DNA, 120 bp, Artificial Sequence
  ENSG00000267452_1 (sequence is synthesized)
agttacgcagctgctggatgaacaaataaatgtgtggaaaatgaagaaaaaccgagagtcaaagcttacagactctgcgatgtgtcctggatgcaaaggccacctcctggagtttttgct

SEQ ID NO: 839513 - DNA, 120 bp, Artificial Sequence
  ENSG00000267452_2 (sequence is synthesized)
acctttgcttttcagctgaaagtattttgggaagtcgaagcttggagagattctgtgaattggtgaaggacacagagcaaagccaggattcagattcagacctgcttgactccaagatca

SEQ ID NO: 839514 - DNA, 120 bp, Artificial Sequence
  ENSG00000267452_3 (sequence is synthesized)
ttccagaaatctcccttttcctttggaccctgtgacgtgacagctgggttctttctgctctgatttccatgcctgacaaccatttaaatggaatacaagaatgcagttttcttaggttga

SEQ ID NO: 839515 - DNA, 120 bp, Artificial Sequence
  ENSG00000267452_4 (sequence is synthesized)
aagaaattcaccctttatcaagaattatttatagttcctctggagtgagagaggaagacattacccacgcagtgctctgtggaatcatctgagccaccacttctgccttggggacatcat

SEQ ID NO: 839516 - DNA, 120 bp, Artificial Sequence
  ENSG00000267452_5 (sequence is synthesized)
ctggggaagtatctagatcctttggctgaacaacgtgttttgaggtctttaatatgtcaccttaaggatgaggcctagagaacatggccttttgttgaacagtttgtaagctctcaaatg

SEQ ID NO: 839517 - DNA, 120 bp, Artificial Sequence
  ENSG00000267452_6 (sequence is synthesized)
tgagtaaatgtgaggagggtcttgagagatataggaagctcaagaaacctagctagagtctctagactgttgagaaaagtggtgagaagaaattcccattgtgggggatgggagtggtgg

SEQ ID NO: 839518 - DNA, 120 bp, Artificial Sequence
  ENSG00000267452_7 (sequence is synthesized)
ttcaggaggatttttgagaatggggatagagagcctagaaataaggccacacacccatggccatctgatcttcgacaaagcaagcaatgagtaatggactccttgttcaataaatggtgc

SEQ ID NO: 839519 - DNA, 84 bp, Artificial Sequence
  ENSG00000267452_8 (sequence is synthesized)
caagcaatgagtaatggactccttgttcaataaatggtgccgggttgactgactcacaccatatacagaaatcaactcaagatg

SEQ ID NO: 839520 - DNA, 120 bp, Artificial Sequence
  ENSG00000267452_9 (sequence is synthesized)
ctggaagacaacctaggcaataccaccctggatataggaacgggcaaagatttcatgatgaagacactaaaagcaattgcagcaaaagcaaaaattgacaaatgtgatctgattaaacct

SEQ ID NO: 839521 - DNA, 89 bp, Artificial Sequence
  ENSG00000267452_10 (sequence is synthesized)
gaaattatcaacagagtaaacagagtaaacaacctatagaataggagaaaatatttgcagactaagtatccaacaaaggtctctttata

SEQ ID NO: 839522 - DNA, 87 bp, Artificial Sequence
  ENSG00000267452_11 (sequence is synthesized)
atgctaaagtagacatatatgtggccaacaagcaaatgaaaaaaagctcaatatcatgatcattagagaaatgcaaatcaaagccac

SEQ ID NO: 839523 - DNA, 120 bp, Artificial Sequence
  ENSG00000267452_12 (sequence is synthesized)
ggctattattaaaaagtcaaaaaataaccgatggctggtaaagttgcagagaaaaggaaatacttatacactgttagttggagtttaaattagttcaaccattatggaaagcagtgtggt

SEQ ID NO: 839524 - DNA, 120 bp, Artificial Sequence
  ENSG00000267452_13 (sequence is synthesized)
tggtgattcctcaaagagctaaaaacaggactaccatttgacccagcaaacctattactgggtatatgcccagaggaatagaaatcattctaccataaaaacatgtgcaacaaatgttca

SEQ ID NO: 839525 - DNA, 88 bp, Artificial Sequence
  ENSG00000267452_14 (sequence is synthesized)
aatcaacctaaatgtccatcaatgacagattggataaaaaatgtagtacataggtcccatggaatactatgcaaccataaggatggag

SEQ ID NO: 839526 - DNA, 76 bp, Artificial Sequence
  ENSG00000267452_15 (sequence is synthesized)
taaatagtgcatgctcttactcataagagggagctaaatgaggagacatcatgaatacaaagaggggaacaacaga

SEQ ID NO: 839527 - DNA, 120 bp, Artificial Sequence
  ENSG00000267452_16 (sequence is synthesized)
aatgaggagacatcatgaatacaaagaggggaacaacagacactgggacctctttgagggtggagggtaggaggagggagaggagcagaaaaacattaatcttgttgtacagattatttt

SEQ ID NO: 839528 - DNA, 120 bp, Artificial Sequence
  ENSG00000267452_17 (sequence is synthesized)
gtcacccaggtactaaatgtggtactattgggtaccctaccactgttttatcaaacaagtttctgtaatagtataaatcctttgttgtcattacaacaatgttcatggcatcttcaccag

SEQ ID NO: 839529 - DNA, 120 bp, Artificial Sequence
  ENSG00000267452_18 (sequence is synthesized)
gagtaaatctcatctcaagaaaccactttttttgcttatccataagaagcaactcctcatctattcaaatttgatcatgagattgcagcaatctggtcacatcttcaggttcactctaat

SEQ ID NO: 839530 - DNA, 120 bp, Artificial Sequence
  ENSG00000267452_19 (sequence is synthesized)
tcaagttctcttgctgtttctaccacatccacagttacttccttcactgaaattttgaacctgtcaaaatttggtaccttactgttgtgtaccaggtttagtacctgggtgacaaaataa

SEQ ID NO: 839531 - DNA, 120 bp, Artificial Sequence
  ENSG00000267452_20 (sequence is synthesized)
agatgcttactgagcacttgctgggtcctgcacccagctggctgctagggatagtgaggggcacgaggcactctctgcccttgcagagctcactggaggaataaacctttgtagaggaag

SEQ ID NO: 839532 - DNA, 120 bp, Artificial Sequence
  ENSG00000267452_21 (sequence is synthesized)
gtttgatgggctttcctggaagaagtactcataggaaaacccaaaagctcaacagatgctgtctccttggttaacattaggagctatgatctccatcttcccatggcattagaggtttag

SEQ ID NO: 839533 - DNA, 120 bp, Artificial Sequence
  ENSG00000267452_22 (sequence is synthesized)
atactgaggatcagagaggcaagttcagcatcagaaggcaggaagaggcagaaatctggacaccgattcctaactctaaagctgcgtcatctctagtgcatctcatcagctcttcccaat

SEQ ID NO: 839534 - DNA, 120 bp, Artificial Sequence
  ENSG00000267452_23 (sequence is synthesized)
ggcaccaatcaactttagcatactggccagccggaatagatgtccttgggcattcttaagatctgagactgtgatggttaattttagggtatcagcttgactgggttgaggaatgcctca

SEQ ID NO: 839535 - DNA, 120 bp, Artificial Sequence
  ENSG00000267452_24 (sequence is synthesized)
gtggctggtggcgtccatcattcctgggtgtgtctgtgagagtgtttccagaggagactcacatgtgagccagcgggctgagaaggagacccgttctcagtgtgagtgtgcactgtccaa

SEQ ID NO: 839536 - DNA, 120 bp, Artificial Sequence
  ENSG00000267452_25 (sequence is synthesized)
tcagctcaaggccaggctggggacaaacaggcagaagaaggaggattctctctcccacctttctggagcaggatgccttttctccttggacatcagactacagggtctttggcttttgga

SEQ ID NO: 839537 - DNA, 120 bp, Artificial Sequence
  ENSG00000267452_26 (sequence is synthesized)
ttctaggacttgtaccaatggcctcccggggccctcaggccttcagcctccaacgaaggtctgtgctgttggcctccctgattctgaggcttctggacttggactgaggcatgctacggg

SEQ ID NO: 839538 - DNA, 120 bp, Artificial Sequence
  ENSG00000267452_27 (sequence is synthesized)
cttctctgattctccagcttgtggatggcctatcatgggacttctccacctctgtaatcacaagggccaatgccccctaatacctttcttttcatatatcctactggttctgtctgcctg

SEQ ID NO: 839539 - DNA, 120 bp, Artificial Sequence
  ENSG00000267452_28 (sequence is synthesized)
gggaaccttgactaatacagatatggagcatttgaaatgagaggatttctgatcctgttcttcaagaagcagtaggtcagagcatacctctttaaaataacttctggatagtttcacagt

SEQ ID NO: 839540 - DNA, 120 bp, Artificial Sequence
  ENSG00000267452_29 (sequence is synthesized)
tagaaagaatcagcttcaggtgatcttgaagatcccacttggattccactctccagctctcaggaagctctggcttccttacttcttctgggattttcctttcatgctggggagagatgc

SEQ ID NO: 839541 - DNA, 120 bp, Artificial Sequence
  ENSG00000267452_30 (sequence is synthesized)
tccctcaccactacccagcccatgggacacaccgagtctggtggaggatgctgtgacctgtggtgcttgtgattgcgtcttactgtgtcgcccagactgaagtgcagtggtacagtctca

SEQ ID NO: 839542 - DNA, 120 bp, Artificial Sequence
  ENSG00000267452_31 (sequence is synthesized)
taaaagggaagcaaaggaagaaagaagaaaagaagacaacccatgtaggatgttaaccaggtcactggttttattgtcacatgcttttaaaagaacatgcatgagtgagctgtctcactt

SEQ ID NO: 839543 - DNA, 120 bp, Artificial Sequence
  ENSG00000267452_32 (sequence is synthesized)
tccaatccaagaatgtttgattccactgtgatgaaaaattctgtgacctggcaggaaaacactacaagaagggcagaagcggaaaattctttctattttccaatatggctttctttgatt

SEQ ID NO: 839544 - DNA, 120 bp, Artificial Sequence
  ENSG00000267452_33 (sequence is synthesized)
caagaaaggcctcctctcctccacatctctgtcctgctcatgaccccagaagatctcaggttgactgcatttgttctatgccttcctcaagcttcacctcttctgtgagcctcctgggtg

SEQ ID NO: 839545 - DNA, 120 bp, Artificial Sequence
  ENSG00000267452_34 (sequence is synthesized)
ggctccttctggctaaatcttcctcctcactgttgcctttttatcttatgcaagcacctgccttatctaaaggtacataccttttcatagaacacttgcctgtttacctagctatttccc

SEQ ID NO: 839546 - DNA, 120 bp, Artificial Sequence
  ENSG00000267452_35 (sequence is synthesized)
tccccatgactatgggctttttgagaggtgctgtgttatttatttatttatttatttatcattttgttttgagacggaatcttgctcttgttgctcaggttggagtgcaatggcgcgatc

SEQ ID NO: 839547 - DNA, 120 bp, Artificial Sequence
  ENSG00000267452_36 (sequence is synthesized)
tttttttttacttctataccttcagcaccccaaacagtgcccaatacaaagttccacactaaatatttattgatggaataatgaatagggttgggggcactggcagggagggtgcccact

SEQ ID NO: 839548 - DNA, 120 bp, Artificial Sequence
  ENSG00000267452_37 (sequence is synthesized)
gggctgaaattctggggcctgaatgcatcactcccttcgcctctggatgagaaaaaagagggacagtacccatgaggcccctagggaagccttctgcagaccaaaagacctctttgaaca

SEQ ID NO: 839549 - DNA, 120 bp, Artificial Sequence
  ENSG00000267452_38 (sequence is synthesized)
gagggcagaggaaacaggtctagagaaagtgaatgtgaagattcaggctttagaatgagccttgcagacctgctggcagtgacaagaattacctgtgtacagcaccttgtggttcccatg

SEQ ID NO: 839550 - DNA, 120 bp, Artificial Sequence
  ENSG00000267452_39 (sequence is synthesized)
accccatttagatctcatcatgaccctgttgggtggatgttattttctgctttacaggggagagaggccaaactcgtgatctgatctgtctgatatcacttacttaaacagttaagtggt

SEQ ID NO: 839551 - DNA, 120 bp, Artificial Sequence
  ENSG00000267452_40 (sequence is synthesized)
caaacctgttaagtggacgtttctggtggcaccttcagttttctccagcctcgtcacacctggtgggctccttccactccttcatgcagacactgctgtccccctccatcaacaccttcc

SEQ ID NO: 839552 - DNA, 120 bp, Artificial Sequence
  ENSG00000267452_41 (sequence is synthesized)
ttcagggaaggagctggatctcatcttcactgggacaatggctgggtaacagctgatagccttgctgctttctgctgaatatgttttttttttcaaaagaccaaaaagaaaaaaaaaaaa

SEQ ID NO: 839553 - DNA, 120 bp, Artificial Sequence
  ENSG00000267452_42 (sequence is synthesized)
atgaggcttcagtcaaggtgcaggccaggattgggctctcatctgaagtctctgctggggaaggatctgcttccaaacccatgggactgttggcaggactcagttccctatgggctattg

SEQ ID NO: 839554 - DNA, 120 bp, Artificial Sequence
  ENSG00000267452_43 (sequence is synthesized)
gctggagatgtgggcctttccagcataacattctgcttcattaaagccagtgaagaagagagtgtgctagcaagatggaaggcacaatctcctgtagtctaatcatggaagtaacagcct

SEQ ID NO: 839555 - DNA, 120 bp, Artificial Sequence
  ENSG00000267452_44 (sequence is synthesized)
gtctcctttgctatattctgttggttagaagcagtcactaggccagcctacactcaaggagagagactatgtggtggtgtggatacccgaaggtggggtcttcagagaccatctgagagc

SEQ ID NO: 839556 - DNA, 120 bp, Artificial Sequence
  ENSG00000267452_45 (sequence is synthesized)
ctgcctgtcccactagttgtgtgactttgggcaattactgaattcttctcatttgtaacattggtatgataataatatctttataaagttgttgtgattaaatgagcatatataaaacag

SEQ ID NO: 839557 - DNA, 120 bp, Artificial Sequence
  ENSG00000267452_46 (sequence is synthesized)
tgtttggcaaataataggccctatataaatatttgcttttatagttacctagaccggtgtctggcacatagagaaagcacagtaaacattggttgaatcaatgcaattgtagttccattg

SEQ ID NO: 839558 - DNA, 120 bp, Artificial Sequence
  ENSG00000267452_47 (sequence is synthesized)
cagttacatggaacatgctttgggaaggctgccctacttaagaatgctgcaaggattagatgtgatcagctatgtgaagcatctagcacagtcccaggcacatgctaggtccccagtcaa

SEQ ID NO: 839559 - DNA, 120 bp, Artificial Sequence
  ENSG00000267452_48 (sequence is synthesized)
tgttagtttcccctcctacttccaggtttggatgtagagctgagattcaaagcttaagagaggtcaggttccagcttctccttctgttcacctcctccttctttccctccttctctcttt

SEQ ID NO: 839560 - DNA, 120 bp, Artificial Sequence
  ENSG00000267452_49 (sequence is synthesized)
ccttctcttcctccttccctcctacaccaatagtaattttctcggtacagtgcctggttggtgccatcagcagttaaatgcttcatagtggctctggatgaggctggcaatgacaattaa

SEQ ID NO: 839561 - DNA, 120 bp, Artificial Sequence
  ENSG00000267452_50 (sequence is synthesized)
gtgtacttcaggggcctgggtggagatggaaatgaggtgaatgggggaaaagagaataaacggctaagaaagtggaaaaaaagacacagaaaggaccactttgaagagcaatgttatttt

SEQ ID NO: 839562 - DNA, 120 bp, Artificial Sequence
  ENSG00000267452_51 (sequence is synthesized)
ttctctatgtacctaagagttctgagatgctttaataatcactgttagaatcttaaaaacacttttccacgtttttcttccttcttagcttcccttaatcactatattcaaagcagatat

SEQ ID NO: 839563 - DNA, 120 bp, Artificial Sequence
  ENSG00000267452_52 (sequence is synthesized)
ttattgcaaacagacaggcagctccgtttcctgttggttctgtttccttcctattaaattactgaactgtgaggactggggagggcgggtaggaagggagatgaagcagggttaagagga

SEQ ID NO: 839564 - DNA, 120 bp, Artificial Sequence
  ENSG00000267452_53 (sequence is synthesized)
ttctgttttcagcaagtagtgaattccccagaagcttttcccacttagtccggatgcatccatacgatgtgaagttgggcttaattgcttcgtgttggtggcagagctctgaagatgagg

SEQ ID NO: 839565 - DNA, 120 bp, Artificial Sequence
  ENSG00000267452_54 (sequence is synthesized)
actggctttcctactggagagctggcccgtggaccaggcatctattgctgaggccagatgaaaatgggccagggcctctggccacacgctgccacagccaagagagatggagcaaagcca

SEQ ID NO: 839566 - DNA, 120 bp, Artificial Sequence
  ENSG00000267452_55 (sequence is synthesized)
tgcagtgtcaacttaggtttgagaaaggggtcaggtcaaagtgctggaaggactccccatcactgagttccttgccatcaacacaactgcagagcagagcagaagtgaccacacatccag

SEQ ID NO: 839567 - DNA, 120 bp, Artificial Sequence
  ENSG00000267452_56 (sequence is synthesized)
aggccactgtggaggaaacacagcatcaggccctttcaacacttagttaatcctcatgttggccccatggaattattttattttcctactttatacacaggaagtcgaagcttggagaga

SEQ ID NO: 839568 - DNA, 120 bp, Artificial Sequence
  ENSG00000235902_0 (sequence is synthesized)
gggaggagtgctcggccagggaggagtctgttgtcagagagcctgtgtcgtggctgtggatgaggctttctggagctgggagcaggtgtttgtataagcaatgggaaaggctctggggat

SEQ ID NO: 839569 - DNA, 120 bp, Artificial Sequence
  ENSG00000235902_1 (sequence is synthesized)
tatgcaggcgtgaagaccccacaccatcggggggcggaaggctgagtgatgctgagctggtgccactgcctggtgagaaagtggctcggttcaaaggtaccacggaaggagggcacggag

SEQ ID NO: 839570 - DNA, 120 bp, Artificial Sequence
  ENSG00000235902_2 (sequence is synthesized)
tttgtctgtgtgtctgtgaagcatttacctccaacacactggcagatggtgccgataccctggggataatataatcaaactaaccgtctctgcgcagcctggataaaaccatgcaaaacg

SEQ ID NO: 839571 - DNA, 120 bp, Artificial Sequence
  ENSG00000235902_3 (sequence is synthesized)
aaaggtatcagcttgttttcaaacatcacaaaaccattctgaagaagcaaaccaggttggatgagtccaatgactgatatgtgttcctatgacttctcctacacctgcttcctggcgtgc

SEQ ID NO: 839572 - DNA, 120 bp, Artificial Sequence
  ENSG00000235902_4 (sequence is synthesized)
ccatcctgggacactggcgagtctgctcactgacactggcacgggcctgtctgtacagtcacagacggattttgctccctccgaccttcctggactcctgaacccgatcaagatgcatct

SEQ ID NO: 839573 - DNA, 120 bp, Artificial Sequence
  ENSG00000267454_0 (sequence is synthesized)
cggatctcgcgatgtttcagggcggctttggtgtcatcaaatgtgagaagccctggactttacacatcccgagccagtgtgatccagtatgattgggagtccgagtgccagatgccggtc

SEQ ID NO: 839574 - DNA, 120 bp, Artificial Sequence
  ENSG00000267454_1 (sequence is synthesized)
aggacctgttatgctgggtctcagaatgcggaaactctccctgtccgaggtggaacagtttgtccttgagtgaggactggagtcctgagtgactcttttgatttgatcctgtttccctca

SEQ ID NO: 839575 - DNA, 120 bp, Artificial Sequence
  ENSG00000267454_2 (sequence is synthesized)
tcttgaactccggagctcaagtgatcgtcttgcttcagccttgcaaaatgatggtgaagctgcatcattgtctggggtaaatacctgaggttcgttgtctcacgccaagggaatcaagga

SEQ ID NO: 839576 - DNA, 120 bp, Artificial Sequence
  ENSG00000267454_3 (sequence is synthesized)
cgtggacacacaagaagtgagtttaagagcggaggtttaataggcgaaagagaaaagagaatagctctagctcctgcagagagaaaagggctcccaagtaggacttccagtccgtggcga

SEQ ID NO: 839577 - DNA, 120 bp, Artificial Sequence
  ENSG00000267454_4 (sequence is synthesized)
gcttcctggggtctgtggtgctgggtgtgctatctgcgtgtgattctctagcgagagattgtgggcgagtgaccgagtgggcaaggggccgtcactgtgtgtgcgtgattttgacagtgt

SEQ ID NO: 839578 - DNA, 120 bp, Artificial Sequence
  ENSG00000267454_5 (sequence is synthesized)
gtggtggtagcttctgactccgcgtgggtcgttgaatgtatgactgggaccgtttagcggtggatacacaactgtgtgcggctgtggaagattgcctcatccgttacgttcccatttccg

SEQ ID NO: 839579 - DNA, 120 bp, Artificial Sequence
  ENSG00000267454_6 (sequence is synthesized)
ggcttcaggaggtggtgtctgatttacgtaggccccaaagattggttggaccaggtgtgccaatcagaagctggctgccccaccctaatcttttattatgcagatggagtccctgtctga

SEQ ID NO: 839580 - DNA, 120 bp, Artificial Sequence
  ENSG00000267454_7 (sequence is synthesized)
acaaagaaaagggaagatggagctgcgatgttggacatgcctggcccccaggtagctttttcctattggcacagctgctggcattcacccgtgcaaacttccagcttgcttatctatgtc

SEQ ID NO: 839581 - DNA, 120 bp, Artificial Sequence
  ENSG00000267454_8 (sequence is synthesized)
attacaggcatgagccgctgtgcctgctagagggttttttatctttattcctcaagattttgcatttagataattatgttaaacttgggtgtgctaggtagacatacgtctgctgattac

SEQ ID NO: 839582 - DNA, 120 bp, Artificial Sequence
  ENSG00000267454_9 (sequence is synthesized)
ggtagacatacgtctgctgattacctgtttaggaagaatgtggattcgtacgtagggaaaaggagtcaggctggtgggaccaggggaaagcaaagagataaagcaaataagctatagatc

SEQ ID NO: 839583 - DNA, 120 bp, Artificial Sequence
  ENSG00000267454_10 (sequence is synthesized)
tgcattttcttcatggtccaggatatataaacaaaaaaaggaagcagataagctataggcttgcttttctttatgacccaggacatacagccctgccgagcaaataatgaacgtaactca

SEQ ID NO: 839584 - DNA, 120 bp, Artificial Sequence
  ENSG00000267454_11 (sequence is synthesized)
caaacttcctgcttatcatcaaacgcacgcatccacttatcatcaaacacctcgggtgacagaagaatgcaggtcagctccctgctgccttggcattatcaatcagcccaggaaccatcc

SEQ ID NO: 839585 - DNA, 120 bp, Artificial Sequence
  ENSG00000267454_12 (sequence is synthesized)
tataaaatctccagcaagcctttgtttccttgcagtcagctcctcttccactgattctgcctgttgctccctgataacatactttgatactgtctttaataaatctgcctttcttcaccc

SEQ ID NO: 839586 - DNA, 120 bp, Artificial Sequence
  ENSG00000267454_13 (sequence is synthesized)
tatggtgagttaaatgtgggttatgaaggagaacgcaaaataaaaacgttataaagatgtaaaggagttttatggggcggcatctcttgggcaaatatcagaccgccgtaggtagttgtt

SEQ ID NO: 839587 - DNA, 120 bp, Artificial Sequence
  ENSG00000267455_0 (sequence is synthesized)
aacagtttcctcgcctggtccaagggataatccagtattcctgggcagaggctggtgctaaggccaggactgaccagttcacagctcacaggggaagattcctggatttgctctcagcct

SEQ ID NO: 839588 - DNA, 120 bp, Artificial Sequence
  ENSG00000267455_1 (sequence is synthesized)
tcagacccttcaggaacggcccaagaaaatgtgacttgtccaggccaatgcacttatagccagcgtggatggaacagaagggcaacagatgactaggaaaaatatgccacagggaagaaa

SEQ ID NO: 839589 - DNA, 120 bp, Artificial Sequence
  ENSG00000267455_2 (sequence is synthesized)
ctctgtggggtaaggggatgctagtgacccaccactggacagcccctccctgcaggctccgggctgagttttccaggtgacgagctgggactggtccagccatattcagccccactggga

SEQ ID NO: 839590 - DNA, 120 bp, Artificial Sequence
  ENSG00000267455_3 (sequence is synthesized)
ccaacagctcacacctgccaggcaatgtgcaggcctgtgatctctgtgttatcaatgggcagatgtacttgcacccaacaccataaaattagctgatagtgtcctaattgggaaccaaca

SEQ ID NO: 839591 - DNA, 120 bp, Artificial Sequence
  ENSG00000267457_0 (sequence is synthesized)
acatccaaaaaccacagcaattagacaaataaattgtgaaagatgtggtttccaggtaagatatgtgacaggcttcttaccgcaaatagtttttcttacaaaaggagaaagactggtggg

SEQ ID NO: 839592 - DNA, 120 bp, Artificial Sequence
  ENSG00000267457_1 (sequence is synthesized)
agagatggtggaaaaaatgaaaacaatgtgtcttttatgattgtctgggcccatcctcacaggacttcatatgtagtgaaggcagaatatttacctcaagcccagatgaccaacttttac

SEQ ID NO: 839593 - DNA, 120 bp, Artificial Sequence
  ENSG00000267457_2 (sequence is synthesized)
tttttaattcttaaaataaaaaagaatagttttattcataaaactacatgggcctacttgtgtggaatgtgatttaaaaatgatgttagcaatacttgttacttattttactagttttag

SEQ ID NO: 839594 - DNA, 120 bp, Artificial Sequence
  ENSG00000267457_3 (sequence is synthesized)
ctttgttagtgctgaaggatgttttatagtttattctaaaattgtaaacgtttttgatgtgtaagccagtcacccttaaaagcacatttggctaaataaataaagcattaggttagagaa

SEQ ID NO: 839595 - DNA, 120 bp, Artificial Sequence
  ENSG00000265174_0 (sequence is synthesized)
gtctgcctaactgcaaaacaatttggttggcttataaattgctgcctctatcatgtgcttctgaattaaaaggaacggatggtttttaaaggtttatctgtttcattattgatgcagaat

SEQ ID NO: 839596 - DNA, 120 bp, Artificial Sequence
  ENSG00000265174_1 (sequence is synthesized)
gacctcgtgctgacaaatttcgattttcacacggtttctttgctgatgcagtatctctgccacccatgctctagggcagcgtggagccacttcagagcatggcttttgtgagccagcgcc

SEQ ID NO: 839597 - DNA, 120 bp, Artificial Sequence
  ENSG00000265174_2 (sequence is synthesized)
tcctgtgaacctctcagtgtgtttcagaacaccagggtctgaacagagaagcttcagaatactttctccgactagagaacttttttatggtgggaggaaaaaatgttgccagtcccactt

SEQ ID NO: 839598 - DNA, 120 bp, Artificial Sequence
  ENSG00000265174_3 (sequence is synthesized)
cacagacacctggaattcatgaagtctgaggacttctttcattttactttcaactaaaagctctagcacgaaacagcaaaggctcacagaactaaagatcaggaggtggccctgtgagag

SEQ ID NO: 839599 - DNA, 120 bp, Artificial Sequence
  ENSG00000265174_4 (sequence is synthesized)
ggtgttcagcctggatccctggtgaaactccatcattgagcagcatatctacttcagaaagcgtggaaagaaaagagcctggtgggaaaagtctatcaagtgatagtgacgtgcccttat

SEQ ID NO: 839600 - DNA, 120 bp, Artificial Sequence
  ENSG00000286772_0 (sequence is synthesized)
atacagcaatagaaaaccaatacagccagaatggtgccaatggagattataaagaagaggatagatggattttggcaataatttatgactgtgatccatctgagaagagctgtcagctgt

SEQ ID NO: 839601 - DNA, 120 bp, Artificial Sequence
  ENSG00000286772_1 (sequence is synthesized)
cagccaagcggttatatttatagacctagaactcaacaagagcttctacaggctactggcattcttggctcaaggcctcttcctccatcttcaaagccagcaacatcaggtcaagttctt

SEQ ID NO: 839602 - DNA, 120 bp, Artificial Sequence
  ENSG00000286772_2 (sequence is synthesized)
cctggataatacaagattttaagatcatctgattagcaaacttaattttatgttatcttaactccccttttccatataacataacatagtcacaggtcctagggactaggacgtggacat

SEQ ID NO: 839603 - DNA, 120 bp, Artificial Sequence
  ENSG00000286772_3 (sequence is synthesized)
cttttgtcgtcataactctgcttactacagaggctaaggatttatctacacaatgtgtaatataataatcttgaagagagctggttgtatgaatggtaaaggcagaagtaataaatagtt

SEQ ID NO: 839604 - DNA, 120 bp, Artificial Sequence
  ENSG00000286772_4 (sequence is synthesized)
cagcaggtatagagtgcagtgggagtgaagtcagaatggagtgactatgaaaaaccttgacaagttcagctatgaatgaataaaagaaagtagagtaaagaaaaggaataaaaggaagta

SEQ ID NO: 839605 - DNA, 120 bp, Artificial Sequence
  ENSG00000232655_0 (sequence is synthesized)
acaaggagaaggtgggcccagcaagcccagaggacacagccaccaggactgtcacccactcctggggaagggcgggaaggtgctgtctccggggttgtcagaaaagtccagaatcctcct

SEQ ID NO: 839606 - DNA, 120 bp, Artificial Sequence
  ENSG00000232655_1 (sequence is synthesized)
ggagttgaagtctctctgcggggccaggatggcgaggaactggaaccctggagcctgtcatgttactccaaggctgactagtcccagtccccagtgagaagcaaggagaacctgatacag

SEQ ID NO: 839607 - DNA, 120 bp, Artificial Sequence
  ENSG00000232655_2 (sequence is synthesized)
acctagacccgtctggctttgggagtcagaggctcggcttcaaatcccagctccaccttggtcacctgcaggaccctgagccgtagaggattaacccagtcggcgtgcagggggcgtggc

SEQ ID NO: 839608 - DNA, 120 bp, Artificial Sequence
  ENSG00000232655_3 (sequence is synthesized)
ctgtgcctcactgcaggtacccctcctgtccctcccgcagcactgatgacaggccggctgtgctgggcaccgagaatgcaccggccctgctctcgcagggcccacagaccagggagggag

SEQ ID NO: 839609 - DNA, 120 bp, Artificial Sequence
  ENSG00000232655_4 (sequence is synthesized)
gaagatcataaataaatgaagtgagcaaggcaccgtgcatgtattctaccagtgtctacagagcccatgctctgagccaggcactagtctagtaaataaacatcgctaacgtgtttcaga

SEQ ID NO: 839610 - DNA, 120 bp, Artificial Sequence
  ENSG00000286774_0 (sequence is synthesized)
gaagggggcagggaaatgggacgatgaccagatgtggcccatggcaaggccgtgcattgtgaagggaggaggagggtctgagatccgggagccctgcagagagtttgctgaagagtgaag

SEQ ID NO: 839611 - DNA, 120 bp, Artificial Sequence
  ENSG00000286774_1 (sequence is synthesized)
aaaggacggcgttagtaatgggatgagggatactggagtccgaattaacatagcacacagagagatattcaggaaaatacatcatatcttgcacttgggtggaaaagagcagaaatcctt

SEQ ID NO: 839612 - DNA, 120 bp, Artificial Sequence
  ENSG00000286774_2 (sequence is synthesized)
ggttaacaggattatacgcaatggtgcagaaagcattctctaaagaaaaatcagagaggaagaaacactgcatggagaatccaagaaacactctaagaattgaagttaaaatgtcggagg

SEQ ID NO: 839613 - DNA, 120 bp, Artificial Sequence
  ENSG00000286774_3 (sequence is synthesized)
ttttgggtggtcccaggggaccatcccaagtttgaggaaagttggcaatggaaaaaggagcatctgataggagcagtcagtgaagtccttggttcttacagaggcagagagcatgctgtt

SEQ ID NO: 839614 - DNA, 120 bp, Artificial Sequence
  ENSG00000286774_4 (sequence is synthesized)
caggcgcagatgctggcgttggacacacccagatgtcagtgtgaaaagaaaataaaattccgggaccccaaactcaatacaccaaagggaaaaggaaagcttggaagctgagtcacacaa

SEQ ID NO: 839615 - DNA, 120 bp, Artificial Sequence
  ENSG00000286774_5 (sequence is synthesized)
aaaatcggtcttttgtttctaaatagacagctacaagataaaaggacacatgtctctccaggtggcctccctcaccttgacagtgtgaattaacagcttatcttcatggacatgggacaa

SEQ ID NO: 839616 - DNA, 120 bp, Artificial Sequence
  ENSG00000286774_6 (sequence is synthesized)
gaggagactggaaatcatctcccacaccaccctctccaagacaaattcatatttaacttctacttctgctctgttgactttatcctatgtaaagtacagatttactgagcacgagacaaa

SEQ ID NO: 839617 - DNA, 120 bp, Artificial Sequence
  ENSG00000238272_0 (sequence is synthesized)
cagaggctctgaaggagaaggcaggagctgtggtggggcctggagagatgctgtgcggaaggagaaaggtctacaggtcacaatgattctggtgtgaagcagaggatgggccagaaagag

SEQ ID NO: 839618 - DNA, 120 bp, Artificial Sequence
  ENSG00000238272_1 (sequence is synthesized)
attcaaaatgctacatcttcaaatcacttcacctgtccctccagtagcccttcaggtccttggcatcttcaactcctgctatcctcacatgtaatgaccctcaaattaagttctacaaat

SEQ ID NO: 839619 - DNA, 120 bp, Artificial Sequence
  ENSG00000238272_2 (sequence is synthesized)
aaagaacaatgcacagttatgcgtctgtttgccagggacagtactaccaactgatatcacaccaaaatccatttccatgcctacttctcattggtttcttgccagcctgctttcgttctg

SEQ ID NO: 839620 - DNA, 120 bp, Artificial Sequence
  ENSG00000238272_3 (sequence is synthesized)
attggctgcctacattatccccacccccaatccagaagaagccaagtgatctagttcttgggaagctttcattttttaacactcaagttactctccctctgatgctgagctgaagctgga

SEQ ID NO: 839621 - DNA, 120 bp, Artificial Sequence
  ENSG00000238273_0 (sequence is synthesized)
gaaacagactgcaggacatccttggctgagggagccctgcccaactcagatcactgtggtcaccggcatggcagagaggctctgggtgtcgggatgttcacaggaggcccaaggactgtt

SEQ ID NO: 839622 - DNA, 120 bp, Artificial Sequence
  ENSG00000238273_1 (sequence is synthesized)
tgagattccattgatcctgaaggcagtggacagctgcttttcaacaggagagtgaagtgctcagactgggggacggttcaaggaattttaaaaatgtgaacgctgagacactttgaagac

SEQ ID NO: 839623 - DNA, 120 bp, Artificial Sequence
  ENSG00000238273_2 (sequence is synthesized)
agtcatgactatggcctttgtgaggggtgacctcttgtgctatccctgttggaagtttgcttcctagaacatctgggaataggattattgctgacgcaagacgataaagaatgaaggaga

SEQ ID NO: 839624 - DNA, 64 bp, Artificial Sequence
  ENSG00000238273_3 (sequence is synthesized)
agccttggtgacagaaggagactcagtctcaaaacaaaaggaatgaagcttaaagtattttcag

SEQ ID NO: 839625 - DNA, 120 bp, Artificial Sequence
  ENSG00000238273_4 (sequence is synthesized)
agtctcaaaacaaaaggaatgaagcttaaagtattttcagaaatctgaggggaacatcacctgtgctttattggttattttgacaagtgaaatagaggacaaactgctttgatttgagtt

SEQ ID NO: 839626 - DNA, 120 bp, Artificial Sequence
  ENSG00000238273_5 (sequence is synthesized)
gatgtctacacatgtgaactcatgagaaacagcaaagcccacaatccacatggacatcatcatcgttcgggaacaggcatggtctccattctttccatgcacacgccccggcttcaaaaa

SEQ ID NO: 839627 - DNA, 120 bp, Artificial Sequence
  ENSG00000238273_6 (sequence is synthesized)
gtaacttgcccagtcacatacctggcacggagctaagccaagcttcgagctcaagtcctcctgatgcgaaagttatttccactgaaccagcccaggcaaaatcctggtcgggtctgtgtt

SEQ ID NO: 839628 - DNA, 120 bp, Artificial Sequence
  ENSG00000238273_7 (sequence is synthesized)
actctttgctttcaaaacagatagccttgaggagatgtgtgtgtgtgttcatttaaaaaaatccagaaacgaccaaactctggcaactttctagaacatattttgtacctaaatgaatgt

SEQ ID NO: 839629 - DNA, 120 bp, Artificial Sequence
  ENSG00000238273_8 (sequence is synthesized)
ggctcagtattgcctttgtttagactttgaataaaattgaacaaatcattagaagccctatccacccaaaacagtaatctgcctaatttaagaagagatggagattttattcatgttatc

SEQ ID NO: 839630 - DNA, 120 bp, Artificial Sequence
  ENSG00000238273_9 (sequence is synthesized)
actgttagaatgctgattgtggaagaaatgcattaagaataaattttgtgtggaaaacaccatggctgatattaaaagtagaattaccatatgattcagcaattgtacttttggatatat

SEQ ID NO: 839631 - DNA, 120 bp, Artificial Sequence
  ENSG00000238273_10 (sequence is synthesized)
acccaaaagaattaaaagtaaggtctcgaagatatatttgtacatccacgttcattgaagaattattcaccatagccaaaaggcgagccacctcatagaggactgctcgtttggggaaaa

SEQ ID NO: 839632 - DNA, 120 bp, Artificial Sequence
  ENSG00000238273_11 (sequence is synthesized)
cagaatgttttccatgacccaagagtcactgtctggctgggacaagagacctgaaggagtaggcgccagggagaggggaggagatccttggcctctctctgggaagatagttgcttttta

SEQ ID NO: 839633 - DNA, 120 bp, Artificial Sequence
  ENSG00000238273_12 (sequence is synthesized)
catggtggctgccctgcccagggaggaggcattacgcccagaggggtggcaagttatcagtgacaagagagggaagagaaatacaatttctagaaaatttgccttttgggactgaccttc

SEQ ID NO: 839634 - DNA, 120 bp, Artificial Sequence
  ENSG00000238273_13 (sequence is synthesized)
aagaaaaactgagagagaaatctccaaggtcaacaggaaagcaaagccactagatgtcaccacagccagtgctccggtcattaagtccccagatggaggaaagagcacatcagcatgcct

SEQ ID NO: 839635 - DNA, 120 bp, Artificial Sequence
  ENSG00000238273_14 (sequence is synthesized)
gcacagacatggaaaagctggctaagacatgcacatgggtccaaggcactgcagaattccatttttcctacagttaatatttatggcacaaaaatgcaatagctacagtttaagactgat

SEQ ID NO: 839636 - DNA, 120 bp, Artificial Sequence
  ENSG00000238273_15 (sequence is synthesized)
tcattgacacgtgacacttgaaactgtccctctaaatgtggatattatccacatgttactggactaagcatccatgcaagacttggagaccttctgcaggcgcagcctgtccccccacac

SEQ ID NO: 839637 - DNA, 120 bp, Artificial Sequence
  ENSG00000238273_16 (sequence is synthesized)
cctgctctatcggatcccacctcgcaaggtgaaggccgcattctctcaggacaacctggtctgctatatcccctgggaaccatttcgccttggctcctgccagatgctgccctttccctt

SEQ ID NO: 839638 - DNA, 120 bp, Artificial Sequence
  ENSG00000238273_17 (sequence is synthesized)
caggctggtgtagagtggacacctgaaagtgctccccatcccattcgggttggggcatgcagagatccaggttttgtcctaagaaacaaaagacagagtgccttccacaaagtgcctttg

SEQ ID NO: 839639 - DNA, 120 bp, Artificial Sequence
  ENSG00000238273_18 (sequence is synthesized)
cctgcccagggctgcgttatctcggcatcattccctggggccatctgcactcagctccgcaacgtttctctcagcctacctttatgactgcacacacaagcattcctgagtgaatatgcg

SEQ ID NO: 839640 - DNA, 120 bp, Artificial Sequence
  ENSG00000238273_19 (sequence is synthesized)
tgcagcagttcctaattctaaaaccttctaaaggaaactcttttccctgaagataaatattaacctatgctcacgttcttaagttttgtggtgtacaataactaaaaatactctgtaaac

SEQ ID NO: 839641 - DNA, 120 bp, Artificial Sequence
  ENSG00000181800_0 (sequence is synthesized)
actgccctaacagagcaggtggggaatgttctgtttactccacttgtgcttctatttggccaacttcgcctcttcaattaaaaggacacatgctgttaacgggtgctgtggattacagat

SEQ ID NO: 839642 - DNA, 120 bp, Artificial Sequence
  ENSG00000181800_1 (sequence is synthesized)
gatcgcactctgggcacagtcctctggaaatgcagatgcccgtgtggaggaaattctggcgggagaggagcggcgactcgccgctctgcttggatctcaaggcatgaggttctgggtgtg

SEQ ID NO: 839643 - DNA, 120 bp, Artificial Sequence
  ENSG00000181800_2 (sequence is synthesized)
cctcgcagcctgcagagccatgtggggccttgctgccagacgaggacgggctgaagacagcagctcgtctccagtggacgcctccaagttcccatggaggggtgggcagcatcgcaccac

SEQ ID NO: 839644 - DNA, 120 bp, Artificial Sequence
  ENSG00000181800_3 (sequence is synthesized)
catgatgccttgtctgctgcgggtgggagttttcaggccctgtcatgtgagacccacgggggatccttcctgcgatgtgcagcctccacgactcggcttctccagagtgccagatacaca

SEQ ID NO: 839645 - DNA, 120 bp, Artificial Sequence
  ENSG00000181800_4 (sequence is synthesized)
ggtggcattttatggcagtggtcactgggacccaactcccttctctgtacacagctgtttttttaatttccaggtcagaaaaattatcttcctactttgaactctttctcctttttgcca

SEQ ID NO: 839646 - DNA, 120 bp, Artificial Sequence
  ENSG00000181800_5 (sequence is synthesized)
aaaatgtttctctcttacaatgcagaagcagaacacagctcctgctcttgaaatactggatggatgtttcagagggtattgtgaggcttggagctccagccagtgacattccagccacat

SEQ ID NO: 839647 - DNA, 120 bp, Artificial Sequence
  ENSG00000181800_6 (sequence is synthesized)
ccttctctcctggctccacttcacagaggctggctgtgtctctggactacacctcagagctaatctgctttctggaagggtcgtgtttacttctgctggtgctgtgcatgtaggagacag

SEQ ID NO: 839648 - DNA, 120 bp, Artificial Sequence
  ENSG00000181800_7 (sequence is synthesized)
ctgtggccagccctgtttccctggggaggtggcagaggcggtaccatgagcaagggatgcagatgctcaagggggaccagtcaggggacacggggagggtttggcctctccagccagggg

SEQ ID NO: 839649 - DNA, 120 bp, Artificial Sequence
  ENSG00000181800_8 (sequence is synthesized)
ctcgccacctccatggtataaacatccatgtgaacaaaaaagttctaacaagtaccagcacactgagaatattttaaaccacaactatcgtggaaaatctgggagggtggttcctaggtc

SEQ ID NO: 839650 - DNA, 120 bp, Artificial Sequence
  ENSG00000181800_9 (sequence is synthesized)
cagggtggaaaagtagctgaaaacctggtagggtttgaagaacaatcagaggcggccttccacttctgagaacagttcctgtgagtcacctgatgttgttctagattaattctatcaaag

SEQ ID NO: 839651 - DNA, 120 bp, Artificial Sequence
  ENSG00000181800_10 (sequence is synthesized)
gtgaagaaagtcaagttgaataaaatgcttccacttaaaagaatagggcttttccttgaaatggtccactggatcgaccatttcctctcatttattattattatcatctccattcccatg

SEQ ID NO: 839652 - DNA, 120 bp, Artificial Sequence
  ENSG00000181800_11 (sequence is synthesized)
catgctatttagacaaggaaggctggaagcaagtgacaggtgcggcagtgcgcagcaaggcctctgcacctggcccgtcagtagggccggcacgcagcctgactactgagtttcttctgc

SEQ ID NO: 839653 - DNA, 120 bp, Artificial Sequence
  ENSG00000181800_12 (sequence is synthesized)
ctcattcctctccagaggccctcaacttacaatagagacccaggagctgggagatgactgaatctgttaacatgacacagaaggactaacccataaacatgagcgtgaatgtcttttgtt

SEQ ID NO: 839654 - DNA, 120 bp, Artificial Sequence
  ENSG00000181800_13 (sequence is synthesized)
gggggactaaggagatgacactgaaaaggagaatcacaagccaagtgccataagcagaccacattccctgcaagctgccctgctaggctttatcccaaatcaaagaaaaagggagaatgt

SEQ ID NO: 839655 - DNA, 120 bp, Artificial Sequence
  ENSG00000181800_14 (sequence is synthesized)
cttaatattctcacagatttgtaaccacttcactggggtaagttttcctttgtatagatgacggattatccttctaagctgcaagctgataaatgagaagctaagtataaaatatctaga

SEQ ID NO: 839656 - DNA, 120 bp, Artificial Sequence
  ENSG00000181800_15 (sequence is synthesized)
actaaggtagatgaagatgtctatatgtgcactgggtgtcacttatatatctgcctgtgttattaagggcacaaaggttgtgtggggctgtgtaaactatagatattaggaatacagatt

SEQ ID NO: 839657 - DNA, 120 bp, Artificial Sequence
  ENSG00000181800_16 (sequence is synthesized)
aaaacagtaatttcacaatgcaagtagtgccaagccacgaaaatatgcctggagcatcttctcttttctctacttcacagaaaatatttccatagacacttttcaccaggcatctgcagc

SEQ ID NO: 839658 - DNA, 120 bp, Artificial Sequence
  ENSG00000181800_17 (sequence is synthesized)
tgtttttttttttttaaacaatcataattttaagcactatatggtaagccatttggaagccattcgaattatgcattaaaacaaggaaaaataagatgccacttgacatacactgaaaca

SEQ ID NO: 839659 - DNA, 120 bp, Artificial Sequence
  ENSG00000181800_18 (sequence is synthesized)
cataaaatcagatacagactcttgggtggaaaaagtatgttcttcaacttagttcagatgttaacatataaaacatgctcagggaaccctgaaaaaatccagaggtgaacactctgatgg

SEQ ID NO: 839660 - DNA, 120 bp, Artificial Sequence
  ENSG00000181800_19 (sequence is synthesized)
tcaatcacatgtgttccttcttctgatctggatgattcttacatttttagggcgctgtactgttttttagccctttgactcattaatgtatcagggaataaaaaggatatcaaactcaaa

SEQ ID NO: 839661 - DNA, 120 bp, Artificial Sequence
  ENSG00000254575_0 (sequence is synthesized)
caggtatctaatttatatgaagcaccctggagtcaatgtctctttgtactgttatttgtcaaatgattcaagcactgctttaaagtatatgtgaggttactagtcaatcttaacgctcta

SEQ ID NO: 839662 - DNA, 120 bp, Artificial Sequence
  ENSG00000254575_1 (sequence is synthesized)
aatctgcatgctatgctacgcacatttttttcctctaagcacatgaaattctaaattatatttgcctttgatatttttatttttctttctttaaggaatatcacgggaaagcatgaagct

SEQ ID NO: 839663 - DNA, 120 bp, Artificial Sequence
  ENSG00000254575_2 (sequence is synthesized)
ggacatcaaccaggctgaaaccttggcatcatacctggcacctgctggatgcttaataagtacttgtggactgagtgactctcatgccttacctctgcagtgtagacaatagtacccatg

SEQ ID NO: 839664 - DNA, 120 bp, Artificial Sequence
  ENSG00000254575_3 (sequence is synthesized)
cttgctacatcacggaggacttgttaagcattattcaattatgaatctttagctagtctacatgtcatagattctaatattgatgttttctaccctttaatataagtgaattttaatcca

SEQ ID NO: 839665 - DNA, 120 bp, Artificial Sequence
  ENSG00000254575_4 (sequence is synthesized)
tccattttatagtacatcttgaaattatatatataatttccttagtggtacctaatgtatcttccaatcaataattttcctgatttattgaaaaacggtattaaataaatgtaattacaa

SEQ ID NO: 839666 - DNA, 120 bp, Artificial Sequence
  ENSG00000251136_0 (sequence is synthesized)
tgataaaccctgtcatagtggagcaagttcaggtgtttaaccgctgttatgggggatctgccttttctccctcttctttcttacttccataagtatgtatgtgcagagattgaaaaataa

SEQ ID NO: 839667 - DNA, 70 bp, Artificial Sequence
  ENSG00000251136_1 (sequence is synthesized)
tatccttcgcctcccaggttgttggcttccatcaggggtggtcatttccaatcagacacctaagaactcc

SEQ ID NO: 839668 - DNA, 120 bp, Artificial Sequence
  ENSG00000251136_2 (sequence is synthesized)
atcaggggtggtcatttccaatcagacacctaagaactcctgctaatgggcaatgatggaggcacattctagatggaggcacattctagaaacgcttgaaactgtgtgttgctttggaca

SEQ ID NO: 839669 - DNA, 120 bp, Artificial Sequence
  ENSG00000251136_3 (sequence is synthesized)
ggggcaccggggtctgctttccgactcccttccgactccgcgcctgcgcaggaagcgatttggggagtgttgtgaattccgagggctccacacttaagaggttgtacactcacctgtcta

SEQ ID NO: 839670 - DNA, 90 bp, Artificial Sequence
  ENSG00000251136_4 (sequence is synthesized)
cttttttcttaaaaagtactcagaagacttttctatccattcattctgttaacgcgcgtcagtgtgaagagaccaccaaacaggctttgg

SEQ ID NO: 839671 - DNA, 120 bp, Artificial Sequence
  ENSG00000251136_5 (sequence is synthesized)
caggtagctttgaacacatggtaaggaaatacattcatcttttcactgagaactgctcacctaattgcttggtacagtcatgttcaatgatatgtagttgattaaaaaatgacaaatact

SEQ ID NO: 839672 - DNA, 120 bp, Artificial Sequence
  ENSG00000251136_6 (sequence is synthesized)
agccatttccaggaaacattgcagcgttataagagaaattatagactatttgttgaagctcagcatgtccatctccctgctttgaagaaggcaagcttcattaaaaccaacatcttactt

SEQ ID NO: 839673 - DNA, 120 bp, Artificial Sequence
  ENSG00000251136_7 (sequence is synthesized)
ggcctaaaacatctttggagtaggagatttatggcctttctgggaaagtagttctaatttttataaaccttagaattaagaagttcttttgtaaatacaattataattctttcttctcga

SEQ ID NO: 839674 - DNA, 120 bp, Artificial Sequence
  ENSG00000251136_8 (sequence is synthesized)
cacatggcaagagggctttgaagatgtgattgagtcaaggatcttgaatggggagattatcctgaattattcagctggacccagtgtaatcacaaaggtttttcaaagatggaagagagg

SEQ ID NO: 839675 - DNA, 120 bp, Artificial Sequence
  ENSG00000251136_9 (sequence is synthesized)
cagaagagccagaaaaggatatgtgacaatggagtcagtgtcagagttggagtgacgtgatgtgagaaggattcaacctgctgtttctggctttgaggatgaaagaaggggccatgagcc

SEQ ID NO: 839676 - DNA, 120 bp, Artificial Sequence
  ENSG00000251136_10 (sequence is synthesized)
aagcaatacaggtggcttctttcaagaagttggaaaaggactgcatcattgcttacccaacatgactcagcctcggtattgccactgactcacggagctcctaatagaggagaattagtg

SEQ ID NO: 839677 - DNA, 120 bp, Artificial Sequence
  ENSG00000251136_11 (sequence is synthesized)
tcacagatcgactggaaaaccaatccacatgaagccaggaagagaaatgaagctgctgttgctgaatccatagctggccttaatgatgctggctaggaaagacggcccattctgggggag

SEQ ID NO: 839678 - DNA, 120 bp, Artificial Sequence
  ENSG00000251136_12 (sequence is synthesized)
tgtcttcctgttttatatttatttacctaaattgttttggaaagactcagaggtatagagacatgcctactttttgcaaaaatcatcacactgtcatggaggtagtccaggctatggggc

SEQ ID NO: 839679 - DNA, 120 bp, Artificial Sequence
  ENSG00000251136_13 (sequence is synthesized)
tcttatttgttggtgtcttgggcaagttgcttgacctctgatcattgtttgcttattcttatatggcccctgtatttcagactcactctgtgtcaggcatttgtttacctttgtagcaag

SEQ ID NO: 839680 - DNA, 120 bp, Artificial Sequence
  ENSG00000251136_14 (sequence is synthesized)
ctcaggaggaaaataccattgcccttgttttacaggtgatgaaactgtacgttttccaaggacacagtgctagtaagtaatgaatgtgaaattttaactgtttcaatctcttctcagagc

SEQ ID NO: 839681 - DNA, 120 bp, Artificial Sequence
  ENSG00000251136_15 (sequence is synthesized)
cagtgctaactactctcctaaacttcctctcatctgtaaaatatggatgataataacacctcttacagagttgttgtacatattaaataatagaactgtgaaatgtgtagtacttcatta

SEQ ID NO: 839682 - DNA, 120 bp, Artificial Sequence
  ENSG00000251136_16 (sequence is synthesized)
ggcctgcggccgggatcctccgcccgggtcgcgcagcggaggccgagggctgggacgggcggctgggaagtgggaaagggagctccttttgtcttctcttcccatcccccaggtttggga

SEQ ID NO: 839683 - DNA, 120 bp, Artificial Sequence
  ENSG00000251136_17 (sequence is synthesized)
aagttttccttttgggaaagcccctctcttcagcctgctggcgggtgtcggattggttagcgaccaccggcccccgcctcccccaacaggattctcctttgggccacaggtcttccggaa

SEQ ID NO: 839684 - DNA, 120 bp, Artificial Sequence
  ENSG00000251136_18 (sequence is synthesized)
actccagatcttgacatctatggttcttcattgttcaggacacagctgaagtattacctttcccaagagatcttacatgacaataaccacccctgtcctatgttttggtatcaagatgaa

SEQ ID NO: 839685 - DNA, 120 bp, Artificial Sequence
  ENSG00000251136_19 (sequence is synthesized)
tgttttggtatcaagatgaagctgacctcatagaatgagttgaagagtagtccctcctcctcactttcttggaacagtttctgtaggaatggaaccagctcttctttgtacatctggtag

SEQ ID NO: 839686 - DNA, 120 bp, Artificial Sequence
  ENSG00000251136_20 (sequence is synthesized)
atttattactgattcaattttggagcccatcattggtctgttaagggaatcaatttcttcctggctcagtcttgggagggtgtgtgtgtccaggaatttatcagtctcttctagattttc

SEQ ID NO: 839687 - DNA, 120 bp, Artificial Sequence
  ENSG00000251136_21 (sequence is synthesized)
tccaggaatttatcagtctcttctagattttctagtttgtgtgcatagaggtgtttttagtagtttctgatggttgtctttatatctgttgggtcagtggtaccattcctttcatcattt

SEQ ID NO: 839688 - DNA, 120 bp, Artificial Sequence
  ENSG00000251136_22 (sequence is synthesized)
ttaattgtgtttatttggatcttctcttttgtcttattagcctagctagtggcatatctattttattaattttttcaaaaaaccaattcctggatttgttgagatctctacaataagcat

SEQ ID NO: 839689 - DNA, 120 bp, Artificial Sequence
  ENSG00000251136_23 (sequence is synthesized)
tacaaaacactgctgaaagaaatcagagaagacacaaacaaatgaaaaaaacatctcttgctcatggataggaagaaacaatattattaaaatggctatactgcccaaagtaatttacag

SEQ ID NO: 839690 - DNA, 120 bp, Artificial Sequence
  ENSG00000251136_24 (sequence is synthesized)
attcattgttattcctatcaaactgccaacaatattcttcaaagaactagaaaaaactattttaaaattcatatggatctaaaaaagagccttaatagccaaggcaatcctaaacaaaaa

SEQ ID NO: 839691 - DNA, 120 bp, Artificial Sequence
  ENSG00000251136_25 (sequence is synthesized)
gaaaaagctggaggcatcacactacttgactttatgctgcaaggctacagtagcaaaaacaccatgtttctggtacaaaaacaggtgcatagaccaatggaacggaataaagagccctga

SEQ ID NO: 839692 - DNA, 86 bp, Artificial Sequence
  ENSG00000251136_26 (sequence is synthesized)
acaggtgcatagaccaatggaacggaataaagagccctgaaataatgccgcacatctccaactatctaggaaatgactctttattc

SEQ ID NO: 839693 - DNA, 120 bp, Artificial Sequence
  ENSG00000251136_27 (sequence is synthesized)
gattgaagttggacactttccttacaccatacacaaaaatcaactcaagacagattaaagacttaaatataaatccgaaaactataaaaaccttgcaaaacaacctagtcaataccatcc

SEQ ID NO: 839694 - DNA, 120 bp, Artificial Sequence
  ENSG00000251136_28 (sequence is synthesized)
tggatgtaggaatgggcaaatatttcatgacaaagacaccaaaagcaatcgcaacgaaagcaaaaattgacaagtggaatctaattaaacttaagaactgcacagcaaaagacactatca

SEQ ID NO: 839695 - DNA, 120 bp, Artificial Sequence
  ENSG00000251136_29 (sequence is synthesized)
acttaagaactgcacagcaaaagacactatcaacagagtaaatagacaacatacagaatgggagaaagtattcgcaaactatgcatctgacagacaaaggtctaatatctagcatctata

SEQ ID NO: 839696 - DNA, 84 bp, Artificial Sequence
  ENSG00000251136_30 (sequence is synthesized)
tattaagcaagacatatatgtggtcaacaagcatttgaaaaagagctcaatatcactcatcataagagaaatgcaaatcaaaac

SEQ ID NO: 839697 - DNA, 88 bp, Artificial Sequence
  ENSG00000251136_31 (sequence is synthesized)
gttgactcaacaattctattactggatatatacccagaggaatataaattgaccttacggtgtttctaccataaagacacatgcatgt

SEQ ID NO: 839698 - DNA, 120 bp, Artificial Sequence
  ENSG00000251136_32 (sequence is synthesized)
acacatgcatgtgaatgttcattgcaacactattcacaattgcaaagacatggaattaacctaaatgcctatcaatgacagattggataaagaaaatgtggcacttatacaccatgaaat

SEQ ID NO: 839699 - DNA, 81 bp, Artificial Sequence
  ENSG00000251136_33 (sequence is synthesized)
tgtctgtggacggaacatggatggagctgacaaaacaaaaaaacaaaaaaattttagcaaactaacacaggaacagaaaac

SEQ ID NO: 839700 - DNA, 120 bp, Artificial Sequence
  ENSG00000251136_34 (sequence is synthesized)
acatgttctcacttataggtgggagctaaaggataagaacttataaacacaaagaaggaaacaacagacactggagtctacttgagggggagggtgggaggagagaggggaacagaaaag

SEQ ID NO: 839701 - DNA, 120 bp, Artificial Sequence
  ENSG00000251136_35 (sequence is synthesized)
ggaggagagaggggaacagaaaagctaactatttggtactgggcttaatacctggatgatgaaataataagttcaacaaacccccgtgacacgtgtttacctgtgtaacaaaccatatgt

SEQ ID NO: 839702 - DNA, 120 bp, Artificial Sequence
  ENSG00000251136_36 (sequence is synthesized)
agtaattttgtcgctagttactgtattactggaaaatgtattcctaggctttaagatttgggaagcgtgtgagtctaacttctcaaacagaatttgacaaggacgtagcagtgttttaaa

SEQ ID NO: 839703 - DNA, 120 bp, Artificial Sequence
  ENSG00000251136_37 (sequence is synthesized)
aagtcagggaaaggaaagaggtgtgttcagcattcctgccccatcttaacatattctttttctcgtcttaacagtggtaatattttatgttattttggtttgatttttgtttgtggcata

SEQ ID NO: 839704 - DNA, 120 bp, Artificial Sequence
  ENSG00000251136_38 (sequence is synthesized)
tggctctgctgtcctgtgactctaagtagaagagaaaatagtgccaataattcttcatggagatgcacctctctcaagtcttgaacaatgtttgaggaaaagtgctttcagctgggctga

SEQ ID NO: 839705 - DNA, 120 bp, Artificial Sequence
  ENSG00000251136_39 (sequence is synthesized)
cttcctggtgtggcatcatcaaatccctgttgctcaaacccactaattagctcattcttatctacaagtagcaggggccctaaagctctctgagaagatctcatactgtgtctcctacat

SEQ ID NO: 839706 - DNA, 120 bp, Artificial Sequence
  ENSG00000251136_40 (sequence is synthesized)
ttcatcttctataatctcttattcttagagacagaaagatggttaaaagacatcacttcatttctttctctggatttggaaagagttatatattgggattatgctgttagtttacacttg

SEQ ID NO: 839707 - DNA, 120 bp, Artificial Sequence
  ENSG00000251136_41 (sequence is synthesized)
cattgtttaaattagaggaaaggttattttgtgcagaacaaataaaaattactctttaactacctttcagaatatcccaacttttaacataagctgttttgtaaaggctggttgtagtga

SEQ ID NO: 839708 - DNA, 79 bp, Artificial Sequence
  ENSG00000251136_42 (sequence is synthesized)
agcccttaaaaaattacttcttggagtgggttgtatttaaattttttaaaaaccaccaatgaagtggttaagaatatag

SEQ ID NO: 839709 - DNA, 120 bp, Artificial Sequence
  ENSG00000251136_43 (sequence is synthesized)
aattttttaaaaaccaccaatgaagtggttaagaatataggctttagcaacagggctacctgagtttattctcagttctttattttaccagctctgtgatcttgagtatattacttactg

SEQ ID NO: 839710 - DNA, 120 bp, Artificial Sequence
  ENSG00000251136_44 (sequence is synthesized)
tttttacctcagttacctcatttataggatcctatctcatagggacttttgaggagtaaatgaattcattcaagttaagcactttgaacagtgccttagtaattaacaattagctaatgt

SEQ ID NO: 839711 - DNA, 120 bp, Artificial Sequence
  ENSG00000251136_45 (sequence is synthesized)
tactttcccaatgttatgtgggttagtaagtggtaaaacctaccagattcccattctgtctgacaaagtctagtctcttagctactgtgtgtcgctgcctgagtgtgaaatctaaagcaa

SEQ ID NO: 839712 - DNA, 120 bp, Artificial Sequence
  ENSG00000251136_46 (sequence is synthesized)
ttttacagtaatttatgtggcccctcaaaacaaacaaatcaacaaaattaaaaagtctccctttataataaatggtaccagtacatgaaaatactggggatgcctttttctcagggactt

SEQ ID NO: 839713 - DNA, 120 bp, Artificial Sequence
  ENSG00000251136_47 (sequence is synthesized)
ggctgatttggcataaccttatctctgagggaaaacaagttttgtgacttgttccactctgaatttcaagagaggaatatgtggaaggtactgagtgcttttgacatatagagaacaaag

SEQ ID NO: 839714 - DNA, 120 bp, Artificial Sequence
  ENSG00000251136_48 (sequence is synthesized)
cgatgactcacttaaaccctgatagtaggggcaccatataaattattatatctaaagggagtcaggtcaaagaagaaatcttgcaagaatctggagggagatctgttgtctaaaagctta

SEQ ID NO: 839715 - DNA, 120 bp, Artificial Sequence
  ENSG00000251136_49 (sequence is synthesized)
ttaggtgactagggtatcggttttgctagtgtttgtttttatcttgttttttcccttcctcagttccagcaggcattttagtgatctcttgaaacacgttttgactctacttggtgattg

SEQ ID NO: 839716 - DNA, 120 bp, Artificial Sequence
  ENSG00000251136_50 (sequence is synthesized)
gctgtgttgcttttataagctctgaaagtttaagaatttaggaagctaatgactgtcttaaattacagttaaatctaattgataaaatcctgggacattgaacgattgattttagtattc

SEQ ID NO: 839717 - DNA, 120 bp, Artificial Sequence
  ENSG00000251136_51 (sequence is synthesized)
gaggttatattccacttcttctgactacaccaccaccatcaatctccttctctgaactcttggatcattacttcaacctgaaacaactcatcaggtatctataaaggcagaatagttgcc

SEQ ID NO: 839718 - DNA, 120 bp, Artificial Sequence
  ENSG00000251136_52 (sequence is synthesized)
aagaagttggaaaagaagagaaaatagtgccaataattcttcatggagatgcacctctctcaagtcttgaacaatgtttgaggaaaagtgctttcagctgggctgatgagaacaccttgg

SEQ ID NO: 839719 - DNA, 120 bp, Artificial Sequence
  ENSG00000251136_53 (sequence is synthesized)
cctgaaattaggaaattactgtaagggactggaatgacacacaagaaaagattacatcatagcagggagactagccagttagaatggggatttctttacaaacactagactggactatgg

SEQ ID NO: 839720 - DNA, 120 bp, Artificial Sequence
  ENSG00000251136_54 (sequence is synthesized)
attataatttacctagtgttaatagttgcagtcatacattaaggacaatatgtatgttctttagttttttgtcactgagcagaggtagaaacagggaaacaacaaaggccgaataatttc

SEQ ID NO: 839721 - DNA, 120 bp, Artificial Sequence
  ENSG00000251136_55 (sequence is synthesized)
cagccattgctgctttgtttgcacggagccctttgaaatgtgaactaagaatatttctcagaaggtttttaggtgattcatatacacagtaaagtttcagaagtgctatattcgagggca

SEQ ID NO: 839722 - DNA, 120 bp, Artificial Sequence
  ENSG00000251136_56 (sequence is synthesized)
tatggaaacccatggcttttctgctagaggattgtcaaaagtccagaatttcataactaaataccatgaatttagtatagtagagcacagaactaaaggctgtcttgtggctgcaaagag

SEQ ID NO: 839723 - DNA, 120 bp, Artificial Sequence
  ENSG00000251136_57 (sequence is synthesized)
ttgacttcacatagcataaactatagtctaagacagtgacttagacataagagagaatagaacttggtaactgggattgttttacagcgtgatcatgtatatttctatattattctaaaa

SEQ ID NO: 839724 - DNA, 120 bp, Artificial Sequence
  ENSG00000251136_58 (sequence is synthesized)
atatttattatatttatataaaaattgttacaaccgtgtacaagtgtgcataaataaatagtgtatttatgtagtctttatttgaatgtcaggccagttagagaagctagacatgtataa

SEQ ID NO: 839725 - DNA, 120 bp, Artificial Sequence
  ENSG00000251136_59 (sequence is synthesized)
ccagtttagtcttaacaatcaagttcagaaaataatatgtagacttccacctagttccttttctgaataatattatagacttaaggaagctaataagagtccaagattctctgagtgcct

SEQ ID NO: 839726 - DNA, 120 bp, Artificial Sequence
  ENSG00000251136_60 (sequence is synthesized)
ttgtgaattatttcatctgattcatgtatgtaccttcatataatggcttttaatattgaggaatatttggagattaaaagattagagtaattctgagctcattaaattgtagattgtcat

SEQ ID NO: 839727 - DNA, 120 bp, Artificial Sequence
  ENSG00000251136_61 (sequence is synthesized)
ttcttatgaggatttacttttctggtacaacatgttcttatcactagttataatgtatttttttacttttggcttagattttgagccctctattcatgacatatcaaatgtagttcttta

SEQ ID NO: 839728 - DNA, 120 bp, Artificial Sequence
  ENSG00000251136_62 (sequence is synthesized)
gatatgctgctttctaattaggaagcagaatgtgattgcctactattctctagccacgtacctactagtgaatatataaaggatggaattcaggccgtggtttatgaaattcaggctgtg

SEQ ID NO: 839729 - DNA, 120 bp, Artificial Sequence
  ENSG00000251136_63 (sequence is synthesized)
tttttgagtacttccaagtatgtttcaagtaacttggttatggttttgaatgactaggaaaatgctttgctttttttgaaagggaaattgttcaaaaatgagattcaatggaaaacacag

SEQ ID NO: 839730 - DNA, 120 bp, Artificial Sequence
  ENSG00000251136_64 (sequence is synthesized)
agggtgctaaaaatgcagagacattgtataaacctataagaaattttacatggaaccagaattttgatgccccttaaaaggaaaccaatgagattccttattcattagtactttgaaagt

SEQ ID NO: 839731 - DNA, 120 bp, Artificial Sequence
  ENSG00000251136_65 (sequence is synthesized)
cattagtcactgttcccactcccaccctggcaccaaggaaaatgtggatgtttccacctttcccacccaggcctatttagggcatacaacccttcctgaatttcctgcagtacagttgag

SEQ ID NO: 839732 - DNA, 120 bp, Artificial Sequence
  ENSG00000251136_66 (sequence is synthesized)
atcacactgtagcctctaacaagcatttaccagagattcagcgatgacaacagagaactacaatataatgagtaacagataaccactccatagatgttgcatgcatttccgagtgtatac

SEQ ID NO: 839733 - DNA, 120 bp, Artificial Sequence
  ENSG00000251136_67 (sequence is synthesized)
agcccattctcaccttacaggagaaccaggaaaagagaacaatttgggaaggtctcttcatttaatttttcccacactgctgcctcttctatctttggcttgtttcttcttctcacttag

SEQ ID NO: 839734 - DNA, 120 bp, Artificial Sequence
  ENSG00000251136_68 (sequence is synthesized)
gaggaagtggttctcagataattgactaatcacttcttcatggtcgtgaactcaaggacttacctgttatgaggggagaagcataataaagattacatcatgtgaacttttgaaataaaa

SEQ ID NO: 839735 - DNA, 120 bp, Artificial Sequence
  ENSG00000251136_69 (sequence is synthesized)
tgcccgaagacataagagagacccttaccactgtcacactcaaaaggaaagcttagtagctacagagatttaaaaagcaagcaaacaagcaaccaagcaaacaacaaagacctgaagaaa

SEQ ID NO: 839736 - DNA, 120 bp, Artificial Sequence
  ENSG00000251136_70 (sequence is synthesized)
attccagaataatcctcaacctgtgctttcacatgctaaattttcataatgagaaagataaactgtgtatcttgtggtgtcagtggtcagtgtggtgatagtagttgtggtttgggctgc

SEQ ID NO: 839737 - DNA, 120 bp, Artificial Sequence
  ENSG00000251136_71 (sequence is synthesized)
ttttttccttgtttattttttccaaattttatttgggaaaatttctgctgtttccattgtgaactaaagttacatatactggatgatataactttaactcctaagagtatgtttggctat

SEQ ID NO: 839738 - DNA, 120 bp, Artificial Sequence
  ENSG00000251136_72 (sequence is synthesized)
gtttttggaattaggtattatgcatgccaccttgtggccattattaagaaaacacctaacatgaagacgagaaacaggatcattagtgagagcagcttgagcttggagcagtactttccc

SEQ ID NO: 839739 - DNA, 120 bp, Artificial Sequence
  ENSG00000251136_73 (sequence is synthesized)
aagtctgtttctccaacagcatccttagaacccttagaacctggatatcacattttagtgggaggagacagacaataaataaaacaaagtatagtaagtgctctggagaaaagtaatgca

SEQ ID NO: 839740 - DNA, 120 bp, Artificial Sequence
  ENSG00000251136_74 (sequence is synthesized)
aagaagagggccagaaagtatcaaaaagtttgaaattacaaataaggtactcttggaagacctcactaaggtcacatttgagcagagatctgaacagcatgagagacaactgggggtggg

SEQ ID NO: 839741 - DNA, 120 bp, Artificial Sequence
  ENSG00000251136_75 (sequence is synthesized)
ggggggcagaataatgtttcagatatgtacattgcaactgcaaaggcctgagacaggaatttgcctggcctgttccagcttagcaaagaaagaggcctgtgttaatgatactcagagagg

SEQ ID NO: 839742 - DNA, 120 bp, Artificial Sequence
  ENSG00000251136_76 (sequence is synthesized)
aaggaggcaatagtagaacatgaagccagaaaagtgaccagatgcaggagtgactaaggctttgtagactgctgtatagactctgagggaaatgagcagtcattgatgggtttttcgcac

SEQ ID NO: 839743 - DNA, 120 bp, Artificial Sequence
  ENSG00000251136_77 (sequence is synthesized)
agaaggatcttggtgtgttttaaaaggaacattctgtattctatgttgaaaacagactgaaaagcacaagagaaagaacaggaagagcaattaggaggctgtggtagattattattcagc

SEQ ID NO: 839744 - DNA, 120 bp, Artificial Sequence
  ENSG00000251136_78 (sequence is synthesized)
aaatattcaccctactgtcctccccataagatttccccaggccaccatcactggatttggctatttgacttgctgtagtcaatggaatgtgagtgaaaagtgactctgtaccagtgggga

SEQ ID NO: 839745 - DNA, 120 bp, Artificial Sequence
  ENSG00000251136_79 (sequence is synthesized)
ggcaaagccttaaaagacccagcaaatttcttccagcccttttgtgcttctgccaaaagaatactgtgagcaatcagtgcccttaagcctgggcctcagaacgagagatatggagcaaac

SEQ ID NO: 839746 - DNA, 120 bp, Artificial Sequence
  ENSG00000251136_80 (sequence is synthesized)
ctgaacctgaacagcagcctacaatcaagccaggatgaccctgcaaagcccagccaacgatagcaaagccacagcagacttgtagaccaatgagcatgaaataaattgcattgaaagcta

SEQ ID NO: 839747 - DNA, 78 bp, Artificial Sequence
  ENSG00000251136_81 (sequence is synthesized)
atccacttgatgcagagctcagttcaattcctgggtatccatgttaactttgtgtctcattgatctgtctaatgttga

SEQ ID NO: 839748 - DNA, 73 bp, Artificial Sequence
  ENSG00000251136_82 (sequence is synthesized)
tagtaaactatcgcaagaacacaaaaccaaacaccgtatatgctgcctcataggtgggaattgaacgatgaga

SEQ ID NO: 839749 - DNA, 120 bp, Artificial Sequence
  ENSG00000251136_83 (sequence is synthesized)
aatttgacttcatgggtgctgtgttacctattggtcacagtttgtcatttactaagtaaaaagagagagattccgataatggaaagagtagaagactgagtttaagttttcagcactact

SEQ ID NO: 839750 - DNA, 120 bp, Artificial Sequence
  ENSG00000251136_84 (sequence is synthesized)
atgaaactgtacgttttccaaggacacagtgctagtatgaatgaataataatggggttgtctatgaagaggagagaatgaaaaagctcagcttaccaagatgaatgctcctctgatcttg

SEQ ID NO: 839751 - DNA, 120 bp, Artificial Sequence
  ENSG00000251136_85 (sequence is synthesized)
ggaaacattgcagcgttataagagaaattatagactatttgttgaagctcagcatgtccatctccctgctttgaagaaggatgttgggaactgactgtaaggaagacaggattggagaac

SEQ ID NO: 839752 - DNA, 120 bp, Artificial Sequence
  ENSG00000251136_86 (sequence is synthesized)
ttcctctctcgcagccccggccctccccccggcgcgcgcagcgaccagctccggccgcccgagctcctccctccccaaacttcgcaggttacgtcagcggcggacggcaaggcggggaga

SEQ ID NO: 839753 - DNA, 120 bp, Artificial Sequence
  ENSG00000251136_87 (sequence is synthesized)
cacttcttctgactacaccaccaccatcaatctccttctctgaactcttggatcattacttcaacctgaaacaactcatcaggcagaatagttgcctactgccccaaccccaccaaatgt

SEQ ID NO: 839754 - DNA, 120 bp, Artificial Sequence
  ENSG00000251136_88 (sequence is synthesized)
gggttctcacctagaactgctggaaagcaacccagccctactgacaccatgattttagctcagtgagactctgtccagatttctgacctctagaactataagataataaatttgcattgt

SEQ ID NO: 839755 - DNA, 120 bp, Artificial Sequence
  ENSG00000251136_89 (sequence is synthesized)
tttaagccactaagtttgtggtaatttgataaagcatcaacaaaaaatgaacacttcttcccagcaggactccttttgaagaccagttctgtatacatcatcgtatccagtgtaagtact

SEQ ID NO: 839756 - DNA, 120 bp, Artificial Sequence
  ENSG00000251136_90 (sequence is synthesized)
ggatgtaaatatggatcaataatttggaatttactgaggtttccagtggtgaggcacaataacttgtaatttgcaattttttgtagtggagaagagataaccatgagtcagctctctttc

SEQ ID NO: 839757 - DNA, 120 bp, Artificial Sequence
  ENSG00000251136_91 (sequence is synthesized)
tgcatacacatttccattgcagcacaagttaaagatactggagaaattccccatctcactaccaaggacagacctaactgacaataaattcatctatagcccagtcagggttttcccctc

SEQ ID NO: 839758 - DNA, 120 bp, Artificial Sequence
  ENSG00000251136_92 (sequence is synthesized)
attgtccctgccttccacaattgcagctagttttcaaaaagatacataaaaatagctaccatgaatttagcacatggtatgtgccaggagttatgctaaatgctctgcgtatgttatctt

SEQ ID NO: 839759 - DNA, 120 bp, Artificial Sequence
  ENSG00000251136_93 (sequence is synthesized)
tgcccgtgctttcaccgtgcaatgtgcctgctcctgctttgccttctgtcatgattggaagcttcctgagacctccccagaagcatatgccaccatgcttcctgtacagactgcagaact

SEQ ID NO: 839760 - DNA, 120 bp, Artificial Sequence
  ENSG00000256504_0 (sequence is synthesized)
agtggttgactgaaacgtctttatgtggcacatgaccgtaactcaaagaagacaaagcttgtgaaaatattttatatactgaagtgtaagcttacgaaaatttcagagaacctagtataa

SEQ ID NO: 839761 - DNA, 120 bp, Artificial Sequence
  ENSG00000256504_1 (sequence is synthesized)
tgcatgctcccctcccaagtcctggcaagccactgtgcatgcagacagcccaccccaagggaaaaatcaggggagaagggacatagaccccagaagtatgccaacgtataaaaccctaag

SEQ ID NO: 839762 - DNA, 120 bp, Artificial Sequence
  ENSG00000256504_2 (sequence is synthesized)
taagtcaaaggtcaaatggggtacttgactttcaagtcgcccacttggccctcttcccagtgtatttccttccttttgttcctgctgtgaagctttttaataaactttcactcctgctct

SEQ ID NO: 839763 - DNA, 120 bp, Artificial Sequence
  ENSG00000248505_0 (sequence is synthesized)
agggttttggcttaaagtctgactgtatgagggcatgtcaagaagagctggactgagtgcccatgacctcagggacatcttggaagctatatgtagaagatggaaaagcctctgtcatct

SEQ ID NO: 839764 - DNA, 120 bp, Artificial Sequence
  ENSG00000248505_1 (sequence is synthesized)
ccatcaatttaatctccaaataactacttagaaaagggacagcttactaactccttcattgcccagtactattagctaaaaacattataacaggagattcaaattctacatggtgggagc

SEQ ID NO: 839765 - DNA, 120 bp, Artificial Sequence
  ENSG00000248505_2 (sequence is synthesized)
gtttgaatctgacagcattcatgctcaaatgtccaagccctgcatttctgataccatggaatcacaagcacgctgtgtgatactgtgcagcatttgatcctgcctgacttctgtgtctca

SEQ ID NO: 839766 - DNA, 120 bp, Artificial Sequence
  ENSG00000248505_3 (sequence is synthesized)
gcctatcaacgaagatatttatagctgccttatgccaacgtactttttaaagctgggtaataccagtgtaagatggtcacatttatcttgaaagccgaggtagggtaccatgtgtgctcc

SEQ ID NO: 839767 - DNA, 120 bp, Artificial Sequence
  ENSG00000248505_4 (sequence is synthesized)
agtgcgattggcattagacagagaagagaaaaatggcagtatgatcctctagaaatgcagcaattggaatgaaaaaggagcatgggctggcgtaacccgggagagaaaatgacttgtaat

SEQ ID NO: 839768 - DNA, 120 bp, Artificial Sequence
  ENSG00000248505_5 (sequence is synthesized)
ggcatagcaacctacttctcttcctgcaaatggctggggaaaaagtgtgcttcctggcagataggctacaatctactgttatttatctggctatttccagcaagttctcttcttatccta

SEQ ID NO: 839769 - DNA, 120 bp, Artificial Sequence
  ENSG00000248505_6 (sequence is synthesized)
gatagcttatctcttcaaaggagtctgtccaaggtgaactcaccatgggccaagaggtcctgcctctgggactgcacatctgattaacatgttggggcttaggggtgggaagggcacagt

SEQ ID NO: 839770 - DNA, 120 bp, Artificial Sequence
  ENSG00000248505_7 (sequence is synthesized)
ttacttagatatatcttgctaggtttaaattttctttctggatacaaatattttttactgttattaaaaaaaccccatgacttcaatttcacaatttttgtagttatttcatgtatttta

SEQ ID NO: 839771 - DNA, 120 bp, Artificial Sequence
  ENSG00000248505_8 (sequence is synthesized)
atagggcaattgggtttctgataattatagtctatttttcctttggaagttgtcatgggaggggttgatgccccacaccctcttgtcctttgcaaccaggtctacttgcacacttttatg

SEQ ID NO: 839772 - DNA, 120 bp, Artificial Sequence
  ENSG00000248505_9 (sequence is synthesized)
caggctgcagcagccttgtgcatgagttgatccctctggtgcccgacttgccagccctctcccatacagagagaggaaaaagtctgaagacacacatatttcccaaattcaatatcttga

SEQ ID NO: 839773 - DNA, 120 bp, Artificial Sequence
  ENSG00000248505_10 (sequence is synthesized)
tatttaagatggcgcagtgctcccgctgttccgaggctcagctaccctgagggaggcagggaattttgatcagcttctgaagaatcacctcatctctccccgcagagagcacagagcaca

SEQ ID NO: 839774 - DNA, 120 bp, Artificial Sequence
  ENSG00000248505_11 (sequence is synthesized)
ggacttcacgttatgtcaacatctcttgcaaaagcccagctcctagagagcaggagccttcccagactgtgtcaaattacctcggggatggagagacttacatggcattaatagaaatca

SEQ ID NO: 839775 - DNA, 120 bp, Artificial Sequence
  ENSG00000248505_12 (sequence is synthesized)
aatggcagagctcgggtttctgatgagtctcctgaggttcagaagggtgagatgacacattcaaggtcacatggctcatttgtgttggagtcagaagtttccagatttcttgacttttag

SEQ ID NO: 839776 - DNA, 120 bp, Artificial Sequence
  ENSG00000248505_13 (sequence is synthesized)
tccaaggagcagtccctgtgcatgtgtcagagttgaacaagccaggaaacatagaaatacgctgtaagaaataatcccaaaattgacgtgatggattaaagatgaaaaaacatgccttgg

SEQ ID NO: 839777 - DNA, 120 bp, Artificial Sequence
  ENSG00000248505_14 (sequence is synthesized)
aatacctaatgggaacattagtctatctctacacccagatcaacatgactgaatatagctttcttaaaaaagcagttgaattcagcaaggcaattattctattgctcaataagacttaat

SEQ ID NO: 839778 - DNA, 120 bp, Artificial Sequence
  ENSG00000248505_15 (sequence is synthesized)
atttggattgattgaatttcctttgctttttattttggagtctatgttcatagcctcaatataagagtgaaaattttcacacagaaacaatacataatccaataaagagccagatacaag

SEQ ID NO: 839779 - DNA, 120 bp, Artificial Sequence
  ENSG00000248505_16 (sequence is synthesized)
atcttgaaagccgaggaaccccctttcctctacaaaactcctaaagaatagataattgtctatatttcttcaaatctttggcatcccggaagtaccttgaataaatcatcaagttttagg

SEQ ID NO: 839780 - DNA, 120 bp, Artificial Sequence
  ENSG00000248505_17 (sequence is synthesized)
ctgttatttagaccatgttggctattactactaaatcatgctgtctgtctccgtggctcttagctggtgagagaagtacatctcaatcatctgtggaagcatatgactggtttgaaaaat

SEQ ID NO: 839781 - DNA, 120 bp, Artificial Sequence
  ENSG00000248505_18 (sequence is synthesized)
ttcccccagtaatcccgatgggcccttctttgggtgggaaccttgacctgggatccttgagagtctctgctggctctcctttccagcctggggagggggaaatactgactctcctcagtg

SEQ ID NO: 839782 - DNA, 120 bp, Artificial Sequence
  ENSG00000248505_19 (sequence is synthesized)
atcatcaaaacaacctgcaaatctgaagcaacattatttattttttaatggatttcgagtcctttgtggatgttttctgagtaatgtttaccaaagcaaatgcattaaagaattaaaact

SEQ ID NO: 839783 - DNA, 120 bp, Artificial Sequence
  ENSG00000248505_20 (sequence is synthesized)
agggttttctagagaaacagccaatagaatgtcctaagatatgcagttggcaagctggagacccaagaagagccaatatttcagtttgagtctgaaggcaggaaaagactgatgtcccat

SEQ ID NO: 839784 - DNA, 120 bp, Artificial Sequence
  ENSG00000248505_21 (sequence is synthesized)
aagtgttggagatacaggggcaaataggatagacctatttcctctctttaccatctagtgcagaaaatagacactgaacaattagttacagggataataaatgaagagtttgcaaagcaa

SEQ ID NO: 839785 - DNA, 120 bp, Artificial Sequence
  ENSG00000256508_0 (sequence is synthesized)
ctgcttaacagcttggattgaagaggcttgtctggggggactgagaccttgcagatcattccaggagccgcctccatccaaggccaacagcttcatcaggccgcaggcctgggagaagcc

SEQ ID NO: 839786 - DNA, 120 bp, Artificial Sequence
  ENSG00000256508_1 (sequence is synthesized)
ctaatagcaatcagatggcgcaagtggaaaatcacggcgctcggcaagcaagctggaaattggcgggctgtggtgcctggtgcctgcgctgctcagcgggaggatgagtcaggagtgtag

SEQ ID NO: 839787 - DNA, 120 bp, Artificial Sequence
  ENSG00000256508_2 (sequence is synthesized)
tgcccagactgggagagatgtgcctctgtgggcatcttgaagggaaatgagaagcggagctgcccctgcacctgcgctgggagctgcctgcctcctgcttgtcctggccatgtgcgaacc

SEQ ID NO: 839788 - DNA, 120 bp, Artificial Sequence
  ENSG00000256508_3 (sequence is synthesized)
tcagcgtggaagagggactctcgcactgctccctgcgcggctcagctggcctcctgggggcagccagctggggcccagctggaacgcttgtttacatggggaggccgggggaggctgaat

SEQ ID NO: 839789 - DNA, 120 bp, Artificial Sequence
  ENSG00000256508_4 (sequence is synthesized)
cccggcgagttccaagtgtaattgcgtttggacacttaaaaggaattgtgtgaagtgggcagaggctctgaagtccaccgccttatttggtgcttctgtggcctatggttgccctgctgc

SEQ ID NO: 839790 - DNA, 120 bp, Artificial Sequence
  ENSG00000256508_5 (sequence is synthesized)
tccctggacgagggggtgggtgtggaccagccctcgtggcccctctgcagccagcaccatcctcagtaaagactacagaagccacaagaaactaatccatggggatggccaggcctgatt

SEQ ID NO: 839791 - DNA, 120 bp, Artificial Sequence
  ENSG00000256508_6 (sequence is synthesized)
acctgaaggagaaggaggaggtggctgctcacgcaacccacaggaaagtgttccaggatcaagaacagcaggtgcaaaggccccgtgatggaaaggattggtgcactaggagaacaaagt

SEQ ID NO: 839792 - DNA, 120 bp, Artificial Sequence
  ENSG00000256508_7 (sequence is synthesized)
gggtggctgcagggcaggaggggagggtgcatgtgcaggctgggcaggagggtagggccttgaggcaccctacaggcccctgtaagtccaggcacagagctgctgccttgagccctgagg

SEQ ID NO: 839793 - DNA, 120 bp, Artificial Sequence
  ENSG00000256508_8 (sequence is synthesized)
tctggacattccagtttcccatctttccaatgtgggactctctgccttttccaattccccacttccctgatgccagatactgcctgactgtgtccatctctcccccgtcccctgggccac

SEQ ID NO: 839794 - DNA, 120 bp, Artificial Sequence
  ENSG00000256508_9 (sequence is synthesized)
ctccctgctgagacccctcactggtgcctcccaggtgcattctcctcgctgcccccagcagagtccttcccacacacccagctcctcggtgtggtgcctgcccgtgggtgggtggtgcac

SEQ ID NO: 839795 - DNA, 120 bp, Artificial Sequence
  ENSG00000256508_10 (sequence is synthesized)
cccactggcatccctcctctgccctgtccacctcaacttccagggcagcctggacaccaggtttggtctacctcgtccacacccgcctgcttctgtcccgccttaagcggatccgtgatg

SEQ ID NO: 839796 - DNA, 120 bp, Artificial Sequence
  ENSG00000256508_11 (sequence is synthesized)
tcccgtcattagaccttcaatttcagcacaggactgaataactaaccttcaaaaagtttgcagtagccttgtcactcctaaaaataacaaataattccttaaacatcattcaacatccaa

SEQ ID NO: 839797 - DNA, 120 bp, Artificial Sequence
  ENSG00000256508_12 (sequence is synthesized)
cttcactccatcccaccatgacccagccccgacgccgctggggctgtcccagcccctctccttagccgcttgtgccgccatcagaggggcctgtctcgctcccccagacacagagcctct

SEQ ID NO: 839798 - DNA, 120 bp, Artificial Sequence
  ENSG00000256508_13 (sequence is synthesized)
ggggtcctggaacgcgttcatgcctggggcactgagcattggtaggggtgggggtgcagagtcgggggtgcgggagccagcagggtggccaggaggagggggtgatgagaaggctcccct

SEQ ID NO: 839799 - DNA, 120 bp, Artificial Sequence
  ENSG00000256508_14 (sequence is synthesized)
gctgtcctgatccgccgaggcctccttttgtggagggctcttcctgtgactcccgcctccggccggcggacccgccggggcagcaggccagcgccgagcgcggcccggagccttggaaaa

SEQ ID NO: 839800 - DNA, 120 bp, Artificial Sequence
  ENSG00000256508_15 (sequence is synthesized)
taggagctcagagtagagccctctcctgctggaagagatggctttggaagcagaacccgccccaaacccaattcctggcccggcaggagggggagggggaggggagtaggaggaggggct

SEQ ID NO: 839801 - DNA, 120 bp, Artificial Sequence
  ENSG00000280145_0 (sequence is synthesized)
gggatctgtgtctctcgctggtgctggcacaggagcttgggatctgtctcctctttcgcctcctgcaccttgagagccctgggctactctgtcacagcccctgttgccctgcgatctgta

SEQ ID NO: 839802 - DNA, 120 bp, Artificial Sequence
  ENSG00000280145_1 (sequence is synthesized)
ggtccttggggacgcatagttaaggtgccaggacatcctggaagctgggaaatgatttcttccagaccatggctggagaaggaaagaaggtgtgttttgcctgattcagggactatagag

SEQ ID NO: 839803 - DNA, 120 bp, Artificial Sequence
  ENSG00000280145_2 (sequence is synthesized)
agaaccaagttctgcaggcctgtcatctaagtctcagctgggtgtcacaaactctgaactggattccaaggctttcatgaatgcacttatgtttgctgtggcagctgcattatgtcgtgg

SEQ ID NO: 839804 - DNA, 120 bp, Artificial Sequence; identical to SEQ ID NO: 831472
  ENSG00000280145_3 (sequence is synthesized)

SEQ ID NO: 839805 - DNA, 120 bp, Artificial Sequence; identical to SEQ ID NO: 825772
  ENSG00000280145_4 (sequence is synthesized)

SEQ ID NO: 839806 - DNA, 120 bp, Artificial Sequence; identical to SEQ ID NO: 825773
  ENSG00000280145_5 (sequence is synthesized)

SEQ ID NO: 839807 - DNA, 120 bp, Artificial Sequence; identical to SEQ ID NO: 825774
  ENSG00000280145_6 (sequence is synthesized)

SEQ ID NO: 839808 - DNA, 120 bp, Artificial Sequence
  ENSG00000280145_7 (sequence is synthesized)
gtaacttcttagacaaagtctataaacagtctcaggacaataacaactccattctagaaagaatatcccaacttttcttcaatctcaaccccaactgcatctgcctgtcaacttccagct

SEQ ID NO: 839809 - DNA, 120 bp, Artificial Sequence
  ENSG00000280145_8 (sequence is synthesized)
gtatgtattcatttcgtaccaccgtagtggaagagagactatccctatcaatacacctggtaacattcccaacagtaagtcgtgagattctgcttgaaatcacctctcagacaaataaaa

SEQ ID NO: 839810 - DNA, 120 bp, Artificial Sequence
  ENSG00000280145_9 (sequence is synthesized)
aacagtcctgggaaatgtacgacactcattctgctaaagaaatagggcaagaaagctttctaagaccccgaactccagatatgcgatggggcaaatcctgaagcgtacatggctatctct

SEQ ID NO: 839811 - DNA, 120 bp, Artificial Sequence
  ENSG00000280145_10 (sequence is synthesized)
tcccttaaacccaagttgtaaccgcacaactaaatcagaatccttggagctggatctgaaaaaaatatggttgaaagtcgtgcaggtgattacaatgtgtaggcaagccagaaaaccatg

SEQ ID NO: 839812 - DNA, 120 bp, Artificial Sequence
  ENSG00000280145_11 (sequence is synthesized)
gctttaacgagcagcttttgttagaaatgatttctccaatgaatgtgaaaacgtttgctgctgaattgtgacctttccattttacctgcttttcctgcaaagtatattttgcagacccag

SEQ ID NO: 839813 - DNA, 120 bp, Artificial Sequence
  ENSG00000280145_12 (sequence is synthesized)
gctggcttctccttctgttcctggttcacccagtgccgtgtgtgctcagtgcatcctgtgcacgggtcactgtgtgccctggcctgggtgagcatcattcttcggggagaaccttgatga

SEQ ID NO: 839814 - DNA, 120 bp, Artificial Sequence
  ENSG00000280145_13 (sequence is synthesized)
aaacaaagctgcattccaaaaagttaaaaccatgctacttactgtgttgaagtaaaaattaaaagacccaggggggctcacccaaaagttaaaacataaataaataacttggaacattaa

SEQ ID NO: 839815 - DNA, 120 bp, Artificial Sequence
  ENSG00000280145_14 (sequence is synthesized)
agacccaggctgttccctacatatgtttcctcctcagacatcagttaatcagtcaatcaagtcaagtgagagtggaggccatgtattccctcttattcttgggcactctcctccaaggag

SEQ ID NO: 839816 - DNA, 120 bp, Artificial Sequence
  ENSG00000280145_15 (sequence is synthesized)
gaaaaggccaggaggtcctgttagaggatgcactctgagagcccgggctccctaaggtatgagagttctaaccagcaggtgtagacttttcaggagtgaggaatgaggcaggcattccaa

SEQ ID NO: 839817 - DNA, 120 bp, Artificial Sequence
  ENSG00000280145_16 (sequence is synthesized)
acctggagcttcatcaccttttgtttcatctcaagacaattctgaggggctgttttggagcgtgtctggaaggtgaacgttgaagaagagtgtgggctttgatgtgactcagatgagatc

SEQ ID NO: 839818 - DNA, 120 bp, Artificial Sequence
  ENSG00000280145_17 (sequence is synthesized)
atgagccactgtactgcgctgtgcctacttcaaaggactgaaaataaaaaataaataaatctttgccaaattaaaaaacaaagcaatagtttccaggtcttagataaagacaattctctg

SEQ ID NO: 839819 - DNA, 120 bp, Artificial Sequence
  ENSG00000280145_18 (sequence is synthesized)
tcatgaagaatgacagaaggcttatttagctgttaaaatgatttgcttatatttcaaagaagcagagaaaaaaaggtacatgtaaaagtgttccaggccactcatggtggttcatgcctg

SEQ ID NO: 839820 - DNA, 120 bp, Artificial Sequence
  ENSG00000280145_19 (sequence is synthesized)
taatctgaacatttggggaggccaaggcatgaggataccttcaagccaaatgtttgagtccagtacaggcaatatggtgaaattctgtcactacaaaaaaataaaataaatatggctggg

SEQ ID NO: 839821 - DNA, 90 bp, Artificial Sequence
  ENSG00000280145_20 (sequence is synthesized)
tgaggcaggtggataatgaggtcagggggtgattctctactaaaaataataataacaaaaaattagccagacatggtggtgtgcgcctgt

SEQ ID NO: 839822 - DNA, 86 bp, Artificial Sequence
  ENSG00000280145_21 (sequence is synthesized)
ctggccaaaatggtaaaacccattctctactaaaaataataataacaaaaaattagccagaaaaggctgagacaggagaattgctt

SEQ ID NO: 839823 - DNA, 120 bp, Artificial Sequence
  ENSG00000280145_22 (sequence is synthesized)
cactacactccagcctagcccacagagcaagacactgtcttgaaaaaaaataaaaacaaaaataaataaagctagccaggcatggtggttcatgcctatagtcctaggtaattaagcggt

SEQ ID NO: 839824 - DNA, 120 bp, Artificial Sequence
  ENSG00000280145_23 (sequence is synthesized)
tgatgcaggaggactgctcaaacccaagaggttaaggttaccgtgagctatgattatgccgttgcacttcaggctaagtaaaagagtaagattctgcctcaaaaaattactaattaaagt

SEQ ID NO: 839825 - DNA, 120 bp, Artificial Sequence
  ENSG00000280145_24 (sequence is synthesized)
tttccagattacattgtttaagaaaaaggaaaagaaaaaaatcttttttttattttcaaatgggagaatagagcctctcatttctaatttgtattgccttctgcaaaaacttagtctagg

SEQ ID NO: 839826 - DNA, 120 bp, Artificial Sequence
  ENSG00000280145_25 (sequence is synthesized)
cccatggtcttgaactactggacatctgaattttggtaggtgctggattcaggcaactgaggggtggccttgggcacactgtgtgcacataaaagaaagggtttgaggtgaactaaaagg

SEQ ID NO: 839827 - DNA, 120 bp, Artificial Sequence
  ENSG00000280145_26 (sequence is synthesized)
taaaagaggggaaggtgctattaagaaaccagaagtgagagactgtacagggttggtgggaggactggttcatgctacagacactgacccaggtgaaacttttctctgagttatttctat

SEQ ID NO: 839828 - DNA, 120 bp, Artificial Sequence
  ENSG00000280145_27 (sequence is synthesized)
gttcatgcaggaagacgagattatgatcaggtggcacagaaatctgcgatggtgaaaaaaccaggttgccactgcagattcggtgtctgaagtagaacatatgccaggggtcttgtaggc

SEQ ID NO: 839829 - DNA, 120 bp, Artificial Sequence
  ENSG00000280145_28 (sequence is synthesized)
acgtgtgtgggtttttggtgggaaagtctatgaggaaaggtaggatgggcaacaatcttgatgccaaagccttgtcctgagaggggcttgaccacgtcaacatgcagtgtgtatgttcag

SEQ ID NO: 839830 - DNA, 120 bp, Artificial Sequence
  ENSG00000280145_29 (sequence is synthesized)
tgggtgaaaaacatgtggtggcttcaagttggcaggagggtagaaggcatctgttctcagaacttcttccctcagagtcgtcggtccttcttaccatgggaggatgcctggaaccacagg

SEQ ID NO: 839831 - DNA, 120 bp, Artificial Sequence
  ENSG00000280145_30 (sequence is synthesized)
gcagtgcatggcgtagcagcctgtgtgcagagcagagcctaccttccccgagacacctggagtctctctccagcaaaggcccccacattgtctttctccttacaacacttttgatcctaa

SEQ ID NO: 839832 - DNA, 120 bp, Artificial Sequence
  ENSG00000280145_31 (sequence is synthesized)
atgtgtaaagttccctgaaaacccactgcttcttcaacacccatttcttgccccaaaatttaattctgacacaacttagagttcgcacagatcccacaaattcagggctaagtcccacat

SEQ ID NO: 839833 - DNA, 120 bp, Artificial Sequence
  ENSG00000280145_32 (sequence is synthesized)
cacccctctcactgcagaggttagtcacatgtcccataagcccatctatacttctgagctactgcctataaatctgagactcccataaaccccttttcaagttaaataatttgatagagt

SEQ ID NO: 839834 - DNA, 120 bp, Artificial Sequence
  ENSG00000280145_33 (sequence is synthesized)
tactcaaaaaaactcaacaaataagtctaattatatttaccactttattataaaaatacaactcagaaactgacaaatgaaagagatgtctaggaaaaggaacagttgtgggtgaaggta

SEQ ID NO: 839835 - DNA, 120 bp, Artificial Sequence
  ENSG00000280145_34 (sequence is synthesized)
atcctggaaatagctatatttaaagaaattcccccattctttgtgttctcaaagaacagcttagtgaagagaaacgtgcttcccattatgactttgtggatgttcccccccccccttttt

SEQ ID NO: 839836 - DNA, 120 bp, Artificial Sequence
  ENSG00000280145_35 (sequence is synthesized)
tttaacctatcacaaagacggacacagattacaaattcctatttttaaaaatgaacaaccattctgtaatttagtcttcagtggtcaaaacagagtacttgttaacaaaactttgcttgt

SEQ ID NO: 839837 - DNA, 120 bp, Artificial Sequence
  ENSG00000280145_36 (sequence is synthesized)
tccccttcttccctcagcccctgaactttgactcacccacagcctcagagaacctacaacccatatttatacatatccctcctaagaacaggctgacttcaagatgaaacattatcttat

SEQ ID NO: 839838 - DNA, 120 bp, Artificial Sequence
  ENSG00000280145_37 (sequence is synthesized)
ctgggatctgattttgctaccctccatcctgtgcttcctttccaaccttctttgtaaacttattttctcctccctatgaaataaaacccttttccacctaacctttgagatcctcaaaga

SEQ ID NO: 839839 - DNA, 120 bp, Artificial Sequence
  ENSG00000280145_38 (sequence is synthesized)
agacacccaggaataatcaactgggccttcagtggcccccttttgcagggtcaacgttagccttagcttttagtcaacggtctaagacttctacttaccagttaaagtcattcaattagt

SEQ ID NO: 839840 - DNA, 120 bp, Artificial Sequence
  ENSG00000280145_39 (sequence is synthesized)
gaggtcaggagttcgagaccagcctcactaacatgaagaaacacagtctctactaaaaatacaaacttaaacgggggtggtcgtgtattcctgtaatcccagttacttgggaggccgagg

SEQ ID NO: 839841 - DNA, 120 bp, Artificial Sequence
  ENSG00000280145_40 (sequence is synthesized)
acactaagtctaaaaaataaaattaaaattaaaaaagaaagttataaggggcttacattttataactcaacaagaaaagccaaagtatctatccctttcagaaaataaacatgtaattta

SEQ ID NO: 839842 - DNA, 120 bp, Artificial Sequence
  ENSG00000280145_41 (sequence is synthesized)
attatgttcataacaaatcatttagtaaacaatcatatgtgaacacttccaggcggtgccaagtcccagctcctaaaacttagcgttaccctcaaacacccagatgacagcatatggaac

SEQ ID NO: 839843 - DNA, 120 bp, Artificial Sequence
  ENSG00000280145_42 (sequence is synthesized)
ttgctattattctaaaatattaatttaggattgttatgcaaacatgcactctttacatttttattgataaataacatgcatacagcaatataggcacaaagcatttagggaatgtttgat

SEQ ID NO: 839844 - DNA, 120 bp, Artificial Sequence
  ENSG00000280145_43 (sequence is synthesized)
gaattattactaaataaatacacttgtgtatctaagaatcagatttgttcatgcccctgacactttccccttcccaaaggtaaccaagaccttaagagctaagtgtagataaactttgtc

SEQ ID NO: 839845 - DNA, 120 bp, Artificial Sequence
  ENSG00000280145_44 (sequence is synthesized)
attttgtacaagtgttttattacagatcactaaaaacatacacaatacaaaaaaagtataacagaccagtcacccagctttaacagctgctagtcatgtgtcatttttgttttatctata

SEQ ID NO: 839846 - DNA, 120 bp, Artificial Sequence
  ENSG00000280145_45 (sequence is synthesized)
cttccagccatgcccccacccccaatttcattattttttaggctttttggataaaatgtatattcattgcaaggtacaatgcgaactgtaaatagtagagagatggggttttaccatgtt

SEQ ID NO: 839847 - DNA, 84 bp, Artificial Sequence
  ENSG00000280145_46 (sequence is synthesized)
tctcttccaatactcggcctgagaattcatatttctaataaagtacaaatccatagggcacatgacaactgcaatgtctatcta

SEQ ID NO: 839848 - DNA, 120 bp, Artificial Sequence
  ENSG00000280145_47 (sequence is synthesized)
acaaatccatagggcacatgacaactgcaatgtctatctacagtaaaaacagtttgatgaataaaatgaaaggcaattgacttaaggtgggaaaaaaacaatcaaagcatgggtactatg

SEQ ID NO: 839849 - DNA, 120 bp, Artificial Sequence
  ENSG00000280145_48 (sequence is synthesized)
tgccatctgtaggagcatttggttaagaataacaaacaaaccagttttattgttttaataaccgaaattggcaaaatttctagtttttctttcataggaatgctcttagcaagaaaaaat

SEQ ID NO: 839850 - DNA, 120 bp, Artificial Sequence
  ENSG00000280145_49 (sequence is synthesized)
tttcatatggtgagagcaaaaatgacaaccatttgcaagtaaatgtcttatgaaattaagtagcagatatcaagctcatgaccttcagattgttacccctaactcaatcatttacatagc

SEQ ID NO: 839851 - DNA, 120 bp, Artificial Sequence
  ENSG00000280145_50 (sequence is synthesized)
aagtgcagataattttcatagttccccattaaaattatactttactccccttacaaattgtgactgtttttaaataaagttcactaactaaaattttgtatatgacatatgataaatttc

SEQ ID NO: 839852 - DNA, 120 bp, Artificial Sequence
  ENSG00000280145_51 (sequence is synthesized)
ccttcaagtcaccttatatttacttaattgtgttagccagtgtctgtctacctcccaacaatactttgggattctccctccatttgcacaggcatcatagctggggaacagggattcaaa

SEQ ID NO: 839853 - DNA, 120 bp, Artificial Sequence
  ENSG00000280145_52 (sequence is synthesized)
gcactgctgagactatgacacttggtttctttgagtttgactaaatattttacatgagtgtaattatacagctttcctttttgactgtcttattttacttaacagaatgttttgaatatt

SEQ ID NO: 839854 - DNA, 120 bp, Artificial Sequence
  ENSG00000280145_53 (sequence is synthesized)
gaccatggctggagaaggaaagaaggtgtgttttgcctgattcagggactatagagagaaccaagttctgcaggcctgtcatctaagtctcagggcggggagaccttccttccccacggg

SEQ ID NO: 839855 - DNA, 120 bp, Artificial Sequence
  ENSG00000280145_54 (sequence is synthesized)
aacaatttttaacaagtgaaatatattactacttaattttattcaaaattcaccaacttaatgtgctttataaatattttcatgcctttcaagctctactgataaaacatagtttacagt

SEQ ID NO: 839856 - DNA, 120 bp, Artificial Sequence
  ENSG00000280145_55 (sequence is synthesized)
taattaaaaagtgaagttaaagtaagtacaaaaacattttcaaggtgacaaaattagaaggtgacagtgccgattgaaacacagacatatcagacccaagggtcaagtcaagccattcta

SEQ ID NO: 839857 - DNA, 87 bp, Artificial Sequence
  ENSG00000223358_0 (sequence is synthesized)
gaatgtcctcgccattctattcaaagagaagagtcatcctggaacagccgtgctggaactctcagaactcagtgtgcttgagggaat

SEQ ID NO: 839858 - DNA, 120 bp, Artificial Sequence
  ENSG00000223358_1 (sequence is synthesized)
ctcagcctcctgagtagctgggactatgagatttttttttaattgaaagaagcaaggacatcagctgagaaggaggatggagaaggaggtgacagaatctggaagaataggaggtggctg

SEQ ID NO: 839859 - DNA, 120 bp, Artificial Sequence
  ENSG00000223358_2 (sequence is synthesized)
agaaggaggtgacagaatctggaagaataggaggtggctgatgcagtcatttattagagaccctcttgaagaccccaaggagatacagaagtgttcaatacacatttgagactagaggac

SEQ ID NO: 839860 - DNA, 120 bp, Artificial Sequence
  ENSG00000223358_3 (sequence is synthesized)
atgctaatgcaaatgttgagtttgagaggactcaggagaaggatttggagagttgagaaagatcagacatcagattagatgccatacaatgaaaagagtccacggccacacagggatgag

SEQ ID NO: 839861 - DNA, 120 bp, Artificial Sequence
  ENSG00000223358_4 (sequence is synthesized)
tgtccagctgttgttgccaagagcattcaccagtagacctgcatggaaatctctgcttcgggtctccttcccattctatggcaattttaacagaagaggtcctaagaggcaaaccgttaa

SEQ ID NO: 839862 - DNA, 120 bp, Artificial Sequence
  ENSG00000223358_5 (sequence is synthesized)
ggctgcaaaagttaaaacttttacccgtgcagaagttgtgatgggatatcggtaggaagtaatgaaagcaatatctcaggcatttgagaggcctatcgaaaattgtgattatatggagtc

SEQ ID NO: 839863 - DNA, 120 bp, Artificial Sequence
  ENSG00000223358_6 (sequence is synthesized)
agatagtggttgctggaggctattgctgcactgcagaaatataataaaagatgtgaaggtgattaattaccaatgtaagatgatctgtgaacatcacgggacttccttggcagcatatga

SEQ ID NO: 839864 - DNA, 120 bp, Artificial Sequence
  ENSG00000223358_7 (sequence is synthesized)
agaagctcatctcctgtagtcacaggggagaaaaagcagaggatcaggccagggacttcattataaggaaagtggagttctgcaaaaggctgaattttcatgggtttcagcaccattctc

SEQ ID NO: 839865 - DNA, 120 bp, Artificial Sequence
  ENSG00000223358_8 (sequence is synthesized)
caaggacttagaatctgaatcagtggtacaagacctcacataatattgcatcagggaaaaggacatactttggaacaaaaggacaaaagagaagaggaaagaccagaagaggaaaggctt

SEQ ID NO: 839866 - DNA, 120 bp, Artificial Sequence
  ENSG00000223358_9 (sequence is synthesized)
gccacactaacctaagttccctgtgctggtttgaagtactcagttcccttaccaatttccaactgtctttttcctacaactttaatgtttgttgagtgtatgtatgattcataagatttc

SEQ ID NO: 839867 - DNA, 120 bp, Artificial Sequence
  ENSG00000223358_10 (sequence is synthesized)
tgatcaatactatgtgtgtgacattgaaaggagtcaaaatgaatgtatgacttagctgcatttatcatttattaattgatgacacatttatccaatgataaaagcatttgagaatctcaa

SEQ ID NO: 839868 - DNA, 120 bp, Artificial Sequence
  ENSG00000223358_11 (sequence is synthesized)
actgaaggaggcgagactccagcacacagcgaatgtcctcgccattctattcaaagagaagagtcatcctggaacagccgtgctggaactctcagaactcagtgtgcttgaggggtatgt

SEQ ID NO: 839869 - DNA, 120 bp, Artificial Sequence
  ENSG00000223358_12 (sequence is synthesized)
ggatctgtcttttggttgtgggtactttaagtgatgagaagtttaatgtcaggaggcacatggcgcaacaggagactccaagaacaaaagtcacagtacatccaggactccaggaagtgg

SEQ ID NO: 839870 - DNA, 120 bp, Artificial Sequence
  ENSG00000223356_0 (sequence is synthesized)
tcggcctcccaaagtgctgggattacatggtaagccaccgcgcccagcctctatgctttctttcaaagggtacatacaatgcataggatttggagaggtggggaagtgtggagagagaag

SEQ ID NO: 839871 - DNA, 120 bp, Artificial Sequence
  ENSG00000223356_1 (sequence is synthesized)
ccaggctcaaccaaattccattctgaagtgtttaaaagcaaagctttggaatcagacacacccaggacaccatatggaaactcttgcacagtgctgggcccagaggactgcctcttccca

SEQ ID NO: 839872 - DNA, 120 bp, Artificial Sequence
  ENSG00000223356_2 (sequence is synthesized)
gctttggaatcaattccctgggactcctgggagaccagcacctgacggtcagatagcttatgaggagatttggcccacagagaccataagtgccctcaagcaacaagaaaggtgcaccca

SEQ ID NO: 839873 - DNA, 120 bp, Artificial Sequence
  ENSG00000223351_0 (sequence is synthesized)
agctttcatgcatatatgggcaattggggcatctgtgatgaagtgctgttgacagaagtatggcccgtggtaacatgattgctataataaggaaccatgaagagcctttcacctctagcc

SEQ ID NO: 839874 - DNA, 120 bp, Artificial Sequence
  ENSG00000223351_1 (sequence is synthesized)
gaacttcccagccatgtggaactatccatctacaagtatattttttcattacaaataattcaagaaaaagaaatcattgaagataaatgaaacattgtattacattttatgccaggtatt

SEQ ID NO: 839875 - DNA, 120 bp, Artificial Sequence
  ENSG00000223351_2 (sequence is synthesized)
ttgccaaaaaaattgtttaaaaagaagccagtttaattagaaatatgaagtaactattgaattgttctatttgcaatgaaataaattgtaatcatgcaggaaaaatttccttagaacaaa

SEQ ID NO: 839876 - DNA, 120 bp, Artificial Sequence
  ENSG00000223351_3 (sequence is synthesized)
ttgttgcaaatgtacattcaccaatcaggcacttgttaaaaagtgcttgaaacggcaaataataaagacgactacttttcagatattgtatctcagcagagatgctgaaaaaagaaagag

SEQ ID NO: 839877 - DNA, 120 bp, Artificial Sequence
  ENSG00000223351_4 (sequence is synthesized)
agaagaatgaggtctttgcagaaagattggaagatgaagaggagataagtagagaaagaaagcaccaggatggaaaaatatgggtcttgccttcaccaaatgaacttgtgtttcaaaaca

SEQ ID NO: 839878 - DNA, 120 bp, Artificial Sequence
  ENSG00000260107_0 (sequence is synthesized)
tgcgtggtattgcaaaataaatttatttgaagataaactgtcttataaaaggtcagaggcaatttgagatcccagattcagcttgtctcataaaaagattcaacttcaagtagcacaatt

SEQ ID NO: 839879 - DNA, 120 bp, Artificial Sequence
  ENSG00000260107_1 (sequence is synthesized)
tcttgtctgcttttaatcctgaacattcttgaagcatgaaacagccaactgtttacacaacacatctgtgacatctgactctggcaccagtggcgccgcagctttcagctctgaggcccc

SEQ ID NO: 839880 - DNA, 120 bp, Artificial Sequence
  ENSG00000260107_2 (sequence is synthesized)
gagggcccagatcaggccttacctggctgcctggcagcccggagaggaaggaggaaggacgctcacggtgcgacagctctggccacgctggcgggagctacgtgatgatcctggcgatgg

SEQ ID NO: 839881 - DNA, 120 bp, Artificial Sequence
  ENSG00000260107_3 (sequence is synthesized)
cttgcagggaggggaagtcgtcgtcccgggcagcatgcagcgcctggtggctgctggcatcgccatgcgcgagcacctgctggcaggtggggcacacacggcagtccaggcccgcctgct

SEQ ID NO: 839882 - DNA, 120 bp, Artificial Sequence
  ENSG00000260102_0 (sequence is synthesized)
ccacggctgccgcatctattatgcccgcgcccctcctgttccatgaaggttctggatggaggtctcatgagggattcgggcagaggctgatgaaaacataaaacaggccagtctccagat

SEQ ID NO: 839883 - DNA, 120 bp, Artificial Sequence
  ENSG00000260102_1 (sequence is synthesized)
tcaagggagagctggagacagcattcatagcttgaccaggcagctttgaccagcagaggcagcgaccactggagagggacactaaggactgctcctggatcttgtttaaacacaaggagc

SEQ ID NO: 839884 - DNA, 120 bp, Artificial Sequence
  ENSG00000260102_2 (sequence is synthesized)
tgggtttcgaagactccacgagggactttaggaccctacgttacttatcgacataaaaagaggagaagataaagcctcacaattcttcctcccacttcctcaggtggccaatgctgcttt

SEQ ID NO: 839885 - DNA, 120 bp, Artificial Sequence
  ENSG00000260102_3 (sequence is synthesized)
tattgtggaatgggtttgccacaaagcctcaggctgatagataagactcgggtctctgaaaaatgacagcttgacatcaaaccaacaaaatcaatttccaaattgattaaaaccattctc

SEQ ID NO: 839886 - DNA, 120 bp, Artificial Sequence
  ENSG00000260102_4 (sequence is synthesized)
aaataaaactccgctggctttttcgaatcccattgtaaaaggtcatctgggaagtaagcaccatatttgttttaagttagcagaagcccgcagcgcacttgaggccctacagtttcgggg

SEQ ID NO: 839887 - DNA, 120 bp, Artificial Sequence
  ENSG00000260102_5 (sequence is synthesized)
ccctcaccacagccgccagctccagggtgcccaccagagccagggcgggaagccacctccaggctggcccttcgtcttggctctttgaaaacctttgggtgaggtgtgtctcttggatca

SEQ ID NO: 839888 - DNA, 120 bp, Artificial Sequence
  ENSG00000260102_6 (sequence is synthesized)
aataaacaatcaacaattggctgctgtcattaagggagagggttagtgctgagggagacatatcctgggggcattttgtgtgattatggggtgatttatgattcatagagatcaagcgat

SEQ ID NO: 839889 - DNA, 120 bp, Artificial Sequence
  ENSG00000260102_7 (sequence is synthesized)
aaacgtactgaaatgccaagaaagaaaattggagagaaaaattgctacaaatgttattcttattttttaaggagatttattttatttgcaagatttgtaattgatgcaaagcctgtaaat

SEQ ID NO: 839890 - DNA, 120 bp, Artificial Sequence
  ENSG00000260102_8 (sequence is synthesized)
gcaggtgccccactgtcaaatcctctcccttccagacccttcgtaaaggcgtgacctgcttcaagaaacacgatatttgaaaatatgaaatctacacatcgagacacattaagagtgact

SEQ ID NO: 839891 - DNA, 120 bp, Artificial Sequence
  ENSG00000260102_9 (sequence is synthesized)
gttcgcatgacaaaagggtttgccactttacaaaagattcatcccagtgtttcttaaagaaccatacaactgtgatgtattttaaatgtctttcaattaaaagaattgactcatgctcaa

SEQ ID NO: 839892 - DNA, 120 bp, Artificial Sequence
  ENSG00000260102_10 (sequence is synthesized)
ctttgaattagtaatttataaacaatagaaatttatttcttatcgttctggaggccggaaagtccacgatgaagacaccagctggttcccagccggtgggtgaggacccagcctctgctt

SEQ ID NO: 839893 - DNA, 120 bp, Artificial Sequence
  ENSG00000260102_11 (sequence is synthesized)
ccaagatggcacctctgggctgcatcctcacgtagggagggggtgggagaagaaaaggggctgggcatgcccttcagcctccattataaggcacggatcctgttcacgagggaggagccc

SEQ ID NO: 839894 - DNA, 120 bp, Artificial Sequence
  ENSG00000260102_12 (sequence is synthesized)
gcatcactcagcctcctctcagaaggccccacctgttaacatcacacggggcttaggtttcactgtacgtatttgagaggcacctacattcagactatagcacaggccagccccccactg

SEQ ID NO: 839895 - DNA, 120 bp, Artificial Sequence
  ENSG00000260102_13 (sequence is synthesized)
cttcccatactgccagaggctggggcagctccccggccaccatgttccgccagcaggatggctcctgtcagccaggtgtgcgggacctgggcacactggcaagaagcagggagggcagcc

SEQ ID NO: 839896 - DNA, 120 bp, Artificial Sequence
  ENSG00000260102_14 (sequence is synthesized)
cagacccagccgccccatggctgctccgggagactgtgtccctgttggagactgtgatagatccacgatccgtcccagccattgctccatctgtcttgtccatcaacccctctgccagta

SEQ ID NO: 839897 - DNA, 120 bp, Artificial Sequence
  ENSG00000260102_15 (sequence is synthesized)
tcatatggtaaatagtaccatgaatactacagttccaggcacccaggtcacatcagagaactgacgagttagagtttaacgacacagtttgtagctgggggggctgcttcagagctgatg

SEQ ID NO: 839898 - DNA, 120 bp, Artificial Sequence
  ENSG00000260102_16 (sequence is synthesized)
actgggtggcattgctgcctggagctggtgactgggtggcattgctgtctggagctggtgactgggtggcattgctgtctggagctgatgactgggtggcattgctgcctggagctggtg

SEQ ID NO: 839899 - DNA, 120 bp, Artificial Sequence
  ENSG00000260102_17 (sequence is synthesized)
actgggtggcattgctgcctggagctggtgactagggtggcattgctgcctggagctggtgactgggtggcattgctgtctggagctggtgactgggtggcattgctgcctggagctggt

SEQ ID NO: 839900 - DNA, 120 bp, Artificial Sequence
  ENSG00000260102_18 (sequence is synthesized)
gactgggtggcattgctgtctggagctggtgactgggtggcattgctgtctggagctggtgactgggtggcattgctgtctggagctggtgactgggtggcattgctgcctggagctggt

SEQ ID NO: 839901 - DNA, 120 bp, Artificial Sequence
  ENSG00000260102_19 (sequence is synthesized)
gtggcattgctgcctggagctggtgactagggtggcattgctgtctggagctggtgactagggtggcattgctgtctggagctggtgactagggtggcattgctgtctgcagctggtgac

SEQ ID NO: 839902 - DNA, 120 bp, Artificial Sequence
  ENSG00000260102_20 (sequence is synthesized)
tgggcggcattgctgcttggttgttgtcaagcctccccaaggtctaaggtcaccagcaggaatgccccggaaggagagggcataactgtagttctaggagtctgaggccgtttaaccttt

SEQ ID NO: 839903 - DNA, 120 bp, Artificial Sequence
  ENSG00000260102_21 (sequence is synthesized)
tctccatcatttagcagcttagaaattcatgtcattccccatctaggcctcaatttctctacctgtaaaatgggatgtttgacccgacttccctttacctgtgaaatcctaggacctcat

SEQ ID NO: 839904 - DNA, 120 bp, Artificial Sequence
  ENSG00000260101_0 (sequence is synthesized)
ttcccgcactcaggcgccggttgaggctgcgctcctggcgaaggacaggtgctcctttcagccggttaacgttcagctcaagaccggattaagtctcttgctctccaaataaaattgtaa

SEQ ID NO: 839905 - DNA, 120 bp, Artificial Sequence
  ENSG00000260101_1 (sequence is synthesized)
aggtttggaaatatagaaccacatttttaccaaaaacctactagagagcattcgtcagcttgcccttttcgccccgaaaaacgactttttcattcacagcctgtctcttcctctttttaa

SEQ ID NO: 839906 - DNA, 120 bp, Artificial Sequence
  ENSG00000260101_2 (sequence is synthesized)
atttatgccgacagaggaagaagctgatatttaacaaataacaagaggttgcgataaatagaatttaaggtgggaaagcagccgccaaactgacaaatcgtcttcgagaccgacaagaaa

SEQ ID NO: 839907 - DNA, 120 bp, Artificial Sequence
  ENSG00000260101_3 (sequence is synthesized)
atagtagtccggaatttggctaatggatggagaaggtggtcgtttttcatagacccttacggagaatatctagtgaagctaaagagatcaccataaacttatgcattcaaacgcatttct

SEQ ID NO: 839908 - DNA, 120 bp, Artificial Sequence
  ENSG00000260101_4 (sequence is synthesized)
ggaacagaggtcgtaaccgattttgtttccatcatcagtcctgaacagttgattatttatataatcaactgttatttatataaaggtaataaaaatattacctttcctcctcctttacaa

SEQ ID NO: 839909 - DNA, 120 bp, Artificial Sequence
  ENSG00000260101_5 (sequence is synthesized)
tgaatatctgttagaacacctgccagtgtaacaatcagactacaaggctacaggattatgattactgtctcggatgatgagcccggggtcctacaaatcatgacccccgccggcccctca

SEQ ID NO: 839910 - DNA, 120 bp, Artificial Sequence
  ENSG00000260101_6 (sequence is synthesized)
ttctgcccatatttgccaaacgtctgcatcagtaatttgaataatttaaaatagttccaaaacagcaaagctcagcagttacgcaaagaaacaagaatggaaaacatcccctcaggcaca

SEQ ID NO: 839911 - DNA, 120 bp, Artificial Sequence
  ENSG00000260101_7 (sequence is synthesized)
ttaactcggagcgctccaatggacccgcatttgtctctttactattcaatcgctgtaagatatacggagactgcatcactttaaatgggagtatcaattgctttgtggttatgctggatt

SEQ ID NO: 839912 - DNA, 120 bp, Artificial Sequence
  ENSG00000260101_8 (sequence is synthesized)
ttgtgttattgctcagtcactaaagtaagaaaaatctatatggcttgtcaaatttatgcctattgtatttcgccccctgctggtttagctcgtgtgcaagcttgaatttgtgtgtgtgta

SEQ ID NO: 839913 - DNA, 120 bp, Artificial Sequence
  ENSG00000260101_9 (sequence is synthesized)
gaaactagaaattgattttaaacgaacacatgcttgttttcattttacagctctactaaacagaaatatcaaaataagaacatatgactagaccttaaagcagaccctacactaagaaca

SEQ ID NO: 839914 - DNA, 120 bp, Artificial Sequence
  ENSG00000260101_10 (sequence is synthesized)
tgtttaaactaaatgaatttaaactgcactccagcctgcgcgacagagtgaaaccctgtctaaaaaaaaattaaattaaattgcacaccccccatcagcttacaattttgtaatagggaa

SEQ ID NO: 839915 - DNA, 120 bp, Artificial Sequence
  ENSG00000260101_11 (sequence is synthesized)
attgagtacctatttggccaactaacttgtaattggtaatcttacatgtaattccgaagacagtgccctaatgctcatgacattttattacaaagggaaagtatttgagtgtttttaagg

SEQ ID NO: 839916 - DNA, 120 bp, Artificial Sequence
  ENSG00000260101_12 (sequence is synthesized)
tgataaatctgtgggaaatataaagtccatttcatttggagtcaatgatagtattgtttttatttaccttttaaaaattatggccataactgcattacctaagatttggcatcaagaaaa

SEQ ID NO: 839917 - DNA, 120 bp, Artificial Sequence
  ENSG00000260101_13 (sequence is synthesized)
gaagaagaaaaaaattaccagttaacatttgttgtatttacttctagtttttttttcctgtgcgtactttttacaaacttgtaatcataatttaagtagattttgtgtcccttttgtgtt

SEQ ID NO: 839918 - DNA, 120 bp, Artificial Sequence
  ENSG00000260101_14 (sequence is synthesized)
gtaagcatttccacccatcgtttaatgtaaaaccttaattttaattggctgcttagtagtcaatggaatgaccactatatggatagttttcagtattataaaataatacttagatgaaca

SEQ ID NO: 839919 - DNA, 120 bp, Artificial Sequence
  ENSG00000260100_0 (sequence is synthesized)
cccttccccttcccatcttctcttgaagttacctagattgcgtctattatttgaatgactcgtacaaaagagatgctatttatcgggcaaaagccgggagttcgtgccctctacgcccgc

SEQ ID NO: 839920 - DNA, 120 bp, Artificial Sequence
  ENSG00000260100_1 (sequence is synthesized)
aaggaaaactacaactcccatgaggacacgggtgagattgaggccgggctccgcctccttctccctggagcttggtggacgccttcccagtgccacgtggcggggagctgatctgatcgc

SEQ ID NO: 839921 - DNA, 120 bp, Artificial Sequence
  ENSG00000260100_2 (sequence is synthesized)
gggcgtgacgacggcccgcacggctagctgcttggcccgcgggcctgggcagccctggagcgggaaacgcctccgtgagaacgcatggcttcaagcttctcccttgcgctcctgatctta

SEQ ID NO: 839922 - DNA, 120 bp, Artificial Sequence
  ENSG00000260100_3 (sequence is synthesized)
ggctgatcgcttttacctttaggttgaagttgaacacagttcacactgtgctcttcctccccctctttctggaattccaggcaacagatttaacactttatgaatcttgaagagctgcac

SEQ ID NO: 839923 - DNA, 120 bp, Artificial Sequence
  ENSG00000260100_4 (sequence is synthesized)
cctaaatattgcagttaatgctgatcctttggaagcctccgaaggccacaaggctgtgatgggagcctctggcttcagttgcctttctcacaccttattttaatactcaaggtaaaccct

SEQ ID NO: 839924 - DNA, 120 bp, Artificial Sequence
  ENSG00000260100_5 (sequence is synthesized)
tctgtacaactttagaaataactgtcaacctaaaggaaaaacggaggcaaagttaatataaatagagaatttatttgggccaagtctcaagaatgcaaactgggagcatcacttcaagtt

SEQ ID NO: 839925 - DNA, 120 bp, Artificial Sequence
  ENSG00000260100_6 (sequence is synthesized)
acccttaatttaatacatgatcttagcagcagtttcaagtgagttctttgttttgttggccaggaagcttgaactcttgtctcaaaggaattgatccttccatctctgcctcccaaagta

SEQ ID NO: 839926 - DNA, 120 bp, Artificial Sequence
  ENSG00000260100_7 (sequence is synthesized)
ctgggattacaggtgtgggcgactgcacccggctacaagtgaatttttaaaggaaaaaaaaagaagaggcccttgctaaattgtattccaagaatttacattaaaataacaacctatcca

SEQ ID NO: 839927 - DNA, 120 bp, Artificial Sequence
  ENSG00000260108_0 (sequence is synthesized)
atgttactgtgtcttattggttcaatgatgatttctctggcatattagacttttattttttcccccatggaagcacttgaggaaataaatagtacactggctgttttctgccagcaactg

SEQ ID NO: 839928 - DNA, 120 bp, Artificial Sequence
  ENSG00000260108_1 (sequence is synthesized)
tggtgatttttctccctgtcctttgagaattgctagtctgcttctgagccattgtcatatccagcagggagcagcttggttcaagaaggaccatagaggctgctcagcatctcctccctc

SEQ ID NO: 839929 - DNA, 120 bp, Artificial Sequence
  ENSG00000260108_2 (sequence is synthesized)
cctcccagcttgccagggatttgatgagacaggaaactgcccagcaaaccagggactgcccatgtaaactatttaagaaaaagttcaacccaggtcttgtatcctgtgatttagcagttg

SEQ ID NO: 839930 - DNA, 120 bp, Artificial Sequence
  ENSG00000260108_3 (sequence is synthesized)
aatgaatacagaattcatcaaaataatattaaccttgtacttgcacacttggatatatttgggagtaattttaggagatttctggctgacttttattatcagggatatgggtttagtaaa

SEQ ID NO: 839931 - DNA, 120 bp, Artificial Sequence
  ENSG00000260108_4 (sequence is synthesized)
gcttttatctttagaaaaatgtttgtatgcattataagatgctacttttaagacaatattgaaaaaaactttggttattatttaacaaaagtggtatgacttgatgcttctctatttaaa

SEQ ID NO: 839932 - DNA, 120 bp, Artificial Sequence
  ENSG00000260108_5 (sequence is synthesized)
ggcaaggaaggattggtatatgattgcctgtaataaataaattgcgtgattattggagtacattggggtaaaagtaaagaacagaggagtattgaggagcttgaaagggaacattcaaac

SEQ ID NO: 839933 - DNA, 120 bp, Artificial Sequence
  ENSG00000260108_6 (sequence is synthesized)
taaagccaagcctgaagataacttgaatcagttgtaaaagtgtgttggcaatgtccgaaattgaatgaaaaacatctggcttataagaaatgttaaagaactaccatcttaagtaaaatt

SEQ ID NO: 839934 - DNA, 120 bp, Artificial Sequence
  ENSG00000260108_7 (sequence is synthesized)
ggtgtttttgttatttttaaggtaaatgccaatgcaaaaggtatgtttttctacttcacattggttttcttttcctgtttacatctgcacttgttttttgctgagagccagaggaaaaga

SEQ ID NO: 839935 - DNA, 120 bp, Artificial Sequence
  ENSG00000260108_8 (sequence is synthesized)
taattagactttgtctcttccacccatgaaatcccccagtacccagggcttcttctgaactactgccgatgtgatgtcactttgtatctggaaaatcactttggggtccatttactgtta

SEQ ID NO: 839936 - DNA, 120 bp, Artificial Sequence
  ENSG00000260108_9 (sequence is synthesized)
ttttgttgcctacaaaaacagccaggtgaaagctaaatcttgtgtgagagtttgcagaggtttttctatacaataaagtagtatagcacactagccaaatccatccaaaaggaccttttt

SEQ ID NO: 839937 - DNA, 120 bp, Artificial Sequence; identical to SEQ ID NO: 133841
  ENSG00000260108_10 (sequence is synthesized)

SEQ ID NO: 839938 - DNA, 120 bp, Artificial Sequence; identical to SEQ ID NO: 133842
  ENSG00000260108_11 (sequence is synthesized)

SEQ ID NO: 839939 - DNA, 120 bp, Artificial Sequence; identical to SEQ ID NO: 133843
  ENSG00000260108_12 (sequence is synthesized)

SEQ ID NO: 839940 - DNA, 120 bp, Artificial Sequence; identical to SEQ ID NO: 133844
  ENSG00000260108_13 (sequence is synthesized)

SEQ ID NO: 839941 - DNA, 120 bp, Artificial Sequence; identical to SEQ ID NO: 133845
  ENSG00000260108_14 (sequence is synthesized)

SEQ ID NO: 839942 - DNA, 120 bp, Artificial Sequence; identical to SEQ ID NO: 133846
  ENSG00000260108_15 (sequence is synthesized)

SEQ ID NO: 839943 - DNA, 120 bp, Artificial Sequence; identical to SEQ ID NO: 133847
  ENSG00000260108_16 (sequence is synthesized)

SEQ ID NO: 839944 - DNA, 120 bp, Artificial Sequence; identical to SEQ ID NO: 133848
  ENSG00000260108_17 (sequence is synthesized)

SEQ ID NO: 839945 - DNA, 120 bp, Artificial Sequence; identical to SEQ ID NO: 133849
  ENSG00000260108_18 (sequence is synthesized)

SEQ ID NO: 839946 - DNA, 120 bp, Artificial Sequence; identical to SEQ ID NO: 133850
  ENSG00000260108_19 (sequence is synthesized)

SEQ ID NO: 839947 - DNA, 120 bp, Artificial Sequence
  ENSG00000239311_0 (sequence is synthesized)
gggagcagccggccccatcttgggagtggcccaccaccatcttgggagctctaagaacaaagacctgctggtaacactatctctggccacctatctctggcctatctatctctggttcct

SEQ ID NO: 839948 - DNA, 120 bp, Artificial Sequence
  ENSG00000239311_1 (sequence is synthesized)
agagtgacagccctgcttctacaaaatggatgccaagtatctctgactaaatgcaattcacagaggtcttctgggtcaagggagagctatctttcctcaaaatcctcagatgacttgaat

SEQ ID NO: 839949 - DNA, 120 bp, Artificial Sequence
  ENSG00000239311_2 (sequence is synthesized)
gtatgaagatgacctggcaattcatccttgctcactgttccagtgctcctactagtgaaagcacttaggtgtttgaaatgacaccaaagaagctctttctgagttgggaaaaattggtaa

SEQ ID NO: 839950 - DNA, 120 bp, Artificial Sequence
  ENSG00000226806_0 (sequence is synthesized)
acatcctcctgagtaggggcccctggctgtccgtttaatgtaagcctgtgttggccctccccttcaggcaaagcaccaccaagcgctgagagaatctccgagctggtgtcacttgtaatc

SEQ ID NO: 839951 - DNA, 120 bp, Artificial Sequence
  ENSG00000226806_1 (sequence is synthesized)
actggcttttcagggaacccattttattacggcttcttgagttttcttttgtgaagccacagccagtccttcttggctgactccaagtgtggtcaggaagcagtggtaacccatgtctgt

SEQ ID NO: 839952 - DNA, 120 bp, Artificial Sequence
  ENSG00000226806_2 (sequence is synthesized)
ctattgcaagtctacactgccacacaaagcctgaggtacagctgctgctgcgggtctgttgatctgaactgctgatttgaagtggattgagaggatggaacaatagaaggaggatatggc

SEQ ID NO: 839953 - DNA, 120 bp, Artificial Sequence
  ENSG00000226806_3 (sequence is synthesized)
tcaggacagtcaagtactggaagaggaaaggtacaaagaggtgttggcactgaatgaccctgaacagggctgcactggaaatatcagagagacagagtttcaccatgttgcccagcccag

SEQ ID NO: 839954 - DNA, 84 bp, Artificial Sequence
  ENSG00000226806_4 (sequence is synthesized)
atatcagagagacagagtttcaccatgttgcccagcccagtcttgaactcctggactcaagcaatcttcccacctttgcctata

SEQ ID NO: 839955 - DNA, 120 bp, Artificial Sequence
  ENSG00000226806_5 (sequence is synthesized)
acctcgtgagtcccactcagtaagagactccctactttctttctgagtctttgtttctcatcaattgaatggcaataaacaacttggtggcccaagagttgatgacaacagtcctataag

SEQ ID NO: 839956 - DNA, 120 bp, Artificial Sequence
  ENSG00000226806_6 (sequence is synthesized)
attatacatgtaaaagaaacagagtattctacaaatatcagttattgatagttcaataggcaacctgacattaccttttcttggaacttgatgaacaactcagaaactcattaatatcaa

SEQ ID NO: 839957 - DNA, 120 bp, Artificial Sequence
  ENSG00000226806_7 (sequence is synthesized)
tgtaaatgccaactaagaacatgcaagtctgaaatcaacagttttcctcgctcatacgacacacccaaactccaagcagtggttccaagcccctttggaaaataccatgggctaacgact

SEQ ID NO: 839958 - DNA, 120 bp, Artificial Sequence
  ENSG00000226806_8 (sequence is synthesized)
ttaaaagcttagaagtgaattctacttacttattacttaaaagtggttctcaaacttcaaggtgaatcaaaatcatctgtagagcttgttaaaacacaggttgctggtcccaccccaaga

SEQ ID NO: 839959 - DNA, 120 bp, Artificial Sequence
  ENSG00000226806_9 (sequence is synthesized)
gtgtctgatgcagtaggtctcaagtagggctcaagaatatgcatttctaatgagctcccaggtgatgctaatgttgatgctgctggtctggggaccacaactttgggaacaattgattta

SEQ ID NO: 839960 - DNA, 120 bp, Artificial Sequence
  ENSG00000226806_10 (sequence is synthesized)
gaagaactcaaagatcagaaaggggtggaatatttttaaaattgtggtaaaatacgcataaacagaaaaggtacaattttaaccacttagagagaggtgggatctaagaacagaaattgt

SEQ ID NO: 839961 - DNA, 120 bp, Artificial Sequence
  ENSG00000226806_11 (sequence is synthesized)
tatgccatcaaaggtgagttcagataagcattattaaatggtatctatggataaacttcaggggccctgtggagccaacccattgctgggatggggtccaggtgtgctatggtttggatg

SEQ ID NO: 839962 - DNA, 120 bp, Artificial Sequence
  ENSG00000226806_12 (sequence is synthesized)
tggtttgtccctacaaaaactcatgttgaaatttaattgccagtgtaacattattgagaggttatggacttttaagaggcatttgggtcatgagggatccgccttcagggattagtgcag

SEQ ID NO: 839963 - DNA, 120 bp, Artificial Sequence
  ENSG00000226806_13 (sequence is synthesized)
tctccagggagtgagtgagttcccattctagtgggactggattagttaccatacagtggttgttataaagtgaggctgcttctggtgttttatctgtttgcaggcacttccttccccttc

SEQ ID NO: 839964 - DNA, 120 bp, Artificial Sequence
  ENSG00000226806_14 (sequence is synthesized)
cacttctctgccaggttaggatgcagcatgaggccctcaccagaagctgaccagatgtggctgcctgatcttgaacttcccagtccccagaaccatgagctaaataaaccttttttctct

SEQ ID NO: 839965 - DNA, 120 bp, Artificial Sequence
  ENSG00000239314_0 (sequence is synthesized)
gttcttcttgttggcctacctgaatacatgctgaagaattgtcctgaggaccctctgtcagtctgggtacagatatgctatagttcagtggcacatggtatgaggagagagctgcctgca

SEQ ID NO: 839966 - DNA, 120 bp, Artificial Sequence
  ENSG00000239314_1 (sequence is synthesized)
gagagcgtgagtcctgatcccttgtcccagggcaaaagagtttcagaggaagcccaactccactgggcggtttttcaggacctggagaggagaaggagatgaagagtgtcatttattgtt

SEQ ID NO: 839967 - DNA, 120 bp, Artificial Sequence
  ENSG00000239314_2 (sequence is synthesized)
gtgctttttaaacagagatatggatttagatcatggagcatatcctctcacccgtgaccagtagccaatattgcagaacagctgacagaaatgtggtagggatgctgcgtgactacctgg

SEQ ID NO: 839968 - DNA, 120 bp, Artificial Sequence
  ENSG00000239314_3 (sequence is synthesized)
gcattactctacagagctggatcacagaacctaacttcattagcatcatagtctaatgagataactagtgagtgcaataaatacttgatgactacgaataaagtcagcaaagaaaacaga

SEQ ID NO: 839969 - DNA, 120 bp, Artificial Sequence
  ENSG00000226803_0 (sequence is synthesized)
atgcaacctaaaagtaaccaactccccccacgcgaaggttcctatcggtcgacgggctgtgggtgtattgctcagtgacggcttcgtttagtttctcccagcacccataattcaaagcaa

SEQ ID NO: 839970 - DNA, 120 bp, Artificial Sequence
  ENSG00000226803_1 (sequence is synthesized)
gaacaacgacattatggggagaaaacgtccttttgtgaaacagaaggcaatccacaccattagtaaaccccatcaattttgccttcagaatatatccagattcttcccaattctaccgcc

SEQ ID NO: 839971 - DNA, 120 bp, Artificial Sequence
  ENSG00000226803_2 (sequence is synthesized)
taatacaaaagaacaatattccaattatgttcctatgttctatccaggaaggtttaagaggagccttttaaactgaactatattctaagaggtgggaaaaagttttcttttgtttttctt

SEQ ID NO: 839972 - DNA, 120 bp, Artificial Sequence
  ENSG00000226803_3 (sequence is synthesized)
attaaccgtaccttgaaagccccaaataaatgttccttggtttagatgccctggtagatgaccaaaaaagtttgaccagttatcaaaatctacaaagactatatgagtcatggttcgcag

SEQ ID NO: 839973 - DNA, 120 bp, Artificial Sequence
  ENSG00000226803_4 (sequence is synthesized)
gtaatccaaatctggaagctcaacaatttcttcctctgagaagagagaaatatcaacatgagttcagtaagaatttgctaaaatcattctgatttcaagtccaaaaagtattagaagcct

SEQ ID NO: 839974 - DNA, 120 bp, Artificial Sequence
  ENSG00000226803_5 (sequence is synthesized)
aatatgcaaaaatactaaccttgaatgttactcatttctatctaaacctttttgtgaaatccaaatctgtacatgacaccatttacacttaaatcagataaaaataatctgaacatttca

SEQ ID NO: 839975 - DNA, 120 bp, Artificial Sequence
  ENSG00000226803_6 (sequence is synthesized)
gattcttcccaattctaccgccaccattctggttcaagctacctggtccagctttgactttacctggttttttatagaatgctacaactccctctagaagcttctcttgataaggtaaaa

SEQ ID NO: 839976 - DNA, 120 bp, Artificial Sequence
  ENSG00000226803_7 (sequence is synthesized)
catgcacagagcaaatttcggttgtatcctagaaatgatagccatattgaggatactggttacacctgacgaaacatctccatgaaagttaagcatacacaggatctcactttgttaccc

SEQ ID NO: 839977 - DNA, 120 bp, Artificial Sequence
  ENSG00000226803_8 (sequence is synthesized)
gagtagctgggcctacaggcatgtaccaacactcccagcaagtttttcttatttttgtgaagacagagtcttgcagtattgcccaagctggacttgaactcctggcctcaagcaatcctc

SEQ ID NO: 839978 - DNA, 73 bp, Artificial Sequence
  ENSG00000226803_9 (sequence is synthesized)
ccaaagcaacacttgcagtttttaagtgaaaatgatcctgtaaatatatatatgaataaaatctagaaagcta

SEQ ID NO: 839979 - DNA, 120 bp, Artificial Sequence
  ENSG00000226803_10 (sequence is synthesized)
gattcttcccaattctaccgccaccattctggttcaagctacctggtgagtttgcacctggaatactacaataccttcctctctggtctccctgcttctactcttgcctctcatgtacat

SEQ ID NO: 839980 - DNA, 120 bp, Artificial Sequence
  ENSG00000226803_11 (sequence is synthesized)
gttatctcagtgcagcaactacagcaatcctaaataaggcagatcataccatttattctcagaaaccttcactggctccttacctcaaagtaaaagcccaggtcattagaaaaacctcag

SEQ ID NO: 839981 - DNA, 120 bp, Artificial Sequence
  ENSG00000226803_12 (sequence is synthesized)
taagttcatttcctattactctcctagctcatcctgtcagccatactagtcttcttgcttttccttgaatatactaagctcctgtctggaccttaacctcctccacctggaactctcttc

SEQ ID NO: 839982 - DNA, 120 bp, Artificial Sequence
  ENSG00000226803_13 (sequence is synthesized)
cctcattccctcaccttcttcaggtctttgctcaagtttacctatcagtgagatcttttctgacaaccctattaaaaatagcaagcctccccccaactccctgtccctgcactatttatt

SEQ ID NO: 839983 - DNA, 120 bp, Artificial Sequence
  ENSG00000226803_14 (sequence is synthesized)
cccttcccttctttattttccgtcgttacacgtatcaccatcagatatgcagttttattgccttgcttactaacattgtacaatcccctcctctccaccaatatgtgctccacagagggg

SEQ ID NO: 839984 - DNA, 120 bp, Artificial Sequence
  ENSG00000226803_15 (sequence is synthesized)
taagggctttgttttgcttactggtatattccaagtgcttagaacagttgctggcacatggtgggtactcaatattttgtgattgaatgaattaatgagtgaatgatgtaatgaaaagat

SEQ ID NO: 839985 - DNA, 120 bp, Artificial Sequence
  ENSG00000226803_16 (sequence is synthesized)
aagcatctttgtcaatgttagaaacatttacttctgacgataatccatatagctttctctgatgttacacagcgattacatctccttgtgtctaaattaaagtcaaagtatgaattttaa

SEQ ID NO: 839986 - DNA, 120 bp, Artificial Sequence
  ENSG00000226803_17 (sequence is synthesized)
cagacgtgagccaccgcgcccggccaaaagatccataaactttgagtcaccagatagagctaacatttaccacagaggaaggtttaagaggagccttttaaactgaactatattctaaga

SEQ ID NO: 839987 - DNA, 120 bp, Artificial Sequence
  ENSG00000226803_18 (sequence is synthesized)
gaactatattctaagagagataaggtcctctggctggactcaaactccggggctcaagcaatcctcccacctcatcctacagagtagctgggcctatagacagagtcttgctctgtcacc

SEQ ID NO: 839988 - DNA, 87 bp, Artificial Sequence
  ENSG00000226803_19 (sequence is synthesized)
gctacaaaactcctttccttaggctggatttgccatctcccacaaagcccataacttgaattatcacttaggtctttggacctaatt

SEQ ID NO: 839989 - DNA, 120 bp, Artificial Sequence
  ENSG00000226803_20 (sequence is synthesized)
gattcttcccaattctaccgccaccattctggttcaagctacctggtttgtagactaggagcaacaggctacatgatatagcatgggtgacaaagactttaagccaactgtcttatgtat

SEQ ID NO: 839990 - DNA, 120 bp, Artificial Sequence
  ENSG00000226803_21 (sequence is synthesized)
gttcaaagaactaaaggaaaccaggaaaaaaatgtatgaacaaaattaagagtaccaataatgaggcagaattattaaaagcccatcaaatagaaactcaggaactgaaaagtacaataa

SEQ ID NO: 839991 - DNA, 120 bp, Artificial Sequence
  ENSG00000226803_22 (sequence is synthesized)
aagaagagtcagcaaatttaaagatagtataatttaaattatccagtgtgtgtcttggtttgagttcagtctaaatcaatcaatcaatcaatcaatcatccagtatgaggaacagaaaga

SEQ ID NO: 839992 - DNA, 120 bp, Artificial Sequence
  ENSG00000226803_23 (sequence is synthesized)
aaaatgaagaaaagtaaacagagtccaagggacctgtgggacatcatcaagtgaactaacatatgcattacaggagtctcaagaggggaagtgcaataggatcagaaagaatgtttgaag

SEQ ID NO: 839993 - DNA, 120 bp, Artificial Sequence
  ENSG00000226803_24 (sequence is synthesized)
aaataatggttgaaaaactcccaaatttgatgaaagaggtgaatctacatatccaagaagctcaatgaactctaaagagacccacactgagacgtgttatagtcaaactgtcaaaagcca

SEQ ID NO: 839994 - DNA, 120 bp, Artificial Sequence
  ENSG00000226803_25 (sequence is synthesized)
gattcttcccaattctaccgccaccattctggttcaagctacctgatgtcaccaccgttcaatgcagaaatgatgggcaatcaccaaagctcaacttactaaagcaattatactggctaa

SEQ ID NO: 839995 - DNA, 120 bp, Artificial Sequence
  ENSG00000226803_26 (sequence is synthesized)
gattcttcccaattctaccgccaccattctggttcaagctacctggtccagctttgactttacctggttttttatagaatgctacaactccctctagaagcttctcttgataagaactcc

SEQ ID NO: 839996 - DNA, 120 bp, Artificial Sequence
  ENSG00000226803_27 (sequence is synthesized)
ttaataaaattactagctgatttcttataaaaaaccatggagaccagaaaataagaatgtcgatcaagaattctatatctgacaaaactattcctaaagaaattctcagataaacaaaag

SEQ ID NO: 839997 - DNA, 120 bp, Artificial Sequence
  ENSG00000226803_28 (sequence is synthesized)
ttcagttttttctgacacaaatacataatctatgctgtggtgctcctcataatgactcagaaatgcttcttccacattaaagataagatcacaaagcccacagaagtatttaatctttat

SEQ ID NO: 839998 - DNA, 120 bp, Artificial Sequence
  ENSG00000226803_29 (sequence is synthesized)
ctcattgtcatgctcatcttggcaatgtcggtacaatgtttctatcttatgaaaaggctttctgcagtgagcacagctgtatctatgaaacttgtggcttgccaaagacatgcagtgctg

SEQ ID NO: 839999 - DNA, 120 bp, Artificial Sequence
  ENSG00000226803_30 (sequence is synthesized)
ttttacatattcctgggaatcaaacatatcttcacaaatccggcattgccatttacccctcggagaactatttgccggggaatgatcaataacagtaatagctgatgaaggcttgttagc

SEQ ID NO: 840000 - DNA, 120 bp, Artificial Sequence
  ENSG00000226803_31 (sequence is synthesized)
atggagagatgtgtgttacttgttatgtggctccctaaaaagaaacattaccagttagagggacttcaagtaactgaggccaccaatttctactttcgctctactttttctgggagtgga

SEQ ID NO: 840001 - DNA, 120 bp, Artificial Sequence
  ENSG00000226803_32 (sequence is synthesized)
acggtcaggtttgccagtattgtgaaaatccatgaggaagcattacttctctcttccacttgcctcattctgagtggaaccccagaacctggtgtagggcttaataatccaagaaattat

SEQ ID NO: 840002 - DNA, 120 bp, Artificial Sequence
  ENSG00000226803_33 (sequence is synthesized)
ctcagcaaacagatacttcatgtttgggtgtattaatgtaggaagataaagacacacatgcagtgtttcctaaactttttggctcacatgcttctttgctcatgcacaacctagacaaaa

SEQ ID NO: 840003 - DNA, 120 bp, Artificial Sequence
  ENSG00000226803_34 (sequence is synthesized)
ctatgtaaccaactcctgtgtacagtttcacggaattgcagggaggtgcccaataaataccgagagacgaacggaaccgctgaatcccgtccgcgaggttaggggagaaacagaagcggc

SEQ ID NO: 840004 - DNA, 120 bp, Artificial Sequence
  ENSG00000226803_35 (sequence is synthesized)
aacgtctctgctgcacgaagcacccgatccacaccattagtaaaccccatcaattttgccttcagaatatatccagattcttcccaattctaccgccaccattctggttcaagctacctg

SEQ ID NO: 840005 - DNA, 120 bp, Artificial Sequence
  ENSG00000226803_36 (sequence is synthesized)
gggccgacaggggctcgggcctggggagcgcaagtctctgaggcacgggaggggcggacgcagagaccgagcgcctaatgtggctagcggatcgtctgctccccggacccaggaactacc

SEQ ID NO: 840006 - DNA, 120 bp, Artificial Sequence
  ENSG00000226803_37 (sequence is synthesized)
gaatttactagtagacctgccctacaagaaatgctaaagagaatctctcagattgaaattaaaggacatcagacagtaacttgaagccatatgaaaaaataaagagcaattgtgaaaaat

SEQ ID NO: 840007 - DNA, 120 bp, Artificial Sequence
  ENSG00000226803_38 (sequence is synthesized)
gattcttcccaattctaccgccaccattctggttcaagctacctggtccagctttgactttacctggttttttatagaatgctacaactccctctagaagcttctcttgataagacagag

SEQ ID NO: 840008 - DNA, 120 bp, Artificial Sequence
  ENSG00000226803_39 (sequence is synthesized)
gattcttcccaattctaccgccaccattctggttcaagctacctgatacaaaaatatttaccattatgttacaatgtctacagtattcagcacaataacatgctatacaggtttgtagac

SEQ ID NO: 840009 - DNA, 120 bp, Artificial Sequence
  ENSG00000226808_0 (sequence is synthesized)
aacttcaattttaatctggataacgccaaagcttttcctcaaattcacccctggagtcagctcatagatgctctgattttgtctaccattgctcctccttaatatctctcgcacaggtgc

SEQ ID NO: 840010 - DNA, 120 bp, Artificial Sequence
  ENSG00000226808_1 (sequence is synthesized)
cattgacctttagatgggctgtacggtgtggggttcggtgccatggatctgcttctccagggaccaggatcttgagatcttcaggctgggtttccatggaggcatggagctgcttttcct

SEQ ID NO: 840011 - DNA, 120 bp, Artificial Sequence
  ENSG00000226808_2 (sequence is synthesized)
ccttcataactgcactcaaaacagccctgttgctctagaatggagacttgggcaactccttctggcacagatttgttcacctcaggtgaaattcagatagaagcaagctgcaggcagttt

SEQ ID NO: 840012 - DNA, 120 bp, Artificial Sequence
  ENSG00000226808_3 (sequence is synthesized)
cacctctaagtccatgggttctcaactggtaacgtcctcttatggatgttagcccatgaggtcaatcctgtagcaatctaaggcttgagaaaaattaatcttctggaaaattccaagaat

SEQ ID NO: 840013 - DNA, 120 bp, Artificial Sequence
  ENSG00000226808_4 (sequence is synthesized)
acatcttagggaaactggctctacctttatgacttggatcacacaaggatatgcttttcatcttggactagaactgagagccaatggatgtgttatctaaaactatcccagtgtgttcac

SEQ ID NO: 840014 - DNA, 120 bp, Artificial Sequence
  ENSG00000226808_5 (sequence is synthesized)
tatacagaggaagattctgagattcaagactcaagactgaagaagatcattatttttattattttagtcttatgcacaaaatgatatctactgaataagcaggtttttaataggtgactt

SEQ ID NO: 840015 - DNA, 120 bp, Artificial Sequence
  ENSG00000226808_6 (sequence is synthesized)
atatatgttagcaaaaataaacactttgtcttttagatctattctagtttttcagtagctgtagacttaagtgctaacttttagcccataggataagaagaaaccaagtcctaaaagtag

SEQ ID NO: 840016 - DNA, 120 bp, Artificial Sequence
  ENSG00000226808_7 (sequence is synthesized)
gccagcaccagggttcaggcctctgacttcaagccaagggctcatcatcttgaattgcgcacgaatttttacacagcgccaaaggaaactgcctgtacttactgttgtaggtgctttgct

SEQ ID NO: 840017 - DNA, 120 bp, Artificial Sequence
  ENSG00000226808_8 (sequence is synthesized)
tttacctggtccacagccctccccagtctggctgcaacctctcatgaggctgagctcaccatgaacccctgctctaggcgtctgcatagtgttctgtttgtccccgtgactgtccacctc

SEQ ID NO: 840018 - DNA, 120 bp, Artificial Sequence
  ENSG00000226808_9 (sequence is synthesized)
ttctttggcctgttggcatgcgcttatcctccagacctcagtccaaagttcagtcccggagcagacacaaccctgtttgcagagagccaacattctaattgacagtgcgtggtgggaaac

SEQ ID NO: 840019 - DNA, 120 bp, Artificial Sequence
  ENSG00000226808_10 (sequence is synthesized)
agtgaaccgagggaaagagtgccagtgttagagagccacagtgcagtgaagaagagaaggcaagaggatgtgatgcaaaatcacaggacctggcttccagaccattctgcttccatgaga

SEQ ID NO: 840020 - DNA, 120 bp, Artificial Sequence
  ENSG00000226808_11 (sequence is synthesized)
acatttcagttgagaaccggatggcatgaaactttattgaagtatcagagaatcattttcttaagagatggtaatggaatccatgcatttgaaataaatcaacagaaaaaaatgattcag

SEQ ID NO: 840021 - DNA, 120 bp, Artificial Sequence
  ENSG00000226808_12 (sequence is synthesized)
aagagagggaactagcctaaggacaactgtgatattgtgaaatatatatatgggtcttcatcctgtgtcctggcatacctaaaacccttggaatatccaaaggcatgcttttcatgtgca

SEQ ID NO: 840022 - DNA, 120 bp, Artificial Sequence
  ENSG00000226808_13 (sequence is synthesized)
aatgattgactgatgtcttcaggatggagccaatcaccagaaatgtcaaagcataattagagtgttgggactttcagccataccccacacccctgacctttggggaggagagacgggcag

SEQ ID NO: 840023 - DNA, 120 bp, Artificial Sequence
  ENSG00000226808_14 (sequence is synthesized)
aaggttaagtccatcaacaatggccagtgatgtaatcagtcatgcctatgtaatgaagcttccataaaaatcccaaaggactgggtctggagagcttctggatatctgagcacatggagg

SEQ ID NO: 840024 - DNA, 120 bp, Artificial Sequence
  ENSG00000226808_15 (sequence is synthesized)
ttcctggagggtggtgcctggggcagtcatggaagcatctcatcccttcccacatgccttgccctatgcatctcttcatctgtatcctttaaaatatctttgtaataaactgctaagcat

SEQ ID NO: 840025 - DNA, 120 bp, Artificial Sequence
  ENSG00000226808_16 (sequence is synthesized)
gcagggagcatttgcagaggcttgggagggagtggacgtgtccctgatgctaagggcagaggaggagcggggccctcgggcagctggaagggcatcctgaaaagacgcctgcctgccgcc

SEQ ID NO: 840026 - DNA, 120 bp, Artificial Sequence
  ENSG00000226808_17 (sequence is synthesized)
gttctcctggcagcagggcgcgctgggaagcaccaggcaggaagtgaagaatttccggttgtcagcggagggatggggcgtcaccaagtctgtggcaagcacaccaagaaccagctaagt

SEQ ID NO: 840027 - DNA, 120 bp, Artificial Sequence
  ENSG00000226808_18 (sequence is synthesized)
ccaaggctcacctgcatggcaaatggtgaaggtaaagtccagctgccagcccaaagtagagcgcttttacagcaagctgctctcaaatcatttccaaaatcaaagttgctgtagctgcag

SEQ ID NO: 840028 - DNA, 120 bp, Artificial Sequence
  ENSG00000226808_19 (sequence is synthesized)
tcagggaacttcaacaggatgtgggccaggggtaagacagaagcatatctttacctggttctccatctgggagatgagcatcccgagggagaaggacaagacacctcaagcccagctccc

SEQ ID NO: 840029 - DNA, 120 bp, Artificial Sequence
  ENSG00000226808_20 (sequence is synthesized)
actgaaggcatatgacccagatcctgagaaccagatgcaccggcctgagctttcgtcagaagcaaggacacacagaacctttcttagaggcatcattagaggaccggacatggtggccag

SEQ ID NO: 840030 - DNA, 120 bp, Artificial Sequence
  ENSG00000226808_21 (sequence is synthesized)
aggctgcagggacagaagtcccagggccatgtccaggaactgggctcaggggacctcctggtgccacctgcatatctgagcccatggagttcctctggtctattcagttctctcatttta

SEQ ID NO: 840031 - DNA, 120 bp, Artificial Sequence
  ENSG00000226808_22 (sequence is synthesized)
agagttgagtgtggttctctcgtaattatttagtctccactgggtctgtgattatatttcctttcttattgctaatgctgtttgtgtttgattttcttcttttttttcttggcctgactt

SEQ ID NO: 840032 - DNA, 120 bp, Artificial Sequence
  ENSG00000226808_23 (sequence is synthesized)
aaagaggtttgtctgttttatctttattttaaaaataaccaactgtttatttttacttctccactgtgatttccccctttatttctttaatgtttgagtttatattttttcctatttatt

SEQ ID NO: 840033 - DNA, 120 bp, Artificial Sequence
  ENSG00000226808_24 (sequence is synthesized)
ttggcttaaattttattatcattttgctatatccttgtgtcaagcgcttaattcaattattttgttattttgacttctaaaaaatcagttaattctataagttttcctctatgtactaca

SEQ ID NO: 840034 - DNA, 120 bp, Artificial Sequence
  ENSG00000226808_25 (sequence is synthesized)
ttgagcaaactccacagatttctgtagggggcatactaattgtaattcaatttcgttttccatgtgtaggtccagatttatttgaatgtccaaatacttagaattgtaggctcttgtttt

SEQ ID NO: 840035 - DNA, 120 bp, Artificial Sequence
  ENSG00000226808_26 (sequence is synthesized)
gttattaaagtctggttttattacattgtgtttagagaaaataatatggaggattttaattttagataaagcattaatatcttttttatcctcaaacatgatcaatttttgacagtgttc

SEQ ID NO: 840036 - DNA, 120 bp, Artificial Sequence
  ENSG00000226808_27 (sequence is synthesized)
caaaaatatactatgaaatatatattatctgttggaatagagtaatatatgtacacactctgccatgtgcatatgtttatatatcatatttagtcaatggtagttgtgttagccaagtcc

SEQ ID NO: 840037 - DNA, 120 bp, Artificial Sequence
  ENSG00000226808_28 (sequence is synthesized)
tggagtcatctcgattcaagtttgttgaggcagaattgtcaatttcgtcctcagctcagcttcaactacttaacagaacctgattcatataggaattaagtaaatgtttgttgaatgaaa

SEQ ID NO: 840038 - DNA, 120 bp, Artificial Sequence
  ENSG00000226808_29 (sequence is synthesized)
gagtctctaacatgtgcagcctctgatgaggagcaagaatgccccctctcatccagccttgtcagggccaagtgaaagaagcccgggcaggcctggggaagctgcccaaggagcctcagt

SEQ ID NO: 840039 - DNA, 120 bp, Artificial Sequence
  ENSG00000226808_30 (sequence is synthesized)
agtcaatgctggcatcgtttctctctcagccccgtctctgtcactttgaagctttctactggtttcctttgagtcccctcagctccccagtcagatcaaggaagagctggttgttgcttt

SEQ ID NO: 840040 - DNA, 120 bp, Artificial Sequence
  ENSG00000226808_31 (sequence is synthesized)
cacagacttcaggggcaagcagatctgagtacctcgggggtcaaacagacctgccccaaccacagcgttgaagaggagatccatttcctaaaaatggggggagacggctattggtgggat

SEQ ID NO: 840041 - DNA, 120 bp, Artificial Sequence
  ENSG00000226808_32 (sequence is synthesized)
actctattcacatctgtctccactgcatgtctacagaacggctccctgtagtctgggagtagcgttccctggcttctctgagcttcctgcggtccacgaaaggctgtttcccttgacaga

SEQ ID NO: 840042 - DNA, 120 bp, Artificial Sequence
  ENSG00000226808_33 (sequence is synthesized)
agcctttcctcttcttccatatctggttgactgcatgtcctttggagccagccctctggactgaggacttgaatctctgattaatccgcccagtactcagctccatggcctcagtggtgt

SEQ ID NO: 840043 - DNA, 120 bp, Artificial Sequence
  ENSG00000226808_34 (sequence is synthesized)
ccacgagactcttgacacgggacctattcacaagggaaggcacctccccacagatgcacctgaaagccgtggaccctgtgattctcaggaattcggctgactgatggagcaatccttccc

SEQ ID NO: 840044 - DNA, 120 bp, Artificial Sequence
  ENSG00000226808_35 (sequence is synthesized)
acacgggtgaaggtggaggactccccttgacccagacacacgggtattccgtgagtttcttgacggtgccagttcctctgaagtatggattttactccttggtgttgtctgattagataa

SEQ ID NO: 840045 - DNA, 120 bp, Artificial Sequence
  ENSG00000226808_36 (sequence is synthesized)
ttgtggttgggtgaggtgtcttttaggtctcttttaatctgtaatacttctccctctcttttaaaaatgcatttatttgttgaaaaaacttggtcatgggtcatttttctgtacagtgga

SEQ ID NO: 840046 - DNA, 120 bp, Artificial Sequence
  ENSG00000226808_37 (sequence is synthesized)
ttatgttctggatttagctaaatgccctcttgttgaagatttatcttccatgcttcctgcaggtggttatatccaatgcttgattaaactcacattttttttttttggcaaagccacttt

SEQ ID NO: 840047 - DNA, 120 bp, Artificial Sequence
  ENSG00000226808_38 (sequence is synthesized)
gaggtcattaagtggcctgtggtctgaggcaggtgcaacgtgagaaatccagagaatcatgagggggtagggcaggcttagaaaagggagaatctgctgccagagaggccagatgccatg

SEQ ID NO: 840048 - DNA, 120 bp, Artificial Sequence
  ENSG00000226808_39 (sequence is synthesized)
aaggaatcatcccgcccccagcagacaagcgtggagccagcctgctcctctggccaaagcattccacccccggacctctcctccaggaagaagagatgtggaagaagagatgtgggtatg

SEQ ID NO: 840049 - DNA, 120 bp, Artificial Sequence
  ENSG00000226808_40 (sequence is synthesized)
ctgttgatgacaaagccacagctcacaggctgacaattttgtctggatttctatcaaggccgggagtgcagtcaatagcacatgcaggaaattttaaaagatcaagagcagctgacaaca

SEQ ID NO: 840050 - DNA, 120 bp, Artificial Sequence
  ENSG00000226808_41 (sequence is synthesized)
aaatccactctgggatgtttttaaccaaacaatcaaggattcagtgctttccgggggtgaggaccaaaatggagcaggactggcggccagcatcacctcttccatcttccgtctgtcctg

SEQ ID NO: 840051 - DNA, 120 bp, Artificial Sequence
  ENSG00000226808_42 (sequence is synthesized)
aaccacgaaggacggcctaaaaatagcgcctggaccttacaccatgggtgcttttgttatttaccctctttggtcttttgaaaaacatctttatcggagctgagagtctcccatcattta

SEQ ID NO: 840052 - DNA, 120 bp, Artificial Sequence
  ENSG00000226808_43 (sequence is synthesized)
aaactcagtcatttgccctgcagaattttctacactgtggatttgcctgactacaccctgtggtgctgttcctctatcttgttctggcccataggataagaagaaaccaagtcctaaaag

SEQ ID NO: 840053 - DNA, 87 bp, Artificial Sequence
  ENSG00000226808_44 (sequence is synthesized)
atgatggtactttattgtgcactctatttctattattattacactgtaattaatgaaatgatggtaaaactcacaataatgtagaaa

SEQ ID NO: 840054 - DNA, 120 bp, Artificial Sequence
  ENSG00000226808_45 (sequence is synthesized)
ccacgcattgtggttggttcccttaggtggagctatacctactcaagctgtaaccaaactcaccctgaatggaaagatgaccaagcacttcctaagctccatgtactgcacgcgtggcct

SEQ ID NO: 840055 - DNA, 120 bp, Artificial Sequence
  ENSG00000226808_46 (sequence is synthesized)
gctcactccatgaagcgggccgccaggtcaaggcccttggagcagacctctgaggagaagggctgcaccatagttgaagatggtcgggggccaagctgctcccctgtgcaccggctttct

SEQ ID NO: 840056 - DNA, 120 bp, Artificial Sequence
  ENSG00000226808_47 (sequence is synthesized)
gggagcaaatgtatgctggaaatccaagcctttctcttggcagtgattgaaggaaatcactggaaatacagtggtatccctggacaccgaacaagcgtgacttatggtatgcaatctcaa

SEQ ID NO: 840057 - DNA, 120 bp, Artificial Sequence
  ENSG00000226808_48 (sequence is synthesized)
agcaacttttattgtcagagtgctgatttttattttttcctggtcctggataaaaactcagcagtccttaagttttattgaaaagaaaatttagaaattagaaattagaaaaatatagaa

SEQ ID NO: 840058 - DNA, 120 bp, Artificial Sequence
  ENSG00000226808_49 (sequence is synthesized)
cattccacccccggacctctcctccaggtacttcctgtccagacgggcagtggccccagagcctgggaaacctgccccacaggtgagggcaaggggtgtgtctgaagtgggtgagaggct

SEQ ID NO: 840059 - DNA, 120 bp, Artificial Sequence
  ENSG00000226808_50 (sequence is synthesized)
atacagtggaaagagtatgggatttggtgtctttcagacaggattccacttgcaagccgtgtgatatggggcagctcaccagatcctggacctccataaacccctctgcaacgtggagag

SEQ ID NO: 840060 - DNA, 120 bp, Artificial Sequence
  ENSG00000226808_51 (sequence is synthesized)
aatcagatttccccacagactccatgaagggctccagagtgccctcccccgttagccactgatgcattcatgaggaagagaaagagttaaatgctcctttcgaggaagcggtggtggccg

SEQ ID NO: 840061 - DNA, 120 bp, Artificial Sequence
  ENSG00000226808_52 (sequence is synthesized)
agagggctgggttgtgtggggagggtaacgaaaaacagacacttgcagggccctaacaatgtgtgtagcaactgaacctgcagcctgcttacacaaaacaggccttaatgaaactcagtt

SEQ ID NO: 840062 - DNA, 120 bp, Artificial Sequence
  ENSG00000226808_53 (sequence is synthesized)
cactgggctttgataaacacccttcaccataaggaaaatgagtcggatgacttaaggatcaccccaaatcaggcataaaatctggattcttctggtcgcaggccagcaggtcttggtgcc

SEQ ID NO: 840063 - DNA, 120 bp, Artificial Sequence
  ENSG00000226808_54 (sequence is synthesized)
ttcggatccttagagtgtcctaatttggctacagttttctgtctgcagaaaggctcccaaagggaagacgccaggctggaacgagagtgactcatcccgggccctcattgtgcctgattc

SEQ ID NO: 840064 - DNA, 120 bp, Artificial Sequence
  ENSG00000226808_55 (sequence is synthesized)
acccagaggaagctttgtgtggacacagctaccctctggagatatttcaggcctttgggaacagagtagggttcctgcctttgtaacgagcaagttcttggctcccttccgccctgtttg

SEQ ID NO: 840065 - DNA, 120 bp, Artificial Sequence
  ENSG00000226808_56 (sequence is synthesized)
ccaccttccctctatttctgtggtttccttatttgccagttcctgggcctggtggaccccaccacgacttctttttgtgagtccgttctgtcctgcatccctaccacagctgtacctggc

SEQ ID NO: 840066 - DNA, 120 bp, Artificial Sequence
  ENSG00000226808_57 (sequence is synthesized)
cccagactccctcctcctagctggcgggcgggtgggcagggttcctcccctaacccatcagggcctcatctctggaggcaattactgcctggcctgtgaaaatatataaggagacttgaa

SEQ ID NO: 840067 - DNA, 120 bp, Artificial Sequence
  ENSG00000287983_0 (sequence is synthesized)
accataatcctttcctttgcaggaggtgtctccatttgtgattatacacataattctgtgattatttgataaattaatgaatcattgaattaataaatgaacgagcagttgaatagcaag

SEQ ID NO: 840068 - DNA, 120 bp, Artificial Sequence
  ENSG00000287983_1 (sequence is synthesized)
gtcagatggaggctaggctagaatcaacacagaaaactgagaaagaagtccacaaggctgagaatttgggaggcttgcaaagcaatcagatctctagaaagggagatacagcagagatgc

SEQ ID NO: 840069 - DNA, 120 bp, Artificial Sequence
  ENSG00000287983_2 (sequence is synthesized)
aagaaaagcccacgtatggctcctgcatatgatttttttcgagagactcagatgtcttcagtaaatcctctttctgtctggacttatctgagtcactttctattctctgcagctgaatgt

SEQ ID NO: 840070 - DNA, 120 bp, Artificial Sequence
  ENSG00000287983_3 (sequence is synthesized)
ttcctaggtttctacactccagacatctctctgcaaaacgagattgaaagagactcagtcttctacccagaagatgcagtggcctccatgagtacaccacagctgaatctacactgaccc

SEQ ID NO: 840071 - DNA, 89 bp, Artificial Sequence
  ENSG00000287983_4 (sequence is synthesized)
ggcctccatgagtacaccacagctgaatctacactgacccaacatccaggagaagaatgcaaatacagctccccagccagcagattggc

SEQ ID NO: 840072 - DNA, 63 bp, Artificial Sequence
  ENSG00000287983_5 (sequence is synthesized)
ttgcccggcccagattgacctttaaaaacatgaatgttggaaagcatcctggggacagaatga

SEQ ID NO: 840073 - DNA, 120 bp, Artificial Sequence
  ENSG00000287983_6 (sequence is synthesized)
aaaaacatgaatgttggaaagcatcctggggacagaatgaacgatttgcatcaccactgaactcaggcctgagtgaaagacagtctggcttctgcagtgtgtcatggatgtcccagttct

SEQ ID NO: 840074 - DNA, 120 bp, Artificial Sequence
  ENSG00000287983_7 (sequence is synthesized)
ccaatatgagagggaactgcacctttcttccaggcaagtctgaaggctggagagaaacggtggtaccagaggctaccccttggatctcattagctaagtggacctgatgacaggtgttgc

SEQ ID NO: 840075 - DNA, 120 bp, Artificial Sequence
  ENSG00000287983_8 (sequence is synthesized)
gtaccactctgccactctctgacggggccgccgccaagtgaggtggagatgcttggaccccaggatatcattccactctaatatgactcaaagagatctgctaaaggaaagttttctctg

SEQ ID NO: 840076 - DNA, 120 bp, Artificial Sequence
  ENSG00000287983_9 (sequence is synthesized)
accttatgaaaaagaggcacttgaagagaaactgtctgctcccacactggctcctgcttcctgcccctgaccatggtgtaaggatgtgatgattgaagctatgacagctattttgtgacc

SEQ ID NO: 840077 - DNA, 120 bp, Artificial Sequence
  ENSG00000287983_10 (sequence is synthesized)
atgagggcaacgccaagagaatcacagggaggccagcccagagatgtgacattgttgagctgctgaaccaggaccagcatcttcatacctctagacatattgttatgtgagaagaacaca

SEQ ID NO: 840078 - DNA, 120 bp, Artificial Sequence
  ENSG00000287983_11 (sequence is synthesized)
agacatattgttatgtgagaagaacacatccttgcttatttaagacaactttgttacatttcctgttacttgtagctacaaaaaaaaatttttcttttttttttttttttagacggagtc

SEQ ID NO: 840079 - DNA, 78 bp, Artificial Sequence
  ENSG00000287983_12 (sequence is synthesized)
agtcttgctctgttgccaggctggagtgtagtggcgtgatttctgctcactgcaaccaaccacgcccggctaattttc

SEQ ID NO: 840080 - DNA, 120 bp, Artificial Sequence
  ENSG00000287983_13 (sequence is synthesized)
tacaggcatgagccaccactcccggctgctacaaacattcttaattgatataaggcatgaatcaagcagctgagtccacagaagggaaaaggaaaagtagcattacctctgaacctactt

SEQ ID NO: 840081 - DNA, 120 bp, Artificial Sequence
  ENSG00000287983_14 (sequence is synthesized)
gtagcattacctctgaacctacttccaactacactaagaactacttccaactaaaccccttgcctgatccccatgctccgttccatgtcagtcttctctagtcttctctcattctgtatt

SEQ ID NO: 840082 - DNA, 120 bp, Artificial Sequence
  ENSG00000287983_15 (sequence is synthesized)
ccagccacagcagcagtctttccgtttctccagggcatcatactagcccttgcctcagggccttcacacaagctgtgccctccatctgaaatgctcatcccctgctctttgcctgtctgt

SEQ ID NO: 840083 - DNA, 120 bp, Artificial Sequence
  ENSG00000287983_16 (sequence is synthesized)
cttcttcacatactgtcatcattcaggtctcagatcaaatgctacctcctcccagaagctttccctgataatccattttaaagcagccctaattttctgcctgggacatatttctctctg

SEQ ID NO: 840084 - DNA, 120 bp, Artificial Sequence
  ENSG00000287983_17 (sequence is synthesized)
gactatatttatgtgttgacttcttcactttcagtctttccaatcaaccctgtgatctaacaatagcagctctgtgaattcatttgccattattttccccatgtttagcacatgcctgat

SEQ ID NO: 840085 - DNA, 120 bp, Artificial Sequence
  ENSG00000238045_0 (sequence is synthesized)
ttttatcctccgggctgcttctgctgcagctgaaggcacactgctccctgagtgctcatgggtttctaccttggagccagctggctgcactggagtgggactgggaggagttggagggcc

SEQ ID NO: 840086 - DNA, 120 bp, Artificial Sequence
  ENSG00000238045_1 (sequence is synthesized)
cgagatgggacaggtgctaactgagggcacctctacccatctggctttcattttccaatctggcaccttgtccaggcgggcctcccgtttctggctccgggctgagcttcctggagaaga

SEQ ID NO: 840087 - DNA, 120 bp, Artificial Sequence
  ENSG00000238045_2 (sequence is synthesized)
ggagaaacaccacggatcacagcgcgatctgaatgggtgcgtgctggtaaagcccggcccgtgtactccacctgccccaggagctggagacaagaccttgtggctgcgcagcggaaacct

SEQ ID NO: 840088 - DNA, 120 bp, Artificial Sequence
  ENSG00000238045_3 (sequence is synthesized)
tgccttgtgacccctggaactggctttcttgactactccttccccagagcagccaagttccactcccgctttccccacacattaccaggaggttcaacctctctggcagatcatctcttc

SEQ ID NO: 840089 - DNA, 120 bp, Artificial Sequence
  ENSG00000238045_4 (sequence is synthesized)
aggggctacccaggcagagagctgagaacacaggggccatcagcctcgctatcacctccacccccaagtgcttggctccccaagggacagctctaaaatccccagaatctcaggctggtg

SEQ ID NO: 840090 - DNA, 120 bp, Artificial Sequence
  ENSG00000238045_5 (sequence is synthesized)
ggtccagctgagcatcctagttttcactttctcctcccaaaaaggaaagaaccttggtcactaaattctacgccttctggaaatcactctgctaatgacttcctgaatgatcgactgaga

SEQ ID NO: 840091 - DNA, 120 bp, Artificial Sequence
  ENSG00000238045_6 (sequence is synthesized)
acattcttggagctcaaggtgacaggccagagcccaggtccccaggacagtgcagcaccttgtccaggcgggcctcccgtttctggctccgggctgagcttcctggagaagaggaaggta

SEQ ID NO: 840092 - DNA, 120 bp, Artificial Sequence
  ENSG00000238045_7 (sequence is synthesized)
agatacatggaagggatggaggtggtgtacaccatacctgcctggacctcactcatcacttggggagctggttaaacatgcaggtccccaggcctctgtcttggaggacctgaggttcag

SEQ ID NO: 840093 - DNA, 120 bp, Artificial Sequence
  ENSG00000238045_8 (sequence is synthesized)
ggatggggatgtggtattgaaagtggagactagcagaggtacttggaaatgtacatcttatagctaccaagacttgctgctggtgtgaatgttcaggtaaaagagagagaaatcaagaat

SEQ ID NO: 840094 - DNA, 120 bp, Artificial Sequence
  ENSG00000238045_9 (sequence is synthesized)
ggctctaggctgggtgcagtgactcatgcctgtaatctcagcactttgagaaccgaggcggatggatcacttgagctcaagagttcgagaccaaccagtctgggcaacacagcaagactc

SEQ ID NO: 840095 - DNA, 120 bp, Artificial Sequence
  ENSG00000238045_10 (sequence is synthesized)
tgtctctccacccctcaaaaaaaagaaaaaaggaaaggcatgactctgagggtaaattctaggaaggcatgtggggtgggaaatggggccagcggtgtgattaaagaatgtacatggtag

SEQ ID NO: 840096 - DNA, 120 bp, Artificial Sequence
  ENSG00000238045_11 (sequence is synthesized)
tagagggatgcagatctagataatattgaaaggccaggacttggacttctgggaatgggaaacatgatagaattatctgtaattttccagaatcaatgactagttgtttttttaaaaaaa

SEQ ID NO: 840097 - DNA, 120 bp, Artificial Sequence
  ENSG00000238045_12 (sequence is synthesized)
aacggtcaccgggattcctggaagagacggggatttgggggaaacggagagggttctgcgaggagacgggaccagtgagacaggcaggaccgggtggaggcgtctctacgagcaggaggg

SEQ ID NO: 840098 - DNA, 120 bp, Artificial Sequence
  ENSG00000238045_13 (sequence is synthesized)
caaggaagatggggcaagacgcggggaggctgcagaggaggagcagggtggggtttggagagaatggagcctgcagaaaggagcggcagaaactggcgctggaaggctcaaaaaaggggc

SEQ ID NO: 840099 - DNA, 120 bp, Artificial Sequence
  ENSG00000238045_14 (sequence is synthesized)
cctggaaaggacggagcggggacaggaaagggaattccaaggggcaggaggagctgggcagaggagcccgtgtaaacacagagtggcccatgcccaggatgagggacaggtgcagctttc

SEQ ID NO: 840100 - DNA, 120 bp, Artificial Sequence
  ENSG00000238045_15 (sequence is synthesized)
attctctacctcgctgctcccagtcctagggctcggactccccagcctttccgcagccgcatccacccaccatggcctcagggccgtgacgcgcgtggggagggatgcggctgggggctg

SEQ ID NO: 840101 - DNA, 120 bp, Artificial Sequence
  ENSG00000238045_16 (sequence is synthesized)
agcagcggccatgagtgtggacgggggagggcggcattcccgtctggcagctctgtttgggtttctgacggggcctcttcaaacctccaggggctattctgggcctgtccgagttgggaa

SEQ ID NO: 840102 - DNA, 120 bp, Artificial Sequence
  ENSG00000238045_17 (sequence is synthesized)
ttccccagagacctggaacttgctctccacagccacagccttggccccgccctgtatctgtgctgccgccagtaaggctgcccctggggagggcggagccagaacctcacagcctcacag

SEQ ID NO: 840103 - DNA, 120 bp, Artificial Sequence
  ENSG00000238045_18 (sequence is synthesized)
ggcagagcaaggctggattgacggacaccaggccgagaagaaacccttggggttggcggcagttcttagtgagggcaattcattcaatccagagccagaaacaggattttatttaaaatt

SEQ ID NO: 840104 - DNA, 120 bp, Artificial Sequence
  ENSG00000238045_19 (sequence is synthesized)
tattgtaatggggtccgcgcaaaaggaaggggtggagggtggggtacatgcaggggacacaggaacacgatgacatggccagggccacaacttcttctgtcgtggggaagagggatgaaa

SEQ ID NO: 840105 - DNA, 120 bp, Artificial Sequence
  ENSG00000238045_20 (sequence is synthesized)
agacaagaccagggctggagctggggtggaagaggggagggggacactggctgcattcccccgcccccaggaagcacctctaggccctggacccctcgctcaccctggcccctaagactc

SEQ ID NO: 840106 - DNA, 120 bp, Artificial Sequence
  ENSG00000238045_21 (sequence is synthesized)
catctcttctctgcctctggccctcctggctcttcctcctgctccccttgactttttcccctgacagattctcaagtaggacgatgttcagggcctgaccccaaccccccataccacctt

SEQ ID NO: 840107 - DNA, 120 bp, Artificial Sequence
  ENSG00000238045_22 (sequence is synthesized)
accgctttccctctttgggacagctctgatccccctccttcctctcctccctccccctggaaaaaaaaaaaaaaggaaaagaaagcaccaactccccggggaggggctgcagacagcagg

SEQ ID NO: 840108 - DNA, 120 bp, Artificial Sequence
  ENSG00000238045_23 (sequence is synthesized)
gggagaggactggaaggagagaagaggaccgtcgagggaagaggctcacaagtccctgggaagacagggcatgggcttacagagaggagagggggtacgggcagtggctgctcgtgtcct

SEQ ID NO: 840109 - DNA, 120 bp, Artificial Sequence
  ENSG00000238045_24 (sequence is synthesized)
ctgccacccctgcccactgtccaggggacttcaacacaaccgaggggacaggtttgtgtggggtcaggtctgacagaagaggagcaggagaaacaaatcgttaaaacctagcgaattccc

SEQ ID NO: 840110 - DNA, 120 bp, Artificial Sequence
  ENSG00000238045_25 (sequence is synthesized)
ctaagaaaacatttcttcctcctttccttctggaggctccttggttggtagggaaataggagttggtgggaaaagaggggggagaggagcttgtaccaagggactctactccattctccc

SEQ ID NO: 840111 - DNA, 120 bp, Artificial Sequence
  ENSG00000238045_26 (sequence is synthesized)
ctctcccccgcaaccaacttggagctcaccagggttgggagggaagtggctgagagctcacaggcaccccctccgcccccgagagggagcccacagctgtgggaggggctgctactgctg

SEQ ID NO: 840112 - DNA, 120 bp, Artificial Sequence
  ENSG00000238045_27 (sequence is synthesized)
tcccttgacctcttgtaggaatctagacgccacgagctcttggctacagcacccttaacccgtatccgtggcaaggcgtctggccaggcgcccaccctctgcccctggccctcccggcag

SEQ ID NO: 840113 - DNA, 120 bp, Artificial Sequence
  ENSG00000238045_28 (sequence is synthesized)
ccctcggcatgtacctttgttgcagagctcacagacatggtgaggaccctggctgtgcaccttcatgtggtccgaaatataagccgagctcagcatcttgccacacacgtgacatggcac

SEQ ID NO: 840114 - DNA, 120 bp, Artificial Sequence
  ENSG00000238045_29 (sequence is synthesized)
ggacagggggggcggccccccccagatgggtctgcatgtggccggccagctgggcaggggtcttgcagtgcacgctgcacagcttgcacaggatgcggtcagcccgcggggcctggagcc

SEQ ID NO: 840115 - DNA, 120 bp, Artificial Sequence
  ENSG00000238045_30 (sequence is synthesized)
cgtggtccttcaccgcgtggatgcgcagaactcattctccatggccgggagacctctcccaggatgacgagacactgactcctagccacttgcagggttgaccctcagcagagacggctg

SEQ ID NO: 840116 - DNA, 120 bp, Artificial Sequence
  ENSG00000234377_0 (sequence is synthesized)
tggtgggttcttggtcttactgactttaagaatgaagttgcggacttttgcgctaaaagaaaatgcattctgccaacaactaatgagcttggaagagaactccaaaccccagaagaggcc

SEQ ID NO: 840117 - DNA, 120 bp, Artificial Sequence
  ENSG00000234377_1 (sequence is synthesized)
gaactccaaaccccagaagaggcctgtcacattggctaacaccttgatttccacccactgagaccttgagcagagacttcagttacaccccacccagacttctgacctgcaaaactctcc

SEQ ID NO: 840118 - DNA, 120 bp, Artificial Sequence
  ENSG00000234377_2 (sequence is synthesized)
agaaggatgttcacttgctggtgagagaaggagctggttccatccattacgcagtcccctgggagcgctaaatgcaactttatctcaacggggagtggacgatgagcaggacgtcgctag

SEQ ID NO: 840119 - DNA, 120 bp, Artificial Sequence
  ENSG00000234377_3 (sequence is synthesized)
agggaaagagcctcacttcccgtttcctttggcagcgcccttttcccgacctaagggagcagaccttcgttggttggcgtgaggactggcgggagaggttttgtgccaggatccgcactg

SEQ ID NO: 840120 - DNA, 120 bp, Artificial Sequence
  ENSG00000234377_4 (sequence is synthesized)
atagttacttgggacaacagttttagcagggctctctttctcctttcctgatctctctgttaagctgcctggctcatttgatatcacatccaaattatcagctgattgctctattgtttt

SEQ ID NO: 840121 - DNA, 120 bp, Artificial Sequence
  ENSG00000234377_5 (sequence is synthesized)
attggtgggttcttggtcttactgactttaagaatgaagttgcggacttttgcggtgatccaccctaccacatattgtctcctaatggccgtccagtttatcctggagcccttgcatgac

SEQ ID NO: 840122 - DNA, 120 bp, Artificial Sequence
  ENSG00000234377_6 (sequence is synthesized)
aatattttacctcttgggtactttctgtgtagaagattcataacaagaacaatacttattctgcaattctttatataaagctaaaagaaaatgcattctgccaacaactaatgagcttgg

SEQ ID NO: 840123 - DNA, 120 bp, Artificial Sequence
  ENSG00000234377_7 (sequence is synthesized)
gtggtcttgctggcttaggagtgaagctgcagactttcgtggtgatccaccctaccacatattgtctcctaatggccgtccagtttatcctggagcccttgcatgacacaggcctatcga

SEQ ID NO: 840124 - DNA, 120 bp, Artificial Sequence
  ENSG00000234377_8 (sequence is synthesized)
caggacaaagagttgtgcagctgctcattttcctgttgacttctgtctaagacttggagatgtttgtaagattgggacctacctacagaggtatcacactcctcttggtctaactcactc

SEQ ID NO: 840125 - DNA, 120 bp, Artificial Sequence
  ENSG00000234377_9 (sequence is synthesized)
ttgaactgacattcgtggtgaatttcttttgtcacttagcatattagaagagatgttttactataattctcacaatcaatccataagcaagtggttaaaggcctttttgtacttagttat

SEQ ID NO: 840126 - DNA, 120 bp, Artificial Sequence
  ENSG00000234377_10 (sequence is synthesized)
gcatctctgaggacatcttaaacaaagatgacccaaatctttgatcttcaaatagtcgatgtgaactgcttaacaaaatgccctgggaaaactctgtctgaaacaagcagcttgggggtt

SEQ ID NO: 840127 - DNA, 120 bp, Artificial Sequence
  ENSG00000234377_11 (sequence is synthesized)
tgatttcattagttactggacaagaactggaatggagtgaaaaatcttcattcatttcttggtcagatggagagaggagaaaaaaagaagtgggtttccattcacttccattttctaact

SEQ ID NO: 840128 - DNA, 120 bp, Artificial Sequence
  ENSG00000234377_12 (sequence is synthesized)
caacttcccatcctccacttttggagagcgcgcctgatagctgctgcccacctgggcactgacatcctccttccgaccgggtgcggagaaagcacaaaggaagtagaccaaggagactga

SEQ ID NO: 840129 - DNA, 120 bp, Artificial Sequence
  ENSG00000234377_13 (sequence is synthesized)
ccatccaaatccagtgacttaaaaccgttattacaagggctcttgctgttgtctgactctgacatcattgaatccaactcagagattttgtcaaggtaagcagcatccatcgatgcttca

SEQ ID NO: 840130 - DNA, 120 bp, Artificial Sequence
  ENSG00000234377_14 (sequence is synthesized)
gcctgatttctcactcaattttgaagatatttctccaacagaatttgctatcgtgttcccctctgaactttcaaaatctaagttttgggcatagcttgtggaacaacagtcccaaaatcc

SEQ ID NO: 840131 - DNA, 120 bp, Artificial Sequence
  ENSG00000234377_15 (sequence is synthesized)
tgtctttggggaagaaaaacattctgatttcttttcattttcacttctacttatatcatcttctgaagaatctttattagaaacatttgaagaatcacaaaaatcatcaaacaccaattt

SEQ ID NO: 840132 - DNA, 120 bp, Artificial Sequence
  ENSG00000234377_16 (sequence is synthesized)
tctgagatggtttgagtgctttttggaacctcctgcttggaccacagagctctctctattttctggagtactgagctgaaggcaactaagggacaaaggagtacaaggagctggaagatc

SEQ ID NO: 840133 - DNA, 120 bp, Artificial Sequence
  ENSG00000234377_17 (sequence is synthesized)
ataaagttcttcatctttgtagggtacacagtcacttggtttattcccccattctctttccaaataagtatccatacttgtatctgtcacatctaacattacttctacctgttcttgata

SEQ ID NO: 840134 - DNA, 120 bp, Artificial Sequence
  ENSG00000234377_18 (sequence is synthesized)
taggtctttgttcttagaacagttaaggtctgctttgctggtactttcctgccttgcagaactggtgtcacacagtctgctgctggaaggcttcgctaggtgagaagaactggaggtgga

SEQ ID NO: 840135 - DNA, 120 bp, Artificial Sequence
  ENSG00000234377_19 (sequence is synthesized)
tgagccaggctgctttctggcactatcgccttgattctttgacaccacatcctcctcactgcctttgctccctttgccatctgcagaaagtgctgtctggcaaatggaattcatagcttc

SEQ ID NO: 840136 - DNA, 120 bp, Artificial Sequence
  ENSG00000234377_20 (sequence is synthesized)
tttctcttcacttgaattttttagctgtgcaacttgagattctagttcctctatatacttatcacttcgttccagggctttcttgaggcgattggtttcacgctcatactgttctacttt

SEQ ID NO: 840137 - DNA, 120 bp, Artificial Sequence
  ENSG00000234377_21 (sequence is synthesized)
ggactgaagagcagcaactgcaaaccttccaaacctacaaagaatggaaagatagttaatcttataactcaagcttttttcttttcaaggtttgagagtgcaaactgtcccaggctattc

SEQ ID NO: 840138 - DNA, 120 bp, Artificial Sequence
  ENSG00000234377_22 (sequence is synthesized)
taatttcacctaacagtgacatttcagaccactcaatgagtagggcaaatgccagatgtatattttcaaaaaatggtttccccacttacataataataaacatatgataataatagcaaa

SEQ ID NO: 840139 - DNA, 120 bp, Artificial Sequence
  ENSG00000234377_23 (sequence is synthesized)
gatgcctggacagcatcagtagtagttgcccgagggaggggggcagtcctcgtccggggacaggtcccaaaaggctgtttatttgttagagttctacgctcttcaaatgaacccaaatca

SEQ ID NO: 840140 - DNA, 120 bp, Artificial Sequence
  ENSG00000234377_24 (sequence is synthesized)
agggcaagttatcacgcaccatgtgacacccggcagctccagactagaacaaggctctgcactgaacgtgataattgaacttttaatgccaagtgtcacttttctttcagatgccaatat

SEQ ID NO: 840141 - DNA, 120 bp, Artificial Sequence
  ENSG00000234377_25 (sequence is synthesized)
aactaaaatacaaaaaaacacaagttatgacaaacatataatgcttcctctagacaagcattgcagcttggcattgcactaagtgttttgatactaatccattaaattctcccaccaccc

SEQ ID NO: 840142 - DNA, 120 bp, Artificial Sequence
  ENSG00000234377_26 (sequence is synthesized)
aacaacgtagaatatatcagagagtgaagcatggagaatttatataatttgctcaaggctacaaagctaataaatgtggagccaggattcaaatgtaggcattctgattccctagtctat

SEQ ID NO: 840143 - DNA, 120 bp, Artificial Sequence
  ENSG00000234377_27 (sequence is synthesized)
gctcttacccagcatgttatgctgatgctcaaaacagttgagtgttatattaatttaaataaaaaagataaattagagctagagagtgtgtaataggctccatggagaaagtcaaatgga

SEQ ID NO: 840144 - DNA, 120 bp, Artificial Sequence
  ENSG00000234377_28 (sequence is synthesized)
cttggaacttggcaactgaagagaccatggccagacaaatggcaagaaattctggcaagaagaacaataggcatggagtgtccgcagcagaggaaagaagccaatctcactacagtggac

SEQ ID NO: 840145 - DNA, 120 bp, Artificial Sequence
  ENSG00000234377_29 (sequence is synthesized)
ggaaacaaggagaaattaaatgagatcattagaatggaaaagattgtagaaatccagataatttatagtgaaaattgaatttctaagagggtgaagttaaaattgggttaatagacacta

SEQ ID NO: 840146 - DNA, 120 bp, Artificial Sequence
  ENSG00000234377_30 (sequence is synthesized)
tctcaaaaatgtaatctgttacattacaacagaaacaaagcttctcatgacatgcagagatccataaatgactgttttacttttggcaaaattgaaaagagaataatagtgactgcaggg

SEQ ID NO: 840147 - DNA, 120 bp, Artificial Sequence
  ENSG00000234377_31 (sequence is synthesized)
tcaagattaatgcatgctgatttttaggtaacatgggagaattaaagagccagagtttcactactggccaccaacagtccattttaatgtgtactcagtctttgtgacctctgtccatta

SEQ ID NO: 840148 - DNA, 120 bp, Artificial Sequence
  ENSG00000234377_32 (sequence is synthesized)
gagatatatcaaacttgtatttaaactgaaatgtgattagagccatgaggcctgcctggaggtaaagcaggttgagaaaaatttcctcaatgacacattctctatggaaagtctttctca

SEQ ID NO: 840149 - DNA, 120 bp, Artificial Sequence
  ENSG00000234377_33 (sequence is synthesized)
aaggaaaagaaattgtgtcctactggcaaaaagcagaaaaggaagtggggaggggaaatggaaaaacatctaaaccatctctggggaaaaggtgatactaaatataaactggccatcaac

SEQ ID NO: 840150 - DNA, 120 bp, Artificial Sequence
  ENSG00000234377_34 (sequence is synthesized)
atagtgaagctgaagaaggcaaggggtgtctaaatgtatcatcagaaaagttaagaaacagggcaaagtaggctagcttaggaacatcaacagaatattggaagaagaacagggggcaat

SEQ ID NO: 840151 - DNA, 120 bp, Artificial Sequence
  ENSG00000234377_35 (sequence is synthesized)
tttataacctctcaatcatttccaacttcttacagtgctccagaaaagaaaaagtgtccttgataagaatgatttattgaacaattatctctttccgccctcagctctctggaactggac

SEQ ID NO: 840152 - DNA, 120 bp, Artificial Sequence
  ENSG00000234377_36 (sequence is synthesized)
aacagacagatctggtgaattataattatggagttctccagaagaacttcctctcaaggatgcacaattttccagttagtcacaaggcagcatcacaagcaaaatggggctctctcttta

SEQ ID NO: 840153 - DNA, 120 bp, Artificial Sequence
  ENSG00000234377_37 (sequence is synthesized)
tttaacaaggcctatcttctacacacagtttctgcaatttccgcttctccttatgtgtatctttctctgcccttttgtatgttccacttatgtaggattgtttgccccacagtcacacac

SEQ ID NO: 840154 - DNA, 120 bp, Artificial Sequence
  ENSG00000234377_38 (sequence is synthesized)
aatacaatcatcatgctaaccccctccccaaaaactccctactcccttttcatctctcccattgctcctccacactggtcctgcgctggcctgtttgctccctgagtaaattagatccct

SEQ ID NO: 840155 - DNA, 120 bp, Artificial Sequence
  ENSG00000234377_39 (sequence is synthesized)
gcatgtgctgctcatcttccctccctccaccttccaccatactctcttcatgtccacatctgcctcttggcaaatgccctgtggaagagagatttttcccaggctctcctcccttgtagg

SEQ ID NO: 840156 - DNA, 120 bp, Artificial Sequence
  ENSG00000234377_40 (sequence is synthesized)
tctctttgtgcctccgcatcctgagtttcctctgactcttgtttctttctgcttcttgtgacagctatggttacagctaacaagcatgggaggaaggatctgagggaaagttgtgctttt

SEQ ID NO: 840157 - DNA, 120 bp, Artificial Sequence
  ENSG00000234377_41 (sequence is synthesized)
ggttcactaaatccttagatttgatttgggtagtcagaaagtgctaaaaagtttgtttcaatggaacatcctgcagtcccaaatggggtaaacttatcttgtttttcatctgctgtcatg

SEQ ID NO: 840158 - DNA, 120 bp, Artificial Sequence
  ENSG00000234377_42 (sequence is synthesized)
gttaactggcaacttccaggtacaaggtgactgtctggcatctcaggtgcacacatgaaggcaatttcagaaagaatgcctatggattacagaccattcagctgagttttatctggggct

SEQ ID NO: 840159 - DNA, 120 bp, Artificial Sequence
  ENSG00000234377_43 (sequence is synthesized)
ttctggcacggaatatgtaccagcatcttagatcaattctggcacattattttaaaagttttttgttcctgagttccttggtacctgatcattccaatattttctgccttacaaagtcac

SEQ ID NO: 840160 - DNA, 120 bp, Artificial Sequence
  ENSG00000234377_44 (sequence is synthesized)
ggaaaacaggtttggagctgagtattttcaatcaccactgacttggtgacagacactaaactcatttcacttaggattataggttgaactcaaattgggatccctgaagagaaagaccag

SEQ ID NO: 840161 - DNA, 120 bp, Artificial Sequence
  ENSG00000234377_45 (sequence is synthesized)
tcctttatccagtaccttaaggaaaacatttcttatttccattaacaaccagaaaaggaaagacagtgcaacagctggaagagcactgcaaatatcagggttacaaagagtaacccagaa

SEQ ID NO: 840162 - DNA, 120 bp, Artificial Sequence
  ENSG00000234377_46 (sequence is synthesized)
acctttaaaataatttaaagtggtgataaaaccagtaacacactgcacttctattaatgcagtaatccttaacccttgaacctaacttgtacttacactaagaagtcagaagaactgttt

SEQ ID NO: 840163 - DNA, 120 bp, Artificial Sequence
  ENSG00000234377_47 (sequence is synthesized)
ttacttgatctaccaaggcaatttcccatagtttgattggaaatagtgctgatgattttctcatttaagttatctacaaagcactaaaaaaaagtgactctgctggaattatccttctaa

SEQ ID NO: 840164 - DNA, 120 bp, Artificial Sequence
  ENSG00000234377_48 (sequence is synthesized)
gaaaataagaaaaaaatagaaatttcttacaactaagaaatggatcaagataacattggtctgtgagatttaaatctatcaaaatatgtgagcataccacagatatgatttcttcagttc

SEQ ID NO: 840165 - DNA, 120 bp, Artificial Sequence
  ENSG00000234377_49 (sequence is synthesized)
tctgcaaggtaaccaaagcaattccaagaagtcttattttattagaactcaaatttattaagtatgacctatctaagatcatagtgggcagacaactaccttggacgtggggttaagaga

SEQ ID NO: 840166 - DNA, 120 bp, Artificial Sequence
  ENSG00000234377_50 (sequence is synthesized)
agataaaattcaaaagtttgaaagtaagtaaaggataagcaagattctttgaatgatcaacagcactccacaggcacacagagacacaaaaacagctaaaaaggcaaggacaaaattaaa

SEQ ID NO: 840167 - DNA, 120 bp, Artificial Sequence
  ENSG00000234377_51 (sequence is synthesized)
cagtaatgatgatttatagtaagatactctgagacatgatagaagtctcagtacaccaaaaggaaaatcttgtttgctcaaattatttgtttcttctgtctaatgaatgtaattctaata

SEQ ID NO: 840168 - DNA, 120 bp, Artificial Sequence
  ENSG00000234377_52 (sequence is synthesized)
tacaagtgataacactggcatttctttgaaatgttgattcagtttaattatgaaaatcaccaaggtattttctagctgctgcatcactccctgtactaagattaatcacatcaacatcat

SEQ ID NO: 840169 - DNA, 120 bp, Artificial Sequence
  ENSG00000234377_53 (sequence is synthesized)
tcatttaatcttcaaagaggaagcagttgtccacaaaagccttcaaatagcttcattagtgcaatttttcagtctcaaacacttagctagcagcatatgattgagagtaaggtcattata

SEQ ID NO: 840170 - DNA, 120 bp, Artificial Sequence
  ENSG00000234377_54 (sequence is synthesized)
ttcatctatttcctaatctaatttttgtaatgtttctacatttaatgtaggaatgtgtaagtgtggagtttttgccttctctttgtttgtaaaacagctcaaaacatgaagaaaataatg

SEQ ID NO: 840171 - DNA, 120 bp, Artificial Sequence
  ENSG00000234377_55 (sequence is synthesized)
attctaattataaaatatttgattgctatggttttaagtcatgaaatttaatgtacaggcccatggccagttcattttttcttttttctttttttaatgtgaaaagaatttagtgtagaa

SEQ ID NO: 840172 - DNA, 120 bp, Artificial Sequence
  ENSG00000234377_56 (sequence is synthesized)
atgctctattttcttgtctcttgtagacaaagaaaaacttagcgcatgagagacgtgtctgacttcagaaactggaattacaaaagtcactgcaaataaaatttctttggtgttttaaaa

SEQ ID NO: 840173 - DNA, 120 bp, Artificial Sequence
  ENSG00000234377_57 (sequence is synthesized)
tgcaagatgaattctatatttaaaaacagaagcctcacttatgtttctctaataagacccattcttaacatccttttctttgatgaaagcattaatattccctttccttattggaaacca

SEQ ID NO: 840174 - DNA, 120 bp, Artificial Sequence
  ENSG00000234377_58 (sequence is synthesized)
acaggtatcagagtcccacaaaataacactgtattgttgatgcaccgatcaaatcattcttttaatcattaaaaattatgcagttgcaatcaaaaacattctcagagagacttagagcag

SEQ ID NO: 840175 - DNA, 120 bp, Artificial Sequence
  ENSG00000234377_59 (sequence is synthesized)
agcctggcaccagcagggtgtggtgatatagtcatttgtaattactgtacctactctgaagggttataaaatgtgtcagaaagtaaaatttgctgagccccattaccaagaagcaaaact

SEQ ID NO: 840176 - DNA, 120 bp, Artificial Sequence
  ENSG00000234377_60 (sequence is synthesized)
tactaactggtgctttaaactttgcatcttataaaggaatgatttatttgacttttgactggtccacttgcagaaatcattacattgcaatattcagtgactgtgcaaaggggaaaaaaa

SEQ ID NO: 840177 - DNA, 120 bp, Artificial Sequence
  ENSG00000234377_61 (sequence is synthesized)
ggataaatcatacagagacattctcaagttaacatctggcgagcatataaggccaaatctgtaaggcaagatctgcctacgatggcataaataatggtgtgtatttgcagtttaggccaa

SEQ ID NO: 840178 - DNA, 120 bp, Artificial Sequence
  ENSG00000234377_62 (sequence is synthesized)
gggataagggcttttgatcataaaaatagttcataaccaattgcaatgagatgatgcaattgtaaaaattttgtttccacaaactgtataaagacaattatgatattttaaatattaacc

SEQ ID NO: 840179 - DNA, 120 bp, Artificial Sequence
  ENSG00000234377_63 (sequence is synthesized)
ccttttaaattgttttcaaataaaattataacggctttttgtaaaaccaaattctaattgacccaatcaaattttaagataaattatgaaggtgagaataacaccagcttgaaaatatca

SEQ ID NO: 840180 - DNA, 120 bp, Artificial Sequence
  ENSG00000234377_64 (sequence is synthesized)
gtttgccatttgtccagctacatgcaaagtcaccagaataaaatggaattatatgaaagaggagcaataaactgcattatttacatgtgttcaatattataatcagaggtaaaaagtgtg

SEQ ID NO: 840181 - DNA, 120 bp, Artificial Sequence
  ENSG00000234377_65 (sequence is synthesized)
tttttaaatatttgtacacacaaagttttattatctactttacataatactgtgttagacacactgggaaatgcaaagatagaaaagataaactatcttctcctgagaagcctttactat

SEQ ID NO: 840182 - DNA, 120 bp, Artificial Sequence
  ENSG00000234377_66 (sequence is synthesized)
ggtagaaaagataggagcacatgtcattacaataagaggaaatgtgagataagtgaccaaagaggatttttgtcttaaaaaatcctaagtttttatctaagagtttacaagtagattctt

SEQ ID NO: 840183 - DNA, 120 bp, Artificial Sequence
  ENSG00000234377_67 (sequence is synthesized)
ctgagccagaacaccatggaaggtttcctggcatgatgacatatgagattcaaggaatgggtattatgttcaaagctcaagactggggagagaagattacattttacagtttaaaatatt

SEQ ID NO: 840184 - DNA, 120 bp, Artificial Sequence
  ENSG00000234377_68 (sequence is synthesized)
ttatttacctttcccaacacttatgcatttgtatcttctgcagcgaatgataaaatttcttttgttttcagaagtgtcaagataattttttattaaaataaacaaataaattcgagaaga

SEQ ID NO: 840185 - DNA, 120 bp, Artificial Sequence
  ENSG00000234377_69 (sequence is synthesized)
ggaaagagtgagtcctacggtagtcatcacaccgggagtccgggcttaacctagtccttcctgacacccctggtggccgttccctgcgctctctcttgacgggaaagaaaaggcccccac

SEQ ID NO: 840186 - DNA, 120 bp, Artificial Sequence
  ENSG00000238043_0 (sequence is synthesized)
acctcgaaggcttatcgcggtggggaaagatccagcacaacagtcctaaagggtatttccatggtggaggatgctctggcggtgcagctgtgggaacatcaggtattttcagagggtgtg

SEQ ID NO: 840187 - DNA, 120 bp, Artificial Sequence
  ENSG00000238043_1 (sequence is synthesized)
aggagggagatggcaactccacctcttcgtctcagtgtctgtcaatgagagcccaccttgagagccccacgctctcagcaggctcaccaggctgttagtaaccggtagagaaaaggagga

SEQ ID NO: 840188 - DNA, 120 bp, Artificial Sequence
  ENSG00000238043_2 (sequence is synthesized)
aaggtcatttcaggtgttcaaagaccccctgaagccccacctaagggtcctgttaagaacctctgctctggagaatattaaaatgttgagcctctgttttctaaactgtgaagaggatat

SEQ ID NO: 840189 - DNA, 120 bp, Artificial Sequence
  ENSG00000238043_3 (sequence is synthesized)
agcactcactcccagccagcttcgtggaagagaaggaagaggctacatagacctgtgctgttaaaacatattggttctctgcctggcagacatgtaatattgatgcagttctattaccat

SEQ ID NO: 840190 - DNA, 85 bp, Artificial Sequence
  ENSG00000238042_0 (sequence is synthesized)
tcagaccgactggagtctcgcactgtcatcctggctggaatgcagtggtgcaagccgactcactgcaacctctgcctcttgggtt

SEQ ID NO: 840191 - DNA, 120 bp, Artificial Sequence
  ENSG00000238042_1 (sequence is synthesized)
gattctcctgcttcagcctcctgatttgctgggattgcagagcaaaccagtgaaaaaatggccttcgcactcctgagagacctttcaccgggctttctacttttgaattctctccatagc

SEQ ID NO: 840192 - DNA, 120 bp, Artificial Sequence
  ENSG00000238042_2 (sequence is synthesized)
tggtttcctcttaggcctcgatagagcagtccctgaatcacacaggtatgctgactacgtcttttcctggtacaaaccatcatgggggaaacacacagcaagaagcatcttcaggtcaca

SEQ ID NO: 840193 - DNA, 120 bp, Artificial Sequence
  ENSG00000238042_3 (sequence is synthesized)
agataggtaataccatctacctgaattttttcaaaagcagcagaatatttagttttctatttcagtggcttctaacagagatcattgtttgcacaagattaaatgtctgcagtggtcgtc

SEQ ID NO: 840194 - DNA, 120 bp, Artificial Sequence
  ENSG00000238042_4 (sequence is synthesized)
ctgggtctccagcttgcagatggcacactgtgggacttcttagcctgcagaatcattgaagcacccattgattgccccttactctagggatttacagctttgtgcttgtcgtggccactg

SEQ ID NO: 840195 - DNA, 120 bp, Artificial Sequence
  ENSG00000238042_5 (sequence is synthesized)
ctcccaaagtgactataatccggaggatccccacgacccttcagagcaggcaagacaccagcaccagaaactctgaaaacctaaaagtcaagaacaatgcttttgcattttcctgtccct

SEQ ID NO: 840196 - DNA, 120 bp, Artificial Sequence
  ENSG00000238042_6 (sequence is synthesized)
tctaaaatttcatttttaagtggtgagatctctttaagaagaggtttcaaaaataatgtaaaaagtattgcttgcaagatttgaaaataagccaattcaacaaatccaaaataaaaagct

SEQ ID NO: 840197 - DNA, 120 bp, Artificial Sequence
  ENSG00000286837_0 (sequence is synthesized)
tgagaccggccccgcgaggcgcgcagggtcctcacttgtggaaagaaacgggcttgtccttgtcgtagcggttcttgcagccgtaggcggagcaggactgcaccatccttccggtcctca

SEQ ID NO: 840198 - DNA, 120 bp, Artificial Sequence
  ENSG00000286837_1 (sequence is synthesized)
ggcacttcacttctgccgccgcagaaggcaggggaagctgttctcagtgtcgctgcgctcggttggattccctcgcttcttttgtagctttggccaacagttacagtgatggtggcctcc

SEQ ID NO: 840199 - DNA, 120 bp, Artificial Sequence
  ENSG00000286837_2 (sequence is synthesized)
ctcgggggtgactagtgtgcccgttttgttgtttgcattagcagaaggaccacagccatcgcccgtctcccatctccaagatggcggaggcagcttcaacctcacctctcgcgaggggtg

SEQ ID NO: 840200 - DNA, 120 bp, Artificial Sequence
  ENSG00000286837_3 (sequence is synthesized)
cgtcccactgtctctgattagccccgaggtcagaggtatcacaagtttctgtgagagccaacgtgacagatttttagcaatgaaaaaagacacactcgccaaatcatctcaattgccaac

SEQ ID NO: 840201 - DNA, 120 bp, Artificial Sequence
  ENSG00000286837_4 (sequence is synthesized)
tatatgtatgtatatgtatgtatatatgtgtgtatgtatatatgtgtgtgtgtatgtatatatatatatatatatgtaattttttaaataaatagaggcgttgtctccccacgttgccca

SEQ ID NO: 840202 - DNA, 120 bp, Artificial Sequence
  ENSG00000286837_5 (sequence is synthesized)
ctccccacgttgcccaggtcagtctggaactcgagctcaagggatcctcccatctcgacctccccatgggttgggattacaggagttgagccaccaggctgtccctccccagaagctttt

SEQ ID NO: 840203 - DNA, 120 bp, Artificial Sequence
  ENSG00000286837_6 (sequence is synthesized)
tttcacacctgagagagaatatgttagaggggttcgaactagagcgactctgtgttgagtgagggctaggaaaatgaggctgggacttgctgggctgcattcccgggaagttaggtattc

SEQ ID NO: 840204 - DNA, 120 bp, Artificial Sequence
  ENSG00000286837_7 (sequence is synthesized)
ctagcctctagatgtgtataccattaaggcaacagattgataatgtttactacacagacccagactaccaagtgtccagatatcccgatattttgagaacagaagcattcctaattttgc

SEQ ID NO: 840205 - DNA, 89 bp, Artificial Sequence
  ENSG00000286837_8 (sequence is synthesized)
gtggtggcacatgccctcgaatttgcttgaatccgggaggcgggggttgcagtgagccgtgcttgcaccactgcactccagcctgggcg

SEQ ID NO: 840206 - DNA, 89 bp, Artificial Sequence
  ENSG00000286837_9 (sequence is synthesized)
cctgggcgacagagtaagactctgtctcataaataaagataatatcgattcttacataatatagtaagcacatctccccatgatctttt

SEQ ID NO: 840207 - DNA, 120 bp, Artificial Sequence
  ENSG00000286837_10 (sequence is synthesized)
ttgtagcaaagcacatctccccatgatctttttttatcctatatataaactaagtgttgtacttagggtggacgcgttcctcctcttactttcgggaatgccctactctgtctgtggagt

SEQ ID NO: 840208 - DNA, 120 bp, Artificial Sequence
  ENSG00000286836_0 (sequence is synthesized)
cctttttaataggcttaaaaaataaaaccaaggaccaatgatttaagtgagggactccagaggccacagatgacagtcaaaacgaagtgaaattgacattcgttgttgattttcacgtca

SEQ ID NO: 840209 - DNA, 120 bp, Artificial Sequence
  ENSG00000286836_1 (sequence is synthesized)
taaaattataatttaaatattaatttataatactattttatacaatttagtcagtattgtaaaagtgcctaaaaactacttaaagatggtgtcttcttgcaaacctgtaaatattcctgg

SEQ ID NO: 840210 - DNA, 120 bp, Artificial Sequence
  ENSG00000286836_2 (sequence is synthesized)
atgagaggaatgatgacagtcaaaagaaggagaagccagctgtcattctgtgaacagccctctgaagaagcccgagtagccaggaactggtttccagccaatagccagcaaggacctgag

SEQ ID NO: 840211 - DNA, 120 bp, Artificial Sequence
  ENSG00000286836_3 (sequence is synthesized)
gccggccaacagctatgtggcaatgcaaaaaataatggtgcatattacaatcaatggcatctttgattggatgtggaaattcaattttgtgtgcacaatagtctctcaagaatggcaaat

SEQ ID NO: 840212 - DNA, 120 bp, Artificial Sequence
  ENSG00000286836_4 (sequence is synthesized)
tgtgcggaggagattaaagatggctgactagaggcatctgacagtcacctcctccataaagaagaatcaaaatagcgagtaaatactggatttcaaaagtgaagtgacaagaaacaccta

SEQ ID NO: 840213 - DNA, 120 bp, Artificial Sequence
  ENSG00000286836_5 (sequence is synthesized)
tggcaggatcagctgggagcccagagaagctccccaacgtgagaaaaggcttgactataatgtgctgtggagaatgtctttttgcattataaatatttgagaatctctgagcttcttgta

SEQ ID NO: 840214 - DNA, 120 bp, Artificial Sequence
  ENSG00000286836_6 (sequence is synthesized)
tccagatgtgtaaacatcctgctagactcgggaagttttccactattaataaaactggaataaaagtggactaaaactagcaatcaataagagtaactttggaaatgatacaaatacatg

SEQ ID NO: 840215 - DNA, 120 bp, Artificial Sequence
  ENSG00000286836_7 (sequence is synthesized)
gaagttaaacaacgtgctcctgaataaccactgggtcaatgaagaaattaagagagaaaattttaaaaatgtattgaaacaaaagaaaattgaaacacagcatacccaaaactatgggat

SEQ ID NO: 840216 - DNA, 120 bp, Artificial Sequence
  ENSG00000286836_8 (sequence is synthesized)
atagcaaaagcagtgctaagatggacatttgtagcagtaatacctacatcagaaaaatggaagatttcaaataaacagtctaatgatgcacctcaaggaacttgaaaagcaagaacaaac

SEQ ID NO: 840217 - DNA, 120 bp, Artificial Sequence
  ENSG00000286836_9 (sequence is synthesized)
aaaccacatccaagattagtggaaggaaagaaacgataaagatcagagcagaactaaataaaatagagacttaaaaaaacaatacaggccggtcactgtggctcacgcctgtaatcccag

SEQ ID NO: 840218 - DNA, 120 bp, Artificial Sequence
  ENSG00000286835_0 (sequence is synthesized)
gggagcgcggcccggggtcgctggggaggccgggtcaacggccactgacatcctcccggcgggctgccgagtcctcagttccgagaggaaacgagagggatgagggccttgagttgttcc

SEQ ID NO: 840219 - DNA, 120 bp, Artificial Sequence
  ENSG00000286835_1 (sequence is synthesized)
accgactgcgagagggcagggagcgcacagtgtttgctccattactgcagatcgccctcgccctgttaaaagatgccctgcagagacagccgaagagcaagaaaggacttctgggcctgt

SEQ ID NO: 840220 - DNA, 120 bp, Artificial Sequence
  ENSG00000286835_2 (sequence is synthesized)
ctaggtgttgagagcacatagtggaatgggacgctaaaattgcttgcagtctccgactgcttaaagctgggaaggtcgttaccactggttcaaacctattttacagatcaggcagctggg

SEQ ID NO: 840221 - DNA, 120 bp, Artificial Sequence
  ENSG00000286835_3 (sequence is synthesized)
gcttacagtgattagtgaggcgaccttcccacgatggcacagctcagtagtggaagagcggggactaggtcgaggttttgtggcttttagtcctgcatgtgtttggggtgactttctgct

SEQ ID NO: 840222 - DNA, 120 bp, Artificial Sequence
  ENSG00000286835_4 (sequence is synthesized)
gacttatactgaactctgtagactgtaagctccaggtgagccaggagtatttctatctagaagactatatgactttactaccttacattctgtaaatgctcaataaaggtgctcaaaaaa

SEQ ID NO: 840223 - DNA, 120 bp, Artificial Sequence
  ENSG00000286834_0 (sequence is synthesized)
gtaaccatgagagaaaccaccaagagaagcacagatatggacgctgacattagtgaactgctggacccatgtcaatgctcacttctctccaacctatagttatgtgagaacaacaaagcc

SEQ ID NO: 840224 - DNA, 120 bp, Artificial Sequence
  ENSG00000286834_1 (sequence is synthesized)
actgcaagccaggtttgcaatcctaactgataacgaaaagttgtgtaacgacatgatcacggcactactgcagctgtcttgtgatcaagaagtaaagccctgaaggtcagcagagatgct

SEQ ID NO: 840225 - DNA, 120 bp, Artificial Sequence
  ENSG00000286834_2 (sequence is synthesized)
gagatgctgatccagaccattgaccttgacatcagcgagctgctgaaagaacctggaaccaccttgctggagacttctgttaagagaaaccacacaggggaggagccaagatggccgaat

SEQ ID NO: 840226 - DNA, 120 bp, Artificial Sequence
  ENSG00000286833_0 (sequence is synthesized)
gcttcagccacatggacatagcacaatagtgcataaatgtcaactctctgagctttaatttaagaagaagaaaaggaatccaccagaatcttgaaggacacaccagattccgggaaggag

SEQ ID NO: 840227 - DNA, 120 bp, Artificial Sequence
  ENSG00000286833_1 (sequence is synthesized)
ggagaatggaggcaaactgcccccatgatggcatccagctaataaaaccaaataggaagagctctggtctgcagctcccagtgtgatcaatgcaagatgggtgatttctgcatttccaac

SEQ ID NO: 840228 - DNA, 120 bp, Artificial Sequence
  ENSG00000286833_2 (sequence is synthesized)
ctacctgattcatctcattgggactgattggacagtgagttcatcccacggagggtgagctgaagcagggcagggcatcaactcacccaggaagtgcaaggggttgggggattttccttt

SEQ ID NO: 840229 - DNA, 76 bp, Artificial Sequence
  ENSG00000286833_3 (sequence is synthesized)
acctgatggagctgaaaaaacacagctcgagaacttcatgaagcatacacaagtctcaatagccaaagtgaccaag

SEQ ID NO: 840230 - DNA, 120 bp, Artificial Sequence
  ENSG00000286833_4 (sequence is synthesized)
agaaatatgggactatgtaaaaagaccgaacctactattgattggagtacctgaaggagatcgagcaaatggaaatgagctggaaaacactcttcaggctgggactacacagccaaggtt

SEQ ID NO: 840231 - DNA, 62 bp, Artificial Sequence
  ENSG00000286833_5 (sequence is synthesized)
gcaaatggaaatgagctggaaaacactcttcaggctgggactacacagccaaggttttatat

SEQ ID NO: 840232 - DNA, 120 bp, Artificial Sequence
  ENSG00000286833_6 (sequence is synthesized)
ctgaaggaagcactaaatatggaaagtcaaaaccagtaccagccactgcaaaaacacaccaaaatacagaaaccaatgacactatgaagaaattgcatcaattagcatgcaaaataacca

SEQ ID NO: 840233 - DNA, 78 bp, Artificial Sequence
  ENSG00000286833_7 (sequence is synthesized)
gaaagacacagcctggcaaattggatagagtcaagacccagtggtgtgctgtatttgggagatgcagctcacatgcaa

SEQ ID NO: 840234 - DNA, 69 bp, Artificial Sequence
  ENSG00000286833_8 (sequence is synthesized)
ttgaaagacacagcctggcaaattggatagagtcaagacccagtggtgtgctgtatttgggagatgcag

SEQ ID NO: 840235 - DNA, 83 bp, Artificial Sequence
  ENSG00000286831_0 (sequence is synthesized)
gcgcttaagagtaacggccggtagctaggctaacacccagcttgtgtggctctcgtactttcttgttcacaggcatgctctgg

SEQ ID NO: 840236 - DNA, 77 bp, Artificial Sequence
  ENSG00000286831_1 (sequence is synthesized)
gcctcccgccatgattctgaggcctccgcagccctgtggaactgtaagtccaattaaactttttcttcccagtcaaa

SEQ ID NO: 840237 - DNA, 78 bp, Artificial Sequence
  ENSG00000286831_2 (sequence is synthesized)
aacaataaggtccaggctgaggtggtttcagatggagatgaggaaaaaaagagacagatggcattttctccccaccct

SEQ ID NO: 840238 - DNA, 75 bp, Artificial Sequence
  ENSG00000286831_3 (sequence is synthesized)
agcaaaggtgactcttgttatgttttagaaaagagacagatggcattttctccccagtatctggcagaagaaatt

SEQ ID NO: 840239 - DNA, 120 bp, Artificial Sequence
  ENSG00000286831_4 (sequence is synthesized)
aaaggtgactcgggtgctattaaaagcattccattttaaaaaggaaacagaacataaaagtttataaaattcgtagcctgacaatgcagtggaaaaaaaaccattttctgaggagaaatt

SEQ ID NO: 840240 - DNA, 120 bp, Artificial Sequence
  ENSG00000286831_5 (sequence is synthesized)
ccattttctgaggagaaattcaagacagctgtagaaatttgcacaagaagcctaatgttaatccccaaaaccatgggaaaatgtctccaggccgtgtcagagaccttcatggcagcccct

SEQ ID NO: 840241 - DNA, 120 bp, Artificial Sequence
  ENSG00000286831_6 (sequence is synthesized)
ccaggatgaaaaactggtttaatgggccaggcccagggtccccatgccatgtgcagcctagggacttggtgtcctgtgtcccagccactccagccatagatgaaaggggccaacatagag

SEQ ID NO: 840242 - DNA, 79 bp, Artificial Sequence
  ENSG00000286831_7 (sequence is synthesized)
acagaagggaaatgtgggtttggagcccccacacaaattccctacctgggtacggcctagtggagctgtgagaagaggg

SEQ ID NO: 840243 - DNA, 84 bp, Artificial Sequence
  ENSG00000286831_8 (sequence is synthesized)
acttgtgctgtgtacttggaaaagccacatgcactcaatgccagcctgtgaaagcagccgggagggagactgtactctgcaaag

SEQ ID NO: 840244 - DNA, 80 bp, Artificial Sequence
  ENSG00000286831_9 (sequence is synthesized)
cttgccccagcatgacctggatgtcagacctggagtcaaaggagatcgttttggagcttcaaaatttggctgccccactg

SEQ ID NO: 840245 - DNA, 120 bp, Artificial Sequence
  ENSG00000286831_10 (sequence is synthesized)
agcatgacctggatgtcagacctggagtcaaaggagatcgttttggagcttcaaaatttggctgccccactggatttcagactttcatggggacttgtaacccctttgttttggccaatt

SEQ ID NO: 840246 - DNA, 74 bp, Artificial Sequence
  ENSG00000286831_11 (sequence is synthesized)
tctcccatttggaatggctgtatttatctaatccctgtatccccattgtgtctaggaagtaactagcttatttt

SEQ ID NO: 840247 - DNA, 120 bp, Artificial Sequence
  ENSG00000286831_12 (sequence is synthesized)
atgattggttttgaaatgtgaggacatcagatttggaggggactgaggcagaaggatatggtttggctgtgtatccacccaaatctctacttgaattgtatctcccagaattccatgtgt

SEQ ID NO: 840248 - DNA, 75 bp, Artificial Sequence
  ENSG00000286831_13 (sequence is synthesized)
agctattctcatgatagtgaataagtctcgcgagatatgatgggtttctcaggggtttctgcttttgcttctttc

SEQ ID NO: 840249 - DNA, 82 bp, Artificial Sequence
  ENSG00000286831_14 (sequence is synthesized)
tcctgagctattctcatgatagtgaataagtctcgcgagatatgatgggtttctcaggggtttctgcttttgcttctttctg

SEQ ID NO: 840250 - DNA, 120 bp, Artificial Sequence
  ENSG00000286830_0 (sequence is synthesized)
tggagagggtggagctttggagtgagacccaggacgccaaatcccaaagagaaaaataggagcctaaataaggatcaggaccaagggaaggggtgaagatactcctaaatagccacatat

SEQ ID NO: 840251 - DNA, 120 bp, Artificial Sequence
  ENSG00000286830_1 (sequence is synthesized)
ggattaattttattttagaatcgtgaaaaatggaagacagtagcacagacacagaaaaagaagaggaagaggagaaagatgaaaaggatcaagagcccatttatgccatagtgcccacaa

SEQ ID NO: 840252 - DNA, 120 bp, Artificial Sequence
  ENSG00000286830_2 (sequence is synthesized)
ttaacattcaagatgagcggtttgttgatttatctgaaactccagctttcatttttctgcatgagtggctgaactaaactaaagagcctcttcacagcaaaagaaaccatcaacagagta

SEQ ID NO: 840253 - DNA, 120 bp, Artificial Sequence
  ENSG00000286830_3 (sequence is synthesized)
acagaatgggagaaaatatttgcaaactgcatctgagaaaggtctgatatccggaatctataaggaacttagacaaatcaacaagcaaaaaacaaataaccccattttaaaaataggcaa

SEQ ID NO: 840254 - DNA, 120 bp, Artificial Sequence
  ENSG00000286830_4 (sequence is synthesized)
tcaaaagaagacatacatgtggccaacaaaagtaggaaaaagtgctcagcatcactaattatcagagaaatacaagtcaaaaccacaatgagatattatctcccaccagtcagaatgact

SEQ ID NO: 840255 - DNA, 120 bp, Artificial Sequence
  ENSG00000286830_5 (sequence is synthesized)
accagtcagaatgactattattaaaaagtcaaaaacaatggatgctggcaaaggtatggagaaaaagaaatgcttatctttgtatttttaaaaccatgatttccttcctctaatcttaaa

SEQ ID NO: 840256 - DNA, 120 bp, Artificial Sequence
  ENSG00000286830_6 (sequence is synthesized)
ttttaagtgaagagttcacatttctgtcaaaatccatcatatgtcgaactttgcaatagaatttctacttctccaccactacccttaataatcaaatcaaaaataaggctaaacttgtgt

SEQ ID NO: 840257 - DNA, 120 bp, Artificial Sequence
  ENSG00000286830_7 (sequence is synthesized)
catacatttgtttgatatagtagctaccaaagacgttgactcaacatacacttatgatgtaaggtcatgcatttttaggtctgacataagttgtttgaaacccaatcatacctgatcttt

SEQ ID NO: 840258 - DNA, 120 bp, Artificial Sequence
  ENSG00000286830_8 (sequence is synthesized)
gtactagttaaaataactcctccccgtgtggtggagatatagcccacttgtttctcatcctgctaatcccaaacccaaaacaccccacagctgctaaccgtgataaaacctaatgatcaa

SEQ ID NO: 840259 - DNA, 120 bp, Artificial Sequence
  ENSG00000286830_9 (sequence is synthesized)
caccagagtcatataaataagtttcccccttctggcgtgttttccttaaaccagccaatccacaactcctgttagaagaccggagggataatacccatataccttaataaaggtgaactc

SEQ ID NO: 840260 - DNA, 120 bp, Artificial Sequence
  ENSG00000286830_10 (sequence is synthesized)
ccacagctgctctctcactccctacccactgctgagctccctgccacctccagacttatctgcgctccccatcagcacccctaagctgtcagatctgtaagtaataaatttcttctgttt

SEQ ID NO: 840261 - DNA, 120 bp, Artificial Sequence
  ENSG00000251336_0 (sequence is synthesized)
atgactcaagagcaagtacttaatttggaaggtgaaggaactgctggtagctctctgtacagcagctgtataaataccgctcaggcagacttcttggcaaatacagcaaggctgctacaa

SEQ ID NO: 840262 - DNA, 120 bp, Artificial Sequence
  ENSG00000251336_1 (sequence is synthesized)
cttgaacagcggaggagactttgccctatttgatatggaaagcacagccatgggtatggatatcagagcctcagagttaggagctgctccaagccttcttccctagatgcctcacacccc

SEQ ID NO: 840263 - DNA, 120 bp, Artificial Sequence
  ENSG00000251336_2 (sequence is synthesized)
tcctggacaacttccaagtatcacagctctggatggccactcatcttctgtgtacagactccaacccagctgaaacccatttcatgaaatgtactttatataaacctaatttattaaaga

SEQ ID NO: 840264 - DNA, 120 bp, Artificial Sequence
  ENSG00000251330_0 (sequence is synthesized)
caattatattagcttctaaaatggctttaacactccacagggccataaattaaaaaccaaagaactcaaacgttacattttttgaactgatttttaaaaatctttaacattcaagtttct

SEQ ID NO: 840265 - DNA, 120 bp, Artificial Sequence
  ENSG00000251330_1 (sequence is synthesized)
gatttttaaaaatctttaacattcaagtttcttcctttattagtttggatttttctctttaaaaaacatgccggattaaaaataatttgggccgagtgtggtggctcatgcctgtaatgc

SEQ ID NO: 840266 - DNA, 120 bp, Artificial Sequence
  ENSG00000227863_0 (sequence is synthesized)
gattaagcacataggttctggagccagtctgtttctttcaaaatcacctcattgcttttgaagaatcagggaaacccccatgagactacaggtgtgaagcaagatagaagcatcagtgca

SEQ ID NO: 840267 - DNA, 120 bp, Artificial Sequence
  ENSG00000227863_1 (sequence is synthesized)
aaagagtactgcatttccaaataaagccactcacaatctttaatcaggctgtaaattttaagaaatctggaccaagacagtttgctccaagagtatcccacaaatgcagatcttcagagt

SEQ ID NO: 840268 - DNA, 120 bp, Artificial Sequence
  ENSG00000227863_2 (sequence is synthesized)
gagattttattattggattgctcacctgtctgttgattctcttactgagataccttggaacatggtttgaataatattgctctaacttctttcatgtcaggaagctctgagttgccatag

SEQ ID NO: 840269 - DNA, 120 bp, Artificial Sequence
  ENSG00000227863_3 (sequence is synthesized)
acttgcggaaatgcctgctacatacatgcgtgttgaacaatgaacttcataactgacatatttatcagagaatcaggatgagagaagatacttccttttcttacttaataagaatagacc

SEQ ID NO: 840270 - DNA, 120 bp, Artificial Sequence
  ENSG00000227863_4 (sequence is synthesized)
tttcttacttaataagaatagaccttggaggtctggacctggacatgaacgtacacttttctaaagaagatatacacatggccaacaagcatgtgaaaaaaagctcaatatcactgatca

SEQ ID NO: 840271 - DNA, 90 bp, Artificial Sequence
  ENSG00000227863_5 (sequence is synthesized)
ccattgtcagaggaatataagtcactctactataaacacacacgcatgcaaattttcattgtagcactatttacaatagcaaagacatgg

SEQ ID NO: 840272 - DNA, 120 bp, Artificial Sequence
  ENSG00000227863_6 (sequence is synthesized)
atggaatcaacctaaatgctcatcaatgacagatcggataaagaaaatatgcatcttcaacctttctggactacagcacctgccaactgacccccacatcatggctccaacgctggcttc

SEQ ID NO: 840273 - DNA, 120 bp, Artificial Sequence
  ENSG00000227863_7 (sequence is synthesized)
gacccccacatcatggctccaacgctggcttcatcacatatcttctctctcagtccctttggctctcagggtgcaatagcttaacaaaattgctgatctaggtgcctcagcattgtttct

SEQ ID NO: 840274 - DNA, 120 bp, Artificial Sequence
  ENSG00000227863_8 (sequence is synthesized)
ttgtcatagtctctgtattatcttattttgagccattcttttcctgcaaagatcctaactgaatgagataactacttcataagctatttgtaaggtttaaataaattaatgcatatttaa

SEQ ID NO: 840275 - DNA, 120 bp, Artificial Sequence
  ENSG00000227863_9 (sequence is synthesized)
aaaggaagaggattagcaactttcccagatctgagttgagctgagatttgagtcaaggcaatattgcttctggggctgtaacaactacattttattgtctcctgaacagatacttccttt

SEQ ID NO: 840276 - DNA, 120 bp, Artificial Sequence
  ENSG00000227863_10 (sequence is synthesized)
atgctgctgtcaacgggaggctaagaagcacagagaaataggccatacaaagtctacctctctgaacactctggtttgttgagatgacagatggttaagtctctctctgacatcaagagt

SEQ ID NO: 840277 - DNA, 120 bp, Artificial Sequence
  ENSG00000227863_11 (sequence is synthesized)
tagagccaaagttatcatggaattgtttcttttggaatgtcaagtttatgtgcaccgtatcactcttctgaaatggactcaagattcagggtctcatctcacttttgatttaactacact

SEQ ID NO: 840278 - DNA, 120 bp, Artificial Sequence
  ENSG00000227863_12 (sequence is synthesized)
ctcactgccttaatttaatagctgaaagaaacactgaacaagtcacactcctgcaagggcatggaacacagaatgaagttagcaaaccatgattggtcttaaggagccatcaaaatccaa

SEQ ID NO: 840279 - DNA, 120 bp, Artificial Sequence
  ENSG00000227863_13 (sequence is synthesized)
tttccttcaagctttctgcctagccttccttcacatatagcttccattctccagtttccccctgtgaacctgattctcttactgagataccttggaacatggtttgaataatattgctct

SEQ ID NO: 840280 - DNA, 120 bp, Artificial Sequence
  ENSG00000286838_0 (sequence is synthesized)
gttttataagtgtctggcatttcccctgtttgcattcactccgttctgccaccctgtgaagaaggtgtttgcttctcctttgcctttcaccatggttgtaagtttcctgaggactaccca

SEQ ID NO: 840281 - DNA, 120 bp, Artificial Sequence
  ENSG00000286838_1 (sequence is synthesized)
gcaatgcgaaactattctactaaaggtgaacatttcccttctgactgaagtttgtattacactcattaatagcaattttctttagtgtggattctctggtgaatgtgaacttctgaggct

SEQ ID NO: 840282 - DNA, 120 bp, Artificial Sequence
  ENSG00000286838_2 (sequence is synthesized)
tgagagaagcccgtactgaactcatcacatttatggggtctctctcccctatgcacttgctcatcagtgccaagttttgcactctgagaaaaattctcaccgctcttagaaatgataatg

SEQ ID NO: 840283 - DNA, 120 bp, Artificial Sequence
  ENSG00000286838_3 (sequence is synthesized)
atgtgctttctctcctgaatggagggagggtactacaaaggagaagagaggagcacctggtgaagctctcactacgttcatcacacaggccaggaagagcaaggggagaaaaagatttgt

SEQ ID NO: 840284 - DNA, 120 bp, Artificial Sequence
  ENSG00000286838_4 (sequence is synthesized)
ccatgggaacaagtactcatgctctaaaggacaatttcatttgaacccactaatttccttttcatgaaaaatttcaaagataaagcaacataaaatatgaggacaaagaaaagggagacg

SEQ ID NO: 840285 - DNA, 120 bp, Artificial Sequence
  ENSG00000286838_5 (sequence is synthesized)
gtcttcaaggagaatttgtgcctttaagtttttactggtacctcagtccttcagcctggagctactcaaagatgaatcatgaaaaagaaaaaaactgtatttcaaacaggttcagtggtg

SEQ ID NO: 840286 - DNA, 120 bp, Artificial Sequence
  ENSG00000280780_0 (sequence is synthesized)
gaggatgtggatgctgttgatctgcggaccacactttgagaaatacacaggtgacagctgtggtggaaagaactcccatccaggaatcaaaacatgtcttcacattttggccatggaact

SEQ ID NO: 840287 - DNA, 120 bp, Artificial Sequence
  ENSG00000280780_1 (sequence is synthesized)
tgggggtcttgctttgttgctcaggatggagtacagtggtgcaatcttgtctcactgcagcatcgacctctggggcttaagccatccttgcacttcagcctcccaagtagctggtactac

SEQ ID NO: 840288 - DNA, 120 bp, Artificial Sequence
  ENSG00000280780_2 (sequence is synthesized)
agctttgccccctccaggggatgcaacaacaaggcgccatcttggaagtagacaccaggccctcaccagacaccaaacctgctggtgcctcgatcttcaatttccagcctccagagtgtc

SEQ ID NO: 840289 - DNA, 120 bp, Artificial Sequence
  ENSG00000280780_3 (sequence is synthesized)
atggtttctggaagaaaagactcaagatgttctcagtagctgctgttttcagacatcatgaaagtcttctcctaccctctataaaaacaaacaataaaactctacaaaggaaaagcccac

SEQ ID NO: 840290 - DNA, 120 bp, Artificial Sequence
  ENSG00000280780_4 (sequence is synthesized)
aaaaacatgctgactttagaagaatccatgatttagaatatttttataaatatctaagaaaacaggagtcctttccatatatatggtccttggagatactttccatatatatggtccttg

SEQ ID NO: 840291 - DNA, 120 bp, Artificial Sequence
  ENSG00000280780_5 (sequence is synthesized)
gagaatccagtttttatgagaaaggtgatttccaaaatctcttacactttacaatttcaattttggcctgagcatatctctcgattgatctacctacctacatactgatctatcttggat

SEQ ID NO: 840292 - DNA, 120 bp, Artificial Sequence
  ENSG00000280780_6 (sequence is synthesized)
gcctcctgtttttctatctaataaagtaaatcctgaagttagtgtgaatcctgtttgacaaagaatatcgcgcagtcagcatttcagagtggcacgaaagagcctgtgttgtcaaaccac

SEQ ID NO: 840293 - DNA, 120 bp, Artificial Sequence
  ENSG00000280780_7 (sequence is synthesized)
gcactggacaaaaggtaggcactgtttacaatccactgacaagaaaacacatgaagaagcaaaccccacagcgctctgaaacctggaagagatgggttctacatgggtctgatgggatta

SEQ ID NO: 840294 - DNA, 120 bp, Artificial Sequence
  ENSG00000280780_8 (sequence is synthesized)
ttggatcatattgctcagagcctcgtccacctgcttcttggccgttttcaggtccgcaatttcctgtaagagcttaaggcgctctgtgtcaaacagtttccgggcctcctcccgggcctc

SEQ ID NO: 840295 - DNA, 120 bp, Artificial Sequence
  ENSG00000280780_9 (sequence is synthesized)
aatggtgagcgctgtccttactttgtcactgctgccgtcgcggagagcacagagagcagacttgagcctctggatctctccatcacgtaccttcaccgtccttgacatttcctgctcgtg

SEQ ID NO: 840296 - DNA, 120 bp, Artificial Sequence
  ENSG00000280780_10 (sequence is synthesized)
ctgcttgataaggttctccctcacagcctgcagctccttcatcttctcctcatggagcttggctttgagttctgtcaccagcaccgtgtgcttgcgctgctccagctcacgaatcctctt

SEQ ID NO: 840297 - DNA, 120 bp, Artificial Sequence
  ENSG00000280780_11 (sequence is synthesized)
cgcttcttgagtcttctctctttcaagctttgatacctaaaaacagagaggcgaaatgatgaagagaaatgagcctcaaaggacgggtgtgctcctaggcaggatttgcagctcaggccg

SEQ ID NO: 840298 - DNA, 120 bp, Artificial Sequence
  ENSG00000280780_12 (sequence is synthesized)
ctgtgatctcttaattcctcatctcttttccaattccaggccctctgagaaaaaagaactacaggccttgaagctgggaatacagtgtgtaagaggaggaaatacctgaggatatttata

SEQ ID NO: 840299 - DNA, 120 bp, Artificial Sequence
  ENSG00000280780_13 (sequence is synthesized)
ttactttgttcagatgaatatttgatgttctggggccttactatgcaatgtgtggtctgcagacaagcagcctcggtatcacccaggaagcatgttagaagcacagaatccctggcttag

SEQ ID NO: 840300 - DNA, 120 bp, Artificial Sequence
  ENSG00000280780_14 (sequence is synthesized)
ccccagatctatgactcagaatttgcatcttaacaaatccccatgtgattggtatacgccttaaaattagaaagtatcgctatcatggtttttccctttacggggaggactgcaaaacag

SEQ ID NO: 840301 - DNA, 120 bp, Artificial Sequence
  ENSG00000280780_15 (sequence is synthesized)
atcgcctggagagctttttagactacacaaccctagctagatccaaactgataaatgtgtgtcttagaatagctcacagtttgatattgtgataaggctaataaattagtgcctcaagtg

SEQ ID NO: 840302 - DNA, 120 bp, Artificial Sequence
  ENSG00000247240_0 (sequence is synthesized)
tttggttggagagggtcccatttccagtcattcttcagcctggtgattcccgcgctcccctgaggagcatatgaagtacgtcggttctgccaggttggaacgcgctgctggacactcggc

SEQ ID NO: 840303 - DNA, 120 bp, Artificial Sequence
  ENSG00000247240_1 (sequence is synthesized)
gatcccctcccactccgacccttccctccagaagggccggttcccaaacggcccctttagacacatccaagcggttgccgacggccctcacgatgaaaactgctgtccgttggtgaaggc

SEQ ID NO: 840304 - DNA, 120 bp, Artificial Sequence
  ENSG00000247240_2 (sequence is synthesized)
agcctcttctgtgctcctcgccgctgacttcctgaggcaggaggatcctttgagtccagcagtttgaggccagcctggacaccacagcaagaccaccaataaataaataaataaatggaa

SEQ ID NO: 840305 - DNA, 120 bp, Artificial Sequence
  ENSG00000247240_3 (sequence is synthesized)
attaccgaaaatactgaagaaagactacctctgattggactcttctcaaggaattaataattcaagaactaaggaaagaaaaaagtgattatatgaaaatactgaagttgatcgtagcag

SEQ ID NO: 840306 - DNA, 69 bp, Artificial Sequence
  ENSG00000247240_4 (sequence is synthesized)
agcctcccaagcagctgggattacaggttttgccttttccagaatgtcacataaatggaatccgccatg

SEQ ID NO: 840307 - DNA, 120 bp, Artificial Sequence
  ENSG00000247240_5 (sequence is synthesized)
cagacgatgaccccctccaaaagttgggtctttgaggagagctactaacttgggttcctggtacaccctctacatgcagtggtgaagcttatctaacagtcattcatagaatcagtttgg

SEQ ID NO: 840308 - DNA, 120 bp, Artificial Sequence
  ENSG00000247240_6 (sequence is synthesized)
atttcatctctctctctgctatggacacagatggcttcactccatcctgtattcttcggaccatgataaaattccagactctcggtagtttttgcgttccaagaagtagagcctagagtg

SEQ ID NO: 840309 - DNA, 89 bp, Artificial Sequence
  ENSG00000247240_7 (sequence is synthesized)
gtggcctataattactttgagtccagcagtttgaggccagcctggacaccacagcaagaccaccaataaataaataaataaatggaaca

SEQ ID NO: 840310 - DNA, 120 bp, Artificial Sequence
  ENSG00000247240_8 (sequence is synthesized)
ctgatcctgtgtgggtaaatgtaaacgctgaattcccacattccaatgtgcgacctgggattaaggcagcaattgagcagggctgaagtacattggtgcaatcttggctcactgcatctc

SEQ ID NO: 840311 - DNA, 65 bp, Artificial Sequence
  ENSG00000247240_9 (sequence is synthesized)
atggtctcgctggcttcaagagtgaagctgcagacctttgctgtgagtgttacagtttataaaag

SEQ ID NO: 840312 - DNA, 74 bp, Artificial Sequence
  ENSG00000247240_10 (sequence is synthesized)
cctcccggtgggctcatggtctcgctggcttcaagagtgaagctgcagacctttgctgtgagtgttacagttcg

SEQ ID NO: 840313 - DNA, 78 bp, Artificial Sequence
  ENSG00000247240_11 (sequence is synthesized)
gctagatacagagtgccgattggtgtgtttacaatcattagatagagtgtggattggtgcactcacaaaccctgagct

SEQ ID NO: 840314 - DNA, 86 bp, Artificial Sequence
  ENSG00000247240_12 (sequence is synthesized)
cctccaaggccccaccagactcaggagctcagctggcttcacccagtgaatcccacacctgcgctgcaggtggagctgcctgccag

SEQ ID NO: 840315 - DNA, 120 bp, Artificial Sequence
  ENSG00000247240_13 (sequence is synthesized)
aggccccaccagactcaggagctcagctggcttcacccagtgaatcccacacctgcgctgcaggtggagctgcctgccagtcccagtgccatacgcccgcactcctcagcccttgggtgg

SEQ ID NO: 840316 - DNA, 120 bp, Artificial Sequence
  ENSG00000247240_14 (sequence is synthesized)
tcagggaggctcaggctgcacaggaacccacggagtgggtgggaggctcaggcatggggggctgcaggtcccaagccctgcccggcgggaaggcagctaagcctccgtgagaaattgagc

SEQ ID NO: 840317 - DNA, 120 bp, Artificial Sequence
  ENSG00000247240_15 (sequence is synthesized)
tgccagcacgctgtcacctctcaatacagtatgtagccctttgagtctgttttctctcactcagcataacgattatgatatttgtccatgttgatgtgggcatcaatttataaaaacaat

SEQ ID NO: 840318 - DNA, 120 bp, Artificial Sequence
  ENSG00000247240_16 (sequence is synthesized)
gctcaggagtgaagctgcagactttcgcgagttatgtcatacataggatatttaaaggaacctcactcgtctcaagtttggccgagacaccaaaacaataaggtcacacttcaaagttac

SEQ ID NO: 840319 - DNA, 120 bp, Artificial Sequence
  ENSG00000247240_17 (sequence is synthesized)
aataaggtcacacttcaaagttacgggcaagtccaccaatacaggatttgcaaaagaagattatagaaaaccaattttcatgccgggcgcgctggctgacgcctgtaatcccagcacttt

SEQ ID NO: 840320 - DNA, 120 bp, Artificial Sequence
  ENSG00000238837_0 (sequence is synthesized)
ctgtggcacttgattgccctggtggtgtttacctcacaaatgctgcctaattcaggccagagggaaggcagagccagtgaaaagagctccacgggctagaagagggtggacccaggaaga

SEQ ID NO: 840321 - DNA, 120 bp, Artificial Sequence
  ENSG00000238837_1 (sequence is synthesized)
gatggcctccccctgtccctgactcaactggagctcagttcactctgctttgaaggagtaggaggagaacactactcacaaaaaggagggcaagaaccggcttgttcaccattgtattcc

SEQ ID NO: 840322 - DNA, 120 bp, Artificial Sequence
  ENSG00000238837_2 (sequence is synthesized)
attctgcttaaccaccgcccaggccagtcatttctctccctggaagactttgagtcatgcacgcgcaaggaaaattagagacagggtttcaccatgttggtctcaaactcctgacctcaa

SEQ ID NO: 840323 - DNA, 75 bp, Artificial Sequence
  ENSG00000238837_3 (sequence is synthesized)
acacagccgaataaaggacaagagtagcaaagaggattatgagcagtgcaatacaaaacaaggctgcaacaaaag

SEQ ID NO: 840324 - DNA, 120 bp, Artificial Sequence
  ENSG00000241168_0 (sequence is synthesized)
aggagttagaagttacttctttgtgctgatgtggtgatgcatgggatgttacagagccagccacagaaataattgacagctggacccagctcctgtttataaggtttaagtctactaccc

SEQ ID NO: 840325 - DNA, 120 bp, Artificial Sequence
  ENSG00000241168_1 (sequence is synthesized)
atctgatatggttaggctttgtgttgctgtccaaatcttatcttgaattgtaattctcataatcctcgtaatctccacgtatcaagggagtgaccacgtggagctgaacagagaagttct

SEQ ID NO: 840326 - DNA, 120 bp, Artificial Sequence
  ENSG00000241168_2 (sequence is synthesized)
gattacctattggccactggaatcatggaagggggaagaatcatgtgcttctgaatgtgtagatctctttcatctaatggaattgcaccacacctaaagatatattaaccagacaacttc

SEQ ID NO: 840327 - DNA, 90 bp, Artificial Sequence
  ENSG00000241168_3 (sequence is synthesized)
atgagaaaatgagataggaagaagtccttagggaccaatggaacagaacagaacactcagaaaaataacaccacacatctacaaccatct

SEQ ID NO: 840328 - DNA, 90 bp, Artificial Sequence
  ENSG00000241168_4 (sequence is synthesized)
gaaactgggacacttccttaacaccttatatgcatgtatgacataaaaccataaaaaccttacaagaaaacctaggcaatatcattcagg

SEQ ID NO: 840329 - DNA, 89 bp, Artificial Sequence
  ENSG00000241168_5 (sequence is synthesized)
caaaggggatgtaattaaactaaacagcttctacacggcaaaagaaactatcatcagcgtgaacaggcaacatacagaatgggagaaaa

SEQ ID NO: 840330 - DNA, 90 bp, Artificial Sequence
  ENSG00000241168_6 (sequence is synthesized)
catcagcgtgaacaggcaacataaatctgacaaagggctcatatgcagaatctactgtgaacttaaatttacaagaaaaaagcaaacaac

SEQ ID NO: 840331 - DNA, 89 bp, Artificial Sequence
  ENSG00000241168_7 (sequence is synthesized)
gcaatcccaatactggatatatacccaaaggagtacaaacgtttactgcaacactgttcacaataccaaagacttggaacaaacccaaa

SEQ ID NO: 840332 - DNA, 71 bp, Artificial Sequence
  ENSG00000241168_8 (sequence is synthesized)
cattctactataaagacacatgcatacaaacgtttactgcaacactgttcacaataccaaagacttggaac

SEQ ID NO: 840333 - DNA, 120 bp, Artificial Sequence
  ENSG00000241168_9 (sequence is synthesized)
aaccatcattctcagaaaactaacacagaaacagaacagcaaacaccacatgttctcactcatacacgggacttgaacaatgagaacacatggacactgggagtggaacatcacacatca

SEQ ID NO: 840334 - DNA, 120 bp, Artificial Sequence
  ENSG00000241168_10 (sequence is synthesized)
aacacatggacactgggagtggaacatcacacatcaaggcctcttgaggggttggaagcaaggagagggagaacattaggccaaatacctaatgcatgctaggcttaaaacctagataat

SEQ ID NO: 840335 - DNA, 88 bp, Artificial Sequence
  ENSG00000241168_11 (sequence is synthesized)
ccaaatacctaatgcatgctaggcttaaaacctagataatgggttgatggctgcagcaaactacgatggcacatgtatacctacataa

SEQ ID NO: 840336 - DNA, 120 bp, Artificial Sequence
  ENSG00000241169_0 (sequence is synthesized)
acatcatcttggtaagttatcttttcctaggagcttgtccatttttatgtaagtcctcaaattaactggcacagtatttattaaattgattagtagggtcgggagcagtggctcatgcct

SEQ ID NO: 840337 - DNA, 120 bp, Artificial Sequence
  ENSG00000241169_1 (sequence is synthesized)
ctccaactcctgagctcaagtgatccagcctcctaaagtgctaggatttacaggcattgagccatcctgctgggccacattcataaatctgacataaataaaacatctatccttttaaat

SEQ ID NO: 840338 - DNA, 120 bp, Artificial Sequence
  ENSG00000241169_2 (sequence is synthesized)
aaatctgacataaataaaacatctatccttttaaatataggaattcactgaatttaaagaaaacagccaccaagaataggaaatttaaacagctttgaactataaaatatacattatttt

SEQ ID NO: 840339 - DNA, 120 bp, Artificial Sequence
  ENSG00000225595_0 (sequence is synthesized)
acatttcccagtattatcgaagatcaagcaagaaagaaaaagacagaaaacaaatgcgaaaccacagcttccttggctctttttgcccatatgccgaagagccgagcattgccgccaagc

SEQ ID NO: 840340 - DNA, 120 bp, Artificial Sequence
  ENSG00000225595_1 (sequence is synthesized)
attggcaccggccatgcggagactagcgaaagctttgcaattcctctacttctcagtgatgactcgggctttctccttacattcttgatgggcatgaccggtcctgtcagctgggtggcc

SEQ ID NO: 840341 - DNA, 120 bp, Artificial Sequence
  ENSG00000225595_2 (sequence is synthesized)
aatttctgttcttcagcagaactgtctcccttcttgggggccgagggctttctggggaagaggatgagtttggagcaatactcattcagacgctgcacattggcctgcagggaatcggtg

SEQ ID NO: 840342 - DNA, 120 bp, Artificial Sequence
  ENSG00000225595_3 (sequence is synthesized)
gacttgttctgcctcctcggatccacagagatgccagtggtccgggtcaccttcttgtgaatgcccgccaccctgagctccaggctgaagcctctgccggcgcgcaccttgatgtgataa

SEQ ID NO: 840343 - DNA, 120 bp, Artificial Sequence
  ENSG00000225595_4 (sequence is synthesized)
cgcacagcagggcacagcacaatgggccagatgggtcccgactctccgggcgcggggcgatgcagcgccctttggcttgccgggccttgattctgcggatcttctggttgaaccacgtgg

SEQ ID NO: 840344 - DNA, 120 bp, Artificial Sequence
  ENSG00000225595_5 (sequence is synthesized)
ccacacgctgctgccagtccttgtggaagtggggcttcaacatcatgccattcctgctgggcgccatggctgcctacggccctcctacgaaggaaacactttatagatttctatagcagt

SEQ ID NO: 840345 - DNA, 120 bp, Artificial Sequence
  ENSG00000225595_6 (sequence is synthesized)
gttacatagtaaggttttatggcgagttttgtagcatggatcatactaccttaggactgatggtaaagttttagtctaaggaaagctctgaaaatttgaaaatgtgtaaccacccaatga

SEQ ID NO: 840346 - DNA, 120 bp, Artificial Sequence
  ENSG00000225595_7 (sequence is synthesized)
gttcagcttgcccactgcctagacagaaccatttatcaagacgggcatgcaaagccggctgtgtgggagacccgttttattattattcaaatcagtctccccaagtggattgcagttttt

SEQ ID NO: 840347 - DNA, 120 bp, Artificial Sequence
  ENSG00000225595_8 (sequence is synthesized)
aaggataatttggtgggtaggggaccagtgagttgggaaagttgattagtcgggtcggagatgaaatcagagggagtcgaagctgtcctcttgtgttggcttaatttctggatgggggcc

SEQ ID NO: 840348 - DNA, 120 bp, Artificial Sequence
  ENSG00000225595_9 (sequence is synthesized)
acaagaccagatgagccagtttatcgttatgggtggtgctagctgatccatagagtacaggggctgcaaaatatctcaagaactgatcttcggttttacaatagtgatgttatcctgagg

SEQ ID NO: 840349 - DNA, 120 bp, Artificial Sequence
  ENSG00000225595_10 (sequence is synthesized)
cataatttataatcttgtggctaatttgttagtcctgcgaaagcagtctagtccccaggcaggaagcgggtttgttttggaaagggctgctattgtctttgtttcaaagctaaactataa

SEQ ID NO: 840350 - DNA, 86 bp, Artificial Sequence
  ENSG00000225595_11 (sequence is synthesized)
attggttaggttagatctctcactgtctcagttgtaattttgcgatggtgttttcaaatgttgatttaaagaagaccataaatttg

SEQ ID NO: 840351 - DNA, 120 bp, Artificial Sequence
  ENSG00000225595_12 (sequence is synthesized)
ggtgttttcaaatgttgatttaaagaagaccataaatttgtgttgctttctcagattttgagaataaggacaaaaagtgtatgttttaatgggagaatcttaagaatttcactactgaag

SEQ ID NO: 840352 - DNA, 120 bp, Artificial Sequence
  ENSG00000225595_13 (sequence is synthesized)
tggatttctctgtccattaacagtgctaaatgttttgtatttcccagttggaaaaacaaaatctgcaagctttgaatgatacttgttattaggttttggtaacagctgttgtactattcc

SEQ ID NO: 840353 - DNA, 120 bp, Artificial Sequence
  ENSG00000225595_14 (sequence is synthesized)
catttcaatgctcaatagccacacgtggcatgtcatacctaccaggtggacagcacagatatagaacattttcatcattgtaaaaagccctatttgacaacactaacttaaagtattaat

SEQ ID NO: 840354 - DNA, 120 bp, Artificial Sequence
  ENSG00000225595_15 (sequence is synthesized)
cttttagaagagaaagcttcagtccaacccaaattacacaattttacttttgaaaatattgttgaaacaacgttcaattttttaaaattttggaaaactgaatgaaatccatttgtaaat

SEQ ID NO: 840355 - DNA, 120 bp, Artificial Sequence
  ENSG00000225595_16 (sequence is synthesized)
gcgcaaatggtactggaggtggaaaactgaagccttgctatagttttagttttttggagggttatgatcaacacagagaagaaaagattcatctacccatagagcttcttgagaaaaatt

SEQ ID NO: 840356 - DNA, 120 bp, Artificial Sequence
  ENSG00000225595_17 (sequence is synthesized)
ttctaacaataattttgaaaatttgtagtgaatttgttcttgccattatttatgggtgctttcatgtgcgaggcacatcaaagttctggggaatgacttaggcacaaccaaatggctatc

SEQ ID NO: 840357 - DNA, 120 bp, Artificial Sequence
  ENSG00000225595_18 (sequence is synthesized)
ttgggaagaccaaagtcctttgctatatatgagagttttgagatggcgactacctttctgtatggtagattcttgtttttgaatatgccctctgggttttcaaaacaaattgtttttaca

SEQ ID NO: 840358 - DNA, 120 bp, Artificial Sequence
  ENSG00000225595_19 (sequence is synthesized)
atacctatagtagttatctagggcatattctttagcttcaaaaattctatctttagaatgggcttcaatattcataactgagttattttcctctaataaatcattaacattttcccatgt

SEQ ID NO: 840359 - DNA, 120 bp, Artificial Sequence
  ENSG00000225595_20 (sequence is synthesized)
ttttctcccgccttttctcctagatgtgccttgtttgcaaaatcatgtctatcatgtccacgactcgcctcaattttttttcttttgtttttgtggcactttcattctctctcaattctt

SEQ ID NO: 840360 - DNA, 120 bp, Artificial Sequence
  ENSG00000225595_21 (sequence is synthesized)
caaattcacatggaaaccaaggaaaacaagctccgttttgctttcaatattgatgcatttctgctctaaggctttgacaccaccctgggtggctgtgtcaagagatgaaagacaaaatga

SEQ ID NO: 840361 - DNA, 120 bp, Artificial Sequence
  ENSG00000225595_22 (sequence is synthesized)
agatgttttcaggttttgaaggagaaacaggtcccttaaggatgagagcgaatcagaagaagacagacaaaaaaggatttaggatttgttccagaagctcatttctggattgactgtcgt

SEQ ID NO: 840362 - DNA, 120 bp, Artificial Sequence
  ENSG00000225595_23 (sequence is synthesized)
accaaggtttggcgaacggcggcaagcgcttgccagtttgtcgaagagtggagaggtcagttgtgccaaggagtggagaggtctaagaactctccaggagcacggagggtttatgcagtc

SEQ ID NO: 840363 - DNA, 120 bp, Artificial Sequence
  ENSG00000266065_0 (sequence is synthesized)
gttttgcttgaagtgtttgttcttacaataaggttctatggagagtagcctgaaacaaagataactacgggctatgcctgtcacagtgttcaatttagtgtgtgtgctgaaagggttatt

SEQ ID NO: 840364 - DNA, 120 bp, Artificial Sequence
  ENSG00000266065_1 (sequence is synthesized)
tactcctgatagtttatacaattctcaaggatatatttgtttacttttgttttgttttccaggattgtttttaaagtgataagttaacttttaaagaagagtaatgtcctgaatatgatg

SEQ ID NO: 840365 - DNA, 120 bp, Artificial Sequence
  ENSG00000266065_2 (sequence is synthesized)
actttgccagggtcataagtgagtagacattttccctatttggcaggatagtcctctagaggctgttcacaatggcagctgtgaggggaccttggtttccttctaagggctagcgagctg

SEQ ID NO: 840366 - DNA, 120 bp, Artificial Sequence
  ENSG00000266065_3 (sequence is synthesized)
cctggaactttccttgaaggaactcaggattttcctttatttccatgcttggaggagaggggattcacaggcccctaagaggggcctctgctccatctcactggttgtgaaacaacaaca

SEQ ID NO: 840367 - DNA, 120 bp, Artificial Sequence
  ENSG00000241163_0 (sequence is synthesized)
gtgcaggctgagaacacaggagctgacttctattgtatcagctgagactgcagggtagactgcaagaagtgcctccttgctgatggactggaattgggctgtctctctctctttctctgg

SEQ ID NO: 840368 - DNA, 120 bp, Artificial Sequence
  ENSG00000241163_1 (sequence is synthesized)
ttgcatttcaccagctaaggagttgcattggcttctgctctcctctcttgctcacctacattgtgaggcagatgagagtggaggttgtaaatcaccctccatgcaatggttcatcataaa

SEQ ID NO: 840369 - DNA, 120 bp, Artificial Sequence
  ENSG00000241163_2 (sequence is synthesized)
ggatatggagcaaaattagaggaggcacgagaaggaaagccggtgatgaacaaggaaagtgcctggttgaagctagcttgcaatcccaaagtcagaaggttgcctgggaagccatgaaac

SEQ ID NO: 840370 - DNA, 120 bp, Artificial Sequence
  ENSG00000241163_3 (sequence is synthesized)
aaagccaaatcaaggcaaagcagacacatggagattttgagactgagaagaggaaaactgaggacattcatgtgagatggtttcaagtttcccttagaaggagaagttatcttcagaagg

SEQ ID NO: 840371 - DNA, 120 bp, Artificial Sequence
  ENSG00000241163_4 (sequence is synthesized)
tcaggttggtgaggtgggagttcaaaaacaacaaagtatgtagctaccattgtgaggaagaccatggaaaatggacgaatcagaatgaaaggctttctgaacaagagtaagtacccccac

SEQ ID NO: 840372 - DNA, 90 bp, Artificial Sequence
  ENSG00000241163_5 (sequence is synthesized)
aattgtagctcccacaattcccacgtggtgtgggagggatctggtgggaggtaattgaatcatggcggggggaaataagtttcacaagat

SEQ ID NO: 840373 - DNA, 81 bp, Artificial Sequence
  ENSG00000241163_6 (sequence is synthesized)
cctcctgcctgctgccatgtgagacctgcgttttgccttccaccatgactgtgaggcctcttccccggccatgtggaactc

SEQ ID NO: 840374 - DNA, 120 bp, Artificial Sequence
  ENSG00000241163_7 (sequence is synthesized)
accatgactgtgaggcctcttccccggccatgtggaactcccagagacagaagcagataatgcaagtgtcatctacatctggcaaaagccaaaggtttggaagatggaaaaaggaatcca

SEQ ID NO: 840375 - DNA, 120 bp, Artificial Sequence
  ENSG00000241163_8 (sequence is synthesized)
ggcaaaaaggagcccaagattgaagtgaatgaccaggtgcaccagttcaaatgcaatcaggagggacaggggtagagggagaagcctagagcagcgcttctcaaactgactattcaagtc

SEQ ID NO: 840376 - DNA, 120 bp, Artificial Sequence
  ENSG00000241163_9 (sequence is synthesized)
acctggagatcttggtgaaatgcagactctggtgcagtaggtcctggcgggaacttgaaattctgcattttgaccaaggtccaaggtgaatgtccagtgctgttgtccttggcctgcagc

SEQ ID NO: 840377 - DNA, 120 bp, Artificial Sequence
  ENSG00000241163_10 (sequence is synthesized)
cctgtaggatgaagttggaagttccagagccttctcttcacataatgggacatgcaagggggaaaccaaatcaaaagtgtagaatgcgtcgctggatgtctttgacatggtgaggtcttg

SEQ ID NO: 840378 - DNA, 120 bp, Artificial Sequence
  ENSG00000241163_11 (sequence is synthesized)
ttcctaacggagcttttcctcttggtcacattacctctgaaggtatctagggccccatactctattccgggggtgctgtggcccacatgggtctgcatggtcagacagtggctaaagcaa

SEQ ID NO: 840379 - DNA, 120 bp, Artificial Sequence
  ENSG00000241163_12 (sequence is synthesized)
attctctggctgcagaagagcctcagtccttctgtctgattggctggcaacatgaccatgagtgtgccctagcagatggccatgaggaggacaactgggcacaaactgggcagccatgtg

SEQ ID NO: 840380 - DNA, 120 bp, Artificial Sequence
  ENSG00000241163_13 (sequence is synthesized)
gcactgggatgaatggcatcactcccaagacctggagcctcttgatctcacttagctcctgtctccatggtccctcttcttcctctctccttcaggggtggagtcttaatttatctgaca

SEQ ID NO: 840381 - DNA, 120 bp, Artificial Sequence
  ENSG00000241163_14 (sequence is synthesized)
gcagagaaaaaatgtgttctgcaggtatatgcactatgatttctgccttaaatttaagcaagtggatttttaaaaactcggtagtcaggaatttgcatccctcttcctgctttgttttct

SEQ ID NO: 840382 - DNA, 120 bp, Artificial Sequence
  ENSG00000241163_15 (sequence is synthesized)
tctttcccccaaagcagtgggtgactctgtccatctgggccagggaggaagagctccagcctagggatcgcttctcaaattttaatgctcacatcaatcccctagggataatacaattaa

SEQ ID NO: 840383 - DNA, 120 bp, Artificial Sequence
  ENSG00000241163_16 (sequence is synthesized)
acatggctcagtgagggaatgaactctgagaaatgtgtcatcaggtagttttgtcattgcacaaatatcacagagcagagtccaaactcttacataaacctagatggcagagcctactac

SEQ ID NO: 840384 - DNA, 120 bp, Artificial Sequence
  ENSG00000241163_17 (sequence is synthesized)
atacctaggctgtatggtatggcctattgctcctgggctacaaacctctatggcatgtgactgtactgaatattgtaggatattgtaacacaatggtaagtatttgtgcatctaaacata

SEQ ID NO: 840385 - DNA, 120 bp, Artificial Sequence
  ENSG00000241163_18 (sequence is synthesized)
tctgagcatagaaaaggaacagtaaaaacacaatttaaaagattttataatgggacacccgtatagggcccttaccatgaatggagtttgcaggactggaagttgctctgagtgagtcag

SEQ ID NO: 840386 - DNA, 120 bp, Artificial Sequence
  ENSG00000241163_19 (sequence is synthesized)
tgagtgaatgtgaagacctaggacattattgtacgctactgtagaccttgtacacattggacgcttaggcgacattaaatctacaaaagaatatttttctttcccttggcttactatatc

SEQ ID NO: 840387 - DNA, 120 bp, Artificial Sequence
  ENSG00000241163_20 (sequence is synthesized)
ttttttattactattttataaactttttgactcttatgtattaacacttagcttacaacacaaacacattgtacagctatacaaaaatattttctttcttggcaaggcatggtggctcac

SEQ ID NO: 840388 - DNA, 120 bp, Artificial Sequence
  ENSG00000241163_21 (sequence is synthesized)
gtgatgcatcactgggtaaacgagagaggctgaagtcagagacaggatcttggagcgcttgatccaatttaattcttctatttttttttttttaaaccctaggcagatgagagtggaggt

SEQ ID NO: 840389 - DNA, 120 bp, Artificial Sequence
  ENSG00000241163_22 (sequence is synthesized)
cagcggggagctactgaggacctcctcactaccctcccttggaagagtttgtctgcaatggagccaacacagtggaaagcagagctgagaaatggacaaacaactcctgatgcctcattt

SEQ ID NO: 840390 - DNA, 120 bp, Artificial Sequence
  ENSG00000241163_23 (sequence is synthesized)
gagcacctggatttagccatgtctgaagctattatatccttgaacttttgaatcatagcaagcaatcaggaaggaaaggccacaagcaaatggaaaccccaccagcacaagctagagctc

SEQ ID NO: 840391 - DNA, 120 bp, Artificial Sequence
  ENSG00000241163_24 (sequence is synthesized)
cacaaggatagactgaaactcatgttctttgtggtgagggcatcctacagaggttgggcatttgttccagatctgaacacacacacctggcccagctcctgcatcacatcaacaaggtga

SEQ ID NO: 840392 - DNA, 120 bp, Artificial Sequence
  ENSG00000241163_25 (sequence is synthesized)
gtcagcagctcctccacctcttctgcctctgccaactggaaacagcaagaccaactcctcctcttccccctcctcctcaacctactcaacttgaaaacaatgaggatgaagacctttatg

SEQ ID NO: 840393 - DNA, 120 bp, Artificial Sequence
  ENSG00000241163_26 (sequence is synthesized)
attaatgaatagtaaatatattctctcttctttaagattttaataacattttctttcctccagctgactctattgtaagaatacagccacctatatgcttcaatacatgagcatacaaaa

SEQ ID NO: 840394 - DNA, 120 bp, Artificial Sequence
  ENSG00000241163_27 (sequence is synthesized)
cccccgggctcccgctcactggttgcaaaactcagctttgcccctgcacggagtttcccttcgcggggcccgctggggaagcatccgcggcttgtggtggctgtggttttgtgcccagga

SEQ ID NO: 840395 - DNA, 120 bp, Artificial Sequence
  ENSG00000241163_28 (sequence is synthesized)
ctcacacgtaaaaggagctcattcggaggcaggggcacgcgcttgtccccagaactcaaaccccagagtccctccggcagatgagagtggaggttgtaaatcaccctccatgcaatggtt

SEQ ID NO: 840396 - DNA, 120 bp, Artificial Sequence
  ENSG00000241163_29 (sequence is synthesized)
aaacgaagcatgtggcctgacaacctaaaattggggtcaatccatccaattatggtgactgcttagaaatatcccttttcctcccaacgttttcctttccttctcccataaacataataa

SEQ ID NO: 840397 - DNA, 120 bp, Artificial Sequence
  ENSG00000241163_30 (sequence is synthesized)
tgtctcctgccagtactaaggcatggcccatggacccactaacacctatgctcacgttagctcttgaggccgagtggcttggttctatctggttatcagatgcaaacttcatcacagcag

SEQ ID NO: 840398 - DNA, 120 bp, Artificial Sequence
  ENSG00000241163_31 (sequence is synthesized)
ggatttgggctagacattagaggaatagtgtggtaccagatggtgtttctgaagaaggttgtcctatttttgcagtttaaggatttgataataaatctgcctggcagccctcagatgtga

SEQ ID NO: 840399 - DNA, 120 bp, Artificial Sequence
  ENSG00000241163_32 (sequence is synthesized)
gagggagggagggaaagagaatcaatcccttcaaccagaattctgtaaagatacaatgaagtgatcaatgtcaacttgctatgattgattgaaatgttatcattcaaccaactgtgttac

SEQ ID NO: 840400 - DNA, 120 bp, Artificial Sequence
  ENSG00000241163_33 (sequence is synthesized)
caattaacacaaattttgccatcttgtgttaccactgggggaaattggggaaacatggatctctctgtattgcttcttacaatttgaggtgaaactaagtatctcaaaatttaaaagctt

SEQ ID NO: 840401 - DNA, 120 bp, Artificial Sequence
  ENSG00000241163_34 (sequence is synthesized)
tttagaaaagaaaaaattccacaatttccaatgtacttgaaagttggaagctgaaccaaagggcacttcagccccacagattccactccttgtctcaacccttcccccaccacaatgtga

SEQ ID NO: 840402 - DNA, 120 bp, Artificial Sequence
  ENSG00000241163_35 (sequence is synthesized)
ccaaattgtttacagtccattctcccagaggctcctggcatctcttgtaaaccacaatctgttagactgtagcttcagcaaagatttctggaagacatcactgaaattctgagtgtccaa

SEQ ID NO: 840403 - DNA, 120 bp, Artificial Sequence
  ENSG00000241163_36 (sequence is synthesized)
tgtgggcatgaagccagttttctagcttccagcctgtccaaatctgaggctattacagtattcaaatggcagcctgtgaactcacatttcaaggagactgttcctcttgcatcctggact

SEQ ID NO: 840404 - DNA, 120 bp, Artificial Sequence
  ENSG00000241163_37 (sequence is synthesized)
ggtgagaattctgtgagattatgcatgcaaagtgctgagcatggggcctggctcatagaaagtatcaaataagtggtagacaagttgtcattttcacttgtggttgataatttccacttt

SEQ ID NO: 840405 - DNA, 120 bp, Artificial Sequence
  ENSG00000241163_38 (sequence is synthesized)
ctattatatccttgaacttttgaatcatgtaggttaccataattccttttttgttaaagctaatttgagttgggtttctatcacttgcaatcaacaattgaccaggtgcttagtacataa

SEQ ID NO: 840406 - DNA, 120 bp, Artificial Sequence
  ENSG00000241163_39 (sequence is synthesized)
tgaatgagtgaatgaacaaattcaattctgtaagtatttatcatctccttacacggcaggcactgttttaagtcccaaagaaagaggcagaggagcgacagagatgacttcctcccttga

SEQ ID NO: 840407 - DNA, 120 bp, Artificial Sequence
  ENSG00000241163_40 (sequence is synthesized)
aagaaatattctgtttctggcctcccatcttggtgggggatgtgcaggctgagaacacaggagctgacttctattgtatcagctgagactgcagggtagactgcaagaagtgcctccttg

SEQ ID NO: 840408 - DNA, 120 bp, Artificial Sequence
  ENSG00000241163_41 (sequence is synthesized)
gagttgtattttccatcgcatctgaagctgtgctggccaacatggtagtcactggccctgtgtggctatgggctagtcctaatggacatgtgctctaacatgtaaaatacacactggatt

SEQ ID NO: 840409 - DNA, 120 bp, Artificial Sequence
  ENSG00000241163_42 (sequence is synthesized)
ttcaatacttggtaccaagaaaataatgtaaaatatctcaatactttaaaaacattattgcatgttgaaataatattttagatatattgggctaaataaaatatacccatattactgaaa

SEQ ID NO: 840410 - DNA, 120 bp, Artificial Sequence
  ENSG00000241163_43 (sequence is synthesized)
acacgtaaaaggagctcattcggaggcaggggcacgcgcttgtccccagaactcaaaccccagagtccctccgatgagagtggaggttgtaaatcaccctccatgcaatggttcatcata

SEQ ID NO: 840411 - DNA, 120 bp, Artificial Sequence
  ENSG00000241163_44 (sequence is synthesized)
aaggatatggagcaaaattagaggaggcacgagaaggaaagccggtgatgaacaaggatttgcctcaactacagagacagcatggaacacgccctcctaggctgcccacatcctcatctg

SEQ ID NO: 840412 - DNA, 120 bp, Artificial Sequence
  ENSG00000241163_45 (sequence is synthesized)
catgggggcacagaagcctggccattcatcccatgggagactcaggacatgctcccagcaacctgatgggctgcccaaggcttggctgatcctgcatccctgcatcacatctcagcttct

SEQ ID NO: 840413 - DNA, 120 bp, Artificial Sequence
  ENSG00000241163_46 (sequence is synthesized)
ccctctgcccaaatctacttcctccccattcctttcacaggcattgattccctgataaacaccttgcaccccatattccatctcagagtctccttgcagagaacccaacctgtggcagag

SEQ ID NO: 840414 - DNA, 120 bp, Artificial Sequence
  ENSG00000241163_47 (sequence is synthesized)
ctggtctcaggactcggagcgagggagcagggaaagaggacaggaaagcagggagagtcaatttaagggtatgttgtctgagacaaagattctgctaggacctctgagatgggtacaaga

SEQ ID NO: 840415 - DNA, 120 bp, Artificial Sequence
  ENSG00000241163_48 (sequence is synthesized)
tgcctggagccattcactgggcagtatctgtccatcagctcccaggccccacagaaccggagctgcctgtgagggctttcactgccctgcatttctgggcttcacatatgcactggctga

SEQ ID NO: 840416 - DNA, 120 bp, Artificial Sequence
  ENSG00000241163_49 (sequence is synthesized)
ctccctgtcttcaaggacgatcctgagcagaaagtgggtgcacttgaggtggcatgctgttgcgagagtctgagctttatgagaagcagacccagggggcatggtgtggggcatcccaaa

SEQ ID NO: 840417 - DNA, 120 bp, Artificial Sequence
  ENSG00000241163_50 (sequence is synthesized)
ggacctgccatacattaggtgccttggtcttggggaggagccctcgggagttctgagggtgggagaagaggtaggtggggttaatcctttcccattccctccctgcctcagcaccatggc

SEQ ID NO: 840418 - DNA, 120 bp, Artificial Sequence
  ENSG00000241163_51 (sequence is synthesized)
tcaggcagtagcgctgccagctcctcctgggatcagagttatggccctgctccccttgtcccttcaggctgaggaacataagggcttcccatggttgctggtgtctgagtgcctcaacct

SEQ ID NO: 840419 - DNA, 120 bp, Artificial Sequence
  ENSG00000241163_52 (sequence is synthesized)
cccttgctggttcctttcccctgcccacacctttgtcaatagttccccccactgaagtctctttggttgagcagttggtggggatgctgactgataaagtggtctaggccactgctcact

SEQ ID NO: 840420 - DNA, 120 bp, Artificial Sequence
  ENSG00000241163_53 (sequence is synthesized)
gcttaaagccttgcttcagagagaccttccagggccctgcagctcccccttctccaacccctccaacccctccaacctttctctctcccagctggtctgggttccctacggcatctactt

SEQ ID NO: 840421 - DNA, 120 bp, Artificial Sequence
  ENSG00000241163_54 (sequence is synthesized)
gcttttgaatctatttcttatagatacatgtgtgtcctcctctttcacagccttaccttttcatatggaggaagaaaaaacccatttctataaagctattaaatgttttcctttcacaaa

SEQ ID NO: 840422 - DNA, 120 bp, Artificial Sequence
  ENSG00000241163_55 (sequence is synthesized)
ctcctctcttgctcacctacattgtgagcctctgttcagatgtcacattctgcatacaatggcacctcctaacagaagaaatgatggcatgggcatgcaatctgcaaaatccataccaca

SEQ ID NO: 840423 - DNA, 120 bp, Artificial Sequence
  ENSG00000241163_56 (sequence is synthesized)
gagtagtattccactgtattccacatgaggctcttatgaccgacttcagcagaaggtcagaggattctatgatgtttgatggtgtgcttcaggggagaagggttggggtcaaagagacct

SEQ ID NO: 840424 - DNA, 120 bp, Artificial Sequence
  ENSG00000241163_57 (sequence is synthesized)
tcccgcttctgctggttttctcagatgccaagatgctctattttggggtaacatgtcctaaaccctatcacctgcctaatgttacttattagctctcatttcccctgacactttcccttt

SEQ ID NO: 840425 - DNA, 120 bp, Artificial Sequence
  ENSG00000241163_58 (sequence is synthesized)
ttgttttcttgagtagaagcttcataaaggcaagaccttcatcttactcacagcagttgattctatcaccttgtatggcccctgacacatagaaggtgctcaataaattttgttgaatgg

SEQ ID NO: 840426 - DNA, 120 bp, Artificial Sequence
  ENSG00000241163_59 (sequence is synthesized)
gttctgggcccagatccccataagtcagcgatgaggggggccgagcaggggctgcccgttagacggccgcagagtcccagcccccagccctgctcacctttcttacctctctggccccgt

SEQ ID NO: 840427 - DNA, 120 bp, Artificial Sequence
  ENSG00000241163_60 (sequence is synthesized)
cggcatttgagcctgggaccccagacgaaaggatacgcttccttttagaacccctgccaatctgaggacggggccaccccacagacgccgtggctcagcaagcagaccaatggccgagga

SEQ ID NO: 840428 - DNA, 120 bp, Artificial Sequence
  ENSG00000241163_61 (sequence is synthesized)
caaagggaaatttaatgtaaggagctgattgcacagatgaaggaaggggctgggaggcaaacaagagggaactgtgaggtaacccagggatttgccacagtaggaagacatgaccactac

SEQ ID NO: 840429 - DNA, 120 bp, Artificial Sequence
  ENSG00000241163_62 (sequence is synthesized)
taggatagagaggtaaaaaataaaaaaataaaaaaagagatggtgttacttgtattcaggaggtggagtcatccagaggaggctgaagccatggcaggtctgtgtggcagaagctgctgc

SEQ ID NO: 840430 - DNA, 120 bp, Artificial Sequence
  ENSG00000241163_63 (sequence is synthesized)
cagggaagacataccatggctccaagaaaagctgccagagacagaaagtgtgggggagaaagattcttccttttccctgcctcccacctctcaaactcaccgcagagcttccccttggcc

SEQ ID NO: 840431 - DNA, 120 bp, Artificial Sequence
  ENSG00000241163_64 (sequence is synthesized)
tcatgcctattgaattctcggaaatgggcttcgagtgcctatttcaggagttgaaatctgaacatcagctctttcttcctctctgcattcctgccacacagtcctaatcctctccagtgt

SEQ ID NO: 840432 - DNA, 120 bp, Artificial Sequence
  ENSG00000241163_65 (sequence is synthesized)
gatggatccctctggctgggtagaagggagatcatttaaaggaaatttgaaaaagaaaagaatagtattccatttcaagagatttttctcctgacacagttattttcaacaggtgacagg

SEQ ID NO: 840433 - DNA, 120 bp, Artificial Sequence
  ENSG00000241163_66 (sequence is synthesized)
tattgatactgatgaaagattcttgagtgaatacaaaccactccccacccccatccccagcatacattctctagaaattccagaatgcccagtgagtggattcattccacatatatttag

SEQ ID NO: 840434 - DNA, 120 bp, Artificial Sequence
  ENSG00000241163_67 (sequence is synthesized)
tgcctaactacatgccaaggagctgggtgctaagaacaaaaaagtatgattcctgccctctgccatagagtttgtgatctgtgttgatgcattaaagattaatccaatgattacacaaaa

SEQ ID NO: 840435 - DNA, 120 bp, Artificial Sequence
  ENSG00000241163_68 (sequence is synthesized)
gttactagaggagaggagaagctccgtgcaggggaatccgggatgctggaaagctggggaatttaatacagagctggctctgctccatcctggatcttctttatgttctttgacaatgtg

SEQ ID NO: 840436 - DNA, 120 bp, Artificial Sequence
  ENSG00000241163_69 (sequence is synthesized)
ccagaaaccctgacaatgaaccgctgtctctgactaattgttctagtggagatgtctcctgtttgacttgattttaaactgtggagcacgtcaagagaaagctcactgatctgccgaggg

SEQ ID NO: 840437 - DNA, 120 bp, Artificial Sequence
  ENSG00000241163_70 (sequence is synthesized)
tttgtgcttttctgtcttcatgcatctgttgtgggtgaagagagcaaagattcttcattcaatcaaaggccccctttggagatgctgagaaggaaatttcctttggaaattcccaaagga

SEQ ID NO: 840438 - DNA, 89 bp, Artificial Sequence
  ENSG00000241163_71 (sequence is synthesized)
cccgcctttgccaccacccacattaaaacaactttaacttcaacctagtcaaagtatatgggcttcccaatcaggcagattcacggttt

SEQ ID NO: 840439 - DNA, 120 bp, Artificial Sequence
  ENSG00000241163_72 (sequence is synthesized)
caaagtatatgggcttcccaatcaggcagattcacggtttcattctactccaccagatattagctgtgtgtggatgttagtctctgggctttgtttctaaaatgtatgtaataatgcacc

SEQ ID NO: 840440 - DNA, 120 bp, Artificial Sequence
  ENSG00000241163_73 (sequence is synthesized)
cttcttttaatctttcttcatatattcttattctatacagcttttttctattttttaatttttaaaatgattttttaaaaactaaggcacaggccaggcacagaggctcatgcctataat

SEQ ID NO: 840441 - DNA, 66 bp, Artificial Sequence
  ENSG00000241163_74 (sequence is synthesized)
gtgtgcagagcggaggctacagtgagctgagattgtgcactgcactccggcctgggcaacagagca

SEQ ID NO: 840442 - DNA, 81 bp, Artificial Sequence
  ENSG00000225598_0 (sequence is synthesized)
cacctcagcctcccaggtagctgggactataagcgaagaccaccacacttggctatttttttgtctccaactcatgagttc

SEQ ID NO: 840443 - DNA, 120 bp, Artificial Sequence
  ENSG00000225598_1 (sequence is synthesized)
tgtctccaactcatgagttcaagcaatctgcccatcttggcctccaaaagtgctgagatttacagataacaaaatcctggaaaagagatgccaagtaacttttccaagatcaatgatcta

SEQ ID NO: 840444 - DNA, 120 bp, Artificial Sequence
  ENSG00000225598_2 (sequence is synthesized)
tatatgacctatagaaagaacactcaactctttcctgaaaaacagtaccaagttgaaggctgaagagggagtgaataaatggaaaagtatttttttcttaggtaagaagactatattgca

SEQ ID NO: 840445 - DNA, 120 bp, Artificial Sequence
  ENSG00000225598_3 (sequence is synthesized)
catgtacacaaattatgttatgtaccatttgttacacaaacattttcaatagcaatgactgagaataccctgagattccatctgtaaatggacagtataaataaatgtggtatattcata

SEQ ID NO: 840446 - DNA, 120 bp, Artificial Sequence
  ENSG00000286781_0 (sequence is synthesized)
agtagaaacagctgaaagtgatcacaggctggaggtgtcatgtatgcaacgagtacgggcttgggagtgggattttccaagatttcagtcctcgctgccgcatcgcaactggagactgag

SEQ ID NO: 840447 - DNA, 120 bp, Artificial Sequence
  ENSG00000286781_1 (sequence is synthesized)
atattaaccaaatcagcttccacactccaccaaggcccacaagccgctggagctggatggcatgcttgacagagttgttgctccagtcccttggcaccatccagacattgacctaagaag

SEQ ID NO: 840448 - DNA, 120 bp, Artificial Sequence
  ENSG00000286781_2 (sequence is synthesized)
ataaccttggggaatctggaggatgtcaatacagcatggtctgatgagagctgggaaagtccgtcttcccatctcctccccttctcaggttcaagccactccagggctgactcacagaac

SEQ ID NO: 840449 - DNA, 120 bp, Artificial Sequence
  ENSG00000286781_3 (sequence is synthesized)
caactttctctccagttgatccttatgacacaggaacttctgaagcctgaaaatgatgctggaggaacaatcaagcaatgacttggaccttgagatttcatcatgtttgaaggctctctg

SEQ ID NO: 840450 - DNA, 120 bp, Artificial Sequence
  ENSG00000286781_4 (sequence is synthesized)
cttggtaatatttatgagaccattattcacagacagacaaccttcttttaggttttattagacaatattaagtccagataagagaccaacagaggaatttgagaatgaaatctgaattct

SEQ ID NO: 840451 - DNA, 120 bp, Artificial Sequence
  ENSG00000286781_5 (sequence is synthesized)
acaagatcgggttcacattatcatctttgtacacgtgtgaacagggacaagaaatgtatttgtttccttgtttgagatgattaccaatgggtgccagaggggcctataggtgattttaat

SEQ ID NO: 840452 - DNA, 120 bp, Artificial Sequence
  ENSG00000286781_6 (sequence is synthesized)
taaattgcttcaaattacttctcgttcttcaagcaagaagaccactggattctatccaggttttagctacccagcttggggtggactgaggttgaccaaaggataaaagctgcaaaatat

SEQ ID NO: 840453 - DNA, 120 bp, Artificial Sequence
  ENSG00000286781_7 (sequence is synthesized)
agcaaactcacctagtgactttctccttataggactcaactctcctctagaaaccaccttcttttgttttctcctcactatcatccaacgatcatttgtatatttctcccagagttttta

SEQ ID NO: 840454 - DNA, 120 bp, Artificial Sequence
  ENSG00000286781_8 (sequence is synthesized)
gtggttgtccatgagaagatgtgtctgaaagaagctacctgaccactacaaaagtagttccaatttgttagcaatgtttgaggaaatatgggtaaagtttcatgactgacttgtaaatta

SEQ ID NO: 840455 - DNA, 120 bp, Artificial Sequence
  ENSG00000286780_0 (sequence is synthesized)
ggactagagaggctggaggaatgggaaagccaatttcaaacagtgggaatcaacctttgaaagctttggagacttcagctcgcacagcagcacaaatggctgagtgttggggatacaagt

SEQ ID NO: 840456 - DNA, 120 bp, Artificial Sequence
  ENSG00000286780_1 (sequence is synthesized)
ggctgagcggcgagcagagaagcagcgactgagctctggagactacagatagacgcagctaacttcagacggaaagaagttttagtcgattactattctacgtggctattgcagcgccgc

SEQ ID NO: 840457 - DNA, 120 bp, Artificial Sequence
  ENSG00000286780_2 (sequence is synthesized)
acaatacacacatccctgtccctgaagcccatttgtcccctccactcaatgtcagttcatctgttgagagaggtgacgagaagggagagtctgtagaagatatgatttccctcggcgagt

SEQ ID NO: 840458 - DNA, 120 bp, Artificial Sequence
  ENSG00000286780_3 (sequence is synthesized)
tttccccttgtcaattccatcgtttccggattgggtagccaccaccactttcatcaggggctgagaaatggagatgaactgtgcttccatttttatctgtgctggagatggaggccacag

SEQ ID NO: 840459 - DNA, 120 bp, Artificial Sequence
  ENSG00000286780_4 (sequence is synthesized)
tcctgctgtcattttccgtgagtgctcccccattgcggctggtaaacctccctggcaaacaatccatcttatgcatggaagcatacaattttagagctagaaataacctaaaacataatt

SEQ ID NO: 840460 - DNA, 120 bp, Artificial Sequence
  ENSG00000286780_5 (sequence is synthesized)
tagtcagaggccttcattgtataaaagagactcaacctagagaaattaagtgagctactcaaagccatacaggtaaaggcagataaaagaatgagaaagcagatttttcttattccatcg

SEQ ID NO: 840461 - DNA, 120 bp, Artificial Sequence
  ENSG00000286780_6 (sequence is synthesized)
agatttattattttttaaaatttttttctgggactctacccttactcaagtttcaattagccttttccaacagggtgactgaaattattttaaaacggtagagttatatgagataacaat

SEQ ID NO: 840462 - DNA, 120 bp, Artificial Sequence
  ENSG00000286780_7 (sequence is synthesized)
tttctcttgtaattatcttgcatttgttctcttccaagagacaagatggtggtcaggggaaggagcagcaatgagcaacagggacagtcataggtcctgaaagtcttcactcaagagacc

SEQ ID NO: 840463 - DNA, 120 bp, Artificial Sequence
  ENSG00000286780_8 (sequence is synthesized)
caagtgcctttttgtgtgaaatctaccacctaagtcatttcctagaggccttcattcagaggggagattaacaaacccctatgactcttcatcctttttttattctaggatagctaagat

SEQ ID NO: 840464 - DNA, 120 bp, Artificial Sequence
  ENSG00000286780_9 (sequence is synthesized)
ctcatatggaatagaaccaagtttcttgctaaggagtctgaagagtgtctttgtcaaacaaaattaagccaacatataattgtcatttgctttattcttatggaaattgaacattagcat

SEQ ID NO: 840465 - DNA, 120 bp, Artificial Sequence
  ENSG00000286780_10 (sequence is synthesized)
gtgcataattgatctgaagtccagacacatcaaagacattaatctatgtatgtatctatgtgtttttaatctaattataaggagctccatatgttattactcaaaacttgcttttgctta

SEQ ID NO: 840466 - DNA, 120 bp, Artificial Sequence
  ENSG00000286780_11 (sequence is synthesized)
ttttattttatttttttaattaaaggaaatgtctattattccatgcccctgtgtctggcttttaaaaatctctttccttttttttctcaaatgaccagagctgcagttatcagcctctct

SEQ ID NO: 840467 - DNA, 120 bp, Artificial Sequence
  ENSG00000286780_12 (sequence is synthesized)
agggctcttgaactgaacacttattcttttaaaaatcatcaacacgggatctgttgccaagaagagaagccaattcttgtctccatgctctaggaagtgttttctttgtagtactgttgg

SEQ ID NO: 840468 - DNA, 120 bp, Artificial Sequence
  ENSG00000286780_13 (sequence is synthesized)
catggaggtgaagagcctggaactcgatactgaaatctcagtaacagagctgccactgggtacagtttattttggaattaaagcaaatacatccagaaattgtactcaggatattcaaat

SEQ ID NO: 840469 - DNA, 120 bp, Artificial Sequence
  ENSG00000286780_14 (sequence is synthesized)
acgagtaatgaaacattgtaaatgtaaccacaactatatcttatgggagatcaatagagaactaagtgtatttgctctattagcacaaagtatacatagatatgctattacatcaataat

SEQ ID NO: 840470 - DNA, 120 bp, Artificial Sequence
  ENSG00000286780_15 (sequence is synthesized)
tttaccgaagtaggaaagagtattcagaaattagaacaaaaatgaactgtattaactgtaattgactgtaaaatattttaacttcataaaaccacatatattatcagacatagttagata

SEQ ID NO: 840471 - DNA, 120 bp, Artificial Sequence
  ENSG00000286780_16 (sequence is synthesized)
tttggttcttatttcttctgatgattacagattaaataagaattcttattttaacaagacaatcagaaagagagatgtataaaggaggggctgagggcagttctaatataacctgaagag

SEQ ID NO: 840472 - DNA, 120 bp, Artificial Sequence
  ENSG00000286780_17 (sequence is synthesized)
ttgtgggttcttttatgtatttggtatgtgtgtagctctgtgttttatgtatacatgatgtagagaaagtatatgtttctaatattacctgttagtgttcggaaaaaagtgttacaaaat

SEQ ID NO: 840473 - DNA, 120 bp, Artificial Sequence
  ENSG00000286780_18 (sequence is synthesized)
atggcaaaatgttcttgcatatgtataattctgcaaaaggtgaacagatgcttgttttggtagattttccctgcttttgctgcttttagtatcgttcttctaacctgcttttaatagatg

SEQ ID NO: 840474 - DNA, 120 bp, Artificial Sequence
  ENSG00000286782_0 (sequence is synthesized)
tcggatgagtcttagtatatgttgtcagtagtaattatgcttatcatgtaaaattgttgtatgccacagaagtaactaaatttccttgtcagtcctgtctaactatgactgttctaagag

SEQ ID NO: 840475 - DNA, 120 bp, Artificial Sequence
  ENSG00000286782_1 (sequence is synthesized)
cttgtcagtcctgtctaactatgactgttctaagagttttgtcatccacagttgttttacttttatccttttttttttctgagaaagagtcatactctgtcacccaggctggagtgcagt

SEQ ID NO: 840476 - DNA, 74 bp, Artificial Sequence
  ENSG00000286782_2 (sequence is synthesized)
cacttttatccttttcaaaaggtgattttataaatagctatatgactctgacaggtgcttttgaatgcaggttt

SEQ ID NO: 840477 - DNA, 120 bp, Artificial Sequence
  ENSG00000286782_3 (sequence is synthesized)
tagctatatgactctgacaggtgcttttgaatgcaggtttctgataacttgggagattgtgacactagaatagaggagaaacatctaagactcctgtagacagttaatgtgttcataaac

SEQ ID NO: 840478 - DNA, 120 bp, Artificial Sequence
  ENSG00000286782_4 (sequence is synthesized)
attgagcagaaccggagttaattacatggactaaactaatggaaaactgaaataatctttttatgactttgtttgaaacattggtaattcttttgtttctgagtccagaaaacccttttt

SEQ ID NO: 840479 - DNA, 120 bp, Artificial Sequence
  ENSG00000286782_5 (sequence is synthesized)
aattctccagaatttgaaaactattagcaagtatacttaatttatagcagtctagttatttgcataagttcaataagaatctgttttcttttgtaacaggatacaattgaagacactggt

SEQ ID NO: 840480 - DNA, 120 bp, Artificial Sequence
  ENSG00000286782_6 (sequence is synthesized)
tattttaccaaggctttgattggaatggcttactttcagatataaatcaactgctttaaggaatcaaagttgacttacagagtcataaaagccccttgggaaagctggcctcatgccttt

SEQ ID NO: 840481 - DNA, 120 bp, Artificial Sequence
  ENSG00000286782_7 (sequence is synthesized)
aaagctggcctcatgcctttccacacagttcctgtacagtttcctgacgtgtgttatgctgtgctttcttaaaaccctgtgaactgaagctacacaacttaaacttcagaagaaaataac

SEQ ID NO: 840482 - DNA, 120 bp, Artificial Sequence
  ENSG00000286782_8 (sequence is synthesized)
actgatgtatgaacttcagagaaaaatggctctatcttttcatttgtttgttgttttctttctttctgtccctattttctgtttgtagaacatgatactttacaacctgctaaaaatgag

SEQ ID NO: 840483 - DNA, 120 bp, Artificial Sequence
  ENSG00000286782_9 (sequence is synthesized)
cttttctaataatgtgagacctacctgtctagaatagatcatcctagctataagtgatcagaaaaacctgagactggagactcattttcttctaaaatgctctttctgaaagattttaaa

SEQ ID NO: 840484 - DNA, 120 bp, Artificial Sequence
  ENSG00000286782_10 (sequence is synthesized)
aagaaacagaaaaaatgtgaaaggaaaataaatctcggattccaaaatcactaagccaagggaaaagtcaagctggaaactatgtcaggcgaacctacctcccattttattcctaaataa

SEQ ID NO: 840485 - DNA, 120 bp, Artificial Sequence
  ENSG00000286782_11 (sequence is synthesized)
gacagctacaaagataaaaaaaaaatctccctcacaatttgcccacaaggaaatttcttgtgggcctcaagatctttaccctgaaacagttctgttgaatttcaccctggcaatgtaaac

SEQ ID NO: 840486 - DNA, 120 bp, Artificial Sequence
  ENSG00000286782_12 (sequence is synthesized)
tgatagcttattttcacagatgtgggacaggaagtcatccctctgctcacctgagacaattgcatatccgattgcttcctgtgccctattgtttatgtaaaaatgcagatacactgagac

SEQ ID NO: 840487 - DNA, 120 bp, Artificial Sequence
  ENSG00000286784_0 (sequence is synthesized)
atcatctttgaactagaaaatgagcgctcagcagaccttgagtttgccagatttgatcatgaacttcccagcttcaagaactcctgaacaaagctccacgatgaagtctacgaagccaca

SEQ ID NO: 840488 - DNA, 120 bp, Artificial Sequence
  ENSG00000286784_1 (sequence is synthesized)
ttttggacaaaggctgaatctaaggactgtttggaagagatccacccaatagattagcttaaagaagactatctggacaacttgttgaaatagaaaaactcgtcctaatattcatctgga

SEQ ID NO: 840489 - DNA, 120 bp, Artificial Sequence
  ENSG00000286784_2 (sequence is synthesized)
atctcaagggacgtaatagcaaaaccacattgtaaaaatagaacaaagatggagatttgacacttctttatttcaaaagtgagtagcatatgaagtctgagtatatgagctaaaagttta

SEQ ID NO: 840490 - DNA, 120 bp, Artificial Sequence
  ENSG00000286784_3 (sequence is synthesized)
taaagatcatataaccaacaaatcacaaactggtagactactggccatggaatacctggatgctgtcaatgttaaaaatgagaagattttatataaaaggcagcatcctgataaattatc

SEQ ID NO: 840491 - DNA, 120 bp, Artificial Sequence
  ENSG00000286784_4 (sequence is synthesized)
ctacaaatatgaaactactaacactggatccatgtctttccaaaattatcatcaccatcatcatcgtcatcatcacaaagccatcacagagtgctttctgtttgtcatccacagtgccaa

SEQ ID NO: 840492 - DNA, 120 bp, Artificial Sequence
  ENSG00000286784_5 (sequence is synthesized)
accctttgcagacattgtttcttttaatctttacagcaatcctatcatgtaggataccctattatcacctgataattgaagataaataattgtccaagagtatacaagtagcagatgata

SEQ ID NO: 840493 - DNA, 120 bp, Artificial Sequence
  ENSG00000286784_6 (sequence is synthesized)
aagccacatttcaaactaatatgattctaacccatcaactgtcagccaatggtcgtaactggcctgtttggattttgtgccctgcagtttgtcacagtttgctcctgtctgtacgtggtc

SEQ ID NO: 840494 - DNA, 120 bp, Artificial Sequence
  ENSG00000286784_7 (sequence is synthesized)
cttgttttacagcggcagaaacctccaaagtgaagtcaagcaaagttaactatgttaggttgtagaaatatcaatgatgtgtgcttctgtctatttcaacaactgaccttcagcccaaca

SEQ ID NO: 840495 - DNA, 120 bp, Artificial Sequence
  ENSG00000286784_8 (sequence is synthesized)
caaaatatttctcaataaagaataactgattgactaattgaaggaaaaagtaacaaatgactacagggcatagttaacactggatttgtgttcaaggtcctctatatttttggtctccat

SEQ ID NO: 840496 - DNA, 120 bp, Artificial Sequence
  ENSG00000286784_9 (sequence is synthesized)
atttcacaaaaaataacaactgccataaattgttagaaaatagcattgttttattaatacatagtgtgagttggcctggctcactggatcactcctgtgatcatagcactttgagaagtc

SEQ ID NO: 840497 - DNA, 77 bp, Artificial Sequence
  ENSG00000286784_10 (sequence is synthesized)
tcactggatcactcctgtgatcatagcactttgagaaggtggccaacttggtgaaatcccgtctctactaaaaatac

SEQ ID NO: 840498 - DNA, 64 bp, Artificial Sequence
  ENSG00000286784_11 (sequence is synthesized)
ggaagcagagatctcaaaaaataaaaataaaaaaatacgtagtgtaagtcatttcttccagggc

SEQ ID NO: 840499 - DNA, 120 bp, Artificial Sequence
  ENSG00000286784_12 (sequence is synthesized)
aaataaaaaaatacgtagtgtaagtcatttcttccagggctttgctttttatcttatttaatactacagccatgttctgagctaaatttattattattcccacctgacagataagtaaaa

SEQ ID NO: 840500 - DNA, 120 bp, Artificial Sequence
  ENSG00000286784_13 (sequence is synthesized)
tcctatcaggatactgatagataaggaacttacctaaagtcaccttgtcttatgaatagcttgattaggatgggtttaaacctgatcaatatgatcacatttccaaaatgctattttatt

SEQ ID NO: 840501 - DNA, 120 bp, Artificial Sequence
  ENSG00000286784_14 (sequence is synthesized)
taccattattgagtttttcattattcaagattttctattttgatcatggcattacatcagcaagttaattgttttaacttttgaattatagttcataaaatactttgtgtgaaaatgctc

SEQ ID NO: 840502 - DNA, 120 bp, Artificial Sequence
  ENSG00000286784_15 (sequence is synthesized)
gagatctctcagctgccagaacataatttcccttccaagactccgccagtatatcaccttctcaaggagccttctaactccttttttgctcttttggcataaatttgtgttccttggact

SEQ ID NO: 840503 - DNA, 120 bp, Artificial Sequence
  ENSG00000286784_16 (sequence is synthesized)
ttcatagcatcatttggttatgcttctgatacaattcttaaaatataatactgtattgtccttgtcatttgtctgttctttatagatcctcaatatatatttggtactaaaacagagaat

SEQ ID NO: 840504 - DNA, 120 bp, Artificial Sequence
  ENSG00000286784_17 (sequence is synthesized)
ttggtactaaaacagagaatgagatactgtgctctgagacccagataatatggaataaaaaatactaacgatagactggataaagaaaatgtcacatatatacaccatggaatactatgc

SEQ ID NO: 840505 - DNA, 120 bp, Artificial Sequence
  ENSG00000286784_18 (sequence is synthesized)
ctatgaaaaagtcaagtttcacaaaattttaaaacgtcttttacattttccaattttaatgtgaaaaaggagtggtacagttatgcaattatgacatggtctgtcatatcaacccacatt

SEQ ID NO: 840506 - DNA, 120 bp, Artificial Sequence
  ENSG00000286784_19 (sequence is synthesized)
ttttcatccttttgtgtaccagaatgttaaatattgagcatactttagatgccagagactctccatattttcatacataattgatgcttacagcaatcccatgaaataatttgttatctt

SEQ ID NO: 840507 - DNA, 120 bp, Artificial Sequence
  ENSG00000286784_20 (sequence is synthesized)
tattttacaaatgagaaaattaaagctgacaaagctattgtagagcactaggctggttcacgctttcaaataccgggcttctagaggtatttttgttttgctttgttttgttgcttgttc

SEQ ID NO: 840508 - DNA, 120 bp, Artificial Sequence
  ENSG00000286784_21 (sequence is synthesized)
tactattatctttgtctcaagaaaacagctcttttactaaatatgtgtcatattcttgtttaatcccaattcaaatattatttccttcaaatcactaaagtttgttgattttgactattg

SEQ ID NO: 840509 - DNA, 120 bp, Artificial Sequence
  ENSG00000286784_22 (sequence is synthesized)
ttgattttgactattgctttttgcatattttttcaaggagaatgagagtatttatcttgtatatagtagaaataaggtaaatatatattttaaatgtgtgtgagtttttttctaaataat

SEQ ID NO: 840510 - DNA, 120 bp, Artificial Sequence
  ENSG00000286784_23 (sequence is synthesized)
ataaatgtttttctgagtcagaacttcactcatttctttaatttgccactaagaaactttgtaattgtaggaaattcattggactctcttggtcctagtttccttatctgctgaaggaca

SEQ ID NO: 840511 - DNA, 120 bp, Artificial Sequence
  ENSG00000286787_0 (sequence is synthesized)
agtcgacaggatcgcctgacgcgggcacagcgtcctccaagaggccaccttgctgagaggcagacttcccatccacaaaatgggatattgattcctaataaacaccttgcacctaaactc

SEQ ID NO: 840512 - DNA, 120 bp, Artificial Sequence
  ENSG00000286787_1 (sequence is synthesized)
tgtcttcgtgtctgcctgcatagaacccaacctgcaacacaaattctgattcctggaggtcaggcgttggcggtgtttcttgtgttttgctgttctgaataaagctgctatgatcatcta

SEQ ID NO: 840513 - DNA, 120 bp, Artificial Sequence
  ENSG00000286787_2 (sequence is synthesized)
catacacatcttcttgtggacatgtttttatttttcttgggtaaatacctggtcatcaggccaacatcatgaaagacaaagaaaggctgagaaactgttccagattaaaggatactaaag

SEQ ID NO: 840514 - DNA, 120 bp, Artificial Sequence
  ENSG00000286787_3 (sequence is synthesized)
agacatgacaactacatgcaacatgtaatcccaaactagaaaaaaagctgtaaaggacattactgggactgaacaaaatacagactacaggttagttaaaatgtattgggtggctgcatg

SEQ ID NO: 840515 - DNA, 120 bp, Artificial Sequence
  ENSG00000286787_4 (sequence is synthesized)
gggggaacaggccttctgccacactggttggagtgtcaggccatttggcaatattcacataaacagaatattgcaccaaagatgaaagatacaaaattgtatccactttttgattctatt

SEQ ID NO: 840516 - DNA, 120 bp, Artificial Sequence
  ENSG00000286787_5 (sequence is synthesized)
tatataaagtccaaaaattagcaaaactagtctagggtgataaaagtaatagaagggcagtgatagttttccttgagaggataacagtagggctgctggggtgctggtcatatctctttc

SEQ ID NO: 840517 - DNA, 120 bp, Artificial Sequence
  ENSG00000286787_6 (sequence is synthesized)
ttcatctgagtgatgctgacagggataaatacagtttgtaaagctttatcatttgccaacctatctatgcacattaagtgcatattatactgaaatatatttttaaagtaaaaatagccc

SEQ ID NO: 840518 - DNA, 120 bp, Artificial Sequence
  ENSG00000286787_7 (sequence is synthesized)
tttgtgtaaacctccacattttattcccttgttctgaagaactgttaacagcttggtatttccttctagatatgtttctatttgtttatactgataggttgaccaatgtaagcgagtgga

SEQ ID NO: 840519 - DNA, 120 bp, Artificial Sequence
  ENSG00000286787_8 (sequence is synthesized)
tacaggcgtgagccactgcgcctggaaagtttgttttgtttttaccgtaaatgttacatattattgttctgtgacttgctattttcttttgataatgtatcttggagatctgaccacatc

SEQ ID NO: 840520 - DNA, 120 bp, Artificial Sequence
  ENSG00000286787_9 (sequence is synthesized)
agtatgaaaacactatttttttaaagaagaacacacaatatttcacagtcagaataaaccataactttattagtgtagtattgtttggcatttaggtcatttccaacttttgccatttaa

SEQ ID NO: 840521 - DNA, 120 bp, Artificial Sequence
  ENSG00000286787_10 (sequence is synthesized)
acagcactacaaaaacactctttgacccattcctttgaatatttgtatgtctcagtcgagcgtatggctaaaggaggaatgtctgcatcagtgtttgtgcattttcattctaataaatgt

SEQ ID NO: 840522 - DNA, 120 bp, Artificial Sequence
  ENSG00000286787_11 (sequence is synthesized)
tgccaaattgcctgccaaatatatgaccccagtttacacactgtccattcattcactcatttatttattgactcacatacttgataaatatttatcaaggatctactctgttctgggcac

SEQ ID NO: 840523 - DNA, 120 bp, Artificial Sequence
  ENSG00000286787_12 (sequence is synthesized)
actgttctaggttctgggaattcagcagtgatgaggaggtagtccttactctcatggaacttgcaatctggtcagagagagagatccccaacacgtagagacgtatatatatggtgtgtc

SEQ ID NO: 840524 - DNA, 120 bp, Artificial Sequence
  ENSG00000286787_13 (sequence is synthesized)
aggtgacgagaaacgctaaaagtaagttaaggtgtctgagcatgcctatttccccacactgtgaccaacactgatattacccattcttctgatatttttttctaatttgatagctatttc

SEQ ID NO: 840525 - DNA, 120 bp, Artificial Sequence
  ENSG00000286787_14 (sequence is synthesized)
ccctattgtgaattgtgttcttatccctttttgcccattttattgatggagtgtttttttcctttgtccttattgatttgtgggagctcttattttattgtggattttaatcctccgact

SEQ ID NO: 840526 - DNA, 120 bp, Artificial Sequence
  ENSG00000286787_15 (sequence is synthesized)
ggcccgggccccactgtagttttaatttgcatttccctgatgaataatgatgttcagacctttttgtgtgctttgcttattggccattttaattttctcttttctagagtttcttttcaa

SEQ ID NO: 840527 - DNA, 120 bp, Artificial Sequence
  ENSG00000286787_16 (sequence is synthesized)
gttttgccccaatttttaacaactgagttatctatcattgagtattctgtatacgagtccttttcaaggagagatttcaaatatcatctcccagcacagaggctgcctttttgttattct

SEQ ID NO: 840528 - DNA, 120 bp, Artificial Sequence
  ENSG00000286787_17 (sequence is synthesized)
aatgatgtcttttgataaacaacatgtaacattttaatgttgttcaagtcctagggtcgttcagaggatcaacaatgtcatcaaagtgtcgagcttttactgtccttcgttttacccctc

SEQ ID NO: 840529 - DNA, 120 bp, Artificial Sequence
  ENSG00000286787_18 (sequence is synthesized)
agagtgtggtccaccttccatctgcagggttctctgcaagcccttttacatccacttatttgaccctcacaatggcactttgtgggtgcagagctgcaaagatgactgcctcattttatg

SEQ ID NO: 840530 - DNA, 120 bp, Artificial Sequence
  ENSG00000286787_19 (sequence is synthesized)
gaggaggaaactcaggcccagagaggaagaggaggagtcacctacacaaggtcacatggctactaagtgcccagtgggcatttaaactcagctccatttccctacagctgcctttttctg

SEQ ID NO: 840531 - DNA, 120 bp, Artificial Sequence
  ENSG00000286787_20 (sequence is synthesized)
aaggttgctccagtgcttgggaggggagagcaggtctcctcgtggtagactcctctctgcagtgtccccctggcaagagcaccattaaagataatgggggtctgtgcccagatgtggccc

SEQ ID NO: 840532 - DNA, 120 bp, Artificial Sequence
  ENSG00000286787_21 (sequence is synthesized)
caggaccatcccattgtacatcagcctgccacagggaacgactatcctgtccccattgccagaaccctgcttagtccttttggaagcaagaagccctcctccccctctcagagaaatggc

SEQ ID NO: 840533 - DNA, 120 bp, Artificial Sequence
  ENSG00000286787_22 (sequence is synthesized)
agttttaggagtccaggagagaaggtagcggagtcccatggggtcagcagaggtgctgatgcgattggtcactcaccagacagcatcaactaaccccaccccctgggaggaatggggtgg

SEQ ID NO: 840534 - DNA, 120 bp, Artificial Sequence
  ENSG00000286787_23 (sequence is synthesized)
ctccaggctccttggtctcttagaagtggctcggcaccagcagggtctgtgaagtggattcctttccccagaatctaaaccctgaaagcccttctgaaactgccatgcacatggggcgtc

SEQ ID NO: 840535 - DNA, 120 bp, Artificial Sequence
  ENSG00000286787_24 (sequence is synthesized)
atcacccacagacctcataagcaacagtgtggattcactcatttatcgactcactcattcattctgatgctttttagcatcttacctcaaggagcctgttaacattaatctagttcactg

SEQ ID NO: 840536 - DNA, 120 bp, Artificial Sequence
  ENSG00000286787_25 (sequence is synthesized)
tagcaatcttttcttgtataatagttcttttcttttatgatagtgctcgcttctcagagctggggagacaatgatggactagattgcctcactaagccaatggtggagtgaaagagacct

SEQ ID NO: 840537 - DNA, 120 bp, Artificial Sequence
  ENSG00000286787_26 (sequence is synthesized)
taaagggttaatcccatcaatatgcaatttgagtgtgataacactcataggaagagcgtagagatagacaaagccagatgactgatttatttgggaggtgtgggaggttggctcaccata

SEQ ID NO: 840538 - DNA, 85 bp, Artificial Sequence
  ENSG00000286787_27 (sequence is synthesized)
cctgcccgcctcgaaccactgattttgataaaaccaaaatcttcatggagtttccaccattcaatcttaggtctataccccaggg

SEQ ID NO: 840539 - DNA, 120 bp, Artificial Sequence
  ENSG00000286787_28 (sequence is synthesized)
tggagtttccaccattcaatcttaggtctataccccagggctccacccatgtctgtcttcaagggggcagtagctgagaggctgaactttagaattcatgcttctttccatctagtccac

SEQ ID NO: 840540 - DNA, 120 bp, Artificial Sequence
  ENSG00000286787_29 (sequence is synthesized)
gctcaaggtctcccagagcatgggattcccacccatctctccccatccctcctctaaacaaaccccatttggttaatgtttctgaaagactgaaggcccccaaattcccaggtgtggcct

SEQ ID NO: 840541 - DNA, 120 bp, Artificial Sequence
  ENSG00000286787_30 (sequence is synthesized)
gagcagtacggaggtccctgtggacctgtcacctcccccttgagacacgccatttctattcccacctctgggtctatctaagcccccagccacctgtcccatagttcctgtccctcatcc

SEQ ID NO: 840542 - DNA, 120 bp, Artificial Sequence
  ENSG00000286787_31 (sequence is synthesized)
ctcctggcgttgtgatttgagtgtgcaaaacctctctgggctcctgaagagcaggcatcctaccaagaaatagcaatgcaggcaaagaaaacctccaacgtattaagctggcttcgttag

SEQ ID NO: 840543 - DNA, 120 bp, Artificial Sequence
  ENSG00000286787_32 (sequence is synthesized)
gaggccaacttctgaaaattcaatttgctggtggtagaaacaggatattgagtctggccaggatgggctctgaggagggcatctgagggggaagaaaggaggcagcaacctgcgggggta

SEQ ID NO: 840544 - DNA, 120 bp, Artificial Sequence
  ENSG00000286787_33 (sequence is synthesized)
acggtaacgttgggtacattcctcggcaacactaaaacccactgctaatcacaaacagattcctgcctgcccaggggctttctttgttcactccgatttctccctccaaacatgacactg

SEQ ID NO: 840545 - DNA, 120 bp, Artificial Sequence
  ENSG00000286787_34 (sequence is synthesized)
aatccaccaggctctgcctctcttggacttctgtcacttctgtgggcctcagtttccctgtgctatatgagaggactgggctagggtctgtaatccaagcctaatatcccaggatctaaa

SEQ ID NO: 840546 - DNA, 120 bp, Artificial Sequence
  ENSG00000286787_35 (sequence is synthesized)
cttctctgacttaaaagtccccaagaatctggaattccaggattataacatgcccagattttatgacggcagaatttgatgagtcaatgatggcaggttctaaagtgctatgattttaag

SEQ ID NO: 840547 - DNA, 120 bp, Artificial Sequence
  ENSG00000286787_36 (sequence is synthesized)
actctgtggcttgaagatcctgaccttgtgactttctacgattctaaaatttgaagagtgtaagtctcaacgactttaagtgtctgtgaggcagtgctgtgtgctttagagccaggcggc

SEQ ID NO: 840548 - DNA, 120 bp, Artificial Sequence
  ENSG00000286787_37 (sequence is synthesized)
cagtgaccctgggcaagttacacctttcagtgcctccgtcttcacatctgtgaagtggggggtcacattgttactaccttctggggtggttgtgaggattaaaggcgttgatatttgtaa

SEQ ID NO: 840549 - DNA, 120 bp, Artificial Sequence
  ENSG00000286787_38 (sequence is synthesized)
tgtacctatcattattctaaaatgaacagtttctacagcctcagaatctgagatggacctcaaaggccccagagttgtaagtttcaaagaatccattgttgaaagattcaatgacatacg

SEQ ID NO: 840550 - DNA, 120 bp, Artificial Sequence
  ENSG00000286787_39 (sequence is synthesized)
aattctgtcagctggctatggacataccatgtttgggcgtccttgacccaggatcatgggatttaccatgggcaagctgaagaggctggctggccagcctgaacctgccactctcagcca

SEQ ID NO: 840551 - DNA, 120 bp, Artificial Sequence
  ENSG00000286787_40 (sequence is synthesized)
caaaaccaatgagcatgacaagtttgggaccctcaactcctgagaagtgccctcctcttcccccaacacttaccactggggataacttgaccttctggctaaaggctcattgaccttgac

SEQ ID NO: 840552 - DNA, 120 bp, Artificial Sequence
  ENSG00000286787_41 (sequence is synthesized)
tagctcctggaatccataaagacacaggaagaccatcactcccctagcttggaactccattcctgaaggacctgctgtggctccctactgtctttcaaaccaagttctatttctcagttc

SEQ ID NO: 840553 - DNA, 120 bp, Artificial Sequence
  ENSG00000286787_42 (sequence is synthesized)
ttttggagccccttaatatcttgttcacttccaggtaagtaaagataatccggaatggggaagggagaactgggatggttcatcggaagttacttctaggtccaggtgcatttgttcatt

SEQ ID NO: 840554 - DNA, 120 bp, Artificial Sequence
  ENSG00000286787_43 (sequence is synthesized)
cttattcacaacacagatattaaatatctattatatgccagtctctcttctgggctctgaggacacacaagtgaataagacagacaaggtccctgttcttgagacctcacaagactccct

SEQ ID NO: 840555 - DNA, 120 bp, Artificial Sequence
  ENSG00000286787_44 (sequence is synthesized)
gactcactgtagagcattattctcagggtagaagagtacaggccatttcccagctgcacaaccttgaaccaatgctctgggcgtcgtttgtaaaatgggtcaataacactacctaccaga

SEQ ID NO: 840556 - DNA, 120 bp, Artificial Sequence
  ENSG00000286787_45 (sequence is synthesized)
taaagttattgcaaagattaaaagagatggtaaagagcttggcacagtgcacggcacatagtctacaatccatgaaagctgcttattattattattgttgttacttcatttctacctcca

SEQ ID NO: 840557 - DNA, 120 bp, Artificial Sequence
  ENSG00000286787_46 (sequence is synthesized)
gctccttttacagcacttagtgtggtggctaaaagcccgacagacctggactcaagtcctgggatattaaagatggataatcatcgtgcctgcttcccaaggctgcttacctggcatgtt

SEQ ID NO: 840558 - DNA, 120 bp, Artificial Sequence
  ENSG00000286787_47 (sequence is synthesized)
ggccatacccagccagggctcagatgaaaaaaacaaacaaaaaacttccccaaaacaagaataaggagcagaaacaaaaactctgtctttgaggaaatcgagagacatttgtaaccctga

SEQ ID NO: 840559 - DNA, 120 bp, Artificial Sequence
  ENSG00000286787_48 (sequence is synthesized)
actacaaaggagggaaatggatgaagtggccagtgacataaccgagaggaagaaagtcaaagctaaatggatggggcgttggcggtgtttcttgtgttttgctgttctgaataaagctgc

SEQ ID NO: 840560 - DNA, 120 bp, Artificial Sequence
  ENSG00000286787_49 (sequence is synthesized)
aaaccacttctccaaggagacacaactgctgcccgcagagctgaagctcctgacccactatcaaatttcaatcatttatttgcctaccccctttatgatttttaccacccgttacttcaa

SEQ ID NO: 840561 - DNA, 120 bp, Artificial Sequence
  ENSG00000286787_50 (sequence is synthesized)
aggcctggtcgccctccctgttaattaaaggggagactagtttccagggcaatttcagctctggccgggcctgtgcccacatccttaagagggaggccatggtgatgggccggctgggcg

SEQ ID NO: 840562 - DNA, 120 bp, Artificial Sequence
  ENSG00000286787_51 (sequence is synthesized)
gctggtggccttggaggtaacaatttgtcttgagatggaatccactcccctgaataaagggactttgtgttctctcccattctcatgcccccctggtccccatggagggattagagggga

SEQ ID NO: 840563 - DNA, 120 bp, Artificial Sequence
  ENSG00000286787_52 (sequence is synthesized)
aacatctgtggttccccaagaacagtgaccgccatggtaggcagctcttaggccactgcctgggccagcaggactttctcatgcacactgggcctctgtctgtcctcagagctctgcctt

SEQ ID NO: 840564 - DNA, 120 bp, Artificial Sequence
  ENSG00000286787_53 (sequence is synthesized)
ctcatagaaaacatggatccacgcaatcactggctcattcatttgttcactcaacaactctttattgagcatctactgatgtaccaggtgctcacaggcaccgagtgtatggaggtgaaa

SEQ ID NO: 840565 - DNA, 120 bp, Artificial Sequence
  ENSG00000286787_54 (sequence is synthesized)
aagcaaagctccccctggtcatggagcccatgatctagtggggtcgacaaacctaaagataaataagtcaatcaaatccattggcaggcagtcagacataaaacaagttagtagagagaa

SEQ ID NO: 840566 - DNA, 120 bp, Artificial Sequence
  ENSG00000286787_55 (sequence is synthesized)
gaaaggggtgagctgaaaacagtggcacttagcagggacaggtcaacctcatgcctccaccccacttttcctcctctaagctttttggtcaaggctgctctccactctctgccaagccag

SEQ ID NO: 840567 - DNA, 120 bp, Artificial Sequence
  ENSG00000286787_56 (sequence is synthesized)
caatgacttatctgtattctccttaatacataatttgctattttattaactgtatcaaatgcatttgtaaaactagaacatgaagccaccttggcgtataatgtaggctcttactccagt

SEQ ID NO: 840568 - DNA, 120 bp, Artificial Sequence
  ENSG00000286787_57 (sequence is synthesized)
aagagtcacaaaacccacattgctgacacacttctgtccaatataagagggtgctttttccatttaaaactctaatgaaatggtggctttaagatagtagactaaagacatttctattcc

SEQ ID NO: 840569 - DNA, 120 bp, Artificial Sequence
  ENSG00000286786_0 (sequence is synthesized)
tctgcctcccaaagtgctgggggcatgagccaccacgcccagccctattttcctgtttttaatgtcattattcccttctctcaaaccttggcaccatgtttccaaactcttggtctcctt

SEQ ID NO: 840570 - DNA, 120 bp, Artificial Sequence
  ENSG00000286786_1 (sequence is synthesized)
tccttggtaaactttattttgtcttttccattgtctctgttaggtacctgataattaggacattgtgagcctaacattgaaaagcagctcctcttgtcatgattgttaacattttataga

SEQ ID NO: 840571 - DNA, 120 bp, Artificial Sequence
  ENSG00000286786_2 (sequence is synthesized)
ttatattgctctatattatattccactgtgtgtttgcctgctactgttgctttcactattctaatatgtgtaaaagatcagcatattccctgatgtgttagaaaagattctcttcgttta

SEQ ID NO: 840572 - DNA, 120 bp, Artificial Sequence
  ENSG00000286786_3 (sequence is synthesized)
tatttaggagggaggcgttttctatggtgagccacaatacactcacctttctcttgttgttgttgctataggactaagatcactaacttctcttaggaagatgcttaggtaaccatgatg

SEQ ID NO: 840573 - DNA, 120 bp, Artificial Sequence
  ENSG00000286786_4 (sequence is synthesized)
atcctaaaccataaccctgatgaacatgttaaagagacctctagggaaggaggatttaggcaagttcattttagttccatctagaaaaggagtggtatcagcacagtaaagctaaccagt

SEQ ID NO: 840574 - DNA, 120 bp, Artificial Sequence
  ENSG00000286786_5 (sequence is synthesized)
agatactgtggtttttctctgtgagcctactaaacagggctttgggcactggcaccagcactctgaaatgccaccacctgtgtggtgatagggagccctgtatagcctgtgctacttgtg

SEQ ID NO: 840575 - DNA, 120 bp, Artificial Sequence
  ENSG00000286786_6 (sequence is synthesized)
taatgtgaaccaaggcccccagtgggttgtgagaaagctggaatcaatcatcctttcttccttccctccctctcttcctccctgtttctccctccctgtttctcccctcctccttttttg

SEQ ID NO: 840576 - DNA, 120 bp, Artificial Sequence
  ENSG00000286786_7 (sequence is synthesized)
ttttagactgcttgtaatcagcctgatctgaatcttcagtccacatgctctttcctggtttggccccacttctctaagatagtctgaaaaaaaggaaaatgaaaaggaaggtacctgttc

SEQ ID NO: 840577 - DNA, 120 bp, Artificial Sequence
  ENSG00000286786_8 (sequence is synthesized)
cagttcttggtaggtaggcagtctgaggtgacggagctcctcctttgattttatgagggagtctttattctcccacttgacaaaagcccgctttctgaccaagactgggctaggacatgg

SEQ ID NO: 840578 - DNA, 120 bp, Artificial Sequence
  ENSG00000286786_9 (sequence is synthesized)
agaggtgggactgggaagcacatatagagtatcctgggctgtcttccttggggaagacagcacaaagggacctgaagggccctcactgccaatccaaggctgtgattcagtctgggtggc

SEQ ID NO: 840579 - DNA, 120 bp, Artificial Sequence
  ENSG00000286786_10 (sequence is synthesized)
cttgtgggcaacagccctcttcagccgaagagaaatcttctgtgaggacactcccatcagcatgatggtccgatccttactctcctcaccatgttccacagcctccccattagggaatgt

SEQ ID NO: 840580 - DNA, 120 bp, Artificial Sequence
  ENSG00000286786_11 (sequence is synthesized)
aaaaggtccttcctcaggtgctgtaggaagatacaggacatgctagtactctagctcaggaaagcagagactcaagactgagacattagtttcaatgagacctttcttattgttactgga

SEQ ID NO: 840581 - DNA, 120 bp, Artificial Sequence
  ENSG00000286786_12 (sequence is synthesized)
gttccatatgttcaaagaggacccattttcaggcacccagtttagggggtgagggctaaatccaggggctttggccaagacatggccactggtgtcaagctacatccaccctgagaaaga

SEQ ID NO: 840582 - DNA, 120 bp, Artificial Sequence
  ENSG00000286786_13 (sequence is synthesized)
gcatcttctgtttgcacaaaggttgcttagagggtttctgtttttggaggtaagttgaagcccctgcctcagtgccacagagtttcataaaataaagagaacaagaacaatatctagaca

SEQ ID NO: 840583 - DNA, 120 bp, Artificial Sequence
  ENSG00000286786_14 (sequence is synthesized)
gaaatgctccataaatacttttttggaccctggaatttgggagctctccacattcatgtctcagtcctgatacagacaccctctagcaggtaagtactctctgggaacccgtttgtacag

SEQ ID NO: 840584 - DNA, 120 bp, Artificial Sequence
  ENSG00000286786_15 (sequence is synthesized)
tgggcacagcttaaccatgagaaagaagttttagctttgtggaaatgtaccttaaaatgtattgcccctgtttgatactgagaggaaaaaggtaagttactctggttttctttaactaag

SEQ ID NO: 840585 - DNA, 120 bp, Artificial Sequence
  ENSG00000286786_16 (sequence is synthesized)
acccactacccaggatccagcctagtaatgttagccataaggagtaatttcctggaaaagtaaagtaagagcagatgtatttgaggtgggcgatagataggctttaagataaactgaaga

SEQ ID NO: 840586 - DNA, 120 bp, Artificial Sequence
  ENSG00000286786_17 (sequence is synthesized)
tcatctcagtttactttttggaaagactcagcagtgattaaaacattggatagtctgactttgaagacattggattagtatagtcaagatggctttaaaaaacaacaaaaaagttttcta

SEQ ID NO: 840587 - DNA, 120 bp, Artificial Sequence
  ENSG00000286786_18 (sequence is synthesized)
attagtatttgaccagaatcaaccagttgtaaaactagaaatcttacaaagatcttagtttaattcttgccaaagagaacataatttaaattaacatttaatatttatccaataaagctc

SEQ ID NO: 840588 - DNA, 120 bp, Artificial Sequence
  ENSG00000286786_19 (sequence is synthesized)
aaaattgtaattacatagttatttaagtgctcaaatatttaaattgttatggtcaccctaaaataattacattttttttttggaggagtattatgggtgattattttttatatctccatt

SEQ ID NO: 840589 - DNA, 120 bp, Artificial Sequence
  ENSG00000286786_20 (sequence is synthesized)
ttccaacttttctgtaatacagttatacattctttttaccaacctagattgtcaaattatgaatataatcccctccattatttaggttgaattcctagacatacagggagcttgggacag

SEQ ID NO: 840590 - DNA, 120 bp, Artificial Sequence
  ENSG00000286786_21 (sequence is synthesized)
aaattcaggcactatacactttgaggagcaaaaggaagaaagcagtaagaacaaaaagcaacagaaagcccttaaaattgcaggaagagtcctgagagatgacagtgttaacagaaatta

SEQ ID NO: 840591 - DNA, 120 bp, Artificial Sequence
  ENSG00000286786_22 (sequence is synthesized)
ggagaggtacaagtttcaagaaagtgaaagttgatgagattgagaaagatagtaatgggctaaaagaaatcactggaaattttgatttgataagcagaaaccatccccgataataatgag

SEQ ID NO: 840592 - DNA, 120 bp, Artificial Sequence
  ENSG00000286786_23 (sequence is synthesized)
atagaaataactaagaatggatgatatccaatagtcatttttgccattataaatagaccttgacttttagcaactttataataatatagtaattttcattttgttgcccatgatacatgt

SEQ ID NO: 840593 - DNA, 120 bp, Artificial Sequence
  ENSG00000286786_24 (sequence is synthesized)
atgtttatcctacctattggtctacttcctgacaagtacttatcttaccactgtggggcagggtttggaaaaggggagagatggcctggagaggagaaatctctaacaactgccccttca

SEQ ID NO: 840594 - DNA, 120 bp, Artificial Sequence
  ENSG00000286786_25 (sequence is synthesized)
ccctaaggttatgtgtaactctgaaaatacagagtgcatgaatgaaatacagggtacaggcctatttttcacaatggtgtttgtgatttctattaaaagttgaacatcaaattcttagtt

SEQ ID NO: 840595 - DNA, 120 bp, Artificial Sequence
  ENSG00000286786_26 (sequence is synthesized)
gattagcatattctttcttagaaaagaccctaagaggattttttccccctaagaacaaaacaccccaaaagtttgaagtcagcctgtgtttagatagatagtaaggggaaagatttagga

SEQ ID NO: 840596 - DNA, 120 bp, Artificial Sequence
  ENSG00000286786_27 (sequence is synthesized)
agacagaaaatttttacttggctgatgtgataaaaaggaatgtgcatttcttacatggaagtgaagcacttaagctttgatctaattgatcaataaatgcatgtggatatttaccactga

SEQ ID NO: 840597 - DNA, 120 bp, Artificial Sequence
  ENSG00000286786_28 (sequence is synthesized)
acattagaagtgctttaaatgcagaatgtatactatatggactttttctctaggcatctgttgtaacgatagtggccttaccactttagggagcttatttcaaaagagtaatgatattaa

SEQ ID NO: 840598 - DNA, 120 bp, Artificial Sequence
  ENSG00000286786_29 (sequence is synthesized)
catatggtacatacgtgttaagcccgattttaagtgctttatataaataaactcatttcttatttccctttttggttctacttagaagtcacacagcttcttatattaaactggcactaa

SEQ ID NO: 840599 - DNA, 120 bp, Artificial Sequence
  ENSG00000286786_30 (sequence is synthesized)
cctaataagcactggatttttgctgaagacctatatgttctttagttagtcaaggtgatcagtgttttgacatgctggctaaccagccagcccagagatcagggcctagtatagcactat

SEQ ID NO: 840600 - DNA, 120 bp, Artificial Sequence
  ENSG00000286786_31 (sequence is synthesized)
gaagccttgtgccccaaccgtccccaacaagcccttcatgttacccttttttaaatagctcctcattttatcatacagacaggcacctgtcatttaagactctctagactgtctcatttt

SEQ ID NO: 840601 - DNA, 120 bp, Artificial Sequence
  ENSG00000286786_32 (sequence is synthesized)
tctacttcatctcttacctaaatcgccttaacacctttttttttttcccactatcccaatagtactaaagctgttctgcccttggccttttgctcctactgtacatcctatctggaatgt

SEQ ID NO: 840602 - DNA, 120 bp, Artificial Sequence
  ENSG00000286786_33 (sequence is synthesized)
gctctgtcctcctcccataacttaattctacccttccttcaagacttagctgaaattccaccttctccataaagtcccaacagccccagtacagcgatctctctgctatgtcctcctgtc

SEQ ID NO: 840603 - DNA, 120 bp, Artificial Sequence
  ENSG00000286786_34 (sequence is synthesized)
atttgctgtcactgcaacctatttggctcttagcatatactcttgcattgtttctaaactgctctatatttgtatattatcttccccctaactagaactactccatgaagacagagacag

SEQ ID NO: 840604 - DNA, 120 bp, Artificial Sequence
  ENSG00000286786_35 (sequence is synthesized)
tctattctgcttctttgcactttagatctggggcatctcaaacatactcaaagtcatttccttattgtactgttgtttgcattttaatgtaagtgaatttgctagtttatttcttgaatg

SEQ ID NO: 840605 - DNA, 120 bp, Artificial Sequence
  ENSG00000286786_36 (sequence is synthesized)
ttgaatgttttgtctcagtcctaggattttccttgtatgatttggaattttaatctgcaagctccacttgagtgggagtttgccccccgcccttcctttctacatttagccttctgtttc

SEQ ID NO: 840606 - DNA, 120 bp, Artificial Sequence
  ENSG00000286786_37 (sequence is synthesized)
tagaattttgacaattacctgctacctggcccctcagggttcctcagactaggacctggtcttaaattaatggcttggggttcctctcctggagaaaaattggggctatcatagacagtc

SEQ ID NO: 840607 - DNA, 120 bp, Artificial Sequence
  ENSG00000286786_38 (sequence is synthesized)
actcagctagtagaactctgtctgtggctaagtctgcttcctgctgctaagtgacagtcacagttttttaagcattggatttttccttctcaattttaagcagtaagtctggttctggtc

SEQ ID NO: 840608 - DNA, 120 bp, Artificial Sequence
  ENSG00000286786_39 (sequence is synthesized)
acctttcacgcataggtggtctctgttactatgcagaaatcaaattcgcagctgcctctacctgcttctagacatgcagccaagcagaccagtagctttagcatctactccttgcagtat

SEQ ID NO: 840609 - DNA, 120 bp, Artificial Sequence
  ENSG00000286786_40 (sequence is synthesized)
gtttctagtacatgtgtaaccttgagatatctgtttttgaatgcactatgccttttaatgtgatttatatattatatatgttaatttacattatatatacacacacatatacatatgcat

SEQ ID NO: 840610 - DNA, 120 bp, Artificial Sequence
  ENSG00000286786_41 (sequence is synthesized)
gtacatacatattttccctagtcactgttttgggtttggagctggggatagggtgggatagttaactgttaacttgaggcactatcttggccagaagtcagtatctgtgcttggtgtagg

SEQ ID NO: 840611 - DNA, 120 bp, Artificial Sequence
  ENSG00000286786_42 (sequence is synthesized)
tgctcaataagtacctgctgatttttatgcctaactaggactctgctattctcacaccttaagtctaagacataggcatggagctaaaatccaaaactgtgggaggggtcagccctggcc

SEQ ID NO: 840612 - DNA, 120 bp, Artificial Sequence
  ENSG00000286786_43 (sequence is synthesized)
tagctgttgaggttacatttaaactcaaacacagagtcatgaggtaatctttccgtctctaaaacttttcccttcctacttcactttccaagatgaatgttcccagtgcctacttaccat

SEQ ID NO: 840613 - DNA, 120 bp, Artificial Sequence
  ENSG00000286786_44 (sequence is synthesized)
ggagcagatctttggctcccaatgagcaaaggttggacactggccccacagaagtgttgttctctgtgggagctactgggttcttggctcgcttcttacactcaaacacaaccagatctt

SEQ ID NO: 840614 - DNA, 120 bp, Artificial Sequence
  ENSG00000286786_45 (sequence is synthesized)
tgcattgtttgtgacagttcatcccgcagtctgtggacaagacatcctgggtcaagaagtctttcacttttctctcttccccagtgtgtctcacaaccaaattcatgcagtgctttcttg

SEQ ID NO: 840615 - DNA, 120 bp, Artificial Sequence
  ENSG00000286786_46 (sequence is synthesized)
tcacacatgtctgttctatcttctggagctaagacacttaacattcctaatgaagctagcattcttctcacttggtgaagcccagagctcacactcttgatgtagcccttatcagtgaat

SEQ ID NO: 840616 - DNA, 120 bp, Artificial Sequence
  ENSG00000286786_47 (sequence is synthesized)
ctcagcatcagaagcagtatcctgatatcttggagggaagagatggtgtcctggtatcccatacattctgcctactctagggagaccctccggaaacactcagctgttaggtcttatttt

SEQ ID NO: 840617 - DNA, 120 bp, Artificial Sequence
  ENSG00000286786_48 (sequence is synthesized)
ctttcttgcagtaaaaggtttcctctctttcactcctgaattctcctagtcacaaggaaggacagttatgtcctgagtgataaaggaaagctgacaagggcctttagtaatcatttatct

SEQ ID NO: 840618 - DNA, 120 bp, Artificial Sequence
  ENSG00000286786_49 (sequence is synthesized)
tctgttgcagaagagattctatctttttcactggggacccacccttccatgactatatgagagcaccatctcctacctgctatccctgttctaggccagccacgacagaaagaggatttt

SEQ ID NO: 840619 - DNA, 120 bp, Artificial Sequence
  ENSG00000286786_50 (sequence is synthesized)
atacagagaaaatgcctatctgtgcaaccaggcatttctctcttcggtgtggcggtcattcaccgggggtgtccgagggaaaccactttggggatgagactctgaactatgctgagaagt

SEQ ID NO: 840620 - DNA, 85 bp, Artificial Sequence
  ENSG00000286786_51 (sequence is synthesized)
aaccactttggggatgagactctgaactatgctgagaagttgtggactaaatggacaactactatggcacttctccttcctgcca

SEQ ID NO: 840621 - DNA, 120 bp, Artificial Sequence
  ENSG00000286788_0 (sequence is synthesized)
ggcctcataacccagctgctgcactgtccaatacagtagccactaaccacatgtggctatttaaattgaaactcattaaaattaaaattaaaaattcagttcctcagcagcactaggcac

SEQ ID NO: 840622 - DNA, 120 bp, Artificial Sequence
  ENSG00000286788_1 (sequence is synthesized)
acctcaagtgctcaatagccaggtgtggttagtgatgactgtgttggacagtgcagatatagaacatttcatcatcctagaaagttatcttggacactgctagcctaaagtgggcttaga

SEQ ID NO: 840623 - DNA, 120 bp, Artificial Sequence
  ENSG00000286788_2 (sequence is synthesized)
gctggacagacacaggggtggatctgggttccaccaggattggtttaattatatgacctctgagtgacttcccctcatttatgaactggaaatcacaatttcctcccatcagagacttct

SEQ ID NO: 840624 - DNA, 120 bp, Artificial Sequence
  ENSG00000286788_3 (sequence is synthesized)
gtatggactttgggatagactgactgggattggctcctgactgccactttctagttgtgtgcccttgaggcaaattacttaagctctttgtactcagtttccttattggtataatgaaaa

SEQ ID NO: 840625 - DNA, 120 bp, Artificial Sequence
  ENSG00000286788_4 (sequence is synthesized)
taatgatggtaatcttaggttgaaccatgttgtttcatcatttttgaccttgaaaacagctgttttctacagttcgattcagtacttcctaggattttggggaggaatgaatgtagggcc

SEQ ID NO: 840626 - DNA, 120 bp, Artificial Sequence
  ENSG00000286788_5 (sequence is synthesized)
cccagagctgcatctgcacagagcacacactcacgtgtgtgagcatcactgtctccatcagccgggtcccagaggggctgctgcaaggtattttagagtccccacctcacaccgtgaaca

SEQ ID NO: 840627 - DNA, 120 bp, Artificial Sequence
  ENSG00000286788_6 (sequence is synthesized)
aaggcaggcaggccgcgctgggcctccctgggcttagcctgtaaggtcccatccaaggttccagatgttccttcctttcccgcccggccctgggctctgcatgcttcctctgcctgaaca

SEQ ID NO: 840628 - DNA, 120 bp, Artificial Sequence
  ENSG00000286788_7 (sequence is synthesized)
cagattcaccagggactcacctcctgctctgccctggggctgggctctgttgggggtaggcagggtcttggaaggacctctttgccatctccacagtctccaccgcggtcctagccatca

SEQ ID NO: 840629 - DNA, 120 bp, Artificial Sequence
  ENSG00000286788_8 (sequence is synthesized)
tcctctcccatctagacagctcttacttccactgctgtcctcttcccattcgttctccacagggctgctggagtgatctttttagcataaaaatcagaccatgccaccgctgattcaaat

SEQ ID NO: 840630 - DNA, 120 bp, Artificial Sequence
  ENSG00000286788_9 (sequence is synthesized)
gttctaatggcttaccctggggcgacacacctctctgctctcaccttatgcgtgatcctccttgcctcctgcctccactggccttccttttcctgagcacccacggtctttcctgcctca

SEQ ID NO: 840631 - DNA, 120 bp, Artificial Sequence
  ENSG00000286788_10 (sequence is synthesized)
gaccctatgctgttgcagtgcctggaatgccacccccatgccctctgcctgggtggctccttcctattctccaacaggcttccctgatccctgtgcctagagtggcatcccttgccctgt

SEQ ID NO: 840632 - DNA, 120 bp, Artificial Sequence
  ENSG00000286788_11 (sequence is synthesized)
ttatttccttcattttccttatcataaattgtgagtcactgcactgtgtatgtacttgggtaacagaatgtttaaatgtgactcgttctgtctctgtgaggcccctgagtccaaggacta

SEQ ID NO: 840633 - DNA, 120 bp, Artificial Sequence
  ENSG00000286788_12 (sequence is synthesized)
accagcagggaagggctcctccacatttcaaagcagggcgctggttggcctgtgcaggacttgcaaaggaggtgtatgaacaccggttttgtggcttttatgctgtcccccatcttgagg

SEQ ID NO: 840634 - DNA, 120 bp, Artificial Sequence
  ENSG00000286788_13 (sequence is synthesized)
ctataaagggattgaatttgaggagcgagagagaattttcctttggagacatttgcagaaatactgggcacgtccctcccaacaccatggggctcctcctttgctagtttaattctaggg

SEQ ID NO: 840635 - DNA, 120 bp, Artificial Sequence
  ENSG00000286788_14 (sequence is synthesized)
agaaaggtcttaggaggagggcttaactgtgtgtcctggagtcatggctggggtttgacacctgcctgaagagcagtgtcctgagagcacggagagaggggcggaatctggaatctgcac

SEQ ID NO: 840636 - DNA, 120 bp, Artificial Sequence
  ENSG00000286788_15 (sequence is synthesized)
cgcctcaacagtagggcgaagctgctagtcttctggaggctgcttaaaagggacctgccccaagacagggtggggaggggtgaaggagtgggcccgatgctcccaggcagagagggttag

SEQ ID NO: 840637 - DNA, 120 bp, Artificial Sequence
  ENSG00000286788_16 (sequence is synthesized)
agctgggagccactggccagagaattttccagatcacagagttggcagcagaatctctctctgaaaccaggaaagcacccaaggggagagagagagagagagcttccggccccttgagga

SEQ ID NO: 840638 - DNA, 120 bp, Artificial Sequence
  ENSG00000286788_17 (sequence is synthesized)
ctgaactgttcaggggatgtagactcaccacccctttttccctcctccttcagcttaacccccaaggagcagaaacccaagctgggaaggaggagccccagaaagagggagaaggagact

SEQ ID NO: 840639 - DNA, 120 bp, Artificial Sequence
  ENSG00000286788_18 (sequence is synthesized)
gcactctcttctcccgccagaggcctcaagcagttctgagctgaaggaatagagcagcttccttgtgagcattcccctaatatgtcacctgcacctgaatgcagggctcggattcggctt

SEQ ID NO: 840640 - DNA, 120 bp, Artificial Sequence
  ENSG00000286788_19 (sequence is synthesized)
ctggtggacctggctgaatcagtcaatatcagctggatgaatgaagaacttttactgagaggctttctgggactctggaatgcatggcccaaggaaacattgggccacgtggaagaaagt

SEQ ID NO: 840641 - DNA, 120 bp, Artificial Sequence
  ENSG00000286788_20 (sequence is synthesized)
ccttctagggttagattagatgtcctctttcaggtgatgtacaggctgaggactttaggaattgtgggctattgctcctacttgtcatgtacttggagggctaggaggatggaagggtaa

SEQ ID NO: 840642 - DNA, 120 bp, Artificial Sequence
  ENSG00000286788_21 (sequence is synthesized)
ctaggaggatggaagggtaagttttatcattgttcacctcattggctcatccgggctggcctagatgtgcttgtcatgaacaggaagcctgtgaagggaagtgtgtgtgtgtgtgtgtgt

SEQ ID NO: 840643 - DNA, 120 bp, Artificial Sequence
  ENSG00000286788_22 (sequence is synthesized)
gtctcacgtacctggttcgggagtccaggaaggccttgttgacttggaccttggcctgactcacagtatcggagatggcagaggttctggtagtctgcgcttggggttggagtggggagc

SEQ ID NO: 840644 - DNA, 120 bp, Artificial Sequence
  ENSG00000286788_23 (sequence is synthesized)
tctccctctttctcggccattacccccacccctcaaatctgggtaggcaggagatcaagattaggaaagtttcataagagtccttaaggggaaaaagcacagaatgggaagaatactctt

SEQ ID NO: 840645 - DNA, 120 bp, Artificial Sequence
  ENSG00000286788_24 (sequence is synthesized)
ggatcttcaacaagatgtcaaaattgctctttgagatctcactagaatgcccagagatgggatgaagagggagtgtggccactcagggtggcttgggctactggactgtggggatttctc

SEQ ID NO: 840646 - DNA, 120 bp, Artificial Sequence
  ENSG00000286788_25 (sequence is synthesized)
tggttcctggtgagatggtcttgtggactatctcaagttcatcaaagaggacccactgatcaccaggaccctgacgtacagaaggggatggcatgagagtaatggtgggattccctgttc

SEQ ID NO: 840647 - DNA, 120 bp, Artificial Sequence
  ENSG00000286788_26 (sequence is synthesized)
cctcttgtattggggtctggagcatggaggacaggatctgttttctcaacaaggagagtgtagtgggttaaataatggccctcccaaaattcacatctgcatggaacctcagaatgtgac

SEQ ID NO: 840648 - DNA, 120 bp, Artificial Sequence
  ENSG00000286788_27 (sequence is synthesized)
cttatttggaagtagggtctttgtagatgttatgaattaaaatgaggtcatactgccttagcatcggccctaaatccaataaatggtggttttatgagaagaggagaggacacccagtga

SEQ ID NO: 840649 - DNA, 120 bp, Artificial Sequence
  ENSG00000286788_28 (sequence is synthesized)
aaaaggccacgcaaagactgaggcagagattggagtgttgcagctacaagccagggaacaccaaggataccagggccaccagaagctggaagaagaaaggaagcattcttccctagagcc

SEQ ID NO: 840650 - DNA, 120 bp, Artificial Sequence
  ENSG00000286788_29 (sequence is synthesized)
ttcagagggagcacagccctgccaacaccttgattttggacttctatcctcccgtactgtgagagaatacatttctgttgtcttaggccatccagttggtgtgctttgtgacagcagccc

SEQ ID NO: 840651 - DNA, 120 bp, Artificial Sequence
  ENSG00000286788_30 (sequence is synthesized)
cagaaaacccgtaaagggagacactcacctcttgtggtagatgctgcagcctgaagcaagatgagggaagccaggagggctgggagatggagaaggaccctcatcactgaaacgagatgc

SEQ ID NO: 840652 - DNA, 120 bp, Artificial Sequence
  ENSG00000286788_31 (sequence is synthesized)
aggatcacactgtgagcctctctagagaccaagtgggagggtttgaaccacagaaagcagagaaagccaaaggagcaccagacaccctaatattggaacaggaaaggagaaaccacatta

SEQ ID NO: 840653 - DNA, 120 bp, Artificial Sequence
  ENSG00000286788_32 (sequence is synthesized)
acgaatgaagcatctaccatacacacaggcctgtgctaggtactgggagagatggaaagaggagaagacatggtggaagggaaagaactcaggcttcaggatctaaggccctgagttatc

SEQ ID NO: 840654 - DNA, 120 bp, Artificial Sequence
  ENSG00000286788_33 (sequence is synthesized)
attctgcatttgctccaatagctctgtgaccttgggcaggttacttaacatctctggggtcctggcttgctatgggaggaggtgggaccaagtgatccagaatgttcaattctgccctga

SEQ ID NO: 840655 - DNA, 120 bp, Artificial Sequence
  ENSG00000286788_34 (sequence is synthesized)
cagcctgtggtcgggagatgctgtacctgtcttgtcacaggtgtgagaaacgctgttaccaaggctggagcctgcctttgagttcccctccctccttccctgcaggatgcattgctccct

SEQ ID NO: 840656 - DNA, 120 bp, Artificial Sequence
  ENSG00000286788_35 (sequence is synthesized)
gcaagccagtttcctctggcccagccccaggagagaatgcctgagaggcagacactcagcgcctcccttcggaaacctggcaggggcttccccttccctcaaagtgccaacttgatggca

SEQ ID NO: 840657 - DNA, 120 bp, Artificial Sequence
  ENSG00000286788_36 (sequence is synthesized)
atactgaaagaaagttatgacaaagctcagagctcccctgagcccacagctgtgccccaggctgcctggaaagattccagctcatggattaacctctttgccatgagctttaactctgaa

SEQ ID NO: 840658 - DNA, 120 bp, Artificial Sequence
  ENSG00000286788_37 (sequence is synthesized)
tgcaaatctttagactgaaatttgtgaagctttgttttctgatgagggtcttcactgggcttagtggagcagaccccatacatcttctgaggagattctggctccagcccggggtggcag

SEQ ID NO: 840659 - DNA, 120 bp, Artificial Sequence
  ENSG00000286788_38 (sequence is synthesized)
ccacagcgtgcagatggaatgattgtgtgtttagaccatggtcctgagaggctcctcagctttcacaagggcgcctgtgctctccctgcagcacggcgttcactggtggaatccagaagc

SEQ ID NO: 840660 - DNA, 120 bp, Artificial Sequence
  ENSG00000286788_39 (sequence is synthesized)
acactaaggagagcagcctcaggttgccccccagccatgtctccccagggctcagctcccagagagaaatcatagttctggagctttgcctgacagacttccccgtatgtcttgcagacc

SEQ ID NO: 840661 - DNA, 120 bp, Artificial Sequence
  ENSG00000286788_40 (sequence is synthesized)
ctctccaaatcatctccctttggaataggccagaccaggagacctctgtatatggatcaggtcatttcagcctccttcacccctgcctgcctccaatttttccctctgccctttcgtggt

SEQ ID NO: 840662 - DNA, 120 bp, Artificial Sequence
  ENSG00000286788_41 (sequence is synthesized)
ccccctaataatttgtatcttgttgtactttttgccagctaactctagagaaggggcaaggcatgaataaatacctctctggccaagattctctctgttacttccccccaccccaagatg

SEQ ID NO: 840663 - DNA, 120 bp, Artificial Sequence
  ENSG00000286788_42 (sequence is synthesized)
agttctcaaacagcttgacctctcagtgggctcttgtccttatagttgtatggccccaaggaggaagagattctgtgacctcctatccctctgtcaccatattttgcaacttcaggggac

SEQ ID NO: 840664 - DNA, 120 bp, Artificial Sequence
  ENSG00000286788_43 (sequence is synthesized)
ccattgcagggttcattgagttagcagaaatctgcccttcagacaaacagagatgatggttttggaggaaaaggtatcattgactttaaaaaacaaactatggtaaaaaacatggccagg

SEQ ID NO: 840665 - DNA, 120 bp, Artificial Sequence
  ENSG00000286788_44 (sequence is synthesized)
tgaggcaggcggatcacttgaggtcaggggttggagaccagcctggtcaatgtggtaaaaccctgtctctactagaaatacaagaattagccaggcgtggtggcagacaccggcaattcc

SEQ ID NO: 840666 - DNA, 75 bp, Artificial Sequence
  ENSG00000286788_45 (sequence is synthesized)
gcctggtcaatgtggtaaaaccctgtctctactagaaatacaagaattagccaggcgtggtggcagacaccggct

SEQ ID NO: 840667 - DNA, 120 bp, Artificial Sequence
  ENSG00000277228_0 (sequence is synthesized)
aaggcaccatctttgaagcagaaagtgagccttcgccagacagcaaatctgccggcaccttgatctcggacttcccagcctccagaattagcaactccgcaggactcaaatacattcctg

SEQ ID NO: 840668 - DNA, 120 bp, Artificial Sequence
  ENSG00000277228_1 (sequence is synthesized)
tccggctgagaaaacagcatctgggcattgcaaagtacaaaatgaagaggtggccaaaggaacaagttgttattgtttgtctttgttccctaataaaattagaaacatatctttatatta

SEQ ID NO: 840669 - DNA, 120 bp, Artificial Sequence
  ENSG00000231298_0 (sequence is synthesized)
gagaccttgaacaagtctctgtttgtttcgtaccattcagatttcctcgtctgtaaacattaagtatctacattcactaaaagtagttctgaatgaatgttatttaatggtgccaatgat

SEQ ID NO: 840670 - DNA, 120 bp, Artificial Sequence
  ENSG00000231298_1 (sequence is synthesized)
gttggaggatacctgtgcatctcatgctgtggttacagcatcaattgtgatgaatataggatactgagtccctcctagaaatgacttcaggaacttcaccccccaactccacaatctggg

SEQ ID NO: 840671 - DNA, 120 bp, Artificial Sequence
  ENSG00000231298_2 (sequence is synthesized)
tccacaatctgggaatggcagacagattcagcaccaggagaacatcacataaaggacaagtgtgtatgtttaaaaatggcaagtttcggcctggcatggtggctcacgtctataatccca

SEQ ID NO: 840672 - DNA, 63 bp, Artificial Sequence
  ENSG00000231298_3 (sequence is synthesized)
cgctgcactccagcctggtgagagtgagattccgtctagaaaaaaaaaaaaaaaaaaagacaa

SEQ ID NO: 840673 - DNA, 120 bp, Artificial Sequence
  ENSG00000231298_4 (sequence is synthesized)
atggctctgtgtgtgtatgtgcaggactctgtgtgtgtggtatatgcataccacatacgcacacatccacactatactatgcactctacatatatacaactacataggcaaatataaagc

SEQ ID NO: 840674 - DNA, 120 bp, Artificial Sequence
  ENSG00000231298_5 (sequence is synthesized)
tgcatgtgcataaatacacaaacaaacacacatacatatgtataaaagcaagcttcccaggagattcttagattcctgctaacaaaaggcggagactcactggacagttactgaagatag

SEQ ID NO: 840675 - DNA, 120 bp, Artificial Sequence
  ENSG00000231298_6 (sequence is synthesized)
acagtagggggcggaagggcccacgcttctttgatattggtggctttggtttttcagtgacgggggacactttgacttcagactcaatcaccacaattgcaatcaaaagacggctttagt

SEQ ID NO: 840676 - DNA, 120 bp, Artificial Sequence
  ENSG00000231298_7 (sequence is synthesized)
tggaacctggaacgtgctaatcctgtcaggcagcctgtgattctggaagtgaaggaacaaaaaaaaaaaaaaaaagggaaaatttcacataaaatttccatatgaggaagaagatggaaa

SEQ ID NO: 840677 - DNA, 120 bp, Artificial Sequence
  ENSG00000231298_8 (sequence is synthesized)
cttttgtgttgtgcgttcagtaaaacgggcactttcttaagcaggtggcaaagaaagcctgagaatccggcctgactttttcatttcagaaccctgcatttcccacacagaggagataga

SEQ ID NO: 840678 - DNA, 120 bp, Artificial Sequence
  ENSG00000231298_9 (sequence is synthesized)
tctgtcatgccacgagatggagcaaaggataaacgctgatgtaaacaggcaacaggactctgactccacacccctgtctgcacggaggatgctcagtccttacacaacaaaatgtgagat

SEQ ID NO: 840679 - DNA, 120 bp, Artificial Sequence
  ENSG00000231298_10 (sequence is synthesized)
gcttccagtcacctcctggccctgacccctgagctccgtgctcaccccactggaggtcctggcagttctccgagcaggctgtacctgtctggggtgatcctctccacttaatgttagaca

SEQ ID NO: 840680 - DNA, 120 bp, Artificial Sequence
  ENSG00000231298_11 (sequence is synthesized)
ttaagttccctgtgaaatctgttttgactcactgaggttatgaatattttatcacaactatcatcatatactaccaaatctccaattttcttatctccattactagactgtgagctccct

SEQ ID NO: 840681 - DNA, 120 bp, Artificial Sequence
  ENSG00000231298_12 (sequence is synthesized)
ggaggctggacctgggtttggcaccgagtggcactcatacatacttcttgaataagagaatgtatgtacacagtggcatgaaattgatttgaatttgttggttttcttaagtgctaaagt

SEQ ID NO: 840682 - DNA, 120 bp, Artificial Sequence
  ENSG00000231298_13 (sequence is synthesized)
tgtagacagttcagtaaaaactataaagcggttaccctgtaaaccatgagtactattaattggaacctcctttcttacatatccacttgtgtttctgttaatgtttccaaaataaataaa

SEQ ID NO: 840683 - DNA, 120 bp, Artificial Sequence
  ENSG00000231298_14 (sequence is synthesized)
aagtgtacagtgcttgtaaagtctgcagtagcatacagtaatgtccaaggctttcacatccactcaccactcgctcactgacccagccagagcaacttccagtcctgaaagctgcattca

SEQ ID NO: 840684 - DNA, 120 bp, Artificial Sequence
  ENSG00000231298_15 (sequence is synthesized)
acagttactgaagatagacagtagggggcggaagggcccacgcttctttgatattggtggctttggtttttcagtgacgggggacactttgacttcagttcctttttacgacttttggta

SEQ ID NO: 840685 - DNA, 120 bp, Artificial Sequence
  ENSG00000231298_16 (sequence is synthesized)
taacgaattgcagtggccgcaggctatgtaaaaatttttaaaaggtggtgtctctcatattcttcagcataacttgggtcacagaaacccaggcataaaaattcattgtgaactcatatt

SEQ ID NO: 840686 - DNA, 120 bp, Artificial Sequence
  ENSG00000231298_17 (sequence is synthesized)
ctaccatggcctgacactgactcaatcaccacaattgcaatcaaaagacggctttagttggaacctggaacgtgctaatcctgtcaggcagcctgtgattctggaagtgaaggaacaaaa

SEQ ID NO: 840687 - DNA, 120 bp, Artificial Sequence
  ENSG00000231298_18 (sequence is synthesized)
agagtaaactgggtattcacaggtaaagagagataatttctagaacaaaaaatgtcagccagaagaaatgggccaaatattagtgtcctcgtttggattttaatgaagttgtcaaattta

SEQ ID NO: 840688 - DNA, 120 bp, Artificial Sequence
  ENSG00000231298_19 (sequence is synthesized)
tgggctatgataacttataatgggcaaaagaatgttaagtagtctagatgggagagggcagaaattacaacaacaaaaaaattcagacaccaaatgatgacacaatcttccaaattataa

SEQ ID NO: 840689 - DNA, 120 bp, Artificial Sequence
  ENSG00000231298_20 (sequence is synthesized)
atctgatctcatttttattcagtgacatttgatatctctcaactttccacactttaatatattcagtagtaaatttgataggattgaaaaaaatgacactataattccaaagtcttttgc

SEQ ID NO: 840690 - DNA, 120 bp, Artificial Sequence
  ENSG00000279159_0 (sequence is synthesized)
tgaaggggccagagtactggctgccctgaaatcagagcagcagctaaaaatggagccttgaggcgagaggtagttgtaatgactactgatgggaactcttcagagaaggaggaatagctg

SEQ ID NO: 840691 - DNA, 120 bp, Artificial Sequence
  ENSG00000279159_1 (sequence is synthesized)
ccaggtcagatccctgactgctttgccctcttttagcctgggagattttaggagcaaaatcactgaggaaatgcgttcagtgcttgaacatcatggtgaggctccttgccaaggtctaga

SEQ ID NO: 840692 - DNA, 120 bp, Artificial Sequence
  ENSG00000279159_2 (sequence is synthesized)
gtcggaaggctatctgtagctttcctttgccaaaggtcagtttcccagcaggccctcaaacacttctgtgtgagagggaaaagggacgaagaggggataaaccacagggcaaagaattag

SEQ ID NO: 840693 - DNA, 120 bp, Artificial Sequence
  ENSG00000279159_3 (sequence is synthesized)
gaagtgttagcaaatgctaccatgtggaacactcaactttatttgctttatttatatatttaacaattctaaagtatttacttcttgctttgacaaaaaatgaaaaatataggagcactg

SEQ ID NO: 840694 - DNA, 120 bp, Artificial Sequence
  ENSG00000279159_4 (sequence is synthesized)
actgactcctctttaggagaaaagggttatatgtacagctatggagagttacggttcctcctttaacaaaggaaaatattaataaaaaagtgcttcatcgatcaaaaaagagctaagagc

SEQ ID NO: 840695 - DNA, 120 bp, Artificial Sequence
  ENSG00000279159_5 (sequence is synthesized)
tgcaagcatttattcacactgtacatcagacccaagaaacccgtatcataacctcttggcacctgtcactaggaaatgcacaatcttcaattagaccaactttttccctacctgcacgac

SEQ ID NO: 840696 - DNA, 120 bp, Artificial Sequence
  ENSG00000279159_6 (sequence is synthesized)
tagatgacacagaatgtggaaaagaactacaccctgtttcaccacgttcaaactgtgttgccactggaagtcagagacgtgctcagatgctctgggctttgcctggactgagagcaccag

SEQ ID NO: 840697 - DNA, 120 bp, Artificial Sequence
  ENSG00000279159_7 (sequence is synthesized)
ggaagccttctgggccacgccttaaccacacccaggcatgcacagaaccaccttcctgagacacaccttgcccttggtcagggaactgctaccaaggggaagaggaatacagggcagggc

SEQ ID NO: 840698 - DNA, 120 bp, Artificial Sequence
  ENSG00000279159_8 (sequence is synthesized)
cagagcttaagcattccctgaccttacccctagtcctcaccatgatccaccctgtcaccagttagcagctttcagcagagtcaagcatggcctccccaagagggagggcaggcacaaaac

SEQ ID NO: 840699 - DNA, 120 bp, Artificial Sequence
  ENSG00000279159_9 (sequence is synthesized)
atggatgccaagattacaaagcacaaacctaactcttctccaaccttccccacacctacctccacaaatattcttgatttaaggctgtttttggaccatatcaaagctcactgaggaaag

SEQ ID NO: 840700 - DNA, 120 bp, Artificial Sequence
  ENSG00000279159_10 (sequence is synthesized)
gtgccctgaatctcctcaaggccatgtcacttctctaaggaaccctacgaagtcaccaagtggcccttcactgctggccagcagccagacaagtgcccactcagacagccaggagtggca

SEQ ID NO: 840701 - DNA, 120 bp, Artificial Sequence
  ENSG00000279159_11 (sequence is synthesized)
aagggggactgctcagcagttattcctgtcccaagaagagaagaggagaaaggctgattgtatgggacctgctcccttttccaggggcttgtaactctaaaggctgattctaccccttaa

SEQ ID NO: 840702 - DNA, 120 bp, Artificial Sequence
  ENSG00000279159_12 (sequence is synthesized)
agggaagatccatgattggtttggtttgggaacgggggatttctggaaccctgagtctggatttccctgtgctggctgaggaagagattgtttaggggaccaggccccagaatggggacc

SEQ ID NO: 840703 - DNA, 120 bp, Artificial Sequence
  ENSG00000279159_13 (sequence is synthesized)
caggtgtgtctgggctcagggcaggctttggccttgactgcataaacattttgaccagtctgtactcatgcctgagggtgggaagtgctacacagcctggcccaggaaagcagccccctg

SEQ ID NO: 840704 - DNA, 120 bp, Artificial Sequence
  ENSG00000279159_14 (sequence is synthesized)
aaagtaaaaggagcccaagacaatctgggtcaagttaaaaatgggatcccacgggggacaacatgacggctacccactcccagcccctcgcctgcctcaaaggagcatccactttccttt

SEQ ID NO: 840705 - DNA, 120 bp, Artificial Sequence
  ENSG00000279159_15 (sequence is synthesized)
cccaaagaggcgcctaaggggatgccatttaccgtgtgcctctccctccaaacatcagcctcatttatccatctgtgaggggactggctcagctcctcgcaggagggagatgatgcccag

SEQ ID NO: 840706 - DNA, 120 bp, Artificial Sequence
  ENSG00000279159_16 (sequence is synthesized)
ggcagtgctcttggggaatatgcttccagcctccccagcagcaaagggttcccaaccagctctgatgtggcggtggcgtgaggaatggttgcatgttagcactggctttcttccctgctc

SEQ ID NO: 840707 - DNA, 120 bp, Artificial Sequence
  ENSG00000279159_17 (sequence is synthesized)
acggtctcagatctccatactcctggctctgaccaccatcctcccacccggaagaaacaagccatccctcagtgtcacgtgacagcaggcagctcggcagttacagtgggcctggcaacc

SEQ ID NO: 840708 - DNA, 120 bp, Artificial Sequence
  ENSG00000279159_18 (sequence is synthesized)
cttggtcttccatcaaaaaaaaaaaaaattaagacaaccaagggaaagtttccttttttgaaggcagaggaggaggatggaaaaggtagggagggagtagggggacaggaaagaaaaatc

SEQ ID NO: 840709 - DNA, 120 bp, Artificial Sequence
  ENSG00000279159_19 (sequence is synthesized)
aatctacaatccagtggtgcatcccaaatctgtcactctgtacaggtggttccacgctcccattccaaagtgcacgggcctctcggtctgcccaggttgagtgggcctgtcataggaaca

SEQ ID NO: 840710 - DNA, 120 bp, Artificial Sequence
  ENSG00000279159_20 (sequence is synthesized)
gcagcttggccactgcccacccaggtcactgagcttcagttggaagtggcagcaatgggcttatccagttcaaggtcaatgctggagcttgtgggatgtaggctgctatagcaagacttg

SEQ ID NO: 840711 - DNA, 120 bp, Artificial Sequence
  ENSG00000279159_21 (sequence is synthesized)
catactcgactgggttcaaagagctgctggctgggaactggaaccttctggttacaacaactggagcagaatacgttcccacaattccttgagatgagaagaaacagaacaatgttagtt

SEQ ID NO: 840712 - DNA, 120 bp, Artificial Sequence
  ENSG00000279159_22 (sequence is synthesized)
ttggccagcaggtatgcggagggaaaccaacttcaaaagacaaactttgccgtgtgtaatttgcatgtgctggagctccttgagatcaaaccctttcatctctctagcccaggaacaagc

SEQ ID NO: 840713 - DNA, 120 bp, Artificial Sequence
  ENSG00000279159_23 (sequence is synthesized)
tgggtagggagggtgtccctacctagcagagtcacatgtcattttcactttggggccaaggattcttggctgcctcaccactgactcaaaagaatgctgctcaggtatacaaaagaatgc

SEQ ID NO: 840714 - DNA, 120 bp, Artificial Sequence
  ENSG00000279159_24 (sequence is synthesized)
tgctcaagagagatctgtaagaatacatggtcctaacaatgggttagtcctgatccaggaaaacccagtggccacacccacctaggcaatgccctctgtgtagcttgtgatcacagaggc

SEQ ID NO: 840715 - DNA, 120 bp, Artificial Sequence
  ENSG00000279159_25 (sequence is synthesized)
caggctcctcaaacgagagaaacaactacccagcctcactggggagtaaggagccttgcccaacggccacttctccagaggatcaaaggcagcaacatggcagatagactgctgccattt

SEQ ID NO: 840716 - DNA, 120 bp, Artificial Sequence
  ENSG00000279159_26 (sequence is synthesized)
tggactgctctgctggcagcatgcaaagccagggacaagtagcctgtgatgcatgctcagagggtgaaagaggagaggtgggaggacaagaacacaggatgaacacacgtgcacacacac

SEQ ID NO: 840717 - DNA, 120 bp, Artificial Sequence
  ENSG00000279159_27 (sequence is synthesized)
ccccttattagataggtgtcagtcaattatggctcactccccgacccatgcatctccagggaaaaccagagttctaccagaaggccagaatgcactcaggccccaggcatccctctcctc

SEQ ID NO: 840718 - DNA, 120 bp, Artificial Sequence
  ENSG00000279159_28 (sequence is synthesized)
ctcccctgaaagctgggttctgaggcatctgtgcagcacagttctgcacccccagatggatgcccatcagagccaacaggaaagggaattggcaaagaatgagtttctgcccaccttaca

SEQ ID NO: 840719 - DNA, 120 bp, Artificial Sequence
  ENSG00000279159_29 (sequence is synthesized)
actctacttttgctgggccctgaggtacaaatcaatcctaatgagcctaagaacaagaagctccaaggagcctgacacagcccaccaaagactgggggagggcagcttcttagccttcta

SEQ ID NO: 840720 - DNA, 120 bp, Artificial Sequence
  ENSG00000279159_30 (sequence is synthesized)
acttttcatttatgctgttcggaatgcaaacccactgctggattaaggatcacttaggcacaggaggagagaagactaagaccagttgggaacaaaagaataccacaaaaggaaaaggtg

SEQ ID NO: 840721 - DNA, 120 bp, Artificial Sequence
  ENSG00000279159_31 (sequence is synthesized)
ggacatggggcaatggaaagacagaaaagaaaaacacaaaattcatcttctagaatgctgtacttcgtaactagttctaaaaagcgtgagtcagcaaaaacctgtagttacacagaaaaa

SEQ ID NO: 840722 - DNA, 120 bp, Artificial Sequence
  ENSG00000279159_32 (sequence is synthesized)
tttctgaacatctacacttctttaacattcctgctggagttcagctcaaaagcctgacatgaatttgatgcttttctttcttttctttactttttcgagatgggagttttgctcttattg

SEQ ID NO: 840723 - DNA, 120 bp, Artificial Sequence
  ENSG00000279159_33 (sequence is synthesized)
aggcgtaagccaccgcacctggctgatgcttttctatctgacttctttcagaggaccctgaaagacactaagtggaatctttccttgaagtcttccaagctaaaacaattctctggaaag

SEQ ID NO: 840724 - DNA, 120 bp, Artificial Sequence
  ENSG00000279159_34 (sequence is synthesized)
atcacctctgttcagtcctggtctcttaaaaaaaaaaaaaaaagggaaaaaagaagcagtgatgctgtttgacctggaaattactagcattattctggcatctcaatgaatcactgaccc

SEQ ID NO: 840725 - DNA, 120 bp, Artificial Sequence
  ENSG00000279159_35 (sequence is synthesized)
aaaataaatagctctgaaaacccaactggttcccctacaagaccagaagacaagaagcactacttctcgtcacaagcaagacggcctggctgacctctgtgatcaggaggggagcacatg

SEQ ID NO: 840726 - DNA, 120 bp, Artificial Sequence
  ENSG00000279159_36 (sequence is synthesized)
gctgcagcctgacccaccctcgatggcctctcctcagctgctttgaatcccctcaagcccacctatctgcctgtgcacccaaggccccaggcttcaccctagtaagtgcagagaggggga

SEQ ID NO: 840727 - DNA, 120 bp, Artificial Sequence
  ENSG00000279159_37 (sequence is synthesized)
aatgataagagttagtgtggagaagttattgtagatgtgcagacatcacaggcaggttgttgcaaatgctcaccacgtttgatcaacacggtcagtgtccctgcaaggaggggagaaaga

SEQ ID NO: 840728 - DNA, 120 bp, Artificial Sequence
  ENSG00000279159_38 (sequence is synthesized)
gctcagaagagaagccaaccaaagatatctgggcttggggtgcagggtggggagatacatgtcctagaagcatcattactaggcaaagagactgttccattttcaatccacccactcgtg

SEQ ID NO: 840729 - DNA, 120 bp, Artificial Sequence
  ENSG00000279159_39 (sequence is synthesized)
tgggtgagctatggcatgattcagataaacttcctcttctaagaacactgaacatccaccagacagtcaacaccctagctggggcaaagggtccctagtaaactcactaccctaacccag

SEQ ID NO: 840730 - DNA, 120 bp, Artificial Sequence
  ENSG00000279159_40 (sequence is synthesized)
aaggaaaaagaagtcaggaaccttaatgattggaagactgtcctcagctgtctctactacttcccaagctacagctgctcaccaatggcacaagggaaaacaagtgtggggtcagggagc

SEQ ID NO: 840731 - DNA, 120 bp, Artificial Sequence
  ENSG00000279159_41 (sequence is synthesized)
aggaaaggaataggaaaatagttccctccccatcgcaggaaaactggttttgctcatagtagccatgttgaatgggaagaaatgttatgctgagaataagaaatggtggtttcagtggtg

SEQ ID NO: 840732 - DNA, 120 bp, Artificial Sequence
  ENSG00000279159_42 (sequence is synthesized)
gctgttgtttcaccaatctgggaaacaacaaaatgctaccatttgcacatttcagaatttaacagtgattactctgaatttgaacaaagatgccaaatgcagttttgcaaacaccaattt

SEQ ID NO: 840733 - DNA, 120 bp, Artificial Sequence
  ENSG00000279159_43 (sequence is synthesized)
cagaggcacaggaagatgagaccatggctctgcctcagacagaacactgagatacccacaaccctctactctgcaggctctgtgggccgaccctcaacctccacacacagcccaccctac

SEQ ID NO: 840734 - DNA, 120 bp, Artificial Sequence
  ENSG00000279159_44 (sequence is synthesized)
cacagcccctcaatggtacctgcagtggtgcttcctgctggcaagccagaaggcactgtcgcacgcatagcagtgggcggccaggtggtcaggaagccaacgggtcatctgcaaaacaga

SEQ ID NO: 840735 - DNA, 120 bp, Artificial Sequence
  ENSG00000279159_45 (sequence is synthesized)
tgggaccaggttactgacaggagatgggccatccagctggagccagcagagccatgctgggggcagcaagagtcacaaggaccacatcagctccagtggcaccagcccagcagatctgat

SEQ ID NO: 840736 - DNA, 120 bp, Artificial Sequence
  ENSG00000279159_46 (sequence is synthesized)
gtcaacagtacaagaaaggcgtccaaatcgtttccctggaggggactccaatctcccctgagataaagtagcaggcagcagcaccctgggtcactgtgagagctggcaaggctccagttc

SEQ ID NO: 840737 - DNA, 120 bp, Artificial Sequence
  ENSG00000279159_47 (sequence is synthesized)
atagaggcaatgaagagggagggccagcttgctgagtctccctggctcagaaatcctaggcttcatgtgggttcccaggagctaaggtgccagaggctcagggctagctgtgctgggagg

SEQ ID NO: 840738 - DNA, 120 bp, Artificial Sequence
  ENSG00000279159_48 (sequence is synthesized)
tgcttccttggccaggggtatggggtgggaatgggggtggagaagaaccacaaaacagttaaattgatggcactcagagcaggggctgagcctgtacctctgtgtcctgtttatccacct

SEQ ID NO: 840739 - DNA, 120 bp, Artificial Sequence
  ENSG00000279159_49 (sequence is synthesized)
gctcccagctggcttcagagaaaatctctgtgctgcagcgagacaaacagttctgatccagattgctttccgagtcggggattgaagtctgttggcaaacaaacacagctgaacagaatg

SEQ ID NO: 840740 - DNA, 120 bp, Artificial Sequence
  ENSG00000279159_50 (sequence is synthesized)
aacctggtctcctcccaaaagaagaaaaggcctggtgaagaagggagaactgaggactctgggtggggccgagtgctaggactgccgaatctgcagatgcatcagccatcaagaactggg

SEQ ID NO: 840741 - DNA, 120 bp, Artificial Sequence
  ENSG00000279159_51 (sequence is synthesized)
gtgaagaagtgcagtgtgggcctgggctcagctgggagagggatacacaggttgtgtgcagtgactctggagtagaaaaacaggccctcagggttccagaaagtgagtgagagggaagtg

SEQ ID NO: 840742 - DNA, 120 bp, Artificial Sequence
  ENSG00000279159_52 (sequence is synthesized)
accaaaatggaatgagaattctgtatgtcagctgctccagtgggcctgtcaatccaaccctgcctgccactaagttaaagctgagtgctttcgggatgccctccttttcttagaaggact

SEQ ID NO: 840743 - DNA, 120 bp, Artificial Sequence
  ENSG00000279159_53 (sequence is synthesized)
ctctgggaacatgagaaactatcattagcatgaaggaaaagccaagtcactctgaactgaaagtcactggatgtgcccgcctttaatgtacgctgaccacttgagagccaggctcacact

SEQ ID NO: 840744 - DNA, 120 bp, Artificial Sequence
  ENSG00000279159_54 (sequence is synthesized)
tgtacttgagctgcctgagtcaagtccacccagagaggaaagcacctccttgagaacctccccctctggaacccccatttccagccacaaacccccatcagagctaactcctcaacagtg

SEQ ID NO: 840745 - DNA, 120 bp, Artificial Sequence
  ENSG00000279159_55 (sequence is synthesized)
ctagaaaccagtcccttctctccatttctactggcagcatctgccacaggatgggtataaatatttgtttaaaaagaactgaaccttcaaagccatagcccacgtctggaaggactaata

SEQ ID NO: 840746 - DNA, 120 bp, Artificial Sequence
  ENSG00000279159_56 (sequence is synthesized)
ctttgtagttactaaggcagaacaggcactaaaatctgacaggaataacttggcattgccctacagatgtcattctgcccatgggttcaagcccttctgaagacttatgatcctgtgtct

SEQ ID NO: 840747 - DNA, 120 bp, Artificial Sequence
  ENSG00000279159_57 (sequence is synthesized)
gagagatctgatcaaccatgcagtgcatgctaagtctcttcctctccaacggcctcaacaggacatctgcagaaagtaagcgaagcagaaaacaggcaggctgccatcgctgtcgtggag

SEQ ID NO: 840748 - DNA, 120 bp, Artificial Sequence
  ENSG00000279159_58 (sequence is synthesized)
gctcatctccagcctctcttaacagggctactctggacctttccaatcctttaacaacctgtaccaatcaccatgcactgggcacaaagggcacccagcctcagcatgccgtctccttgg

SEQ ID NO: 840749 - DNA, 120 bp, Artificial Sequence
  ENSG00000279159_59 (sequence is synthesized)
gcagctatggaggaataccacagcctactcaccacctcatccccaaagtctccattaaagtgtagggagctggtcaggtactggctctccaggcgactcttcagctcctggacttgtttc

SEQ ID NO: 840750 - DNA, 120 bp, Artificial Sequence
  ENSG00000279159_60 (sequence is synthesized)
ttcaaagtttctacttcctgctggtggcctgactcaatctgacgcaggcgctgttggatcgtgtctgtgtacactgacatgccatcatcgtccaggtggctgcgggaaggctggtcgggg

SEQ ID NO: 840751 - DNA, 120 bp, Artificial Sequence
  ENSG00000279159_61 (sequence is synthesized)
ctgctggttgcagatggccttcctgagtggctatgcagccacttgtggtgcaagttccttgagtgtaagtgggcagagctgcagctcatagcagacagctgacggctcagtgagtccttg

SEQ ID NO: 840752 - DNA, 120 bp, Artificial Sequence
  ENSG00000279159_62 (sequence is synthesized)
ctcctaccagcctccccattggcgcaatgcccattgggtgtggggtacatctggagggtgctaagacctgggggctgctctgaggccctgttttcagtctctggggcaccattgcacaca

SEQ ID NO: 840753 - DNA, 120 bp, Artificial Sequence
  ENSG00000279159_63 (sequence is synthesized)
agcccctctttacattcggctaaaggcaaggcacaaggggaacgtgtcaggctgagagtgctgccaagggaagtcctatgcaccacagaccccacttggggcctctcgaccaggcttgtc

SEQ ID NO: 840754 - DNA, 120 bp, Artificial Sequence
  ENSG00000279159_64 (sequence is synthesized)
tctgaagggctgggttccatggtctgaggaagcctgtccttgccactatttacaaggcaagatctatgatgaccttggggcccacttactgacttcaccttatcttccactaacatgtct

SEQ ID NO: 840755 - DNA, 120 bp, Artificial Sequence
  ENSG00000279159_65 (sequence is synthesized)
gtagaactgtccacgtttggtcctctggtctcaaaagggacttgggaaggtagcagagaacatgactgtgaggtaccatagccaacttttgcatctactgggattggaagaactgcttcc

SEQ ID NO: 840756 - DNA, 120 bp, Artificial Sequence
  ENSG00000279159_66 (sequence is synthesized)
tccctaccctctgcaatctcttctattcgaaactgctccacagggacctccagggaatcctctcccctgggggggacctggagagaactgaggagaacactgagcccactctgctgttca

SEQ ID NO: 840757 - DNA, 120 bp, Artificial Sequence
  ENSG00000279159_67 (sequence is synthesized)
gaaatgccctgtgagaacagaggccagctcatatccagatggctcctcagagcagcatcacccagttctgggtcttggtgaagtccaatggctgaggcctcaggtgtcttcctcctgctc

SEQ ID NO: 840758 - DNA, 120 bp, Artificial Sequence
  ENSG00000279159_68 (sequence is synthesized)
tccttttctaagagagggtcctctttaccctcctgtatctcaatgcctgccctgtgggcaggttcctctactccactctcctctttggtggcctcctgcaagatgttctccatctgcccc

SEQ ID NO: 840759 - DNA, 120 bp, Artificial Sequence
  ENSG00000279159_69 (sequence is synthesized)
tcagctactccggctgcaacagaaagctcggcaccccccggcactctggtgggcttccctaggctgtcggcagaaaggggatcctctccagggccagccaggctgctcagctctagtgag

SEQ ID NO: 840760 - DNA, 120 bp, Artificial Sequence
  ENSG00000279159_70 (sequence is synthesized)
cgccggtgctcctgccacttctcgttcaggctggggtcgctgcagcgccggctggccagaggcactgtgttgtcacaggctgtggtcagattgtcgtatgatctagtctttggtagccta

SEQ ID NO: 840761 - DNA, 120 bp, Artificial Sequence
  ENSG00000279159_71 (sequence is synthesized)
aaggaaaggaatttgggggaaatgaaaatcttggaaactgtttggaggaagtaggagacaataggttttaacaagcagttgtttcataactgggtccattatggctactcatggagctgt

SEQ ID NO: 840762 - DNA, 120 bp, Artificial Sequence
  ENSG00000279159_72 (sequence is synthesized)
agcatctctggagcgaggcccagactgctggagcagcaaagctccggaacaagtcctcctagtgtgcagatttcctttcaaactcccccaaccccatgccccatacatacaaatgagcta

SEQ ID NO: 840763 - DNA, 84 bp, Artificial Sequence
  ENSG00000279159_73 (sequence is synthesized)
gcaaatgctatttccaaaagacgttcttcatgatgctgctgtgtttctcagtggatggcaaagtagcactggtgtttcttgata

SEQ ID NO: 840764 - DNA, 120 bp, Artificial Sequence
  ENSG00000279159_74 (sequence is synthesized)
ttctcagtggatggcaaagtagcactggtgtttcttgatattacagtattttaaattaatgtattatctatcagtctgaatttaataaagctaattctcaagtgacaaagccaaattttc

SEQ ID NO: 840765 - DNA, 120 bp, Artificial Sequence
  ENSG00000279159_75 (sequence is synthesized)
tttcttttcttttttttttttcctgagacaggtcttgccctgtcatccaggctggagtgcaatggatcttggatcactgcaacctccaccttccaggctcaagtgatcctcctgcctcaa

SEQ ID NO: 840766 - DNA, 72 bp, Artificial Sequence
  ENSG00000279159_76 (sequence is synthesized)
ttggttagtttttgcattttgggtagaaacagagtttcaacacattgcccaggctggtctggaactcctggg

SEQ ID NO: 840767 - DNA, 120 bp, Artificial Sequence
  ENSG00000279159_77 (sequence is synthesized)
attacaggcatgagccaccaagcctggccccaaagcaaaattttctgtcatctgacagcatctgccttttaagcctcagaagacaaatcatggcaaataggcaggagcacagagcactgg

SEQ ID NO: 840768 - DNA, 120 bp, Artificial Sequence
  ENSG00000279159_78 (sequence is synthesized)
gcaaataggcaggagcacagagcactggggaaaacacaaaccagggggtcacagaaaaactggaggatttgctctatcactgaggagcggctcagtgtatgcaaaacaacatgaagcaac

SEQ ID NO: 840769 - DNA, 120 bp, Artificial Sequence
  ENSG00000279159_79 (sequence is synthesized)
agggcctaactcactcccagaaacaaggatcttacagcctcgtagctcagaaatccctataacttccctgaaaaaactgcagagacctaagaaagatactgtggagccagataccatcat

SEQ ID NO: 840770 - DNA, 120 bp, Artificial Sequence
  ENSG00000279159_80 (sequence is synthesized)
gatctctgaccatccctgcacacgtcccaacacaggaatacacccacacaggctgtcaggcctgtggcatcaccctgggctcaccggctcagggggggatcatcagggctggtgcctggg

SEQ ID NO: 840771 - DNA, 120 bp, Artificial Sequence
  ENSG00000279159_81 (sequence is synthesized)
gctgggtatggtgcacagctgtcgtccacaggggtggttggggatgggcagggcaggtacactgcactccacagcatcaggttacgcacatggcacacagggtacagcacctgaggaggg

SEQ ID NO: 840772 - DNA, 120 bp, Artificial Sequence
  ENSG00000279159_82 (sequence is synthesized)
gggaggacacaggtttaaatatgccccaataagtcttctaggatgtctggaaatgaggatcaagagcaagcacccagctggaatacccaacagggctgacaggatctccacaaagaagca

SEQ ID NO: 840773 - DNA, 120 bp, Artificial Sequence
  ENSG00000279159_83 (sequence is synthesized)
gcaccaatggatacaggtctatcccaagaggaccaatacaggactagacattttatatagccaacatttttcacctaagagccacttgagagcatgaaaatataaaatattttttagatc

SEQ ID NO: 840774 - DNA, 120 bp, Artificial Sequence
  ENSG00000279159_84 (sequence is synthesized)
cctttctcattatagttatttcttaggtcaccttcaatgtctgactttcatcagcttgatttgttgcttttactgcctaagaaagtgagtcattctgttagatggtgattgtccatcctg

SEQ ID NO: 840775 - DNA, 120 bp, Artificial Sequence
  ENSG00000279159_85 (sequence is synthesized)
ctggcacaaaagcttggcttcaagaaacactgtcaaacccattttatgggatcatttaaattaatcatgtgaaaagaaggaaattttcctgctgtattgttacttccccagaaggcacac

SEQ ID NO: 840776 - DNA, 120 bp, Artificial Sequence
  ENSG00000279159_86 (sequence is synthesized)
tgaaggggagagacaagcagtcagcttaaatcttttctgtgattacttaaatgtaatgagaaccatattaatagtccaggaaatcagtatgaactctgattagcctccttttgacttctt

SEQ ID NO: 840777 - DNA, 120 bp, Artificial Sequence
  ENSG00000279159_87 (sequence is synthesized)
tagggtctaagatgcattctgacaaagctagtattactatgaaactgacacataggtctatgtgcctccttttctctgcttaacagaaggtattcattccttcggggaacaaagtcttaa

SEQ ID NO: 840778 - DNA, 120 bp, Artificial Sequence
  ENSG00000279159_88 (sequence is synthesized)
agggcctgccagctcttcatgtgagcagagaatcagacagacacacataccaatgtcaaacacagtttactgttctgagacagaagctttggtgggtatcattgcttattgacactggga

SEQ ID NO: 840779 - DNA, 120 bp, Artificial Sequence
  ENSG00000279159_89 (sequence is synthesized)
gggtgctgggggcctggtggcagctcattctgagctatcagtgcatcaggaagcaacttaagtgcctctcccgtaagacagaatatgctagaaataagctctggaggcagtgccaaaaaa

SEQ ID NO: 840780 - DNA, 120 bp, Artificial Sequence
  ENSG00000279159_90 (sequence is synthesized)
gattcatgtctagggtggcaaagtagagatctgtgttaaaccaaaccaccctcagcaagtagtcatcagaaacagatcagagcaccatcagaagcaggccttcctcaggacagaatcatg

SEQ ID NO: 840781 - DNA, 120 bp, Artificial Sequence
  ENSG00000279159_91 (sequence is synthesized)
ggggaaaaatggaaccagtccatccagagacagtagagatgtcttcacaaaaacagtcactactcaaaaaggctctcatatgtaaccaaccccaaattccttctgctgaccacagtggaa

SEQ ID NO: 840782 - DNA, 120 bp, Artificial Sequence
  ENSG00000279159_92 (sequence is synthesized)
aggctgaaggatacatacggcttctgactgagaggaatacagtaggtttttgaaagccttgttgcctgcccgaagaagtgaccacacggaacatgtccgttcctgagtatgcttttcccc

SEQ ID NO: 840783 - DNA, 120 bp, Artificial Sequence
  ENSG00000279159_93 (sequence is synthesized)
tctctccttggcgttgttgcacaggaatgttccaaacaggcaggaataggtatgctgcaccagtttcacctatggaagtccaatgaagcacaaattaagcaatcaggcatgcacactctg

SEQ ID NO: 840784 - DNA, 120 bp, Artificial Sequence
  ENSG00000279159_94 (sequence is synthesized)
ataagtcagctcagctgagccaccttatcctaacatccctgagaacacttcaatttactctgtcaggacggggaacccagtaagccatgcagtagcctcctcctcctcacaccaccaatt

SEQ ID NO: 840785 - DNA, 120 bp, Artificial Sequence
  ENSG00000279159_95 (sequence is synthesized)
ccaggacccaacaacctgagtcagacaggttgttggtgcccctattcctcttagcttccgtgataaatagtctgagattgtgaattaacagccactctcacaagcgccacagcatatgaa

SEQ ID NO: 840786 - DNA, 120 bp, Artificial Sequence
  ENSG00000279159_96 (sequence is synthesized)
ctgggtgcaggagcacgtcagtgtacaactcaagtctgagctgacagtatgtttgtaaaactacttgttcattctacaaattattgagcatttcacatggcccaaacatgactaaggtgc

SEQ ID NO: 840787 - DNA, 120 bp, Artificial Sequence
  ENSG00000279159_97 (sequence is synthesized)
tgggcatgtagcaatgaccagcaaattcttctgccctgatggagcttgctctagtcatagctgaagagtgaccagtgctatggagaacaaggcagactgagatggacaggacacatatga

SEQ ID NO: 840788 - DNA, 120 bp, Artificial Sequence
  ENSG00000279159_98 (sequence is synthesized)
ggcagtgcaggatggcctcactggctgggacccagtggacttgaaagagcaggcatgtgggtatctgaggggaagcactccaggcagaggcaaccacaggtgcaatggctttgaggtaaa

SEQ ID NO: 840789 - DNA, 120 bp, Artificial Sequence
  ENSG00000279159_99 (sequence is synthesized)
gcacatgcttgcaatttctgagctacagcaaggaggccagtgtgactaaaggagattgcagaagagggagaatggtaggaaatgaacctagagaggtaacctctaggaaggccctggaga

SEQ ID NO: 840790 - DNA, 120 bp, Artificial Sequence
  ENSG00000279159_100 (sequence is synthesized)
ccattttaagaactttggcttttgtgtaaaatgtaactagaggtttttaagccaaggaatgacacagcctgccttgtgttttagaagagactctatgctgggataactcaattggggcag

SEQ ID NO: 840791 - DNA, 120 bp, Artificial Sequence
  ENSG00000279159_101 (sequence is synthesized)
gagatgatggtggcttgaaccagtgtggtaccagtaaaggtggcaataaataaccaggttttagatagattgcgaaagcagagctgcagaatctgactgaatgtggaagagggagggagg

SEQ ID NO: 840792 - DNA, 120 bp, Artificial Sequence
  ENSG00000279159_102 (sequence is synthesized)
gaaggagggagggagggagggagggaggagacttgacgatgacaaagaattttgccccaaacaaaaggagggatggaaatgccatatggtgagagagaagacttctggaagatcaagttt

SEQ ID NO: 840793 - DNA, 120 bp, Artificial Sequence
  ENSG00000279159_103 (sequence is synthesized)
tatagtgaggaaacacaggaatcaagaatcaagttttggacaggcatggtgactcatgcctgttaataccagcattttggaaggccggggtgggaggatattgtttgagcccaggtgttt

SEQ ID NO: 840794 - DNA, 120 bp, Artificial Sequence
  ENSG00000279159_104 (sequence is synthesized)
cctgggcaacaaagcaagaccccatctcttaaaaaaaaaaaaaaaattaaaaacatcagccaggcacagtggtacgcacctgcagtcctagctactcagggggctaaggtgagaagatca

SEQ ID NO: 840795 - DNA, 85 bp, Artificial Sequence
  ENSG00000279159_105 (sequence is synthesized)
tacgcacctgcagtcctagctactcagggggctaaggtgagaagatcacttgaccctgggagttcaaggctgcagtgggctgtgt

SEQ ID NO: 840796 - DNA, 120 bp, Artificial Sequence
  ENSG00000279159_106 (sequence is synthesized)
ttaagtctgaatcaacattaagacagccaagtggagatacctagtagtaacttagatacgtgagtctgaagtggagaggtctaagctgaaggtgtataaatgtgggactcatcagcatac

SEQ ID NO: 840797 - DNA, 120 bp, Artificial Sequence
  ENSG00000279159_107 (sequence is synthesized)
agatggcaattaaagccactagaatggatgaaatacttggaagtgtggatggaggagcagcctggaggctgagcaagggggcattccaacatttagaactggggagaggaggctaggtgt

SEQ ID NO: 840798 - DNA, 120 bp, Artificial Sequence
  ENSG00000279159_108 (sequence is synthesized)
tccaacatttagaactggggagaggaggctaggtgtcgaagcttacgcctgtaattctttgggcaaccaaggcgggagaatcacttgccaggaggtttgagaccagcctgggcaacatag

SEQ ID NO: 840799 - DNA, 120 bp, Artificial Sequence
  ENSG00000279159_109 (sequence is synthesized)
gctactggggaggctgaggtgggagaatctcttgatcccagaagtttgaggatgcagtgagttatgatcacactgctgcactccagcttgggtgacacagcaagatactatctgaaaaaa

SEQ ID NO: 840800 - DNA, 120 bp, Artificial Sequence
  ENSG00000279159_110 (sequence is synthesized)
aaaaaaaaaaaaaaaaaagaactggagggattaaggggaatcagcaaaggaggcagaaacaatccagtaaggtaaaaggagaactaacagcaaggaagtactagaagtcaactgcaagga

SEQ ID NO: 840801 - DNA, 120 bp, Artificial Sequence
  ENSG00000279159_111 (sequence is synthesized)
taacagcaaggaagtactagaagtcaactgcaaggaagtactagaaggtcaattgaagaaagcatttcaaggaaggagtggttaaactgtgccaaatggtaatgatggatcaaagagatg

SEQ ID NO: 840802 - DNA, 120 bp, Artificial Sequence
  ENSG00000279159_112 (sequence is synthesized)
aagactgagaacttctcactggattggtggcatgaaggtcactggtcattttaacaagagcagctttgttaagcagtggggtgaatgcctgattgaagtgggtttaagagagagtggaaa

SEQ ID NO: 840803 - DNA, 120 bp, Artificial Sequence
  ENSG00000279159_113 (sequence is synthesized)
gagaaatttgagatagcaagggtagaaaacttgaggagctctgctgtaaaggggaacaagagcaataggatgatagctagaggtaaatgcaggaccaagaatgggttttaaaaagatgag

SEQ ID NO: 840804 - DNA, 120 bp, Artificial Sequence
  ENSG00000279159_114 (sequence is synthesized)
agacactacacatttttaagctgaaacccatgctctggtagagagggaaacgcactgatgcagaaggcagagaagagaaatgctggagccagccagtgcagcagatgagaggagatgaga

SEQ ID NO: 840805 - DNA, 120 bp, Artificial Sequence
  ENSG00000279159_115 (sequence is synthesized)
gctggtatacaaatggacagaggggctgaaagagggcagggatagtgtaccctccatcaaaggagagggtgcagagtctgagacagtcatgggggtctggtagacagactggagggagta

SEQ ID NO: 840806 - DNA, 120 bp, Artificial Sequence
  ENSG00000279159_116 (sequence is synthesized)
tggtccagacattctgattgcttctatttctaactgctatttagggtttctaccatccctttaaaaaaaaactaagtttaaaacaacacaaggacttcatgcaaacctggtatacctgga

SEQ ID NO: 840807 - DNA, 120 bp, Artificial Sequence
  ENSG00000279159_117 (sequence is synthesized)
ttttctctttttgaaaatagcaaaattatttactaaaaaaaaaagcagaaacaggaaaaaaatcacctctattaaattctgaagaggcagcacagtttcatgtgagaactggcccactaa

SEQ ID NO: 840808 - DNA, 120 bp, Artificial Sequence
  ENSG00000279159_118 (sequence is synthesized)
catttgtactgaccctccttcaaattgagaaagtccccaaaatgaagaaacttacaaggaatgcttcattgaactcaaaagagcaaggaaattgcctctgaagctgatgaacacagtcaa

SEQ ID NO: 840809 - DNA, 120 bp, Artificial Sequence
  ENSG00000279159_119 (sequence is synthesized)
gccactgcagaaacactgggcaacgttcattcagatcatccgagttctccccatgaccacaccggtcagcaaatttatggccaaaatccagccactccatttccacgaggacctggaaac

SEQ ID NO: 840810 - DNA, 120 bp, Artificial Sequence
  ENSG00000279159_120 (sequence is synthesized)
cctgcagggaagcatccaggagagaccatttgtgctagactatccagactgtgacagtcctaagcctggtgtcacagaaagcaatcccctctaacagcctcccagaaagcccacccggcc

SEQ ID NO: 840811 - DNA, 120 bp, Artificial Sequence
  ENSG00000279159_121 (sequence is synthesized)
ttgccctttggtggaaggctctatccctgatgaggcacacacttagggaaatttcccaattccctgaactccattccatgatcactaaaatggtactgactgcgtttatctaagcctttc

SEQ ID NO: 840812 - DNA, 120 bp, Artificial Sequence
  ENSG00000279159_122 (sequence is synthesized)
ttgaatgtgtatttttagcctcttgtgttcactatataaaaaccacacttttcccctaaatttctcttaacatttctgcctctggtgttacaaagtcaagtctgtaaaatccttctatac

SEQ ID NO: 840813 - DNA, 120 bp, Artificial Sequence
  ENSG00000279159_123 (sequence is synthesized)
cccaagtttaattaatacttgcatatattttagggtactttatgatttttctttcatctttaacccaacagatggttatttcaggtagagctgcttctccacagaacactctggtaatat

SEQ ID NO: 840814 - DNA, 120 bp, Artificial Sequence
  ENSG00000279159_124 (sequence is synthesized)
ctagcatgccaagatccttttacagactccttattttcctgaggtagctaaaaacttttacaagtagatagactgtaaaggaaaatatgtctatattctcaataccttgttacccataat

SEQ ID NO: 840815 - DNA, 120 bp, Artificial Sequence
  ENSG00000279159_125 (sequence is synthesized)
ctgccccattttaagaggtgcaagaactgtgggaggaaccaccacaatttagctcatggcataaaggaacaatgaccaaaacagaaatttcactttctttaaccgaatcaccactcccaa

SEQ ID NO: 840816 - DNA, 120 bp, Artificial Sequence
  ENSG00000279159_126 (sequence is synthesized)
aactggtatcactcctgagacgtttccctggctcatcctgaagtaccaacccctcccatttggatgggctcacctctatggttcggtaataagggtccagcaagagcttagccaatgcca

SEQ ID NO: 840817 - DNA, 120 bp, Artificial Sequence
  ENSG00000279159_127 (sequence is synthesized)
caatctggggggtgcggtcccagccatctgagcagtgtactagcaccggccgctgatcctgatccacagcatgcactaccagaagcgctgatttcagaagcacagacaagtgatggagcc

SEQ ID NO: 840818 - DNA, 120 bp, Artificial Sequence
  ENSG00000279159_128 (sequence is synthesized)
attttgtgctttcaagagctgatagccaactataaaaacaggagaggattagaaaatgctgatttttttatgatttactgcatcatgctcaatgattgtcaaatgaaaaagcaatttcca

SEQ ID NO: 840819 - DNA, 120 bp, Artificial Sequence
  ENSG00000279159_129 (sequence is synthesized)
aagatttctctctccaaatataacactgccaaaacaaaaaaatctgtgtgtttataaagcatgtctcaggatgaggcccaagccctactatacaatagagaagagccttagaaatagggg

SEQ ID NO: 840820 - DNA, 120 bp, Artificial Sequence
  ENSG00000279159_130 (sequence is synthesized)
ctacaattaatagcacaccttttgttccaaaatctgtatggatgattccccgggcaaaatatttgacatttttcagtccatggtataaggaaagtggctctttctggaatcttctcctga

SEQ ID NO: 840821 - DNA, 120 bp, Artificial Sequence
  ENSG00000279159_131 (sequence is synthesized)
atcttctcctgaataaaaaatgtagccacttctgagatgtaaaacagaagatatttatatttaatgatcagcaactacgcccaacaagttctcaaaaaaaaaagaaaagaaaagaaaaga

SEQ ID NO: 840822 - DNA, 120 bp, Artificial Sequence
  ENSG00000279159_132 (sequence is synthesized)
tacaaatatatctatgagacataagctggatgccatatacaagaatggtacacacaaccctgcctatgacccagactgtaacacttaccactgtttaattctttaatgtttactgactaa

SEQ ID NO: 840823 - DNA, 120 bp, Artificial Sequence
  ENSG00000279159_133 (sequence is synthesized)
aacaagatgagcccaatctgataatttatactgatacaaattagtataccaatggccacacagtattgctgggctcaacacagactggattcagcagcgatctaggaagaaccttttttt

SEQ ID NO: 840824 - DNA, 120 bp, Artificial Sequence
  ENSG00000279159_134 (sequence is synthesized)
gagctgagatcaggccaccgcactccagcatggatgagagagagagactccatctcactttcggagtatcagatagcagtagctgccccttgggagtaatcacaagctaatcacacttgc

SEQ ID NO: 840825 - DNA, 120 bp, Artificial Sequence
  ENSG00000279159_135 (sequence is synthesized)
tttttaaactctgttgcattttgtttcttgtgctttccctcacccctcccaatccctaaaaaggagttgatttttcccaaatgtgatcagatttgtagttaagatcacaagtcaagtctt

SEQ ID NO: 840826 - DNA, 120 bp, Artificial Sequence
  ENSG00000279159_136 (sequence is synthesized)
tcaaacactgagtcagaggaagaaataaacatttctgtcaggggactgtgggaaggctgtaaaggcctactaaaccctgtggaataagtatgaaattttggcatagtctaaggaggtggg

SEQ ID NO: 840827 - DNA, 120 bp, Artificial Sequence
  ENSG00000279159_137 (sequence is synthesized)
ggtctttccaggcaaagagacaacagaatgcagtgcataagtactggttgtatatggatttgtttggactaccaaccagactgtgactcctcagagggctaacactatgtctcagtcata

SEQ ID NO: 840828 - DNA, 120 bp, Artificial Sequence
  ENSG00000279159_138 (sequence is synthesized)
actgtacccccagcacagtgcctagcatacagtagggagtcccactgtttaatgaattgtaagtctgttatgggtaaaaatccaatcgtaagactttctatctcctagcaggtacctgag

SEQ ID NO: 840829 - DNA, 120 bp, Artificial Sequence
  ENSG00000279159_139 (sequence is synthesized)
aaacattttttcctgatggatcaattgtttatttcattcctcacatattcttgaaaggaactaaaagataaggcttaggagaacaaatactaaattatctcctagcacctgaagaaatgg

SEQ ID NO: 840830 - DNA, 120 bp, Artificial Sequence
  ENSG00000279159_140 (sequence is synthesized)
taaacaagagaaccggtgtgaggttcttttgaacctaactaaactattatttaataccagttggtgttgtctgtgactaatgaagctgtactccaaaacctgccagccaaggaggggctg

SEQ ID NO: 840831 - DNA, 120 bp, Artificial Sequence
  ENSG00000279159_141 (sequence is synthesized)
ctgagagactccccattcccttgtcctgttctcaacctgcactagaagcctaccattcccctatcctccacagccccaaacacaggccgggggcctaattacagctgcccatcactgcta

SEQ ID NO: 840832 - DNA, 120 bp, Artificial Sequence
  ENSG00000279159_142 (sequence is synthesized)
cagctgctttttacccatgagggagacttcagtgcagcattatgatttgctgccaaatacataaaagcattacctttaataaaatccccaagacatttatgtggaccaggtgagggctaa

SEQ ID NO: 840833 - DNA, 120 bp, Artificial Sequence
  ENSG00000279159_143 (sequence is synthesized)
ttctatcttttttgactctgatagctctttaagaattttaatatatggagggtattagatcatgtagtgttgattacatgtctttcattttatagacaggaaaactgagatctacagtag

SEQ ID NO: 840834 - DNA, 120 bp, Artificial Sequence
  ENSG00000279159_144 (sequence is synthesized)
ttaaaccccttggccaaggttacacagttcgcggccgatctcctgggtccttagtaaggctccttctacataccaccctagggaagaaagcgctgctagctgggacctggaactgtgtag

SEQ ID NO: 840835 - DNA, 120 bp, Artificial Sequence
  ENSG00000279159_145 (sequence is synthesized)
caaatgcaaatggctaatccccaaaggaggcagcaagctcaattctccggtcaggctttccccaaaggcactgcttcatcctcttggctgatgacaactacggtgaatttaatcatttgc

SEQ ID NO: 840836 - DNA, 120 bp, Artificial Sequence
  ENSG00000279159_146 (sequence is synthesized)
tactggcagtcaatataagtggtttaggcagcatctgatttaataaatcaaataaagaacgcagtaaaacttgatgtgatcatcagatctactgaataggacccagagaaacaactatgg

SEQ ID NO: 840837 - DNA, 120 bp, Artificial Sequence
  ENSG00000279159_147 (sequence is synthesized)
gctccagcacaaataccagaaaaaagaaaattctgtcttctctggcacctatctctggcttcctgaaatagtaaaacaggatttttaaatacttatctgtccatatttgttttacagagc

SEQ ID NO: 840838 - DNA, 120 bp, Artificial Sequence
  ENSG00000279159_148 (sequence is synthesized)
attcttcctaatttatcttgtattcaatcagtacccttggagggggtattagttcaccttcctcactgcaaatgccagccattcatatttaataagcaataagaatcaggataatatgct

SEQ ID NO: 840839 - DNA, 120 bp, Artificial Sequence
  ENSG00000279159_149 (sequence is synthesized)
tagtaaatgagaacagtttagaaattgaaagcagatgtaaaaggaactgacttaatggcaagtttaaaccctttagaacatgatgaataaattctgacttttcatgataaaacatcccag

SEQ ID NO: 840840 - DNA, 120 bp, Artificial Sequence
  ENSG00000279159_150 (sequence is synthesized)
ttcaaaacaggttatgtatcactatgggacatcagaaactgaagaattaaatttctttgggctaaaaatgacgtggaagggaaaggtcccaggacaaacagtaaggtaatgcttctgttt

SEQ ID NO: 840841 - DNA, 120 bp, Artificial Sequence
  ENSG00000279159_151 (sequence is synthesized)
tgatgctgagatttcttctgtgctgcagattttaaaacctttcaaatggctgtattttctcccaactcttcctctgtgctgccacatttcagacccagcaaggagatacttgcagagact

SEQ ID NO: 840842 - DNA, 120 bp, Artificial Sequence
  ENSG00000279159_152 (sequence is synthesized)
ggtctggtaactgaagattaccaagaaacagaaggaaagactgctccaaattaatttttttttctttttttcccccttagttcaaggaaagaagcaaacttattatttaagagcaatgca

SEQ ID NO: 840843 - DNA, 120 bp, Artificial Sequence
  ENSG00000279159_153 (sequence is synthesized)
aaatgaaagccaaggccaaggacttactttcccggatctggcatctgagtgcacagcaaccgcagagactgaaaactcctccgaatagaatgaatgtttgccatccccataaacacaact

SEQ ID NO: 840844 - DNA, 120 bp, Artificial Sequence
  ENSG00000279159_154 (sequence is synthesized)
tcacagtttgggtaatactctggagagagtaacaataaagagaacacaaatacgttgaacttaaagcccacatggccaaatttaaaagcaaactggctataaaacaaacccactgcagct

SEQ ID NO: 840845 - DNA, 120 bp, Artificial Sequence
  ENSG00000279159_155 (sequence is synthesized)
tctgattaacgaaactgaaatgttttgaaatgcttaactattagcccaatcctttataataagaggaacacactgaattttagctatcttttcaaaaagcgtgaaaagggaaggttagat

SEQ ID NO: 840846 - DNA, 120 bp, Artificial Sequence
  ENSG00000279159_156 (sequence is synthesized)
ttgtaaagaagatactgacataaaataaaagctattattttttaaaagaaaggcctacttcgatctcactctggctttacttcttgggccttatctaacttgtggctttgaaatctcttt

SEQ ID NO: 840847 - DNA, 120 bp, Artificial Sequence
  ENSG00000279159_157 (sequence is synthesized)
gaaaagaactccacagaacaatgcgttcacacattcaaatttcaccttggtacagctgctttcaatttccagcttagaccacatctgaacaaagagcctggtgcctctgcctgtgccata

SEQ ID NO: 840848 - DNA, 120 bp, Artificial Sequence
  ENSG00000279159_158 (sequence is synthesized)
ggcactgaggggggtccctccttggggaaagctagcattccaacagtaatggtgttacagctcaggacagagataccttactagggttctgtatttactgcttcaattttcaccccaggt

SEQ ID NO: 840849 - DNA, 120 bp, Artificial Sequence
  ENSG00000279159_159 (sequence is synthesized)
tttctaaggagaggcccttgaggagtttgctacaaggccagtggtgagcataccctctgtcaaaggcaacaaaaagcttttagacggctgagaaattgagcccactaaagcagcagcttc

SEQ ID NO: 840850 - DNA, 120 bp, Artificial Sequence
  ENSG00000279159_160 (sequence is synthesized)
caaacatgaacaggtcttattatggggaagatctgctttccttatcacctacaagttggcacaaggaaggaagattatgtgacttcactgcacctcctcctccatttctcctcagaaaag

SEQ ID NO: 840851 - DNA, 120 bp, Artificial Sequence
  ENSG00000279159_161 (sequence is synthesized)
aacatacagtgttaagaatccaaagagaagctctggcactctcacgacaggatggatgaggaatatggcttgccacttatttcaaattgggaactaagtctcagttgggcaagggctaca

SEQ ID NO: 840852 - DNA, 120 bp, Artificial Sequence
  ENSG00000279159_162 (sequence is synthesized)
ctcacaaggagaaagtatggggaacaaagcaccatacacctcacctgggcattcgcagcctcctcctttggctcggtttgccacagcagctgcataggagcgtgcatccaagatcaaaag

SEQ ID NO: 840853 - DNA, 120 bp, Artificial Sequence
  ENSG00000279159_163 (sequence is synthesized)
cttctgcggttggatggctaaactctctgctcctgaagcatttgacagagaagaatctagggacacagagggagagggcatactaaatgagcctgtctctcccagaactgtgcagaatta

SEQ ID NO: 840854 - DNA, 120 bp, Artificial Sequence
  ENSG00000279159_164 (sequence is synthesized)
gacccacaagcacatcttatggcacaaaaaaggctcaataaaatgaaatcccctaaccaaaacccttgatacataggatttttctctttttttctatgtggccttcttatgaaagatgag

SEQ ID NO: 840855 - DNA, 120 bp, Artificial Sequence
  ENSG00000279159_165 (sequence is synthesized)
aaggatttattctccaaaactgactcccagagtacacatggggttcacacagcccagtctcttatacttcatttctgtatctgttgtcctttcatgaagcctggcatttcctgccatggt

SEQ ID NO: 840856 - DNA, 120 bp, Artificial Sequence
  ENSG00000279159_166 (sequence is synthesized)
ctgcagatactgcaagtcctctattacataaacactccatttttgtcacaatggcaagaaagacaacaaacacactaatatcttgattcaggtttgaaacaaagggtcttctgattctct

SEQ ID NO: 840857 - DNA, 120 bp, Artificial Sequence
  ENSG00000279159_167 (sequence is synthesized)
gccaagacccatgactcctcaatcaatcccatcaagtgaagctctgcacattcacttctataaaagtaaatctatgtcttgtaaggaagaggccatttcaagaaaaggttcttagatgct

SEQ ID NO: 840858 - DNA, 120 bp, Artificial Sequence
  ENSG00000279159_168 (sequence is synthesized)
ataaaaatcattgccatgggtccagggagcaccttaccgaactccacgtcagaaaggtctcccccattgggaaagtctcgagaagtgttcctagttgacagcttgctgccactcgatcgg

SEQ ID NO: 840859 - DNA, 120 bp, Artificial Sequence
  ENSG00000279159_169 (sequence is synthesized)
gagtcagaggcacaagctttggctactgactgtaccagatgctcatcatctgcatttcgccagccccaccagctaacctctggctgtccacagcgggcaatgacagctccattgctctgg

SEQ ID NO: 840860 - DNA, 120 bp, Artificial Sequence
  ENSG00000279159_170 (sequence is synthesized)
tgcctgtgtgaggaacaagagacaacaactgtacccattcagatgctctctgtactcacacaaaatagattttaagtgccttaatgaacagtctaattctaggtaagtgttgggtcagct

SEQ ID NO: 840861 - DNA, 120 bp, Artificial Sequence
  ENSG00000279159_171 (sequence is synthesized)
tcaagtcctctcagtattaaagagggtagaaatcttacacaaccaacaagaacaaacaacaaaacctgtgtgtctttctcaattaccataacatcacggagatccctgtaaagttaccca

SEQ ID NO: 840862 - DNA, 81 bp, Artificial Sequence
  ENSG00000279159_172 (sequence is synthesized)
aattaccataacatcacggagatccctgtaaagttacccaaaaaaatgactaacaggggtcaggcatggaggctcactctg

SEQ ID NO: 840863 - DNA, 77 bp, Artificial Sequence
  ENSG00000279159_173 (sequence is synthesized)
cctgagcaacatagcaagaccccatctttacaaaaaagtttttacaaattagccaggcatggtagcacaccttgaac

SEQ ID NO: 840864 - DNA, 120 bp, Artificial Sequence
  ENSG00000279159_174 (sequence is synthesized)
tccagcttgggtgacagagcaagaccccatttccaaaaaacaaaaaagaattaatgtgtactcttagtgaaaataaatcaatattcgtaacttaaatctataggtactacactaattctg

SEQ ID NO: 840865 - DNA, 120 bp, Artificial Sequence
  ENSG00000279159_175 (sequence is synthesized)
tcgtaacttaaatctataggtactacactaattctgctacccaatagtgaaatctgctaccttcttaatgctgaaccaagagcccgcctctgggaataaaacatttacctggcccacagt

SEQ ID NO: 840866 - DNA, 120 bp, Artificial Sequence
  ENSG00000279159_176 (sequence is synthesized)
gaactgctttacaaaatctcctgagatttcatgagtcacagactgctcttataataggcagatagctcaatgagccagctacccttcctagggctcttaagaaagagaagaagagcatca

SEQ ID NO: 840867 - DNA, 120 bp, Artificial Sequence
  ENSG00000279159_177 (sequence is synthesized)
acctcagaaaaccatactctgacatatccttttccaataagacagaccagaaatcacagtctactttaaggtgctattaaaacccagacttttcctagttaggcaattttaactgataaa

SEQ ID NO: 840868 - DNA, 120 bp, Artificial Sequence
  ENSG00000279159_178 (sequence is synthesized)
aagttagaaaaattctattacttggcagtaaagaggaataaagttctgatacaggctaggacactgatgaacctcaaatatgttatgacaagtgaaagaagtcagtcacaaaaggcaact

SEQ ID NO: 840869 - DNA, 120 bp, Artificial Sequence
  ENSG00000279159_179 (sequence is synthesized)
tattgtacgacaattaacatgaagtatccagaataggcgaatctataaagatggaagtagatttctgcatgtagtgactattataaactcgtagttacttaagggagcttgcctaattct

SEQ ID NO: 840870 - DNA, 120 bp, Artificial Sequence
  ENSG00000279159_180 (sequence is synthesized)
aagttggggttacttaaaacgagtatgtttctatataaaactgaagcactctatgttttactagcaggggcttcatccattggacatcttaattattcagggctagggtggctgggtgcc

SEQ ID NO: 840871 - DNA, 120 bp, Artificial Sequence
  ENSG00000279159_181 (sequence is synthesized)
ctgtgaatgggttttttgggacgatgaaaatgtactgtaatttgtttttactcctaaaactcacaaataagttaaatttggcactaatcaaattccactgaaatcaccagtttgcttgta

SEQ ID NO: 840872 - DNA, 120 bp, Artificial Sequence
  ENSG00000279159_182 (sequence is synthesized)
gtttttaaagcctccctccctgggagacaagtagctgtaagtacttgtgtattgccaacatgctcaactggctcacgtgctgaatggggccaaaatagaaataaaacctcaatgattctt

SEQ ID NO: 840873 - DNA, 120 bp, Artificial Sequence
  ENSG00000279159_183 (sequence is synthesized)
tataaaatgtctcctagcaaataacaggcaaccactgagctgaatgactccaaaccctgcacaagaggctggttgggcctttcctgaacatcctcctcttcttcaatgcttcccagcagt

SEQ ID NO: 840874 - DNA, 120 bp, Artificial Sequence
  ENSG00000279159_184 (sequence is synthesized)
gcccaagaggagcagtagatggcgctcttcagcctggatcttgggttttaggggacactgcattatagtagctattagatttcaactggactattgcaataaacaattatgttttctgca

SEQ ID NO: 840875 - DNA, 120 bp, Artificial Sequence
  ENSG00000279159_185 (sequence is synthesized)
gtcttctaaaatgcttcagactacatgaaagataattcaaacactacagttaaaaatcactaaaggaatgcatttctatcactaacagaaccaggcaaagtataaaaattatgatgtcca

SEQ ID NO: 840876 - DNA, 120 bp, Artificial Sequence
  ENSG00000279159_186 (sequence is synthesized)
acagataaagccctccctactaaaacacagaatgcttcaattttatataggaacagaattgtcttaagtaacctcaacttagatttaggcaagctcccttaagtaactaggagtttagaa

SEQ ID NO: 840877 - DNA, 120 bp, Artificial Sequence
  ENSG00000279159_187 (sequence is synthesized)
taatcaccacatgcacaaaggaaaaagctgtgaactgcactacagatgggtgccctttacatcatcttgctatgttagagcaatctctaccttcagttataaatccaattaagtgctctc

SEQ ID NO: 840878 - DNA, 120 bp, Artificial Sequence
  ENSG00000279159_188 (sequence is synthesized)
tcatcacagtaggacaaagccctaatcaagcgctggttcagcatggtgctgtcaagtaactgctgctggcaacctcaggaatcatgacccaatctacagacaactaaattcaggaaatgg

SEQ ID NO: 840879 - DNA, 120 bp, Artificial Sequence
  ENSG00000279159_189 (sequence is synthesized)
atgtcaagagttccaggcatcctgccacctaggctggcaaagcagagcatggtggaggatccgattcttccacacgccccttacaaagctcccaaatactacagcaacccagtctgcatc

SEQ ID NO: 840880 - DNA, 120 bp, Artificial Sequence
  ENSG00000279159_190 (sequence is synthesized)
tcagcgatacaagacacatgttctgagacagagcccagttccaggaaacctgcctgattttgcatggatgactacaccaagaactttgtgatcttttgaaagactttctctgaaaaactg

SEQ ID NO: 840881 - DNA, 120 bp, Artificial Sequence
  ENSG00000279159_191 (sequence is synthesized)
caaataaaatttttcatttatatatcctcttgtatctctagaaaaagggggggaaaacctagggtgcatgccctctagaattaattttagaaggtgcatgccctctagaataaaatttag

SEQ ID NO: 840882 - DNA, 120 bp, Artificial Sequence
  ENSG00000279159_192 (sequence is synthesized)
aaaaaaaggaagtttttcttcaaccagccctcttaagcttctcttcccaaagggagaattcacctaaagcctcttattttgcaaataagagtaccttcccccttttggtcaaagtcagca

SEQ ID NO: 840883 - DNA, 120 bp, Artificial Sequence
  ENSG00000279159_193 (sequence is synthesized)
agccccacagatgccagggctgctgacctaacacagttgttggccagagcagcaactggctgctttccccattccagctgagctgatcattgataagactcataaatcccttcagctttc

SEQ ID NO: 840884 - DNA, 120 bp, Artificial Sequence
  ENSG00000279159_194 (sequence is synthesized)
actactctctagttcctgtagcatccttaccacttgaatgacaggtaaatttggtgactgacttttctaggggtgtctgaaaacaacagtgatgagaattgagattaaaaacgtaatgag

SEQ ID NO: 840885 - DNA, 120 bp, Artificial Sequence
  ENSG00000279159_195 (sequence is synthesized)
ttccactgggccagagcaaatacttttccatctctctccattcagagtgggcatcagagtttgcctttagtagactaaatgaacaagctggttacctctgtaggaattccacaaggagac

SEQ ID NO: 840886 - DNA, 120 bp, Artificial Sequence
  ENSG00000279159_196 (sequence is synthesized)
aaatcccttcctacaatctcaatatttcagtggaatgaagtttctaactgtaagccactggattggcccaactcagggagagtccaaaaagccggcaaactgggaaaatgaaatggagaa

SEQ ID NO: 840887 - DNA, 120 bp, Artificial Sequence
  ENSG00000279159_197 (sequence is synthesized)
tgtaaacattacaaagagatgacatccaaaacatttccagaataagaaggaaggacttctttaaaatttaataggattctgtgagaactaagatattcaatgaattacaaaagcagcact

SEQ ID NO: 840888 - DNA, 120 bp, Artificial Sequence
  ENSG00000279159_198 (sequence is synthesized)
caagagatttaacctattccaaatgctggtacagaagctcagtgtttatagcccctcatttagaatcagaacatatctacaaaataagaactaccattcccattgtattcattaggaaca

SEQ ID NO: 840889 - DNA, 120 bp, Artificial Sequence
  ENSG00000279159_199 (sequence is synthesized)
tgtgctccatcaccatgccaccatccccatctagaacttgcatcccatggctctcatgcctctgatcactgaaatcttctatctagtcatgcctcagtcttcttctctaaatgcttcctc

SEQ ID NO: 840890 - DNA, 120 bp, Artificial Sequence
  ENSG00000279159_200 (sequence is synthesized)
tcgaaacagagttcttccacatgtcaaagtttcaaccacaaagacaatcagagccaactcgaccctatattcccaaagatcactttctaagactcatctctcaatccaaaagccctgcta

SEQ ID NO: 840891 - DNA, 120 bp, Artificial Sequence
  ENSG00000279159_201 (sequence is synthesized)
acagctgaagctaaatgcttagtaagcacattatcttctcacagaatgtaagaaggatattgaaatagcaagtccagccactttacaactaaaactttcttatctgtttcaaatgaacaa

SEQ ID NO: 840892 - DNA, 120 bp, Artificial Sequence
  ENSG00000279159_202 (sequence is synthesized)
ccagctagtgttctgaatgcagtcagtactgatgtgttactggaggagaagctttaacaataaggaagtacagccttgcctagaaagttctctgaactctccccacccttcccaggttag

SEQ ID NO: 840893 - DNA, 120 bp, Artificial Sequence
  ENSG00000279159_203 (sequence is synthesized)
cagcagcagaggcagcagaccatatgcagcaggcagcagcaccagcccaagctgggactggtccagtttaacttacctgtagatgacggcagggatgcgcttccaggacctgaaacttga

SEQ ID NO: 840894 - DNA, 120 bp, Artificial Sequence
  ENSG00000279159_204 (sequence is synthesized)
tacactttccagttctttgtcagtgatccaggcaggcactatgagctcttgaggatagctaccacataatctaaagagaagatgagaagtggggagagtcaaggggataagagagggaga

SEQ ID NO: 840895 - DNA, 120 bp, Artificial Sequence
  ENSG00000279159_205 (sequence is synthesized)
gagaaaacgggagagagagagagacactaggtgagccagcataaggatgatgatctcactgccacagaaccagttaaaggcaatgaggcgctttattcgagttttggactcctcaacaga

SEQ ID NO: 840896 - DNA, 120 bp, Artificial Sequence
  ENSG00000279159_206 (sequence is synthesized)
atgggttaccataagtgtgttttgttttgttttgttgccttaaatgtttacttatgtgtatacaacaaatgatactatcttgaattgttccacttgatgctaccttttgggaatctggca

SEQ ID NO: 840897 - DNA, 120 bp, Artificial Sequence
  ENSG00000279159_207 (sequence is synthesized)
atcttaactatcaatgaaaaaaaggggagtcgagggtcagctctttatactccattacaactcttctgctgtaacaagtacataggttatttctaactacatgagcgcccagtccaatta

SEQ ID NO: 840898 - DNA, 120 bp, Artificial Sequence
  ENSG00000279159_208 (sequence is synthesized)
cagaactgagagtccgtgtcagttctaccagaccctcagggaaggaaaaaagcccacaattgcaagtttccagagacttcacaggattaactcattctttgatttgaaccaaacagggtg

SEQ ID NO: 840899 - DNA, 120 bp, Artificial Sequence
  ENSG00000279159_209 (sequence is synthesized)
tcatccttataggtaacaggtgcagccatgggtatgcaaaaccaacacaagccagtctatctgcatacacagcctcagtcccattgaaccaggttagtaatgtgactaagctattaacca

SEQ ID NO: 840900 - DNA, 120 bp, Artificial Sequence
  ENSG00000279159_210 (sequence is synthesized)
taatttccataaaacatacttcagaacaaattatactgggggcggggggataagctttcttttaattagggaagatcccagctacagtcaagccggtatcctaggaagcaatacttccga

SEQ ID NO: 840901 - DNA, 120 bp, Artificial Sequence
  ENSG00000279159_211 (sequence is synthesized)
tagatttttacttacaggacaatgtctctctctggataatccaatcttcttttttcaatagtgaaggcaataaggcctttaatccaaatcctaaaacacacaaactccaccaacaccacc

SEQ ID NO: 840902 - DNA, 120 bp, Artificial Sequence
  ENSG00000279159_212 (sequence is synthesized)
aaccccctgccctagcctatcctatacatagcagaaagcgcagaaaaacacaaaatggcttaggatttgggggttttgatcattttgcactaaatctctcctcaatttccagaagaggag

SEQ ID NO: 840903 - DNA, 120 bp, Artificial Sequence
  ENSG00000279159_213 (sequence is synthesized)
acttctggaattttcaggaatttaaaagccactgaacaaaagagaatggctatgactaagagtagctatacaaacttcctaacacctattcacaaactcctaaaaataagctgggagcca

SEQ ID NO: 840904 - DNA, 120 bp, Artificial Sequence
  ENSG00000279159_214 (sequence is synthesized)
gtaatgatggttaatatctaaccatgaatctcattccctttattatgtattaaactcaagagtaaacttggctctcactcttctacctttgtagtaggaagaactttcaacatcctgttg

SEQ ID NO: 840905 - DNA, 120 bp, Artificial Sequence
  ENSG00000279159_215 (sequence is synthesized)
tttcccaccaccccccattttgttttatggtggtgataacatcctaaagactggttctgaggtataactggtaaactccttgagacagttgttctgttacccgggctagagagcagtgga

SEQ ID NO: 840906 - DNA, 120 bp, Artificial Sequence
  ENSG00000279159_216 (sequence is synthesized)
tgagacagttgttctgttacccgggctagagagcagtggagcggtcatggctcacagcagcctcgacctcctgggctcaaacaactcttctacttcagcctccccagtagctgggactac

SEQ ID NO: 840907 - DNA, 89 bp, Artificial Sequence
  ENSG00000279159_217 (sequence is synthesized)
aaatttttaagaaattttccctagtctcaaactcctgggcttaatcaatcctctatcttggcctctcaagaagttaatttttaaaagcc

SEQ ID NO: 840908 - DNA, 120 bp, Artificial Sequence
  ENSG00000279159_218 (sequence is synthesized)
cctctatcttggcctctcaagaagttaatttttaaaagccgaattggggattattttccaacaagtctgtcttaattcacagtttttttttacttgatctaattttctaaacattctgtt

SEQ ID NO: 840909 - DNA, 120 bp, Artificial Sequence
  ENSG00000279159_219 (sequence is synthesized)
cattgtcctataggtactacactcccagtagtcagctcttcagtatgcactacctactcacttgtggataaacaatttccagtataggttacactcaggaaagcctaatgcagccacagg

SEQ ID NO: 840910 - DNA, 120 bp, Artificial Sequence
  ENSG00000279159_220 (sequence is synthesized)
ctctctgaggccgccccctcatccagcattcaccctccttctttgctttgactcatcactgagaacaggcaaaagtataaaaagtctgcagctccaactcttcaaaacaccctgggttct

SEQ ID NO: 840911 - DNA, 120 bp, Artificial Sequence
  ENSG00000279159_221 (sequence is synthesized)
caactccctggagaaggtccacattaagaactgtgtatagcaattagctatagcttttccagtgaaaactctgacggctagccacaaacagaccaggaaaatgcccgtcataatttgaga

SEQ ID NO: 840912 - DNA, 120 bp, Artificial Sequence
  ENSG00000279159_222 (sequence is synthesized)
caaacagaccaggaaaatgcccgtcataatttgagacagctaagaggaccgcagaatgattaatgatgcagggaaacgtaggagaaggatatatatattttttttttttattttttttat

SEQ ID NO: 840913 - DNA, 120 bp, Artificial Sequence
  ENSG00000279159_223 (sequence is synthesized)
gcgcctggccaagaaggatatagttaaagatttaagatatttaactatcatggacaattttgttttatagaaatttggatcaccaaaatcatagtagttaactgtcctcccccaccaacg

SEQ ID NO: 840914 - DNA, 120 bp, Artificial Sequence
  ENSG00000279159_224 (sequence is synthesized)
cacttacacattttaaggaactgggtaatggctaaatggttacattaattttttttttgcgacagagtctcactctatcacccaggttggaatatagtggtgcaatctcagctcactaca

SEQ ID NO: 840915 - DNA, 71 bp, Artificial Sequence
  ENSG00000279159_225 (sequence is synthesized)
tccagccaaataaaggttacattaatatttaatggttaaatgatcatagcagtgaagttggttttagatca

SEQ ID NO: 840916 - DNA, 120 bp, Artificial Sequence
  ENSG00000279159_226 (sequence is synthesized)
atggttaaatgatcatagcagtgaagttggttttagatcaatatattaaaggacagaataatacagactgagcatctttaatccaaaaatctgaaatgctccaaaatccaaaactttgag

SEQ ID NO: 840917 - DNA, 120 bp, Artificial Sequence
  ENSG00000279159_227 (sequence is synthesized)
tgctgacataatgccacaagtggaaaattctacacttgacctcatgtgatgggtcacagtcaagtcacagtcaaaacttttcgtaaaaaacatcatgcatgaaattatttaaaatattgt

SEQ ID NO: 840918 - DNA, 120 bp, Artificial Sequence
  ENSG00000279159_228 (sequence is synthesized)
acaaaattaccttccagctgtataatgtgtatatgagacaaataattttgtgtttagacttgggtcccaggcccaagataatctcattatgttcatgcaaatattccaaaacctgaaaaa

SEQ ID NO: 840919 - DNA, 120 bp, Artificial Sequence
  ENSG00000279159_229 (sequence is synthesized)
aatccaaaatctgaaatatttacagtcccaagaatttcagataagggatactcaactgtacttatgtctatttcacaccacctggagtaaaattacagtcataaaaactagttcataaat

SEQ ID NO: 840920 - DNA, 120 bp, Artificial Sequence
  ENSG00000279159_230 (sequence is synthesized)
gttctgtcactgcttatgagaccactgatcctctctctaatgtgatgccaagtggtgatgagaaaaatggtaactgcctgcctacaggcaaatacaatattatttagacatgcatgtacc

SEQ ID NO: 840921 - DNA, 120 bp, Artificial Sequence
  ENSG00000279159_231 (sequence is synthesized)
agaaaaaacagaggcctagagggggtaaaagggaaggttctaggatcctgttaagtaaggatcactttccactccaatgatagcaacgggaacagaagattcaataaatactctgaagat

SEQ ID NO: 840922 - DNA, 120 bp, Artificial Sequence
  ENSG00000279159_232 (sequence is synthesized)
catgcctttagatttaataaataaaaccatttcaaataaaaagtctaagttcaaatgttctgccacatgagaattgcggtttctgcaaaggcactggctgtgaaacagtccacagggacc

SEQ ID NO: 840923 - DNA, 120 bp, Artificial Sequence
  ENSG00000279159_233 (sequence is synthesized)
catataactcacttgtacttctcattgatgttggaaatcctccaggcgttgttcatatcaaaacccatcctctccacctcgtttttaaaccttgaagttacatgctcccctagaggccaa

SEQ ID NO: 840924 - DNA, 120 bp, Artificial Sequence
  ENSG00000279159_234 (sequence is synthesized)
agataaacagcagaaaggaagaaatgaataccattttgcaaaacaggtggaataaaaacaaagaaatatacatatgttacatatatgtaaatatatatatattttttgagacaggattcc

SEQ ID NO: 840925 - DNA, 85 bp, Artificial Sequence
  ENSG00000279159_235 (sequence is synthesized)
atatatgtaaatatatatatattttttgagacaggattccactctgtcacataaacttccgcctcccaggttcaagtgattcttg

SEQ ID NO: 840926 - DNA, 77 bp, Artificial Sequence
  ENSG00000279159_236 (sequence is synthesized)
ctgggattacaggtgcatgccaccatgactggctaatttttgcactttcagtagagatggggttttaccacatgcct

SEQ ID NO: 840927 - DNA, 120 bp, Artificial Sequence
  ENSG00000279159_237 (sequence is synthesized)
caggcgtgagccactgcgcccagcctgtgtatttttaaaggtaagaattgtataaataataaagtaacatatattatatagttttagtttagaaagatccctgtcaggttaagattataa

SEQ ID NO: 840928 - DNA, 120 bp, Artificial Sequence
  ENSG00000279159_238 (sequence is synthesized)
ataaagaggaaagaaattaattctgatcaagagttatgttatctcatctaacccttacaatcatctctgagaacagtatcactgagctcattttacaaaggacaaaattaaaacaggtta

SEQ ID NO: 840929 - DNA, 120 bp, Artificial Sequence
  ENSG00000279159_239 (sequence is synthesized)
ttatggcaggcctgtctggccccagaagccatgctcttgtcctacactggctacttgcctacttccacactcagactgacagtacacttaataagaaataaaatcaataacaagatcacc

SEQ ID NO: 840930 - DNA, 120 bp, Artificial Sequence
  ENSG00000279159_240 (sequence is synthesized)
acgagtagcaatacagaactataattcctcatccaaaaccctttggtccaaattttagaacttgagagttttccaaactttcgttaaggtaagacagcgaatataatattaggctcacat

SEQ ID NO: 840931 - DNA, 120 bp, Artificial Sequence
  ENSG00000279159_241 (sequence is synthesized)
gcttaacaagatctccttaaacaaatattaatatttctttcgtgaaaggtatagatcattcataccaggtgggataaataaagcaacaaatagcctcatgtcagctcagatcaggtccag

SEQ ID NO: 840932 - DNA, 120 bp, Artificial Sequence
  ENSG00000279159_242 (sequence is synthesized)
ccaagacaccaaatagggtatgaaaaacattctggtttccagagccttttagatgatggcaggttaacaggtcatggaatcataactgccagccaggaatctcaggaaacaccatactac

SEQ ID NO: 840933 - DNA, 120 bp, Artificial Sequence
  ENSG00000279159_243 (sequence is synthesized)
taagtgctgattatttgcaagaacagccacccaagctggtataatctggctatatttgccctaatgaatctggctttatcttccttaaaaaagcaaaacagaggtagaaacgaagctaac

SEQ ID NO: 840934 - DNA, 120 bp, Artificial Sequence
  ENSG00000279159_244 (sequence is synthesized)
ataaattcagtaaatctaaaataactttcttccttgaaaacatacacagtcctagggcagcatgttattttaaaaaatattaagcagaacctctaatatatagtggtacaggttgtaaaa

SEQ ID NO: 840935 - DNA, 120 bp, Artificial Sequence
  ENSG00000279159_245 (sequence is synthesized)
taagtgctagcagggctggaagaaaccacaacaacaaaagcacaaaacagatttcactttagtgttcagagtataaagctttgttctccctgggagaggagctacagaataggaaacagc

SEQ ID NO: 840936 - DNA, 120 bp, Artificial Sequence
  ENSG00000279159_246 (sequence is synthesized)
aattacttggatggaagacaattctgttaaactacttcccatttaaactgcttttcttgagctcaagctaggtattatacatttcctgaaggagagctataaaaagatgaggttgagaga

SEQ ID NO: 840937 - DNA, 120 bp, Artificial Sequence
  ENSG00000279159_247 (sequence is synthesized)
atatgaggtgcaagaagaaataaaaactaaatccatcccattttggaaaagttttagaagcaatgtagcaggcttccaaacaggaaaaaactatctgaattggggtgccatctgtctaca

SEQ ID NO: 840938 - DNA, 79 bp, Artificial Sequence
  ENSG00000279159_248 (sequence is synthesized)
caggaaaaaactatctgaattggggtgccatctgtctacaaattgcaaggaatattgaccatcaagaatactaggccag

SEQ ID NO: 840939 - DNA, 120 bp, Artificial Sequence
  ENSG00000279159_249 (sequence is synthesized)
agttcaagaccagcctgggcaacatctggtcaaccccatgggcaaccccatctccacaaaaatgcaaaaattaagttgtggtggtccatgcctatagtcccagctacttgagaggctgag

SEQ ID NO: 840940 - DNA, 63 bp, Artificial Sequence
  ENSG00000279159_250 (sequence is synthesized)
aggctgaggtgggaggatcacctgaacctagggaagttgaggctgcagtgagccatgggaaaa

SEQ ID NO: 840941 - DNA, 120 bp, Artificial Sequence
  ENSG00000279159_251 (sequence is synthesized)
aaaaaacagacaaggagtctttaattcataatcccaatctaaaagctgcaaaactgtggcaaattccaagttcattaagagattttttcccccgactctgggatatagctccaagtcttt

SEQ ID NO: 840942 - DNA, 120 bp, Artificial Sequence
  ENSG00000279159_252 (sequence is synthesized)
gcaaaagctgtaagtatttcattaatgatttattttttttgtgcttttcttgaactgtacattaatgatcttttacattaacacctctatctcaggataaaacacatagatacccttaaa

SEQ ID NO: 840943 - DNA, 120 bp, Artificial Sequence
  ENSG00000279159_253 (sequence is synthesized)
ggatcttgtgatttaaaaataaccactggcaaaataataacagtaacaatcactatcactagcaatttacttcatagaaccatttccccaaagaaggacttagaaccaccatccagagca

SEQ ID NO: 840944 - DNA, 120 bp, Artificial Sequence
  ENSG00000279159_254 (sequence is synthesized)
caacattctgagctatacgcagaaatatatactgactagcaggtatagaaaatctgttatttcgagttctttgggaatgggaatgagttttaattatttttatatcctctaaggcagtga

SEQ ID NO: 840945 - DNA, 120 bp, Artificial Sequence
  ENSG00000279159_255 (sequence is synthesized)
cttcataaactctgaaactgaccatcacaacccacaataagaattatgttttacaacacaatacaacaaacatgttttaatttattcagtttttgagagaccgggttttccctctgttgc

SEQ ID NO: 840946 - DNA, 120 bp, Artificial Sequence
  ENSG00000279159_256 (sequence is synthesized)
ctaagctggatttgaactcctaaactcaaacaatcttcccacctcagcctcttgaatagctaggactataggtagacactgtgcccagctaatacaacatacattatttttttgaaagca

SEQ ID NO: 840947 - DNA, 120 bp, Artificial Sequence
  ENSG00000279159_257 (sequence is synthesized)
tttcacaaaacaatacccactcttaatatgtgtgtgacacaatttgatattttctattccatttctttaaaattagatttcatgacccactactggatcataacctatttgaaaaccaca

SEQ ID NO: 840948 - DNA, 120 bp, Artificial Sequence
  ENSG00000279159_258 (sequence is synthesized)
tcattacatacatcaggaattcaaccagcttttgcaaattgtgtgagatgttcactcacgtttacttagccagaaaaataaacacaaacagatctattgctggattccccttaaaaatct

SEQ ID NO: 840949 - DNA, 120 bp, Artificial Sequence
  ENSG00000279159_259 (sequence is synthesized)
ccatctcagaattctcaggtctcaatcaattcaacattaaatacattgtgatatcccaactttctttaaatactggggctataaggtttttgtttggctttatatttccatttcaaccct

SEQ ID NO: 840950 - DNA, 120 bp, Artificial Sequence
  ENSG00000279159_260 (sequence is synthesized)
tcctatctgcctttgtcccttttcagcatttagtgtttcttataataaaaataatacagtccagcaattttcactttagtggaaatgaaaactttctttttaaaagcaatgaagttccct

SEQ ID NO: 840951 - DNA, 120 bp, Artificial Sequence
  ENSG00000279159_261 (sequence is synthesized)
aactccctctatcacaaacacagtgtcaatcagcaatctaaaaaattttcccccaaaagtctagctccctggctgatcctgagtagtcaagcccacaattacacacagcttaaaaggcct

SEQ ID NO: 840952 - DNA, 120 bp, Artificial Sequence
  ENSG00000279159_262 (sequence is synthesized)
gggacagaagggacaggcctttacctggcaggtgaggaagcagaccaataccagagtcagagaaggtaagaactacctcttagcagattttcaaatacggagaaaggaattatgcttttc

SEQ ID NO: 840953 - DNA, 120 bp, Artificial Sequence
  ENSG00000279159_263 (sequence is synthesized)
tatgtacaaaggtcacagtaaatcctctagatgcaacttcctggactgcattcaaacccggaagacagataaataggcagcttcacagcagtgttaagacccagagtcatatgctagtcg

SEQ ID NO: 840954 - DNA, 120 bp, Artificial Sequence
  ENSG00000279159_264 (sequence is synthesized)
tggataaacaagatgggcttaagggacatttcacatgagagaggttagagaggtaggcctgatgctactaaactggcagctaagctgcccagtcatctgtcaggcctccagattaacact

SEQ ID NO: 840955 - DNA, 120 bp, Artificial Sequence
  ENSG00000279159_265 (sequence is synthesized)
ctagtacagagccatcaccaacaagtcaattgcaatgaggagcaggaagttaaggacatgggagagaagcttttagctttcagtccacttttttagagtttgaggggctaagagaagggt

SEQ ID NO: 840956 - DNA, 120 bp, Artificial Sequence
  ENSG00000279159_266 (sequence is synthesized)
caagaatttggcaaaggcttctgcaggtttcacaggtaaactccaacagcaatgttgaaacttcttccaaagctgattaagccttagagctgtgaccacagtacagccggcttaactatg

SEQ ID NO: 840957 - DNA, 120 bp, Artificial Sequence
  ENSG00000279159_267 (sequence is synthesized)
accggttcaacagccagaaactaagatttatatgaatactaagacaattatgtaattttctcatttctctcctctctgatacattctacttctagcaggctaggtagagaagactccata

SEQ ID NO: 840958 - DNA, 120 bp, Artificial Sequence
  ENSG00000279159_268 (sequence is synthesized)
aaaggctttattaactgctataagattaaactaacttccacccctcagagtctacacttgtgatatcatgtactggggcagattataaaaaggcatgactttgaaatatcccaagtgttg

SEQ ID NO: 840959 - DNA, 120 bp, Artificial Sequence
  ENSG00000279159_269 (sequence is synthesized)
tctcatcctaaagatgacttataagtatgtggttgtctggtatgctaatatttgatgagtaatgctatatacaccgccactgctcaacaacatgaggtaatgacaaaagaaacaggttga

SEQ ID NO: 840960 - DNA, 120 bp, Artificial Sequence
  ENSG00000279159_270 (sequence is synthesized)
tttttttttttttggtttgtttttaattaaaaccaagtttttcctttgtactccacagcgaatatacataaaaggcaaaagccatacatacacatacattcaaccaagtcactgaaatac

SEQ ID NO: 840961 - DNA, 120 bp, Artificial Sequence
  ENSG00000279159_271 (sequence is synthesized)
cattcaaccaagtcactgaaatacaagattccatgctgagtggtggcaggttaacatcaatgtggactgtgtatactgggaagaaacaaaatgcaacccttactcataatctctagccaa

SEQ ID NO: 840962 - DNA, 120 bp, Artificial Sequence
  ENSG00000279159_272 (sequence is synthesized)
acagttatgattgcattaccttgtagttgcataatttccaaagtgttttcataagcatggcacatagggggcacttaaacatttactgaattgaactctgcagcattaacagatttgatc

SEQ ID NO: 840963 - DNA, 120 bp, Artificial Sequence
  ENSG00000279159_273 (sequence is synthesized)
ttcaggatacctggatcagcctgggcaggaagagcatgaatgtcccactttaaagcacaaaggaaactaaagcacagagagcataaattctttgcccagtgttctttttttcaactaaat

SEQ ID NO: 840964 - DNA, 120 bp, Artificial Sequence
  ENSG00000279159_274 (sequence is synthesized)
cgtagaatacgcatttaaattcaggtttcctaattcctaagtcagtactttacccctcacatgcccttgcatcacaaacctacgaaaagacagagaacactgtagatatctttatgtcct

SEQ ID NO: 840965 - DNA, 120 bp, Artificial Sequence
  ENSG00000279159_275 (sequence is synthesized)
gatggccaaagaataccagatatcatcaggaaggggaagggtctggggaccaaagtcatcccacctcagggcagagccacccataattaaaagactagactgaggtacctctcaggaata

SEQ ID NO: 840966 - DNA, 120 bp, Artificial Sequence
  ENSG00000279159_276 (sequence is synthesized)
tcctaagagtttgctgaaatctaaaagaaactcaaattatcaagggactaaaaaagctctcctaaaaagataaggacttttcagtctgtggttgtgagagaacaggataggagaaagcaa

SEQ ID NO: 840967 - DNA, 120 bp, Artificial Sequence
  ENSG00000279159_277 (sequence is synthesized)
atcttgctgagtaaatgctggcaacccaaaattagggaatacctcttggagtcaggggtcttggagtcaggggtcttaaacaaattaaagttcttatataacataatgcagtaggatgca

SEQ ID NO: 840968 - DNA, 120 bp, Artificial Sequence
  ENSG00000279159_278 (sequence is synthesized)
ctcattaagttcattatcctaggagatggtagaaactaaaaatttaataaagaagatgcaatggttaaaaactcagaaactgtacatgtaagatttgtacacatcactgtttgtaaactt

SEQ ID NO: 840969 - DNA, 120 bp, Artificial Sequence
  ENSG00000279159_279 (sequence is synthesized)
tctctttaagaaaaacccccaaatttgaaaagagccataaaaaatgaaaaaatgtatttaaaatgtgatggcatttcaataaagaaaaaaaatagatgtaacaatcggagtgaagtgaga

SEQ ID NO: 840970 - DNA, 120 bp, Artificial Sequence
  ENSG00000279159_280 (sequence is synthesized)
gacagtttaagcacattctcataaacttccaaggttggtgtggtctctcgtaggtgacaggattctgctagcctggacacgcctgtgagaagctgggattctgaggctttccctgaggct

SEQ ID NO: 840971 - DNA, 120 bp, Artificial Sequence
  ENSG00000279159_281 (sequence is synthesized)
ccaagagggcaggtgcttttgtttttcaaactctgtatccacagcatccaccatggtcaggtctgaataactgagaactggttttaagtcctagttctgtcgtcagtgactagcactggg

SEQ ID NO: 840972 - DNA, 120 bp, Artificial Sequence
  ENSG00000279159_282 (sequence is synthesized)
acttgacaacaggctttttacctctgagcctccatttctttggctcccaaaacagacaccaacctatcttgcctgtttgacaaggtcatgaggatcaaacaaaagtatttatcaaagcat

SEQ ID NO: 840973 - DNA, 120 bp, Artificial Sequence
  ENSG00000279159_283 (sequence is synthesized)
tgttaaacataagataatgctaatgctacaagcattttaatagaacaagaatgtgaaccaaaagcttcaattagtcatggggccagagaacaaagtaacaaaagcatagcaagattagcc

SEQ ID NO: 840974 - DNA, 120 bp, Artificial Sequence
  ENSG00000279159_284 (sequence is synthesized)
tcaaatgtttaaaatgacccagggcagacttataagattgaagattcaggattaaaatttcaggtttctagaaaaaagtcccaagagtaaactttacttgaaggaggcttacaacttttc

SEQ ID NO: 840975 - DNA, 120 bp, Artificial Sequence
  ENSG00000279159_285 (sequence is synthesized)
actgcacagaaatttaagacttcactttgaaacctgacacactaaaagtcagtgttggaccagcaaagttttatgaccacataaagtttacaagaaactacatgcagagaaataacatgg

SEQ ID NO: 840976 - DNA, 120 bp, Artificial Sequence
  ENSG00000279159_286 (sequence is synthesized)
tcaaagccatttctgacggagaatgacagtgagggggacaaagactatagaggagtcaggaagcctgggttccagaacaggctcagcatctctttttggtttttttgggggggagggggt

SEQ ID NO: 840977 - DNA, 120 bp, Artificial Sequence
  ENSG00000279159_287 (sequence is synthesized)
gggtcacatgttaaaacctataatctaggccaggagctgtggctcacgcctataaatccaagcactccgggtggccaaggcgggcgtatcacctgagaccagcctgaccaacatggagaa

SEQ ID NO: 840978 - DNA, 120 bp, Artificial Sequence
  ENSG00000279159_288 (sequence is synthesized)
caagagcgaaactccgtctcaaaaaaaacaaaaaacaaaccccactatctatttgttcttgataggaacctggcctctcaccaattaactcctattcaactttcaaagctgattcaaaag

SEQ ID NO: 840979 - DNA, 120 bp, Artificial Sequence
  ENSG00000279159_289 (sequence is synthesized)
ctcctattcaactttcaaagctgattcaaaagccactttaaatgtgaagtcttcccacacatgtatacaaaactcatggctcctttctatcaggcttccatactattcataaaaccttat

SEQ ID NO: 840980 - DNA, 120 bp, Artificial Sequence
  ENSG00000279159_290 (sequence is synthesized)
tatagttgagctgtttttaggcccaatagattgtgatgccttctagtgttcttcccttccccggaaggcagaaaagatgttctattaagcttaaaagaatgctgcgcacttgctgggtgc

SEQ ID NO: 840981 - DNA, 120 bp, Artificial Sequence
  ENSG00000279159_291 (sequence is synthesized)
tccttaaaatatacactgattgatatatgaatgcttaggtgtcccatttcatgttaaaagtacctccatcagtagcttgataaagcccctggccatttgcacatttcagaaaggcgtacc

SEQ ID NO: 840982 - DNA, 120 bp, Artificial Sequence
  ENSG00000279159_292 (sequence is synthesized)
tggtctgcacaggtctccatgttgctctttttcactggcatagacctccatgcaccaagcatggtatgcaaatgagaagagatcttctattttagcaggtggtcggattgcgttgttcag

SEQ ID NO: 840983 - DNA, 120 bp, Artificial Sequence
  ENSG00000279159_293 (sequence is synthesized)
tctcttcagccactcttgacactgctcaaaggttgaaaactgacaccttttgtaaagccaaacaagtatggatgtaatcagaagacagttgaaatgaaatgtaagaaaagccattatttc

SEQ ID NO: 840984 - DNA, 120 bp, Artificial Sequence
  ENSG00000279159_294 (sequence is synthesized)
aagaatgcccactcgtagtgaagtgggaactacaaccaagaaagcatctgaggcagtcagtcattcgcatgctcattatcacttataagaaaaacaaatgttagccaatggaacaaaatg

SEQ ID NO: 840985 - DNA, 120 bp, Artificial Sequence
  ENSG00000279159_295 (sequence is synthesized)
tccaaaaggaggaagctgaccattggaaaacctatttttttagactaatgaaatctcttctaagattaatgacaattattacagaaaaatggcagctattctctttcatgagtggagttt

SEQ ID NO: 840986 - DNA, 120 bp, Artificial Sequence
  ENSG00000279159_296 (sequence is synthesized)
cattctacttcttccatcgaagttttatggttgtccctcataaaaaatatgtttagaaaaatctttgttttgtagtaacatattagatcaagtttaaaaaaaaacagcattatttttagc

SEQ ID NO: 840987 - DNA, 120 bp, Artificial Sequence
  ENSG00000279159_297 (sequence is synthesized)
cagttaggtagtaatttcaatatttagctattaggacaaatcagatccaaaagacagattgcactgaaactttcagctatgaccatgtagagaacaaaacaattctattgtcaactgcga

SEQ ID NO: 840988 - DNA, 120 bp, Artificial Sequence
  ENSG00000279159_298 (sequence is synthesized)
aacaaaacaattctattgtcaactgcgattttcagtatatacaactaagaagttaaaataattagtgaaaactaatttattaaagatatgtttaggctgagtgcagtggctcatgcctgt

SEQ ID NO: 840989 - DNA, 80 bp, Artificial Sequence
  ENSG00000279159_299 (sequence is synthesized)
gaccagcctggccaacatggcaaaactcccgtctctgataaacatacaaaaatctcagaaggctgaggcacgagaatcac

SEQ ID NO: 840990 - DNA, 72 bp, Artificial Sequence
  ENSG00000279159_300 (sequence is synthesized)
gtggtggcgtgcacctgtaatcccagcttctcagaaggctgaggcacgagaatcacttgaaacagggaggta

SEQ ID NO: 840991 - DNA, 120 bp, Artificial Sequence
  ENSG00000279159_301 (sequence is synthesized)
aataaataaaaataaagatttgtttaaatatttggcctttttgaatgcaatgttaaaaactgactaattaataagcaactaccttcttaaactgtgagttgtagccagtatctatcaaaa

SEQ ID NO: 840992 - DNA, 120 bp, Artificial Sequence
  ENSG00000279159_302 (sequence is synthesized)
ataagccaaatctcactgactaaaaagcaatataaatatctatcttaaaaccaaggggtcacttaaacctctctctcatcccaatcatggtggctcatcagtatgccaacacataatatt

SEQ ID NO: 840993 - DNA, 120 bp, Artificial Sequence
  ENSG00000279159_303 (sequence is synthesized)
tactgacaccccagaagaggtcagaggaatgcagtaaaaacttgtggaatttaagacctctagagctattaaatttaaaaatgcatttcaggcatcgttgttggtttttggtttttcaga

SEQ ID NO: 840994 - DNA, 120 bp, Artificial Sequence
  ENSG00000279159_304 (sequence is synthesized)
caggcgtgagccaccacacccagcctgcaaccattatagttaagcgcagatacaaatcatcaatgaatgctaaacttatggagaaatttttatgagaagcagggacatttgcattgtttc

SEQ ID NO: 840995 - DNA, 120 bp, Artificial Sequence
  ENSG00000279159_305 (sequence is synthesized)
acatttgcattgtttcaaagtgcctcccccagactgtttttagttgcaagagagaaaacgcagaaattatacagaagccaggtgacatctcgactggaataatcaaaattaacatcacca

SEQ ID NO: 840996 - DNA, 120 bp, Artificial Sequence
  ENSG00000279159_306 (sequence is synthesized)
atgaaggacatgtggacactgtacttccagatgtaatacaataccctgaaaaggatgtgacatcatatatacagtattccagttgagaaaatagaacctcaatttaattgaggaaatact

SEQ ID NO: 840997 - DNA, 120 bp, Artificial Sequence
  ENSG00000279159_307 (sequence is synthesized)
ggacaaacacaacatgagaagtattccattaaaacaaaagattgtattctgcaaaatgtgaatgtcataaaagaaaataaggctgtagaaaatgttccagattggccgggtatggtggtt

SEQ ID NO: 840998 - DNA, 60 bp, Artificial Sequence
  ENSG00000279159_308 (sequence is synthesized)
ggctgtagaaaatgttccagattggccgaggtcagagttcaagaccagcctgaccaacat

SEQ ID NO: 840999 - DNA, 120 bp, Artificial Sequence
  ENSG00000279159_309 (sequence is synthesized)
gcaacagagcaagactctgtctcaaaaatcaaacaaacaaaaacaaaaagaaaatgttccagattaaagaaggctacagagtcatggcagctaaatgcaatatatgacctagactggatc

SEQ ID NO: 841000 - DNA, 120 bp, Artificial Sequence
  ENSG00000279159_310 (sequence is synthesized)
ctgtactgaatgagatggaggtgagggagaatgctataaaaaagtatcaataggtcattaggtgaactgacaaaattggaacatgtatagtagactggatgtaagtattatcaatgtaaa

SEQ ID NO: 841001 - DNA, 120 bp, Artificial Sequence
  ENSG00000279159_311 (sequence is synthesized)
attgaaaattgataatgttatggttatgtaagaaaatatccctattcttaggaaagcacactaaagtattttggggttaagagccatgattacgtaacttactctcaatctgttcaggaa

SEQ ID NO: 841002 - DNA, 120 bp, Artificial Sequence
  ENSG00000279159_312 (sequence is synthesized)
aagaaacacacacacacatacacacacgcctctgcaaataataaagcaaatggtaaaatgttaacaagtgaatctgggtgaatggtgtactgatgttctttttagtatttttatttttgc

SEQ ID NO: 841003 - DNA, 120 bp, Artificial Sequence
  ENSG00000279159_313 (sequence is synthesized)
ccttttgtaaatttaaaattatttccaaattaaaaaaaaaaaacatctttcaacatagcaaagtatacatcctacagataaaatatttcaggcacaaactactcagaaaatattcctaat

SEQ ID NO: 841004 - DNA, 120 bp, Artificial Sequence
  ENSG00000279159_314 (sequence is synthesized)
gaggctaatcatcaaaaggtattttactaagttaccaaataatggacccattctttaaaaaatattttccacactaaacagcaacacaaacataccataccacatacctgataactttgc

SEQ ID NO: 841005 - DNA, 120 bp, Artificial Sequence
  ENSG00000279159_315 (sequence is synthesized)
agtctttgcaagtcaaatgaagctgaaatatatctcggcattcaacactttctataagctgtaatggaacctgcaattttaaaaaaatgaagtcctcttagtcaaaaaggcattgaccct

SEQ ID NO: 841006 - DNA, 120 bp, Artificial Sequence
  ENSG00000279159_316 (sequence is synthesized)
ggagttcttcaatgtgtccaacaagactaattaaaaagatctataagggaaagcaacaaaaatagaactgcaaacttatctggatcaacagtactcaagtgatttactacaaagtgaatt

SEQ ID NO: 841007 - DNA, 120 bp, Artificial Sequence
  ENSG00000279159_317 (sequence is synthesized)
aggacttccctttatctctaaatcagtggtctcaagtcatgtcatagcatgaaggcaacaaagaggtggcaccacctttggaagaaggggagaatatatctctcaggcaccgaattcaca

SEQ ID NO: 841008 - DNA, 120 bp, Artificial Sequence
  ENSG00000279159_318 (sequence is synthesized)
agatcagagtactacttttagatgctataactgactatgatttgcaatgatgcaatgacatagaagctgaagggagccagaacagtaatcttttcttgcttatagaaaagaactacagat

SEQ ID NO: 841009 - DNA, 120 bp, Artificial Sequence
  ENSG00000279159_319 (sequence is synthesized)
cagaatgccagtgggagactattgtttgccccaaatgacagagtgggcttatggcttagtgtcagccaatgaggctcctgaaaaagactagagttctaagctgactgtggattgcacaga

SEQ ID NO: 841010 - DNA, 120 bp, Artificial Sequence
  ENSG00000279159_320 (sequence is synthesized)
aaagacaatggggcaatagctgctggccaggctctctactaagtagaatagacccaaaagtatcaaaaaggagggagaaggccatacagtgatcaaggatgctaaagctataataactat

SEQ ID NO: 841011 - DNA, 120 bp, Artificial Sequence
  ENSG00000279159_321 (sequence is synthesized)
gtcagatttgcttcaaaaaatcagttagaagccccgtttgccaaatggggcttgaggtttgaacaagctggaatggttcccccttgccaatctggtctacagactctactggacacagga

SEQ ID NO: 841012 - DNA, 120 bp, Artificial Sequence
  ENSG00000279159_322 (sequence is synthesized)
ttatgtacaacagcagatagagagaagggagacagatagaagcaaaagcatctagacagggtgccaaatcttcaggataatatgaggatcctcctcctatcccttaaatcatcctaattc

SEQ ID NO: 841013 - DNA, 120 bp, Artificial Sequence
  ENSG00000279159_323 (sequence is synthesized)
aacccttggcttcaaaaagcaatttctaggctttcaaggcaaacctggtaaaataatagtgaatacttttactccttgaaaaaggagtgggccatttgcctcttacagtgtatcaagtct

SEQ ID NO: 841014 - DNA, 120 bp, Artificial Sequence
  ENSG00000279159_324 (sequence is synthesized)
agccaaaatgtggctctgggagttgcaaatagcattccaacaacttgtgtttagtatgcaaagaggaggacagtctcctccaatgcagacaggaacaagagtactgtctgcacaggctgg

SEQ ID NO: 841015 - DNA, 120 bp, Artificial Sequence
  ENSG00000279159_325 (sequence is synthesized)
ccctcgtgttagctgagccagtttcaggaacaagcttcctgcaaactctgccccaccacagagctgccagtcagcacagaactctcagaatgaggatgcagggatcaaaaagaagcccag

SEQ ID NO: 841016 - DNA, 120 bp, Artificial Sequence
  ENSG00000279159_326 (sequence is synthesized)
tgctggacaaagaaacagaaactggagcaggggttaaagaagagaagaaagcaaaataatattactcagataaatgactgggagtttctaccttaggactaaagtcttcttgcttttaag

SEQ ID NO: 841017 - DNA, 120 bp, Artificial Sequence
  ENSG00000279159_327 (sequence is synthesized)
tctacagtctataaaaattcccttacaaatgtaataggactgggggtcagaaaaagactaagaaatcttggccggatacggtggctcacgcctgtaatgccaacattttgggaggccgag

SEQ ID NO: 841018 - DNA, 70 bp, Artificial Sequence
  ENSG00000279159_328 (sequence is synthesized)
tgcggataattttggtgcatgcctgtattttggtgcatgcctgtatttggtgcatgcctgtatttggtgc

SEQ ID NO: 841019 - DNA, 120 bp, Artificial Sequence
  ENSG00000279159_329 (sequence is synthesized)
ggtgcggataattttggtgcatgcctgtattttggtgcatgcctgtatttggtgcatgcctgtatttggtgcatgcctgtaattttggtgcatgtctgtaatcccagctactccagaggc

SEQ ID NO: 841020 - DNA, 75 bp, Artificial Sequence
  ENSG00000279159_330 (sequence is synthesized)
ccagaggctgaggcgggagaatcgcttgaatcccagaggcagagactgcggtaagctgagatcgtgtcattgcac

SEQ ID NO: 841021 - DNA, 120 bp, Artificial Sequence
  ENSG00000279159_331 (sequence is synthesized)
gaacaaaaggagcttttggccttctgtttttatttacgtccttaaccccaaggtgctgtgagaaactgcaactgatgcaactaagaattcttctgagacctgtgcatctaagaaggaaaa

SEQ ID NO: 841022 - DNA, 120 bp, Artificial Sequence
  ENSG00000279159_332 (sequence is synthesized)
aaaaaaacaaacaaacctacaatttatcagagataaaactataaagaagaaatattgagattaagaagacagattagaagataactttgctttgttctcaggccagttctctgggtagcc

SEQ ID NO: 841023 - DNA, 120 bp, Artificial Sequence
  ENSG00000279159_333 (sequence is synthesized)
tgtaacagacacttactgctttttattttgtatatactcctgctaactaccttactcactatatccccccaaaatgtggctgccagactggcaattaagagccgtgagttctaatctcaa

SEQ ID NO: 841024 - DNA, 120 bp, Artificial Sequence
  ENSG00000279159_334 (sequence is synthesized)
ttttctaaaatgttaccaattaaaattttgctggcttcattgggcaagcctccagccttcccatgtgccatcagcctctgctttctgaaccttggtcacaactaaggaaatctcagtcat

SEQ ID NO: 841025 - DNA, 120 bp, Artificial Sequence
  ENSG00000279159_335 (sequence is synthesized)
ggggcctgggaagagtctgggataggattagagtgagctttacaaatccacaagaagaggctgctcttgcagcagtcacctgcatcccaagtcccctgcaactgactttctttatggaca

SEQ ID NO: 841026 - DNA, 120 bp, Artificial Sequence
  ENSG00000279159_336 (sequence is synthesized)
gaagacatgaaaaccagctaatgctcttagcagctgctgggggaaatggattagcctttgctactttgctacaaagaacaggtaagttttacatccttattactaaaccagagcccaatg

SEQ ID NO: 841027 - DNA, 120 bp, Artificial Sequence
  ENSG00000279159_337 (sequence is synthesized)
gcccgtgcccaaatttaatatcataaaattatctcagaccatgcaaaacatttgctacctaaaattcaggcaatatatacatatttttttctatattttaacatcttaaattgaagaaaa

SEQ ID NO: 841028 - DNA, 120 bp, Artificial Sequence
  ENSG00000279159_338 (sequence is synthesized)
aagaattagaatgttggttctatgcattgaaatcagattgcagacaccagcaagtcaccaaaatcaaccatgtgtattacaagtcacagatacggagaacagcagattttaatattcatg

SEQ ID NO: 841029 - DNA, 120 bp, Artificial Sequence
  ENSG00000279159_339 (sequence is synthesized)
cagactgtcacatgcaggaaagcttaatacgcagcaagaatagggacatacaaaagagaaacacctgatttttataacaaatatctcccttttcttctcctttctactgcagtgtttccc

SEQ ID NO: 841030 - DNA, 85 bp, Artificial Sequence
  ENSG00000279159_340 (sequence is synthesized)
atatctcccttttcttctcctttctactgcagtgtttcccttcagcacttcctgcacagactgccttttctttctttctttcttt

SEQ ID NO: 841031 - DNA, 62 bp, Artificial Sequence
  ENSG00000279159_341 (sequence is synthesized)
ccacctcccaggttcaagctattctccctgcctcagcttcctgagtagcaggcacctgtgat

SEQ ID NO: 841032 - DNA, 70 bp, Artificial Sequence
  ENSG00000279159_342 (sequence is synthesized)
tccagattgccttttctaaaaggcagaattgaccttcttttcctgttcatacctccatccaaaacatact

SEQ ID NO: 841033 - DNA, 120 bp, Artificial Sequence
  ENSG00000279159_343 (sequence is synthesized)
gaccttcttttcctgttcatacctccatccaaaacatactgtttctctattttcttaaggcccactacactgctttaggttcaaatttcctcacatatgaaaacaatctcttaacatttc

SEQ ID NO: 841034 - DNA, 120 bp, Artificial Sequence
  ENSG00000279159_344 (sequence is synthesized)
tataactagagataccctatattcaacctcaaaagcaaattacagattcaagagccagtccactttacagcccaggaaggttaaactactacactataagctaatatagtagtaaagtca

SEQ ID NO: 841035 - DNA, 120 bp, Artificial Sequence
  ENSG00000279159_345 (sequence is synthesized)
ggaccaggatccatgtctgtcctccagcctgggctccttccaccatacacggtgtgtctttctttctgcccctacacgtgggcttctcttccatatgagctctactttagtttttctttc

SEQ ID NO: 841036 - DNA, 120 bp, Artificial Sequence
  ENSG00000279159_346 (sequence is synthesized)
acaaataagtagcttctccaccagggatcttcaagaggaaaacagagtttaaatcaaaactcctcagatgcaattccttttgtaaaagagtagcaagataaactcactttcaaatcctct

SEQ ID NO: 841037 - DNA, 120 bp, Artificial Sequence
  ENSG00000279159_347 (sequence is synthesized)
caaacgtactgattcaatgtcttgtagcaactcattttctttttgctcctctctcctctatctctccacctgccaggtaacgcaatctcaccttacaatgcttttcctaatataaatttc

SEQ ID NO: 841038 - DNA, 120 bp, Artificial Sequence
  ENSG00000279159_348 (sequence is synthesized)
accaaactcatgctcaaacaatgcatcaaacacattcagtgctacaaccaattcctcaaaaagccaagttacattatagacactaacaccctgaagagcatcaatccaaaaaaagcagaa

SEQ ID NO: 841039 - DNA, 120 bp, Artificial Sequence
  ENSG00000279159_349 (sequence is synthesized)
gagcagcagtttaaaaatttaacagacatacagacatgcacaggttatgtccacagtactgtcacattccagagggaactgatgccatcataccctactatatttacctcatttcattct

SEQ ID NO: 841040 - DNA, 120 bp, Artificial Sequence
  ENSG00000279159_350 (sequence is synthesized)
gggtgtgtgtgcatacatgtgcattatttttaaacaccagaatctagagtgggataattcctacctttttaaaaacaaacaccctttttatagcctgaatgggaagtactaatcttgtac

SEQ ID NO: 841041 - DNA, 120 bp, Artificial Sequence
  ENSG00000279159_351 (sequence is synthesized)
acgtgaagttaaaatggcagtaaaagagtaaaaataatgagtctaaatctaaaatcagtaataaagtggaatatctgggcacaaaaatcttttcatttaaaaactaatcagggccgggca

SEQ ID NO: 841042 - DNA, 73 bp, Artificial Sequence
  ENSG00000279159_352 (sequence is synthesized)
acaaaaatcttttcatttaaaaactaatcagggccgggcacgacgactcacatctataaacccagcactttgg

SEQ ID NO: 841043 - DNA, 90 bp, Artificial Sequence
  ENSG00000279159_353 (sequence is synthesized)
ctgggcaacatggtgaaaccctgtcactacaataacataacataacataaaaataaaataaatatttgagtgcagtggctcacatctgta

SEQ ID NO: 841044 - DNA, 120 bp, Artificial Sequence
  ENSG00000279159_354 (sequence is synthesized)
agcccaggagttttgagaccaacctgggcaacacagacatcatctctacaaaaaataaaattaaattaactgaacgcggtggcatgtgtctgtagacctagctactcagaaggctgaggt

SEQ ID NO: 841045 - DNA, 71 bp, Artificial Sequence
  ENSG00000279159_355 (sequence is synthesized)
ctcagaaggctgaggtgggaggatcacctaagcgcaggaagttgaggctgcagtgggccatgatgaacaac

SEQ ID NO: 841046 - DNA, 120 bp, Artificial Sequence
  ENSG00000279159_356 (sequence is synthesized)
atcagcagaagactgtcactggtttaagattcaaactctattgttcacctttgacaatttacaagcctccagcactgctttcagaggctcccactgttatatgaatgctagatcaaagtg

SEQ ID NO: 841047 - DNA, 120 bp, Artificial Sequence
  ENSG00000279159_357 (sequence is synthesized)
aggctcccactgttatatgaatgctagatcaaagtgcattaaatgttaacaataacctccttcgcagcagggtgtggtggctaacgcctgtagttccaacactttgggaggctgaggtgg

SEQ ID NO: 841048 - DNA, 120 bp, Artificial Sequence
  ENSG00000279159_358 (sequence is synthesized)
gagccgagactgtgctaacgcactccagcctggacaacagagtgaaactccgtctccaaaaaacaaagtgaaagaaaaaaaaactagtgttgattttacaaattatttctaacagaaact

SEQ ID NO: 841049 - DNA, 120 bp, Artificial Sequence
  ENSG00000279159_359 (sequence is synthesized)
tgttctacatttttttgaaggtcacaattccatctgcttatgtataaactgcagggctttttccttaccctacaaattgttctcctagtagcatacaactggaatttggtccagtaagag

SEQ ID NO: 841050 - DNA, 120 bp, Artificial Sequence
  ENSG00000279159_360 (sequence is synthesized)
gaaaaggactcatgcagaggggaaacattctgctgatttgcaaggtgagcatctaacactcaaaaccaatttgctccaagcacaggtgcagcaaccgcctaggattttcatactacttac

SEQ ID NO: 841051 - DNA, 82 bp, Artificial Sequence
  ENSG00000279159_361 (sequence is synthesized)
cacaggtgcagcaaccgcctaggattttcatactacttacagggattttagaagcagcagattgagaagcagtctattaaat

SEQ ID NO: 841052 - DNA, 120 bp, Artificial Sequence
  ENSG00000279159_362 (sequence is synthesized)
acttgaacacttgtttataatttatctaagcttcaaagaactatgtctgtaaatatataataatttgggaaaagcacagaataggagcaatgtataccttaaatgctacacataaactct

SEQ ID NO: 841053 - DNA, 120 bp, Artificial Sequence
  ENSG00000279159_363 (sequence is synthesized)
actacagagattctttaccacaggaactggaacttgatattcagtgaatgtgtgaattaaagtaatgatgtttacggtatcaaaacctacagacacattttactcaatgtgctgtgaaat

SEQ ID NO: 841054 - DNA, 120 bp, Artificial Sequence
  ENSG00000279159_364 (sequence is synthesized)
taaaagagaatatatgatatcaggtagctatttaaaacttgatggtaaatcattttctgaagtgctaagtattttgatttaagcatacaaaatgatgaactggggcatgccacaacatat

SEQ ID NO: 841055 - DNA, 120 bp, Artificial Sequence
  ENSG00000279159_365 (sequence is synthesized)
gctggtatgtctgggctttgatggtttaaatgtgtttgatatagataaaataacatttaaagagagcctcctgatctaacattttattgaaatacacatattttattgaaatacttattt

SEQ ID NO: 841056 - DNA, 120 bp, Artificial Sequence
  ENSG00000279159_366 (sequence is synthesized)
gctaagggaaggaaagagggaggggcaacaccactaccaactgtctgatctccatccaggacccgatgcaggaagaatccttgtttcctaagtacctccaggtttcaggtttcaggaatc

SEQ ID NO: 841057 - DNA, 120 bp, Artificial Sequence
  ENSG00000279159_367 (sequence is synthesized)
taagtacctccaggtttcaggtttcaggaatctcttagcactagctgtgatgaaattaatttatttttatggaggagttctagtctctctcaatctgaaatttttttttttttttttttt

SEQ ID NO: 841058 - DNA, 120 bp, Artificial Sequence
  ENSG00000279159_368 (sequence is synthesized)
gcgtgagccaccgcgcccggcctcaatctgaaatttttaaagtcactgcaatgccaaaatacttttacaccatcatttttctgtacaaagccattaccttgggtgtttttttttttttcc

SEQ ID NO: 841059 - DNA, 120 bp, Artificial Sequence
  ENSG00000279159_369 (sequence is synthesized)
agtgctgagattacaggcgtgcatcactgcacccggcctaccctgggctttttaagtaacatgtaggctctatgccttagagggttatgatgctaacagaaaaaaaacactttcagatta

SEQ ID NO: 841060 - DNA, 120 bp, Artificial Sequence
  ENSG00000279159_370 (sequence is synthesized)
agaaaattgatcaaaagaaagaacagtggcaagtttccttaagcattatctctcaatcacaatgggggatcaacaattccagtcaacaacctactcacacagctatccttagagacaatt

SEQ ID NO: 841061 - DNA, 120 bp, Artificial Sequence
  ENSG00000279159_371 (sequence is synthesized)
aagccacagcctattcacacagaagtgtactgttttaaaatgagctttaaacaccaaagggggaaaaggttctaatgcccacttcaaacccacattaacttcaattcatttaatatttac

SEQ ID NO: 841062 - DNA, 120 bp, Artificial Sequence
  ENSG00000279159_372 (sequence is synthesized)
tgaatattgtggcaccaggagacatgctggatcttgaagacacaaaaacaattaaccaaaaattacaacctatttggtaaatgttataaaagaatgtacaagataaagacaaagcaaaga

SEQ ID NO: 841063 - DNA, 120 bp, Artificial Sequence
  ENSG00000279159_373 (sequence is synthesized)
aagagtgtagttaactgtcacagagggaactgggactaagaaaggcttcacaggagaagttatcacctgaactgaattttgacagatgaacagaagttcctgggccgaaaagagaacaca

SEQ ID NO: 841064 - DNA, 120 bp, Artificial Sequence
  ENSG00000279159_374 (sequence is synthesized)
gaggtgtgaggtatggctgaatagtacaaagaggctgcttttacaagtaaaaatgtgataatggggaaaggagggaagctgtgatccttggtccctgccacgttgtcagacagcttcatg

SEQ ID NO: 841065 - DNA, 120 bp, Artificial Sequence
  ENSG00000279159_375 (sequence is synthesized)
tcatgctaaacaatctgatcttcatcatagaagtagtgaagaaacactgaagggctttaagctgatgaatgacatgatcagtttctttctttctttctttcctgcttgctttccagcaga

SEQ ID NO: 841066 - DNA, 120 bp, Artificial Sequence
  ENSG00000279159_376 (sequence is synthesized)
ccttattcccaaatagttctaaaatagtctctgaaacacttggccatcaaccaataaactgataaatacaggatgatatgagaaaatgcaatgatatgaaactatcattctcacatgcaa

SEQ ID NO: 841067 - DNA, 120 bp, Artificial Sequence
  ENSG00000279159_377 (sequence is synthesized)
tttaattataatttaattccagcaattcaaacactgaaagaacacaaagttaaattgggcagttctactaaacactactatcattacttccacagtagctggtggggaattctcagttgc

SEQ ID NO: 841068 - DNA, 120 bp, Artificial Sequence
  ENSG00000279159_378 (sequence is synthesized)
tgggattttataggtgtttcccccctttcccctccccatcacgactactcaaatccaagtggacccttctgaacagagtgctacatagtatgaaagaacagcattgcctctttccttaat

SEQ ID NO: 841069 - DNA, 120 bp, Artificial Sequence
  ENSG00000279159_379 (sequence is synthesized)
gaatctggtgtgtatctttagctgatagacagaaaactgatgtaactgctataatcatggcccaaatctagaagccagaagggattcaggccaaaactgctcctggacataaatgcttaa

SEQ ID NO: 841070 - DNA, 120 bp, Artificial Sequence
  ENSG00000279159_380 (sequence is synthesized)
ctacaaagaagaatgataataagaagtaaaaaatgtcaactaccaaaaaaaaaatgacagccactgagtctttttttaattgctgagtaaaacgaatgaacaagatttcaaagaatccca

SEQ ID NO: 841071 - DNA, 120 bp, Artificial Sequence
  ENSG00000279159_381 (sequence is synthesized)
aaatgaagccaaaacacagtctgcatggaattacagtcctgagctgttttaacgtgtcataatacacttctctgtgctggaagtggagtgtagaaagccacaacactggcaagtaaagaa

SEQ ID NO: 841072 - DNA, 120 bp, Artificial Sequence
  ENSG00000279159_382 (sequence is synthesized)
ggaagaaggcatttgctgtaagtacatgaattttcaagcctttattcgtttcatttaaggctaatgatagcagagcactggaagaaccagttcactgagaggacattcataactgaaaag

SEQ ID NO: 841073 - DNA, 120 bp, Artificial Sequence
  ENSG00000279159_383 (sequence is synthesized)
ggtaaatgtactcttgagaatcaagaggcttccttttcttcagtaatacatagtccattatgcaaatcaacattatacttaacatctacacttataccaccaaggagtcattagagtaac

SEQ ID NO: 841074 - DNA, 120 bp, Artificial Sequence
  ENSG00000279159_384 (sequence is synthesized)
ctcatgctgtaatgagagtctgcagtgagctcaaagtgcatctcatcttttgacattaaggccaagggaattatctcaactgaggcagttggtaactactaaagattgcagaataaaagc

SEQ ID NO: 841075 - DNA, 120 bp, Artificial Sequence
  ENSG00000279159_385 (sequence is synthesized)
ccattcagcctttatacctttataaagcttaatgatacagcattacctaatgcaaatcattcactgttaaactaaacaatggacacctcagctgacaactacacacatcattttaaatca

SEQ ID NO: 841076 - DNA, 85 bp, Artificial Sequence
  ENSG00000279159_386 (sequence is synthesized)
ggacacctcagctgacaactacacacatcattttaaatcaagcataagagctgcttgctgatctagtgtgttttgttgttggtca

SEQ ID NO: 841077 - DNA, 120 bp, Artificial Sequence
  ENSG00000279159_387 (sequence is synthesized)
taaattaagtgagaaaagcagagcacataatgctttctctcccaattctgtatgcctctcctctctttgagagcattaagttttttgacttactttctccatttaccttagagggagaac

SEQ ID NO: 841078 - DNA, 120 bp, Artificial Sequence
  ENSG00000279159_388 (sequence is synthesized)
agctggtaatcacttacattaacaagagactccttgaacttgatgtgaagtctgtaattggaaagggcaatgatggcatcctcggcacggcccacaaactctgtgctctctccatgaagt

SEQ ID NO: 841079 - DNA, 120 bp, Artificial Sequence
  ENSG00000279151_0 (sequence is synthesized)
acagtctgcgccgggagctcaacgattccagggcccctgcagccctacccgcccggccccctctgcctcccagagatgaaaggggaaagccactgtgggagcttggtctaaggtggcgtg

SEQ ID NO: 841080 - DNA, 120 bp, Artificial Sequence
  ENSG00000279151_1 (sequence is synthesized)
ccctggggaggcagaaggaagggccagatttggaagcatgcagacagcctttcccccaagaatgagactctccaccacctggaaacaacttgccgagggccaagacggagttttgttctt

SEQ ID NO: 841081 - DNA, 120 bp, Artificial Sequence
  ENSG00000285588_0 (sequence is synthesized)
aaatgactcagcatagagaagcgggacagacatataaacaaagagctatgtagtctgggacactcaagctcctatccttgctcgtagaagatccaactatttgccccacaagcaaacagt

SEQ ID NO: 841082 - DNA, 120 bp, Artificial Sequence
  ENSG00000285588_1 (sequence is synthesized)
ctcagctcaaatacagtatctttaaggatgccggagatacaggagtgctgggaaggcaagaccatggtccctttaaatgatacgggagtgctgggtagaggaagggtgtggtccctggct

SEQ ID NO: 841083 - DNA, 120 bp, Artificial Sequence
  ENSG00000285588_2 (sequence is synthesized)
agggctccacccccaccgacctagatgaggacctggcactcctgcctgcacgcccaaatgttgtatttcccaagaccatcctggcccaccacggccccatcctgtgactataaaaacctg

SEQ ID NO: 841084 - DNA, 120 bp, Artificial Sequence
  ENSG00000285588_3 (sequence is synthesized)
gacgtgtagaggagcggatcagcagaagaagatagaggcagggggatgtcaaatgcagcatatcagcgtaggaacacacaggccgttgaagcgagagaggagcacatcaatgaaagaagg

SEQ ID NO: 841085 - DNA, 120 bp, Artificial Sequence
  ENSG00000285588_4 (sequence is synthesized)
cacaagcatctggatggcgagaggatgttgaggggagcatggcagctgaagagcacaccgacaggacacacgccggcactgtcccggtgggagtgggatgaggcggagtttggtgggggc

SEQ ID NO: 841086 - DNA, 73 bp, Artificial Sequence
  ENSG00000285588_5 (sequence is synthesized)
gtcccggtgggagtgggatgaggcggagtttggtgggggcagtgggaggagagccctggccgtggagtgcccc

SEQ ID NO: 841087 - DNA, 120 bp, Artificial Sequence
  ENSG00000253105_0 (sequence is synthesized)
agatgaaacatgctgtgctggtttctgaaaaccaagaagcctggagagaaatttatgactttgaaacaaaatttagaggttgaaggatttagcagtttgcaaagaacatggagctaagcc

SEQ ID NO: 841088 - DNA, 120 bp, Artificial Sequence
  ENSG00000253105_1 (sequence is synthesized)
cttgaaaaaggctgttcaaaaagtcctggcctaaagtgccaaggtcgttttcagaagtccccgcagaagctcttaggaatcggaaagcgtaaaaatggggagagagtattttgaagacat

SEQ ID NO: 841089 - DNA, 120 bp, Artificial Sequence
  ENSG00000253105_2 (sequence is synthesized)
ctttcccctgaaagctgttgcttgtgagcctgtgcattttcccacacgaatatgctcggccgttatgttagccaggcatttcctgcatgcggcagttctggaggccggaagtccagggtc

SEQ ID NO: 841090 - DNA, 120 bp, Artificial Sequence
  ENSG00000253105_3 (sequence is synthesized)
aaggtgacagtggattcgtttcctggtgaggaccctcttcctggtttgtacatgtgattcctagcagtctccattttgaagttctcttctcctttgaccaagcgtccagcacatcctcac

SEQ ID NO: 841091 - DNA, 120 bp, Artificial Sequence
  ENSG00000253105_4 (sequence is synthesized)
aacactccaaagccaccttgaagactctcttcaaagcagttcttactgttgataccaccaccattgttccgacacatgaagcaggaggacccaaggccagaggtcatggtggagagatga

SEQ ID NO: 841092 - DNA, 120 bp, Artificial Sequence
  ENSG00000253105_5 (sequence is synthesized)
gcagatagtcctcaaaggcagacagggctggggttggagaggaattccctaatagctgttataaatggagatatgacaggtgtgaacaaacaacctaggactggaagaaagaagagggag

SEQ ID NO: 841093 - DNA, 120 bp, Artificial Sequence
  ENSG00000253105_6 (sequence is synthesized)
gagtcgggtagagatagtacttggagtggatgcccaggctgtgtagtgacataaaggggcttaaagagggcttagggagcagatctgagaggaagagaatgaaggaaggtaaggaattca

SEQ ID NO: 841094 - DNA, 120 bp, Artificial Sequence
  ENSG00000253105_7 (sequence is synthesized)
gactagattcagggaacctgagggctgggtgttggtttgtgttcttgaaattacttcctcaggatttcacatctaaccaaatattaacaatcatttactaaataaatattgttctgtccc

SEQ ID NO: 841095 - DNA, 120 bp, Artificial Sequence
  ENSG00000253105_8 (sequence is synthesized)
tggatgggcagatgggagtgttatgcctgcccctccccatcccccaccaaaaaaataacaaaggcagtttaattcatgaccccaaggctgtcacaatccagactaagaagtgccctgaga

SEQ ID NO: 841096 - DNA, 120 bp, Artificial Sequence
  ENSG00000253105_9 (sequence is synthesized)
gcctggtgggatcatcttggtgcacagacccagtatccaggggatctgagtggccaaggaacacccagaactcctgcctcccataagtgcaaggctgagcatagcaaagtatgaagaggg

SEQ ID NO: 841097 - DNA, 120 bp, Artificial Sequence
  ENSG00000253105_10 (sequence is synthesized)
aaggctcttctaacactgaagtacgtaggagcagacttttcagtaagaagaaaagtcccagaaattcagattagattataaacaaattataaagcgataagctggctgaaacaataatat

SEQ ID NO: 841098 - DNA, 120 bp, Artificial Sequence
  ENSG00000253105_11 (sequence is synthesized)
tcaaattagttcaattcagcaagtacatatgagtgcttctgtgtgcccatcctgggctagtccacttgagggaatggacacaggagaaatgaacagggtttaaaggggaggtatttcttc

SEQ ID NO: 841099 - DNA, 120 bp, Artificial Sequence
  ENSG00000253105_12 (sequence is synthesized)
aggcacaaagctctgcagatggctgcctctccactgggcaccccatgacaattcacacaagatctctcccaagacctctcaaagcaattcttttaagacctcagtccctgcccccaagca

SEQ ID NO: 841100 - DNA, 120 bp, Artificial Sequence
  ENSG00000253105_13 (sequence is synthesized)
gccaggagtctgtttcactggtatcagatcaagcagacccttcctgaagcttttgtagagaaatggaagtgatttggttaaaacagggaatttcggctgggtgcagtggctcacacctgt

SEQ ID NO: 841101 - DNA, 82 bp, Artificial Sequence
  ENSG00000253105_14 (sequence is synthesized)
aatcctagcactttgggagacccaggcgggcagattgtctaaactctgtctgtactaaaaatacaacaacaacaacaaaaaa

SEQ ID NO: 841102 - DNA, 120 bp, Artificial Sequence
  ENSG00000253105_15 (sequence is synthesized)
ggacattttccctgcttaggcagccacagcacagagatagaattagtcacaagattagtccagcttaaataagcagaagtcaagttagtgcttcacagattggtcttttagcagatgctc

SEQ ID NO: 841103 - DNA, 120 bp, Artificial Sequence
  ENSG00000253105_16 (sequence is synthesized)
tgccctttcgaggaatgcaaggggcaaatgtgagctcttaaggatattttacatttgcgcaatgaagttacgctgttcaaaaaactttctcgtctttctgcctttgtgcaacctaatttc

SEQ ID NO: 841104 - DNA, 120 bp, Artificial Sequence
  ENSG00000247867_0 (sequence is synthesized)
ttggcgcgggcccggggctggccagcagcctgctccgcgcggatccggggaatgcgtgagaggagagcagctctgagccctgcttccaaggggcgcgcccggttattcccctcgctccct

SEQ ID NO: 841105 - DNA, 120 bp, Artificial Sequence
  ENSG00000247867_1 (sequence is synthesized)
cagtccgaccccgggcgctcccccgcggagattggtgtgtgagcagaacagcttgagaatgtgttctaggacctggttacctttccttcatcatctctcaacccatgtgtatattgggaa

SEQ ID NO: 841106 - DNA, 120 bp, Artificial Sequence
  ENSG00000247867_2 (sequence is synthesized)
aatcagagaccggtcaagtcatgcctccaagaagggcttgaccagggtgggctttgtggtcccaccaagaagcttggacttcatcctgttgggggatggaccaaaggaggggtgtgagca

SEQ ID NO: 841107 - DNA, 120 bp, Artificial Sequence
  ENSG00000247867_3 (sequence is synthesized)
gagaggcatccacaaggatggctcatcctccacccacttcaatcaccagtgttgtacagccattggggattacacgtgcagctttgtagcttgtgagaggtttgacgcatgcacctctga

SEQ ID NO: 841108 - DNA, 120 bp, Artificial Sequence
  ENSG00000247867_4 (sequence is synthesized)
gatatgcttcagtgatagcagtcttagctcctccattgcacacatgaggagggtaagtggccagcctataaggcagagaggacacttgccctaagagaggcacaggtagaaagacagaaa

SEQ ID NO: 841109 - DNA, 120 bp, Artificial Sequence
  ENSG00000247867_5 (sequence is synthesized)
caaacgtgtatcaagctccctgctctgtgctaggccctggcttgtgtgagcttgcccagtcctcacagccaccacacaaggggtgatcacccccaccgctttgcacatggggtgcaggga

SEQ ID NO: 841110 - DNA, 120 bp, Artificial Sequence
  ENSG00000247867_6 (sequence is synthesized)
ttccagagcctcaaacctgtacgcttttcctgcctcccaaggctgggagagggagcacctgtaacagcagaactactggacgaaagcaaattcccatccatcgcctccacagccctggga

SEQ ID NO: 841111 - DNA, 120 bp, Artificial Sequence
  ENSG00000247867_7 (sequence is synthesized)
tccatcgcctccacagccctgggagagacgaggttttgccatgttagccaagatggtctcaagctcctgacctcgtgatccgcccatctcaacctcccaaagcgctgggattacaggcgt

SEQ ID NO: 841112 - DNA, 120 bp, Artificial Sequence
  ENSG00000247867_8 (sequence is synthesized)
atttcttcaaatacaaccttgagagcccaagaagtgacagggatgacaggctgctggggtggtcccacagttcctcagggtttgtctctcacttgcccagcccacacaccctatctccag

SEQ ID NO: 841113 - DNA, 120 bp, Artificial Sequence
  ENSG00000247867_9 (sequence is synthesized)
ggctctgtggaacacagtttgaaactcctgctgcacagaatagcaagtgcagggccaggggatgcactgaagacgggcattcaggtggatgccccctgcacactgtggaaaggcaccctg

SEQ ID NO: 841114 - DNA, 120 bp, Artificial Sequence
  ENSG00000247867_10 (sequence is synthesized)
gtgggctggcacctggtcagacccatcttcctgagcaagggcactggacaggcagggacaaagctgattctgagcagatctggcacaaggaagtcaccagaaaacactattgggttcctc

SEQ ID NO: 841115 - DNA, 120 bp, Artificial Sequence
  ENSG00000247867_11 (sequence is synthesized)
aagggtaaagactggatcttatccatcttgttgcccattcctgcctctgcaatcatgtgcactctgggaacttggaaaatacattgtggcatccagtattaaatctcatggtacctagaa

SEQ ID NO: 841116 - DNA, 120 bp, Artificial Sequence
  ENSG00000231290_0 (sequence is synthesized)
agaagcgaggcagccgtgaggcggaggacaggctgggggatcccaaagggtgcgctccagcccccaacccaggcactgggactctggtggcaccctgggtggcaggcaagccttgaaatc

SEQ ID NO: 841117 - DNA, 120 bp, Artificial Sequence
  ENSG00000231290_1 (sequence is synthesized)
aagtgcacgagccttggaaaggaggaccgggagagttatggcatttatgaatgaagaagagaaagagaatcactcggatgggaaaagttaactggattgttcccacctgcatggatcacc

SEQ ID NO: 841118 - DNA, 120 bp, Artificial Sequence
  ENSG00000231290_2 (sequence is synthesized)
tgaaaccacatggtgagaagttgaaggtcacacagctgaagcaacttagccgtctcgccttgcggcctggaacccctggcaatttccggagcaccggcaagagacttttgcacagtttct

SEQ ID NO: 841119 - DNA, 120 bp, Artificial Sequence
  ENSG00000231290_3 (sequence is synthesized)
gcttggagtctaccgactgtctgtctcagaggtctggacagctgcttgttacatttggctcacgctagcttaaaaaaggaatttatggaccttactgcagaacgtcccaattcttcaggc

SEQ ID NO: 841120 - DNA, 120 bp, Artificial Sequence
  ENSG00000231290_4 (sequence is synthesized)
acccccggcctcccgttggttcccccaccccaagagccttcccaccaggcttcagggtgacaaacgcttggatttgatggggctgagacttgcttgtgcctttgttgatggcagggcact

SEQ ID NO: 841121 - DNA, 120 bp, Artificial Sequence
  ENSG00000231290_5 (sequence is synthesized)
tttattgaaacttgttgaaaggagctagcttcgaaggctcctccaagattctacaccacagggggaagcaggactttgatttaagatactcacatctgtcaaccacaggcattcattcag

SEQ ID NO: 841122 - DNA, 120 bp, Artificial Sequence
  ENSG00000231290_6 (sequence is synthesized)
ttttctctttcatttggggaaggaagggagaaaatgaatcagaggctgatttttttttttctggcctgttttccccaagctccaggaaattaagaaacatgccattagttttagcaaaca

SEQ ID NO: 841123 - DNA, 120 bp, Artificial Sequence
  ENSG00000231290_7 (sequence is synthesized)
atttgaacaaagtaaaaccagatctcccaccaaaggccgaggaccatgaggggtctgagtgcccctggccctgtttgtggactctgcgggtcgtggaggagccatgaagtgggaagagag

SEQ ID NO: 841124 - DNA, 120 bp, Artificial Sequence
  ENSG00000231290_8 (sequence is synthesized)
cttgggtgatacaggatggtgtgcgtgacagtcctccctgtgtcttctttgctaccatatttatcatagcttagatgtgtgtggcctggtggcaccaaaggtgaacagaaagcatttttg

SEQ ID NO: 841125 - DNA, 120 bp, Artificial Sequence
  ENSG00000231290_9 (sequence is synthesized)
gggcgccatggcccagacctcagcctgaacgttgtgggaagccagtgggtgtctgcatgtgttggcgagaaccagtgggcatctccttggaagccagtccccaaggtggctctagatggc

SEQ ID NO: 841126 - DNA, 120 bp, Artificial Sequence
  ENSG00000231290_10 (sequence is synthesized)
atgtaaaaggggcaggggacgggaacaaagaaaccagtgctggtgatcctgcccccacagtaaggtctgctttagtgtggacatgggacaggggccagcccctgctgctccctgggggaa

SEQ ID NO: 841127 - DNA, 120 bp, Artificial Sequence
  ENSG00000231290_11 (sequence is synthesized)
cacaggtccgtgggggtggctcaccgtcatgtatgtgattttgatgtttgtacatttgttgtaccacatgaaccagtcttggacggctgttctgagtaaatgggatgatgtgggtaaagc

SEQ ID NO: 841128 - DNA, 120 bp, Artificial Sequence
  ENSG00000231290_12 (sequence is synthesized)
ccccaagaccagagcctggcacagggccgtgctggataatgctgactcatggtgatgaggggaaggaggaggcaggatgccatgggtgaggagtccaggctccagtgctgctgaaccacc

SEQ ID NO: 841129 - DNA, 120 bp, Artificial Sequence
  ENSG00000231290_13 (sequence is synthesized)
atccaccagtatgatctcagcaagcctctctccacctggacccagatgattcacccgttaaacatcccaggcacattgaagggagatgaacagcgtccagcatggtcctcagctgtgaga

SEQ ID NO: 841130 - DNA, 120 bp, Artificial Sequence
  ENSG00000231290_14 (sequence is synthesized)
agccatacactcgccttttccaccctacaactttccgtcatctggggtgcaggtttctttcctctctttttacttattacaaggtaaaatacagtcttattacagaaaactagaaaccag

SEQ ID NO: 841131 - DNA, 120 bp, Artificial Sequence
  ENSG00000231290_15 (sequence is synthesized)
aaaagcccatcacacagtcattcattcaacaaatgcgtattgggaagggtggggatgagcccctggtggaaatggggtgaagctgtggactttctctgggtgcgatgaaggctgacggag

SEQ ID NO: 841132 - DNA, 120 bp, Artificial Sequence
  ENSG00000231290_16 (sequence is synthesized)
ggctttgagcatcctcaagattcagaagtctgttctcagtcatcagcagctgtaccaggagaggaagaacctctgaagtgttctggctccaaaagctagtgaaagtgcagatttcctgag

SEQ ID NO: 841133 - DNA, 120 bp, Artificial Sequence
  ENSG00000231290_17 (sequence is synthesized)
aaggagtgaagcttagggccctgccaggcagtgatgctttctcaactttgggggcagtaaaatgtacagactctggggaaggagaccaggaaggaggctgcaaagtgtgcatgctctggg

SEQ ID NO: 841134 - DNA, 120 bp, Artificial Sequence
  ENSG00000231290_18 (sequence is synthesized)
aagggggcagggaaggctggcaaaaagctgttggggacccagccaggctgcttcccttggaggcccagcctgagatgtgtttcccaccatatatggcagaaatgatttcaggtgctatgt

SEQ ID NO: 841135 - DNA, 120 bp, Artificial Sequence
  ENSG00000231290_19 (sequence is synthesized)
agataagccacgaactatcattgaatcttttcttggttgtattgtgaaagaaaaagtctctgttgggtgctggtgtatcttcgacaccacttaacacttgtcaagctctcctttactgag

SEQ ID NO: 841136 - DNA, 120 bp, Artificial Sequence
  ENSG00000231290_20 (sequence is synthesized)
gtaaagcagtcctcaggctcagagcttgtgaccagggagcggtatctagccaaaattttatttcaatgctttgttttcattgtctttaaaacaaaagatggttatcttccatttgccatg

SEQ ID NO: 841137 - DNA, 120 bp, Artificial Sequence
  ENSG00000231290_21 (sequence is synthesized)
gaaggtcacacagctggtgcctgtgttcctgctcggtttctggattgcttggtacttaaatgaaacatcttattaatcatttcccgggaatgctgtgcaggcaaaaggaaaacaaaggca

SEQ ID NO: 841138 - DNA, 120 bp, Artificial Sequence
  ENSG00000231290_22 (sequence is synthesized)
gaaaatgaaacacatcggattctgtccaggccgggcacagcaacctggcccatccatgtggagcctgcagtgaccacttccgctgtctgcacaaaactggagggaggctgggggtgctcc

SEQ ID NO: 841139 - DNA, 120 bp, Artificial Sequence
  ENSG00000231290_23 (sequence is synthesized)
aagtataagtttcctcatcagcaaaccggaaagagaaagaccgacctggaggctggttatggggataaaataaatatgtccttatatatgtgtataaagccccagcacaaacagcagtcg

SEQ ID NO: 841140 - DNA, 120 bp, Artificial Sequence
  ENSG00000231290_24 (sequence is synthesized)
ccgcatgggtcagggaggcactgcttggagccttatgtgaccgtgttctcacattatcttccaactggtttgggagacaggtactgctatgatctctgtattacacagaagcaaactgaa

SEQ ID NO: 841141 - DNA, 120 bp, Artificial Sequence
  ENSG00000231290_25 (sequence is synthesized)
agaaggtgcttgagctctgtgctgatagatggaatcccagattttccatttaacttttgatgttgtgtcgtgggagtggtgttccacctttggagggttttaaggactctttattaacca

SEQ ID NO: 841142 - DNA, 120 bp, Artificial Sequence
  ENSG00000231290_26 (sequence is synthesized)
gcaagggttcttgtgcctttaaggaggagtgattgagaggcacctgcaaggccggtggaggctgctctggaggcctgcctcttccagcccacaggccctgcttcctggaactggtgtggg

SEQ ID NO: 841143 - DNA, 120 bp, Artificial Sequence
  ENSG00000231290_27 (sequence is synthesized)
ggctgtggtcaggatccaagcaggaagcctgagttcatgtctattcttcaccgagcatggccaagtccatttgagtccatctccagaagacatgtcaaaatcacccacttatctccatct

SEQ ID NO: 841144 - DNA, 120 bp, Artificial Sequence
  ENSG00000231290_28 (sequence is synthesized)
tcaactcctcccaggtcaccaccttatcttccttagatgactgcactagcttcctgactggtttccctaaaacccattcatttatctatcccttctaccatttctcccaccaaacatcca

SEQ ID NO: 841145 - DNA, 120 bp, Artificial Sequence
  ENSG00000231290_29 (sequence is synthesized)
tcccttctaccatttctcccaccaaacatccatctcaccacccaccatcctgccacttatctttccctccctccctcattcccttcctccatctatctctccatccatccatccatccat

SEQ ID NO: 841146 - DNA, 120 bp, Artificial Sequence
  ENSG00000231290_30 (sequence is synthesized)
atttagtggttacaatgtcccaagcactgtatgggtcccagtgtaggtggaaaaggaaacagatttcctgacctcaaacaaaacaataaatttcaaagtaagaagccccacgagggagga

SEQ ID NO: 841147 - DNA, 120 bp, Artificial Sequence
  ENSG00000231290_31 (sequence is synthesized)
agtgtaggctgtcttgaaagaggatgatatcaggagacatatatggagagggcttggaggaggtgatgcgcctcaccaggaggtgatatactgatagagggactatataatttattgatc

SEQ ID NO: 841148 - DNA, 120 bp, Artificial Sequence
  ENSG00000231290_32 (sequence is synthesized)
aaacggggccattttggggagtgagaggaggagctattaaacattttttcagggcaccaggtgcatgtcaggactggccaggtaaactgagctgcatggctacctcctacaagccaaggt

SEQ ID NO: 841149 - DNA, 120 bp, Artificial Sequence
  ENSG00000231290_33 (sequence is synthesized)
tcacagcatgagctgagaaaggggcaaggaggagagaaatgccccttcctttccttggggagagcctgcaaacctacatttaaaagaactaggagaaggctgggtccggtggctcacgcc

SEQ ID NO: 841150 - DNA, 63 bp, Artificial Sequence
  ENSG00000231290_34 (sequence is synthesized)
actaaaaaatacaaaaattagctggagggaactagggaggcagaggttgcagggagccgagat

SEQ ID NO: 841151 - DNA, 120 bp, Artificial Sequence
  ENSG00000231290_35 (sequence is synthesized)
tgagcactgggtgcaggatccagtcttctgaggccctgaaaccacatgtggtcctaatatgctatttagaaaatacaaagtggaaagaagaaaaatgaaagtcacgcatcgtccttcaac

SEQ ID NO: 841152 - DNA, 120 bp, Artificial Sequence
  ENSG00000231290_36 (sequence is synthesized)
ccggggacaactcctgctaacactcggatggatgaatttcacatatacatataaatattctcatctacagtcaaatttaataatgtgaatgccttaataaaccactaattcttcaatttc

SEQ ID NO: 841153 - DNA, 120 bp, Artificial Sequence
  ENSG00000231290_37 (sequence is synthesized)
aaacgcatctaggcaaagtgtggacccgaccaggcgggttttcctccttctcgcaactcctcctcctgcccccctccctcccaaatctcatctgagtgagtcagctgagggtggcagctc

SEQ ID NO: 841154 - DNA, 120 bp, Artificial Sequence
  ENSG00000231290_38 (sequence is synthesized)
gggtgggaagtggtggcctctaagtgtctatcaactgtgaagactgcaaagagggatccatggctgttggagcaatgagatacgcgatgacgtagacagatccggaaagcgcatcgtctc

SEQ ID NO: 841155 - DNA, 120 bp, Artificial Sequence
  ENSG00000231290_39 (sequence is synthesized)
ggaggtcttgagccacagagctggctccagaggcattgggaggagaaacgcggcaggcctggctcactcattatatttcaagatctatcccagcttgtcacaacatggactgtgtaactg

SEQ ID NO: 841156 - DNA, 120 bp, Artificial Sequence
  ENSG00000231290_40 (sequence is synthesized)
agacgattcgcggttggtgttcccatgctgaggcatgtgctgccccggcccttggttgctgcgcaatttgctctctatggactgtacctggggtgcctaccctggacttcagacaagctt

SEQ ID NO: 841157 - DNA, 120 bp, Artificial Sequence
  ENSG00000231290_41 (sequence is synthesized)
cttcaagagtagcccctgccagagctggagccaacagcaagagcagcccagggccactctgcccaggctcagaggcatcactgggaaagaggcaggggcagaaggaactggggcgggaag

SEQ ID NO: 841158 - DNA, 120 bp, Artificial Sequence
  ENSG00000231290_42 (sequence is synthesized)
ccctgaagggtgtcgagtcccaggacaagggactggggtgtgtcccagcagacccccagggaagcagcagctttggactcgcctgacccaaccccttgctgccagacaggcttaaattgc

SEQ ID NO: 841159 - DNA, 120 bp, Artificial Sequence
  ENSG00000231290_43 (sequence is synthesized)
cccaactttccccatgaagctcggacaggaggacggaggagcaactgccttctggggtcagagtctgtccccgctcctgcaggccggaagcacgtgcggtcagcggtgggccagagcctc

SEQ ID NO: 841160 - DNA, 120 bp, Artificial Sequence
  ENSG00000231290_44 (sequence is synthesized)
tcagcctctcagcaagggccttcctgtagctctcggctcctccaacagccccatcccttagcacaggcggggctggcggagcactgcaggggccaggtgcagccaccgtgcagcaaggca

SEQ ID NO: 841161 - DNA, 120 bp, Artificial Sequence
  ENSG00000231290_45 (sequence is synthesized)
cagctgcctgatcaaaccagatcaaaagccattcgatcatccaaggactattttcattcgatatttattgatttctaccactcgctggggctgtacagggccctgagcttgccgtgagga

SEQ ID NO: 841162 - DNA, 120 bp, Artificial Sequence
  ENSG00000231290_46 (sequence is synthesized)
gcacatttcagcccccaccccctcggggctcacagtctggtagaggaagcacatgaaataaaagaatttgcacatgtaaatatctcattacaaatgcgcaagagccatgaaggaaaaaaa

SEQ ID NO: 841163 - DNA, 120 bp, Artificial Sequence
  ENSG00000231290_47 (sequence is synthesized)
aagaacacgatgggaggtaatcacaaagtccacttattttagacaaagtggttggcgacagccacatttttgccaagacctaaaggatgggcaacagtaaaaataaaaatcatcatcatc

SEQ ID NO: 841164 - DNA, 120 bp, Artificial Sequence
  ENSG00000262294_0 (sequence is synthesized)
actgggcccctgactccaggaaaacagaggcatcttccaatgtccttggagccatgagaccccgaaacacctaccgggaacagaggggcttcacccagacaggccccaccagggaggagg

SEQ ID NO: 841165 - DNA, 120 bp, Artificial Sequence
  ENSG00000262294_1 (sequence is synthesized)
aggccgctctccctcccaccaccgttgtcgggggtgacccgaggtgttccagatgaggagctgaatcactgggacttaagtcaataagtggcagccaccaggcaggctccatcgtccacc

SEQ ID NO: 841166 - DNA, 120 bp, Artificial Sequence
  ENSG00000262294_2 (sequence is synthesized)
tcagaccatctcgggtttgctggtcttctggactagcgcagccagaaagaacccaggaaggaagcctcacgtctgacacaagaaccttcggtgctaacccgagggcggtatgtgcatcct

SEQ ID NO: 841167 - DNA, 120 bp, Artificial Sequence
  ENSG00000262294_3 (sequence is synthesized)
tgatccagggactgtgagcaacagggccccgtggccaggacatctctcaccctccagttaaaatctcgccagttgagtctgcccatgaaagtaggcgctgaactgcccaataaatccaca

SEQ ID NO: 841168 - DNA, 120 bp, Artificial Sequence
  ENSG00000262294_4 (sequence is synthesized)
agtaagagttgcaagaaggagccaaaaagggctgagctgaatgactcatatatgaaataatttgataattaatataaataggaaatttaaagtctccagctgagtgacagaaaacacctt

SEQ ID NO: 841169 - DNA, 120 bp, Artificial Sequence
  ENSG00000262294_5 (sequence is synthesized)
aaaaagctcaagagagaggaaaggaagaaaataaacctataattgcaaaataaaagcattgaaagaagccgtgctcaaggtaagatgctacagatgcaataaattcatgttttaacatta

SEQ ID NO: 841170 - DNA, 120 bp, Artificial Sequence
  ENSG00000262296_0 (sequence is synthesized)
gtgatagaataatgaacatttcctgtggggctggcactgtgttctacatagaactcatttaatacaacaaccgtataacgaggaagcaagccatgtgcatcaattatcaggaacgcttta

SEQ ID NO: 841171 - DNA, 120 bp, Artificial Sequence
  ENSG00000233834_0 (sequence is synthesized)
aagaagaaaggggaagcaggtggaaaagcaattaaaaaaaaatcagcatctctctctagcctattatctcctgttagacacagcccagaaaatgaatagagacaagtcctggctgggtct

SEQ ID NO: 841172 - DNA, 120 bp, Artificial Sequence
  ENSG00000233834_1 (sequence is synthesized)
gggttcagaaacataatagaaggattcatctaatctgtcggccactgtggaggaagtgaaccttctagatcctgctgactcatacaatgagttttgtgtggaccatcagacaaaagggct

SEQ ID NO: 841173 - DNA, 120 bp, Artificial Sequence
  ENSG00000233834_2 (sequence is synthesized)
gaggccccttagcctgcttgtgataacacgcaaggaaatatgggccaactcttcacatgaacacaagatatttccatgctagccttttgcaagtaacaacagagagagctctgtgcagtt

SEQ ID NO: 841174 - DNA, 120 bp, Artificial Sequence
  ENSG00000233834_3 (sequence is synthesized)
ttcactggaatgcctgtggattgcttgtgtcataactgtaatctaaagagttgtccatttgttgattcctttgtatttgtattggtagaattgccactatcaaaccaagatctttagctg

SEQ ID NO: 841175 - DNA, 120 bp, Artificial Sequence
  ENSG00000233834_4 (sequence is synthesized)
cctttgtatcaacttctttggagcttatgtgattttccagaaaatttccaaggcatagttttgtccctaagtcccatgaatatgtaatattttgtgtctctctattaaaatagcactttt

SEQ ID NO: 841176 - DNA, 120 bp, Artificial Sequence
  ENSG00000233834_5 (sequence is synthesized)
ctgtgcactttggactatttaaatagttcttaaccactgatctcctccctcagggaagggaattctttccacagttgctagttcctcacacctctgcctctatgggattctcctggtccc

SEQ ID NO: 841177 - DNA, 120 bp, Artificial Sequence
  ENSG00000233834_6 (sequence is synthesized)
ggggaagcaggtggaaaagcaattaaaaaaaaatcagattctctttcggtgattcagagctgaaggtgcctcactgccctgtggaacaggtgaataaagccttcccagcatctctctcta

SEQ ID NO: 841178 - DNA, 120 bp, Artificial Sequence
  ENSG00000226026_0 (sequence is synthesized)
aactacagacgcgaagctcagcctctcggtttgggaattttcttggaggccgaggccctgcgcctctgtctgcacccaaggcgaccgcccagcttacccccggctcttctgagcacaggg

SEQ ID NO: 841179 - DNA, 120 bp, Artificial Sequence
  ENSG00000226026_1 (sequence is synthesized)
aggcctcccagcaaagcctgaaccctctaagtttagctgcaggcttcgaaccccgaccgtccccgccgagccttgggctgctgaggtggggatgaactgggcgaaagacacttgggagtt

SEQ ID NO: 841180 - DNA, 120 bp, Artificial Sequence
  ENSG00000226026_2 (sequence is synthesized)
gggcgtccacagaatgaatacaggaatgtctgtctgcctgtctgtgtatactctgtgaaggaatataccaacattacatgctgacccaaggatagccagtacgccttctgcaagaggaaa

SEQ ID NO: 841181 - DNA, 120 bp, Artificial Sequence
  ENSG00000226026_3 (sequence is synthesized)
gtttgtgtttcaaaatccatcaagtgaaagagaacagaaaaattcagagggcgtcattcacgtgtacaacgtggagggtgaaagaatgagctggaagcaggcatcataaagcaccatcgt

SEQ ID NO: 841182 - DNA, 120 bp, Artificial Sequence
  ENSG00000226026_4 (sequence is synthesized)
gatatgctgcagcaaaatgagtgaataaacaagaaagtcaaagacatgggattgaggaaacagtgacttcagcccaagattggaatgacagggagccccaggccactgggcagcagcaca

SEQ ID NO: 841183 - DNA, 120 bp, Artificial Sequence
  ENSG00000226026_5 (sequence is synthesized)
gacagcaatctgttcagactgcagcagaacagcaaactcctggagcaggtatgtgggagctgggaaaagacggttgcagagatggagtagtatccttgaggatatgaagctactcaaata

SEQ ID NO: 841184 - DNA, 120 bp, Artificial Sequence
  ENSG00000226026_6 (sequence is synthesized)
tgtagtaaaggcaaatgatggggggaaaaaaggaaggcaattagaaactccaaaaaaattacacagaaaatgtaatctgggtcctgcaatcaactattttaatacaatcataataaatat

SEQ ID NO: 841185 - DNA, 120 bp, Artificial Sequence
  ENSG00000226026_7 (sequence is synthesized)
tttactgattttctatgtgtagatcaactgactacaaagaaaaactatgattacagaatacaaagtagatatttttaattctcagcaatacaaaagtacaagtgataaaaactgagaagc

SEQ ID NO: 841186 - DNA, 120 bp, Artificial Sequence
  ENSG00000226026_8 (sequence is synthesized)
aaagtaggagttagagaagtagaagaaaaaattggggcactaatatcttcatttttaaaagtatcaagaggtggcgggggttccaagatggccgaataggaccagctccagtctacagct

SEQ ID NO: 841187 - DNA, 120 bp, Artificial Sequence
  ENSG00000226026_9 (sequence is synthesized)
cccagtatgagcgacacagaagacgggtgacttctgcatttccaactgaggtaccgcattcatctcactggggcttgtcagacactgggtgcagcccacagagtgtgagccgaagcaggg

SEQ ID NO: 841188 - DNA, 78 bp, Artificial Sequence
  ENSG00000226026_10 (sequence is synthesized)
tcacctgggaagcacaaggggtcaggaattccctttactagccaagggaagctgtgtgcgcttttccaacagccttaa

SEQ ID NO: 841189 - DNA, 74 bp, Artificial Sequence
  ENSG00000226026_11 (sequence is synthesized)
agcagaaacttctgcagaattaaacgtttgagatctgagaacagacagactacctcctcaagtggacccctgac

SEQ ID NO: 841190 - DNA, 120 bp, Artificial Sequence
  ENSG00000226026_12 (sequence is synthesized)
ctgagaacagacagactacctcctcaagtggacccctgacccctgagtagcctaactggtaggcacctcccagtaggggccgactgacacctcatatggctgggtgcccctctgagacaa

SEQ ID NO: 841191 - DNA, 71 bp, Artificial Sequence
  ENSG00000226026_13 (sequence is synthesized)
aggtctggagtggacctacagcaaactccaacagacctgtagctgaaggtcctgttagaaggaaaactaac

SEQ ID NO: 841192 - DNA, 120 bp, Artificial Sequence
  ENSG00000226026_14 (sequence is synthesized)
ttctaaaaatcagagcacctattctcctccaaagtaacgcagctcctcgccagcagcagaacaaagctggacagagaacaactttgacaagttgagagaagaaggcttcaaacgatcagt

SEQ ID NO: 841193 - DNA, 120 bp, Artificial Sequence
  ENSG00000226026_15 (sequence is synthesized)
taaaggaggatgttcgaacccatcgcaaaaaagctaaaaacatgcaaaaaagagtagacgaatggctaactacaataaacagcatacagaagacctcaggtacccaatggagctgaaaac

SEQ ID NO: 841194 - DNA, 87 bp, Artificial Sequence
  ENSG00000226026_16 (sequence is synthesized)
aagtgagaaggaagcctctgagaaatatgagactatgtgaagagaccaaatctacgtttgactggtatacctgaaagtgatggggag

SEQ ID NO: 841195 - DNA, 76 bp, Artificial Sequence
  ENSG00000226026_17 (sequence is synthesized)
tctctcggcagaaactctacaagccagaacagagtgggggccaatgttcaacattcttaaagtaaagaactttcaa

SEQ ID NO: 841196 - DNA, 60 bp, Artificial Sequence
  ENSG00000226026_18 (sequence is synthesized)
ctttacagacaagcaaatgctgagacattctgtcaccaccacaccactgcaaaaacatgc

SEQ ID NO: 841197 - DNA, 64 bp, Artificial Sequence
  ENSG00000226026_19 (sequence is synthesized)
aacatggaaaggaacaaccagtactactgattagcgggcaaaataaccagctaacatcataatg

SEQ ID NO: 841198 - DNA, 120 bp, Artificial Sequence
  ENSG00000226022_0 (sequence is synthesized)
tttttattcagtatttgaaaaatgtgctacttccttctgaccaccaagattttggatgagaaatcctctgctgtttaaatcattttcccccagagggtgagccagcttcgggattgcaac

SEQ ID NO: 841199 - DNA, 120 bp, Artificial Sequence
  ENSG00000226022_1 (sequence is synthesized)
gacaagagacctctggagcttcgcctttatagctgattgctttttgaatcccagccatcccagcctccacagtctgaagcagaaacatctcatccaaactgcatttgtgtgagcaagaaa

SEQ ID NO: 841200 - DNA, 120 bp, Artificial Sequence
  ENSG00000226029_0 (sequence is synthesized)
gcagcagtgagaccctagagaattctctaaaagaattaaaaatgaaaaaaagccacaacacttcttttgcctgaggattctgtaagaagcagtttttattgttatggaaatagccactct

SEQ ID NO: 841201 - DNA, 120 bp, Artificial Sequence
  ENSG00000226029_1 (sequence is synthesized)
gattaagaaactgtagagaggagaaagaaaatgaaaattgaagattctcttgcccattgaattaagggtaaggagattgcattaaaggatcttcgggagcagtaacttttttatgtcgat

SEQ ID NO: 841202 - DNA, 120 bp, Artificial Sequence
  ENSG00000226029_2 (sequence is synthesized)
ttcacatagcattacttcacatcgagtcagttttaagtacttggagggtggaaatcagaaagcttagatgtagaggaagctttattagaagtgtgtaccatggctgggtgtggtggctca

SEQ ID NO: 841203 - DNA, 120 bp, Artificial Sequence
  ENSG00000226029_3 (sequence is synthesized)
gagcaagactgtctcaaaaggaaaaaaaaaaaaagtatgtaccattgaagatcagcacttggattgtggagacagacctggccttaggatctaggctatcccctggttagacgtgtggcc

SEQ ID NO: 841204 - DNA, 120 bp, Artificial Sequence
  ENSG00000226029_4 (sequence is synthesized)
acaggctgttccttcacctgagcgtcactcggatgaggcactagcagatgcacattgcattgtttgaccttaatgacctttctctggagtcaggtaagtacccagaacagttcatcatgg

SEQ ID NO: 841205 - DNA, 120 bp, Artificial Sequence
  ENSG00000226029_5 (sequence is synthesized)
tagggaggaggaggtggcacagctgatgacacagccctcaggaatctagcctgaaaagcaccttgtggggtctggggccaggagcaagggacagcttgatgctgtccatcactaactgga

SEQ ID NO: 841206 - DNA, 120 bp, Artificial Sequence
  ENSG00000226029_6 (sequence is synthesized)
atcccagctggaaaaaactcattacaggaccagaatctccaggaaaactcaatcccaaaccaggcatcacttcaattacacccctgactggagtttacaaactggtgggtggatggtaga

SEQ ID NO: 841207 - DNA, 120 bp, Artificial Sequence
  ENSG00000226029_7 (sequence is synthesized)
agatggctgctttcttggggggtatgctagacctcacttgccctctgcacaacagaatttggatgcactgggaggtgtggcagatagactcccaggtggtcactgtgatccccacctgct

SEQ ID NO: 841208 - DNA, 120 bp, Artificial Sequence
  ENSG00000226029_8 (sequence is synthesized)
gttcacagccttatgtactccctgccccttgagatggcctagacctgtgactgctaaccagtagagtgccacaaaggtgacaagatgttattttcatggttgccttatgtaagactgcaa

SEQ ID NO: 841209 - DNA, 120 bp, Artificial Sequence
  ENSG00000226029_9 (sequence is synthesized)
catctgccttgctgagaaattctcttgctggctttgaagaaggaagctgtcatgttgtgtgagctgcccttgggagagggtcaggtggctaggaactgaggtagcctctgacagccaaca

SEQ ID NO: 841210 - DNA, 120 bp, Artificial Sequence
  ENSG00000226029_10 (sequence is synthesized)
ctgaagctcagtccagcagtctgcaagaaagcaaatgctgccagcaaccacacaagcttggaggctgatcactcccaggtaagccttcaggtgagaccccaggcctgaccaacactgact

SEQ ID NO: 841211 - DNA, 120 bp, Artificial Sequence
  ENSG00000226029_11 (sequence is synthesized)
gcagccttgcagaggaccagctaagctgtgcccagactgtcccataggaacagatggtaaatgtattgtgttaagtcgctaagtttctggtaaggttatgcagcaatagataaccaacac

SEQ ID NO: 841212 - DNA, 120 bp, Artificial Sequence
  ENSG00000226029_12 (sequence is synthesized)
aaaggttagcaaagtgtgtttgaggtgggaatcagtgtggaaaagagagaatctggatagacttaatagctgtagggccttgggaggtcccttatgatgctcctttgggccttcctgttg

SEQ ID NO: 841213 - DNA, 120 bp, Artificial Sequence
  ENSG00000226029_13 (sequence is synthesized)
cctttaagtaatgcttattgtttattgctaaagtaatgcttaactctctgctaggcactattctatgcacttataaaactcattgcatcatctctacaaccccatgaggtaaggacttgt

SEQ ID NO: 841214 - DNA, 72 bp, Artificial Sequence
  ENSG00000226029_14 (sequence is synthesized)
cattgcatcatctctacaaccccatgaggtaaggacttgttttttttgtgttttgagacagtctcgctctgt

SEQ ID NO: 841215 - DNA, 88 bp, Artificial Sequence
  ENSG00000226029_15 (sequence is synthesized)
gcctcctgcgttcaagcagttcttctgcctcagcctccgagtagttgtgattacagacgtgtgccagtacttccggctaatttttttg

SEQ ID NO: 841216 - DNA, 120 bp, Artificial Sequence
  ENSG00000226029_16 (sequence is synthesized)
ctgggattacaagtgtgagccaccgcacctggccacacaacaaactttctacacattgatgtatgatattccactgaggggagaggcaccctcctggcttaactgaaggggtgtaccaca

SEQ ID NO: 841217 - DNA, 120 bp, Artificial Sequence
  ENSG00000226029_17 (sequence is synthesized)
aactgaaggggtgtaccacagaaggacatggtggacatcacacacagattctgtggcataggatgaactgctaaactaggatattttaaagtcctccaacatctgtaattgttttccgtg

SEQ ID NO: 841218 - DNA, 120 bp, Artificial Sequence
  ENSG00000226029_18 (sequence is synthesized)
gtgaacaagtgtcgtgtgtctcaagaagacaggccacagtgacctctttgaaagctttctgtcaagtctcttatccaaggggagcaaaatcacaaaggtcccaggcgattttttttcctc

SEQ ID NO: 841219 - DNA, 120 bp, Artificial Sequence
  ENSG00000226029_19 (sequence is synthesized)
tttcctcttttcttcataaatcttggttttgcttttatttgacgaaaacaatctgatgcctgttctcccttctatacaatggtaaattagcatgcaagtagctatccctttattattgtt

SEQ ID NO: 841220 - DNA, 120 bp, Artificial Sequence
  ENSG00000226029_20 (sequence is synthesized)
tgatagatttttgcagcggctatgtccgtaaaaattagcccacctgagatatatcactggagccaacagaaccctgcacccaacaggcaccttgtgcagacctggacccttacagctgtt

SEQ ID NO: 841221 - DNA, 120 bp, Artificial Sequence
  ENSG00000226029_21 (sequence is synthesized)
ggctcatgttcctttggttcttctaatgaatatcatgagtagaaactgagctctttggcttttacccactaccatgactctagtacattttctctctctcgtttctctcatttttgtatc

SEQ ID NO: 841222 - DNA, 120 bp, Artificial Sequence
  ENSG00000226029_22 (sequence is synthesized)
atgattttctgccatcaggggcatcagtgtgggttcctggttttgatggtatggagtgaacttctgggatcgttttatgactgtataacagttggtattcttctgttgatgaagatttgt

SEQ ID NO: 841223 - DNA, 120 bp, Artificial Sequence
  ENSG00000226029_23 (sequence is synthesized)
gttgtacccagtttttccttagtataaaaaggaggttaataagaacatttttgctagaagccttgttggatgtattgttcattttacgggggtaatcaataaatgtaagcgtgcttcttt

SEQ ID NO: 841224 - DNA, 120 bp, Artificial Sequence
  ENSG00000283141_0 (sequence is synthesized)
gatggagcctccaggcctgcccagcacctactgccctgggacaggctctctttcaagtcagctcctctgtccaggaagcatctgagaggccctgtggtcctggccaaggaggcaggccgt

SEQ ID NO: 841225 - DNA, 120 bp, Artificial Sequence
  ENSG00000283141_1 (sequence is synthesized)
aaggagggcaggcccgaggacgtaggtgtggcaacactccgtgtggagtagtctctgaggccagacctgcggttcctgtttcctgtgccctggggacccagagaaagaagacggatgggc

SEQ ID NO: 841226 - DNA, 120 bp, Artificial Sequence
  ENSG00000283141_2 (sequence is synthesized)
gctgcagtggggcggagcaggcctgagcccagctcgaggaaagcttgccttctcgtctagtgtccccgtgttttacataattagaaatgtgtgtgtgaaaaaattttaagcaattgaaag

SEQ ID NO: 841227 - DNA, 120 bp, Artificial Sequence
  ENSG00000283141_3 (sequence is synthesized)
gagccggggtgtggtgggaagaattattaaataataaaaaaaaaatcaatcctcagtttggcctggccagacgagtgtttctcggctcagtatttgttaaagggcgtggcaaacactagt

SEQ ID NO: 841228 - DNA, 120 bp, Artificial Sequence
  ENSG00000283141_4 (sequence is synthesized)
atgtgagcaaattccatgaacaccagatggcttcaaggggcttccaggtaatttgaaggaaaaaaagtttaaggacagaagatgatgctgaaaaaataaaatcagctctaaaccacccca

SEQ ID NO: 841229 - DNA, 120 bp, Artificial Sequence
  ENSG00000283141_5 (sequence is synthesized)
gcatgctgggagagcctgatgtgctccacgaggagcccccaaaagccgaggggaacacaggacacttccccgaaggcacaggggcctggtcctgcccctgggccactccaggtgcatgca

SEQ ID NO: 841230 - DNA, 120 bp, Artificial Sequence
  ENSG00000283141_6 (sequence is synthesized)
tgggaggcgatggctgggcagctgtacatccacctttagagacactatcgggtttccaaagcggctgcaccattttacacacccaccagccaggtgaactggacatctcttctgctggtt

SEQ ID NO: 841231 - DNA, 120 bp, Artificial Sequence
  ENSG00000283141_7 (sequence is synthesized)
ccatctgggttcacccatgggtgggccccactctgcaagagggtccatagggctggaccgtccaggttactgctggcaatggtcctgctggtggctctgtccctgcttcattcaggttgc

SEQ ID NO: 841232 - DNA, 120 bp, Artificial Sequence
  ENSG00000283148_0 (sequence is synthesized)
attctctcctggcggagggcctactgtgtgtcccgggctgcaagtgaacaacaggacaaaacgccctggcctcgcggagctgatcctgccctgccctgtaactcgggtgtctccgcgggc

SEQ ID NO: 841233 - DNA, 120 bp, Artificial Sequence
  ENSG00000283148_1 (sequence is synthesized)
cgagcctggcacacaatgagagcagtgaggcacagagaaggtgaccgcctgaggtatctcggttggtaagcagcagcgctgggcttggaatccggtttgaacctgcagcatgtgacccgc

SEQ ID NO: 841234 - DNA, 120 bp, Artificial Sequence
  ENSG00000283148_2 (sequence is synthesized)
tgttctctgaatgctgctgctacacgaggttattctgctgctatggagcaggctgcttgtagctgggcctgaagctggcatttccaggacttggtgcttctgctgagatggaatctcact

SEQ ID NO: 841235 - DNA, 120 bp, Artificial Sequence
  ENSG00000283148_3 (sequence is synthesized)
gtgcagtagcacgatctcagctcactgcagcttctgcctcccgggttcaagcaactctcctgcttcagcctcctgagtagtgagattacaggctgcaccacaacgcccagctaatttttc

SEQ ID NO: 841236 - DNA, 72 bp, Artificial Sequence
  ENSG00000283148_4 (sequence is synthesized)
tcagcctcctgagtagtgagattacaggctgcaccacaacgcccagctaatttttctatcgttgaccttagg

SEQ ID NO: 841237 - DNA, 120 bp, Artificial Sequence
  ENSG00000283148_5 (sequence is synthesized)
gatatgagccaccgcatccggcctattctgctagcctattctgctaatttttaagtctgtgcaactttcaagggaaattaaatcccgatatgccctactcattttacaccaaagtcatca

SEQ ID NO: 841238 - DNA, 120 bp, Artificial Sequence
  ENSG00000283148_6 (sequence is synthesized)
aaatgtggctttcaacgcccctttgaagtcctaaaactagacttggtcaagaggcccaagtgttttaagtgcatcggaaacaaagaaacatgttaataaaatgtttccttcttggcagca

SEQ ID NO: 841239 - DNA, 120 bp, Artificial Sequence
  ENSG00000260328_0 (sequence is synthesized)
aggtgttggaatcggtgggtggattgccagtacatttgcaccgtgtcctagagagcctctatgcatttcaactctgattctccttcaccatctacgcgcagcccacaaccgcaggacccc

SEQ ID NO: 841240 - DNA, 120 bp, Artificial Sequence
  ENSG00000260328_1 (sequence is synthesized)
acccctggctctgaatctcccatgtcctggcgccaagcaggtgagtcagcctaggaggaggaagggcttccggaagccaagcccatgctggggtggtgagaaacaactttcctatgcaag

SEQ ID NO: 841241 - DNA, 120 bp, Artificial Sequence
  ENSG00000260328_2 (sequence is synthesized)
gaggtgcctgagcaccccctgatgatcaagctggagccccctcacctccccgaagtgtgctggaggaaaggccagaaagaggcagcagtcttcacccactgaggctgagtttctcactca

SEQ ID NO: 841242 - DNA, 120 bp, Artificial Sequence
  ENSG00000260328_3 (sequence is synthesized)
tgccaagttttacataagctggggaccatgtgcttcaaggctagaggtcttggtgggcccagggccttggaggggcctggatgaccaaggggtccgtggcttaggccctggctctgcatg

SEQ ID NO: 841243 - DNA, 120 bp, Artificial Sequence
  ENSG00000260328_4 (sequence is synthesized)
gggaatcttgggaaggttggaagcccacagcccctactgagaaaggagccacgggccagatcttttgcacaaatcctgcctgtgctccttgactgtctctccccaccggggtcacggtga

SEQ ID NO: 841244 - DNA, 120 bp, Artificial Sequence
  ENSG00000260328_5 (sequence is synthesized)
ccaagcaggcaggagactccatccgttcacaggactagcatcctgggagggccctggcctgagcgagctgctgcaggggaccctcatgctggatggttggccactcagcacccttttctc

SEQ ID NO: 841245 - DNA, 120 bp, Artificial Sequence
  ENSG00000260328_6 (sequence is synthesized)
tgtggagcagggatgacatttgagagccaccaaagatgggcaggaaaaacaaaggccaccacagaggaagctgaaggcagaaagagatgcagagaaagtgggagaaactcggctgtgctt

SEQ ID NO: 841246 - DNA, 120 bp, Artificial Sequence
  ENSG00000260328_7 (sequence is synthesized)
tgtgggggccctgcagggacatcagctcctgaaggggtgaaagaaagggtcccctgaactttgacactgttcttctcgaggcctggccagccctgtggctccttagaggaatctgggtgc

SEQ ID NO: 841247 - DNA, 120 bp, Artificial Sequence
  ENSG00000260328_8 (sequence is synthesized)
ctgctgtccctagtacctgacaagccccaggtgagaagacctgagttcacctgcgctgccacgtgtaacctgatggccccggcaccctcgcagggtttgaatagctgccctttccacctg

SEQ ID NO: 841248 - DNA, 120 bp, Artificial Sequence
  ENSG00000260328_9 (sequence is synthesized)
tttcccggattttccacaccacccagaggctcatattcaaccccacagcctacaagtcagccaggggcctttggccacatgtactgatgatgagaatcactggattgtaagctgtaaaag

SEQ ID NO: 841249 - DNA, 120 bp, Artificial Sequence
  ENSG00000260328_10 (sequence is synthesized)
cacaaggatggtgttttgttccccgctaccccctgcacctgaggcccagcgaggattgctgctcggatgaaggagagcgagtgttcgtggagctctttgcagaagccacgggaagccctt

SEQ ID NO: 841250 - DNA, 120 bp, Artificial Sequence
  ENSG00000260328_11 (sequence is synthesized)
cctgtgccttctcaggtttagtctcagacagccccactttccagatgaggaaacagaggctaagaaaggagaataaacttgtccagaatcagtggtgaagctgggatttgaaccccatcc

SEQ ID NO: 841251 - DNA, 120 bp, Artificial Sequence
  ENSG00000260328_12 (sequence is synthesized)
agcagagttgggccagacgcgtcacctcccaagctctgcggcacccaagggttcccagggtcctcttcctccatttggctcttttcttctctggactctcccaccttcgaggattggact

SEQ ID NO: 841252 - DNA, 120 bp, Artificial Sequence
  ENSG00000260328_13 (sequence is synthesized)
ccttgcagggagagcaaagcagagaacagaggaggcccatctgaggagagagtgctggagcagatggagcacagagagagcccccaaaccttagcctcacctggagagtggctccctgca

SEQ ID NO: 841253 - DNA, 120 bp, Artificial Sequence
  ENSG00000260328_14 (sequence is synthesized)
agctgagcccctgtgtgcccagaagtgacataggcattcaggaaagggactgagggaggaaagaaggagccattcctcttcccaggggcgcctgccctgggttcctgagggacgctccat

SEQ ID NO: 841254 - DNA, 120 bp, Artificial Sequence
  ENSG00000260328_15 (sequence is synthesized)
gtttacatctccaaagcccagtcccaaacacgccagagtgcaatgccctccctcagacccagggccatcctcagagcagccgggaggcagcctgtccacccttaccacaggcaggtcgcc

SEQ ID NO: 841255 - DNA, 120 bp, Artificial Sequence
  ENSG00000260328_16 (sequence is synthesized)
agcctgtccacccttaccacaggcaggtcgcccaggcagcctcctcttagagctcctgaattctggagcatgaaatagaaatgtgaaaaacaggctggcgtggtggctcacacctgtaat

SEQ ID NO: 841256 - DNA, 120 bp, Artificial Sequence
  ENSG00000260328_17 (sequence is synthesized)
catttgagatcaggagtttgagaccaacctggccaacacagtgagaccctgtctctactaaaatacaagtaaataagccaggcatggtggtccacacctgcagtcccagttacctgggag

SEQ ID NO: 841257 - DNA, 120 bp, Artificial Sequence
  ENSG00000260328_18 (sequence is synthesized)
gagagaaaataaatactacaaaatgttaacaatgggtgaatgtaggtgaagagtatgtggcagggtgttttttattctcgcaaattttgtgtaggtttgaagttaccacagaatagcaaa

SEQ ID NO: 841258 - DNA, 120 bp, Artificial Sequence
  ENSG00000260328_19 (sequence is synthesized)
tataagaatgattcctgcagacacacgagtgatttcaactgttcacagggctcaggcaggaagcagatctcttgccctccctctgatccaggtcacttagtccagtccctgaaagcagtg

SEQ ID NO: 841259 - DNA, 120 bp, Artificial Sequence
  ENSG00000260328_20 (sequence is synthesized)
gatggacaaccatgccaccctctttcttccaatacaccttattttgtatcctgccctttttgtgtagcattagatcatgagcattttcctctgctataaatgtcccctcaaatatgttgt

SEQ ID NO: 841260 - DNA, 120 bp, Artificial Sequence
  ENSG00000260328_21 (sequence is synthesized)
ttcttgtgactccctagtgttctacccacgatttcctcggctgctccaccttggtggaattcagtgattcttctgccttttcaccattgtaagtgatgctttgatgaaaagctttgtagg

SEQ ID NO: 841261 - DNA, 120 bp, Artificial Sequence
  ENSG00000260328_22 (sequence is synthesized)
tttatctgtgctgcacctctgaccagtcttttctggaagactctaaggaaggagacaggggcatggaccactggcttttgaaggcattcggtgggtcctgccatgccgccttcccacatt

SEQ ID NO: 841262 - DNA, 120 bp, Artificial Sequence
  ENSG00000260328_23 (sequence is synthesized)
ccagaagggtggtcccagtgaacaacccaccagcacggggccccgctccatggtgccccagcaaggccagcgtccctatacaggaaaattaaaccatttgccaattcaaggcactccaga

SEQ ID NO: 841263 - DNA, 120 bp, Artificial Sequence
  ENSG00000254467_0 (sequence is synthesized)
gaacagaatcagggccttgtgcagaataagagagagatggaaaagtctctgggaagtgaggtgatggattgattaaaggtgaaggaaagcagtgagcatcagtaaacccaacaaagaaca

SEQ ID NO: 841264 - DNA, 120 bp, Artificial Sequence
  ENSG00000254467_1 (sequence is synthesized)
gattcagggtggatccagttaaaacagtttcacaattttctccaataacagtttgcaaccattcttgaaggctgcagacttggcagacttggcaaggtggaacaggagaaatacaaagta

SEQ ID NO: 841265 - DNA, 120 bp, Artificial Sequence
  ENSG00000254467_2 (sequence is synthesized)
agtatggagctgatatggtttggctgtgtccccacacaaagtcttatcttggattgtaatccccataatctccacatgtcaagggagagcccaagtggaggtaattgaatcatgggggtg

SEQ ID NO: 841266 - DNA, 120 bp, Artificial Sequence
  ENSG00000254467_3 (sequence is synthesized)
ggtggtttcccccatgctgttgtcacgatagtgagttctcaggagatccgatggttttataagtgtttggtagttcctcctgcgttcattctccttcctgctgccttgtgaagaaggtgc

SEQ ID NO: 841267 - DNA, 120 bp, Artificial Sequence
  ENSG00000254467_4 (sequence is synthesized)
tgaggcctcctcagccatgctgaactgatgtggagctgagaagccccgatttccactttctgactcctagactcagctgatttgaacccctcagtggaatagcagcagcccatccgcagc

SEQ ID NO: 841268 - DNA, 120 bp, Artificial Sequence
  ENSG00000254467_5 (sequence is synthesized)
agcagcagcccatccgcagctttcctagaagttcctgacctagtagcctgaaatgcattctaatcaagtgagacaaggctgtggctggaagactccccgtgagccagggaattgaagctg

SEQ ID NO: 841269 - DNA, 120 bp, Artificial Sequence
  ENSG00000254467_6 (sequence is synthesized)
cctctgcaagctgaattcgtaattgccatgagaaggcaacagcatcaaatcctccagcgtgccaattctttaggcgacggacgaattgacaactcctcaccttacataggcaccaactga

SEQ ID NO: 841270 - DNA, 120 bp, Artificial Sequence
  ENSG00000254467_7 (sequence is synthesized)
ctgttggtctttgcccagctctgggtttgtacctgcccttctgcccacagcgatggtgtcattttgaccttgatctgggaattgctgttcttgtcagcctgttggctccctctgttgagg

SEQ ID NO: 841271 - DNA, 120 bp, Artificial Sequence
  ENSG00000254467_8 (sequence is synthesized)
gagacagctcttttgagtgtccaggagatggaagtacaaaggtggacaaatatctacactcggaaggcagacaatagtaccccccaatttctgtttgcacataggtaacttggattcatc

SEQ ID NO: 841272 - DNA, 120 bp, Artificial Sequence
  ENSG00000254467_9 (sequence is synthesized)
atgtgaagtatgtcctttgttctcaaggatcttatgaaatacctgggcaaacaaaactaacaacctgaattatgttgtatcatactactgttaaaatccttcaatggctctctattataa

SEQ ID NO: 841273 - DNA, 120 bp, Artificial Sequence
  ENSG00000254467_10 (sequence is synthesized)
tcaatggctctctattataattagcatactgtgttcaataaggcttctttcattccccatcccatccccttagcatttttttttttttttttgagagatggaatcttgctctgtggccca

SEQ ID NO: 841274 - DNA, 120 bp, Artificial Sequence
  ENSG00000254467_11 (sequence is synthesized)
cttagcgtttatctctatgtttgaaggctgttttatgtgtacacctgtaactttctgctcttgggcttgtttttctggccacgagtatgctaatcctgcacagggccagctgtaagtaac

SEQ ID NO: 841275 - DNA, 120 bp, Artificial Sequence
  ENSG00000254467_12 (sequence is synthesized)
agagagttaatgcctgacagtgaagggatttggttaataatgagctcatgtccatccatggtgtcacaaatgacagcattttttttaatgggtgaatagtatttcattgtgtatatatac

SEQ ID NO: 841276 - DNA, 120 bp, Artificial Sequence
  ENSG00000254467_13 (sequence is synthesized)
cacattttctttattcatttgctgttggatacttaggttgattctatatcttggcttttgtaaatagcactgaaataaacatggacatacagatatgtcttcaatatactgttttccttt

SEQ ID NO: 841277 - DNA, 120 bp, Artificial Sequence
  ENSG00000254467_14 (sequence is synthesized)
cctttgaatatgtacccatcagtgggattgctggatcacatggtagttgtatatttaattttttgaggaaccacagtggggtgaagttggtttgaacagcagggtattgtatattacaaa

SEQ ID NO: 841278 - DNA, 120 bp, Artificial Sequence
  ENSG00000254467_15 (sequence is synthesized)
atagctagaaggggggcttttgaatgcccttatcacaaagaaataatacatgcataaggagatggatatgctagataccctgatttgatcattttacaacatagatatgcattgacacat

SEQ ID NO: 841279 - DNA, 120 bp, Artificial Sequence
  ENSG00000254461_0 (sequence is synthesized)
ctggttctcctgcaccagacgccgcacctgcgcccgcagcttctgcttctctgattctacagcccccaggtggctcgacaatgccaagatcacctgtgcaaccagcccagcctctgctgc

SEQ ID NO: 841280 - DNA, 120 bp, Artificial Sequence
  ENSG00000254461_1 (sequence is synthesized)
cacagccagtaggttactgctccctgcctcagggctagcgcttgcccacagaactctgctagatggctgaaggaccacccaaagactccatccccacttctgctgaggggccacagcatc

SEQ ID NO: 841281 - DNA, 120 bp, Artificial Sequence
  ENSG00000254461_2 (sequence is synthesized)
gtcccttttctccaccgtcatagccaccccttaattccaagcaccagctctcatttgaattccagcagtggcttcctaaccactcattggagagtgattccatcctcgacccactgaggt

SEQ ID NO: 841282 - DNA, 120 bp, Artificial Sequence
  ENSG00000254461_3 (sequence is synthesized)
ttattctccacatctcagccagagagagtttttagaaactcaagtcagactgtgttgcctgcctgcttaaagccctccagaggctttctgatttcctgagaataaaacccaaaccaacca

SEQ ID NO: 841283 - DNA, 120 bp, Artificial Sequence
  ENSG00000254460_0 (sequence is synthesized)
ggtggcacacccaggaaggcaccggatacatggcaggccaccgatttgcaaggcagatctaatgctaggccagagcaaagaaattggatgtttttagatacttgatctgtggtctctgta

SEQ ID NO: 841284 - DNA, 120 bp, Artificial Sequence
  ENSG00000254460_1 (sequence is synthesized)
cttcctcaaaatgatcagtgcagcttagacacgtttttgtaccttgtgactccacgaaaaggacttcaaaattacccagtgcccagaagttccccagggagtcttgcgccagtggattag

SEQ ID NO: 841285 - DNA, 120 bp, Artificial Sequence
  ENSG00000254460_2 (sequence is synthesized)
gggtggcgtaaaacaagtgttgctgacctcagtgccgagtccaccatgctgtctgtgctactcccctgcctggggaccacaggattgggatagagctggccatcctctgccacttaaggg

SEQ ID NO: 841286 - DNA, 120 bp, Artificial Sequence
  ENSG00000253209_0 (sequence is synthesized)
tcgtggaacaacagaatacgccgcgtctgtgaaaggcagattcaccatctcaagcgatgattccaaaagcatcgcctatctgcaaatgaacagcctgaaaaccgaggacacggccgtgta

SEQ ID NO: 841287 - DNA, 120 bp, Artificial Sequence
  ENSG00000236951_0 (sequence is synthesized)
agagggaggaggtgagccagcctgaagaaaagtcaagcacagccccaggaataagccgcaaaactcctacagatccaaaaggacctggaggatgcctaaggcctcccggactttgtcagg

SEQ ID NO: 841288 - DNA, 86 bp, Artificial Sequence
  ENSG00000236951_1 (sequence is synthesized)
ggacctggaggatgcctaaggcctcccggactttgtcaggagttgcactccgttgcctgggctggagtgcagcgtcatgatctcca

SEQ ID NO: 841289 - DNA, 120 bp, Artificial Sequence
  ENSG00000236951_2 (sequence is synthesized)
tgggtccactttgcccctcaacagcattactggacacctttgtcagactagcaatttccacagacaccctctgtgaacatttttcaacatcatctgcagcagtgagaggccagtttgatg

SEQ ID NO: 841290 - DNA, 120 bp, Artificial Sequence
  ENSG00000236951_3 (sequence is synthesized)
cttgcctttgtcatggttcctgcctttctcatagatctcctgccaggacaaggatgataggaggcaaggaagtcaagggcccagccccattcactgaaagctgcctctgggatctcagaa

SEQ ID NO: 841291 - DNA, 120 bp, Artificial Sequence
  ENSG00000236951_4 (sequence is synthesized)
agaagaccacaccactcccaagaacagacatctcccagtgttttatcgtccttcagccaacccagggagagacagcagcagtcctgtctgcagggctttttaaatgtagctcaaattcag

SEQ ID NO: 841292 - DNA, 120 bp, Artificial Sequence
  ENSG00000236951_5 (sequence is synthesized)
ttcccagccaagcaactgcttcacgtcgtgaaggagaattcctctatcatcgtgagatttcattctagaacagagaatgtcagcagcaataaggtcacagagagatgaagatataatgtg

SEQ ID NO: 841293 - DNA, 120 bp, Artificial Sequence
  ENSG00000236951_6 (sequence is synthesized)
ccgtgaagatgcatcatggtggactgtggtctcttctctgtggaatcctcgggagagtcccatgatcctaggagagggtgagagggcagatgtaagccagcattaagaagcctcaagcag

SEQ ID NO: 841294 - DNA, 120 bp, Artificial Sequence
  ENSG00000236951_7 (sequence is synthesized)
agccgcaggaataatccgtgaattccctaacaatcctaaaggatctgcaggatgcttcaggcctgcctagatgttgtagggatcatgaatccgctgtaaattgagaggctggctgagacc

SEQ ID NO: 841295 - DNA, 120 bp, Artificial Sequence
  ENSG00000236951_8 (sequence is synthesized)
tgccaggtccaaataacctccccctgaggaaaaaaaaaagccactcttctagaaagaagaggagcacatcaaacccaggaacagaaatatttcactgctttattctccagtgtacatccc

SEQ ID NO: 841296 - DNA, 120 bp, Artificial Sequence
  ENSG00000236951_9 (sequence is synthesized)
atggagaaacactagcagtccagtcctcagggccccttgaatttacttcatattcagttcctagctgagcaggaccttcacgtcactccttcattgtcttggaatttcattttgggacag

SEQ ID NO: 841297 - DNA, 120 bp, Artificial Sequence
  ENSG00000236951_10 (sequence is synthesized)
atactttgagcagccataacatcagataaaggattgtcccatgagcctaggagagggcagatgtaagccagcctgtagtagcatcaagaagaggcccaggaataaaccacaatatttctc

SEQ ID NO: 841298 - DNA, 120 bp, Artificial Sequence
  ENSG00000236951_11 (sequence is synthesized)
aggatccagaaacatctgcaacatttttcagatgtgtctagacattgtagagaaagaagaggaacacaccacagcaaaaataagacatcttccagtgttttgttgtcctgtggtgaaccc

SEQ ID NO: 841299 - DNA, 120 bp, Artificial Sequence
  ENSG00000236951_12 (sequence is synthesized)
agggagaaaatatagcagtactgtctgcaaagccgcttgactttacctcgtatatgggtcacagctgagcacgtgtttcatgtcgtgagtgggcactccaacatcgccttgagatttcat

SEQ ID NO: 841300 - DNA, 120 bp, Artificial Sequence
  ENSG00000236951_13 (sequence is synthesized)
cctggaacatagagggtgagcagcaataagttcagcctagggttttctgggtctgaatccacgtcttccaaactaaaactttctgagttcacagaggaagaccctcatggaaatccactg

SEQ ID NO: 841301 - DNA, 120 bp, Artificial Sequence
  ENSG00000236951_14 (sequence is synthesized)
cggaatccacagtgcccctcaactgcactactgttcaccagtttcaggcttgccatcaccacagagggcatctgagatattgtctgaacctcatctgcacccatgagagaccagatcgag

SEQ ID NO: 841302 - DNA, 120 bp, Artificial Sequence
  ENSG00000236951_15 (sequence is synthesized)
gcagactgatagctctgacagctaggtgcctgtacctgcctcaggaatgcatatgcactagtctcaggacaccagtcctcattgtgagctctggctagcatcacaatgaatgtcatcatt

SEQ ID NO: 841303 - DNA, 120 bp, Artificial Sequence
  ENSG00000236951_16 (sequence is synthesized)
gcctagagacaagttcctgcctcttgaggaaggagacctccctgtaggtatgtcggctgtggactcttgcctgtcttctctgtgggatccaagagatagtcccatgatcctacgagagag

SEQ ID NO: 841304 - DNA, 120 bp, Artificial Sequence
  ENSG00000236951_17 (sequence is synthesized)
tagatgtgagccagccaaaagaaacatcaaacagaggcccaggaataaattgcaaaatccctaaggatccaaaagatctgcaggattcctcaggcctgcctagatgttgtaggggttcta

SEQ ID NO: 841305 - DNA, 120 bp, Artificial Sequence
  ENSG00000236951_18 (sequence is synthesized)
tgaacagcaataaggacagatacaggctggctgacagttctgacagcccgtcgcccaagtctgcatactcttaggcacaaggactgagctatgggctcgggttagcatcacaacgaaggc

SEQ ID NO: 841306 - DNA, 120 bp, Artificial Sequence
  ENSG00000236951_19 (sequence is synthesized)
caccattgcctaggcataagtctctgcggctttgcggagaagaactctgtggaggttagtcagtggtggactctcgcctcatttctctgtgggattcccgtgatagtcccatgaggctag

SEQ ID NO: 841307 - DNA, 120 bp, Artificial Sequence
  ENSG00000236951_20 (sequence is synthesized)
gtcctacagccaacccaaaaacggcactaccagtcatgttgcagggccccttgaattaacctcgaattaggtttccagatgagcaggtgcttcatgttgtgaaggggccctcctccatca

SEQ ID NO: 841308 - DNA, 120 bp, Artificial Sequence
  ENSG00000236951_21 (sequence is synthesized)
tctccgtgggacctgattcttgcacacagcctctttcacgaatggagccagaagagcagttttcagtgaccatctcagtttggaaaagcctcctccttcagtgggtctcagccacagagt

SEQ ID NO: 841309 - DNA, 120 bp, Artificial Sequence
  ENSG00000236951_22 (sequence is synthesized)
catcccgaaggggctctaaggtcaataattttagggtctgacagttgattatcacagacagactttttcatgatagcagatcatctctgtctatatcattttcctctgcttaggcaggct

SEQ ID NO: 841310 - DNA, 120 bp, Artificial Sequence
  ENSG00000236951_23 (sequence is synthesized)
gacagctctgacagccaggcacttgaatctacctggcaaatgttcatgctctagtctcagtgcaaaaggcctgtttgggagttctggctagtgtcacaataaatgccgccattgcctagt

SEQ ID NO: 841311 - DNA, 120 bp, Artificial Sequence
  ENSG00000253202_0 (sequence is synthesized)
agtgatgacacagtctccagcttccctgtctttgtctctggagaaaaaagccaccctgacttgcagggccagtcagtgttagcagctactaagcctggtaccagaagaaacctgagcggg

SEQ ID NO: 841312 - DNA, 120 bp, Artificial Sequence
  ENSG00000253202_1 (sequence is synthesized)
catctatggtacagccctgatttgtgatagtgggtcggggacagggcttactctcaccatcggcagcctggagcctggagcctggagatttgcacttcatcactgttatcagcatagtag

SEQ ID NO: 841313 - DNA, 120 bp, Artificial Sequence
  ENSG00000253200_0 (sequence is synthesized)
cctacaaaattttctagttaaccatcaggcaatcaaagcaccccactctgccaagcgttctcagtgacaagggtttctgtgctgtcaggctgctcagccatgctccctgcactctgcgcc

SEQ ID NO: 841314 - DNA, 120 bp, Artificial Sequence
  ENSG00000253200_1 (sequence is synthesized)
accttcccttgcactaggtgtgctacttactagctgtgcggcctcagtccatgccgagcaagggtgcagggaatgagctaaggcacaggaagcgctcggaacagagcccggggtaaaggt

SEQ ID NO: 841315 - DNA, 120 bp, Artificial Sequence
  ENSG00000253200_2 (sequence is synthesized)
gcgcggtcacggtaagcactatgacagcccgaggtggcagggtactcaccagcggggcctctgactctgtagccgggccctcattctgtgcctcatccttgggctccttgaccacctcct

SEQ ID NO: 841316 - DNA, 120 bp, Artificial Sequence
  ENSG00000253200_3 (sequence is synthesized)
ctttgatggcttcttcctccttggtggcttcttccttggccgcctcctccttctcaggttcaggtggggacacgaccttttcaggaaggctcagtagcatcttataaactctatagccaa

SEQ ID NO: 841317 - DNA, 120 bp, Artificial Sequence
  ENSG00000253200_4 (sequence is synthesized)
aatccctctggagcatctccagaaacagctcggccagcaccatcacctgatggggaggtgggagggtccatgagcatcaggaagaaagactgcttcaggcccacaaatcccagcccacag

SEQ ID NO: 841318 - DNA, 120 bp, Artificial Sequence
  ENSG00000253200_5 (sequence is synthesized)
cctccccaagactcttgacacctgcctcaaaagagatcctttcctttggcctccgatcctccacaatcccatggagggacaggtttacacagccagggcgtgcgatgacagcaggttcta

SEQ ID NO: 841319 - DNA, 120 bp, Artificial Sequence
  ENSG00000253200_6 (sequence is synthesized)
gggggggtggaggggcctctgggagatcagtgtccgtttcctgctgtgtggtggcctctggagtttctgcgttccgtctagaagtgtctgctgcttgctccaaggcatcaggtgcctgtt

SEQ ID NO: 841320 - DNA, 120 bp, Artificial Sequence
  ENSG00000253200_7 (sequence is synthesized)
cagtaggctccgtttcctgtgacaacagctgaaatgagaccctctgggtcccgggattaggccacctatatcccccgctgctggctaaggcacagccttaccccttgtgcctcctgggtt

SEQ ID NO: 841321 - DNA, 120 bp, Artificial Sequence
  ENSG00000253200_8 (sequence is synthesized)
gggggagctgcctctgcagctttctgctggcacagggcctcccactcctccaaagtaggcatgatggtccagacatccggcaggtacaccaccactgtctgaagccgccgggggggtccc

SEQ ID NO: 841322 - DNA, 120 bp, Artificial Sequence
  ENSG00000253200_9 (sequence is synthesized)
ggctgcaggtactgaaactcggcaaagcgccacctgcacatggcaaaaggaggtactaacttctttagtgacaactccacgcagacaccacgttcacaggcaagggcttcagtttccagt

SEQ ID NO: 841323 - DNA, 120 bp, Artificial Sequence
  ENSG00000253200_10 (sequence is synthesized)
gcaccctacaaggtgcaaggacaactccagggagtctcaagtgcagcctggtggctcagccagattttggcatacaccccaccctaccctgaggcaccagagggggaaggaacgggacta

SEQ ID NO: 841324 - DNA, 120 bp, Artificial Sequence
  ENSG00000253200_11 (sequence is synthesized)
gggggcagagagctaaccagcagaaaggggcagggaccgggccttcccaacaaaacctccccaacctggtgcgttggtgcagctgaggctcaggaagcccactcaccacttggtacagcc

SEQ ID NO: 841325 - DNA, 120 bp, Artificial Sequence
  ENSG00000253200_12 (sequence is synthesized)
gctcaaatcaatgccagtctgggcctgcgcacagcggatggcggtacgcaccagcacctgcgggtcagcctgggggtcgaggccatccagggaaggagaccattcacccccaaccagcac

SEQ ID NO: 841326 - DNA, 120 bp, Artificial Sequence
  ENSG00000253200_13 (sequence is synthesized)
tgcctcctcttctttcctgcccagcaaaaactgcaagaagagatcagggatacaaaacaaaaaactacattacctgggtctcccactgcagggcaaggctgccacccatcaggatgaagg

SEQ ID NO: 841327 - DNA, 120 bp, Artificial Sequence
  ENSG00000253200_14 (sequence is synthesized)
cagccggaagtggggaagtccaccacacagtgaggtctctatctgcaaacatgaaccagccacctcgctctctctgactagtcgtaacagctctgagctgcaccttcctcctgggtgaaa

SEQ ID NO: 841328 - DNA, 120 bp, Artificial Sequence
  ENSG00000253200_15 (sequence is synthesized)
tgaggggtgttcggctctgagatgcctcgttttatgcattcaggaacaggagccgaacactcaaaacatgacaggttgtgcacattacccgtgaatgcatctcctcctgctctccagctc

SEQ ID NO: 841329 - DNA, 120 bp, Artificial Sequence
  ENSG00000253200_16 (sequence is synthesized)
ttaccttaatctgcttcagaggatgctctggcgtctcccttggctcagccatgtcatccacaaagagcatgcaacaacgatacaattcctccaaccccggggaagagagcagcagtacct

SEQ ID NO: 841330 - DNA, 120 bp, Artificial Sequence
  ENSG00000253200_17 (sequence is synthesized)
gtgcaggaggagacactcagagctgccttcagcctccagaaatcagataagtgagagacgcctgtcagcttaccttcgaactataagcggggtcactgtctgcagtgatgggctcagcac

SEQ ID NO: 841331 - DNA, 120 bp, Artificial Sequence
  ENSG00000253200_18 (sequence is synthesized)
cagcgtctggagctgcctccttttcagaagagacctggatccggcttggatgatggagggaaaagggctggctcagggggaaggctgatagccaactcagatgcacggacagaaaatctg

SEQ ID NO: 841332 - DNA, 120 bp, Artificial Sequence
  ENSG00000253200_19 (sequence is synthesized)
aggggaccaggaggctgcggtaacggcgctggagttctaggaagtcacagatggggctacaggaagacagcaagggaatccagactgagcaaagactaaaacattcgaaatgaaaccatc

SEQ ID NO: 841333 - DNA, 120 bp, Artificial Sequence
  ENSG00000253200_20 (sequence is synthesized)
aaagatttgaaaaaatgggcgaattttttttcagtctgagaacttttgaagtaaggcacctctcaaggaagctagatcagatctgaccacttaatttacaaactctagatggcaaaagtc

SEQ ID NO: 841334 - DNA, 120 bp, Artificial Sequence
  ENSG00000253207_0 (sequence is synthesized)
caggaatctcatagagcactgcaccctaaaaattcttctatgaccttaggaagcaagaaggaccactcctactcctactccacatgatgcagaagcacttccccatcctctttcatgggg

SEQ ID NO: 841335 - DNA, 120 bp, Artificial Sequence
  ENSG00000253207_1 (sequence is synthesized)
caaagctgaacgaagtactatgccatgaaatgtggaacgtggcttcctgaacaatggcagacagtctgaatgttgaaatgtgaaggtgcaggggaatttgttcaccatggattgaaagtt

SEQ ID NO: 841336 - DNA, 120 bp, Artificial Sequence
  ENSG00000253207_2 (sequence is synthesized)
aaccaaacagaaatggcagataggagacagccagacatgcagtttccttctagtccttcagttcttcatgctgagtaagcacacctgccaaaaaacttgaatgagttttttcctggacac

SEQ ID NO: 841337 - DNA, 120 bp, Artificial Sequence
  ENSG00000253207_3 (sequence is synthesized)
ttaacaaagcaggtgccaacagggaaataaattatcgtgccgctttaaatatttccctgtttcatttcccacttacctccacaacacccgccctaaactcacaccttccaaattatcctg

SEQ ID NO: 841338 - DNA, 120 bp, Artificial Sequence
  ENSG00000253207_4 (sequence is synthesized)
ctatacaacacaatctcagacacacaatatctagaaatagtcaattatttgtatttttcaggaattatcattataattatttatttttttggagttggagaatgattgcatggaattaaa

SEQ ID NO: 841339 - DNA, 120 bp, Artificial Sequence
  ENSG00000253207_5 (sequence is synthesized)
aattatataatatttctccttactatgaaaataggattatgagaaatttttgaagtgttaaggtgatggtttacaaataacctcaactgacgcagggaaactaagcattaattgtatctt

SEQ ID NO: 841340 - DNA, 120 bp, Artificial Sequence
  ENSG00000253207_6 (sequence is synthesized)
gcgagacaattagattcaataatgagtttcacaatcttagtcaaaacggaagtatatgtttattgtcatttgtaataattaataaaacagatgtgttttagttttccatctatgttttta

SEQ ID NO: 841341 - DNA, 120 bp, Artificial Sequence
  ENSG00000253207_7 (sequence is synthesized)
gttaagctcatctgttccctattattttttatttttaaaaaattttgtcccttttacactttttaaattaataataattttttctttattttgcttatttgctacattcagtaagaatgt

SEQ ID NO: 841342 - DNA, 120 bp, Artificial Sequence
  ENSG00000253207_8 (sequence is synthesized)
ttaagatataacacaaaatgatagatgagttttattaaccatttctgtttttggctttttagtttctccccattcttgagaataaaagtatgctttaagccattgacagtagtttattta

SEQ ID NO: 841343 - DNA, 120 bp, Artificial Sequence
  ENSG00000253207_9 (sequence is synthesized)
tggacacaaattataggcctgggaggacaggtttcttaaaagatattttaagtctgaatttttttacttctaagtgtttatttaaattttttcttctttttccagtggacacctgcatat

SEQ ID NO: 841344 - DNA, 120 bp, Artificial Sequence
  ENSG00000253207_10 (sequence is synthesized)
tgaattatttcatctgaggcaaactacaatggaaaaataaaatcacctgaaatgatgaacagttaagttataaatgaatgctgacaatagaaaacagcacaatgtcttgtgtagtttaaa

SEQ ID NO: 841345 - DNA, 120 bp, Artificial Sequence
  ENSG00000253207_11 (sequence is synthesized)
tatatgtagaagtaagatgaatttaacaatgacacaaaatctgaaatggagtaaacacattttgaatgttctctaattctaacattactggatgaactggtagagaaaataatttgtatt

SEQ ID NO: 841346 - DNA, 120 bp, Artificial Sequence
  ENSG00000253207_12 (sequence is synthesized)
tgaactggtagagaaaataatttgtattcaatataataaataaaacacagaaaatgtaatgtctcataatatttagtagaaccagtaaaagaatattgaaagaatgtaactaagaaacca

SEQ ID NO: 841347 - DNA, 120 bp, Artificial Sequence
  ENSG00000253205_0 (sequence is synthesized)
gaaatcactcctattgaccccctggcatatttatagcctctctctttctgctgagactggtagttttcaccttcccttccctgtgttgtgtttattcagcagcacgctaaatcacacccg

SEQ ID NO: 841348 - DNA, 120 bp, Artificial Sequence
  ENSG00000253205_1 (sequence is synthesized)
ggcacaagtggagcattcatcaggaaccacgagcccctctttcagtctgccaaacctatccaattactggggctggaagagcctgcacaaacccttctgccagatgaaccttcttgctgt

SEQ ID NO: 841349 - DNA, 120 bp, Artificial Sequence
  ENSG00000253205_2 (sequence is synthesized)
ccctaattatttcgtccacttcaactctccccagctctgaacgttccttaattcctggatgtgacttccaattaattttgacccaggcagtatattctacaatgcttgacttcagggcta

SEQ ID NO: 841350 - DNA, 120 bp, Artificial Sequence
  ENSG00000253205_3 (sequence is synthesized)
cactttccagaaagacctcaaatcagactttcagctaactcccttgtggagaaggtgagacaatgagaaacatctccatgccaggagtgcgcaagagctgtctgcaaaaagatgtctgtg

SEQ ID NO: 841351 - DNA, 120 bp, Artificial Sequence
  ENSG00000253205_4 (sequence is synthesized)
agttcactccttgcatgacaccaagcagcaagtgtaattgaagggaaatgctctatccagataccaagaggactagtcacgagaccaggcctcaaaacaggaaaatggttccaatggaga

SEQ ID NO: 841352 - DNA, 120 bp, Artificial Sequence
  ENSG00000253205_5 (sequence is synthesized)
agtagagtatgagtcaagaattgagagatgagcaatatacattagcattataaaacactaaagaaagtatacatgcctagagcctctgaggcacactacaaagaagatgacctgaaaagt

SEQ ID NO: 841353 - DNA, 120 bp, Artificial Sequence
  ENSG00000253205_6 (sequence is synthesized)
gactgcttacagggtccacatataggtgacatgaaagttccctcagccttgtcagtatgaatgagcctgtaaagtgaagatgaatgagaaagggattagatgagtcatctgagtctgtaa

SEQ ID NO: 841354 - DNA, 120 bp, Artificial Sequence
  ENSG00000253205_7 (sequence is synthesized)
ggcccttgcaacaagagcatgaagatgataaaagaggacagaaagggaacaagttgggtgaaaagaaaacaatgaattagggtgaaaagatcaagccagtgaccaaactctctacaacta

SEQ ID NO: 841355 - DNA, 120 bp, Artificial Sequence
  ENSG00000253205_8 (sequence is synthesized)
gaaaagacttatcagtttctcatgaattcgaagttgttttaacattagaaaatcaactgatgtgattcagcacatttactgaatattatgatgacctgggcagagtcagaaaagacaact

SEQ ID NO: 841356 - DNA, 120 bp, Artificial Sequence
  ENSG00000253205_9 (sequence is synthesized)
ctagaaaatcaagcattatatttaatggtgaaacattaaacatttccttctgagacttggaatggacaaggatgacatcattacttctattcaacgttgtactgaaggccccagacacta

SEQ ID NO: 841357 - DNA, 120 bp, Artificial Sequence
  ENSG00000253205_10 (sequence is synthesized)
cagtaagacaaaaacagaatggaagataaaaggattggaaagaaagaaaccaaactgtcataactcacagatcaggtagtggctatatgcatactggctttgtaatcgttgcttaagccg

SEQ ID NO: 841358 - DNA, 120 bp, Artificial Sequence
  ENSG00000253205_11 (sequence is synthesized)
tatttgtgctgtgcattttttattaactcctatgcatcgccaggaccctgaaggtgtcatactcttcctgacaggacctaccagcttgacggagagctctatccccatttcctaaagaag

SEQ ID NO: 841359 - DNA, 120 bp, Artificial Sequence
  ENSG00000253205_12 (sequence is synthesized)
aaacctgatccttggaaatgttcagtggctgccccaagatgtcggcacaacctcttgtgctcttgcctcctgccacaagaacatatgtcccagaaaagggccactccatcagcctaggtc

SEQ ID NO: 841360 - DNA, 120 bp, Artificial Sequence
  ENSG00000253205_13 (sequence is synthesized)
cagaaatgagaggacacatggactgaacttgaagatggcccacagcagacctgcagtcaactctcagcctttatgtaatgcgggaaagaaggaaatgtgaatattatagactactaaaat

SEQ ID NO: 841361 - DNA, 120 bp, Artificial Sequence
  ENSG00000253205_14 (sequence is synthesized)
tctaaagttgtaacatagcaaaatgatcgatacaattagcagtggcaatcagtctagcatattgtcatgctatatgcatgctataaaactattgaacaaaaatatcactatcctatcatg

SEQ ID NO: 841362 - DNA, 120 bp, Artificial Sequence
  ENSG00000253205_15 (sequence is synthesized)
tatgactgcatcacgtgtgatgatcagaaatggagtgaagacagaaaaataagaaaattcaagaatgtgctacagagtgatcctctccctcttagagcacccacagaaaccactcatggc

SEQ ID NO: 841363 - DNA, 120 bp, Artificial Sequence
  ENSG00000253205_16 (sequence is synthesized)
ttctctgtctgcatcctctccacacaaacatattctttaaggtaccagccccatatcacatacctgtatgtcagcccataataggccttaccttagaagccaaagatccataactacaca

SEQ ID NO: 841364 - DNA, 120 bp, Artificial Sequence
  ENSG00000253205_17 (sequence is synthesized)
gtattcatgttgtataatgtggagcagcaccaaaaaataaagtggcagacaataatgcctatgactaaagtgaccccttgatcccctcccaaagcagtctccatatcataactgtcaatt

SEQ ID NO: 841365 - DNA, 120 bp, Artificial Sequence
  ENSG00000253205_18 (sequence is synthesized)
gtaaaaatagtatgtattttatatattctccctaataggtaactctgtattttaaaatcttaggctccaagttttaatctacttcgtcccatcggagtactttttttcaattttctcatt

SEQ ID NO: 841366 - DNA, 120 bp, Artificial Sequence
  ENSG00000253205_19 (sequence is synthesized)
tacaaggccatttttatttttgcctcactctgtgctgatggccccagatctactcagtcagtttcttctcttctatgatgtctatattcagacacctaggagattgacaactcctagaaa

SEQ ID NO: 841367 - DNA, 120 bp, Artificial Sequence
  ENSG00000253205_20 (sequence is synthesized)
taccactcactcaactgctcctttccccttctttcgtacttgggcataaactttactgtatcttaaacacatcttcctaaatgcctcacgactatgataaacttgacatgcttacaactg

SEQ ID NO: 841368 - DNA, 120 bp, Artificial Sequence
  ENSG00000253205_21 (sequence is synthesized)
ttcataaacatggctgtacctctaaatagactgggacttccttttgttaagaagccaaataagatatcatttacatcaaaaatgaaaaaataagggggcatctactttctataataacga

SEQ ID NO: 841369 - DNA, 120 bp, Artificial Sequence
  ENSG00000253205_22 (sequence is synthesized)
cctgggaaactcagaccatccttccttctgaggacgctgaaaaaaactgaatccaagaactaacaacatattaaggaactgccaggtggtgacccagcatgctaagaacacagcaaggaa

SEQ ID NO: 841370 - DNA, 120 bp, Artificial Sequence
  ENSG00000253205_23 (sequence is synthesized)
ccaagcaatattttaaagaatgagatctgtgttaacacttaaagacattttccacgttgacctcatgaaccccaaaagaaggatgaaagaagtctggaattaatgaatttagggaacctg

SEQ ID NO: 841371 - DNA, 120 bp, Artificial Sequence
  ENSG00000253205_24 (sequence is synthesized)
taaaactccaaaaatgtttaatgcaaaaatgtgatatttttggtaggaaatttccattgctttcaacagatttgggaagggacccaaaagatgactaaaagcatctgcattttaaccaaa

SEQ ID NO: 841372 - DNA, 120 bp, Artificial Sequence
  ENSG00000226159_0 (sequence is synthesized)
aaagtgcaaaactttttgggcatcaacatgacttttaaaagaaatgctcattggagcattttgaatttcaaattttcagattagtgatgctcagctagtaatattactgtaaatattcca

SEQ ID NO: 841373 - DNA, 120 bp, Artificial Sequence
  ENSG00000226159_1 (sequence is synthesized)
aaatctgaaaaagtctgaaacatctctggtctcaagcatttcagataagggacactcgatctaccaacaaaggagagagccccttgaaaagggcactctgaatcactcttctggtgaaga

SEQ ID NO: 841374 - DNA, 120 bp, Artificial Sequence
  ENSG00000226159_2 (sequence is synthesized)
tctctgggagttacatgcaagcggtgggcctgggcccatttccacatcccacaaagagtgcatttactttgtgtatccagaagagcaaaactcccaactctactgctttgttttcaaacg

SEQ ID NO: 841375 - DNA, 120 bp, Artificial Sequence
  ENSG00000226159_3 (sequence is synthesized)
gtaggcatctttggagatatgctatctgcaggttcagctttggagattcagaagtgacatgcacatgcctctgacactctcatggagttcacagttggagaagtcaccagaatggaacct

SEQ ID NO: 841376 - DNA, 120 bp, Artificial Sequence
  ENSG00000226159_4 (sequence is synthesized)
ttttgttaagctttccctttacctcagatagacagctgtccttgacaaacacaaagtcagtcttggctgtctcagaaaagcactgtgtgtcaatgtcagagagcccagtgggcctagcat

SEQ ID NO: 841377 - DNA, 120 bp, Artificial Sequence
  ENSG00000226159_5 (sequence is synthesized)
aaggttcacaacatttctaactcttcaaatcaagtattattttggaagttgccaacttaacaagcaactttgactccatgcaaactaaaaatggcatttgaaagttgaaatttcattaaa

SEQ ID NO: 841378 - DNA, 120 bp, Artificial Sequence
  ENSG00000226159_6 (sequence is synthesized)
tctgctgttttctgagacttcatccaactgggacatctgtttgtaacaccaaaggggtatgtaatcccaaaattatgattggattatattcaagtcattaaaaaagatgaattcatgaca

SEQ ID NO: 841379 - DNA, 120 bp, Artificial Sequence
  ENSG00000226159_7 (sequence is synthesized)
caacactctggagaggatgtcctaatgcaataaagaattttcagagagcaagtgactgctacaattccatgggtagagagggcaagagaggctgcttgttaatgccaaacaggaaagtca

SEQ ID NO: 841380 - DNA, 120 bp, Artificial Sequence
  ENSG00000226159_8 (sequence is synthesized)
tcaaaattctttctcttctgccctccagggaaacagcccactgctaaccaccaagttttgcaagatattcttttgtttcttgaaaatttattattccccccatcagcagctctagctgaa

SEQ ID NO: 841381 - DNA, 120 bp, Artificial Sequence
  ENSG00000226159_9 (sequence is synthesized)
cctctgagcactcactaagtttgttagactttattcaatcttgaattggacaaagtactttaataagggttgcctcccactgctccaggaacaggcaaaggtaatgtcctgatggggcac

SEQ ID NO: 841382 - DNA, 120 bp, Artificial Sequence
  ENSG00000226159_10 (sequence is synthesized)
tggcataggatattgcatgtggaagcacttttggaactcttaagcagcccccaaatggagcagatgatgattagactgcacatctcagactgagctcctcattcccaaaaagaatgaaaa

SEQ ID NO: 841383 - DNA, 120 bp, Artificial Sequence
  ENSG00000226159_11 (sequence is synthesized)
agaaatgattgtaccatttattcatgtgtaccttcaacaaaaatgtattgtgcaatcactttgtgcaagatactgtactaggcacttaggatataatgataaataagatatggcctctat

SEQ ID NO: 841384 - DNA, 120 bp, Artificial Sequence
  ENSG00000226159_12 (sequence is synthesized)
tcagtagaatataaaggcattggtataccccccccaaaaaaaatttttgattgtagacccagaaatattccagatgtttttgcatatatcatgtcattcaagcttgtcatataacaagcc

SEQ ID NO: 841385 - DNA, 120 bp, Artificial Sequence
  ENSG00000226159_13 (sequence is synthesized)
catttggaaggtatttttattcctagtacacagaagaagaaactgaagcacacctatctagagttgtgctaaagaaaaacaaacataaatttatttagccaaattggagttttactgctc

SEQ ID NO: 841386 - DNA, 120 bp, Artificial Sequence
  ENSG00000226159_14 (sequence is synthesized)
tgccttatgtcttcctacctgcttgtaggatgacacctgtgcctaaagcatcttcaagctacttcccacagtgaagggcatccccaacccacatttctccacactgtagggcaggtcagg

SEQ ID NO: 841387 - DNA, 120 bp, Artificial Sequence
  ENSG00000226159_15 (sequence is synthesized)
gttcctcccgcaccatccactgaaaaaagttctggaacagctaaatctctgctttcaacattctgctaacactgctgatcttcttgcaggttaggaaatccagtgccctaaagaaataca

SEQ ID NO: 841388 - DNA, 120 bp, Artificial Sequence
  ENSG00000226159_16 (sequence is synthesized)
gacttaggctaaagagctggatctctggcttacacagatgttcctgaaacgttgagcatgttgtctaacctctctgtgtctcattgtccccatttgtaaaattgagacaattgtacctac

SEQ ID NO: 841389 - DNA, 120 bp, Artificial Sequence
  ENSG00000287499_0 (sequence is synthesized)
gtaagttctgagagaagagattgagaaacaaaggcagttccttcgttgcagcttttggacacacttggagaaactggtcatcttaccaaggctttgactggaaggctatgcttcccttta

SEQ ID NO: 841390 - DNA, 120 bp, Artificial Sequence
  ENSG00000287499_1 (sequence is synthesized)
aggagtcaatctcgacttgcagagccaatgaaagccccttggagagactggccttatacccttgcctatgcagtccctatacagggttcctgactgcaatcagagtaaagaatgtcactt

SEQ ID NO: 841391 - DNA, 120 bp, Artificial Sequence
  ENSG00000287499_2 (sequence is synthesized)
tctgacaggtctaggaactcaaagtttatcctgggaccttaagagaagaggatcatccaattcacaggtatttgaggatacaaacctgtggctgggttcagctttaaaagttcttatctg

SEQ ID NO: 841392 - DNA, 120 bp, Artificial Sequence
  ENSG00000287499_3 (sequence is synthesized)
agattccttctggaatagagttcctttaaagccaatacaaaagacctgtgtagaaatagttattattgctgcactttatgcaaataatcaggctaaatataagactaaagtctattttgc

SEQ ID NO: 841393 - DNA, 120 bp, Artificial Sequence
  ENSG00000287499_4 (sequence is synthesized)
aaatgtaagactaaagtctatataaagttgtttgcaaaaattattgatttttgttttcatcaagatcatagatgatttgtttccttaacaaaaatgaggactggagagagagaaattatg

SEQ ID NO: 841394 - DNA, 120 bp, Artificial Sequence
  ENSG00000287499_5 (sequence is synthesized)
agagaaattatgttttaaaagttatcatacatttgtcattaaattctaaactcattagttgtttttaagtttttgcctacatttttagataaaccctgcttgttcctgtgaaccaaccag

SEQ ID NO: 841395 - DNA, 120 bp, Artificial Sequence
  ENSG00000287499_6 (sequence is synthesized)
gcagctgagaaagaacaaaaggggatgggtaaggtaaaagcctggatcaatattctagttctgagcaattgtgctgcaaatcttgccagataatgggaataaacaggatgtccataactt

SEQ ID NO: 841396 - DNA, 120 bp, Artificial Sequence
  ENSG00000287499_7 (sequence is synthesized)
ggaggtttcctttttgggaaagtaagactaagggagctgaacaaagccaagcaccatgcccccaaatcctaacaagcatacctatagccaccagttatctgggtgtgtcacaagacatcc

SEQ ID NO: 841397 - DNA, 120 bp, Artificial Sequence
  ENSG00000287499_8 (sequence is synthesized)
ttttccttgtcagaggaggagtcaattccatagcttcaccttagcatttggcttatgataaggaatccacgcaacccccctgtaagacatatttttatcccaaactaatttctaagcttt

SEQ ID NO: 841398 - DNA, 120 bp, Artificial Sequence
  ENSG00000287499_9 (sequence is synthesized)
gggtcaaagccctaggaagggaaattggaactaagggatccagagagagacaattacagaggttaaaaggcacagcacaggtgagcatggctaattcctgccaattaagacaggcctctg

SEQ ID NO: 841399 - DNA, 120 bp, Artificial Sequence
  ENSG00000287499_10 (sequence is synthesized)
gataaaagtcatgctagtatccatggcataaatgaggtctagggaactctgaggctactgtcagtaggtgggatagagacataggtgagagcagataattcctattctctaggcccttta

SEQ ID NO: 841400 - DNA, 120 bp, Artificial Sequence
  ENSG00000287499_11 (sequence is synthesized)
tgcttcatgggtgcaagccgctttggcacccatggcagcacctgccaaggtcactgggtctcgggaatacaagaatggaagagagaaagaggaaactcttctctccctcatgcaccctgg

SEQ ID NO: 841401 - DNA, 120 bp, Artificial Sequence
  ENSG00000287499_12 (sequence is synthesized)
ctatctgccaggaagagacgggcaccagggatgcctgctctcctctctctagatgggtagccattcttcttcagtctgtacccctttcgaatgcatcctgaacctctgggactcctaaaa

SEQ ID NO: 841402 - DNA, 120 bp, Artificial Sequence
  ENSG00000287499_13 (sequence is synthesized)
atgccttcatttttctatcctcctcctctgttctctcttcgctaacagataattatgtctcggtactacaggatactcccctcagatgcatccttcaaaccggaaagagttaatttccca

SEQ ID NO: 841403 - DNA, 120 bp, Artificial Sequence
  ENSG00000287499_14 (sequence is synthesized)
aaccttaaactgattggtttaggattggtctcaggggaagggaatccaaaagcccaacctgccagcgaaaagtgtctgcgagtctaatctctgacgaagaacctggctgtcagccgaact

SEQ ID NO: 841404 - DNA, 120 bp, Artificial Sequence
  ENSG00000287499_15 (sequence is synthesized)
aaggaaaaagtcctacaactgtgatacttgcctatgcctggtgaattccatctcagcttcaaaaagttgatgatttctggctaggaagctgcccttttatcattattctaaaagaactga

SEQ ID NO: 841405 - DNA, 120 bp, Artificial Sequence
  ENSG00000287499_16 (sequence is synthesized)
cattaataatctattactttttaatgaaatgtaaacaatagaaagcctttattatcaacaaagacacactttttttttctgtagttacggaaataatttgtgaggaaaacagaagaggta

SEQ ID NO: 841406 - DNA, 120 bp, Artificial Sequence
  ENSG00000287499_17 (sequence is synthesized)
tccttaaacagattctttaccttctgctataaagcatctaagaaaatctacttaccaagtaaaatgtataaacctgtaaaaagacaaaactcacaatacaatgtgctgatagtaaagtct

SEQ ID NO: 841407 - DNA, 120 bp, Artificial Sequence
  ENSG00000287499_18 (sequence is synthesized)
atgtatatatatttcgctaggtaagtattaaaataataggacaggtcaaaaaattgaaagatataaaacttagatatttttaaaatgtacacttcaaaaagagtgaacgatattatagga

SEQ ID NO: 841408 - DNA, 120 bp, Artificial Sequence
  ENSG00000287499_19 (sequence is synthesized)
aaaaaagcaacaaataacaaataatgcagtgaaatttcttcccactatcattagatcattatttgatttctgacaccaaaattattgccccaccatttatatatatgtgtgtttatcagt

SEQ ID NO: 841409 - DNA, 120 bp, Artificial Sequence
  ENSG00000287499_20 (sequence is synthesized)
acacacacacacatacatacacgtacatacaagatttatatatatatatatacactcttagtagatggaaggtaaattgtttgtcttcaaaaactagagtgttatttagcaagcaagctg

SEQ ID NO: 841410 - DNA, 120 bp, Artificial Sequence
  ENSG00000287499_21 (sequence is synthesized)
gaggatttacttattatttacttttataactatttctgtgagttaggtccacatgctgctgtttagtgttgccaacattaacattattcagcccttttggtaataatagttccaggataa

SEQ ID NO: 841411 - DNA, 120 bp, Artificial Sequence
  ENSG00000287499_22 (sequence is synthesized)
ttatgtagataaagtacgtctttattatagggttttctataatgtagagccttataatgtagaactatttaactctcttttgtctcatctttaatacctcttttcattgagaaactttag

SEQ ID NO: 841412 - DNA, 120 bp, Artificial Sequence
  ENSG00000287499_23 (sequence is synthesized)
acaactccgggttgaaactgagtaaaaatcaactaaatttaaaaataaaagtttaatttcagagtggcaagtgtctcatttttaagaaatgaatacttgtaagtgaacttcaggaaacat

SEQ ID NO: 841413 - DNA, 120 bp, Artificial Sequence
  ENSG00000287499_24 (sequence is synthesized)
ttcaggaaacatatatttttataaaaaaacacctgaatgaaattatctactattaaaaacattatcgatgcaattttatgtaagtatagatttttaactttacaagaaagtcctttgaca

SEQ ID NO: 841414 - DNA, 120 bp, Artificial Sequence
  ENSG00000287499_25 (sequence is synthesized)
ttcataataccggtaggatttttttctgattaacagtatttgtgaaccatttattgaaaacagaagcatttttttctgattaacagtatttatgaaccatttattgaaagcagtagcttt

SEQ ID NO: 841415 - DNA, 120 bp, Artificial Sequence
  ENSG00000287499_26 (sequence is synthesized)
tttttctgattaacagtatttatgaaccacttattgaaaacaagggaaattggaaaaagatggagaaatctcaatgaagaattggtaaacatggaagcagaaatgtaaaggtcaaaatta

SEQ ID NO: 841416 - DNA, 120 bp, Artificial Sequence
  ENSG00000287499_27 (sequence is synthesized)
gcattcctagccagataccttaagatcttttattattttactcaatctgtttaaatatttttatgttaaaaagtcagagtggtacatattaaaattttacagtgcagttcgtcttccaca

SEQ ID NO: 841417 - DNA, 120 bp, Artificial Sequence
  ENSG00000287499_28 (sequence is synthesized)
agcacaggccaacaaaaaactgagacacagagagaaaccagagttactataagttagattgtcaaattaactatgacatgctacatcttttgtattctagacttaaattttaagaaggaa

SEQ ID NO: 841418 - DNA, 120 bp, Artificial Sequence
  ENSG00000287499_29 (sequence is synthesized)
ccttacatacccaatatgataggcagaataagaacttcccactcagatgctggcatctgtccacatcttaattctggaacatatgaacatattatatcatatgacagagaagaagtaatg

SEQ ID NO: 841419 - DNA, 120 bp, Artificial Sequence
  ENSG00000287499_30 (sequence is synthesized)
tggcagaaggaattaaggttgctaatcagatgaatttaatatagatagattatattggattatctaggtgggcccaataatcacgaggatgttaaatgcaaaagaggagagaagtgacag

SEQ ID NO: 841420 - DNA, 120 bp, Artificial Sequence
  ENSG00000287499_31 (sequence is synthesized)
tatttgagtgacacaatgagagaaagaccactggatattgcttagacaatcgaaaaggccaggagtcagggaaatgcaggcagtctgtgaaagctatgaaaggtaagaaatcagtttctc

SEQ ID NO: 841421 - DNA, 120 bp, Artificial Sequence
  ENSG00000287499_32 (sequence is synthesized)
cttttagagccccttgggggaaaaaaaaatgctctactaacacattggtttttagctcagttagatgggaggtgaattcatgtaagatttctgacctacagactgtaaaataacaaattc

SEQ ID NO: 841422 - DNA, 120 bp, Artificial Sequence
  ENSG00000287499_33 (sequence is synthesized)
ttgttactaaatgtgtaataatttgttacagcagcaatggaaaatgagtaattcaccagaaacatgtaaatattaaagaaaagatttggtgtgaaccaaatttataaactatttttgtaa

SEQ ID NO: 841423 - DNA, 89 bp, Artificial Sequence
  ENSG00000287492_0 (sequence is synthesized)
cagtagaagattcagcccatatcacacaaagcctgtttggtagtctcttcacacggacgtgcatgaaaaatatatcaaaagagtattcg

SEQ ID NO: 841424 - DNA, 120 bp, Artificial Sequence
  ENSG00000287492_1 (sequence is synthesized)
cacacggacgtgcatgaaaaatatatcaaaagagtattcgcattcctgtgtttattgcagcattattcaaaatagcaagacgtggaacaacctgagtgttcattgacagatgaatgcatc

SEQ ID NO: 841425 - DNA, 120 bp, Artificial Sequence
  ENSG00000287492_2 (sequence is synthesized)
ttattcagcaataaaaaataatcaaattctgtcatttgcaacaacatggttggaattacaggtcattatgttaagtgaaattatccaggaacagaaagacacatcttctcactgatatgt

SEQ ID NO: 841426 - DNA, 120 bp, Artificial Sequence
  ENSG00000287492_3 (sequence is synthesized)
gagaaaaaaattaaattgaactcatagagagtagaatgattgttaccaaaactgggaagggtagtggggagaggtaaataaagtgggaattgttaatgagtgcaaaaatacaattaggtg

SEQ ID NO: 841427 - DNA, 120 bp, Artificial Sequence
  ENSG00000287493_0 (sequence is synthesized)
ggcaggagtagcgtcggaagcaatggatccccacgcaattgcacaccaacgctaggggatgatctcgccccagctgactcattttctcattcgtgcagcagacatttattgagcgcctac

SEQ ID NO: 841428 - DNA, 120 bp, Artificial Sequence
  ENSG00000287493_1 (sequence is synthesized)
tgtatggatggatactgtacgccagagaaccgctgcgtggcgctccaattcagttcttcacatccacacagccctggaggatttacaaaatacattaaggttccttatccctcactttac

SEQ ID NO: 841429 - DNA, 120 bp, Artificial Sequence
  ENSG00000287493_2 (sequence is synthesized)
agatccgatatgcctgagtacacaccccgtatcttgccacttaacggcaatctgtgtgaccctaggtcactacttggcttctctgggcctcagtttcctcatctgtaaaatggggcagta

SEQ ID NO: 841430 - DNA, 120 bp, Artificial Sequence
  ENSG00000287493_3 (sequence is synthesized)
attgatagcaatctatctcatagagctgtccttctgctaacaaatattcatggaatgattcctatgagccatatactgttgaaggtgctggatgttcctgttaaggcctctaaaaatcgt

SEQ ID NO: 841431 - DNA, 120 bp, Artificial Sequence
  ENSG00000287493_4 (sequence is synthesized)
gtttatttattgatacttataatgtgccagacgctgttctaaatgccttacatatattaattcaacaacctcatgaagctagattattacatcccaatttgacagctgagaaaaccgtct

SEQ ID NO: 841432 - DNA, 120 bp, Artificial Sequence
  ENSG00000287493_5 (sequence is synthesized)
caataaccaatttacccaactagcaaaatgtgaggccaaaattccaacccagcttacctaaacaatcaactttgatatctgaccatgtgcctctaatattttgtcttgaaaagggctcag

SEQ ID NO: 841433 - DNA, 120 bp, Artificial Sequence
  ENSG00000287493_6 (sequence is synthesized)
cggtcatctgtgtagtattcaaacatgtttgccctgaatctaatcattggaaaacagacatatccaaaagaagggacatacttcaaaacaactggcctgaaaacttcaaaaaaagtcaat

SEQ ID NO: 841434 - DNA, 120 bp, Artificial Sequence
  ENSG00000287493_7 (sequence is synthesized)
gttgtgaaatacacatggggaataaggggtgggggacagagaaaggaggcggatatgcaattgcctagatttaagaacactaaagatgtgcatcaactaaatgcaatgggccaggtgtgg

SEQ ID NO: 841435 - DNA, 120 bp, Artificial Sequence
  ENSG00000287496_0 (sequence is synthesized)
gacaaaaatcccaaacaaaatattcataagataaattaagcagcttatcaaaacaataatataccacagctaagcatattatatttcagaaatggtttaaaacaagaaatcagaatgaat

SEQ ID NO: 841436 - DNA, 120 bp, Artificial Sequence
  ENSG00000287496_1 (sequence is synthesized)
tataacattaaaatagcagaggagaatgatatatgaacaaagcaaaagaagtgataggatttgaaaaaatataagaagttagccctaattatagagcatacttgcatacaacaaagtaaa

SEQ ID NO: 841437 - DNA, 120 bp, Artificial Sequence
  ENSG00000287496_2 (sequence is synthesized)
tattagttgaatggtaaaatattgtactgatttccattaaactgtttaaacaactaagacactggctattaccccaatacttgacataatcgtatttattttaataaaagtaaagaaata

SEQ ID NO: 841438 - DNA, 120 bp, Artificial Sequence
  ENSG00000287496_3 (sequence is synthesized)
ataatgattttaaaagaaaattcatttccattcatagataatctgactgaatacacagaaatctcacatactattaaaaatataaatagattaccagtttatggttagagtgataatggc

SEQ ID NO: 841439 - DNA, 120 bp, Artificial Sequence
  ENSG00000287496_4 (sequence is synthesized)
gaaaactatcagtatcagaaaaatcatgaatgcactttaaacagctactctccaggaaaaggatattatatataaaataacagaagaatcaagatctagagtatgtgtgtgtattcataa

SEQ ID NO: 841440 - DNA, 120 bp, Artificial Sequence
  ENSG00000287496_5 (sequence is synthesized)
atcagcaggttgagaaaatgagcaaaagaaacaaacaggaaagtcacagtaaataacatgattggctaataaatacatataaaaaatacttaatgggttagttaaaaaaataattatatt

SEQ ID NO: 841441 - DNA, 120 bp, Artificial Sequence
  ENSG00000287496_6 (sequence is synthesized)
tttagatggacaagtggagttactggatacttttatttccagctgaccagactagaaattacaagagtagaagagcatttggaaaagatccaagtatagatacatcagctatgactgcaa

SEQ ID NO: 841442 - DNA, 120 bp, Artificial Sequence
  ENSG00000287496_7 (sequence is synthesized)
ttatagagttttgttatttacagactcctctgaaacaatattctaagtagagttttaaaaaattatctataacctaaatactgatcaggatgagagtttaaaaacatttaggccaggcgt

SEQ ID NO: 841443 - DNA, 89 bp, Artificial Sequence
  ENSG00000287496_8 (sequence is synthesized)
gggggcgaatcatgtggtttttgtttgttccaagagcaggagattgcttcattggcttgtctaagaacataaaccatttttcaattatc

SEQ ID NO: 841444 - DNA, 120 bp, Artificial Sequence
  ENSG00000287497_0 (sequence is synthesized)
atatccagagcatgggaccaggagctggactcacggtgggatctctgatcagtcacagaaggagcttgacgagctcatggggtctctctccctaggtggagaagacagggctccaaatgg

SEQ ID NO: 841445 - DNA, 120 bp, Artificial Sequence
  ENSG00000287497_1 (sequence is synthesized)
gaccatcgtgcgcccatgggaagagtgctgcatccacggaggacatgggccaacagtgctctcaaatgggtttcatgaaagcatctgtgactcatccctgttcaagaatgttttcattac

SEQ ID NO: 841446 - DNA, 120 bp, Artificial Sequence
  ENSG00000287497_2 (sequence is synthesized)
gattcagcagaagcgatgtgccaggtcagcaaatacaactgcaaaaccggggcctgccagcctggccaacacagcaagaccccgtctctactaaaaagtaaaattaaaattagctgagta

SEQ ID NO: 841447 - DNA, 120 bp, Artificial Sequence
  ENSG00000287494_0 (sequence is synthesized)
gggcagtgtacccgcaatcatcattccagagctcatgctgtgtcagggccagatgcctgctgctgccacagctgtatttcaggaagcccagcctgtgaggatgccgtcccccctccgcag

SEQ ID NO: 841448 - DNA, 120 bp, Artificial Sequence
  ENSG00000287494_1 (sequence is synthesized)
gaagacgtcagacaggacactttccatcaccctgcttcctgattccaggcatcgatgctgagctggacagaaggaaaacagccttttggtgtctgagacaacagcacaaatgacaggact

SEQ ID NO: 841449 - DNA, 120 bp, Artificial Sequence
  ENSG00000287494_2 (sequence is synthesized)
tgggaagagggtggggagaagaatgctgcagtgacccgagcttgttgatgccctgccacaggcaccccaggtggccttgggcaagtcccttctcttgcctctccacctgtaaagtgtagg

SEQ ID NO: 841450 - DNA, 120 bp, Artificial Sequence
  ENSG00000287494_3 (sequence is synthesized)
ttactggggtcccttcaccttagactttctttggtcagagctacagaaagaggtggctgtagggaggactttctgaaaaagagtaaaaaggctctccttgctcaggaggctgaggtagga

SEQ ID NO: 841451 - DNA, 120 bp, Artificial Sequence
  ENSG00000287495_0 (sequence is synthesized)
aggacaggcctagacaatgaagcaaggggcgagtgggtggatgggtaaaaccacctgctcctcaaaacagccaggctctgagatgaagcaggaatctgcacttaaaccgaggctggatcc

SEQ ID NO: 841452 - DNA, 120 bp, Artificial Sequence
  ENSG00000287495_1 (sequence is synthesized)
atcctagggattcaagcctgtgttgtcaagcgaaaacagaaaagagaagggaattccacctttgcccactgagaacacatctatgctgagaacacatctacccaactcctctgtcacaac

SEQ ID NO: 841453 - DNA, 120 bp, Artificial Sequence
  ENSG00000287495_2 (sequence is synthesized)
ccctgtgagaaggttctgccatctcccagccctgaagattgtgagctccctgatggccctgggcctccctcccgacagctgaggcccttcctggatctctacacgtcaccaagctaagcc

SEQ ID NO: 841454 - DNA, 120 bp, Artificial Sequence
  ENSG00000287495_3 (sequence is synthesized)
agtgttccaaaatagtctcctgaacaatgatgacaactgcacagttattttggaagaacttcctggcagtgatggcagtggaacattggaaacagagatgaacaggaggtgggaagagga

SEQ ID NO: 841455 - DNA, 120 bp, Artificial Sequence
  ENSG00000287495_4 (sequence is synthesized)
aactctttgaaggtaaatggcagaattaattttcccgtttaaaaaacagaaacacaaagacccagtggagtctgcattttctagttttagtcagccattctggaagctgcgtcctggtaa

SEQ ID NO: 841456 - DNA, 120 bp, Artificial Sequence
  ENSG00000287495_5 (sequence is synthesized)
ccgcagtgtcccagctgtgaactccgggcaagtgtacagcatcatcttccattcaccatgtggttactgcacttctcatacaaactacctgcgttactcagttatccagtatcaaggact

SEQ ID NO: 841457 - DNA, 120 bp, Artificial Sequence
  ENSG00000287495_6 (sequence is synthesized)
atgccacactccttagagcagatgcagggcacttagagattaataaaacaggccgagcacagcctgtaaccccagcactttgggagcctgagatggaagaactgcttgagcccaggagtt

SEQ ID NO: 841458 - DNA, 89 bp, Artificial Sequence
  ENSG00000287495_7 (sequence is synthesized)
cttgagcccaggagttcaagaccagcctcggcaacatagtgagacttgcatggtggcaccttcctgtggtcccagctacttgggaggct

SEQ ID NO: 841459 - DNA, 66 bp, Artificial Sequence
  ENSG00000287495_8 (sequence is synthesized)
ggctgagatgggaggatcccttgagctcaggtggttgaggctgcagtgagttgtgactgtttaatt

SEQ ID NO: 841460 - DNA, 120 bp, Artificial Sequence
  ENSG00000237312_0 (sequence is synthesized)
aagcaagcaagctccactagcagaacagaactgttgggtgtggctgaggggaatctagaacacaggcagaggagggagagtataaatatcaactaacgctcagcaccaaatgcagaagtg

SEQ ID NO: 841461 - DNA, 120 bp, Artificial Sequence
  ENSG00000237312_1 (sequence is synthesized)
gtgaacgctgcttggtctaccatcctcttgctatgtggcattggtcagaatttagtcatgtggacataccaaactgcaaatgaggctgggaaatgaattgtagctacatgcccaggagga

SEQ ID NO: 841462 - DNA, 120 bp, Artificial Sequence
  ENSG00000237312_2 (sequence is synthesized)
aggagacttggcctgaattatttcttgcagaagatccaaaaaccttctgttggggtctgaattgggactcctttcctgtagcatctttctggtgaccactgaagggactatagtgcagaa

SEQ ID NO: 841463 - DNA, 120 bp, Artificial Sequence
  ENSG00000237312_3 (sequence is synthesized)
aacccccacccaaaggctaactttcgatgcagaacccatggaaacagaagggaaactaaatgttagaatctgatcatgtgaagctttggtcaccaaagaaatgaatcataatgctaataa

SEQ ID NO: 841464 - DNA, 120 bp, Artificial Sequence
  ENSG00000237312_4 (sequence is synthesized)
caggtgtggaggggcagaaggaagaagcaaagtggagtaggaagtgtgagaatgtgcatgtaatctacgcctatgcagcacatccaggcacgccagcttcaactcgcttcatcatgagag

SEQ ID NO: 841465 - DNA, 120 bp, Artificial Sequence
  ENSG00000237312_5 (sequence is synthesized)
accaaaaataaacataatgaaatagaggacattctcgcgcctcaaaaaattgaactatcttaaaagtttacttttgagaaatgtgagtcacaaaaagtaaaacaacgtactcaaggtcac

SEQ ID NO: 841466 - DNA, 120 bp, Artificial Sequence
  ENSG00000237312_6 (sequence is synthesized)
accgctgagaagtgtgttaggtgagacatcttgaagctcttccttctcatgctggaaaggctgtcagaaagttcaagtcctcctcttgacatagtacatgcctatttgctcattgggata

SEQ ID NO: 841467 - DNA, 120 bp, Artificial Sequence
  ENSG00000237312_7 (sequence is synthesized)
ggctaaccttttcaagcaatgtgcggcaccccttagcttcaataaagtgttcaatgtaagaagaatatgctctgtatccataataaaatcaccacaaatcaaaaaaatgaccaagttgca

SEQ ID NO: 841468 - DNA, 120 bp, Artificial Sequence
  ENSG00000237310_0 (sequence is synthesized)
cgcatgcgcagacgcatggccacagactgccggtcagtgtcagcaggcggtgggttagggtccgcaggcccagaccaggccgccgacaccaataagctacaaggaggagctttaccgctg

SEQ ID NO: 841469 - DNA, 120 bp, Artificial Sequence
  ENSG00000237310_1 (sequence is synthesized)
cctgtactactactgcctgcgctacttcccagcctgcggcgtagggcgcagcaagggcctgacgcttagcgagcaggcgctgcgcaccaagcggctgtcgcctggagggcacgttcaggc

SEQ ID NO: 841470 - DNA, 120 bp, Artificial Sequence
  ENSG00000237310_2 (sequence is synthesized)
cgtcacctgagcctgtgtaggatgccgaaggacctgttcaaagtattttctgtaactccaactgtaacttggttctaggaggagagaatccatgtttggtcaacagaacttttcgccgcc

SEQ ID NO: 841471 - DNA, 120 bp, Artificial Sequence
  ENSG00000237310_3 (sequence is synthesized)
acttaagtttactgcttcaatatcttttccttactaattgattgttaattaagtagtgtccaagtgagttagcctttttagggttgattaattaaaagagcagcaagaatggcattttaa

SEQ ID NO: 841472 - DNA, 120 bp, Artificial Sequence
  ENSG00000237310_4 (sequence is synthesized)
cttttcaagtccacaaatgatttgttcttagctgtaaagaagaggtcagaaatgtaagtggggagagaacaaagataggaatatgtgtaagatttctacctaaatgttggcagggcacgg

SEQ ID NO: 841473 - DNA, 82 bp, Artificial Sequence
  ENSG00000237310_5 (sequence is synthesized)
gtgtaagatttctacctaaatgttggcagggcacggtatggtcgatcgcctggagtcagaagttcgagaccagcctggcaaa

SEQ ID NO: 841474 - DNA, 120 bp, Artificial Sequence
  ENSG00000237310_6 (sequence is synthesized)
gcaggatcggccccgtctgaggctgcaccgcattagggagctgcacccctcggcttgacctctgatggccgttgcaacaacatcaaagcctttggaactttgtagggggtacgaggggct

SEQ ID NO: 841475 - DNA, 77 bp, Artificial Sequence
  ENSG00000237310_7 (sequence is synthesized)
catcaaagcctttggaactttgtagggggtacgaggggctaggaaaccaagaaaacatctttttaaaaatataagcg

SEQ ID NO: 841476 - DNA, 120 bp, Artificial Sequence
  ENSG00000237311_0 (sequence is synthesized)
attttcaggaagagcagaaactgcaccacagtgttttgggtagataaggcttaccctggtggggagagaggtcctggaaggggattgttggagaagataggagaaagtgaagaagggaag

SEQ ID NO: 841477 - DNA, 120 bp, Artificial Sequence
  ENSG00000237311_1 (sequence is synthesized)
aagagaaaaaaacagagaagaaagaaggaaaagaagatagagggacaagtagaagaaggaaaggaaaggaaaagcaaggaaaaaggataacctgtcctctttgactagtaggctcaccaa

SEQ ID NO: 841478 - DNA, 120 bp, Artificial Sequence
  ENSG00000237311_2 (sequence is synthesized)
ctcttctttaccatggaagggatttcagtaggaccaaaggcttttcccatgaaatagtattttatcttgataagaacctagcacattggttaccaacctccttaaattgattccctcaaa

SEQ ID NO: 841479 - DNA, 120 bp, Artificial Sequence
  ENSG00000237311_3 (sequence is synthesized)
aggaagaaagtgtatctggaaatcctctgaaacttccagagtcccccaagcccagtgctatttctaccaggggagaaagcagagctctttgtatatatgggtaggagcaaagtaagattc

SEQ ID NO: 841480 - DNA, 120 bp, Artificial Sequence
  ENSG00000237311_4 (sequence is synthesized)
cccctttccccacaacccgaagcagaagtttctcctgagatttcaaccagtaaaatcaccatataatagattaggcatcctgagaagttcttaatggaacgagagctctcactaatcaaa

SEQ ID NO: 841481 - DNA, 120 bp, Artificial Sequence
  ENSG00000237311_5 (sequence is synthesized)
gcaggaaagaacagggccttgaagaaatcagaaatctaattaaggtggaatttcaagagatctgactgaatgttaaataagttgtagaagcctcatcaaaaggattaactcagctgcaga

SEQ ID NO: 841482 - DNA, 120 bp, Artificial Sequence
  ENSG00000237311_6 (sequence is synthesized)
gacaacgcagaagtgcaggtggggattctgcatgaagactggaaaaaaaaacagtgacaagaactgaaagtggtcattgtgttcatggtgtgtctaaaggacagataaaagaaagaggtg

SEQ ID NO: 841483 - DNA, 120 bp, Artificial Sequence
  ENSG00000237311_7 (sequence is synthesized)
cccctgacccctcctttcatcccatcttagttgatgaggtttggggaaaagaagagtttgttaagctcatttaatctgttttgtcttgtccatgttttcatcaagcaactttctgattaa

SEQ ID NO: 841484 - DNA, 120 bp, Artificial Sequence
  ENSG00000237311_8 (sequence is synthesized)
tttggcttttagaatatatttttccaagcaagacagagattgttattcagccaacatgagcattcccagctgtttttgggttatattagctctggaattaaaacaaaaccaaacaaaaaa

SEQ ID NO: 841485 - DNA, 120 bp, Artificial Sequence
  ENSG00000237311_9 (sequence is synthesized)
tgagcctcagcattcttataggtgtaacaaggaagtgagactttttggcctctaaaagcttttataacttggagagattagttgatctaatctatgaccccatcctccagttaggaagct

SEQ ID NO: 841486 - DNA, 120 bp, Artificial Sequence
  ENSG00000237311_10 (sequence is synthesized)
gaggtcctggaagacaaagtgcttttatctcaggttgcccaatggataagtacattactttttaactctatgcctgattgaccaaggtaaagctgaaagagtctcatctgaactataacc

SEQ ID NO: 841487 - DNA, 120 bp, Artificial Sequence
  ENSG00000237311_11 (sequence is synthesized)
caagtgggtaagccagtcccttggcactgcccaggaagaagatatggatgggaggactactccttcttgaatgcagaggataaaagttatctgggagctcttttacgattgttggagaag

SEQ ID NO: 841488 - DNA, 120 bp, Artificial Sequence
  ENSG00000237311_12 (sequence is synthesized)
gctattatctggctaagccagtggtcttatcttgtgaggtcctgtggaagtgggcccgcagactgatactgcgtggctccctggattcagcccccttcctaaggcaaggcaatgtacttc

SEQ ID NO: 841489 - DNA, 120 bp, Artificial Sequence
  ENSG00000237311_13 (sequence is synthesized)
gttacatgtcaggacactttccatggcaacaggtctcaccagggtcaatctttaatgggagttctccaaagcagaagagttgaattctcttagtatggaaggattgttggagaagatagg

SEQ ID NO: 841490 - DNA, 120 bp, Artificial Sequence
  ENSG00000243150_0 (sequence is synthesized)
ggcgagaagtctggccttgcgccggccggggagcttttcgccaaggctcctgtgggatgggatagcttgttctctgggctgcaggaaccaaaacattagaccaccctttctgtgaccttg

SEQ ID NO: 841491 - DNA, 120 bp, Artificial Sequence
  ENSG00000243150_1 (sequence is synthesized)
ggcatgccgccctcggttccgagccgcaagtctttctttcggggaaaatgaaaaggggtcaagatttggaccagatgacacccaatgtcccattcaacggtcgcattctgtcatccacag

SEQ ID NO: 841492 - DNA, 120 bp, Artificial Sequence
  ENSG00000243150_2 (sequence is synthesized)
gaattagtcctgtatccgaaacattctctggtagtcaaaagctgtgagcaaataataagaaaaaatgtgcaaaacgttttttagtacagttagcaaatagtgtactcagttgttgaagga

SEQ ID NO: 841493 - DNA, 120 bp, Artificial Sequence
  ENSG00000243150_3 (sequence is synthesized)
aatgggatgaagcctatcagatttcaacaaacttatttacctcttgagaaagctgctctcttttcggttgtccttctgtgtctctctttcaaagatcaagtctcactgcgatgctgatat

SEQ ID NO: 841494 - DNA, 120 bp, Artificial Sequence
  ENSG00000243150_4 (sequence is synthesized)
gtttttaacacttctccagcatttcttaacctaacagcaggtttcaggcacaggcctgcagcaagcagccatatccaactaaaattccactactatatgtttttatttgcattacattta

SEQ ID NO: 841495 - DNA, 120 bp, Artificial Sequence
  ENSG00000243150_5 (sequence is synthesized)
tcagtgatatacatcaagagctagattttgcatttttaagtgaaaaagtaagctatcaaatagaacaggtggaatttggatatggtggggcggaggggtaggcagagcaggggagaggaa

SEQ ID NO: 841496 - DNA, 120 bp, Artificial Sequence
  ENSG00000243150_6 (sequence is synthesized)
catcgtgatagtggtactcaaattactaagttttagaaaacactatcacggggcctttcaggagcctggagacagatggaggggaagacagaagagagattaaggagaagaatggtttca

SEQ ID NO: 841497 - DNA, 120 bp, Artificial Sequence
  ENSG00000243150_7 (sequence is synthesized)
tttggaaggacactgactaaggaaaaacagagaaaaggatgaaacccaagccaactctgcaactctattaaaaacaccaagacttcaatataatctccttaaagggaggcagtgcattct

SEQ ID NO: 841498 - DNA, 120 bp, Artificial Sequence
  ENSG00000243150_8 (sequence is synthesized)
tcatggctagagcttcagcagctatctagaaccatatggtggaagccacttactgagaactgtgaaacaagagcctgggtccctgacatatgaagccaccatacctaccttaaagtgtct

SEQ ID NO: 841499 - DNA, 120 bp, Artificial Sequence
  ENSG00000243150_9 (sequence is synthesized)
ttcacttgagggaaaaatacatctttcttagagatttgaattttaatgtcccagaaatataaagaagatggcattaaaatgtcctatatgttggcagtcctaccctgaagactttttttg

SEQ ID NO: 841500 - DNA, 120 bp, Artificial Sequence
  ENSG00000243150_10 (sequence is synthesized)
ggcagtcctaccctgaagactttttttgcttatcttttgttctgagctacagtcttcgcagagactaaattagtgactggacaacagaagaaaatagaccatcctggctaaaatggtgaa

SEQ ID NO: 841501 - DNA, 120 bp, Artificial Sequence
  ENSG00000243150_11 (sequence is synthesized)
gtccatagctcatcagggccccctgggatcaggccagaggggtggcactttgccagcatgaagaagtgtgcaagccctgatttggaggtgacaggagtagtcaggggttattttgagagc

SEQ ID NO: 841502 - DNA, 120 bp, Artificial Sequence
  ENSG00000243150_12 (sequence is synthesized)
tggaaatttaatcgtttggatcttttactccccatcccccttttttagccaagttctctggcagcttccttcccctgagactggtggcatggggtagggcagacttcacagcccaagatg

SEQ ID NO: 841503 - DNA, 120 bp, Artificial Sequence
  ENSG00000243150_13 (sequence is synthesized)
agatggcacagcccatccaggaaagaggatattttcttttcctctggactcagaataaagctcagagaacatatacacaaaatttcgaaaatttctaaataaatttcaaggcaaacaaaa

SEQ ID NO: 841504 - DNA, 120 bp, Artificial Sequence
  ENSG00000277260_0 (sequence is synthesized)
aacaaaagcagggtagggctccagctaagccacgtaggcactacgatgggcaacagaaaggttggtttctgggcaattcagagaaaccaaggacagctacccccagaactcagagtagcc

SEQ ID NO: 841505 - DNA, 120 bp, Artificial Sequence
  ENSG00000277260_1 (sequence is synthesized)
aactgggttgctcacaggagatgccttaactgaaaggtgatcagactccacaggagacccagagaagatgtggagggagctcagaggctgtcctggaggagacgtggagacagttcagag

SEQ ID NO: 841506 - DNA, 120 bp, Artificial Sequence
  ENSG00000277260_2 (sequence is synthesized)
gctgtcccggagaagacgtggaaagagctcagaggctgtcccagagaagacgtggagagctcagaggatgtcccaaacaagagagagctcagaggctgtcccagagaagacgtggagaga

SEQ ID NO: 841507 - DNA, 120 bp, Artificial Sequence
  ENSG00000277260_3 (sequence is synthesized)
ggctgtcctggagaagacgtggaaagagctcagagactcagagactgtcccggagaagacatggaaacagctcagaggctgtctgcaagaagacgtgcagagagttcagaggctgtccca

SEQ ID NO: 841508 - DNA, 120 bp, Artificial Sequence
  ENSG00000277260_4 (sequence is synthesized)
gagaagacatggagagagctcaaaggctgtccacaagaagatgtggagagagttcagaggctgtcgttactgttgcacttggctgtttttctttggataattattgcaatcaattttagt

SEQ ID NO: 841509 - DNA, 120 bp, Artificial Sequence
  ENSG00000277260_5 (sequence is synthesized)
aattcaggtgttaaatcacagtcaagcacctatttacctagtggtaaaatccttaagtaagtcatatttggttgggaagatcaaagaaatcacccagtctcccacatccgaaattgtgca

SEQ ID NO: 841510 - DNA, 120 bp, Artificial Sequence
  ENSG00000277268_0 (sequence is synthesized)
cggggagaccgcgtttagaggatcagtggcggcggcacccgcggccccgcgcggcgcggacggcgggcagcaccgtgcctgggccccctcctgctccgttgtatcgtgaccttctgaacc

SEQ ID NO: 841511 - DNA, 120 bp, Artificial Sequence
  ENSG00000277268_1 (sequence is synthesized)
tcagttgtcttgcctgtaaaatggaaatgaaggggatggttagcactcccactggatcaaataagctgcacctcatacataatgaggaaacagagacccggagagatacagtccttggcc

SEQ ID NO: 841512 - DNA, 120 bp, Artificial Sequence
  ENSG00000277268_2 (sequence is synthesized)
gttggagcatagcttggactttgaacccagtctcccagctcccagtctgcctgcagccctgtccctctccacccccaagccctgaccagaattctcttctgtacatccagaagggctttc

SEQ ID NO: 841513 - DNA, 120 bp, Artificial Sequence
  ENSG00000277268_3 (sequence is synthesized)
ccattcctcagactctctgaggcaattacagtccctaccactcatgtggcccttaatcatttactgcccttgcaaacagcctgtggtcaaaagcaataaagttcggacttggacagatca

SEQ ID NO: 841514 - DNA, 120 bp, Artificial Sequence
  ENSG00000277268_4 (sequence is synthesized)
ctgccggtcccagaggccacgcaaactccgcccagactcggtgctgttcaactattgtgcagcaaatgagtggatgagttgtgtcctgcccctcctttagaatgcagctgaaatgacact

SEQ ID NO: 841515 - DNA, 120 bp, Artificial Sequence
  ENSG00000277268_5 (sequence is synthesized)
tttttggcaggggacagcagcgcacgactaagatttctctcaatctggggcatgactttgaagggaaggttgctaagcctcctaaatcccgatacacaccaatgccgtttccccactcat

SEQ ID NO: 841516 - DNA, 120 bp, Artificial Sequence
  ENSG00000277268_6 (sequence is synthesized)
tatgtcaattccacctcctgcttggcgacccaccatgcccacattttccactcaagcctttcagatctgctttgggcacctgaagacagagagaatcatctttcaagagtcagaaacttt

SEQ ID NO: 841517 - DNA, 120 bp, Artificial Sequence
  ENSG00000277268_7 (sequence is synthesized)
gcacgtgccattccctctgcttagaatgcttttccctttctcccaattgccttatcatcagcctgggaaaatatttatttcggctcctaaaatctcagatatcacttctccaggagcttt

SEQ ID NO: 841518 - DNA, 120 bp, Artificial Sequence
  ENSG00000277268_8 (sequence is synthesized)
cccagatgcctcacttgattccagaaggagctatcgccacttttgcctggcgagtacgttttcaccgttacacttatacgctatggcaatttattggtgatttgtctgtctcccctactc

SEQ ID NO: 841519 - DNA, 120 bp, Artificial Sequence
  ENSG00000277268_9 (sequence is synthesized)
ggagaccgcgtttagaggatcagtggcggcggcacccgcggccccgcgcggcgcggacggcgggcagcaccgtgcctgggccccctcctgctccgctctcaatctggggcatgactttga

SEQ ID NO: 841520 - DNA, 120 bp, Artificial Sequence
  ENSG00000277268_10 (sequence is synthesized)
tgctacacccatcccggaggagggaggaaatagccagcccggagcacccctggactctgccggtcccagaggccacgcaaactccgcccagactcggtgaggccgcggtaatgccacgca

SEQ ID NO: 841521 - DNA, 120 bp, Artificial Sequence
  ENSG00000277268_11 (sequence is synthesized)
gggaactgcgtggataaggtcgctcggatctgagcgccaaggtctcccgcctctccttcccgtctagttctctccggactcaaattgccttaatctcacccatcactctctcatggaaat

SEQ ID NO: 841522 - DNA, 120 bp, Artificial Sequence
  ENSG00000277268_12 (sequence is synthesized)
agcaagagggtggtggggggtggaagagaagggtactatctccactttcccggccaggaggcccaagttaggaggcttgtccgagatccctaggtcagagcactatttaagctctcaatc

SEQ ID NO: 841523 - DNA, 120 bp, Artificial Sequence
  ENSG00000277268_13 (sequence is synthesized)
cgcgtttagaggatcagtggcggcggcacccgcggccccgcgcggcgcggacggcgggcagcaccgtgcctgggccccctcctgctccgaacagcccaaggagcagaaaagagtgacaag

SEQ ID NO: 841524 - DNA, 120 bp, Artificial Sequence
  ENSG00000277268_14 (sequence is synthesized)
cggagacaggccctggcaccaggctctggagaccccacttcctgactccagcggtgcgaagatgatacaatactttctggtgctgacattcagctgtctcccaaacagctctcaatctgg

SEQ ID NO: 841525 - DNA, 120 bp, Artificial Sequence
  ENSG00000277268_15 (sequence is synthesized)
gttggtagtggcagaggatttggggcacaggggtggagttaagtccaattgctgtttaaattggacttggcctcctttattttacagtcctaaggggtctccataggagaaaaagtagcg

SEQ ID NO: 841526 - DNA, 120 bp, Artificial Sequence
  ENSG00000277268_16 (sequence is synthesized)
catagggaagagtttcttgtctcaatcttggtactgccgtgccaaaatgaagcccagggatggttaaaaacggatcctagggaccgggcaccttggctcaggcctgtaatcccagcactt

SEQ ID NO: 841527 - DNA, 87 bp, Artificial Sequence
  ENSG00000277268_17 (sequence is synthesized)
tgggagatcaagatgggaggattgcttgaggctgacctcatctccaaaaataaaaacttaaaaaaaaatttaaaaaacaaaaacaaa

SEQ ID NO: 841528 - DNA, 120 bp, Artificial Sequence
  ENSG00000277268_18 (sequence is synthesized)
cagatcctagggaacagagttttgaggttccctgtgggatcttggcctgactcttgggagatgaagaagtccttggcaagtttgaaaagatctacaagtgccatctattcaggggactaa

SEQ ID NO: 841529 - DNA, 120 bp, Artificial Sequence
  ENSG00000277268_19 (sequence is synthesized)
atgtgatttcttttcactgcccagtggctggtaaggaaggaagcattttgcattttcagcttgtaggatggttattggtggtcctaccatcttgctcatgttcaagtttggtcgtgtaga

SEQ ID NO: 841530 - DNA, 120 bp, Artificial Sequence
  ENSG00000277268_20 (sequence is synthesized)
tgaagagcccagcttcccagctcttagtttttcttttccctcaggccattcataatttagctaacattctagtccattgaccagcatgcattttgaaaggtgagctggcaagcctgtaac

SEQ ID NO: 841531 - DNA, 120 bp, Artificial Sequence
  ENSG00000277268_21 (sequence is synthesized)
tgtgtgcaaggttgttctcatttaggctccaggaaggatatagtttccccataagaaagaaaagtgggcgagaggctgaggtgggaggtcacttgagtccaggaggcaaagattgcagtg

SEQ ID NO: 841532 - DNA, 120 bp, Artificial Sequence
  ENSG00000277268_22 (sequence is synthesized)
cgcggccccgcgcggcgcggacggcgggcagcaccgtgcctgggccccctcctgctccggttccagaatgacgctcggcccatggacagagcctgcccagtcactctcggctgctattga

SEQ ID NO: 841533 - DNA, 120 bp, Artificial Sequence
  ENSG00000277268_23 (sequence is synthesized)
tcccgaggatgatggccgcccctagccatttccctcctctctcttcggttccagaacagcccaaggagcagaaaagagtgacaaggccgtgaaaggaggcgcctggggcgtagccggctc

SEQ ID NO: 841534 - DNA, 120 bp, Artificial Sequence
  ENSG00000277268_24 (sequence is synthesized)
tataagcaaggggggcttgggctggttaagggggagcagggaccgcagggccaggaaagggcagcatccggcaggccggggcgtcacggtatgtgcctggcctgggtaaacaactctggc

SEQ ID NO: 841535 - DNA, 120 bp, Artificial Sequence
  ENSG00000277268_25 (sequence is synthesized)
ttcccacgagcgctggagggaccctgggcatggggcaggggcgtgggggagggggggcaggggcgtggggtggggcagggagcgggtggaacagcgaggtcaagcgtggagattccagtt

SEQ ID NO: 841536 - DNA, 120 bp, Artificial Sequence
  ENSG00000277268_26 (sequence is synthesized)
gcgagtcagctccgcgccgcggagcaaagacaggacgtggataatcttgggagggagacgctgagctgaagaacagaaaagagagacagaggcagaagtgaggagagagggacaggaaaa

SEQ ID NO: 841537 - DNA, 120 bp, Artificial Sequence
  ENSG00000277268_27 (sequence is synthesized)
gaaaataaaggcagaaaaccagagaaaagatgagacggagtgcggaaaagcaggcggggataaagaaaggaaagatctgtcggggaaatgcggggagaagtggaggaaaagaaacagaaa

SEQ ID NO: 841538 - DNA, 120 bp, Artificial Sequence
  ENSG00000277268_28 (sequence is synthesized)
ttagacccagagagagaccctgccacgaagaaggccgcggggacgggcgcggagccgagggccctgcaggcacggagggggcgtcccgcgggtctgggggtgtgcggctttgggacaggc

SEQ ID NO: 841539 - DNA, 120 bp, Artificial Sequence
  ENSG00000277268_29 (sequence is synthesized)
gagtgcgtgctgagagaaagaggcagcgtgtttggtgggagactctgcgcccgtggaaaagcggctctgggcaggaatccaacaaataaataaaacgtctaagacggcgtgacaacaatg

SEQ ID NO: 841540 - DNA, 120 bp, Artificial Sequence
  ENSG00000229466_0 (sequence is synthesized)
agtataaagagtgccaggcaacggccaatggcttctacaatccctttcatcctggacagtccagtgttgtgataccctgacaccaagacccttccttggttgtctggcacagtgctgcca

SEQ ID NO: 841541 - DNA, 120 bp, Artificial Sequence
  ENSG00000229466_1 (sequence is synthesized)
cataccatctcaggaactttcatttatttccctttgtgtccaaacatcagaaaggctttctgagttgcttgccaaggtgttcttcagccttccctaggctaaacttctccattggatcaa

SEQ ID NO: 841542 - DNA, 120 bp, Artificial Sequence
  ENSG00000229466_2 (sequence is synthesized)
tagcaggtggtcaacaaagacaaaaacaccatcttcagaatgactcagatcatcctcttgggcagccctttttggatatctctatgaaattctgcagctgaaagctgacacgcataatta

SEQ ID NO: 841543 - DNA, 120 bp, Artificial Sequence
  ENSG00000229466_3 (sequence is synthesized)
tttcctgttagatactgaagaaaaaaaaaagcccaggagatattgtcgagactgtttctggggtgtgattgggggataggagatgagtaagtaatgaagactttcctgcataatagcaat

SEQ ID NO: 841544 - DNA, 120 bp, Artificial Sequence
  ENSG00000229466_4 (sequence is synthesized)
attgttattcatactgtatgacaattattagttattagttacttacattttctcaaaacacaataccattctaatccatctgtgcccaatttagagagtagctctaacttcttccataat

SEQ ID NO: 841545 - DNA, 120 bp, Artificial Sequence
  ENSG00000229466_5 (sequence is synthesized)
attattgctgtaattttttgtgaatacctcctagaccattcagtggacagcaaacagtggccagctcaggagacactgataaggacagagaagccacaaaagatttacacttgaaagcaa

SEQ ID NO: 841546 - DNA, 120 bp, Artificial Sequence
  ENSG00000229466_6 (sequence is synthesized)
tattctagaggtgcccagaatcagggaaatagatagaaattgtgaggttagagatttagacttaacatattaaagcattttaaactacatcaagttatctgaaaatagtctgggctttct

SEQ ID NO: 841547 - DNA, 120 bp, Artificial Sequence
  ENSG00000229466_7 (sequence is synthesized)
ggctttcttgggagttgatgagttacctgtcaaaagaggtgttctggaagacattggggcagggggtgggacagaggtggatgaggagaaattacttttttttttttttaagacagagtc

SEQ ID NO: 841548 - DNA, 71 bp, Artificial Sequence
  ENSG00000229466_8 (sequence is synthesized)
agatggagtttcaccatgttggtcaagctgatctcaaactcccgacctcaggcaccctgtgctggtgatga

SEQ ID NO: 841549 - DNA, 120 bp, Artificial Sequence
  ENSG00000229466_9 (sequence is synthesized)
ggtgtgaggcaccctgtgctggtgatgagaaattagttaatggggacagtgtactttttttctggtgatggataccctaaaagcctgactttgctgctaggcaatctatacatgtaacaa

SEQ ID NO: 841550 - DNA, 120 bp, Artificial Sequence
  ENSG00000229466_10 (sequence is synthesized)
aattgcacttgtacaccatagatttttacaaaacaaaatacataaatctattttttaaaaaagaatacattggattaccatctgtaggtagtcggtactgaaacaacttctataggttgg

SEQ ID NO: 841551 - DNA, 120 bp, Artificial Sequence
  ENSG00000229466_11 (sequence is synthesized)
tccataacctcccaggtcacaggtcacttttagcctagcgacataaggcaattttatgcctctgaaactctaaaaagaaatctgttcatatttattaaaattttaataatggtttacact

SEQ ID NO: 841552 - DNA, 120 bp, Artificial Sequence
  ENSG00000229466_12 (sequence is synthesized)
tgtttctggggtgtgattgggggataggagatgaccatccagacccacaggaaatgggcattcttgctgaaagtcatgaaagcaactgattatctgctaagtggaactccagggagcatg

SEQ ID NO: 841553 - DNA, 120 bp, Artificial Sequence
  ENSG00000229466_13 (sequence is synthesized)
atgggaataagtcattttttaaaggaagagagaagtgcatttaacatgaatagttgtctaatagcatcatttccccatttctccttcccaacaaagaaccccaggtagcctttgtgcctg

SEQ ID NO: 841554 - DNA, 120 bp, Artificial Sequence
  ENSG00000229466_14 (sequence is synthesized)
gaggtgcggtggttatttcattcacagttccaaagatagggctgactggcctgggcgggaacgggagtagggggatgggggtggggaggtaatactctcaaacagtgcatggtctggaat

SEQ ID NO: 841555 - DNA, 120 bp, Artificial Sequence
  ENSG00000229466_15 (sequence is synthesized)
tgggcattttattagatctaataggctgatcacttactctgtaattgtgagaacttttttggtttgaatttttgtccgcttgatgtgaatgaagaaacaggtaggacaattgttataggc

SEQ ID NO: 841556 - DNA, 120 bp, Artificial Sequence
  ENSG00000229466_16 (sequence is synthesized)
agccatctgtccataagtgcaaccagactgaggattaagccaatgccataactggcagaacaggccacccggccaacgctactgagctgtgagattgatgtacctgaatcctgccctaat

SEQ ID NO: 841557 - DNA, 120 bp, Artificial Sequence
  ENSG00000229466_17 (sequence is synthesized)
acagaacttatactttacaattcatttcataatcttcaaggccgttagagaaggctttcctgatacttgtagcaaaaatcttcctaaattgaaaaagaaatgatatctgaatactaagaa

SEQ ID NO: 841558 - DNA, 120 bp, Artificial Sequence
  ENSG00000228033_0 (sequence is synthesized)
atcagatttcgcttcaaaaattttggacctttgttactaggtacataaacatctgaggtgtttattggagctctttgcctagaactgataattggattcatggtattctggagaacaagg

SEQ ID NO: 841559 - DNA, 120 bp, Artificial Sequence
  ENSG00000228033_1 (sequence is synthesized)
ttttgctctgtatcttggatgaataaactaaaccttagggaatcttcctagaagaaaccatataacgcctcctgtacgagaagttaaattacaacacaaagattgcttggtgagcatgtg

SEQ ID NO: 841560 - DNA, 120 bp, Artificial Sequence
  ENSG00000228033_2 (sequence is synthesized)
atcaaaacagggcaagatgaagacctttagaggccacaagcattttagtgtgcctcccaacttcccttatattattcaaaatataaacaataaaatctacaaagatgtgaaagaagtcca

SEQ ID NO: 841561 - DNA, 120 bp, Artificial Sequence
  ENSG00000228033_3 (sequence is synthesized)
cctagaaaaaccattgtcttctgtgggaaaagaagagagtatttatgatacatcaagcatccactacctagaaaattatagggctcccatttgcttctgctgtgaaatgccaagatcaca

SEQ ID NO: 841562 - DNA, 120 bp, Artificial Sequence
  ENSG00000228031_0 (sequence is synthesized)
gccaccccatgcaggctggggacaagggggtgcagaagcagaagttgctgcaaactctgagctcttgtaccccaagagaaagaagaaaatgtccatttccaactcagctatccaacatct

SEQ ID NO: 841563 - DNA, 120 bp, Artificial Sequence
  ENSG00000228031_1 (sequence is synthesized)
gtatgtattttgttgtgcacatttaccaggaagttgatagtatgttatgtccttgaaaggagaagtgccctaaagatataagatactgctgactccatgctttgtacatctgccaaatta

SEQ ID NO: 841564 - DNA, 120 bp, Artificial Sequence
  ENSG00000228031_2 (sequence is synthesized)
atcttcctaaatagaacctgcattgtgtcagtctgtattggaacactcccaagtcactgcaatgtccataataaaacaaaattcaagatctgccgcaagattggagtgcagtggtgtgat

SEQ ID NO: 841565 - DNA, 120 bp, Artificial Sequence
  ENSG00000228031_3 (sequence is synthesized)
catagctcagtacagcttcgaactccttggctcaactgacccttccacctcacccttcctagcagcttggactacaggcatgtaccacaacacccagctaattttttcagaaaattattt

SEQ ID NO: 841566 - DNA, 79 bp, Artificial Sequence
  ENSG00000228031_4 (sequence is synthesized)
actgtgttgcccaggctggtctccaattctcagcctcaagcgatcttcccaccttggactcccattatgtttaatgatg

SEQ ID NO: 841567 - DNA, 120 bp, Artificial Sequence
  ENSG00000228031_5 (sequence is synthesized)
gcctattatgtttaatgatggctttcaaagagcaaaattttaatttatcagtattttactaacagtttgtactttttacatgctagctaagaaatctttgcctaccccaaaataacaaag

SEQ ID NO: 841568 - DNA, 120 bp, Artificial Sequence
  ENSG00000228031_6 (sequence is synthesized)
attttctcttattatattgtagaaatgttatagcatttgcttttatgtttaggcctttaattcattttgagttaatttttttctatgatctcagagtttatgtctttccatattgatatc

SEQ ID NO: 841569 - DNA, 120 bp, Artificial Sequence
  ENSG00000228031_7 (sequence is synthesized)
cagttctttcagcattatttgctggacaacctgtcctttccccattgaaaaatgtttgattctatttgtgaactgaccattgtttcccgttgttctataagtctatctttatgccagtac

SEQ ID NO: 841570 - DNA, 120 bp, Artificial Sequence
  ENSG00000228031_8 (sequence is synthesized)
gtttcaggttgtcaatttctataaaggcacttattggaatttggctttaatgatatttaatctatagataaatatacaaagaatgtatgtcataacaatcttaaattttcaaattgctga

SEQ ID NO: 841571 - DNA, 120 bp, Artificial Sequence
  ENSG00000228031_9 (sequence is synthesized)
acatgatgaatctctctatttaggtgttctataagttatctcagaaatgttctgtggttttcaatgaataaggcttgaaaatattttgctaaagttatccctaagtatttctttctgtct

SEQ ID NO: 841572 - DNA, 120 bp, Artificial Sequence
  ENSG00000228031_10 (sequence is synthesized)
gctgggattacaggcataagccaccaaatatttcatacttttgataattgttcatcgttagaaatagaaataaaattgatctttataatattaacttgtatccatgtagagtcataaatt

SEQ ID NO: 841573 - DNA, 120 bp, Artificial Sequence
  ENSG00000228031_11 (sequence is synthesized)
tgtatccatgtagagtcataaattagttctagaagattttctgtgcatttttgatcaatgtctatgtatatactcaagttatctgaaaataaagccaactgtgcccctccttctcatttt

SEQ ID NO: 841574 - DNA, 120 bp, Artificial Sequence
  ENSG00000228031_12 (sequence is synthesized)
ttttctttttctggacttattttattggctaagatttctcatgcaatatcgaataaaagtggtaagagtggccattcttggctttttcttgattttaggtggaaagtatcctttagcttt

SEQ ID NO: 841575 - DNA, 120 bp, Artificial Sequence
  ENSG00000228031_13 (sequence is synthesized)
ctgtggatatctcttatcagaacaagagtagtcattcatattcttaagttgatgaattttaaattatgaatggatgttgaattctgtcagatgcttttcgtatatatattaatgtattct

SEQ ID NO: 841576 - DNA, 120 bp, Artificial Sequence
  ENSG00000228031_14 (sequence is synthesized)
acccttccacctcacccttcctagcagcttggactacaggtgaaatctgattaaaacaagcactgcttgcttcacacagaagtggaatcacaaaaggaaaacaggtaacctgaagcctgt

SEQ ID NO: 841577 - DNA, 120 bp, Artificial Sequence
  ENSG00000228031_15 (sequence is synthesized)
gtgtaggagaaaggaacacagcttccttatttagttatttcatttgagaattgtatgtggtatgtatatgaagagtttgggaagggggataaattgtaggtgtgtaagtgcatctctgat

SEQ ID NO: 841578 - DNA, 120 bp, Artificial Sequence
  ENSG00000231521_0 (sequence is synthesized)
ttactctgaggttctcgcggcaagacccaaatggacagtgatttggctgccagctggtgttaaaaacaagccaactccaagaaagttatggattacctctaagtgagaaaaaggaagcat

SEQ ID NO: 841579 - DNA, 120 bp, Artificial Sequence
  ENSG00000231521_1 (sequence is synthesized)
caaaattattccatctttatgaaggcaacactgatctccacgagcacaatcatccaaacggagatgggaacccctgttctaactctctcagaggcctgaagttagttttctagcactctc

SEQ ID NO: 841580 - DNA, 120 bp, Artificial Sequence
  ENSG00000231527_0 (sequence is synthesized)
gcctgaagagcttcctttaggatttcttgtgagacaagtcagcttttatttgtctggaaaagtctttatctcacttttatttgtgaagaactgctttggcagccgtaccctcaagaactg

SEQ ID NO: 841581 - DNA, 120 bp, Artificial Sequence; identical to SEQ ID NO: 824756
  ENSG00000231527_1 (sequence is synthesized)

SEQ ID NO: 841582 - DNA, 120 bp, Artificial Sequence
  ENSG00000231527_2 (sequence is synthesized)
ctggtcggaaagctgtttggtagacaaccttcgagtctttctgccttcatactgtgggtataccgttctcccaactgaaaacccgtttattttcttatctgtctactcaaagcctaacca

SEQ ID NO: 841583 - DNA, 120 bp, Artificial Sequence; identical to SEQ ID NO: 824758
  ENSG00000231527_3 (sequence is synthesized)

SEQ ID NO: 841584 - DNA, 120 bp, Artificial Sequence; identical to SEQ ID NO: 822681
  ENSG00000231527_4 (sequence is synthesized)

SEQ ID NO: 841585 - DNA, 120 bp, Artificial Sequence; identical to SEQ ID NO: 822682
  ENSG00000231527_5 (sequence is synthesized)

SEQ ID NO: 841586 - DNA, 120 bp, Artificial Sequence; identical to SEQ ID NO: 822683
  ENSG00000231527_6 (sequence is synthesized)

SEQ ID NO: 841587 - DNA, 120 bp, Artificial Sequence
  ENSG00000231527_7 (sequence is synthesized)
atttatctactgctcgtgaaatctctggatttaactctgatgaaagactggaggctgaaggagaacttcaatatcatatattttaaaggttgattcacagtttggagcaagaattaaaga

SEQ ID NO: 841588 - DNA, 120 bp, Artificial Sequence
  ENSG00000231527_8 (sequence is synthesized)
acagtttggagcaagaattaaagaaccacgaacttcaagtctggataaagtgcttcatgcctgtaatccaagcactttgagaggctgaggcgggtggatggcttgagcccaggagtttga

SEQ ID NO: 841589 - DNA, 120 bp, Artificial Sequence
  ENSG00000231527_9 (sequence is synthesized)
accccatctcaatataagaagaagaagaaaaagaaaaaaaaaatcaaaaacgaaaacaacacaaattttagagtgatgtaaaattctcaaacaatgagatagataaaaagtacgcagcca

SEQ ID NO: 841590 - DNA, 120 bp, Artificial Sequence
  ENSG00000231527_10 (sequence is synthesized)
atggagcaggcccttcgtaaaaacacgatgttggttttctggattttggaggcctcacaaaacccggatcagactcgcccactgccctgtgtctgccctcccgaccgcctctcctgccca

SEQ ID NO: 841591 - DNA, 120 bp, Artificial Sequence
  ENSG00000231527_11 (sequence is synthesized)
gcagggatgagggtggcagtggtgctgtgtggagggtggcgggaggacctggaagactgcgaccagtgagccgggaggccttgggacagcctctctctgaatcatcctgtgcactgccgg

SEQ ID NO: 841592 - DNA, 120 bp, Artificial Sequence
  ENSG00000231527_12 (sequence is synthesized)
gtgtgacagaggctcctagaatcctgtctcaagtggccgccttcacagagggagtcactgacgtccctgctcagcgcagccctggcatgtgggggtccctctactcatgagaaaccccca

SEQ ID NO: 841593 - DNA, 120 bp, Artificial Sequence
  ENSG00000231527_13 (sequence is synthesized)
agagcaggagccctcggtggcagtgcttgggtgtcgaggctctgaggctccggcctcacctctccacggggtcgaagggaacgtctccggatgccaggagtcgcaaagggccgaccatga

SEQ ID NO: 841594 - DNA, 120 bp, Artificial Sequence
  ENSG00000231527_14 (sequence is synthesized)
cctgccttggcctcccaaagtgctggagttacagatgtgagcctctgtgctcagtccatccttggctgttcaagtgtagagggaggcctcacaaaacccggatcagactcgcccactgcc

SEQ ID NO: 841595 - DNA, 120 bp, Artificial Sequence
  ENSG00000231527_15 (sequence is synthesized)
cgagccctcagcagggggcggtgctggatgccgggatgtagagagtggggtgggacaaggacttggttgtgagacgtcccagtccggggaaggactaagagaaggtgacatggacagtct

SEQ ID NO: 841596 - DNA, 120 bp, Artificial Sequence
  ENSG00000231527_16 (sequence is synthesized)
agactacccgtcattggttctccactgggggcagtattggcaatgtttaggtataaatttgttgtcacaatgaatgctaccaacgtctagtgggtggaggccgggggtgcggctcagcat

SEQ ID NO: 841597 - DNA, 120 bp, Artificial Sequence
  ENSG00000231527_17 (sequence is synthesized)
gagccccggtgtggagtgcagggttcgtttggaccacggctgtagaggcctaggggagctcccgccatcaggatggccgggcatcagggctctgtgagggggaagggggcatcagtgcag

SEQ ID NO: 841598 - DNA, 120 bp, Artificial Sequence
  ENSG00000231527_18 (sequence is synthesized)
cggcaggcaggggttcgacgggctgagtcctgcgacgtgttgcatccacaccagtgtctggggccagcaccaccgctcagtctctgaacccacttatttcgcccaatattgcttgagtgg

SEQ ID NO: 841599 - DNA, 120 bp, Artificial Sequence
  ENSG00000231527_19 (sequence is synthesized)
gaagttccaccttccccagtcggctgcttatctcgtctttccaatgcagttaggaagggaaaatattttctccccattttacagatgaagaaatggggcctggcgaggagcaaagcccag

SEQ ID NO: 841600 - DNA, 120 bp, Artificial Sequence
  ENSG00000231527_20 (sequence is synthesized)
aactgctgcccaccaccctccctgcctggtgctttcctgggaacatgtgggagcccctgcctggaccttgggacctcccatctgtaattgcaggccctggtctgcctgtatggatgtgga

SEQ ID NO: 841601 - DNA, 120 bp, Artificial Sequence
  ENSG00000231527_21 (sequence is synthesized)
atgtgtcactcgggatcctggagtcctcctgagcttgtccagcagggctgcattcactgatgtgctgacagaggcctaggctcggacctctaggaatatccaaggcatctcattatgcag

SEQ ID NO: 841602 - DNA, 120 bp, Artificial Sequence
  ENSG00000231527_22 (sequence is synthesized)
aaaaccaccctcatgaggtcctggaggcctctctccatcttcctgggggtgatgcaatagagtgtaacttccatgctgccgagacaggccatgaggggttgcccccgttggaggggcaga

SEQ ID NO: 841603 - DNA, 120 bp, Artificial Sequence
  ENSG00000231527_23 (sequence is synthesized)
gtggtatttgtggggtggtaggaatcattcaatgcccagctgcaaccccccgggctcacagcacactcttaaggccagtgctaccagctcccttgggtggatagaggagctacggctcag

SEQ ID NO: 841604 - DNA, 120 bp, Artificial Sequence
  ENSG00000231527_24 (sequence is synthesized)
aagcatgcccacagctcccccaggaccctgaggccagcctgtggcagggcctgtgatttgaacccctctacaaggcttcaaatcagtgctgtttgtcctggcctcataaaacctggctgc

SEQ ID NO: 841605 - DNA, 120 bp, Artificial Sequence
  ENSG00000231527_25 (sequence is synthesized)
ccagttgggattggtgtcatctgccttgctgaactgggcactccttgggaagagggtgggtgctgcgagaaggcggtggatcctggctgtgcaaccttcgcaggtggctgaacctctctg

SEQ ID NO: 841606 - DNA, 120 bp, Artificial Sequence
  ENSG00000231527_26 (sequence is synthesized)
caagaagaagtgttatggagatggagcaggcccttcgtaaaaacacgatgttggttttctggattttgtatgtttgcttttttttttcctcatcctaaagaaatattcactgtcatacct

SEQ ID NO: 841607 - DNA, 120 bp, Artificial Sequence
  ENSG00000231527_27 (sequence is synthesized)
tcagcaaccaccacctcgatcagtcactagctatcaacattgagacaagaccatccagcagcaaaatgatgatgacttactgaaggcccagatgatggttagcagtttttggcaatcacg

SEQ ID NO: 841608 - DNA, 120 bp, Artificial Sequence
  ENSG00000231527_28 (sequence is synthesized)
tattttcaaaggacacggcttcccctgaacgcggatcctagaggccaggcagaagcagcatgggtttccactcacacggtaggcggctgtgcaatttcgtctggagtccccagacccctc

SEQ ID NO: 841609 - DNA, 120 bp, Artificial Sequence
  ENSG00000231527_29 (sequence is synthesized)
ctcatccttcccagggttgctctgaggccattccttgtcatctaggaggggtctacataaaagcatttataaacacctccaaatgggagccaggcgtgcccacctttggagcacttttct

SEQ ID NO: 841610 - DNA, 120 bp, Artificial Sequence
  ENSG00000231527_30 (sequence is synthesized)
caggcaggagtgtggtgggacatccggctggggtaaggacaggcaccctcccactgtgtcagggcccagagagtgggtggagaagctctgcaagagacctgtgcaagggcgccttgcagg

SEQ ID NO: 841611 - DNA, 120 bp, Artificial Sequence
  ENSG00000231527_31 (sequence is synthesized)
agcctgcagtccccacaggtgtgtttgtggataacacttggggagccctggccttttggggtcacggagggcttggcctctcacctcagagctgcagagaagccgcttctacatcaggac

SEQ ID NO: 841612 - DNA, 120 bp, Artificial Sequence
  ENSG00000231527_32 (sequence is synthesized)
atcagaagctggaacaggatggccggcgaggggcctcttgttggggtcacagagatgggtcgcagagatggcccgtgtggaaggttggattctcaccccacctctgcccctagatgtcct

SEQ ID NO: 841613 - DNA, 120 bp, Artificial Sequence
  ENSG00000231527_33 (sequence is synthesized)
ggtgaccctcccctctgtagtcttggttttttgcaaaacagttatgacctcctgccatactgggtactttgcttatgtattgtgtttactctttactgtgtgtctctcctgctaaggtct

SEQ ID NO: 841614 - DNA, 120 bp, Artificial Sequence
  ENSG00000231527_34 (sequence is synthesized)
acgaagaagggtctttgtgggtggggttcttagaggcatcccaagtaccagaagcagtccctggactaaggggctcaataaatattttttatttattattttttctttttgagatggagt

SEQ ID NO: 841615 - DNA, 76 bp, Artificial Sequence
  ENSG00000231527_35 (sequence is synthesized)
ttgagatggagtctcgctctcttgacgcctcctgggttcaagtgatttccggctaatttttgtatttttagtagtg

SEQ ID NO: 841616 - DNA, 120 bp, Artificial Sequence
  ENSG00000231527_36 (sequence is synthesized)
agaagcggggcaagccactgatatttcaaaggaggtgggaggcagagggctgatggatcagtgaatttgcagctgacgctaggccttgagacctatgggatcattgtgtgctgcagcgag

SEQ ID NO: 841617 - DNA, 120 bp, Artificial Sequence
  ENSG00000231527_37 (sequence is synthesized)
agacctatgggatcattgtgtgctgcagcgaggccctgccggcctctccagatgtggtgagcccatcctatctcagtgggagggggccagaatcggatctcaacgggagtccggagaaca

SEQ ID NO: 841618 - DNA, 83 bp, Artificial Sequence
  ENSG00000231527_38 (sequence is synthesized)
cccctctcccacgccgccccaaacaggacccaggatccagccgccgccgcggcggcagcgatatttaaaggggacgcagccta

SEQ ID NO: 841619 - DNA, 120 bp, Artificial Sequence
  ENSG00000231527_39 (sequence is synthesized)
ccgccgcggcggcagcgatatttaaaggggacgcagcctatctgtcaggagcggagcgcgagtcggctcagccaatgcgcatgcgcgaggcgcgagcggtttctcccgtcacagtggttc

SEQ ID NO: 841620 - DNA, 120 bp, Artificial Sequence
  ENSG00000231527_40 (sequence is synthesized)
aagtgtagaggtaagtagtagatgccaagtttacctccaggtaagaaggggcagatgccccagggcagaatcataaccataatcaggcctcccactgcatgagacattatgttctgaagc

SEQ ID NO: 841621 - DNA, 120 bp, Artificial Sequence
  ENSG00000231527_41 (sequence is synthesized)
gaccagtagcactgtgttcatgaatgtcaggtcaaaaatttaaaactgggactatccagaagaacctggtagatgcaggtgcagtccacagtccaatggtcagccttgataacaggccac

SEQ ID NO: 841622 - DNA, 120 bp, Artificial Sequence
  ENSG00000231527_42 (sequence is synthesized)
cagccttgataacaggccacctgtactttctctttatcatggagtccttgatgtaaaaattgatgacactttcttgcttctggtgtgcttccctttcttcttcattttccataagtagtt

SEQ ID NO: 841623 - DNA, 67 bp, Artificial Sequence
  ENSG00000231527_43 (sequence is synthesized)
tcctccatccctccataacacgaatttagaggccagacagggtggatcacgcctgtaatcccagcac

SEQ ID NO: 841624 - DNA, 81 bp, Artificial Sequence
  ENSG00000231527_44 (sequence is synthesized)
cttggctgttcaagtgtagagggctaacaccatactcaatgatgaaaacctgaaaactttccctaagatcaagaacaaggc

SEQ ID NO: 841625 - DNA, 120 bp, Artificial Sequence
  ENSG00000231527_45 (sequence is synthesized)
ctgcatttccaactgagatgaattggtgaatagctttgtgacagacctttgttcaagatccattcaaggatagaagacaattgcattgaatggttgaatagggagatttctcaggagaat

SEQ ID NO: 841626 - DNA, 120 bp, Artificial Sequence
  ENSG00000231527_46 (sequence is synthesized)
gttgctgggtgcggttgaatatttactctcccacatccttgcctggcaggagggcctgtaaggaggctattctatgagcttgtatcatctccctggattctaggagcaaattaagaagca

SEQ ID NO: 841627 - DNA, 120 bp, Artificial Sequence
  ENSG00000231527_47 (sequence is synthesized)
cacatagttacgcatgctgttgctgactgttgacacataccatcggctaagagcagtggctggctttgaaacagctccaccttccctgaatactctttcagcgtctctgacgtctaggcc

SEQ ID NO: 841628 - DNA, 120 bp, Artificial Sequence
  ENSG00000231527_48 (sequence is synthesized)
aagtttgtgtacttagctccatgacagcatcaagatacaaacaacaagaactgatggatttcagtacatcttctggggctcctgcctgtgggatacagcttgtctttgatgtcttaccct

SEQ ID NO: 841629 - DNA, 120 bp, Artificial Sequence
  ENSG00000231527_49 (sequence is synthesized)
ctacatccatgtctccttcctgtctgtgctgtggacttcaaactccagcatcagacatgaagacaacatcctgcagagattgctttaagcagctcccacagttataacaacatcatggcc

SEQ ID NO: 841630 - DNA, 120 bp, Artificial Sequence
  ENSG00000231527_50 (sequence is synthesized)
ctatagcaaatatcataaaaatttttccacacctatattcacaaacataaaatcttttattggttctgtttctcagttgaatcatgactgatacaatatgagaagcagtatattattatt

SEQ ID NO: 841631 - DNA, 120 bp, Artificial Sequence
  ENSG00000231527_51 (sequence is synthesized)
tataggtaaggtgtcattaattacagatgcatgggtcaggcatagtggctcatccctgtaatccaagcactttgagataccaaggtaggaggatcccttgaggccaggaatttgagacca

SEQ ID NO: 841632 - DNA, 120 bp, Artificial Sequence
  ENSG00000231527_52 (sequence is synthesized)
gcctgggtaacaaagtgagactctgtctctacgaaaaacaattttttaaggtgcatattataaacctagggaaccactaaaatatttttaaaagaagcataaatgataaaaaaacaaaaa

SEQ ID NO: 841633 - DNA, 120 bp, Artificial Sequence
  ENSG00000231527_53 (sequence is synthesized)
atggagattaaatggaatcattaaaaataattcaaaatcagttagaaaaagaacaaagaacaaatataacaaataaaaacaagatatgagatagtacattaaaatccaactgtatcagta

SEQ ID NO: 841634 - DNA, 120 bp, Artificial Sequence
  ENSG00000231527_54 (sequence is synthesized)
gctgtatttaatttaaatgacctaaacataccaactaaaacacagagatgatcaaattagataaaaaagcaagaatcaactataatctatctataataaattcacattaaatataaaagt

SEQ ID NO: 841635 - DNA, 120 bp, Artificial Sequence
  ENSG00000231527_55 (sequence is synthesized)
atacaggttaaaagtaaaaggatgaaaaatataccatatatgccatgcaaacagttgctctattagtattagataacaggaaattccagaacaaagaatatcttcagaaataaaaagcca

SEQ ID NO: 841636 - DNA, 120 bp, Artificial Sequence
  ENSG00000231527_56 (sequence is synthesized)
ttccacaaaaacctggttaggatttggatagcaatttctttagttctacaaatcaatttggaaaaaattaattaatttgggaagaattcattttgagtcttctaatccatgaacatggta

SEQ ID NO: 841637 - DNA, 120 bp, Artificial Sequence
  ENSG00000231527_57 (sequence is synthesized)
tctccatttgtttagaccatctttaatgcctactaataacatttctgtatagtgaccttgcacattattcttagattcttgatattttgtgctattatgtctttttataaattttatttt

SEQ ID NO: 841638 - DNA, 120 bp, Artificial Sequence
  ENSG00000231527_58 (sequence is synthesized)
tccaacattgttgctaatatatagtaagaaaatggaatcttgcctatagattttgaacccaacaactttgctaaactcctctgaatcctcagaatttccctgtggattatgtaggctctt

SEQ ID NO: 841639 - DNA, 120 bp, Artificial Sequence
  ENSG00000231527_59 (sequence is synthesized)
ccagtccccgaggcttggcaaagcaggagccctctgtggcagtgcttgggtgtcggggctctgaggatccggcctcacctctccacggggtcgacgggaacgtctccggatgccaggagt

SEQ ID NO: 841640 - DNA, 81 bp, Artificial Sequence
  ENSG00000231527_60 (sequence is synthesized)
acctctccacggggtcgacgggaacgtctccggatgccaggagtcgcaaagggccgaccacgatgaggaaaccccaggctg

SEQ ID NO: 841641 - DNA, 86 bp, Artificial Sequence
  ENSG00000231527_61 (sequence is synthesized)
atcaagatgagtacactgcagccgagaacaagagccccagaggaactctttgtcccacaggagagcagcggatccacgccagagaa

SEQ ID NO: 841642 - DNA, 120 bp, Artificial Sequence
  ENSG00000231527_62 (sequence is synthesized)
ggaatgggagatggcaacagtccctgtcactggaacgctggcctccctggacaagccaccctttaggaaccccaccccttatgtctgtggcggtggcacggtgctgtatcctgcctgggc

SEQ ID NO: 841643 - DNA, 120 bp, Artificial Sequence
  ENSG00000231527_63 (sequence is synthesized)
tctggcctctactctctcctccctctggctctgcctcccctgtttctcaggggcctggatgcctctcgctctggccaaatgccttcaaaaaagatgacttcccagtccgtcagggagaca

SEQ ID NO: 841644 - DNA, 120 bp, Artificial Sequence
  ENSG00000231527_64 (sequence is synthesized)
attacaggcgtgagccaccatgcctggcaacataacatttatatgcaccagaaagcaaaaaatatcgtgtgacttgcaaaaaatttcgtgtgacttgcgctgttgtgacattcaccttat

SEQ ID NO: 841645 - DNA, 120 bp, Artificial Sequence
  ENSG00000231527_65 (sequence is synthesized)
ctgcaatatctccaaggtgtgcctgtatccctagaagcagagctggagtaaggacttcggtgtgggtggtttatttggaaagtgattccaagaagcaagagtcagaagtgggaagagtga

SEQ ID NO: 841646 - DNA, 120 bp, Artificial Sequence
  ENSG00000231527_66 (sequence is synthesized)
gtcagaagtgggaagagtgagccaggcaagaaagaaaagccaaaataatggcatgctattgaggctcctgccatgcagttttttctgcaggaccttccgagaggctccggaaagttatcc

SEQ ID NO: 841647 - DNA, 77 bp, Artificial Sequence
  ENSG00000231527_67 (sequence is synthesized)
ttttctgcaggaccttccgagaggctccggaaagttatccagaaatgcccacctgaaacatgagcctggagcatttg

SEQ ID NO: 841648 - DNA, 120 bp, Artificial Sequence
  ENSG00000231527_68 (sequence is synthesized)
aatcgtacaataatggagattccctagggcagaaagtgtatcttgagtttgctggcagcacaagagaagcctgtgcttccatggaacttctcacggtgtctgagactgaatgaaaggtga

SEQ ID NO: 841649 - DNA, 120 bp, Artificial Sequence
  ENSG00000231527_69 (sequence is synthesized)
aaaggtgagctgagaaaacatgacgcaggcgccattgcactaagcaatcatagccatcgatctgggcaagaggacccctgccctgaatcctgcacttgagaaggtgcctctctggccctc

SEQ ID NO: 841650 - DNA, 120 bp, Artificial Sequence
  ENSG00000231527_70 (sequence is synthesized)
gtaccctggcccactcagagcttcaccctctcttctagggcacatgctgggcactcagggacctggcgaaatgtgcctgagcctgcatggcctcttccctgggtccatttcaaagtgcaa

SEQ ID NO: 841651 - DNA, 120 bp, Artificial Sequence
  ENSG00000231527_71 (sequence is synthesized)
ttccccacacaagggtttgcaaagcttctcaagtgaggacagggctacctacgatgaaagaaaaaagtttagcctggggctgatgatcagctctccctttactaccacattcctgtgcag

SEQ ID NO: 841652 - DNA, 120 bp, Artificial Sequence
  ENSG00000231527_72 (sequence is synthesized)
actaccacattcctgtgcagagcaccaagaaatcagagaattctacactcaactttgaccttgtgggttattatggcagtatatttatcgaaataggagaatagaacatatttaactatt

SEQ ID NO: 841653 - DNA, 76 bp, Artificial Sequence
  ENSG00000231527_73 (sequence is synthesized)
aggaaatgggctttatatgcttggatggctttgtggaatccccaacttcattagcttctgtggtgactcaagattg

SEQ ID NO: 841654 - DNA, 80 bp, Artificial Sequence
  ENSG00000231527_74 (sequence is synthesized)
atattatgtagatcagtagttagaaggtacttgactcaaaatatgtatgaaccaaaggatataaatgactaaaagcagaa

SEQ ID NO: 841655 - DNA, 120 bp, Artificial Sequence
  ENSG00000231527_75 (sequence is synthesized)
atatgtatgaaccaaaggatataaatgactaaaagcagaaggattattacctgaagtggtggaaggttgatctcaggatatgacctgtgagatccttcctgctggctcagtgctggctga

SEQ ID NO: 841656 - DNA, 120 bp, Artificial Sequence
  ENSG00000231527_76 (sequence is synthesized)
acggggggtaggagagcaccaggaacaacacacatctgggacaggagggaatccggggaggaaggaaagagaaataggcctttttatttttattgatacatgacaattatacatatttgt

SEQ ID NO: 841657 - DNA, 120 bp, Artificial Sequence
  ENSG00000231527_77 (sequence is synthesized)
atattttgatacatgcatacaatgtgtagtgatcaaatcaggataatttgcatatccatcacctcaaacatttatcatttatttgtgttgagaacattccacatctttcctctactcatt

SEQ ID NO: 841658 - DNA, 120 bp, Artificial Sequence
  ENSG00000231527_78 (sequence is synthesized)
cctctactcattttgaaatatataagttattgttaatgatcatcaccctactgtgctattgaacactagaaatttttctgttccttccatctaactgtatttttgtgtccattaaccaac

SEQ ID NO: 841659 - DNA, 120 bp, Artificial Sequence
  ENSG00000231527_79 (sequence is synthesized)
ttctgggaagggcaaaagagtgggtggatgaaaagggccctttttaaggaaaagtaaatcttacaagaagggaagacatcttaggaggaaaaataaaaaggtggaccatgggcttagagt

SEQ ID NO: 841660 - DNA, 120 bp, Artificial Sequence
  ENSG00000231527_80 (sequence is synthesized)
agggactgcagaaattgaatggcaaagaaaaaaccaacttagcaatgtgaaaatacatctcaatgtcattcttttcgcaggtccagtgtctgattcttttgggaagctggatatgaagtc

SEQ ID NO: 841661 - DNA, 120 bp, Artificial Sequence
  ENSG00000231527_81 (sequence is synthesized)
agaatctttctttgagtcatacattttcatgattatgattattattgaatgatagctgacaattattgagagcaattattgaggacaattattgagctttcacaagcccttttcaaaggt

SEQ ID NO: 841662 - DNA, 70 bp, Artificial Sequence
  ENSG00000231527_82 (sequence is synthesized)
cacaggcataaagcctatgtggaggcagagagcagctacgtaacctgaccatggcccaacagcaaacaaa

SEQ ID NO: 841663 - DNA, 120 bp, Artificial Sequence
  ENSG00000231527_83 (sequence is synthesized)
ggggccacatgcaaatccaggcagaatccttctattatatgaagctcaatgttttcttgtttgcagcttgttatgaatacatctatttgcaaatgggttttgaagctactttaaaacatt

SEQ ID NO: 841664 - DNA, 120 bp, Artificial Sequence
  ENSG00000231527_84 (sequence is synthesized)
atacatctatttgcaaatgggttttgaagctactttaaaacattttgtggctgtgcgtggtggctggcacctgtaatcccagcattatgggagaccaaggtgggcagattgcctgagctc

SEQ ID NO: 841665 - DNA, 120 bp, Artificial Sequence
  ENSG00000231527_85 (sequence is synthesized)
agctcctgaccatgtccctagattgtactcatatgtattttgatgtctaataagatttattctcagtgcattttttaagtgaaagtatttattgagcatctactgtatatcatgtgctga

SEQ ID NO: 841666 - DNA, 120 bp, Artificial Sequence
  ENSG00000231527_86 (sequence is synthesized)
ttaggacaccaacacatgtgtgaatataagatagtatgatagatattgcaacaagtaattatttactgtaaacctattttataggattttaaacttaaactactttcaccctatttccaa

SEQ ID NO: 841667 - DNA, 120 bp, Artificial Sequence
  ENSG00000231527_87 (sequence is synthesized)
aaactactttcaccctatttccaaaaaaaagtattgcataactttaaatagattctcagtttgaaatcatcatacaaactgcagtagcatctgctggtgaaatactgctttgtatctatt

SEQ ID NO: 841668 - DNA, 120 bp, Artificial Sequence
  ENSG00000231527_88 (sequence is synthesized)
tttgtatctattagaatagtccaaacaattgtgagacaactgcattattagagctgtaaaagttattgtctagaaatctcagagaagaagaggaagttctatggtagatgaataagatga

SEQ ID NO: 841669 - DNA, 120 bp, Artificial Sequence
  ENSG00000231527_89 (sequence is synthesized)
ggatatctcacagcacaaagttcaagtgtatgcccacagctcctcatgccacaagatgtgacacctttccaatctctttttgcaaaagtttccaattatgtctcttttaagagtactttt

SEQ ID NO: 841670 - DNA, 120 bp, Artificial Sequence
  ENSG00000231527_90 (sequence is synthesized)
tatacccacatattccagattttgtggtgcacgcaaagacaagatgggaaggggcttccatttattgatgccagctgctccatggaccaggccctgcccatgcatccatgttggttcttt

SEQ ID NO: 841671 - DNA, 120 bp, Artificial Sequence
  ENSG00000231527_91 (sequence is synthesized)
tatccccacatcagccatagcccataagcattaactgccattgcacagatgaggaaattgaaagtctaagagaatatgcaatctacccagagtcatgcagcttgtgtatgtaagggttgg

SEQ ID NO: 841672 - DNA, 120 bp, Artificial Sequence
  ENSG00000231527_92 (sequence is synthesized)
aatgaaaatccaatctgtgtgagtcccaagtccccttccaccatatggtttccatttcattttgcaatcagattggctgggatatgtctgccctaaaagacagtaagtaggaatatttgt

SEQ ID NO: 841673 - DNA, 120 bp, Artificial Sequence
  ENSG00000231527_93 (sequence is synthesized)
ctctataccttaacctgacatccatgggcttgctttttgtatttggaggtgtcataacattataataataatttgattttatttgtacagtggatattatactactcagtctagagattt

SEQ ID NO: 841674 - DNA, 120 bp, Artificial Sequence
  ENSG00000231527_94 (sequence is synthesized)
cttcaaggagacaagtatgagtaataaggtagtaataagctgaatttctatggagttgctacttctgaattaaaactagttgagattaagtagatattcaaaaatattgctataatcttc

SEQ ID NO: 841675 - DNA, 80 bp, Artificial Sequence
  ENSG00000231527_95 (sequence is synthesized)
tatggagttgctacttctgaattaaaactagttgagattaagtagatattcaaaaatattgctataatcttcacttgaat

SEQ ID NO: 841676 - DNA, 120 bp, Artificial Sequence
  ENSG00000231527_96 (sequence is synthesized)
atgctctcccattacaaaattttacaccttctttctgtatcaggagtttgactcttttttgtcaacactttgagcatccccttgactgtgctgtaactggagatggacacccgctcgccc

SEQ ID NO: 841677 - DNA, 120 bp, Artificial Sequence
  ENSG00000231527_97 (sequence is synthesized)
ctcaaggaccgcatcgctctccagcactcctcctcttcttataacttttgcctagtcctagaatatgttgcctcttctcaaaaataaggtaccacaaagcctctggtgacggtggagcaa

SEQ ID NO: 841678 - DNA, 89 bp, Artificial Sequence
  ENSG00000231527_98 (sequence is synthesized)
gcctcagcctcccaacatggccaaatatttgtcaaattgaatttgtatttccatacaaattttagtctggataaagtgcttcatgcctg

SEQ ID NO: 841679 - DNA, 120 bp, Artificial Sequence
  ENSG00000231527_99 (sequence is synthesized)
agaagtttaatatgcaaaagaagaaagctctccccagcggaggggggacccgaaagagggttgccaactaggaggctgaatctgggggttttgtgaactgggaaggggaagaatgtgctc

SEQ ID NO: 841680 - DNA, 120 bp, Artificial Sequence
  ENSG00000231527_100 (sequence is synthesized)
actagtctgtgagctgtcttggagaaagcacaacttcgcttggcccgggaccttagcttgggaccaaccagaggctgaagtgaaattttggcccaagaacaatcaggggctgaagtgaaa

SEQ ID NO: 841681 - DNA, 120 bp, Artificial Sequence
  ENSG00000231527_101 (sequence is synthesized)
gtttggcccaggaccaatcaggggctgaagtgatgattcatagaggcttggctcacagtccaaagcatgtccagaaaaggaaagtggtcaccagagcctgttagtccaagctgcaccgat

SEQ ID NO: 841682 - DNA, 120 bp, Artificial Sequence
  ENSG00000231527_102 (sequence is synthesized)
ttgtaagcccccaccgtttcacagaccctggtcagagggaaacattccactggggtttgggctgcgagaaacatcctccccaaccgcctgacttccttatcacatcctgctggggaaagg

SEQ ID NO: 841683 - DNA, 120 bp, Artificial Sequence
  ENSG00000231527_103 (sequence is synthesized)
cccaagaaacatccttatcaacattctcccaggcaacaagctatactgcccagatccctcctgcccaggcctataattactccagcctgtaagcggcagtgggctctggcatttagttgg

SEQ ID NO: 841684 - DNA, 120 bp, Artificial Sequence
  ENSG00000231527_104 (sequence is synthesized)
tcccctccatagagccgccaactctctctctttctttaaccttcaccttcccttcaaaatctaacagagcccaccatatacatgcccacaaaaaagcgactatttcctggaagcccgctg

SEQ ID NO: 841685 - DNA, 120 bp, Artificial Sequence
  ENSG00000231527_105 (sequence is synthesized)
gtcacacaaaggacaaaggcatttctatgttgggcctcggtcccttatcaatgcagctgaggaatgtctttaggacaaccccctttgctagttttccttctctgtgcctgcagcctgatt

SEQ ID NO: 841686 - DNA, 120 bp, Artificial Sequence
  ENSG00000231527_106 (sequence is synthesized)
tttcaggctgtttctctgttgaaaggagttttaccaaggacccgctctaactccctaaagggttttttctctcaaggggacacacaaatttccaatcgcacacatgcctccctatatcca

SEQ ID NO: 841687 - DNA, 120 bp, Artificial Sequence
  ENSG00000231527_107 (sequence is synthesized)
ggggccacacaagttgcacctgcacagccacagacctgcaactcatgcacacacagtactgcacacacacgcaaagtcacacacccaccctgggacacgcagcccccactacacagtcac

SEQ ID NO: 841688 - DNA, 120 bp, Artificial Sequence
  ENSG00000231527_108 (sequence is synthesized)
cggttgtccacatccgcacacacaacgcggctcgtccaggacacacacatccactccgagcgcgcacagtcacaagcgcccacctgatcacccagagtcagcaccacacagccacagtca

SEQ ID NO: 841689 - DNA, 120 bp, Artificial Sequence
  ENSG00000231527_109 (sequence is synthesized)
cagaccacgaagacccacggcaaccatcgcaatcacacacgcaaactcctctcctcagccctccacacacaaaaggaccagagccggattcctcatcctcagctttctctagttccgctc

SEQ ID NO: 841690 - DNA, 120 bp, Artificial Sequence
  ENSG00000231527_110 (sequence is synthesized)
ggggccggcctggccaagttactccggactccaaggcgtggcagcagctaattgggcacagcgaaagattctgccacctggctaagaggaagccaaaatctcgcgagacatgggacacgg

SEQ ID NO: 841691 - DNA, 120 bp, Artificial Sequence
  ENSG00000228037_0 (sequence is synthesized)
gaaatgccgtctaacgggatctctggatggagaattccacagctgattggaacctaaacgagagaaccaaatggacatcccagggctgcagaagccaccccatctatgactaagacaccc

SEQ ID NO: 841692 - DNA, 120 bp, Artificial Sequence
  ENSG00000228037_1 (sequence is synthesized)
tcccaccttcatgctactgagtggacaagcttacatgaaatgactgttttcacatatgtggcaccaggcagcccagggatgccggtgaaatctctgggagaacggcatgttccagagagc

SEQ ID NO: 841693 - DNA, 120 bp, Artificial Sequence
  ENSG00000228037_2 (sequence is synthesized)
aacgaaggaggcatcagaagctgagccacccgtggccgacaagaaacctgagtgggaggggaaacttggttgctgtgatcgacccaggcttgcgagttgttttggcaacacagcctagca

SEQ ID NO: 841694 - DNA, 120 bp, Artificial Sequence
  ENSG00000228037_3 (sequence is synthesized)
agagccgaccaatatgtcattgatgaaagaaagtcaacaggcgtgtagaaggagctgtctactgagcatgtctgcacttttctgaattatgttgcacttgagtaaaaagtaagcaagcct

SEQ ID NO: 841695 - DNA, 120 bp, Artificial Sequence
  ENSG00000228037_4 (sequence is synthesized)
gtctatttactttaaatgatgtgtgccagatatgtacagtatgcagagttaagaaggtgccaccccaaaataggctgctctggcatagtcactattaggaattaaaggcagttaaaacaa

SEQ ID NO: 841696 - DNA, 120 bp, Artificial Sequence
  ENSG00000231529_0 (sequence is synthesized)
agtacaaatgtcaaacactggatcctggtgtaattaaagctgggccctcagagatgtggcagaggcttacaatggtgccaccaccctgtacattactcacctggtgcctgtcaggtgaca

SEQ ID NO: 841697 - DNA, 120 bp, Artificial Sequence
  ENSG00000231529_1 (sequence is synthesized)
cctcagcgtgaacaggaatatcgcctgacaccatagaaacactgtcctctgattcaggactcaccaatggggaagttaaaaattaaccatggcatttatgctacccctacgcacaccttc

SEQ ID NO: 841698 - DNA, 120 bp, Artificial Sequence
  ENSG00000231529_2 (sequence is synthesized)
agacttcagaaatgtctcctggcagaggcctctttggcctgatgaaaggctgagtagtagggccaaggctatcttttgcccagtgtcctgggactctggggtattgtgatagccccagaa

SEQ ID NO: 841699 - DNA, 120 bp, Artificial Sequence
  ENSG00000231529_3 (sequence is synthesized)
ctcacagccacttttacttctagagttgtagccccaagaaggatgtcaaataagggaacgaaacaccctccagagagatacctccaaagctcacctatagaggtcaacctctgccagtcc

SEQ ID NO: 841700 - DNA, 120 bp, Artificial Sequence
  ENSG00000231529_4 (sequence is synthesized)
tttgggatgaggtcatgaatgcctttctgcagtggaaagctttgccttctgcagttcgtgagtcagttgtgacatggacagcatatagtccttcaacctcagcctgctcactggtgggat

SEQ ID NO: 841701 - DNA, 120 bp, Artificial Sequence
  ENSG00000231529_5 (sequence is synthesized)
atggacctattcgagtctgctgcctcagatatatgggctatcattatcctaagtgcctgcacacctacccacccctgacctgcctgccctgctcaggattaactcagtctggaaagcttc

SEQ ID NO: 841702 - DNA, 120 bp, Artificial Sequence
  ENSG00000231528_0 (sequence is synthesized)
gcccaaccgccgcctccaacgggactggaccagaccgggtgggaccggaccgcggtttgagtccaagcccagcggtgtttgcggcgggtccggggcctggaagcgcgggggcggcgccga

SEQ ID NO: 841703 - DNA, 120 bp, Artificial Sequence
  ENSG00000231528_1 (sequence is synthesized)
gaacgaaactggaaaatggccttcattggaaaagccccagtcctcggggagcagatcccccatctctggcagtgcagtgtgcctgggagctgtctggaacattccgcaacggtcactcct

SEQ ID NO: 841704 - DNA, 120 bp, Artificial Sequence
  ENSG00000231528_2 (sequence is synthesized)
ctgccctgcattggccttgaccacatgacccagaggtgcagggagaagcctcccttggatgcttggagtgacttcagctgctgagagtgtctaaggagagccgggaacaccgcacgcttc

SEQ ID NO: 841705 - DNA, 120 bp, Artificial Sequence
  ENSG00000231528_3 (sequence is synthesized)
ctgcagatggcggggcagacctgtgtgcaagagtgcctgaaggggatctcccgtggcgctacctggtccagggaggtcacagagagctcctccaccctgagcacagggggtcccaccaag

SEQ ID NO: 841706 - DNA, 120 bp, Artificial Sequence
  ENSG00000231528_4 (sequence is synthesized)
gacaaggacaagattcagcaccgtcgcacacagaacagctacctggagccacaggtcactttccaaaaagggagtttccaggccagaagccatccctgcagcattgtctttgtgctccaa

SEQ ID NO: 841707 - DNA, 120 bp, Artificial Sequence
  ENSG00000231528_5 (sequence is synthesized)
gagaagccctggcacacacttctgctcagatggaaccactgttccctcagtgtccttgtcagtaccagctggtgactttcctactcaaacccttccctcactctctgcctcattttctca

SEQ ID NO: 841708 - DNA, 120 bp, Artificial Sequence
  ENSG00000231528_6 (sequence is synthesized)
aggtgccgtgtttgcctgaaaggacattggcagccagcaggggcggcggctggtcctctagatgggcacgaatgccattggcaggcaatggggcagactccatggaaagatgcttctctt

SEQ ID NO: 841709 - DNA, 120 bp, Artificial Sequence
  ENSG00000231528_7 (sequence is synthesized)
cctcaaggtatgcactcagcggggagacctcattgtcaagttcagagttacgctgcagactgcacagcacctcgcctgcttctagggcctgctccggtcagcccaggacccaccacagca

SEQ ID NO: 841710 - DNA, 120 bp, Artificial Sequence
  ENSG00000231528_8 (sequence is synthesized)
ggaccccccatcctgtgctcacccggggcttgtccatggcactggaaactccttcctgttcctgatccccctctgggcgaggggtgggcagggacatgtggctcgtgccgaggtctaata

SEQ ID NO: 841711 - DNA, 120 bp, Artificial Sequence
  ENSG00000231528_9 (sequence is synthesized)
ctgtgttcccagcatggaagcaggtggggacacttcctgtggcatgcaggattccgtgtagaaagctgtgactgtcacccctcctccccactcagttttgttagtggacctttccctggc

SEQ ID NO: 841712 - DNA, 120 bp, Artificial Sequence
  ENSG00000231528_10 (sequence is synthesized)
ccttctctccttggccccctcttggcaggagagaggaggagaggatctcactttccccctgtaccagccacaccctcggtctgcggggttcccagcagctggccagggatgctccacacc

SEQ ID NO: 841713 - DNA, 120 bp, Artificial Sequence
  ENSG00000231528_11 (sequence is synthesized)
tggaggtcaagtaaccgtcccctcactctgggcatcggtgccctctctggggttggaacaggaaagaaagccaagacctgtatgtgggacttgagttgagactcaattctgtagagtcag

SEQ ID NO: 841714 - DNA, 120 bp, Artificial Sequence
  ENSG00000231528_12 (sequence is synthesized)
gggtgaggaggagccaggcctcctgtgtgctctccataccccagagccgggtgcccagttccatgggtcctgatggacagaagggaagaacgggggggctgctgcaccgtgggtggtaat

SEQ ID NO: 841715 - DNA, 120 bp, Artificial Sequence
  ENSG00000231528_13 (sequence is synthesized)
gcagtgggagccacctccagctgaatgcccagggactcctggggctgctggccccgggtcccagcagtgggtcctgtttcttctttactcttggaatgcaggatctgccacaccaaaacg

SEQ ID NO: 841716 - DNA, 120 bp, Artificial Sequence
  ENSG00000231528_14 (sequence is synthesized)
tcccctccacatttggtgaaataggaagctccatggcatgtctccatctttcaaggtgactgagaggtttattttcataggagcctcagtggccttgtccgtacccacctctgcacgtgg

SEQ ID NO: 841717 - DNA, 120 bp, Artificial Sequence
  ENSG00000231528_15 (sequence is synthesized)
ttgcagaaagtgaaggattgtcagggagcagggcagacatttggtttatctgtgtcattggtcaaagttttgtttttcctccagaagaaaaaggcttgtgaacatgccaccgtattcttc

SEQ ID NO: 841718 - DNA, 120 bp, Artificial Sequence
  ENSG00000231528_16 (sequence is synthesized)
attccttcttttggaaatgtatgaagaacgggtggcattttggagttattggcctgtgaacagctggcccagaggaagggttagatgtgggtgggtgtggccgcctctgcccctccccag

SEQ ID NO: 841719 - DNA, 120 bp, Artificial Sequence
  ENSG00000231528_17 (sequence is synthesized)
cgcaggtgtgcgtgggcagcccaggcaggcgctcaggaagggtgaggtggagccctgcacgctctgagcacaaagtcctgggatcccttaaacccaagcactgccttgacagcagccagc

SEQ ID NO: 841720 - DNA, 120 bp, Artificial Sequence
  ENSG00000231528_18 (sequence is synthesized)
atggctgatagaagagacacagaagtccagctgatgccagacagagggcgtcactagagagccgtgctaggtgggggtcattcaagttgtcttggcgtatgcagacgttgcttctagaga

SEQ ID NO: 841721 - DNA, 120 bp, Artificial Sequence
  ENSG00000231528_19 (sequence is synthesized)
gtcagaagctctatatgcgtagtgttggagcagaatttcgggatagtgatggcaagcctcctcccaagccagctggggagtatggggagggggtggccggaggaacctggcatccccggg

SEQ ID NO: 841722 - DNA, 120 bp, Artificial Sequence
  ENSG00000231528_20 (sequence is synthesized)
ttaggaccacagaggtggctctgcctgcagctgggcctctgcctcatcctgactccccctgctttggccatggctcttcttgtccttcctcttctcagtgcaggaggaccctgaatcaaa

SEQ ID NO: 841723 - DNA, 120 bp, Artificial Sequence
  ENSG00000231528_21 (sequence is synthesized)
tgcctcatcctggtttgcattttaccctcggatgaagcttgtggcgaacccctggactctgtgtctcctgagtctctgcagacctcgggtcctggacccagagactcttctccctgggac

SEQ ID NO: 841724 - DNA, 120 bp, Artificial Sequence
  ENSG00000231528_22 (sequence is synthesized)
aggaggcactggggtgggtggacaggggtggcctggggcacagtagctgacggggggacttcctagttttctgggcctttccaactctgagtgtgaccttcctattcttgatcacagccc

SEQ ID NO: 841725 - DNA, 120 bp, Artificial Sequence
  ENSG00000231528_23 (sequence is synthesized)
ctagagcctgcagaatgtggcttcatcctcttcctctgtgggaaaaggcggggcctggcagtcccgccaatcttgtatatttgctccccacctcggtggtgaatacattcttgggtggtg

SEQ ID NO: 841726 - DNA, 120 bp, Artificial Sequence
  ENSG00000231528_24 (sequence is synthesized)
aataggttctctccttgccttcactctagaaaagtcccctgttttgtgatgtaggatgtggtcaatgactgactcgtccctttggaccatagacgcagctctgatttctggtgttcctgg

SEQ ID NO: 841727 - DNA, 120 bp, Artificial Sequence
  ENSG00000231528_25 (sequence is synthesized)
gctctgcacacagcaggagccactctgggctctgagaggtgcatcttctggctcactttcttcttgttggctcttctccctgcgtcttctgccactgccctgttctgggtgggaggctgt

SEQ ID NO: 841728 - DNA, 120 bp, Artificial Sequence
  ENSG00000231528_26 (sequence is synthesized)
cacactgtggtggagggtcccctctcctgcctcccctctttgatccttttctgtgagggtctgctggggtcctgtgtgtcgtgcattgttgatagattcctgtcgtgcttgctgtcctcc

SEQ ID NO: 841729 - DNA, 120 bp, Artificial Sequence
  ENSG00000231528_27 (sequence is synthesized)
ccattctaagggacctctgattgcctgtgagcagtttacagggtcctctcctggccccttcacccgaggaattcccgcaacgcatgagtttgtgaggggcggatcctgggaggatgtgac

SEQ ID NO: 841730 - DNA, 120 bp, Artificial Sequence
  ENSG00000231528_28 (sequence is synthesized)
gtcaggtgagaagggagggcccgtcctagtccggtgggctcctctaacaaagtgcattagcctggggagttactgacgctcgaaatatgtcgtcaaagttctgaaggctgagaagtccga

SEQ ID NO: 841731 - DNA, 120 bp, Artificial Sequence
  ENSG00000231528_29 (sequence is synthesized)
gatcaagatgcctgaggattcagtgcctggtgaggacccattccttagggcagtgcctctagctgtgtcctcatgtggccgaaggggacaagggaggttgctggagcctgtttgatgaga

SEQ ID NO: 841732 - DNA, 120 bp, Artificial Sequence
  ENSG00000231528_30 (sequence is synthesized)
gcactaccttccttcaggaggggattattcagaaagtctgtctggtttcagggcattcccaaaggccccacctgttcattctaccccattggtagaattcccattgggaattaggcttca

SEQ ID NO: 841733 - DNA, 120 bp, Artificial Sequence
  ENSG00000231528_31 (sequence is synthesized)
acatacaaatttgggagacactgacatttaggccatagcgcgtcaaaggcaaagtgaggctgagtgtggaaaccatcccagaatctggatgtggcccaggcagaaggaaactcaaagtga

SEQ ID NO: 841734 - DNA, 120 bp, Artificial Sequence
  ENSG00000231528_32 (sequence is synthesized)
tggggtgaccgatggtccctggtctgtgcaggactcagcggtgcggatggccctgggcacggtggcagtggctgttggaggatgatagggaacatgttggtggggggagggtggagccca

SEQ ID NO: 841735 - DNA, 120 bp, Artificial Sequence
  ENSG00000231528_33 (sequence is synthesized)
ctatgagtggcaactccctgggggcacaggaaacaaagctagaggtggctcccctctcccctccctgcacacagtgtcacctctgtggtggccctgtcgtccgcctcagttcacaggtgt

SEQ ID NO: 841736 - DNA, 120 bp, Artificial Sequence
  ENSG00000231528_34 (sequence is synthesized)
tgctgtaacaactcctgaaattaccttcaaaaggaggctcgtgcaggtgcctgcaggagccaggaggccgaagtgcatcctgagtgtccggggacaggccagcctggcggggtccacggc

SEQ ID NO: 841737 - DNA, 120 bp, Artificial Sequence
  ENSG00000231528_35 (sequence is synthesized)
cccacagtcccaacgactgcctcagaaatgggcagagagcatgcctggttctagctggcaaggcccacatctcagagctgtggacagtcatgaagggtccgtgagcatggagagggggca

SEQ ID NO: 841738 - DNA, 120 bp, Artificial Sequence
  ENSG00000231528_36 (sequence is synthesized)
aaaatgacccatgaacctcaggccactgtgctgccatccagccaagtgcggtaccagcccttcgggcctcgagatcctctacccttctctgggccttgctgatttcctcctccagcccct

SEQ ID NO: 841739 - DNA, 120 bp, Artificial Sequence
  ENSG00000231528_37 (sequence is synthesized)
ctgtttgtgtacgcacatacacacatgcacgcacgcacacgcacacccagtgcaatttctctctgctccctgtactccccaaaattcaatgggttcctctttcctcctcagagatatagt

SEQ ID NO: 841740 - DNA, 120 bp, Artificial Sequence
  ENSG00000231528_38 (sequence is synthesized)
cctgggccccatctcagcctgcagaggcctgaacgtttcccaggattgtcttctaattctcaggtccggctttaaaacaaaacctaaactaaaactaaaatgctttctgcaaagaataat

SEQ ID NO: 841741 - DNA, 120 bp, Artificial Sequence
  ENSG00000231528_39 (sequence is synthesized)
acaccaacataaagtccgggtatcctaagcatgtggtgtgtatggtgtctgaaattgaatatgctgtgaaactgcctgtgtcgaaatgcagtgtttcccaagacctggaggctctctcca

SEQ ID NO: 841742 - DNA, 120 bp, Artificial Sequence
  ENSG00000231528_40 (sequence is synthesized)
gctgctgattgtgatcacctctcccgatcaccgctgagccctgcaggtcaccttctcctgacctattacaccactgattgcttatgctgggcacaattttatacccttgctgttgttcag

SEQ ID NO: 841743 - DNA, 120 bp, Artificial Sequence
  ENSG00000231528_41 (sequence is synthesized)
tctaatcatccctataaccctatcggatcattcccatatgacagaggagaaaacctggggacacaggggctgtgtcctggccaaggccttgcttgcagcaaaaggcagagctggggtcta

SEQ ID NO: 841744 - DNA, 120 bp, Artificial Sequence
  ENSG00000231528_42 (sequence is synthesized)
gccaggagccccagcacagtcctgttcttcccccactaaactgagctgtgaaatagatcatggcggtctggaaaacgagctaattccgtgccgatggaggtgttgatggatgtccaccac

SEQ ID NO: 841745 - DNA, 120 bp, Artificial Sequence
  ENSG00000231528_43 (sequence is synthesized)
tctccacttgggaggaggccttaacatccccctcaggtctagcttctctctgtgactgagtaccttgggaaagtgggctcagaggaggaaagggacttacttgcccaagggccacagctg

SEQ ID NO: 841746 - DNA, 120 bp, Artificial Sequence
  ENSG00000231528_44 (sequence is synthesized)
ccaagtggcaggtaagggaccgttattctcctgtccctttcacagaggacaggaggaaagtgaggacaggtggggtacatgagtttagcctcttttctgcagcaggcccagatcagcttt

SEQ ID NO: 841747 - DNA, 120 bp, Artificial Sequence
  ENSG00000231528_45 (sequence is synthesized)
gcacacggttggtgctgacctcaaatgcagccctagaggggcctatctctgccctgagtattgaggtgcaggcttcttcccctttgttctgtccatttccaaaaatgtgaacacacacct

SEQ ID NO: 841748 - DNA, 120 bp, Artificial Sequence
  ENSG00000231528_46 (sequence is synthesized)
cctacatgtttatattattgtgtgcatagatactaccattgtaacattttttgcggattaaaaatgcactattgtattgaaaatttcaaaggaaatgtgtaataaaacatttaaaattaa

SEQ ID NO: 841749 - DNA, 120 bp, Artificial Sequence
  ENSG00000231528_47 (sequence is synthesized)
agaccgggtgggaccggaccgcggtttgagtccaagcccagcggtgtttgcggcgggtccggggcctggaagcgcgggggcggcgccgagagtgagtaagaagttctggaacagcctcag

SEQ ID NO: 841750 - DNA, 120 bp, Artificial Sequence
  ENSG00000231528_48 (sequence is synthesized)
ttccaaaaaaatgagtcgctttgttgcggcattaaattttgcccctaactcatgtgtcccggcgtggcccgggagcagcgggcccttcctcttccaggctccctggccccggtctttgat

SEQ ID NO: 841751 - DNA, 120 bp, Artificial Sequence
  ENSG00000231528_49 (sequence is synthesized)
gactcagagctcctgcggtcaccgggccgctctggagactcatcagagcagctcccccatcccgtcagctctgcggttacagcctcagttaatttccaaagtcgcccactttcaaaacac

SEQ ID NO: 841752 - DNA, 120 bp, Artificial Sequence
  ENSG00000231528_50 (sequence is synthesized)
gatcttagggcgggacgatatgtacgcatcttcctgtggccagcagcagtgatggcaacgctgtaggcacctccttcccttaggaagaagccaaacatttcacgaagtccttctgtgctt

SEQ ID NO: 841753 - DNA, 120 bp, Artificial Sequence
  ENSG00000253787_0 (sequence is synthesized)
ttggtcccttggagttcacagtctaatggggaagacaggatataagcaagtagtttcagcatagctttggaattgcatgcagagaagtgagtgaagtgagtgagggcccagccaaggctg

SEQ ID NO: 841754 - DNA, 120 bp, Artificial Sequence
  ENSG00000253787_1 (sequence is synthesized)
aggcgcaggccaccatgcccaggtcacccgtacttcatttaccagtccttgctaaggattattcattaaaacacacaacagcaacaataaccacaaaagcaacaataaaaatacctttga

SEQ ID NO: 841755 - DNA, 120 bp, Artificial Sequence
  ENSG00000253787_2 (sequence is synthesized)
actcactcaatcttgaactattgaacatgctaagtccgtgtcattggcctacttaatcagccctcgattgtaacttgaagaagcttattgataagaaaataaacttctcataaagtataa

SEQ ID NO: 841756 - DNA, 120 bp, Artificial Sequence
  ENSG00000253786_0 (sequence is synthesized)
cctatgagctgacacagtcaccctcagcgtcagtggccccaggacagatgaccaggatcacctgtggggaaagcagtattggaagtaaaagtgctcaatggtaccagcagaagccagcca

SEQ ID NO: 841757 - DNA, 120 bp, Artificial Sequence
  ENSG00000253786_1 (sequence is synthesized)
cgtgtgtgggtcatctatggggatagcgggcggccttcagggatctctgagagattctctggctccaacttggggaacgtggccaccctgaccatcaacaggacccagggtggggacaag

SEQ ID NO: 841758 - DNA, 120 bp, Artificial Sequence
  ENSG00000253784_0 (sequence is synthesized)
tgatttctgcatttccatctgaggataatcatccatcatccaagcctacgtccttgggaggaagcctccgctaccagcaaaggcccaggaggaggctgggggtgtgtgtttctttgtgaa

SEQ ID NO: 841759 - DNA, 120 bp, Artificial Sequence
  ENSG00000253784_1 (sequence is synthesized)
acagggctagcagtcattgttctgagaacagcagctctggttcttcagctcccctgacaaatattctccaggattccagagcagcagctgaggctggaggaggtgagcctgccatcagag

SEQ ID NO: 841760 - DNA, 120 bp, Artificial Sequence
  ENSG00000253784_2 (sequence is synthesized)
ggtgttagtggaaagaagctctgtggactcttgaaagcaacaaattatcagttgtatttgttttgaggttgtagcagactaggtaattgaaagagagggtgaggatgctattagtctgct

SEQ ID NO: 841761 - DNA, 120 bp, Artificial Sequence
  ENSG00000253783_0 (sequence is synthesized)
aacgagcgaacatttagctggcagaatcctcacattcatcccctaacctgtggggtcaaggatattgtgtaggaaagtcttctaccaagttctcccatcgactggacgcagaagacagca

SEQ ID NO: 841762 - DNA, 120 bp, Artificial Sequence
  ENSG00000253783_1 (sequence is synthesized)
agttggtacagtacctggaaaatgtatgctgaaagtgtgcgccatgactgactagtccattccttcacttctgtgagacaggaccaatagccacatcagtagatacaggtaaatcctgaa

SEQ ID NO: 841763 - DNA, 120 bp, Artificial Sequence
  ENSG00000253783_2 (sequence is synthesized)
gatactggcataaagacacagagaagaccaatggaacagaatagataatccagagataaacacacatgtttatagacttattgttgacaaagttgccaagaacattgggacaaacttctg

SEQ ID NO: 841764 - DNA, 120 bp, Artificial Sequence
  ENSG00000253783_3 (sequence is synthesized)
agtagtgctgggaaaactcaatatccatataaatgctagatctctattgatcacaccataagcaaacaccaaagcaaaacatgaagacttaaatctaagacccaagactgtaaaatattg

SEQ ID NO: 841765 - DNA, 120 bp, Artificial Sequence
  ENSG00000253782_0 (sequence is synthesized)
ttttagtctggaaagaacgatgtgaggacaggacccctgctactgtgtgtgtctctcatcctgatgttgacatatgtaaaagaaaaaatctgctccggacacttgtgaaaaccagcaaga

SEQ ID NO: 841766 - DNA, 120 bp, Artificial Sequence
  ENSG00000253782_1 (sequence is synthesized)
atgagcagagggtcagcggatggacagtcactaagaggaacttgatgagcaaaggatggtggggagtgaagcagcaggaagagccacagcctcactgagccctggagcccagttcagagc

SEQ ID NO: 841767 - DNA, 120 bp, Artificial Sequence
  ENSG00000253782_2 (sequence is synthesized)
agagttgcagctgcagaggcaggcaggcggcacctgtggtcacatgggggtttatcagctgtgcatccatcttctagcagcttctgtgtcttttctccctggaatgttctcctgtgccct

SEQ ID NO: 841768 - DNA, 120 bp, Artificial Sequence
  ENSG00000253782_3 (sequence is synthesized)
gcccggggaagccactagctacagatgctggagaatttgggctggtttcttctgcattttaacaatccctggggctttctttggttctttctttatttgagtgaggttgagatcatcttt

SEQ ID NO: 841769 - DNA, 120 bp, Artificial Sequence
  ENSG00000253782_4 (sequence is synthesized)
gagggtcagcggatggacagtcactaagaggaacttgatgaggtatcaagggggtttatcagctgtgcatccatcttctagcagcttctgtgtcttttctccctggaatgttctcctgtg

SEQ ID NO: 841770 - DNA, 120 bp, Artificial Sequence
  ENSG00000253782_5 (sequence is synthesized)
ccctcctcttccctccctcactgagatataaacaagctgcctcatgtctgtcttgtcttgttggaagcctggggcttgacatcagaaacttatcatctcaggatgtgtgcaccacacagt

SEQ ID NO: 841771 - DNA, 120 bp, Artificial Sequence
  ENSG00000253782_6 (sequence is synthesized)
tctctaccccaaaagtcttcttcttacttcgttaaacaacatgattttcaggcattgctgaaaataattgactttttaaaaaatatcaagactaagctcaagatctggatttcacaatgc

SEQ ID NO: 841772 - DNA, 120 bp, Artificial Sequence
  ENSG00000253780_0 (sequence is synthesized)
gaagtttactgatggagtcagagggggaaaaattttacagcccagtggtgagactctcctgcaaagcctctggtttcacctttactggttacagcatgagcttggtccagcatgcttcac

SEQ ID NO: 841773 - DNA, 120 bp, Artificial Sequence
  ENSG00000253780_1 (sequence is synthesized)
gggttactctccatgagtacaaataaattaacaatctcaagcaacacccttttaagtgcagtctgccttacaatgaccaatctgaaagccaaggacaaggtcatgtattactgtgagtga

SEQ ID NO: 841774 - DNA, 120 bp, Artificial Sequence
  ENSG00000248127_0 (sequence is synthesized)
aggaagtgcaggcgctgacaaagagcctcagccccgcgggctcccctgctctccagccctctcttgctctctcttagacgccagacaggcgcttcgggaatgtatgtgggagagtttgaa

SEQ ID NO: 841775 - DNA, 120 bp, Artificial Sequence
  ENSG00000248127_1 (sequence is synthesized)
aattcatggtgtttctttcaggctctctcagcacttactgcggctacctctgctctcccgccacctgcacgtctgcagagggatccccgccgaaaagttgagcctaaggcagctatgaag

SEQ ID NO: 841776 - DNA, 120 bp, Artificial Sequence
  ENSG00000248127_2 (sequence is synthesized)
cacccaccccgcggcagcagtggagggcgtcgccctcccgggccttccgacgcagaccctgccatccggatgctgcgggaagtagggcatcctcacgtccctgactcctccggctccgcg

SEQ ID NO: 841777 - DNA, 120 bp, Artificial Sequence
  ENSG00000248127_3 (sequence is synthesized)
cgctcacggaacccaagtggagtgggaagcggtcacacaggcgtgtgccgtccccgaaatcgttgctcctgtggtggtgacccaaagcgagacaaagcgccgcgccaatacgggctgcag

SEQ ID NO: 841778 - DNA, 120 bp, Artificial Sequence
  ENSG00000248127_4 (sequence is synthesized)
tgattggaactcaaacacacacatctctccgcgaatgtgttccatccgtgtaaatatgcctgggtgattgaatggatggctgaatgaacgctgtgtggatagaaatataaatgttacatg

SEQ ID NO: 841779 - DNA, 120 bp, Artificial Sequence
  ENSG00000248125_0 (sequence is synthesized)
attctgtctcttagggtcctgccaccaccacatatgttagcctgctggaggacgacagccagccaacctccagacatcttcttgacagcaagtaatgtgcttcactcatctttgcacacc

SEQ ID NO: 841780 - DNA, 120 bp, Artificial Sequence
  ENSG00000248125_1 (sequence is synthesized)
aaccacagaacccaatatcctccacataataaattcccaatgtgattgataaattcaactgtggattatgttagaccagacaccagctgctgataaactgtctctgacttggacatctca

SEQ ID NO: 841781 - DNA, 120 bp, Artificial Sequence
  ENSG00000248125_2 (sequence is synthesized)
gtggctgtgtagagagagcagccttgctgaggaggcgttgagaaaagaaaaagaaaactttaccatctctgaaacttttaatgaatttaaggggaaaattatacatctcaacagaaagcg

SEQ ID NO: 841782 - DNA, 120 bp, Artificial Sequence
  ENSG00000248125_3 (sequence is synthesized)
agctccacagaaaatcatgatgagcagtgttcattatctattcatgagcacctttcttgcatatttagcatttgcaaaatattggatgtcatcagcatatgggagtccaggagaaatctc

SEQ ID NO: 841783 - DNA, 120 bp, Artificial Sequence
  ENSG00000248125_4 (sequence is synthesized)
accttcttgcaaagacaaaaatggaaacggctgagtctttctacccagttgagggaacccaatctgaacatgacgcctagttgttctttgactcagtttaaatgatgtgaagctgagctg

SEQ ID NO: 841784 - DNA, 120 bp, Artificial Sequence
  ENSG00000248125_5 (sequence is synthesized)
tactctctgcagcccaaatatctctggttgaacaaagaacattagcacctaaggccaacaactctcaaagtttctgtactgtgaatggtccaacagctgaaaaaactcaagttcatctca

SEQ ID NO: 841785 - DNA, 120 bp, Artificial Sequence
  ENSG00000248125_6 (sequence is synthesized)
attctgtctcttagggtcctgccaccaccacatatgttagcctgctggaggacgacagccagccaacctccagacatgtgagtgaggccaacctaaaccagccagccctcagccatccca

SEQ ID NO: 841786 - DNA, 120 bp, Artificial Sequence
  ENSG00000248125_7 (sequence is synthesized)
gcagctgaacacagatgcatgagaaaggccagtctgtattacctgaatgcagcccagaagagcagaaccacctattgggtccttagtctcatgggaaatagtagatggtggttgtttgct

SEQ ID NO: 841787 - DNA, 120 bp, Artificial Sequence
  ENSG00000248125_8 (sequence is synthesized)
gccactaacatgtggagtggttttcgatgaagtaatagttaattaatccaatttttgtcttcccaactctacatgtgcaaattctacccattccatttcaaatataccatcctccatgaa

SEQ ID NO: 841788 - DNA, 120 bp, Artificial Sequence
  ENSG00000248125_9 (sequence is synthesized)
gtattgcctgatacctacagcaagaagtcagctctttttcctctgacaccctacagcatttaaactgtatcttttggtatttgtcagaataggttaaaactatgctgctgtaacaaattt

SEQ ID NO: 841789 - DNA, 120 bp, Artificial Sequence
  ENSG00000248125_10 (sequence is synthesized)
ctttggctttgtataaaaaagatttatttcttgctcatggtacacaacttatgagaattgccggggagttctgcttcacacattctctcaggctaccacactgaggcaagcggcaccttc

SEQ ID NO: 841790 - DNA, 120 bp, Artificial Sequence
  ENSG00000248125_11 (sequence is synthesized)
atggaaacactgtctcagatctagacctcagacaaatcatgaagaactcaaacctgctcttcgtcacttctgcccactgcccattgtctaggcctggtcatgtgtcctcatctaactgca

SEQ ID NO: 841791 - DNA, 120 bp, Artificial Sequence
  ENSG00000248125_12 (sequence is synthesized)
tgccaccatacatcatttgtaatataattagtctcacacttatctcagtttcccatctcactcctctcttatctattttccacattacaaactgagtgattgttttgcttcctacaacac

SEQ ID NO: 841792 - DNA, 120 bp, Artificial Sequence
  ENSG00000248125_13 (sequence is synthesized)
agttcttatcatcaccattgtcatcattgaaattatattatcataattatcataagtcaggtcttaactgtaagcaaaaaaataaactctggctaattaaagcagaaataatgaacttaa

SEQ ID NO: 841793 - DNA, 120 bp, Artificial Sequence
  ENSG00000248125_14 (sequence is synthesized)
agagaggcctggcatgcttccattctgtctcttagggtcctgccaccaccacatatgttagcctgctggaggacgacagccagccaacctccagacatattgtctaaccagactggattc

SEQ ID NO: 841794 - DNA, 120 bp, Artificial Sequence
  ENSG00000248125_15 (sequence is synthesized)
tgtcaaagcagatgtgtctaagatgctagaaatgaatgcataccaaaggacacaattgaataatgctggacagagaattctgcaagacagtctgcctagccagagtagcaagggaaggca

SEQ ID NO: 841795 - DNA, 120 bp, Artificial Sequence
  ENSG00000248125_16 (sequence is synthesized)
acaacatttatggtaattacataggatccacagagcactttcacatcagctatctcatttaaccctcaagatgcctcagagatgacaggaagcatggacatgcattgagtcacttgactt

SEQ ID NO: 841796 - DNA, 120 bp, Artificial Sequence
  ENSG00000248125_17 (sequence is synthesized)
ggccaagatgtattggcaagttgaagtatattgggagctgggaatgaccattttcctccattcatatggacatcttataatcatttcttaatatacctttactgtagagccttcactgca

SEQ ID NO: 841797 - DNA, 120 bp, Artificial Sequence
  ENSG00000248125_18 (sequence is synthesized)
attctgggcctaagcctagagaggcctggcatgcttccattctgtctcttagggtcctgccaccaccacatatgttagcctgctggaggacgacagccagccaacctccagacataaact

SEQ ID NO: 841798 - DNA, 120 bp, Artificial Sequence
  ENSG00000240710_0 (sequence is synthesized)
tggctgtactgagaagaggtcctgactcagaactggaggacatcatggaaggcttcctggaggaagtgccatctaggctgaaacctaaaggatgagtagaactaaccagatgaaaagcct

SEQ ID NO: 841799 - DNA, 120 bp, Artificial Sequence
  ENSG00000240710_1 (sequence is synthesized)
gagggatctaaagccttgggacttctggatctgcaagtggtccctgttttggtagctattgactgacgaggggctcttcgccccacaggtgactgctgtagccttgagtgaggacctcgg

SEQ ID NO: 841800 - DNA, 120 bp, Artificial Sequence
  ENSG00000240710_2 (sequence is synthesized)
taccctcgcttaggtgagtgctccaggtccatggggcctgatgctctgtccctggtctggcttccgcccatgtatacatttgcactcttgatggtggcttaggatctgcttccaacaagt

SEQ ID NO: 841801 - DNA, 120 bp, Artificial Sequence
  ENSG00000240710_3 (sequence is synthesized)
ctgccaaatgtgctctgtaacacagggggaccctccaaatgtgcattgctttctgtcagtctcaggaaacccattcccttcccagcctatctcagaaacggagagtggtggctcagtggc

SEQ ID NO: 841802 - DNA, 120 bp, Artificial Sequence
  ENSG00000240710_4 (sequence is synthesized)
ctctggctctggcacagccccttgatgggtccacagtggcccctctgcccttggctctgttggcttcccaacagatgttcctcttcacatgtagtcctaagaactcaatcagtttaaaaa

SEQ ID NO: 841803 - DNA, 120 bp, Artificial Sequence
  ENSG00000249837_0 (sequence is synthesized)
acaggtcccagataataattaggaaaacaaatcaggaccgaaactccagagagtcagaaaaggataagggaccgatggctgaaagcttgggaatccttgcatcatccacaactggcttac

SEQ ID NO: 841804 - DNA, 120 bp, Artificial Sequence
  ENSG00000249837_1 (sequence is synthesized)
ggttgagtctgaaattggctgaccatggaacacctaacccgaaaatatgcatatccctttcagagggcaaaaaggaggaagcaagaacacagaggcacacagggaagaccaggtgaaggc

SEQ ID NO: 841805 - DNA, 120 bp, Artificial Sequence
  ENSG00000249837_2 (sequence is synthesized)
acaaggagaagatgagcatcttcaagccaagacaagagatctcagaagaaaactgccctgccaactccttgatctcagatttacaatgcccagagctgggagaaaataaatttctgttgt

SEQ ID NO: 841806 - DNA, 120 bp, Artificial Sequence
  ENSG00000249835_0 (sequence is synthesized)
acaagtcaaaattttcattaagaactcagtagtctttcacagaagggaatctgagaattcttccactcatgagtaatgtgttaaagaatgagaaaagagcatgttttccttggcttttgg

SEQ ID NO: 841807 - DNA, 120 bp, Artificial Sequence
  ENSG00000249835_1 (sequence is synthesized)
gttcacagagaaatggtatttgacttagagctaatgccacatcacagctgacatacatccatctgcaaatgttgtatagaaagtcttctaagatcttcagatggaagttctgtcaagtat

SEQ ID NO: 841808 - DNA, 120 bp, Artificial Sequence
  ENSG00000249835_2 (sequence is synthesized)
gttggtggctctaaaaaaagtggggtggagaaaagcagagaaagaagacacaaagaaaaaacaaaacctccagaaacctactatgtgaagcatatggccaaagtaagtaaactagccttg

SEQ ID NO: 841809 - DNA, 120 bp, Artificial Sequence
  ENSG00000249835_3 (sequence is synthesized)
tttgcatgtgttttaacaatcccccaccctccagagccctaggtctatatccgtatgaaatgcattgatcggtaaccttatgagttagtgttatgaaagccattaaaaagtagacctggt

SEQ ID NO: 841810 - DNA, 120 bp, Artificial Sequence
  ENSG00000249835_4 (sequence is synthesized)
atgcagcaaagaagagttctaattttgtgtcaggagataaagagggaggctcagttatgtgaaggtattcctcacttgatggtttgaaagtcgcttcaatatttacatgaatttccttaa

SEQ ID NO: 841811 - DNA, 120 bp, Artificial Sequence
  ENSG00000249835_5 (sequence is synthesized)
aagaatcctgtggggacattacagatgagccgacgtctattcctggcagagcactgggctgggggatctctgtgtgtccagaggcttcactgcctgagtagatagtgaggggagatgatg

SEQ ID NO: 841812 - DNA, 120 bp, Artificial Sequence
  ENSG00000249833_0 (sequence is synthesized)
gggagggcgcggggccgggctgctgggtccgagctctgggcacgatgtcctccctgacgccgccaggacagcgcctggcccaggcctgggcctggtgaacgcgggtttcttcctctgagg

SEQ ID NO: 841813 - DNA, 120 bp, Artificial Sequence
  ENSG00000249833_1 (sequence is synthesized)
ttcaacactccgcacttgggttggctcctttcatcctgattggtttattcgccacgtgccaagcactgaagagggcgtgcaggatggatacttttggagcaaaaatagccctgcttcttt

SEQ ID NO: 841814 - DNA, 120 bp, Artificial Sequence
  ENSG00000249833_2 (sequence is synthesized)
cctggggagggatcgcactttctagaggggcggttttcaaagtatggtctcaggactagcagcatcgaaaatgctgggaactcgttagaaaagcaagttttcaatcctcgccccagaatc

SEQ ID NO: 841815 - DNA, 120 bp, Artificial Sequence
  ENSG00000249833_3 (sequence is synthesized)
agaaactcggggtggagcccagcaatgtgtgtcctgacaagtccacgcgcgaccccagtgctggctagggttgcaaagccactgctctacggagcgagcgagatccatcatagtgggaca

SEQ ID NO: 841816 - DNA, 120 bp, Artificial Sequence
  ENSG00000249833_4 (sequence is synthesized)
gcttgaagccaggggcaccaggatgtctggtcccccagctcagggatcctgtctccccacaaaaagcagcagcagaagacccctctttgagttctgaacatgttcctagattttcccagt

SEQ ID NO: 841817 - DNA, 120 bp, Artificial Sequence
  ENSG00000249833_5 (sequence is synthesized)
atctatggggattgagagattgataaaggctgcttggagctgaaagcacagagagaggctccttacactgacattcaaagtcctcaatgacccggccccagcctacctctgcagccttat

SEQ ID NO: 841818 - DNA, 120 bp, Artificial Sequence
  ENSG00000249833_6 (sequence is synthesized)
ctccctacaaaccatcaaagcagaacaaaaacctgtccctccgatttaggttttagcaaaccacaagaagcacttcataaactggtgactcaagtagaaaagtactgttccacgcacttg

SEQ ID NO: 841819 - DNA, 120 bp, Artificial Sequence
  ENSG00000249833_7 (sequence is synthesized)
acaccaatccacccatttcacctgcatgatcaccctgcctttgcatgagttgccggtgtggacagagcagggacacagtgagacagcggattccagctttgctcttacctagaacacact

SEQ ID NO: 841820 - DNA, 120 bp, Artificial Sequence
  ENSG00000249833_8 (sequence is synthesized)
gcctctcaccaggaatcgtccttccattttatgcagttatcccagacaatgatgcacaagctttgggaaaaaaaccccacaagtccaaaggtgtacttcataataaaggcaagttatctg

SEQ ID NO: 841821 - DNA, 120 bp, Artificial Sequence
  ENSG00000249833_9 (sequence is synthesized)
caaaaatagccctgcttctttcctggggagggatcgcactttctagaggggcggttttcaaagtatggtctcaggactagcagcatcgaaaatgctgggaactcgttagaaaagtactgt

SEQ ID NO: 841822 - DNA, 120 bp, Artificial Sequence
  ENSG00000249831_0 (sequence is synthesized)
agattattcttcggacttggactccgctttggattgccttctttcagctttgctgctttgctgaaggctgtgcatcagaggtgcttctacctgggaggacctccaccccataacctctgt

SEQ ID NO: 841823 - DNA, 120 bp, Artificial Sequence
  ENSG00000249831_1 (sequence is synthesized)
cactccccagacactctttctgctccataatgactggtagaagatgccctggatctgctatacagaaacaaagaacaagtatcaaactggatgttaaacagaaattgtatgaccttcatg

SEQ ID NO: 841824 - DNA, 120 bp, Artificial Sequence
  ENSG00000249831_2 (sequence is synthesized)
tttccttccaggtaatgatcatgaaaacagagggtaaaggttggcagacaattaagtgccactgaagtcctttgacattaagcaggacatcataaacatattttcagtttggagggattt

SEQ ID NO: 841825 - DNA, 120 bp, Artificial Sequence
  ENSG00000249831_3 (sequence is synthesized)
gactaacaattctgtatctggaacaaatgatagctatagatatgatacaactccaggagactggaagaaaatgtgaaagctattggcattgtaggatgctgggactgcgactttgtaaga

SEQ ID NO: 841826 - DNA, 120 bp, Artificial Sequence
  ENSG00000249831_4 (sequence is synthesized)
actctgttataatgatccgtaaaggtgcttttccagttagaaatgaatgcgtgttttgcactgaaagaggtatgaatgtaccccataatatataacattacataacatttagccaaaaca

SEQ ID NO: 841827 - DNA, 120 bp, Artificial Sequence
  ENSG00000249831_5 (sequence is synthesized)
agtggtcactaactgttagtttctttagctttctactaagtcaagtgttaatatacctaccaattttggattcccacagggtacaagacagcagctagacagccttttaagctatcctag

SEQ ID NO: 841828 - DNA, 120 bp, Artificial Sequence
  ENSG00000249831_6 (sequence is synthesized)
tatagtgatatttggagacaacaaatatagaacaaaatatttgttttgcttactaccttatccctagagcagtgtttctcaatagaggcactattgacatttgcattggataattctttg

SEQ ID NO: 841829 - DNA, 120 bp, Artificial Sequence
  ENSG00000249831_7 (sequence is synthesized)
ttgtgggaaactgttcaatgcatagtggatgcttagagaatgttagcctgatcttgactcactagatgccagtagtgttttctcagttgtgataatcaaaaatgtctccagccactgtca

SEQ ID NO: 841830 - DNA, 120 bp, Artificial Sequence
  ENSG00000249831_8 (sequence is synthesized)
gatatcctctagacagaaaaattccccactgttgagaaacacggagttacaacatcaaatataacagacactcaagtgtttgttaatgaataaaaaattggatgaatgaaatttttcctg

SEQ ID NO: 841831 - DNA, 120 bp, Artificial Sequence
  ENSG00000249831_9 (sequence is synthesized)
ctgtccatattcatatgaatttttcattgtctaatatagcaataatgcaggagaggggaagggagttagaaattagattttaaaagagagcatttttgttagacactatacctggccaac

SEQ ID NO: 841832 - DNA, 120 bp, Artificial Sequence
  ENSG00000249831_10 (sequence is synthesized)
aggaacatgcatttgaagtctaatcctacgcaaaccaacagagatcattctatcttgtgagcccttgaattacctacctaccggaacttctccctgttggtgactaaaattccaccaaag

SEQ ID NO: 841833 - DNA, 120 bp, Artificial Sequence
  ENSG00000249831_11 (sequence is synthesized)
tgaagagctcttttaaaaaataaatacaccaggtagaattaattgcttaatccttattgttaacaagaaagggatcatgcatttgattttcttctacattactatgagcaccgagggagt

SEQ ID NO: 841834 - DNA, 120 bp, Artificial Sequence
  ENSG00000249831_12 (sequence is synthesized)
ccttgggattttggagattttagaggtcacattgcaaaaaggagatggtaaaggcaaacttcaccaacaactgaattttatcaagtggttctcaccagtgttatttgtttattaaataaa

SEQ ID NO: 841835 - DNA, 120 bp, Artificial Sequence
  ENSG00000249831_13 (sequence is synthesized)
cacacagtctctaggatactttctttgcatgttccttcttcgaggacatgtagaaaatgttaaatacccaaatattcaaaatcatgatacccagaaacttgtttgctactttaattgcta

SEQ ID NO: 841836 - DNA, 120 bp, Artificial Sequence
  ENSG00000249831_14 (sequence is synthesized)
atttcatggtcgtcattcttaaacagtagtaaatttgaagactatactttccaattttgtatttccaaaattgttgatatctgtgaagaatgagtgctagagcctctcagatttgattct

SEQ ID NO: 841837 - DNA, 120 bp, Artificial Sequence
  ENSG00000249831_15 (sequence is synthesized)
aacaagaagtcttagcgaagtcacagtctttaagcataagctgctaaggtgctttcttcagtacaggcactggcatctgttattcaaacccttgcttgagttgatttctgcttattattc

SEQ ID NO: 841838 - DNA, 120 bp, Artificial Sequence
  ENSG00000249831_16 (sequence is synthesized)
attaaaatatatgtgttaaaataagcatgccctgatctgagcctctcacttagatgttgtttctctcatctttccagcagggttgcagtaatcatacctactagagaatgagggcatttc

SEQ ID NO: 841839 - DNA, 120 bp, Artificial Sequence
  ENSG00000249831_17 (sequence is synthesized)
ctttggtcagtacgtaattaccaagatagtcattaccatcactacaaaaggcagcagggatgttcttcacagagaaaaatttgacatggagcaaattgagctattcatagtggtagagag

SEQ ID NO: 841840 - DNA, 120 bp, Artificial Sequence
  ENSG00000249831_18 (sequence is synthesized)
ctacccttcaagctatccataggatagtgcattcagttcaattcaatgtccatttatcatatacctattgatactgaggggagaagattcaattaaataaagctacttgctgggcagagg

SEQ ID NO: 841841 - DNA, 120 bp, Artificial Sequence
  ENSG00000249831_19 (sequence is synthesized)
agtagatttcctttctgaacagttaaatgttatgggccattttttatgtgttcacttacctagcccttgacaaaataaaagctaattatggcaaaattaagaagatttcacaatcagaga

SEQ ID NO: 841842 - DNA, 120 bp, Artificial Sequence
  ENSG00000249831_20 (sequence is synthesized)
tatcaatatctctatggcttctctgggacaggcaccacattagtctttaatgtttttggaagtctttctagacttattcattgatctatgtgagaaaactttctgatgaatgatctagta

SEQ ID NO: 841843 - DNA, 120 bp, Artificial Sequence
  ENSG00000249831_21 (sequence is synthesized)
tgcaaaatgtccatagcattggtaaatatccttacctcctgtagctggtttcttttataatctctttgtctcatgaaaagaaagggcaatttataatttcttattaaatttctggcttgc

SEQ ID NO: 841844 - DNA, 120 bp, Artificial Sequence
  ENSG00000288035_0 (sequence is synthesized)
gctttgtaacagaagatttgaatcagacaactgtactcaacactagacagtgtcgagattagttctgcaaagaaataaggctttgctgtgcatggcatcaactgagcttttaaagattac

SEQ ID NO: 841845 - DNA, 120 bp, Artificial Sequence
  ENSG00000288035_1 (sequence is synthesized)
agatgagcaagggtttcaaaaaaaaaagttagaaaaatcaaaaacaaagctttatagccacttcagaaagcctggatgtttaacctgtaaggaagtctgtcaaatccttgtggaaaccat

SEQ ID NO: 841846 - DNA, 120 bp, Artificial Sequence
  ENSG00000288035_2 (sequence is synthesized)
atagagaaaagatcaataggatacctactggctccattagcttgatgtaaaagggggcgagggaagctgctcttccacaagagaagctacattattccagggattatgcgggatcagttc

SEQ ID NO: 841847 - DNA, 120 bp, Artificial Sequence
  ENSG00000288035_3 (sequence is synthesized)
actttgcagagaagaagaagagaaaatgaatgaagattcttggtgggccaagactgcagagaaagggcttgtcaggttgagctttaattcctttcactgggattcatcacttccttataa

SEQ ID NO: 841848 - DNA, 120 bp, Artificial Sequence
  ENSG00000288035_4 (sequence is synthesized)
aatttcattttcttggttgttcagtagaagagtgacaagaggacaccactgctattctccagattttagagaagaacaattgaacttttttttttaacacaatgaagataacaccaacat

SEQ ID NO: 841849 - DNA, 120 bp, Artificial Sequence
  ENSG00000288035_5 (sequence is synthesized)
atcttgaacttggcagatggaactaggctactgatactcttctagtaaggacaaaagtctggagttagaaggctgttggcagtggttcagaggaccagctctgttaaggccagtaagtct

SEQ ID NO: 841850 - DNA, 120 bp, Artificial Sequence
  ENSG00000288035_6 (sequence is synthesized)
ccaattctcaagcttttcacctcattgccacaagtttgctgttgcagctcacaacgtcatacccactttcaagatgggaagaaaggagacagagtgattccagccctgtatctcctttgt

SEQ ID NO: 841851 - DNA, 120 bp, Artificial Sequence
  ENSG00000288035_7 (sequence is synthesized)
ataaagaaagcaaaaacgttttagaaaccccataacagaatttcactgatttctaattagccaaaactgtatcacacaaccttcctttgatataagagaagccaggaaagcaagtagttt

SEQ ID NO: 841852 - DNA, 120 bp, Artificial Sequence
  ENSG00000288035_8 (sequence is synthesized)
aaaattcccagaggagttggaaattgatgttgaaacagtcagtctcagggtctgccatagtgatgctacacaaagataaggtgaagaaattatttggaaacacagaagctttagagttaa

SEQ ID NO: 841853 - DNA, 120 bp, Artificial Sequence
  ENSG00000288035_9 (sequence is synthesized)
cactgcaagatcacaggaaagaataatatggataaaaatactcactaactcatactaacagctttccaatttgggttaaataaaagacaagtttaggattcagatcattcctgtaatata

SEQ ID NO: 841854 - DNA, 120 bp, Artificial Sequence
  ENSG00000288035_10 (sequence is synthesized)
gttaactagaatgaaagttctaaagtaccaaagcatcaaatatttaaagtctaaggtaccaaagaccaaagagatagcttgaaaggattttattctttacatttttgagtgagttcagtg

SEQ ID NO: 841855 - DNA, 120 bp, Artificial Sequence
  ENSG00000288035_11 (sequence is synthesized)
ttggcagaacctcatcactgcctacattattgatggggatatctgaaaagaagcagatgttttgccaagaaagggaatatgaatcattgtacctaataagttgagaatcttaggaaacaa

SEQ ID NO: 841856 - DNA, 120 bp, Artificial Sequence
  ENSG00000288035_12 (sequence is synthesized)
tctacacagctcatgagtgaaactagcaattaatcttgacatgttttataaaaggttgggttgcttaatatttctcccaagtaatttttttaagtttgctgtaggcaggaaggtaaaaag

SEQ ID NO: 841857 - DNA, 120 bp, Artificial Sequence
  ENSG00000288035_13 (sequence is synthesized)
actgacagtgcaggaaactgaacttttctttcctccaaatgccaactgtgccagttggatattgaaatatgaggtacatcatgataggagattagtcaaactcattcaccaatgtgccct

SEQ ID NO: 841858 - DNA, 120 bp, Artificial Sequence
  ENSG00000288035_14 (sequence is synthesized)
cagtcccaacttgctagaggaaataatgaagtggcgccattggagacaaggagtcatgaccaatttattgcaccattctggatgctgcatatgtatgcaaagttttatttataaagataa

SEQ ID NO: 841859 - DNA, 120 bp, Artificial Sequence
  ENSG00000288035_15 (sequence is synthesized)
tttatgtggcagttgggttatgtgctaatcagcaaaacacagtgtctaaaactacaccatgtcacgctagcatgtagacggaaattcttttgtattgatgtacatatgagagcttcccaa

SEQ ID NO: 841860 - DNA, 120 bp, Artificial Sequence
  ENSG00000288035_16 (sequence is synthesized)
gaggtatgctgcaaccaaaatgcatccattgattctccctccatttgcttctttgaggaggagaaaatgaaaacctgatatttttaaaattcattgatgttgccatccccatttgagcct

SEQ ID NO: 841861 - DNA, 120 bp, Artificial Sequence
  ENSG00000253258_0 (sequence is synthesized)
gaacacaccacggaggagtggggctcccgcacccccgggaggccgcctgctcccaggaccggcgtgcagggcacctccaagaagtgatttaccgctgtcctgagcaatgcttctcagaac

SEQ ID NO: 841862 - DNA, 120 bp, Artificial Sequence
  ENSG00000253258_1 (sequence is synthesized)
tcctcatctgcagctgcgggattggcttatctctcagggccacctgccctgccctcgggccgggagggctggctcagacacctccttggcacagtcagccatgggatatttcctctcctc

SEQ ID NO: 841863 - DNA, 120 bp, Artificial Sequence
  ENSG00000253258_2 (sequence is synthesized)
ccagccgcagggggaggcgaagagaccgcagaggttccagttctcaggccaacgcttcctcgctggaagtggcttcttggaacactgtctggagaacgagccgaggctgccggcggccca

SEQ ID NO: 841864 - DNA, 120 bp, Artificial Sequence
  ENSG00000253258_3 (sequence is synthesized)
tgaaatctatgaactctgaggggagtgaccacgtgttctttccagatcagatcgtgatctggcaatgggatggactgcctagaaccctgactctctttgggtgggctctgctggaaacag

SEQ ID NO: 841865 - DNA, 120 bp, Artificial Sequence
  ENSG00000253258_4 (sequence is synthesized)
gctctgagactaggatttcagtacaagtggttggtcggaagatcattctgagaagtacagagagaagtggggaagagaaacgggaagggaaggaagccaggccaggtgaagttgaggagc

SEQ ID NO: 841866 - DNA, 120 bp, Artificial Sequence
  ENSG00000253258_5 (sequence is synthesized)
aggccactgctgtggacatctgggttcatggacatctctggggacatcagggggttccagcctgtgggaacctctgggtgatggtgccaaatatatctcaaggttttcctgcccaaaggg

SEQ ID NO: 841867 - DNA, 120 bp, Artificial Sequence
  ENSG00000264290_0 (sequence is synthesized)
ctgtgtcaggatgctgttgggtagctggctctgtggacaagtggctgtgagtggaactctctctgagagtagctggaaaaaacccaggctccagctccctgaggagacagcgggaagtct

SEQ ID NO: 841868 - DNA, 120 bp, Artificial Sequence
  ENSG00000264290_1 (sequence is synthesized)
tgcatcgtgcaaggagtgtgcctccagttgccaggctccacactgcgggctcagcttgcgtggtagcatctccatcttcatcgccagctcctctgaattttcctttgaaatacttattat

SEQ ID NO: 841869 - DNA, 76 bp, Artificial Sequence
  ENSG00000264290_2 (sequence is synthesized)
tcgccagctcctctgaattttcctttgaaatacttattattattattatttgaaatggaatctcactctgttgccc

SEQ ID NO: 841870 - DNA, 120 bp, Artificial Sequence
  ENSG00000275139_0 (sequence is synthesized)
gacactcgccagggcactgatgaaaccaaccgccagcgagcagcacgggagacccgcggggagggcgcggccctggctctgccacctccctgctcccggaccacactggtgggcgcaggc

SEQ ID NO: 841871 - DNA, 120 bp, Artificial Sequence
  ENSG00000275139_1 (sequence is synthesized)
agacgatcctgatgctcgaccacggccgcatctcatctgggggtgccctctgctattcttatcctacaggcgttcaacccaaaaaaaactttgcagtgaactttgcctcttcctgtttct

SEQ ID NO: 841872 - DNA, 120 bp, Artificial Sequence
  ENSG00000275139_2 (sequence is synthesized)
cctgaggatgctcctctacgccgagtttaggagaagagagtgagaggagcaacagtgaaaggccaagggaacaaatccatccgcgggcagccccttcgcgccttctccactgcaccctga

SEQ ID NO: 841873 - DNA, 120 bp, Artificial Sequence
  ENSG00000275139_3 (sequence is synthesized)
gccctacagctgagaagcggagtcctgagactgtgccagcaccgcacgcagagcctggtgtgtggtcggagcacagcgtgagcggaatgaatgctgaataaataattatcatcctacaca

SEQ ID NO: 841874 - DNA, 120 bp, Artificial Sequence
  ENSG00000275139_4 (sequence is synthesized)
cattctaagccagaaatagagaaatgttacagccctcaatggtgggaactgcaaaacctcagccctgcaaagcatgccccatgtaggggcagcgccactgctgcttgtgcggctcagctg

SEQ ID NO: 841875 - DNA, 120 bp, Artificial Sequence
  ENSG00000275139_5 (sequence is synthesized)
accgagcggaaagccagagggggcacctccggagagtcgccgagcactgctgctccagtgaccaaacgtccggccttctaagaggtatgtgtcaacctcaatcctaaacaagcagcaagg

SEQ ID NO: 841876 - DNA, 120 bp, Artificial Sequence
  ENSG00000275139_6 (sequence is synthesized)
aagatgtggatacttactgtccctttaagttaaattacctagagaaaacctatcctaaaagaaaaggcaatgaaagtaaccacaaaagtgatgagacagaaaagccatggctcacatgac

SEQ ID NO: 841877 - DNA, 120 bp, Artificial Sequence
  ENSG00000275139_7 (sequence is synthesized)
cccctggaagggttgctgctggccttacctacaaggcgaacgtggaaaatccaagaagtcctcaatgagagtgaggtggtttgagaaaatgcccacagattgttggatacatctctctta

SEQ ID NO: 841878 - DNA, 120 bp, Artificial Sequence
  ENSG00000275139_8 (sequence is synthesized)
tggtggctcacgcctgtaatcccggcagtttgggaggctggggcaggtagatcacttgaggtcaggagaccagccgggccaacactgagaaaccctgcctctactaaaaataataaaata

SEQ ID NO: 841879 - DNA, 86 bp, Artificial Sequence
  ENSG00000275139_9 (sequence is synthesized)
tgaggtcaggagaccagccgggccaacactgagaaaccctgcctctactaaaaataataaaatacaaaaaagttagccgggtgtgc

SEQ ID NO: 841880 - DNA, 72 bp, Artificial Sequence
  ENSG00000275139_10 (sequence is synthesized)
ggtgaagcacaattaccctcccttaagacaggactgacttggtaacgcacatggaaagaacatagtgtggca

SEQ ID NO: 841881 - DNA, 120 bp, Artificial Sequence
  ENSG00000275139_11 (sequence is synthesized)
actgacttggtaacgcacatggaaagaacatagtgtggcagaagggacagggtgtaacacccgagactgggacatgcaggccccgtgacccctccttgctctctctctctctctctccaa

SEQ ID NO: 841882 - DNA, 120 bp, Artificial Sequence
  ENSG00000275139_12 (sequence is synthesized)
tcgcctgctcaggaaaagtgaatggcaatcccacagacacgcacgcagccctgtggggaggccgcaaggtgctgggctgaggcctcctgcccttgccctgtgagagcaccctggaagtgg

SEQ ID NO: 841883 - DNA, 120 bp, Artificial Sequence
  ENSG00000275139_13 (sequence is synthesized)
gctgtccagctgatgtgcagcctcaaaagagaccccaagccagacccacccacgaaaggtacccctgaattctggactcataaaatctcttagataatacatatttgttgttttaaccca

SEQ ID NO: 841884 - DNA, 120 bp, Artificial Sequence
  ENSG00000275139_14 (sequence is synthesized)
ctcagttttgcattggttacacagcaatagaaaataaaggaggcagatgaaattgatggagaaacaattgcaacgaaaacagaatacacaatgcacgagcctgtgtcaggaatgacagtg

SEQ ID NO: 841885 - DNA, 120 bp, Artificial Sequence
  ENSG00000275139_15 (sequence is synthesized)
cattccacggaagagttgcacagagagagaccagttacaagatgccatcaggataacgggagctgcgctgggcagctgggccttccgacatcctccctggttgcggtggcagtggtggtg

SEQ ID NO: 841886 - DNA, 120 bp, Artificial Sequence
  ENSG00000275139_16 (sequence is synthesized)
cctactgtcctcaccagagaccaaccacacccacagaaaggccaagaggcattctggaaacacaaacctcactgagtaacaaagaaacagtatttgaggaaagccaatgtgatgaaagag

SEQ ID NO: 841887 - DNA, 120 bp, Artificial Sequence
  ENSG00000275139_17 (sequence is synthesized)
agacgccagactggaaggagggacggtcatctgagaacatacaaagcaagtggcaagcgctagtttacacgtccaaggtgaccgtcacatgctctgtccaggcaagagaggcaagtggac

SEQ ID NO: 841888 - DNA, 120 bp, Artificial Sequence
  ENSG00000275139_18 (sequence is synthesized)
accctgagaaggaaaaatgttgtcaaaataaaaacctaatatgtgaacctaggagtaaaatggacacagcttgcgagcaaagagacagtgagaagatgaagccaaggcactctccagaat

SEQ ID NO: 841889 - DNA, 120 bp, Artificial Sequence
  ENSG00000275139_19 (sequence is synthesized)
gcaggtgacgggaaaaagagacagtaacagatccaaagaggtccagaaggaatgaccatggagcggaaagaaagaaaacagcattcaaaaaggcgacagaatagaattccccgggctgaa

SEQ ID NO: 841890 - DNA, 120 bp, Artificial Sequence
  ENSG00000275139_20 (sequence is synthesized)
gaaataagtcttcagagtgaaaggacccaaggaacaatgtcctgcttaagttcagaaaatccaaggctgaggagagagccctgaaaggctccacgtggcaacactgtgctaaaagacagt

SEQ ID NO: 841891 - DNA, 84 bp, Artificial Sequence
  ENSG00000275139_21 (sequence is synthesized)
ctgaaaggctccacgtggcaacactgtgctaaaagacagtggagttctgaggagcagctcttcccacggaaggagtgcaatggc

SEQ ID NO: 841892 - DNA, 76 bp, Artificial Sequence
  ENSG00000275139_22 (sequence is synthesized)
tggaacttttaaatcatctagcccatcaatattttagacatttccaatatgtctggatttatttactattttatgt

SEQ ID NO: 841893 - DNA, 120 bp, Artificial Sequence
  ENSG00000275139_23 (sequence is synthesized)
gacatttccaatatgtctggatttatttactattttatgttgtgttttctacttttctcatctttctgtgttcaactatcctcttttgccttcttttggatttttctccccattatacat

SEQ ID NO: 841894 - DNA, 120 bp, Artificial Sequence
  ENSG00000275139_24 (sequence is synthesized)
ttttttctttttactctaaacttaattacataacttatcaaagcctaatgtccccacactctacccacgcaatcccaggaccttaaaactctttaattccattcccttcctgctgacatg

SEQ ID NO: 841895 - DNA, 120 bp, Artificial Sequence
  ENSG00000275139_25 (sequence is synthesized)
accttggagtcaattattttagttctaccatttgtggtttagcccaggagacatctgcctcaagcctgttcaatttactcacatgcatacaactttgtttataatgccttcttagagctc

SEQ ID NO: 841896 - DNA, 120 bp, Artificial Sequence
  ENSG00000275139_26 (sequence is synthesized)
ggactttccatagaagacaaccttctctcctcctgaaataggtcctttagaaatgcttttagtagccaggcatagtggtgcatgcctgtattccaggtgctcaggaggctgaggcaggag

SEQ ID NO: 841897 - DNA, 120 bp, Artificial Sequence
  ENSG00000275139_27 (sequence is synthesized)
agtggactgagcccaggagttcgaggctgtggtgcactgtgatcatgcctatgagtagccactgcactccagcctgggcaacgtggtgagaccctgtctctagaaaaacagaaatacttt

SEQ ID NO: 841898 - DNA, 120 bp, Artificial Sequence
  ENSG00000275139_28 (sequence is synthesized)
taataaagtcctataggtatcaaattatctccacttgtgtttgtataaaatgtatttatttttctataattcctgaaagatatattaagtatatcagttagtgcaaaagtaattgcaggt

SEQ ID NO: 841899 - DNA, 120 bp, Artificial Sequence
  ENSG00000275139_29 (sequence is synthesized)
ctgcaattacttttgcaccaacctaatagaatgtcagttcttttctctcagcacgttagatattatccagctatcttctcctttccactggtgccagtaagaagccatgtcagccttaat

SEQ ID NO: 841900 - DNA, 120 bp, Artificial Sequence
  ENSG00000275139_30 (sequence is synthesized)
gtcagccttaatgttgcttctttgaaggcaatgtcttttctctctgttaagatcttgtacttgtctttggtgttccagagtttcaccatgatatgtctaaatatagacttcatttcacca

SEQ ID NO: 841901 - DNA, 120 bp, Artificial Sequence
  ENSG00000273998_0 (sequence is synthesized)
aaaaaaaaaaaaaagcagtaaatccagggcccaaaagctcccctcaatgggaagtagaatctctttctccacctcttcaatatggctggccctggaacttcccttggcacacagaatgca

SEQ ID NO: 841902 - DNA, 120 bp, Artificial Sequence
  ENSG00000273998_1 (sequence is synthesized)
gcagaattggcttcatgttgtttctaagccttggcctcagaggccttgcatgcttcctaaccctggctctaggaaacttgctgctgtcatgtaagcaagcccaggctaacctactgaatg

SEQ ID NO: 841903 - DNA, 120 bp, Artificial Sequence
  ENSG00000273998_2 (sequence is synthesized)
ttggtgtgtcccagtcaaatccagcactgcaaccaatagccaggcagccaccagacatgtgagtggggccacctcacaccagccaacctccaccaagtcatcagatgtatgagtgagaac

SEQ ID NO: 841904 - DNA, 120 bp, Artificial Sequence
  ENSG00000273998_3 (sequence is synthesized)
gacttaggagcagtaaacagatgattgttatggaagccattctgtttagggtgtgtgtgttattgcttgcatccaaatacatcctatctcatctaatgagaaaaggccctgctcaagggc

SEQ ID NO: 841905 - DNA, 120 bp, Artificial Sequence
  ENSG00000273998_4 (sequence is synthesized)
ttttgcagctgtagttgggcgccggaagtgtctttgtggtcatttcttactccatacacggggagatcaaggctcagaccaggtagtgtgactgtggacaacactttccttacccctctg

SEQ ID NO: 841906 - DNA, 120 bp, Artificial Sequence
  ENSG00000273998_5 (sequence is synthesized)
tgacacttaaatcaatgaagcagattcacagaagcatgcatgctcactgaacacagtatttgcattcctacctccaaacctttgctccacccatgcatccagtaagaatgcctacttccc

SEQ ID NO: 841907 - DNA, 120 bp, Artificial Sequence
  ENSG00000241449_0 (sequence is synthesized)
ggaagaggggatagctctcagtccccactctcgtggggggtgcctccccctcctgcgatgggggtccccagagccagggggggaagagggactggctctcagtaatcccacgtaaggtac

SEQ ID NO: 841908 - DNA, 120 bp, Artificial Sequence
  ENSG00000241449_1 (sequence is synthesized)
agagggactggctctcagtaatcccacgtaaggtacctgccgtcggaagatttgaactttctacttggacaactaacacccacagtcctccagctccggtagattgcaaataacctgctt

SEQ ID NO: 841909 - DNA, 120 bp, Artificial Sequence
  ENSG00000241449_2 (sequence is synthesized)
ctgcgttcggacccatgtcttattgtaaatcccacgcaagctgcgttcggacccgtctgatcgtaaatcccatgtaaggtacctgccgtcggaagatttgaacgttctacttggacacct

SEQ ID NO: 841910 - DNA, 120 bp, Artificial Sequence
  ENSG00000241449_3 (sequence is synthesized)
caaggtacctgccgtcggaagatttgagctttcttcttgaacacctcatacccacagtcctccaggcgccagtgggatcaagagagggcaacattgcaactctccatgctcctgcaatat

SEQ ID NO: 841911 - DNA, 120 bp, Artificial Sequence
  ENSG00000241449_4 (sequence is synthesized)
ccatggctattctgtagacagaaagacaacaggtacaaagccctaaggattataaaggtatgctgcttaccatcatcttagtgaccaaggcagcgaagctgtttctgtaccttggaacag

SEQ ID NO: 841912 - DNA, 120 bp, Artificial Sequence
  ENSG00000241449_5 (sequence is synthesized)
tcttccctgacaagccagagaacagtgataaagccaccagccttgggatcaggactgaaaaggcaagagtgatggagatttctcctgcgctaagccaagagaaggtttcagcacttcaga

SEQ ID NO: 841913 - DNA, 120 bp, Artificial Sequence
  ENSG00000241449_6 (sequence is synthesized)
cagctcccaccgaagtagccgcgctcccagctgcttgcagatgttgaaaaggaaagcctcggtttgtcttgaggttgtcagcaggtgcaagacacgtaataaaatgcaatgtgttcctaa

SEQ ID NO: 841914 - DNA, 67 bp, Artificial Sequence
  ENSG00000241449_7 (sequence is synthesized)
atacaaaggcttggctaatactgcagtttgggatccacaggctccggtagattgcaaataacctgct

SEQ ID NO: 841915 - DNA, 120 bp, Artificial Sequence
  ENSG00000241449_8 (sequence is synthesized)
ttctttctgttcccgagctgcgttcggacccgtcggatcgtaaatcccacgtaaggtcggaagatttgaactttctacttggacacctaacacccacagtcctccagctgcgttcggacc

SEQ ID NO: 841916 - DNA, 120 bp, Artificial Sequence
  ENSG00000241449_9 (sequence is synthesized)
gattcttcagtcttggcaagtatctgtacctaaaaagcagtttttctacctaatgtctttttttgtttttgtttttcaatacaccttaagcaaattgaagcttttgttcctggaggaaaa

SEQ ID NO: 841917 - DNA, 77 bp, Artificial Sequence
  ENSG00000241449_10 (sequence is synthesized)
gccttctgcccttaagctgccttcggacccgtcggatcgtaaatcccacgtaaggtacctgccgtcggaagatttga

SEQ ID NO: 841918 - DNA, 120 bp, Artificial Sequence
  ENSG00000241449_11 (sequence is synthesized)
gctacatcgttaacaacagtgcctttcaaaaatgatgaactataatctactgggctaacagtgaacccctgaaaaatacatgtgactgcaggctggagactgtggataaggctgccatga

SEQ ID NO: 841919 - DNA, 120 bp, Artificial Sequence
  ENSG00000241449_12 (sequence is synthesized)
ggtcctgggaaatgtctgttagagtgccaggagcagctgtgtttcagtgaacacttcagaataccaatggggaaaaaaacacaaggacaaaccctactgtgaagcagtggagactggagt

SEQ ID NO: 841920 - DNA, 120 bp, Artificial Sequence
  ENSG00000241449_13 (sequence is synthesized)
cctgcatttgctgaactttctttttatgtgttggattctgattttatattcatttccattcatgtggactctgaagagttaaactcaccaaggacacttgaagaagtcacgtccagggat

SEQ ID NO: 841921 - DNA, 120 bp, Artificial Sequence
  ENSG00000241449_14 (sequence is synthesized)
cactgtcatcacaaatggagaaaaggccaatgtctttccatgctgcctcaccagaaaaggactgagttggtacagaccttcactccagcttactgtccatgacctcgtcacactccaggc

SEQ ID NO: 841922 - DNA, 120 bp, Artificial Sequence
  ENSG00000241449_15 (sequence is synthesized)
ccaggcttgagctacatgttctagaaagcccctaacttctctaggtctcaagtctaatctctgcatctgtgccaggttccctgagactactctaaagcttgatgattcactaggattcac

SEQ ID NO: 841923 - DNA, 120 bp, Artificial Sequence
  ENSG00000241449_16 (sequence is synthesized)
aggactcagaaaagcttacttttctgaattagatgtactgttctgatatattacagcaaaaggatatgagttcaaatcagaataaaataaaaggtacatggggcagagtccaggagaaac

SEQ ID NO: 841924 - DNA, 68 bp, Artificial Sequence
  ENSG00000241449_17 (sequence is synthesized)
gggcctttatgttcaggttttgcccaagaaataggggggccatcctttagaaacctgtctagttgttt

SEQ ID NO: 841925 - DNA, 80 bp, Artificial Sequence
  ENSG00000241449_18 (sequence is synthesized)
tagcagggcagttgctgccaaggccctctaataggggggccatcctttagaaacctgtctagttgtttagagacgtaggc

SEQ ID NO: 841926 - DNA, 71 bp, Artificial Sequence
  ENSG00000241449_19 (sequence is synthesized)
atgaaagactcgctgttgtcgggatccccatttcaaagtttccgggtccccgccccctttgtgacctcata

SEQ ID NO: 841927 - DNA, 120 bp, Artificial Sequence
  ENSG00000241449_20 (sequence is synthesized)
gggggtcctcagagccagggcgggaagagggactggctctcagtccctgcctcgcggggggtgcctccgcccccagcgatggggtcctaagagcaaagctggagctgcgttcggacccgt

SEQ ID NO: 841928 - DNA, 87 bp, Artificial Sequence
  ENSG00000241449_21 (sequence is synthesized)
cttgaacacctcatacccacagtcctccaggtggttcctaaggatcttaggatccccgatgggcgtcctaagccagttgcggggggt

SEQ ID NO: 841929 - DNA, 120 bp, Artificial Sequence
  ENSG00000241449_22 (sequence is synthesized)
gtccccgccttgcggggggtgtctccccaccctgtgatgggggtcacaagagccagagggggaagaggggctggctctcaaccaccacgaaatgggaggcctttatgttcaggttttgcc

SEQ ID NO: 841930 - DNA, 82 bp, Artificial Sequence
  ENSG00000241449_23 (sequence is synthesized)
tggggctgccagaagattttcttgtaactcatgaaaaacttgctgttgttgggatccccatttcaaaagttccgggtccccg

SEQ ID NO: 841931 - DNA, 120 bp, Artificial Sequence
  ENSG00000241449_24 (sequence is synthesized)
tcttttagtaaatttgggggcataacttttccaattctgaggaacttttctaagaagagtgcataaaagtttgttgttgtttttaaaggatgcaacattcagcctgtgtcatgagtttaa

SEQ ID NO: 841932 - DNA, 120 bp, Artificial Sequence
  ENSG00000241449_25 (sequence is synthesized)
ttatacaatttaaaggacatatgtgcaatgcattttgcagatgtgtgccggatatatatgtgcagataatgggcaagtatatatgtgtgcatatatatatcgggagtatactatataaac

SEQ ID NO: 841933 - DNA, 120 bp, Artificial Sequence
  ENSG00000241449_26 (sequence is synthesized)
acacaatacacgcccacccacacacattgtgtattttccagaaaaaaaaaaaaaagcatgtcaggacttacatctaagttagagatgctgtttagaaccccattaaaaaatgtacatgtt

SEQ ID NO: 841934 - DNA, 84 bp, Artificial Sequence
  ENSG00000241449_27 (sequence is synthesized)
ccccctgtgatgggggtagaatcccacgtaaggtacctgccgttggaagatttgaactttctacttggacaactaacacccaca

SEQ ID NO: 841935 - DNA, 120 bp, Artificial Sequence
  ENSG00000241449_28 (sequence is synthesized)
ataaagttcacttaagacacacttatctacaaacagtcttcagagaggtgatcggatggaagatattaacatgattctggagtctgctaggagctgctctgactggtggctactgagata

SEQ ID NO: 841936 - DNA, 120 bp, Artificial Sequence
  ENSG00000241449_29 (sequence is synthesized)
ggacacctaatacccacagtcctccagctggagctgcgttcggacccgtcggatcgtaaatcccatgtaaggtatctgccgtcggaagatttgaactttctaattggacacctaacaccc

SEQ ID NO: 841937 - DNA, 120 bp, Artificial Sequence
  ENSG00000241449_30 (sequence is synthesized)
gtcctaagagccagtgggggaaccaggggctggctctcagtccctgcctcgcggggggtgcctccccccccctgcgatgagggtagcaacagccgggggtggaagaggggataactctca

SEQ ID NO: 841938 - DNA, 120 bp, Artificial Sequence
  ENSG00000241449_31 (sequence is synthesized)
ctcagtccccaccctcgcggggggtgcctccccctcctgcgatgggggtcctaagagccaggggggggaagagggactggctctcagtccctgcctcgcggggggtgcctccccccctgc

SEQ ID NO: 841939 - DNA, 120 bp, Artificial Sequence
  ENSG00000241449_32 (sequence is synthesized)
gatgggggtactaagagccaggggtggaagaggggatagctctcagtccccactctcgtgagggttgcctccccctcctgcgatgggggtcctcagagccagggggggaagagggtctgg

SEQ ID NO: 841940 - DNA, 120 bp, Artificial Sequence
  ENSG00000241449_33 (sequence is synthesized)
aaaggactgagttgagatattttacagctgagaaggaaattatgcagcctgtaggataaattcctctcctggcagattgagtggatgtagcaccagaagctcccagaataatcacaactt

SEQ ID NO: 841941 - DNA, 120 bp, Artificial Sequence
  ENSG00000241449_34 (sequence is synthesized)
ggctctcagtccctgcctcgcggggggtgcctcccccacttgcgatggggctgccttcggacccgtcggatcgtaaatcccacgtaaggtacctgccgtcggaagatttgaactttctac

SEQ ID NO: 841942 - DNA, 120 bp, Artificial Sequence
  ENSG00000241449_35 (sequence is synthesized)
acacctaatacccacagtcctccaggtacctgccgtcggaagatttgaactttctacttggacaactaacactcgcagtcctccagctggagctgcgttcggacccgtcggatcgtaaat

SEQ ID NO: 841943 - DNA, 120 bp, Artificial Sequence
  ENSG00000241449_36 (sequence is synthesized)
aaatcccatgtaaggtatctgccgtcggaagatttgaactttctaattggacacctaacacccacagtcctccagctgcgttcggacccgtcggatcgtaaatcccacgtaaggtcggaa

SEQ ID NO: 841944 - DNA, 120 bp, Artificial Sequence
  ENSG00000241449_37 (sequence is synthesized)
attgtaaatcccacgcaaggtacctgccgtcggaagatttgagctttcttcttgaacacctcatacccacagtcctccagctgcgttcggacccgtctgatcgtaaatcccatgtaaggt

SEQ ID NO: 841945 - DNA, 120 bp, Artificial Sequence
  ENSG00000241449_38 (sequence is synthesized)
acctgccgtcggaagatttgaacgttctacttggacacctaaaacccacagtcctccagatttgaactttctacttggacaactaacacccacagtcctccaggtacctgccgtcggaag

SEQ ID NO: 841946 - DNA, 120 bp, Artificial Sequence
  ENSG00000241449_39 (sequence is synthesized)
agagccagggggggaagagggactggctctcagtaatcccacgtaaggtacctgccgtcggaagatttgaactttctacttggacaactaacacccacagtcctccagctgcgttcggac

SEQ ID NO: 841947 - DNA, 120 bp, Artificial Sequence
  ENSG00000241449_40 (sequence is synthesized)
gcctcgccccctgcgatagtggtcccaagagccagggggggaagaggggttggctctgagtccccgcctcgcggggggtgcctccccccactgcgatgggagtcccaagagccaggggac

SEQ ID NO: 841948 - DNA, 120 bp, Artificial Sequence
  ENSG00000271590_0 (sequence is synthesized)
gaatacattgattgggttttgatgttcaaaacccaatcaatgtaaatcactattaactacaaaataaaagcaatatgatcatctaaatagatgtagaaaaaaaatctgaaaaaaacccaa

SEQ ID NO: 841949 - DNA, 120 bp, Artificial Sequence
  ENSG00000271590_1 (sequence is synthesized)
cacccattcctgattaaaaactattagaaaactaggaatagaaaagcattttctcaaccaattgaacaattgaagggtagctatgaaaaacctacagctaatatcatatttcatgataaa

SEQ ID NO: 841950 - DNA, 120 bp, Artificial Sequence
  ENSG00000271590_2 (sequence is synthesized)
agatggagttttcttactctaaattcaagaatcagggaaaagtgtctgctctcaccactctatttaacagtgctggaaatattagccagcaaaacagataaagaaaaataaataaatggc

SEQ ID NO: 841951 - DNA, 120 bp, Artificial Sequence
  ENSG00000271590_3 (sequence is synthesized)
atagactggaaagattcatagttggcacaattatgtatatataaaatcctcaggaatgtacactttacatactagaatttaaaagtaagtttagcaactgtgttagttcgttttcatgct

SEQ ID NO: 841952 - DNA, 120 bp, Artificial Sequence
  ENSG00000271590_4 (sequence is synthesized)
ctgagactggacaatttacaaaagaaaggtttattggacctatagttccacatgtctggggaggcctcacaatcatggcggcaggcaaggaggggcaagtcacatcttatgtggatggca

SEQ ID NO: 841953 - DNA, 80 bp, Artificial Sequence
  ENSG00000271590_5 (sequence is synthesized)
tgcagggaaactcctgtttttaaaaccaccagatctcatgacacccattcactgtcagtctcccacaaggcccctcccat

SEQ ID NO: 841954 - DNA, 120 bp, Artificial Sequence
  ENSG00000271590_6 (sequence is synthesized)
ggtggggacacagagccaaaccacatcagcaacatgtcagaacacagaaaaaatgtaaaatatcactgtatttctatgtactagtagtgaactgtcagatgttaaaattcaattgcttag

SEQ ID NO: 841955 - DNA, 120 bp, Artificial Sequence
  ENSG00000271590_7 (sequence is synthesized)
gaactgtcagatgttaaaattcaattgcttagaatggcatcaaaaatatgaaatactggccaggcgttatggctcttgcctgtactcccattgctttggaaggctgaggcgggtggatac

SEQ ID NO: 841956 - DNA, 78 bp, Artificial Sequence
  ENSG00000271590_8 (sequence is synthesized)
tgtactcccattgctttggaaggctgaggcgggtggatacctttgaggccaggagttcaagaccatcctgagcaacag

SEQ ID NO: 841957 - DNA, 120 bp, Artificial Sequence
  ENSG00000271590_9 (sequence is synthesized)
ctgagacacaacaatcacttgaacctgggatgcagaggttgcagggagctgagattgaaccactgtactccagcctggggaacaaactgagactctgtctcaaaaaaaaagaaagaaata

SEQ ID NO: 841958 - DNA, 120 bp, Artificial Sequence
  ENSG00000271590_10 (sequence is synthesized)
cttatgggtaaatctgacaaaataagtgtaagacctgtacactaaaaactacaaaacattgctgaaataaattaaagaagacctaaataatcggagagatatactttgtttaaaggtcag

SEQ ID NO: 841959 - DNA, 120 bp, Artificial Sequence
  ENSG00000271590_11 (sequence is synthesized)
aagtctcagtattgctaaaatgagaactcttcccaatgcagtgctaatcaaatttctagcaggctttttgtagaaattgaaaagcagatttgaaattcatatggaagtgcgaacaaaacc

SEQ ID NO: 841960 - DNA, 120 bp, Artificial Sequence
  ENSG00000233316_0 (sequence is synthesized)
ggcaaccaggatagaagatcagttgtgctgggggaggggagccagccaggttgtagaaacagcatccctgactttgttctgctaactgtgcagagagaggtgatagtctccgcccaggcc

SEQ ID NO: 841961 - DNA, 120 bp, Artificial Sequence
  ENSG00000233316_1 (sequence is synthesized)
atgagggacctggaaatggctgatgacacggtggagctcggccacaccaggcccagctggccccacagcaaaccagagggtccaaggaagctgggtcctgcccaccaaggtcccagggat

SEQ ID NO: 841962 - DNA, 120 bp, Artificial Sequence
  ENSG00000233316_2 (sequence is synthesized)
cctcctctgaggccccctctctcctttgggtttagtcaacggagagggagatggggagaggactgaaaggtctccccaaaggtacaagctgagagacctggatttgcaatcagacagctc

SEQ ID NO: 841963 - DNA, 120 bp, Artificial Sequence
  ENSG00000233316_3 (sequence is synthesized)
taacatgcagattgtgcaggggttccctgcggatgcacccctgtgtgccctgatgtggacctgctccttcctgcttcctgggctccagacagaaacaccgtacccctgcaccagcctctg

SEQ ID NO: 841964 - DNA, 120 bp, Artificial Sequence
  ENSG00000233316_4 (sequence is synthesized)
cctcagctcttcacagtcagcacaccctccgcttcctgtcagggtgttctctgctgagtctggttatgggatccctttctgtgcagagccatgctcccgtgtcactgtgtgtcaccttca

SEQ ID NO: 841965 - DNA, 120 bp, Artificial Sequence
  ENSG00000233316_5 (sequence is synthesized)
agctgtccccgtgtgtatgcctgtgtgagaatatgtgtgtgtgggtttgccatcgaaggaaaacctttattttggctgctaacatttggaaacatttagagaacaaacaatatcttttaa

SEQ ID NO: 841966 - DNA, 120 bp, Artificial Sequence
  ENSG00000233316_6 (sequence is synthesized)
aaaacatcaaaggttcaaaaaaacaagacaagaaacaaactgttgtaaaatttcaactcctctaaatttgtcttaaattgaacttagaactaatctaataaaaatagtatgaagtttcaa

SEQ ID NO: 841967 - DNA, 120 bp, Artificial Sequence
  ENSG00000237928_0 (sequence is synthesized)
gagaaaaaacagtgaaacccgatggaccttaaatagatctgagggcactgatttgattattttgggtgaaatcttttaagaaaatcttgtcagattcttcacagaaaatttggtaaagcc

SEQ ID NO: 841968 - DNA, 120 bp, Artificial Sequence
  ENSG00000237928_1 (sequence is synthesized)
tatatttcatcgccagcctagcaaagataccatgaaaggatttgagcgtttttttatgtgaatccaaagatgacatttacaaaaggtggagaagcagttccctactgagggacgtggata

SEQ ID NO: 841969 - DNA, 120 bp, Artificial Sequence
  ENSG00000237928_2 (sequence is synthesized)
caaaaagcagatgacacaacacatcccatagagttcccagggaagaatgaacccagattcttgacctgcagaggtggcgtactggctggagaaatctctggctggcgaccgtgctattct

SEQ ID NO: 841970 - DNA, 120 bp, Artificial Sequence
  ENSG00000237928_3 (sequence is synthesized)
gtctgtccacctaactgtgggctcccagatcaccactgccatgggcagggggccgtggggtgggcctgcttggggtgacaggctagctgtgctcccatagcagaggtgggagaagggaat

SEQ ID NO: 841971 - DNA, 120 bp, Artificial Sequence
  ENSG00000237928_4 (sequence is synthesized)
cacatctggtgagcagctatgtcgtgccaggcactgtgctgtgtattgcacacatctcaaaccttgtgacaaatgtgtaagatattttttatgtattacaaatgaaggaactgggctcag

SEQ ID NO: 841972 - DNA, 120 bp, Artificial Sequence
  ENSG00000237928_5 (sequence is synthesized)
aaaagctccattatttgcccaaattgcagcagtaatgcaggaatttgaatccacattaatctgactccacaacccatgttctttcactgaattcccatatccttgttccccctactgtcc

SEQ ID NO: 841973 - DNA, 120 bp, Artificial Sequence
  ENSG00000237928_6 (sequence is synthesized)
tcactggtcaaggtgagcttggtcttccacaaacaggctagaaaagtatgcttacttatctttagctttatgcttttaaactaattcttaaaaatcttctctggataagtcaaagacaat

SEQ ID NO: 841974 - DNA, 120 bp, Artificial Sequence
  ENSG00000237928_7 (sequence is synthesized)
gggaatgtgtatttctaatacattaattataatacattaccggtttacacaatgccatcaccttgtcattttctttgacacaacgtccccctcccctctagtttataaatgaggacattg

SEQ ID NO: 841975 - DNA, 120 bp, Artificial Sequence
  ENSG00000237928_8 (sequence is synthesized)
aggcacaaagtgggtaagtgacttgcccaagggggagatttgtccaatcataaagatgggcctgaactttttctactttgcattcttacttgaaaggcaggaaacatatgctcaagaggg

SEQ ID NO: 841976 - DNA, 120 bp, Artificial Sequence
  ENSG00000237928_9 (sequence is synthesized)
agatctcacgaaatttcatgtcatatagtgctctcgctaatttaatcctgtcattcctggttatatccctttggaaaaaccaccaccagtgccttctcttttgatatatttacagtaaaa

SEQ ID NO: 841977 - DNA, 120 bp, Artificial Sequence
  ENSG00000237928_10 (sequence is synthesized)
atattccctgtacaaaccatctcactctttcacagggaactggcttggccctctcccctgaagtgggttgcacatccacccagcccacccccagctcactctagctcccttcctgttaga

SEQ ID NO: 841978 - DNA, 120 bp, Artificial Sequence
  ENSG00000237928_11 (sequence is synthesized)
atttattcagaacctccatttctaggaggaagcaaggagggggcagttatcttcgtggacttgggtcctcctggaccctttgtcctcatggttatgtttcaaacagagttgagggctccc

SEQ ID NO: 841979 - DNA, 120 bp, Artificial Sequence
  ENSG00000237928_12 (sequence is synthesized)
atggcttagcctctgtgaggccagagctggaacattcagctgtgagggtgtttatatttgtggaactctcttgaacatttgctgtgggttttaaacagctgctatgctgaagctctgggg

SEQ ID NO: 841980 - DNA, 120 bp, Artificial Sequence
  ENSG00000237928_13 (sequence is synthesized)
ataggaagatcatgaatattcaggtgaagccaccagaatgaacagccgttaatagaataaatgcctaaacagttgtgtaaggcttattaagacctattggggctgagataataaattccc

SEQ ID NO: 841981 - DNA, 120 bp, Artificial Sequence
  ENSG00000237928_14 (sequence is synthesized)
actctgacatgttgcaactactgtcgcttaaacactttggaccacctcttctgaactgaaggaaaaaatgatgttagttctctgcgcgaatacaaagaaacacctggaagccttggcaag

SEQ ID NO: 841982 - DNA, 120 bp, Artificial Sequence
  ENSG00000237928_15 (sequence is synthesized)
gggatgagatttggcagagatctttccgtgtaccgatgcatcctcaggaaaatgatgtgccgctcattgttcctgttgtcaaggttatcgcagtcgacttcaggctggaacgggcattgc

SEQ ID NO: 841983 - DNA, 120 bp, Artificial Sequence
  ENSG00000237928_16 (sequence is synthesized)
tcttgcactgaagaaagtctgtcctgactccctcagagtgcctcaacatcaaccaagagccaccgtgaacctctggggcactgagcctggccaccagcacccccaccccagcccatatgg

SEQ ID NO: 841984 - DNA, 120 bp, Artificial Sequence
  ENSG00000237928_17 (sequence is synthesized)
cctgggcctctcccttggtaagcctcttccaacagggtatcagaggaaccaaatacacacttacactggacgcttgcttttcattcgcttgctccataatccatagcagggaacacaatg

SEQ ID NO: 841985 - DNA, 120 bp, Artificial Sequence
  ENSG00000237928_18 (sequence is synthesized)
caaagattgcaaatgtaaaaatgacctttccaagtggtaacacctggtgtgttaaaaagtccattgcagactgggtttgcagtgtgcacactgtaaatatggggaatgtgggaaacagta

SEQ ID NO: 841986 - DNA, 120 bp, Artificial Sequence
  ENSG00000237928_19 (sequence is synthesized)
gagagggactgttttctcctttgggtgttagctgtcaccttgtgttagactgagccagactcctcggttctggctcccacagtcacaaggcattaaccaagggtatacagaggaactcac

SEQ ID NO: 841987 - DNA, 120 bp, Artificial Sequence
  ENSG00000237928_20 (sequence is synthesized)
ccaggttcacacctagagaagactcagtaatatttgatcagcaacctgctgtcaatttagataaatggcatttgacttcaaataaaggtgactaactcaatgaaggaagcctgtgcatag

SEQ ID NO: 841988 - DNA, 120 bp, Artificial Sequence
  ENSG00000237928_21 (sequence is synthesized)
aaggcaatgtttgcttctcccaagctgtcagggagagcttgcccaccctagcagtggtcactgattttctccacctctgaagacatggtggggtcctgccaaagactctgagctgtcaga

SEQ ID NO: 841989 - DNA, 120 bp, Artificial Sequence
  ENSG00000237928_22 (sequence is synthesized)
attctggaagagacaaactcacaacaaagaaatgcacatgtctcaatgtggcttgggaggagtagcagattttagagtgatgctgacctgaatttgaattgtgctctgccactcaaggtc

SEQ ID NO: 841990 - DNA, 120 bp, Artificial Sequence
  ENSG00000237928_23 (sequence is synthesized)
tgagtgtctgaaagcaagttattccacttctgtgaggtatagctgtcttgcctgtaacacaggcattattctacctactcacaaacttgttctgagagttaaaaaacaaataaaccacct

SEQ ID NO: 841991 - DNA, 120 bp, Artificial Sequence
  ENSG00000237928_24 (sequence is synthesized)
aaagtctgaacaaaactagactgtgagactagcacgtcctagagtggaattgactgaggttaacgcagagtctgtaaagactctacagactcggatcatttgcaagcaaactaaaattcc

SEQ ID NO: 841992 - DNA, 120 bp, Artificial Sequence
  ENSG00000237928_25 (sequence is synthesized)
cttttttaaaaaagaaaaaaaatcattaattgggttccgatctaaaatactgctcttaaaatgcgctcacatgttgaagactgagattgcaagttctcgagtaaacatctggtgaagaca

SEQ ID NO: 841993 - DNA, 120 bp, Artificial Sequence
  ENSG00000237928_26 (sequence is synthesized)
ttccaggaacacatctgaaaggaagaaaggaactctcaaggtgacttcatccatggcggctgtgtggcagcgagctacttgcgcatctcttctgttccgtgaggtcatgttggcagcttg

SEQ ID NO: 841994 - DNA, 120 bp, Artificial Sequence
  ENSG00000237928_27 (sequence is synthesized)
aaattgatcaagtgggaagcatttacatcacagaaattggtggtctctctgcgtgtctctgtcttcatgtggtgctttcttcttcttacaaggacatcagccatgctggattagttccca

SEQ ID NO: 841995 - DNA, 120 bp, Artificial Sequence
  ENSG00000237928_28 (sequence is synthesized)
ctactactctctgggacccccaaatcaggtgccaagaacatacactggggaaaaggcagtctcttcaataaatggtgccgggaaaacttgatatccatattcaggagaatgaaactagac

SEQ ID NO: 841996 - DNA, 120 bp, Artificial Sequence
  ENSG00000237928_29 (sequence is synthesized)
cccaatttcttctcatatacaaaaatcaaatcaaaatggattaaagatttaggctgggtgcagtggcttactcctgtaatccgaacactttgggaggatgaagagggagaatcacttgag

SEQ ID NO: 841997 - DNA, 120 bp, Artificial Sequence
  ENSG00000237928_30 (sequence is synthesized)
tcccggagctcaggaccagcctgggcaacataatgagaccttgtctctacaaaaagtaaacaaaattagctgggcatgatggtcacatgcctgtagtcccagctactcagaaggttgaga

SEQ ID NO: 841998 - DNA, 120 bp, Artificial Sequence
  ENSG00000237928_31 (sequence is synthesized)
agctgagatcaagccactgcactccaccctggacaacagagtgagaccttatccccccctccaccccatcccacaaaaaaaaggattacagaattaaatctaagacctcagactatgaaa

SEQ ID NO: 841999 - DNA, 84 bp, Artificial Sequence
  ENSG00000237928_32 (sequence is synthesized)
gttggtctgggcaaaaattttttgagcaatacccccaagcacaggcaaccaaaggaaaaatgaacaaatgggatgacgtcatgt

SEQ ID NO: 842000 - DNA, 120 bp, Artificial Sequence
  ENSG00000237928_33 (sequence is synthesized)
taataatctgatagaaaaacaggcaaaatattcaaatagacatttctcaaaagaagacatccaaagagtaaataggcatatgaaaaagtgcccaacatcactgatcatcagagaaatgca

SEQ ID NO: 842001 - DNA, 120 bp, Artificial Sequence
  ENSG00000237928_34 (sequence is synthesized)
aatcaaaactacaatgagatatcttaccccagttaaaatggcttatacccaaaagacaggcaataacaaattctagcaaggatgtggagaaaaaggaaccctcatacactgttgatggga

SEQ ID NO: 842002 - DNA, 120 bp, Artificial Sequence
  ENSG00000237928_35 (sequence is synthesized)
tttgaaggttcctcaaaaaactaaaaatagagcctactttaccatctggcaatcccattgctgggtatatagtcgaaagaaaggaaatcagtatattaaggagatagctacactcctata

SEQ ID NO: 842003 - DNA, 120 bp, Artificial Sequence
  ENSG00000237928_36 (sequence is synthesized)
ctgggtatatagtcgaaagaaaggaaatcagtatattaaggagatagctacactcctatatttgttgtagcactgtgtacaatagccaagacttggaagcaacctaagtgtccatcaaca

SEQ ID NO: 842004 - DNA, 120 bp, Artificial Sequence
  ENSG00000237928_37 (sequence is synthesized)
tgcacaatggagtactattcagccatgaaaacgaatgagatcctgtcatttgccaccacctggatggaactggagatgattatgttacatgaaatatgccaggcacagaaagacaaacat

SEQ ID NO: 842005 - DNA, 82 bp, Artificial Sequence
  ENSG00000237928_38 (sequence is synthesized)
tcagaggctgggaagaatagtgggggtgagtggggaaaaggtggggatggttaatgggtacaaaaaaatagttagaaatgat

SEQ ID NO: 842006 - DNA, 120 bp, Artificial Sequence
  ENSG00000237928_39 (sequence is synthesized)
agtgggggtgagtggggaaaaggtggggatggttaatgggtacaaaaaaatagttagaaatgatgaataagacctactatttgatagcacaccagggtgactatagtcaataataactta

SEQ ID NO: 842007 - DNA, 120 bp, Artificial Sequence
  ENSG00000237928_40 (sequence is synthesized)
aaaataatgacaagagtataattggatcatttgtaacacaaaggataaatacttgagatggaaatcccattctccacaatgtgattattatgtattgcatgcctgtatcaaaacatctca

SEQ ID NO: 842008 - DNA, 120 bp, Artificial Sequence
  ENSG00000237928_41 (sequence is synthesized)
cccaaccttctgtctccctgagtcagacctgcagacgattgcatgccaccagctgtcttcactcctgagaacatgacacaaaggaatgctccctgtcaagttcttcattatccttctgat

SEQ ID NO: 842009 - DNA, 120 bp, Artificial Sequence
  ENSG00000237928_42 (sequence is synthesized)
gaatttcccctggtttaaacaagttggtggtagacagacctttctcgcattttcacagacgtgccaggaggaaacccagcgtctctcagtttcctttaaatatatgagataccatgaaag

SEQ ID NO: 842010 - DNA, 120 bp, Artificial Sequence
  ENSG00000237928_43 (sequence is synthesized)
gggcctctcccttgatgtttaaaggagatgataaaaatgctgcaacccagataatgatcaccttactcttcaaaaatactgcccaagttctttgttcaagatgccaagaacctggatacc

SEQ ID NO: 842011 - DNA, 120 bp, Artificial Sequence
  ENSG00000237928_44 (sequence is synthesized)
ctccactggtaacaaatatgactttgtttttagcaagcaactttgcagtgtaattaagttaaggatcttgagatgagatcatcttggaatatctgggtgggccctaaatccaatgacaag

SEQ ID NO: 842012 - DNA, 120 bp, Artificial Sequence
  ENSG00000237928_45 (sequence is synthesized)
tgtcctcataggaagggaagatacacacagaggagaaggtggtgtgaagatggaagccaagactgttgataccagttggagagcaccaagaactacccgcagccactgaaagctaggaga

SEQ ID NO: 842013 - DNA, 120 bp, Artificial Sequence
  ENSG00000237928_46 (sequence is synthesized)
gaggcataggactgtctccttcagaccctccagaaagaccaaacctgcccgtgccttgatttcagacttttggcctcccacattgtgagagaataaaattttgtttttgaagccatctag

SEQ ID NO: 842014 - DNA, 120 bp, Artificial Sequence
  ENSG00000258928_0 (sequence is synthesized)
gaaagaaggcctgcaaacacaaggctaaggttccaactcactccctggaggatgctacgtctcacaggaagattacagaggcgattgcagtatgaaggcaaccagccatgtcgttgctgt

SEQ ID NO: 842015 - DNA, 120 bp, Artificial Sequence
  ENSG00000258928_1 (sequence is synthesized)
ctgacaaatgggatgcgattttcttgtgctttacacttggggctcagattattttcgtggaaaatttttagcactttgagatgttataacactggcatcctagagaccgaaatatgaaat

SEQ ID NO: 842016 - DNA, 120 bp, Artificial Sequence
  ENSG00000258928_2 (sequence is synthesized)
caccatattctgccaacggtgcactattctcaactactccatttatctctacggggcaaataatggatgtgttccagcacccactcaatttctgtgttttcgtctagctgaaataataat

SEQ ID NO: 842017 - DNA, 120 bp, Artificial Sequence
  ENSG00000258928_3 (sequence is synthesized)
agatgtaaaatatggctctctgtctaaaattagcctctggttagacactatcagctaccactcaacacaaggaaattttacacagaaataaaatgattacataggtagaatgatgcatga

SEQ ID NO: 842018 - DNA, 120 bp, Artificial Sequence
  ENSG00000258926_0 (sequence is synthesized)
agggtggaaaatctggattctaccccaagtgtaagtctcaaactgactggagagcaggggaaagagaagggtcaagaactcagggactcattttatgttccccttcctgctgtggccctc

SEQ ID NO: 842019 - DNA, 120 bp, Artificial Sequence
  ENSG00000258926_1 (sequence is synthesized)
attacagtggaactgaactagaggatactcaaggaatcagaggcacacctggccccgagaatgagacacttaacagtttttttcccagactacagaggaggtgtggctgcaggggaaagc

SEQ ID NO: 842020 - DNA, 120 bp, Artificial Sequence
  ENSG00000258926_2 (sequence is synthesized)
aagcaggcatgctccctcctgacgctagttctaaggggacatgtaaaggatttgggccaagtttgtataggaatgtcctgggaggcctcctgcaagccagggaaggctgaaagaactaac

SEQ ID NO: 842021 - DNA, 120 bp, Artificial Sequence
  ENSG00000258926_3 (sequence is synthesized)
agcttctctgacatggagggctggtcaggctctgcagtgtcactgcttgtgtttgtatcattctttcaccactgagttactgtgtgactgtggacaaatttcttaacttctctgagcctt

SEQ ID NO: 842022 - DNA, 120 bp, Artificial Sequence
  ENSG00000258926_4 (sequence is synthesized)
agatttctcaactctaacatgaagattttcctatattttaaaaagttatgatgagtcaatgagagaattaacgtaaagcgcctggcataaagaaagccctcaagaaatgatagtattagt

SEQ ID NO: 842023 - DNA, 120 bp, Artificial Sequence
  ENSG00000258926_5 (sequence is synthesized)
gaacatcttgttgccgtcctaggctcgaatagactgtccctaaacactctgttcccaccgctgtgaacagtggcagcataattcttttgcagaatacttccattatttgcttatgtccct

SEQ ID NO: 842024 - DNA, 120 bp, Artificial Sequence
  ENSG00000258926_6 (sequence is synthesized)
aatgggacccaaatgccaaacttgtaagtccatcctgttctactaaaaggcaggggcacagatagaaagctgctgagagactacactctgaggtcagccttgaccctgaggctcatctgg

SEQ ID NO: 842025 - DNA, 120 bp, Artificial Sequence
  ENSG00000258926_7 (sequence is synthesized)
ctctccctgttcctctacagccaggtaaaggttagaggcaagtctcggagatggaaacccaaggtcatgcagttgtgccaatgcccgttgttagacaacatgcttctattcctgacaaac

SEQ ID NO: 842026 - DNA, 120 bp, Artificial Sequence
  ENSG00000258926_8 (sequence is synthesized)
cagtctcaagcagctctgactgatggggcggatttcaatgctctccaatgacttccaagtgttaagaaaaagctgctgctaccctacatgcccaagctatacgaactacttttttccagg

SEQ ID NO: 842027 - DNA, 120 bp, Artificial Sequence
  ENSG00000258926_9 (sequence is synthesized)
caaacaggattcctgcagacaatgctcggatgatgaaatctgagaggctggatgacagagaaacccacatgcatacacacacactttataaagcttaggaacaaaagcactttataatct

SEQ ID NO: 842028 - DNA, 120 bp, Artificial Sequence
  ENSG00000258926_10 (sequence is synthesized)
ccttctgatgccaagtttacagtgcttccagagtcaacaaaggtgactcaggagagtgcacccagctcctttcagcacttatttagctcagccacctgtgtgagctcaaagacaagggtg

SEQ ID NO: 842029 - DNA, 120 bp, Artificial Sequence
  ENSG00000258926_11 (sequence is synthesized)
ccgacttcacctgagtagaccctgagtcacgtgatttcttgctggagatgattcagcaaaggagcactaacctctgagacaaggcttcagcttcctgagctctgctgactcgcctgggac

SEQ ID NO: 842030 - DNA, 120 bp, Artificial Sequence
  ENSG00000258926_12 (sequence is synthesized)
ttccctaagcccttctggacctagatgagggcaaaactcagtggaacctcagaagccctaaaaaaatgatagactttcttttgtctcatcattatcagcattttgggatgatttagtcag

SEQ ID NO: 842031 - DNA, 120 bp, Artificial Sequence
  ENSG00000258926_13 (sequence is synthesized)
cctaagaaacctgatggcatgttgacaccagaaaacaggtagtatatattcccaaaccaagttaaaaaaaattaagaaataacagctggaatgccttttattttttctttacacaaatgt

SEQ ID NO: 842032 - DNA, 120 bp, Artificial Sequence
  ENSG00000258926_14 (sequence is synthesized)
agtattgagcagaaacatttgaagcaaagatgagaaagacagaaggggaagcaagaaaaatagtcttcccagtgtgcctatttgggtgcatataaagttacttttagatgtgcgattact

SEQ ID NO: 842033 - DNA, 120 bp, Artificial Sequence
  ENSG00000258926_15 (sequence is synthesized)
ggttaatgatttggggaattcttttcaagtagaaatcctgggctaaaaactaagtgtgctcaagctacccccgcacccactgattctgcactccatgggaaaagttctcacaagcaagtc

SEQ ID NO: 842034 - DNA, 120 bp, Artificial Sequence
  ENSG00000258926_16 (sequence is synthesized)
ctttgtccactacccacgtctataggaaatgtttgaacagctatacacaaagaactcacaagtccacaacctcgggggtgttgcgggtggagagggcagtggtaaaggtgatgacaggga

SEQ ID NO: 842035 - DNA, 120 bp, Artificial Sequence
  ENSG00000258926_17 (sequence is synthesized)
gggcctgtggggacagtaatattagattagtggtcagaagatgctggagcctgccttgccagtcacacacttttagaggaatgctggacagtacacaccctccccaaccctgaatgtagg

SEQ ID NO: 842036 - DNA, 120 bp, Artificial Sequence
  ENSG00000258926_18 (sequence is synthesized)
ccctcgctgacatcacgccagatgaagccctgaggtctttaacatctgtaactctatggcatgtaacataaacaggtgtctgaccagtttccccagatatagaataataataataccttt

SEQ ID NO: 842037 - DNA, 120 bp, Artificial Sequence
  ENSG00000258926_19 (sequence is synthesized)
catttaaaaaggtaagagggaattcaacaagctttccttcttaaataaatctccatctcaggaagccatggaaagatgcccctcccacactaagactgtagagagaggcactgtgaaggt

SEQ ID NO: 842038 - DNA, 120 bp, Artificial Sequence
  ENSG00000258926_20 (sequence is synthesized)
ctggcttggagatctcagctcttcctgcctctcagggggaaagggcagatccagcaggccgggaaaggatctcccagggtcccaaggaggcagcatggggcaaagtccaacagtgaggat

SEQ ID NO: 842039 - DNA, 120 bp, Artificial Sequence
  ENSG00000258926_21 (sequence is synthesized)
tctctccttctctggtctcttttctgttaaaaatgcttctttggggtacccttcattactaccctggaggttgaaggacacttcttgagaaggcatagatactcttcaggtatgctgaag

SEQ ID NO: 842040 - DNA, 120 bp, Artificial Sequence
  ENSG00000258926_22 (sequence is synthesized)
aaatgagttgtgctaaaaccactggttaattttgtctgtggcaaaaaatcatgagggtgacatagactcccaggccaggaacccgagactggatttaagagatgtggccaggatccacag

SEQ ID NO: 842041 - DNA, 120 bp, Artificial Sequence
  ENSG00000258926_23 (sequence is synthesized)
gggagcttgtatgtggctcacatcattagctctttctgtatatttgtattgtaaaccatttcccttcatttgtgaagatggagatcactttttctatacaggctagaaatgtttcttcat

SEQ ID NO: 842042 - DNA, 120 bp, Artificial Sequence
  ENSG00000258926_24 (sequence is synthesized)
acacacacgctgagcttgtttataaaagatattcatttatatggtggttttaacaacttttccatgtggaaattttagacgacagtaacacagaccctcatgtactcatcactcagcctt

SEQ ID NO: 842043 - DNA, 120 bp, Artificial Sequence
  ENSG00000258926_25 (sequence is synthesized)
gatggttactgacacatgcccaatattgtttcatctgtttctccccacaactcctggattaatttgaaagaaatcctagaagtcacttaatcagcaaatactccagtctgttggtccact

SEQ ID NO: 842044 - DNA, 120 bp, Artificial Sequence
  ENSG00000258926_26 (sequence is synthesized)
ccttatacaatagccagggtgatcttttacacatgaagtagtgattgcatcactcatgcttgcttggaattcttcaaagacttacgttggcacttcagataaagtgtagactccttcgcg

SEQ ID NO: 842045 - DNA, 120 bp, Artificial Sequence
  ENSG00000258926_27 (sequence is synthesized)
tgacctaggatgtcctttgggctctcactgttccctcagcctcctcacctgaagctctcactgccccacccctttgctcatcacactccaacccgcctgccattgagctactcaaatgga

SEQ ID NO: 842046 - DNA, 120 bp, Artificial Sequence
  ENSG00000258926_28 (sequence is synthesized)
ctgctcctttctcaagacctctgcacactttcaagcctcatttctcttcagcctttattaaatgtcatctcctccagatggcctcctttggtggcccaggtcatgttagatctgcctgtt

SEQ ID NO: 842047 - DNA, 120 bp, Artificial Sequence
  ENSG00000258926_29 (sequence is synthesized)
atagtaggcatgaaggaagaaaatgcgcctgaggacacagccagcacaaatgcagaggcatacaagtgcctggtacagctggcatgcagggatggctgaggaactgcgggggcagccggt

SEQ ID NO: 842048 - DNA, 120 bp, Artificial Sequence
  ENSG00000258926_30 (sequence is synthesized)
agatcaagtgctgtgagagcttggaagaggcacggggcaaataacactggggctggtggtgggaaggcaagtgacagcctcgtggaagaggtggcatttgaccagagatgaggacgaaca

SEQ ID NO: 842049 - DNA, 120 bp, Artificial Sequence
  ENSG00000258926_31 (sequence is synthesized)
acactaggggtttcttggggatacgcagatgacaaagacagtgtctcttcatccaggagctaatcaagagaagggggaagaatcaagcaaacttcataatacacagccggatgaaatgaa

SEQ ID NO: 842050 - DNA, 120 bp, Artificial Sequence
  ENSG00000258927_0 (sequence is synthesized)
gggagcgcggcaagcggatggagccagcgagaaacacatagccagggttctgtcgcatgacccccgacggcacctgctccccatcagcagcatcatactccggtaacttctggaaatgct

SEQ ID NO: 842051 - DNA, 120 bp, Artificial Sequence
  ENSG00000258927_1 (sequence is synthesized)
tgaaagagtggagttttgtggaaattggacctggggctgggttctgacggaggaagcaggaagtcaactgggaggattcttagagaagaaaagtgctgatttaagagaaactgcattatt

SEQ ID NO: 842052 - DNA, 120 bp, Artificial Sequence
  ENSG00000258927_2 (sequence is synthesized)
tgtgaaatacaaaattcatcttgtgggtgtaagagatgccttcgtggacggatgaagctcctggtactaagtagcaggagtgcagtgaagctgctgtgttctccagctcgtagttaaggg

SEQ ID NO: 842053 - DNA, 120 bp, Artificial Sequence
  ENSG00000258927_3 (sequence is synthesized)
ccagtcaggatcagacatcttgccctgatggaaaagaagatgaacagatacctcctgacctggatagcaattaattctggggacctagatccccaaggactttaggatgaggcagcagtt

SEQ ID NO: 842054 - DNA, 120 bp, Artificial Sequence
  ENSG00000258927_4 (sequence is synthesized)
tggatttaggatcaacatggtatttaaaatataaaagcattgtagtgttggggaagcatcatttaaaagaacttgtggggtccctgtcaggcccctcttgagacaggccagccccacaga

SEQ ID NO: 842055 - DNA, 120 bp, Artificial Sequence
  ENSG00000258927_5 (sequence is synthesized)
tggctccctagggttgtgagaaactccagaacagtgttgacttctttcttcccctagggtcacaccagcatgtagcatgatgccttgcacacagtaggtgctcagtaaacacttttggac

SEQ ID NO: 842056 - DNA, 120 bp, Artificial Sequence
  ENSG00000258927_6 (sequence is synthesized)
cactgaatgcaatgaccaatggataaaaacattgttcttcccttgaccagataagacccgcttccctgggcgtccacaggccgctggtgatgcacactcttctctgtgtggcctctgcct

SEQ ID NO: 842057 - DNA, 120 bp, Artificial Sequence
  ENSG00000258927_7 (sequence is synthesized)
gccgggggaagccttgtgaccagtttctccccgctgagtcaagggagaatgagggggagcatgaacatttgcttgtttcccttatggcttctgaatctttattttattttttttaatgaa

SEQ ID NO: 842058 - DNA, 120 bp, Artificial Sequence
  ENSG00000258927_8 (sequence is synthesized)
aatgtctacttgaatttaggtaaggaagaccttgctcttagtttttgaattttgaactagaaaaaaaaaaaaggtctttcaatgaacactagcagaacagtctaagcaatcatgataaag

SEQ ID NO: 842059 - DNA, 120 bp, Artificial Sequence
  ENSG00000258927_9 (sequence is synthesized)
acctaattcctgcctctttctcctgctctgatggagctgatgacagcacaaatgggagagggagaatgtagcaaggacactgaaggacagagagttgtccaagccaccaggaaggtgaaa

SEQ ID NO: 842060 - DNA, 120 bp, Artificial Sequence
  ENSG00000258927_10 (sequence is synthesized)
aagtgagtcggcggaagtgggagcgcggcaagcggatggagccagcgagaaacacatagccagggttctgtcgcatgacccccgacggcacctgctccccatcagcagcatcatactccg

SEQ ID NO: 842061 - DNA, 120 bp, Artificial Sequence
  ENSG00000258927_11 (sequence is synthesized)
atggataaactgagggctcagtgggtcatgacctgcccagagtcatggagggagtgagaggcagagccaggatgagctcccaggccctgaaacttctgggccagtggcctacacacagag

SEQ ID NO: 842062 - DNA, 120 bp, Artificial Sequence
  ENSG00000258927_12 (sequence is synthesized)
cttcccacccttcctcattgggtttctgcaagccctccccaccccagcactctgcagggcctgggaagtgaaccagctgggaggattcttagagaagaaaagtgctgatttaagagaaac

SEQ ID NO: 842063 - DNA, 120 bp, Artificial Sequence
  ENSG00000258927_13 (sequence is synthesized)
cattttctgtgccattgggtggttccttaggaaaaaacgtagacaaagaaaaatattgtattatttgtggaaatcaagttcgtattgcaggtgtaagaaatgtctttgtgggttgacagc

SEQ ID NO: 842064 - DNA, 120 bp, Artificial Sequence
  ENSG00000258927_14 (sequence is synthesized)
atttattgaacatgagcctttatttttggagctcctccaacgtaccatgcactgtcaccttaacagttcctcacagtgaccccatagagtcaagagtcaactgcatttttgcagaagcga

SEQ ID NO: 842065 - DNA, 120 bp, Artificial Sequence
  ENSG00000258927_15 (sequence is synthesized)
ggctcagagaggttgagggttgtcctaggtatccaggtagcgagcaacagagcaagaatttgaactcgggttgtaactcttcattgtatgtgtcaacttgactgtgcaaagtgatgccca

SEQ ID NO: 842066 - DNA, 120 bp, Artificial Sequence
  ENSG00000258927_16 (sequence is synthesized)
ggcggaagtgggagcgcggcaagcggatggagccagcgagaaacacatagccagggttctgtcgcatgacccccgacggcacctgctccccatcagcagcatcatactccgggccctttg

SEQ ID NO: 842067 - DNA, 120 bp, Artificial Sequence
  ENSG00000258927_17 (sequence is synthesized)
gggagcgcggcaagcggatggagccagcgagaaacacatagccagggttctgtcgcatgacccccgacggcacctgctccccatcagcagcatcatactccgctgggaggattcttagag

SEQ ID NO: 842068 - DNA, 120 bp, Artificial Sequence
  ENSG00000258922_0 (sequence is synthesized)
tttcttggttttctggacgttcttctctccttggagctgctcttgtctttcccatttcatctccaaaccgattttgatttcctgaacgtttgtcttgagcaaggcctgcgttatcttagg

SEQ ID NO: 842069 - DNA, 120 bp, Artificial Sequence
  ENSG00000258922_1 (sequence is synthesized)
acctcatctctaaaaaaaataaataaactatttcttagaaatgtagttcctgtttagacctttgaacaatgaccatgtctagtggtctctccatagcacatgatgtataaaattgttctt

SEQ ID NO: 842070 - DNA, 120 bp, Artificial Sequence
  ENSG00000258922_2 (sequence is synthesized)
attttcattactaacagctacaaaataactataaagtagatcataaatatgccatatgtaaatatgtatacatagtgcttttatttttatgtggaatctaaatcaaatatgtgaagagct

SEQ ID NO: 842071 - DNA, 120 bp, Artificial Sequence
  ENSG00000258920_0 (sequence is synthesized)
tgggcggtggggcaggtgggtcaggcggcgcgtgccctgtcccctccccgggctccggccacacgagcgggccggcgctgcgctgctggcaacgtgtcgcgggaacgctcctaccccatc

SEQ ID NO: 842072 - DNA, 120 bp, Artificial Sequence
  ENSG00000258920_1 (sequence is synthesized)
cgctgctggcaacgtgtcgcgggaacgctcctaccccatctgcatgccttacatggctcgaaagtaaaaataaaaagaattacgatgcgggcgaggcttgtgggggtgagaagaggagat

SEQ ID NO: 842073 - DNA, 120 bp, Artificial Sequence
  ENSG00000258920_2 (sequence is synthesized)
tccacgtctccccagtgctgcgtcctgataggacccccagggccttccgagccctctcccagcgaccacctcgtgtcccggagttgcagcaagagatgtgagaaggtgtcaccctgaaga

SEQ ID NO: 842074 - DNA, 120 bp, Artificial Sequence
  ENSG00000258920_3 (sequence is synthesized)
ttccaccttctaattccatagaacctcagctctgggacttgcttcctgacctagggtgcaggggccaaatttgtttgggaacaaccccattcacaattccccatgaactttcagaaagga

SEQ ID NO: 842075 - DNA, 120 bp, Artificial Sequence
  ENSG00000258920_4 (sequence is synthesized)
cccttgcgtcttaggtcctgagaagtcacaaataagcaagctgcattgtctaatgtcttgtctacactgttttacaaacacatttaacagccgaattgtatatgtgccctagaaatcact

SEQ ID NO: 842076 - DNA, 120 bp, Artificial Sequence
  ENSG00000258920_5 (sequence is synthesized)
ttgagaaacacttatttcctgatagaggacttgatgggaccattctgcagccccatctgagcatgggctggagagtacataagtatctgggagctggaagtcctcaattccaggcttatc

SEQ ID NO: 842077 - DNA, 120 bp, Artificial Sequence
  ENSG00000258920_6 (sequence is synthesized)
tgcccccatcagcgtgggacctcagttcctcctccaaggagaagagcgcccctcccttgatgttttgtgcattcttttgctaaatgtttctctggtcaagaactttaatccccctacaca

SEQ ID NO: 842078 - DNA, 120 bp, Artificial Sequence
  ENSG00000258921_0 (sequence is synthesized)
agaggtccctcagtgccagggcctcccctgtgtcgagggcggctcttagaatccatcctgggaaactcaccgtcagggcaacggaatgagaacaacttcatgagacttattttgactgga

SEQ ID NO: 842079 - DNA, 120 bp, Artificial Sequence
  ENSG00000258921_1 (sequence is synthesized)
caggagaattgcttaaacctgggaggtggtggaggttgcagtgagccgagactgcgtctttgcactgcagcctgggcgacaagagcaaaacttcatcaaaaaaaaaaaaaaaaaaagaaa

SEQ ID NO: 842080 - DNA, 120 bp, Artificial Sequence
  ENSG00000258921_2 (sequence is synthesized)
gaagtgggtgcagaggctgggctacagaagaacacactgattcccatggctgaatactccttcgcacaagagcagagcctctgtgagggataaggactccttgaagatcacaggggtggt

SEQ ID NO: 842081 - DNA, 120 bp, Artificial Sequence
  ENSG00000268739_0 (sequence is synthesized)
ctcacaacatgtctaagaggtaggcacgtcattgttcccattttgcagatgaggaaactgaggttcagagagggcacttggcttgcccaaagtcacacagcagggagtggcagagaatgg

SEQ ID NO: 842082 - DNA, 120 bp, Artificial Sequence
  ENSG00000268739_1 (sequence is synthesized)
ggataggtgggggaatgaggtgagaggggagatgtttagaggtgtggagggcggcagaggtttgaacagtgcagacaaggggagagttcagccgactggggaggaagaggatggacgatg

SEQ ID NO: 842083 - DNA, 120 bp, Artificial Sequence; identical to SEQ ID NO: 677976
  ENSG00000268734_0 (sequence is synthesized)

SEQ ID NO: 842084 - DNA, 120 bp, Artificial Sequence
  ENSG00000268734_1 (sequence is synthesized)
atataaatggttggtaagcatgccaaatatattcaataacccccctcctttatttttttttgttgaagtgaggctctccctatgttgcctaagctggtcttgaactcctggtctcaagca

SEQ ID NO: 842085 - DNA, 120 bp, Artificial Sequence
  ENSG00000268734_2 (sequence is synthesized)
ctacaaattgataagagtgaaagtcataatcctacaggaggattaccctatttatttcacaaaccctatttctaccggattttcatacaaggaatacaggcatgtgtttcacctcattaa

SEQ ID NO: 842086 - DNA, 120 bp, Artificial Sequence; identical to SEQ ID NO: 677979
  ENSG00000268734_3 (sequence is synthesized)

SEQ ID NO: 842087 - DNA, 120 bp, Artificial Sequence; identical to SEQ ID NO: 677980
  ENSG00000268734_4 (sequence is synthesized)

SEQ ID NO: 842088 - DNA, 120 bp, Artificial Sequence; identical to SEQ ID NO: 677981
  ENSG00000268734_5 (sequence is synthesized)

SEQ ID NO: 842089 - DNA, 120 bp, Artificial Sequence
  ENSG00000228787_0 (sequence is synthesized)
atccaggagcaagttggttctggctttcgaaggacatgtttgcttccctttctgccttgattgaaagtttctggaagccttcccagccttgcagaactatgaaaactcttctacataaga

SEQ ID NO: 842090 - DNA, 120 bp, Artificial Sequence
  ENSG00000228787_1 (sequence is synthesized)
tataattattggaacagatcaatgaagaaattacaaaagacaaaataatacacttgatcacctaagatggggtctcgctctgtcacccagactgcggggaagcagcatgatctctgctca

SEQ ID NO: 842091 - DNA, 90 bp, Artificial Sequence
  ENSG00000228787_2 (sequence is synthesized)
tcagcctcctgagcaactgggattacaggagtgcaccaccacccccggctatatattttttttctctgtttgtttttttagtagagtcga

SEQ ID NO: 842092 - DNA, 88 bp, Artificial Sequence
  ENSG00000228787_3 (sequence is synthesized)
tgtgatctgcccgtctcggcctcccaaactgctaacaattttctcactctatattttctaatactatgaaatcaatgaattaagtttg

SEQ ID NO: 842093 - DNA, 120 bp, Artificial Sequence
  ENSG00000218416_0 (sequence is synthesized)
agactcaggaggcgtctctccgagggtgtgggctgtgatggggccctgtgcacccatccaggctgcccagaccaggagagcacaggtcagccggacacatgatgggggcacgctagaaac

SEQ ID NO: 842094 - DNA, 120 bp, Artificial Sequence
  ENSG00000218416_1 (sequence is synthesized)
gcagaaggggacgcagcagccacattccagtccacaaagacgccgcgcaggcccgtccatctgccccgtgaatgccaaccaggcagagacacacatacagctgaggctgggccggatccc

SEQ ID NO: 842095 - DNA, 120 bp, Artificial Sequence
  ENSG00000218416_2 (sequence is synthesized)
agagcaaacccttgggtgcctctggagggagcccgccaagagggatggctcataaacactggggaaggaacagaaggggagggagcaaaggaactcggccgctcacctccgacccaacca

SEQ ID NO: 842096 - DNA, 120 bp, Artificial Sequence
  ENSG00000218416_3 (sequence is synthesized)
cttcccgagaagccatctctgtggtcatggtggtcccaggcctggctctccctgcgcccacccccaccacccagtcactccacccagtcaccccacccagctgtgacctgccacttccct

SEQ ID NO: 842097 - DNA, 120 bp, Artificial Sequence
  ENSG00000218416_4 (sequence is synthesized)
ccatctcacatgctttcccctcacctccctcaggaagcctccccagcctctggcctccagtcccaacaagccatgctccttccagagggaacctctgccaggggagcctccactttcttg

SEQ ID NO: 842098 - DNA, 120 bp, Artificial Sequence
  ENSG00000218416_5 (sequence is synthesized)
ctcctgcctccctacctggcacccaggccggccctggtaccctggtactgaataaaggcacacgtctaaatgatgtcggggggaatctgcccagtgttggcactggagcgaacacgaccc

SEQ ID NO: 842099 - DNA, 120 bp, Artificial Sequence
  ENSG00000218416_6 (sequence is synthesized)
actgccagcatggcccacgagccacacccccccaagccagcacctcctccccagaggaagcacggggctcgacggggcacgcccctgaatgggaggtcacacatggtgagggctcccttg

SEQ ID NO: 842100 - DNA, 120 bp, Artificial Sequence
  ENSG00000218416_7 (sequence is synthesized)
ttcccagaggtctagctgtctccctgctaagatgcagagctcactatgggcctcgcagggggttaagccgagtcatttcatcttcacagcagctgtaggtcccgctgacatagctgacac

SEQ ID NO: 842101 - DNA, 120 bp, Artificial Sequence
  ENSG00000218416_8 (sequence is synthesized)
cctgcagcctgccctgactccaatcccaggggaattcctgagctgcaggcaaaggctgaagcaggagctgacaagccctgctgagcccagagaggtctgggcggtcccaggagggcgtct

SEQ ID NO: 842102 - DNA, 120 bp, Artificial Sequence
  ENSG00000218416_9 (sequence is synthesized)
ccctagggctttgatgagttggtggccgcccaggcacctctgcctgcctgcccagcatggcaggtgtgtgggctggagcttctgcccagccctgccccacagccacaattaggggacgag

SEQ ID NO: 842103 - DNA, 120 bp, Artificial Sequence
  ENSG00000218416_10 (sequence is synthesized)
tgcagataaagcacgggggccagttacatctgaatttcagataaacaatgaattgttattttagtacagtatgaaagtatttggccccaaagaactggaagcaggaaaaggaacagctcc

SEQ ID NO: 842104 - DNA, 120 bp, Artificial Sequence
  ENSG00000218416_11 (sequence is synthesized)
tcatacacccatgctcacagcattattcaccagagccggaaggtagaaacgatgtctctccacagtcgaatagattgtttccacaaactgtctgtaggtgcatacaatggaataggatta

SEQ ID NO: 842105 - DNA, 120 bp, Artificial Sequence
  ENSG00000218416_12 (sequence is synthesized)
atccgtgaaaaggaagaaattctgacacatgctccggcgtggaggaaccttgaggacgacgctgagtgaaagaagccagacacgaaaggacagatacggcaagactcgacttatgtgagg

SEQ ID NO: 842106 - DNA, 120 bp, Artificial Sequence
  ENSG00000218416_13 (sequence is synthesized)
tccctagaggagtcggattcatagagactgaaaggatggcgggcaccaggggcggtggagaggggaaatggggagttactgtttaatggggacagagtttcagttttacaagatgaaaag

SEQ ID NO: 842107 - DNA, 120 bp, Artificial Sequence
  ENSG00000218416_14 (sequence is synthesized)
ggtcctggagctggatgggggtgacggccgcacaacagcatgaatggactgaacgccactgaaaactgaactcttgaaaatggttaaactggcaaattttgttatgcatattttgccaca

SEQ ID NO: 842108 - DNA, 120 bp, Artificial Sequence
  ENSG00000218416_15 (sequence is synthesized)
aaaagcaaacaactcttctccccaaaaatatctggggtgtacttacactaaatatgtagggcatatttactctcaacatttatttccttatttgaaatgaaagtatttgggacacactgc

SEQ ID NO: 842109 - DNA, 120 bp, Artificial Sequence
  ENSG00000218416_16 (sequence is synthesized)
tggcttggtggagctgaagagggcactcacatctctatgcccaaccctgccagcagggtggaaattcaggcaggctgtgggagggtggggttgtcctcctggggctctgcccagctctcc

SEQ ID NO: 842110 - DNA, 120 bp, Artificial Sequence
  ENSG00000218416_17 (sequence is synthesized)
tgaccaccgctgtcctcacgcaaagctgccatggtcattccacatcctctacctgccccctccagcccccagtccaatggcacccgggccttgactccagacccccctgcccctatatcc

SEQ ID NO: 842111 - DNA, 120 bp, Artificial Sequence
  ENSG00000218416_18 (sequence is synthesized)
tgacctgctttccctctgacataccaaacccaacaggccacatccttccaccaagtctcccacccaggtgcccccagcctgggaggtctatgctgtgcgcctctggcccctccttggaca

SEQ ID NO: 842112 - DNA, 120 bp, Artificial Sequence
  ENSG00000218416_19 (sequence is synthesized)
ccagagggacagcctcccgccaacaccctcccctccctgcagcccaggtcctgcgtggctcccactgtcccggcccagctccccaccttccccaggcctgctgacccagccagacaaaac

SEQ ID NO: 842113 - DNA, 120 bp, Artificial Sequence
  ENSG00000218416_20 (sequence is synthesized)
cacccactcacaccagttcccctctggccgcactccggcctctcggccggtctgcaatgggcacactgagagctgctggacagaccaccaaggcaggccacaacaccggagacccccaaa

SEQ ID NO: 842114 - DNA, 120 bp, Artificial Sequence
  ENSG00000218416_21 (sequence is synthesized)
gacggggctttcaccaggcaactcataagactgctctctaagctgcccagatcctgcttggggaacccctgagcaggccatcctgccggcagacgccaggtctgggcggtgccggccctg

SEQ ID NO: 842115 - DNA, 120 bp, Artificial Sequence
  ENSG00000218416_22 (sequence is synthesized)
gcatggcacgacggcaggggtccatcagatgggagcctagtcacagctcgggccaagaagccgcgtgccctgtgcaggcctccccccatgccagcctgctccactgtctgaggctcatgc

SEQ ID NO: 842116 - DNA, 120 bp, Artificial Sequence
  ENSG00000218416_23 (sequence is synthesized)
gtgccaggctgagcagactcaggaggcgtctctccgagggtgtgggctgtgatggggccctgtgcacccatccaggctgcccagaccaggagagcacaggtcagccggacacatgatgga

SEQ ID NO: 842117 - DNA, 79 bp, Artificial Sequence
  ENSG00000274776_0 (sequence is synthesized)
agtaaagttacaaagtcattcacttggtgtacaccctatgtaaatggagaggatgtttccttcagcatgaattggcctt

SEQ ID NO: 842118 - DNA, 120 bp, Artificial Sequence
  ENSG00000274776_1 (sequence is synthesized)
atgttctctgcctccagaccccattgtcctgcctcaataccactgcaggttgtgcctgaaaaacacagcattccaataaattgtttttcacaattcctattaaaaaatagtagtgcattt

SEQ ID NO: 842119 - DNA, 120 bp, Artificial Sequence
  ENSG00000274776_2 (sequence is synthesized)
gtttataattgtatatgctacattatctacaattatctgtatttgtatacacatgaccaggtaaacacattactagagtttttctgaggcctttgaaggggctgtagagcttggactcct

SEQ ID NO: 842120 - DNA, 120 bp, Artificial Sequence
  ENSG00000274776_3 (sequence is synthesized)
tttctgaggcctttgaaggggctgtagagcttggactccttcaacttaatggtaaagcctcctctgagttcaagaatttttttttttcttcaagatggagtcttgctttgttgcccaggc

SEQ ID NO: 842121 - DNA, 120 bp, Artificial Sequence
  ENSG00000274776_4 (sequence is synthesized)
ccagtctggtctcgaactcctgaccttgtgagccaccgcgcccagcctgcaagaattatttactaataccctaccctgtacttagcatggtgctgaatttttatggaagcatctgagaac

SEQ ID NO: 842122 - DNA, 120 bp, Artificial Sequence
  ENSG00000274776_5 (sequence is synthesized)
tgtacctatccctgcttataagtgtacatagtcctgttagggagaaacaaaatataaaattgcacaagtaaagtacatatatatgacctcagaaaggacttccagaccctaggagaacct

SEQ ID NO: 842123 - DNA, 120 bp, Artificial Sequence
  ENSG00000274776_6 (sequence is synthesized)
aaaaggtctgcaaaactttccctcttgaggccccttgccccatttcgccttccaatcatttagaatttgaaggcaaattagaggataactgaaactgacaaatcaggagcttttcttgtt

SEQ ID NO: 842124 - DNA, 120 bp, Artificial Sequence
  ENSG00000274776_7 (sequence is synthesized)
accagaatgaattttgtaaaactcaaatctgaattcctacttctccagcacatgatagttttttaataaaactttatactaagcaagatagaaatttataaaattcagtgtatattattt

SEQ ID NO: 842125 - DNA, 120 bp, Artificial Sequence
  ENSG00000274776_8 (sequence is synthesized)
tttaatgtgtaaatgaaactggatactaaaggctagtattatgataaaggtaacttaaaaaccactgagtgaactgatgaataaaataagtttgacacatatatttttaaataaatgagg

SEQ ID NO: 842126 - DNA, 120 bp, Artificial Sequence
  ENSG00000274776_9 (sequence is synthesized)
acccacaagggattgtgaacaggttagcatgcttttaaattaagaaacagaaacagaatgcatggctgctcaaaaagagtatctttttgtgctttcttgagggagagggttgtggagggg

SEQ ID NO: 842127 - DNA, 120 bp, Artificial Sequence
  ENSG00000274776_10 (sequence is synthesized)
aaaccctccaactcgggctggctaacagggatgcttccttatgaaacgtgctcacctaagaataccagtgagaccatcggcactttctgtaattggcagcaatagagctattagaagaaa

SEQ ID NO: 842128 - DNA, 120 bp, Artificial Sequence
  ENSG00000274776_11 (sequence is synthesized)
catgaaagagatagatggatctgaaatcaacatttgtaacaaaaggcctcaccatgttccccagcacaaatgtgctactgattagcagctaaaatgtgagcatccctactcaaattcacc

SEQ ID NO: 842129 - DNA, 120 bp, Artificial Sequence
  ENSG00000274776_12 (sequence is synthesized)
ctgttctccccatcctgaaggttctgatattaatgcataacattgtagcttataatgcttttacttaacattatcttattcatgcatcatcagagaatgatctaccaaaatgtatggaga

SEQ ID NO: 842130 - DNA, 120 bp, Artificial Sequence
  ENSG00000274776_13 (sequence is synthesized)
gaaagctaaaaatgtaaagtggctgttctcaatcttagctacatattagaacaacttggggagtttttaaattctgtgataaccacactgccctcagaccaatccgaattctggggctta

SEQ ID NO: 842131 - DNA, 120 bp, Artificial Sequence
  ENSG00000274776_14 (sequence is synthesized)
aatccaggtggagtgctagccacatgtagagcagctttctgctttcatatatatctgggcttaggcctcggtgagggttgggaagggcctatgacctctgaagagccttcacattacagc

SEQ ID NO: 842132 - DNA, 120 bp, Artificial Sequence
  ENSG00000274776_15 (sequence is synthesized)
ccaggaacagctggcccacagcaggagagatgcagagcctgaggtggagggccaagcctggggaatagggggtgctttgaagagcgtggtggtgaatggaggcttaatgaagcagaaact

SEQ ID NO: 842133 - DNA, 120 bp, Artificial Sequence
  ENSG00000274776_16 (sequence is synthesized)
ctactgctgtccagctgccccaaattacctgaatttagaaaggaacacaaagttacagtgagtgcattttattttagctcagacaaatccaacaccatggatagaaggagggaaagtaaa

SEQ ID NO: 842134 - DNA, 120 bp, Artificial Sequence
  ENSG00000274776_17 (sequence is synthesized)
gatcccattcagagccttcctcctccaagaattgaggggctttctcatttttctctctgtaaaggatcatttcataattcagctctcttacttttataagccacttttaaaacccacatt

SEQ ID NO: 842135 - DNA, 120 bp, Artificial Sequence
  ENSG00000274776_18 (sequence is synthesized)
cctgtgtgtatttatatctatttctgtgctttctattctgttctattagtaatcagtccattcaagtgtcagtaccatgctgttttaattatggaggctttatactgtgttttaataact

SEQ ID NO: 842136 - DNA, 120 bp, Artificial Sequence
  ENSG00000274776_19 (sequence is synthesized)
ggtcaagctatgtcccttactgtgctgcttttttcagagttgaaaaagatttaataaaatcacaaatttaattggatttaatccttcatgtaaacaatatacaaattattttcctccttg

SEQ ID NO: 842137 - DNA, 120 bp, Artificial Sequence
  ENSG00000270641_0 (sequence is synthesized)
gagccgagatcgcgccagtgcactccatcctgggcaacagaacaagactccaactcgaaaaaaaaatcaataaaaatgtaaaagatcattcttagcttggaggctataaaaaaggatgca

SEQ ID NO: 842138 - DNA, 120 bp, Artificial Sequence
  ENSG00000270641_1 (sequence is synthesized)
gcatgtcagatttggcccattagctgcagtttcctgacctctatctacctcaattggttctttacttacattacatggaaagtgcaaacttggatggcttcaatgtctggcttcttttat

SEQ ID NO: 842139 - DNA, 61 bp, Artificial Sequence
  ENSG00000270641_2 (sequence is synthesized)
cttggatggcttcaatgtctgggtctcgctgtggcccgggctggagtgcagtggcacgatc

SEQ ID NO: 842140 - DNA, 71 bp, Artificial Sequence
  ENSG00000270641_3 (sequence is synthesized)
tcagcctcccgaatagctggaactacaggtgcacgccaccacgcttagccaggatggtctcgatctcctga

SEQ ID NO: 842141 - DNA, 74 bp, Artificial Sequence
  ENSG00000270641_4 (sequence is synthesized)
ctggcttctttttacccttcacatctggctttaaatactaccttttcacagatttcttctctaatcactctttc

SEQ ID NO: 842142 - DNA, 120 bp, Artificial Sequence
  ENSG00000270641_5 (sequence is synthesized)
atactaccttttcacagatttcttctctaatcactctttctaaagtaaatatgctgtttttcattattagtcattgcatcctatttctttccctttaattttcttatcacaatgtataat

SEQ ID NO: 842143 - DNA, 120 bp, Artificial Sequence
  ENSG00000270641_6 (sequence is synthesized)
tatatgtttttttttttttttggttattgcctgtctccctcaatagatcataagttccatttgataaggtacaatgtctgttggtttattagccagtgcctaacactaccatttaatatg

SEQ ID NO: 842144 - DNA, 120 bp, Artificial Sequence
  ENSG00000270641_7 (sequence is synthesized)
tattcaatgaatatttgttaaatgtattgattgaatttaaagtgactactcagcctacttctgccccttggagcttggattgtttcttcaaaggtattgatccttttgactattttaatt

SEQ ID NO: 842145 - DNA, 120 bp, Artificial Sequence
  ENSG00000270641_8 (sequence is synthesized)
atgaattcactaaagacatctggaaggcttattgtgtcaagcagtgccaaatccatggcttgatgaacctagatccatccccttcccctttccatatcacagatgacaacttgatggttg

SEQ ID NO: 842146 - DNA, 120 bp, Artificial Sequence
  ENSG00000270641_9 (sequence is synthesized)
gcctatgacttgtaaaagttgtcatatttgaattctgaaatttctctaattttcttgggaagcagaaaggaaaaattagtagttggcctcaaagggacagttgaatttcacatataatga

SEQ ID NO: 842147 - DNA, 120 bp, Artificial Sequence
  ENSG00000270641_10 (sequence is synthesized)
gcaaagtagtgtgaggaagagaggagggccttttcttttgaggtcataactaaaagttaggtgagcaaatgccataagcatgaaaatagcaaaccaagcttcttggtttctatccaaagg

SEQ ID NO: 842148 - DNA, 120 bp, Artificial Sequence
  ENSG00000270641_11 (sequence is synthesized)
ctttgttgggaaaagtatcaaagtgtgttcatttgttatgtaatatataaggtagagaacccaatttgaaggaggtggaataactttccaaaatacttatggctaaattctcagttgatc

SEQ ID NO: 842149 - DNA, 120 bp, Artificial Sequence
  ENSG00000270641_12 (sequence is synthesized)
tttccaaaatacttatggctaaattctcagttgatcttggaataagattcaagaatccaaatgcacccttctttgttatcttgctagaaaacatgctgggcatggtggctcatgcctgta

SEQ ID NO: 842150 - DNA, 61 bp, Artificial Sequence
  ENSG00000270641_13 (sequence is synthesized)
ctgacgcacctataatccgtgctactcaggaggtaggcaggagaattgctggaacccggga

SEQ ID NO: 842151 - DNA, 120 bp, Artificial Sequence
  ENSG00000270641_14 (sequence is synthesized)
aagaaagaaaaaagggaagggaaggaaaggggggaggggagggaagggaagggaagggaaggtaagggaagggaagggaagggaagggaaaagggaaaacaatgtgcttttacccacagc

SEQ ID NO: 842152 - DNA, 120 bp, Artificial Sequence
  ENSG00000270641_15 (sequence is synthesized)
tgataagcttttctaattgtctacctttgggttaaactttatcattgagtgtttttatcccattatgaaagaattaaggtttgaaggactgaggtaagggtggatatttactcttaattg

SEQ ID NO: 842153 - DNA, 120 bp, Artificial Sequence
  ENSG00000270641_16 (sequence is synthesized)
agtagcttaaccaagtcaagccacagattagctgaagccaaaaagcactggcagcatttgaaataactgagaacatattatacttaacactttattatctaagagaggcacttgaagttg

SEQ ID NO: 842154 - DNA, 120 bp, Artificial Sequence
  ENSG00000270641_17 (sequence is synthesized)
agacctagaaatttgattctgggttctttgtttctaaggggcagggtgaacccagctatagcattcacagatgctatagaattatatatattctatatataattatatatattacattca

SEQ ID NO: 842155 - DNA, 120 bp, Artificial Sequence
  ENSG00000270641_18 (sequence is synthesized)
tattaatatatgttaatatattctatattattcatatagaattcacagataatccaagtgcttttttaatacattgataccaaatctctcctgctctcaaaaaaaaaagcccaaggcaaa

SEQ ID NO: 842156 - DNA, 120 bp, Artificial Sequence
  ENSG00000270641_19 (sequence is synthesized)
aatttttgattagcctgtatccgcaaattcatagtgcatggcatgatgggtactctacatccctcctcctattgcactcactgtgcccagatgaacctaaagtcaccagtaatagtgcta

SEQ ID NO: 842157 - DNA, 120 bp, Artificial Sequence
  ENSG00000270641_20 (sequence is synthesized)
atgtagtaatgggcccaagcttcaaaagaaggaaaattagtattcagtatttaaatgtgggaaagaggaagaatatggaaattatcaattttataatacctatacatattcttacctgca

SEQ ID NO: 842158 - DNA, 120 bp, Artificial Sequence
  ENSG00000270641_21 (sequence is synthesized)
ttaatgtgaatagacatcaatgataaacagaataatgccccataaagatgtctacactgtaatctccaaaacttataactatactatatcacatggcaagagggaattaaggttactaat

SEQ ID NO: 842159 - DNA, 120 bp, Artificial Sequence
  ENSG00000270641_22 (sequence is synthesized)
cagctgaccttgagatgggagattctcctggtttgtatgggtgggcccaatgtaatcacagggtccttataaatggaaaaggcagacaggagattcagtgtcagactgatacaatgaggg

SEQ ID NO: 842160 - DNA, 120 bp, Artificial Sequence
  ENSG00000270641_23 (sequence is synthesized)
aaagactaccagcagttgatggctttgaagatagaagaagggggccatgagccaagaaatgtgagtagcctctagaagctgaaaaaggcaagaaaacggattcttccctagaatctccag

SEQ ID NO: 842161 - DNA, 120 bp, Artificial Sequence
  ENSG00000270641_24 (sequence is synthesized)
aaatgcagccctgccaacatggtgattttaactcaatgagatgcattttagacttctgacatctagaattgtgttattttcagccctcaagtttgtggtaatttgttacagcagcattaa

SEQ ID NO: 842162 - DNA, 78 bp, Artificial Sequence
  ENSG00000270641_25 (sequence is synthesized)
tccaagagttcgagaccagcctgggaaacatggtgaaaccttgtctctacaaaaacacaaaaattagcctggtgtggt

SEQ ID NO: 842163 - DNA, 86 bp, Artificial Sequence
  ENSG00000270641_26 (sequence is synthesized)
agtccaagagttcgagaccagcctgggaaacatggtgaaaccttgtctctacaaaaacacaaaaattagcctggtgtggttgtgtg

SEQ ID NO: 842164 - DNA, 120 bp, Artificial Sequence
  ENSG00000270641_27 (sequence is synthesized)
catgccactgcactccagcctggacagtagagccagaacttctctcaaaaaaataaaaaagaaagaaactatacaatgctcctgtgattctagtgctatgtacatatatcctttataggg

SEQ ID NO: 842165 - DNA, 120 bp, Artificial Sequence
  ENSG00000270641_28 (sequence is synthesized)
ttatagggaattaaggaggttatagacacaaccagaagaggaggcatggaatagactaatgtataatggataggaaagtgtatcttttacaacttctctgtaaaaacaccttcacctact

SEQ ID NO: 842166 - DNA, 120 bp, Artificial Sequence
  ENSG00000270641_29 (sequence is synthesized)
ttatgagtttgcctcagctgccataacaaaatatcagaccaagtggcttaaataacaatttattttctcacagttctggaggctagaagtctaagatgaaagtgccagcaagtttgattt

SEQ ID NO: 842167 - DNA, 120 bp, Artificial Sequence
  ENSG00000270641_30 (sequence is synthesized)
ctggtgaagtctctcttccttgcttgccaatggccgctttctcactgtgtcttcaaatgtccttcctctgagtatgtgaggagagagaggtttgatgcctcttcaccttcttataaggac

SEQ ID NO: 842168 - DNA, 120 bp, Artificial Sequence
  ENSG00000270641_31 (sequence is synthesized)
accagtcctactggattagggctccacccttatgacctcatttaaccttaattacctccttaaaggttctatctccaaatacagtcacatttggagtcagacctacaacatatgaatttt

SEQ ID NO: 842169 - DNA, 120 bp, Artificial Sequence
  ENSG00000270641_32 (sequence is synthesized)
gagaggacacaattcagtctataacacctagatggaaggcaatttcatataaagatgatatgcagtctatgacagcaaagtagctagtggaaatcacaacccctaattctatttttatgt

SEQ ID NO: 842170 - DNA, 120 bp, Artificial Sequence
  ENSG00000270641_33 (sequence is synthesized)
cattccctaagtccaggtcccatgtggatatagcattgttcagggctatctctttgctgttctttttttttttttagactcacacaagcaatgtggagaaggaacatgaaaacatctttg

SEQ ID NO: 842171 - DNA, 120 bp, Artificial Sequence
  ENSG00000270641_34 (sequence is synthesized)
agatagagcttaatacagatgtcaatctctttgtaaataagcaattaaaagtggaaccactgtccaccatgtgagaagagtgactggctatggctggatatttttaaatacacataaaat

SEQ ID NO: 842172 - DNA, 120 bp, Artificial Sequence
  ENSG00000270641_35 (sequence is synthesized)
gtggtataaatggtagaatgccagggatagaaggagtatcttataagttacctagtcaacgttctggcttctgggcagaaaactatctaaactcagccagataatcagtttcaactaaat

SEQ ID NO: 842173 - DNA, 120 bp, Artificial Sequence
  ENSG00000270641_36 (sequence is synthesized)
caggaaaacatggaatcatctttatctaggtagtgttatagttacattgcctcatttatctacacatcaataaattctttctcattgctaatatttatcattcttatcatagtataagca

SEQ ID NO: 842174 - DNA, 120 bp, Artificial Sequence
  ENSG00000270641_37 (sequence is synthesized)
aatgttttaattctattatggtaaagataaagcttctgtaattaaaacactttaatctggaaagacagcagtaaacccttcaagcaaaagcccaagtaggttcaaaaataatagccagag

SEQ ID NO: 842175 - DNA, 120 bp, Artificial Sequence
  ENSG00000270641_38 (sequence is synthesized)
aggttaaaggtaaaccaatagagtgatatgttacagcaactaagggagagaggcaggagttttttaaaagagagaagaggaattataacaacagaaacaggttagccagctgccagttta

SEQ ID NO: 842176 - DNA, 120 bp, Artificial Sequence
  ENSG00000270641_39 (sequence is synthesized)
gatgagcataatgagtcccttagatagatcattggtgatttttatcaaaacactatcggtggagttgtgggagtggtaggctgactatagtggattggggaattaaatagtgatgaaccc

SEQ ID NO: 842177 - DNA, 74 bp, Artificial Sequence
  ENSG00000270641_40 (sequence is synthesized)
ctgactatagtggattggggaattaaatagtgatgaacccaaaacagaaagtctgaagaaattccctttgagcc

SEQ ID NO: 842178 - DNA, 89 bp, Artificial Sequence
  ENSG00000270641_41 (sequence is synthesized)
ctctactaaacattgtctctactaaaagatacaaaaattagccggaagtggtggcaggcaacttaatcccagctacttgggaggcagag

SEQ ID NO: 842179 - DNA, 120 bp, Artificial Sequence
  ENSG00000270641_42 (sequence is synthesized)
aacccgggaggtggaggttgcactgagctgagatcgagccattgcactcaaacctgggggacaagagggagacttctctaaaaaaaaaaaattccctttgagcatctctactgtagagat

SEQ ID NO: 842180 - DNA, 120 bp, Artificial Sequence
  ENSG00000270641_43 (sequence is synthesized)
tctctactgtagagatgaaataagagagaagtggattctttagtatagagatggaaaggtatggagctagaacatgtgggttgtgaacagtggctaactaaaccaggaccagtaacctag

SEQ ID NO: 842181 - DNA, 120 bp, Artificial Sequence
  ENSG00000270641_44 (sequence is synthesized)
atatcacattgggcttaattgctgggttattcattcattcaggcaacatgtatttgttgagagcctgaatgtgccaggtaatagaaacacaaaggtggttaaaatagaccttggcctctg

SEQ ID NO: 842182 - DNA, 120 bp, Artificial Sequence
  ENSG00000270641_45 (sequence is synthesized)
tcttcaggaagcttccagtctgaagagggatgaagacatatattaatcaaacaatcccacaaatgcaggtataatctgcataaactgacaaatatatctactttggagtcaagaaattaa

SEQ ID NO: 842183 - DNA, 120 bp, Artificial Sequence
  ENSG00000270641_46 (sequence is synthesized)
gagaaatcactgatgtgatcagtgaacaagtaagatttattaggaagatggaaggatgacattacttcaaatatattacaggaaaccccaaccatggtaacaacatcaggcctatcttta

SEQ ID NO: 842184 - DNA, 120 bp, Artificial Sequence
  ENSG00000270641_47 (sequence is synthesized)
catatgtttaataatgcttaacttcacttttgctcctatcctccccaaagcaatcttcaagttcttctgtatctttgttttattttctttgttcttttttgtctcatttcctatactgtt

SEQ ID NO: 842185 - DNA, 120 bp, Artificial Sequence
  ENSG00000270641_48 (sequence is synthesized)
tttattccatactttgacagttcagtgaactcctttgatagatcccaagtcctcctttttcaatatttacacttataatcatttttgatcactccaaaactgagaactttgagtgtagat

SEQ ID NO: 842186 - DNA, 120 bp, Artificial Sequence
  ENSG00000270641_49 (sequence is synthesized)
tttctaggcttcttattttatttttagacattatatagaaaaattagagggaagggaaaagaaggatggcaacatggtaactgggacagtgttcaaaaggtctaagtcctacttctcact

SEQ ID NO: 842187 - DNA, 120 bp, Artificial Sequence
  ENSG00000270641_50 (sequence is synthesized)
gacagtgttcaaaaggtctaagtcctacttctcactccatacaaattatctgcaatttttttatttttgagacaggctcttatctctcacctgggctagagtgcagtggcacaatcatag

SEQ ID NO: 842188 - DNA, 120 bp, Artificial Sequence
  ENSG00000270641_51 (sequence is synthesized)
cttccatttcggcctcccgagtagttaggactacaggtgtgtgccactacacacagctagtttttaatttttttttattttcatagacacagggtctcactatgttgctcaaactggtct

SEQ ID NO: 842189 - DNA, 120 bp, Artificial Sequence
  ENSG00000270641_52 (sequence is synthesized)
atcctcctgccttggcctcccaaagttctagaattgttacaggaaagaggtcccaatccaggcccaaagagattttatttatgtactagtgtggagcctagcctaggacacatcaagcag

SEQ ID NO: 842190 - DNA, 120 bp, Artificial Sequence
  ENSG00000270641_53 (sequence is synthesized)
gcctaggacacatcaagcagaagtgcagataaggtctgactctttccagtacagctagggtgcctggctctccacatgtccccagaccttatctagaatctaatgtctccaaggtaggta

SEQ ID NO: 842191 - DNA, 120 bp, Artificial Sequence
  ENSG00000270641_54 (sequence is synthesized)
cattgaataattttcaaaagtcaaggaagcagtttatgaccttaaagtagttagcaaacttaatatctgacctgactaatttagaccaaatgtttacatttttgaagatatttttatttt

SEQ ID NO: 842192 - DNA, 120 bp, Artificial Sequence
  ENSG00000270641_55 (sequence is synthesized)
atcagtaatctttaaaactattttctattttccaaagattacttaagtcaaatgaactaaaaggcattatacattttagttttctgatgaaatatctgatttaagcacttattatttttg

SEQ ID NO: 842193 - DNA, 120 bp, Artificial Sequence
  ENSG00000270641_56 (sequence is synthesized)
tttctgatgaaatatctgatttaagcacttattatttttgaaccaattaaagcttttttatatcacacacacaacacatataaatacacagacaggctgggtgcagtggctcacacttgt

SEQ ID NO: 842194 - DNA, 66 bp, Artificial Sequence
  ENSG00000270641_57 (sequence is synthesized)
gatcacgtgaggtcaggagtttgagagcagcctggtcaatgatgcctgtaatcccagctactcagg

SEQ ID NO: 842195 - DNA, 120 bp, Artificial Sequence
  ENSG00000270641_58 (sequence is synthesized)
gaagaagataaaggacttatcccctaaggcaggaatcaaaccctgaacacaggccaccattgtgaaaagaaaaagcacagccacatggttacaaggtcaagctcccaaggacatacaaaa

SEQ ID NO: 842196 - DNA, 120 bp, Artificial Sequence
  ENSG00000270641_59 (sequence is synthesized)
caagaaggaaacctcatccagttttttcagggacctgcagcaaagtttgtacctgataaatttactgggccatcttgaacagcaggtttacaggtgtcctaagctcatgttctatcctaa

SEQ ID NO: 842197 - DNA, 120 bp, Artificial Sequence
  ENSG00000270641_60 (sequence is synthesized)
gatacccctctttatgacagaacaatacagaaagacacacaacagatttgctacaacttaagactagcctcataaatccattttttcactaatcaaaactttacagaggaaatgaacagt

SEQ ID NO: 842198 - DNA, 120 bp, Artificial Sequence
  ENSG00000270641_61 (sequence is synthesized)
gatttttgccatccattcaaccagttttatagagagagagagaggaaagcattgcctgaggcagggtggggaaggcccggcactccgagtgccagagaaagccccacccattgcagcaac

SEQ ID NO: 842199 - DNA, 120 bp, Artificial Sequence
  ENSG00000270641_62 (sequence is synthesized)
actgaaaagttcatgcagctgcttgtcagtcatgaacggattttttccagcagtcccatcagctctcatttccctttttaggagggaaaagctccccatgttctacaatcctctacatgc

SEQ ID NO: 842200 - DNA, 120 bp, Artificial Sequence
  ENSG00000270641_63 (sequence is synthesized)
ctaattctgtcaaccatagccatcagcaaagagtgcaaggcagatcaatccaaagagaatagcggttaacatcctataatgccaaacctgttcttagccgaaagggactttaaggagagg

SEQ ID NO: 842201 - DNA, 120 bp, Artificial Sequence
  ENSG00000270641_64 (sequence is synthesized)
gactttactgagagggacctctaaccccctaaatcttaaaagggactctaatcctcctaagttgggcctctaacccagtgtcagtcaagcatccttgccttttattgagaggaagcttta

SEQ ID NO: 842202 - DNA, 120 bp, Artificial Sequence
  ENSG00000270641_65 (sequence is synthesized)
accctctcttacgagagactctaactcccctaagttgagctataaccaatcccatcctttgcctgagtaccccaccacttacccaaagttgtccaattagtaatgctgcagtctatttcc

SEQ ID NO: 842203 - DNA, 120 bp, Artificial Sequence
  ENSG00000270641_66 (sequence is synthesized)
tttgtgctgggggtctcctcagtatcatcccttcgagtttcaccagaaagatgttatcaggccccaccacttacccaaagttagcctttggattgggggtttctgcattatagtcacttc

SEQ ID NO: 842204 - DNA, 120 bp, Artificial Sequence
  ENSG00000270641_67 (sequence is synthesized)
agtggttgccaaaaagatgttataggacccccaacacttacccaaaattaacctttgggtcaggtatttctgcactatagtcccttctgtgataatcagaaagatgttataggaaaagga

SEQ ID NO: 842205 - DNA, 120 bp, Artificial Sequence
  ENSG00000270641_68 (sequence is synthesized)
ttgtgcaagaaagaattcagggcgagtccgcagtgcaaagcaaaaccaagtttattaggaaagtaaaggagtaacagaatggctactccatagacagagtaaccccaagggctgctggtt

SEQ ID NO: 842206 - DNA, 120 bp, Artificial Sequence
  ENSG00000270641_69 (sequence is synthesized)
actccatagacagagtaaccccaagggctgctggttgcccatttttgtgtttttttcttgatgatatactaaacaaggggtggattgttcatgccttcccattttagaccatatagggta

SEQ ID NO: 842207 - DNA, 120 bp, Artificial Sequence
  ENSG00000270641_70 (sequence is synthesized)
tgtaaactgtcatggtgctgatgggaatgtagcagtgaggatggccacactaatgtgttttaagccttttcctcagccaaactacaaaaaagcaaaaattactttgtttcaatattaccc

SEQ ID NO: 842208 - DNA, 120 bp, Artificial Sequence
  ENSG00000270641_71 (sequence is synthesized)
aattactttgtttcaatattacccctactggctaacacactagcaggtcatcagaatatttgccattcctacaaaattccaagattctgtgatgatcctttgagtataagaatcacagag

SEQ ID NO: 842209 - DNA, 120 bp, Artificial Sequence
  ENSG00000270641_72 (sequence is synthesized)
atacacacaattgttacatgctctatttaagttttctatgttatattttctctttataccccccaccccatttcctgactctttctttttaaagggtctttgggatcatgaaagcaaaat

SEQ ID NO: 842210 - DNA, 61 bp, Artificial Sequence
  ENSG00000270641_73 (sequence is synthesized)
ctttctttttaaagggtctttgggatcatgaaagcaaaatgcagcatcctcagtgtcacaa

SEQ ID NO: 842211 - DNA, 80 bp, Artificial Sequence
  ENSG00000270641_74 (sequence is synthesized)
aggatttgggtaggtagtggaaaattactgtcaaagggggttgttctctggcgggcaggggtggaggtgaatttcacaaa

SEQ ID NO: 842212 - DNA, 80 bp, Artificial Sequence
  ENSG00000270641_75 (sequence is synthesized)
aggtgaatttcacaaatgtcatcagctaaggcaggaaccagccattttcacttattttgtgattcttcagttgcttcagg

SEQ ID NO: 842213 - DNA, 77 bp, Artificial Sequence
  ENSG00000270641_76 (sequence is synthesized)
attttttggggggtggtatggagagttactgggtgatgtttcttagggttgctttgagtgggattaggggtggcgtg

SEQ ID NO: 842214 - DNA, 76 bp, Artificial Sequence
  ENSG00000270641_77 (sequence is synthesized)
aaaattttttggggggtggtatggagagttactgggtgatgtttcttagggttgctttaagctgaaggaagatttt

SEQ ID NO: 842215 - DNA, 85 bp, Artificial Sequence
  ENSG00000270641_78 (sequence is synthesized)
ggtattaaaggactaagaattgggaggactcaggacatccaatcagagtgcctaagggggttcagcgtgattattttcttggttg

SEQ ID NO: 842216 - DNA, 120 bp, Artificial Sequence
  ENSG00000270641_79 (sequence is synthesized)
attgatttaggtaaaaacaacacttttcatttaaaaatacacacagtcccctttttttgagcagtaagtcaaggcctcagtgattttggaggaaagagaaatgcaaagccagcaatcatt

SEQ ID NO: 842217 - DNA, 77 bp, Artificial Sequence
  ENSG00000270641_80 (sequence is synthesized)
tgattttggaggaaagagaaatgcaaagccagcaatcattttttaaagaaggattagaaacagctaggagagagtga

SEQ ID NO: 842218 - DNA, 120 bp, Artificial Sequence
  ENSG00000270641_81 (sequence is synthesized)
aggtaaagaataggactttattagggtgaaagtattggagtgtaccttgtcactgaagatcttctatccacttcaagagagacttaaggaaggtggtttgaggtaaaaccaggagatatg

SEQ ID NO: 842219 - DNA, 120 bp, Artificial Sequence
  ENSG00000270641_82 (sequence is synthesized)
gaaggtggtttgaggtaaaaccaggagatatgagttatgatggtttggaggaaaagtgtaaactggcagtgtaaacaagggcagggcatttacgagtagttgagaatggtgaataggagt

SEQ ID NO: 842220 - DNA, 120 bp, Artificial Sequence
  ENSG00000270641_83 (sequence is synthesized)
ttttggggttgcagtccaagtagtgggggtgactgcataaagccttgttgcaataagtagggtaataaacttaatagaatgaaaggatgttttaggctcataagggttactactgttctt

SEQ ID NO: 842221 - DNA, 120 bp, Artificial Sequence
  ENSG00000270641_84 (sequence is synthesized)
cagaaatgtgagtgagtttaagggaagtagggttgagtacttgcaacttctaggaggaagaggagagattaggctggctgtccaatggacacagctttattctggaatggtgagcctaat

SEQ ID NO: 842222 - DNA, 120 bp, Artificial Sequence
  ENSG00000270641_85 (sequence is synthesized)
tctggaatggtgagcctaatagggagggtcttacaggcggatggcagttggggtattatagatgactaagtagggtccggtctatcaaggttatagagtttgaggggtcagattcttaac

SEQ ID NO: 842223 - DNA, 120 bp, Artificial Sequence
  ENSG00000270641_86 (sequence is synthesized)
gggtgtctttatatggctgggaatatggagtaggcaagaaaagattagcagcttggcaaatttcctgtcttgcctgctggaggaccagcagatagattcctagaggactggtgtctgaga

SEQ ID NO: 842224 - DNA, 120 bp, Artificial Sequence
  ENSG00000270641_87 (sequence is synthesized)
cgaggttggggccaagcaagaaagtgtgtctatataaaagtttaaatggactgtaccctctagcatctcaaggacaggctctaattctgagaaaggcaagaggtaaaagtactgtccaat

SEQ ID NO: 842225 - DNA, 120 bp, Artificial Sequence
  ENSG00000270641_88 (sequence is synthesized)
tgtccaatcttttttaagttggaggctgagcttggtgagatgtgtctttaaaagaccattagtccattctacctctcctgaagattgagaatggtaaggggtatgaaggttccactgaat

SEQ ID NO: 842226 - DNA, 120 bp, Artificial Sequence
  ENSG00000270641_89 (sequence is synthesized)
ggtgatttgactaataaaggccggtccattatcagactgtatagaggtgggaaggccaagcctaggaattatgtctgaaagaagggaagaaatgactatggtggccttctcagaccctgt

SEQ ID NO: 842227 - DNA, 78 bp, Artificial Sequence
  ENSG00000270641_90 (sequence is synthesized)
ggaattatgtctgaaagaagggaagaaatgactatggtggccttctcagaccctgtgggaaagtcctctacccatcca

SEQ ID NO: 842228 - DNA, 120 bp, Artificial Sequence
  ENSG00000270641_91 (sequence is synthesized)
gatgtgtagggaagggagggggcctgaggaattcctgagtagtagtagtatagcagatgggacagagaagtgatttttttaggatagatttttacaaaggaaaggaaatgagaggtttta

SEQ ID NO: 842229 - DNA, 120 bp, Artificial Sequence
  ENSG00000270641_92 (sequence is synthesized)
aaaggaaatgagaggttttaagaggcaggatagcagcttgcaacttacatggaaggggttacaaaatgacaacagaatagaataggcctgtgaggctggaaggagatattttccttgttc

SEQ ID NO: 842230 - DNA, 70 bp, Artificial Sequence
  ENSG00000270641_93 (sequence is synthesized)
aataggcctgtgaggctggaaggagatattttccttgttccaagaaccatttgccttgtgtgggatgaga

SEQ ID NO: 842231 - DNA, 120 bp, Artificial Sequence
  ENSG00000270641_94 (sequence is synthesized)
cagaagttgggacactagctgcttctttagctaccttatcagcataagcactgtcctgagtgatgggatctgatgccttttgatggcccttggagtgaatgactccagcttcctttggaa

SEQ ID NO: 842232 - DNA, 89 bp, Artificial Sequence
  ENSG00000270641_95 (sequence is synthesized)
tgtgtagtccctttgcaagagtgagagccaggtagtggaggtggacagagtggtaacatcaaggatagatgtggaagatactatagcat

SEQ ID NO: 842233 - DNA, 67 bp, Artificial Sequence
  ENSG00000270641_96 (sequence is synthesized)
ctgtgaaatatgggtaaatggagtgaatgtcaggtagatcagaaagatacagtcatgggggtcaggt

SEQ ID NO: 842234 - DNA, 120 bp, Artificial Sequence
  ENSG00000270641_97 (sequence is synthesized)
aggtgtggtatcaggaataatgtgggagccagcctaaaacagtaagatcaagttgcttggacagaaaggctacaggtcatggtcctggctcttgtgtaagaattctgaccgcacagccct

SEQ ID NO: 842235 - DNA, 85 bp, Artificial Sequence
  ENSG00000270641_98 (sequence is synthesized)
agatcaagttgcttggacagaaaggctacaggtcatggtcctggctcttgtgtaagaattctgaccagggttcagatgagttagg

SEQ ID NO: 842236 - DNA, 120 bp, Artificial Sequence
  ENSG00000270641_99 (sequence is synthesized)
atttaggatctatggggtcagctaggttttcttttgtgagtttatataatggtttagtcaggacagtaaagctaggtatttaaaggcaaaagtactgaaccatgctcaggaaagaaagga

SEQ ID NO: 842237 - DNA, 120 bp, Artificial Sequence
  ENSG00000270641_100 (sequence is synthesized)
gaaccatgctcaggaaagaaaggagttgttgctttgtcaagggggttggggtttgggagattagccagacacgatcagcagggagagcatgtgtgtttttatgaagaattatgtcaagat

SEQ ID NO: 842238 - DNA, 120 bp, Artificial Sequence
  ENSG00000270641_101 (sequence is synthesized)
atataacggatgaggaagaaatttgggctttggaggcagatgtgcaatgtccttttgagaatagattgttggagcagcaggagggtgtcctgttgggaagatttgtaggaggggctataa

SEQ ID NO: 842239 - DNA, 120 bp, Artificial Sequence
  ENSG00000270641_102 (sequence is synthesized)
agtagaaggtcatcaaaatatttaataaggtgagatgtagatggatggaaagagagtaaatcatgagaaagggcctgactgaagtaataggagctgtccctgaagccttgcagcagtaca

SEQ ID NO: 842240 - DNA, 120 bp, Artificial Sequence
  ENSG00000270641_103 (sequence is synthesized)
tccctgaagccttgcagcagtacagcccaggtaagttgctgagactgatgggtgtcagggtcagtccaggtaaaagtaaagagggccttggaggaagggtgcaaaggaatagtaaagaaa

SEQ ID NO: 842241 - DNA, 79 bp, Artificial Sequence
  ENSG00000270641_104 (sequence is synthesized)
atagtaaagaaagcatatttgagatccagaacataataatgggttgtggaggggttgtgaagggaggtattaagaatac

SEQ ID NO: 842242 - DNA, 84 bp, Artificial Sequence
  ENSG00000270641_105 (sequence is synthesized)
agaagctcatgctgcagcaggcgagtgataacaggctttaacctttttaaagcatgttgtgggatgggatattggcattgagcg

SEQ ID NO: 842243 - DNA, 78 bp, Artificial Sequence
  ENSG00000270641_106 (sequence is synthesized)
gtgttttaatgggatgctaaggggtgcatgatcggtccccaaggagggagtaaaggtgtcctatacttgtggattaag

SEQ ID NO: 842244 - DNA, 120 bp, Artificial Sequence
  ENSG00000270641_107 (sequence is synthesized)
gtggggagatacaaggggaggatgcgaaggaggctttgaactggggaaaaggcggcaatgaggtgtggctgtagtccaggaatagccagggaagtagataatttggttaaaatgtcttgg

SEQ ID NO: 842245 - DNA, 73 bp, Artificial Sequence
  ENSG00000270641_108 (sequence is synthesized)
aatagccagggaagtagataatttggttaaaatgtcttggcctaataagagaactgggcaggtgggaataact

SEQ ID NO: 842246 - DNA, 64 bp, Artificial Sequence
  ENSG00000270641_109 (sequence is synthesized)
tccactgtaagagttacctaaagtgtctgtgatggtccaggaggcttctgaggtgatcaggcag

SEQ ID NO: 842247 - DNA, 120 bp, Artificial Sequence
  ENSG00000270641_110 (sequence is synthesized)
gtctgtgatggtccaggaggcttctgaggtgatcaggcagcgtcagtctccagctgctaagccaagcagatctgggaaagtgtcagtcagagagccttggaccagagctttaggggctgt

SEQ ID NO: 842248 - DNA, 120 bp, Artificial Sequence
  ENSG00000270641_111 (sequence is synthesized)
aggagtagctgccaggtgagttggacaatcctatttccagtggggtcctgcatagatgggacatggcttacgaggaatcccaggctgcagcattccttggcccagtggccagatttccag

SEQ ID NO: 842249 - DNA, 120 bp, Artificial Sequence
  ENSG00000270641_112 (sequence is synthesized)
ttccttggcccagtggccagatttccagcgtgtgaagcaagatcctgggggaggaggtctggaaggaatgcctgactgctgtggcttaggtgctatgaagttcttgtgtgctggagatgt

SEQ ID NO: 842250 - DNA, 87 bp, Artificial Sequence
  ENSG00000270641_113 (sequence is synthesized)
aggtgaggttgattaattcctgttgtggggtttgagggctggagtctaatttttggagctttttctaatgtcaggagctgactgggt

SEQ ID NO: 842251 - DNA, 73 bp, Artificial Sequence
  ENSG00000270641_114 (sequence is synthesized)
gactgggtgataaaatgcatattgagaatgagacggccttctgacccttctgggtctagctagggtggtaaag

SEQ ID NO: 842252 - DNA, 85 bp, Artificial Sequence
  ENSG00000270641_115 (sequence is synthesized)
gtcagccagcttcagccacctctgtaagaggaaactgttgggtagatgggggagggctagccacagaacgcaactgtaagctgga

SEQ ID NO: 842253 - DNA, 65 bp, Artificial Sequence
  ENSG00000270641_116 (sequence is synthesized)
tcagcttcagccacctctgtaagaggaaactgttgggtagatgggggagggctagccacagaacg

SEQ ID NO: 842254 - DNA, 66 bp, Artificial Sequence
  ENSG00000270641_117 (sequence is synthesized)
tgggtcagacaggagagaaagaagaaagatttgggatgagtcacattgggagcagagattaggaaa

SEQ ID NO: 842255 - DNA, 84 bp, Artificial Sequence
  ENSG00000270641_118 (sequence is synthesized)
ggggtggagactgaaggaagagacaggagagaaagaagaaagatttgggatgagtcacattgggagcagagattaggaaaagac

SEQ ID NO: 842256 - DNA, 89 bp, Artificial Sequence
  ENSG00000270641_119 (sequence is synthesized)
cttgtgatttcctatgcctgtctttaatttaatctcaatcttgtcagttgaggaggatgtatattgtctcaggaccctgtaataattgc

SEQ ID NO: 842257 - DNA, 78 bp, Artificial Sequence
  ENSG00000270641_120 (sequence is synthesized)
ctcaaaaccctgtctcctgataagatattatcaatgacagtggtgccctaaacttcgttagcaattttaatttcacct

SEQ ID NO: 842258 - DNA, 79 bp, Artificial Sequence
  ENSG00000270641_121 (sequence is synthesized)
gtggcttgtggggcatcacagatcctaccgatgtgtgatgtctcccccagatgcccagctttaaaatttatgcttaggg

SEQ ID NO: 842259 - DNA, 120 bp, Artificial Sequence
  ENSG00000270641_122 (sequence is synthesized)
aagccagtcaatgcttagggaaatagaaaagaacctacgtgattatcagggcaggtcccccgatagggactgatgtgcaaaagaattcctggatatcaggcacctcagaccatttgccca

SEQ ID NO: 842260 - DNA, 120 bp, Artificial Sequence
  ENSG00000270641_123 (sequence is synthesized)
taggatggagaaatcgaaagtgctgttttctggctatttggaaccattgtcaagtttgtattggggtcaagtggtattgcagaagaaaataagatgtttaggttttaggtcaggtgtgag

SEQ ID NO: 842261 - DNA, 74 bp, Artificial Sequence
  ENSG00000270641_124 (sequence is synthesized)
acctgagaaaagagagggtagagacacggagagaaggggtggggggtacttgcctcccggggaggtggtgcttg

SEQ ID NO: 842262 - DNA, 120 bp, Artificial Sequence
  ENSG00000270641_125 (sequence is synthesized)
agggtagagacacggagagaaggggtggggggtacttgcctcccggggaggtggtgcttgccaccaaggtgaaggatcaaggcaggcatccccatggtgatcagacacctctgaaatgtg

SEQ ID NO: 842263 - DNA, 120 bp, Artificial Sequence
  ENSG00000270641_126 (sequence is synthesized)
ggcaggcatccccgcagtgattaaacactgagggaagactgtcttcccgagaccatgaccatcgtcagagttttgggttcacacataaaacatgtctcctctgtctctaccagaaaagga

SEQ ID NO: 842264 - DNA, 88 bp, Artificial Sequence
  ENSG00000270641_127 (sequence is synthesized)
tcctctgtctctaccagaaaaggaaaggcactgaaattaagggaagggagagattgaagggtagcacagaaaagaagttggagaagag

SEQ ID NO: 842265 - DNA, 72 bp, Artificial Sequence
  ENSG00000270641_128 (sequence is synthesized)
gacaggggattgatctcccaagggaagtcccctgatctgagttatggcaccaaatgtcacgtgcatccgtgg

SEQ ID NO: 842266 - DNA, 75 bp, Artificial Sequence
  ENSG00000270641_129 (sequence is synthesized)
aaagggagatagggtcaaagggagttgttctctggcaggcaggggtagtggtcacaaggtgctcagtgggggagc

SEQ ID NO: 842267 - DNA, 120 bp, Artificial Sequence
  ENSG00000270641_130 (sequence is synthesized)
cttgggctcagaggcctgacactcagcagctactaccaccattggcaccactggcaccactgccaccaccccactgcaccccagttgcttcactctccatcacagaagccttttcagcaa

SEQ ID NO: 842268 - DNA, 120 bp, Artificial Sequence
  ENSG00000270641_131 (sequence is synthesized)
cagccaacatttgtaccctcaccaagccctctgattttcccaatcacaaggccttcactacaatattttcttcattcacaagtgtcacctattctccatccccaaggtaagtcaattcta

SEQ ID NO: 842269 - DNA, 120 bp, Artificial Sequence
  ENSG00000270641_132 (sequence is synthesized)
attttcttgcaagggttgacagaggtaaaacctgtccagataccccaaaggtgtttcatcttggcaattcttgactctttcaaggaaataagaatagtcaaatataactaagtaaaataa

SEQ ID NO: 842270 - DNA, 120 bp, Artificial Sequence
  ENSG00000270641_133 (sequence is synthesized)
ataagaatatataaggtctgtaaaccaaaaatgaaattctaagccccccaaccaactgaatggacccctcctctcagccaagggcattctaaagttaacctgaaagactaattcaggcca

SEQ ID NO: 842271 - DNA, 120 bp, Artificial Sequence
  ENSG00000270641_134 (sequence is synthesized)
tgatggaagtgggtggtcaggcatgcctcattatatcctcctccctttggaatttagacacaaatgaccaacattaacattaaaacagagaccttaagattgacaaagtagactctttgt

SEQ ID NO: 842272 - DNA, 120 bp, Artificial Sequence
  ENSG00000270641_135 (sequence is synthesized)
agcaataagatatgaacacaacagatagcaggccccaaaatatatttattcaacatatttttaaatggccctgcaaagctgtctcttgtggggaaacctacattctgtagagaatgccct

SEQ ID NO: 842273 - DNA, 120 bp, Artificial Sequence
  ENSG00000270641_136 (sequence is synthesized)
gtctcttgtggggaaacctacattctgtagagaatgcccttccctttccagatcttttcgcttatccaggagagaattaactaagagtctggtacctttttaagtctgataagaaacatt

SEQ ID NO: 842274 - DNA, 120 bp, Artificial Sequence
  ENSG00000270641_137 (sequence is synthesized)
atctgcataagagccttagtctcagaagccccttatgttaatgcagatactcccttctattgatttcaagactttaatcagaaaacctctgagtcttcctatgacctggaagcccccact

SEQ ID NO: 842275 - DNA, 120 bp, Artificial Sequence
  ENSG00000270641_138 (sequence is synthesized)
tagagttgtcccacattttcagacccaaccaatgtacatcttacatgcattgattgatgtcttatgtttccctaaaatgtataaaaccaagctgtagcctgactactttgggtacatgtt

SEQ ID NO: 842276 - DNA, 89 bp, Artificial Sequence
  ENSG00000270641_139 (sequence is synthesized)
ataaaaccaagctgtagcctgactactttgggtacatgttctcaggtctcttggagctgtgtcatgagctattggtcactcatatttac

SEQ ID NO: 842277 - DNA, 120 bp, Artificial Sequence
  ENSG00000270641_140 (sequence is synthesized)
atagagtttgactctctgttgacaagtcctagttttaaaacagtttttatttcatttatttattttgagatggggtcttccctctgtcacccatgttggagtgcagtggcacaatctcag

SEQ ID NO: 842278 - DNA, 77 bp, Artificial Sequence
  ENSG00000270641_141 (sequence is synthesized)
ctcaaactctctactacaggcatgacccacagcgcccaaccaaaatgacttgtttttagacaagaggttagaaattt

SEQ ID NO: 842279 - DNA, 120 bp, Artificial Sequence
  ENSG00000270641_142 (sequence is synthesized)
aaccaaaatgacttgtttttagacaagaggttagaaattttttttcctcaaagggccagacaataagtagattaggccagggtttctcaacctcaacagtattcacattttgggccagat

SEQ ID NO: 842280 - DNA, 120 bp, Artificial Sequence
  ENSG00000270641_143 (sequence is synthesized)
aattctttgttgtggagtgctttccttttcactgtagggtatttaactgcatccctgacttctactccctaggtgccaataacatcttattctcagttgtgacaataaaaacattttcca

SEQ ID NO: 842281 - DNA, 120 bp, Artificial Sequence
  ENSG00000270641_144 (sequence is synthesized)
gacatttctagatgtcccataggaggtaaaattgccctgaggtgagaataactggtatagactttgcattccatatgctatctgtcacaactactcagcagtgccattatagcacaaaag

SEQ ID NO: 842282 - DNA, 120 bp, Artificial Sequence
  ENSG00000270641_145 (sequence is synthesized)
cagccatagacaatatgaaaatgaatggacatggtactttcccaataagtactatggaaactgaaatttaaatttcatataattttcacatgtaataaaatattcctttaaaaatttaag

SEQ ID NO: 842283 - DNA, 120 bp, Artificial Sequence
  ENSG00000270641_146 (sequence is synthesized)
catttagagatggaaaacccattgttagcttgtgggacaaacaaaaacaggtggtaagccatagctttccaactcctatttgttttatttttgaaagtttaataatatatgtaatttaaa

SEQ ID NO: 842284 - DNA, 120 bp, Artificial Sequence
  ENSG00000270641_147 (sequence is synthesized)
tattttaacatgtggtaattataaaaatcaattcataaattcagtatgtattttacatttataatacatctcaatttgtactagccacattttaagtactcaatagtcatatatggctag

SEQ ID NO: 842285 - DNA, 120 bp, Artificial Sequence
  ENSG00000270641_148 (sequence is synthesized)
caatagtcatatatggctagtagctaccatattgggccatgatgccctagagtatttgcttttaattattaggcatacttcctctcaagaggccctagtcattgggaacatgaggtcact

SEQ ID NO: 842286 - DNA, 120 bp, Artificial Sequence
  ENSG00000270641_149 (sequence is synthesized)
ttctctttgaaggtaaaagcctctaagtcctgttattgatctaaactcacacaaaaaaaaaaaaaactgaaagtaaggtttaaaagaccaccatgacaatatttatccaatttgtgactg

SEQ ID NO: 842287 - DNA, 120 bp, Artificial Sequence
  ENSG00000270641_150 (sequence is synthesized)
tatttctgattggcaattcaaaattttgtttggcttagtaatttttcttgctatcttgaatagaattaatcccagaaggtctggtagacaatgagtgttttggtgtaactgggtttcttt

SEQ ID NO: 842288 - DNA, 120 bp, Artificial Sequence
  ENSG00000270641_151 (sequence is synthesized)
atgtacaaagctacagaattccccttgaagacactggccttgacatccctgaaatagcaaaatagacttttttgtttactccacgtgtagtatatgacagttagtgcattgtagataggg

SEQ ID NO: 842289 - DNA, 120 bp, Artificial Sequence
  ENSG00000270641_152 (sequence is synthesized)
ccatctattgaaatctacatgtgattatactctatcgaacatctactttaaaacagcaaacatgagagcctacaattgacatctcactgtttaaaaaaaacaatttcacatatatattca

SEQ ID NO: 842290 - DNA, 120 bp, Artificial Sequence
  ENSG00000270641_153 (sequence is synthesized)
caaacatactaaagtggtcaatattcaaagtaaagactcagatattcctcactttgcaccatggtttagttaaataatacaagtaccccaacaacacagtttaaatttcagttaccatgg

SEQ ID NO: 842291 - DNA, 120 bp, Artificial Sequence
  ENSG00000270641_154 (sequence is synthesized)
tatattgactgtgatattaaataaagtacaaatttcactgctaggttttcagtatgtaaattactatataactaacagatgtgcatcatgatcaattatgaatcacatcacttctttcac

SEQ ID NO: 842292 - DNA, 120 bp, Artificial Sequence
  ENSG00000270641_155 (sequence is synthesized)
agtctttggtgactggtcacttatcagctattcagtacatgtgcagagaacaaaccatgtgtttgtgttgcctctttgtctgccagtgataaacccaagtgacatttaacaaaaacatat

SEQ ID NO: 842293 - DNA, 120 bp, Artificial Sequence
  ENSG00000270641_156 (sequence is synthesized)
aatgaaagagggaattggccaataaaaatgaaagctcaagaaagaaactaaagtcacaatgctggaaatgaaattcaaatcaaaggtaaatgaagttatagaggaaacagctgactgtgg

SEQ ID NO: 842294 - DNA, 120 bp, Artificial Sequence
  ENSG00000270641_157 (sequence is synthesized)
gaatgttgacactttcactggttggaaaggctatatagatatgaagccaaaggaacttagttaaagcagacattgacataaatgaggaatttggttgtgacaagcaatgcctattttaga

SEQ ID NO: 842295 - DNA, 120 bp, Artificial Sequence
  ENSG00000270641_158 (sequence is synthesized)
ccaatggcttgtatcctcattagggactgtcagtataccaaaagaatgggtgttaagtctaggaaaattataatcatcattaagttgacttttagttcccaagatttcctataattactg

SEQ ID NO: 842296 - DNA, 120 bp, Artificial Sequence
  ENSG00000270641_159 (sequence is synthesized)
ttttcagtatttagatattactgctaatggtaaaatggcctatgagtagaaaatatgaaatttacatttctctttatccaaatttcctagtggaaccctgcccctaacaatgtttaccac

SEQ ID NO: 842297 - DNA, 120 bp, Artificial Sequence
  ENSG00000270641_160 (sequence is synthesized)
ttcttactgtccattttcacagatatgggggacatgattacatgccctcaacccatatgttttctaggtaactctaccacagaataaagcggtactcaaattactctcagcttgcttaat

SEQ ID NO: 842298 - DNA, 120 bp, Artificial Sequence
  ENSG00000270641_161 (sequence is synthesized)
atccactttaggacactgaaaaacaaacacaaagggactaaacaagatgaacagtacgtatcccatttcttttaagtccactatcttgatatcatgaggccccctcactggttttatgta

SEQ ID NO: 842299 - DNA, 120 bp, Artificial Sequence
  ENSG00000270641_162 (sequence is synthesized)
gatgggctactggaatgcataagctagtgccaattcttattttccaaagatgttaaaagattaacataggatgggaggagagtgaggatcaaaaaatctacctatcaggtactatgctca

SEQ ID NO: 842300 - DNA, 120 bp, Artificial Sequence
  ENSG00000270641_163 (sequence is synthesized)
ctaccagtgtaatgaaatcatttgtacatcaaagcccatgacacacaatttacccatggaaatttacccattggcttttgctgcaaaagtaccccttgaacctaaaataaaagttggaag

SEQ ID NO: 842301 - DNA, 120 bp, Artificial Sequence
  ENSG00000270641_164 (sequence is synthesized)
aaaaaaacttaacatagcaaattcttagacattgttctgacttgtttgcaagacctatgctttcttcctaagctggtgctggatagttcttttgacttttttcattattgatcttctctc

SEQ ID NO: 842302 - DNA, 120 bp, Artificial Sequence
  ENSG00000270641_165 (sequence is synthesized)
tccctagcattgccaccaagggaaactatttcatgtaagacattcttttccatccagccatctggttggccctaatttctctgagcacatctttcccacctgtattgtgaaccatagagc

SEQ ID NO: 842303 - DNA, 120 bp, Artificial Sequence
  ENSG00000270641_166 (sequence is synthesized)
aggcctaagggaaggttataaagaaggtaaggttggtctgtattgtctcagtctcttttaatatctattcccttctgtatggtactccttcttctcagagactcctgttctctagcttct

SEQ ID NO: 842304 - DNA, 120 bp, Artificial Sequence
  ENSG00000270641_167 (sequence is synthesized)
tcataatcggctttcaaaataggatctgctgtcagcgatttatccctttagtgctaggatggtaaataaattttatcttgcatgccaactctaaattattagtagcagccacctgaaatg

SEQ ID NO: 842305 - DNA, 120 bp, Artificial Sequence
  ENSG00000270641_168 (sequence is synthesized)
ctacgtgaaggattctggggatgcatccagttgaattagttatgagaagaaaaattggctactataggaaagagaatcaacaattcaatggattaaacaaaaagagtgttaattatttct

SEQ ID NO: 842306 - DNA, 120 bp, Artificial Sequence
  ENSG00000270641_169 (sequence is synthesized)
tacatgacagtatcaatgtaaaaagttcaaatcagagagggaattctgtttcttagtcattcagggacttgatttccttccaagtcattgtactttcatctcatagggaatcactcccat

SEQ ID NO: 842307 - DNA, 120 bp, Artificial Sequence
  ENSG00000270641_170 (sequence is synthesized)
ctgtatactgaaactgggtagccattacatctgagttgcagctggtgggagaaagtatggaaaggagagcataccctatgtcttaggacccaggcatggaaatggcatacatcacttcta

SEQ ID NO: 842308 - DNA, 120 bp, Artificial Sequence
  ENSG00000270641_171 (sequence is synthesized)
ctcacattttattgatcataacaatcatttggctgcacagaactgcaaaagaagctgaaaaatgtaccctagctgggcagccacacatcaagcaagaatgggagaatgtattttggtggg

SEQ ID NO: 842309 - DNA, 120 bp, Artificial Sequence
  ENSG00000270641_172 (sequence is synthesized)
caacgagcatttttgtcccttactaggcttaacaggaatcaatgctatgattaattaatgaaattttccacgagttggaaaaaaactgtggcatccacccatattatggtattagctgat

SEQ ID NO: 842310 - DNA, 120 bp, Artificial Sequence
  ENSG00000270641_173 (sequence is synthesized)
cttgccttaagtgtgaaatggaagtcttgttttctttcctagagggtcctgaagtttaaatataattccaaaaaatttgacaggcattttccactatgagaaaggtacttttgttaggta

SEQ ID NO: 842311 - DNA, 120 bp, Artificial Sequence
  ENSG00000270641_174 (sequence is synthesized)
caaaaataaacttgtccctgctttatcacttaatgtagaatcaaagattcgtctccagataacagaatttcagacatcagctaccaaggagggaaaatataggcttgggaaagaaggcct

SEQ ID NO: 842312 - DNA, 120 bp, Artificial Sequence
  ENSG00000270641_175 (sequence is synthesized)
tcttgtatgaaatcacaccacacaggcactagacagctctacttatataaagtttagctctataaaaatgagattggggtgtttcagagattttattaggaaatgtacagagaaaacagt

SEQ ID NO: 842313 - DNA, 120 bp, Artificial Sequence
  ENSG00000270641_176 (sequence is synthesized)
tgatggggcaaaagctataaacactaaggtgagaaggaatcagaatataggcaagagttatagaagcatctaaatggcatttgtatctgtttaatcagcctatcaggtaaatctgcccac

SEQ ID NO: 842314 - DNA, 120 bp, Artificial Sequence
  ENSG00000270641_177 (sequence is synthesized)
ttttctccctaccagtgaacatctgttttgaacctctaggatatgggacctcttgcttgataccagtctttctgtgcctacctattctaaagcctgatgtcatcttctgtgccttccctt

SEQ ID NO: 842315 - DNA, 120 bp, Artificial Sequence
  ENSG00000270641_178 (sequence is synthesized)
ataggcttacttccttcaacgctgaccattcctccagcatttcttattctaaagaggaacaggtaagaaacttcgttggagggaaaattaagcaaggattggcattagagagggagctgt

SEQ ID NO: 842316 - DNA, 120 bp, Artificial Sequence
  ENSG00000270641_179 (sequence is synthesized)
gcacagtccctgtctcaacaaaaatagcttaagatgagacaagtactttacttagcataatcttgctactgaaggggctattctaaatgtccccccgcccaacaccattatgtaaacatt

SEQ ID NO: 842317 - DNA, 120 bp, Artificial Sequence
  ENSG00000270641_180 (sequence is synthesized)
ctctaatattcgctacttaatttagattatccacccttccttctggccattgcattccttatctagcaatgcaggaaaagggcaagaaatcaaagggaaggaataaagggacttctgttt

SEQ ID NO: 842318 - DNA, 120 bp, Artificial Sequence
  ENSG00000270641_181 (sequence is synthesized)
ccagactgtattttaaagggaagtcatggttggttagcgattttctttagcttttgctttgcgtttgcagaatagctaatattattgttttacctatgggaactggtatccaatctagtg

SEQ ID NO: 842319 - DNA, 120 bp, Artificial Sequence
  ENSG00000270641_182 (sequence is synthesized)
cccaatggggctgttgttactagagctattttctgtgaacctcatagcagactctcttctgctgaaaatgagatttactattcattctgggttctctcaaaagccagcctgccatctaca

SEQ ID NO: 842320 - DNA, 120 bp, Artificial Sequence
  ENSG00000270641_183 (sequence is synthesized)
attagcggtcacatccatttggctatagttcaggtaagtccaattcttcatgtcctgcttctcagctctctgctgctcagagccaaaaaccttatcttagaaccccaaaatacatgtcta

SEQ ID NO: 842321 - DNA, 120 bp, Artificial Sequence
  ENSG00000270641_184 (sequence is synthesized)
gttgctgtatcaaagaccaggtagcagcctttacagaaagtcccttttctcagaatctagttgagccaatactatgcagtgtccactatattcttcttggttcattctctttcttttgga

SEQ ID NO: 842322 - DNA, 120 bp, Artificial Sequence
  ENSG00000270641_185 (sequence is synthesized)
ggcaacagcttactatggtgaggacaactggaatccatctctacctattcaccactttttaagtagtaaaattggtagctcaaaagtaactttattccctgctaagtcttgctctttcca

SEQ ID NO: 842323 - DNA, 120 bp, Artificial Sequence
  ENSG00000270641_186 (sequence is synthesized)
attattattcaaacatgagaggtgacagtgagaagattggtttggcattataggatggtaccatgcaaggtactctaacaaccggccttctgtctcatggtctatctccctgcagattca

SEQ ID NO: 842324 - DNA, 120 bp, Artificial Sequence
  ENSG00000270641_187 (sequence is synthesized)
ggttgcatcagctgtcctcctatgtccacaatccaaatgctatgggatactatggcagacaagttttccagttcttcaggaagtagcaactgtgagtattctagctcacaatgggaggag

SEQ ID NO: 842325 - DNA, 120 bp, Artificial Sequence
  ENSG00000270641_188 (sequence is synthesized)
cacaacgactggactccagccatgagcaaatacaagtaaaggtttaactgagactgtctgctccccagttctccaacccctgcctaccccaagcccctttttgtcttgatttatagtaga

SEQ ID NO: 842326 - DNA, 120 bp, Artificial Sequence
  ENSG00000270641_189 (sequence is synthesized)
cttgatttatagtagaaaagtaatagtcggtcgggcgcgggggctcacacctgtaatcccaccactttggaaggacgaggcaggtggatcacccgaggtcaggaattctagaccagcctg

SEQ ID NO: 842327 - DNA, 120 bp, Artificial Sequence
  ENSG00000270641_190 (sequence is synthesized)
agtgagctgagattgcgccatcacactccagcctgggcaacaagggcgagacgtcatttcaaaaaaaaagaaaaagaaaagtaatagtcacaaaatggatataaaaagagaggtaacaat

SEQ ID NO: 842328 - DNA, 120 bp, Artificial Sequence
  ENSG00000270641_191 (sequence is synthesized)
gggaaactacaggggggcaaattaatacttttatagtttcagcagacctgtagtaacagaagaaaaactgattttcacttggttcagactatctccctgggctagaaagtatagggccaa

SEQ ID NO: 842329 - DNA, 120 bp, Artificial Sequence
  ENSG00000270641_192 (sequence is synthesized)
ggtagaggaatcggaggtagatgaattatcttcctgtgtcttcctttaagtagttcacattgctcccatttaggtaccagttaatagtcataattactataatccctctctttggatatt

SEQ ID NO: 842330 - DNA, 120 bp, Artificial Sequence
  ENSG00000270641_193 (sequence is synthesized)
ctctaagactttatttcctcgtgagcataaagacataaaatagtacactggaggttagctatgattaggaagagccattctaactgtaaattactcataatccaagctctttcctgatga

SEQ ID NO: 842331 - DNA, 120 bp, Artificial Sequence
  ENSG00000270641_194 (sequence is synthesized)
gcatgtatccgttataaaagaggctatgataatatacagtgagaaaagaatttgtttagaaattaagtgaatttggatctagggtcacctcagctattttgcgctgcgacattgatcaag

SEQ ID NO: 842332 - DNA, 120 bp, Artificial Sequence
  ENSG00000270641_195 (sequence is synthesized)
ttattttctctgggtttcagatgcctcatctttattttgtgcatttagatacacaattctaattggcccaatgggaattacacagctaacaccatcatgcagcaaaacaaaataaaatac

SEQ ID NO: 842333 - DNA, 120 bp, Artificial Sequence
  ENSG00000270641_196 (sequence is synthesized)
agtggaactgaagtgagggagtaaaaccaccacactatgcagatgagactatctgcctagtaacaagacatttcttggactctggtacttcagccaaatgtcctctgggagtggagaggc

SEQ ID NO: 842334 - DNA, 120 bp, Artificial Sequence
  ENSG00000270641_197 (sequence is synthesized)
ggggagacaatatagtccactgccagaaagaacccacatctgttccaccactctcattgtcattgcgtttcctgggatactttcagaataattcattagtaacaacaacaacaacaacaa

SEQ ID NO: 842335 - DNA, 120 bp, Artificial Sequence
  ENSG00000270641_198 (sequence is synthesized)
aaaaaaaaaacagcaaggaaaaggctacaaggggaagggtttttctaggtctttgggatatatctaatcatttcttcacggaatattataaagtagggtccactcaaagctcatccctca

SEQ ID NO: 842336 - DNA, 120 bp, Artificial Sequence
  ENSG00000270641_199 (sequence is synthesized)
caagccactcaacctttgacattcttcttctatttaatgtgagtcagaattcctaagattttttgaaatcctgcctgcaaagtctgcttatgaatttttttccttaccacggagttccca

SEQ ID NO: 842337 - DNA, 120 bp, Artificial Sequence
  ENSG00000270641_200 (sequence is synthesized)
taaagtgacaggttctgcctaagtagttagctacctgcaaggctgctcgaatccaactttctttcccactctactttgcattctgctctccctttgctctcctctccttaggccctcaag

SEQ ID NO: 842338 - DNA, 120 bp, Artificial Sequence
  ENSG00000270641_201 (sequence is synthesized)
tgatgccagcttttgttctagcactctagaaaggagttactattttgatccagagtacacagagaagagaaactggagtgggtaaaaggaagctcgtcactgagaatgctggtactggga

SEQ ID NO: 842339 - DNA, 120 bp, Artificial Sequence
  ENSG00000270641_202 (sequence is synthesized)
gcaagactgtggcaaacccaggaaatactaacaataagaacccctcaaaagttcacctttaccaagccaatggaaacaatatagctgagtggggtttgaattttgagaactaatgactcc

SEQ ID NO: 842340 - DNA, 120 bp, Artificial Sequence
  ENSG00000270641_203 (sequence is synthesized)
tcagctaccatgtaattgccttggtgctccatttgctataattcatgggaaaggtactaaggtccttcaactggttttccttgctacctccacctttttcagaagttggacctatgatta

SEQ ID NO: 842341 - DNA, 120 bp, Artificial Sequence
  ENSG00000270641_204 (sequence is synthesized)
gcacacttcctgcctatccattcacagtgaatagaatggctggctaaattttaaaccccatttaaattattccacttcgaaatttgaatgatagatgcttgcctaagtctactggcctca

SEQ ID NO: 842342 - DNA, 120 bp, Artificial Sequence
  ENSG00000270641_205 (sequence is synthesized)
gtaacattaccttttctcatgaccaagggtaaaagagtaaattgataggaggcacaagtttttgtggatgtgggttgggctggcaccaaatccaactacaagcatacagtgaccacttca

SEQ ID NO: 842343 - DNA, 120 bp, Artificial Sequence
  ENSG00000270641_206 (sequence is synthesized)
tacacaccacataaaaaatacaaaaactgaaaaatactatcaaatgctttgacattttctaaatatttctgctgcccctataaaattgccttgtctgacctttcctcactaaccaggaga

SEQ ID NO: 842344 - DNA, 120 bp, Artificial Sequence
  ENSG00000270641_207 (sequence is synthesized)
tacggtgtttttcatttcctctcccttcaaattttacaagagaatcaaggaatttgaggaccaaagcaccacaaacacaagagtaagcacagcaaatatgacaaggggactgaagtaagc

SEQ ID NO: 842345 - DNA, 120 bp, Artificial Sequence
  ENSG00000270641_208 (sequence is synthesized)
ccctatgggaataggatctgctgaaggaatcaagagggatggacaaaggaacagaagacactcaagaataacttcaggaagtctccttaccgcctcacctgctttccctctgtcctacac

SEQ ID NO: 842346 - DNA, 120 bp, Artificial Sequence
  ENSG00000270641_209 (sequence is synthesized)
atccagccttgcaaagaaataagagtaaagagaaaagtccatgtagcaccatcccagttcagaagcaacccccaagatatgggtcaactttatcacctcaaactctactcatttataatg

SEQ ID NO: 842347 - DNA, 120 bp, Artificial Sequence
  ENSG00000270641_210 (sequence is synthesized)
tcatttataatgacaaaattcaactgttaacacataggtaagagttcttcaggcatcggttttaaaggtccatgtactgggacgggtgcggcggctcacacctgtaatcctagcaccttg

SEQ ID NO: 842348 - DNA, 79 bp, Artificial Sequence
  ENSG00000270641_211 (sequence is synthesized)
cgggcatgatggcgggtgcctgtaatgccagctgttctggaggctgggacgggagaatcacttgaacctgggagacagt

SEQ ID NO: 842349 - DNA, 120 bp, Artificial Sequence
  ENSG00000270641_212 (sequence is synthesized)
aaaaagttcatatactgaataaccatctgggcccataacagcttaagactttctggagaaaaaaaaaaaaaccagtttccagtttaatttccaacaaagcagtaggaactcttgcctata

SEQ ID NO: 842350 - DNA, 72 bp, Artificial Sequence
  ENSG00000270641_213 (sequence is synthesized)
agtttaatttccaacaaagcagtaggaactcttgcctatagaatactgtgctgggggctgggcacggcgact

SEQ ID NO: 842351 - DNA, 120 bp, Artificial Sequence
  ENSG00000270641_214 (sequence is synthesized)
ggagttaagagactagcctggccaaaatggtgaaaccctctctctactaaattaaatacaaaaattagcctgctgtcgtactacacgcctttaatcccagctattcgggaggctgaggca

SEQ ID NO: 842352 - DNA, 89 bp, Artificial Sequence
  ENSG00000270641_215 (sequence is synthesized)
ctgtgctggttcatttgcctataaagtcaccaatctaatgtttgggtatttgatcattcagaattctagaaacactgaagatcccttca

SEQ ID NO: 842353 - DNA, 120 bp, Artificial Sequence
  ENSG00000270641_216 (sequence is synthesized)
ttgatcattcagaattctagaaacactgaagatcccttcacctactcagggtctgggcctctttcatgaatgcttaattcccacagccttacagtttatacccttctcctctcccacttt

SEQ ID NO: 842354 - DNA, 120 bp, Artificial Sequence
  ENSG00000270641_217 (sequence is synthesized)
tgatcctcaagttttttgcttctcacattttttactgggtttgtgcttctcagtatccttgaccaaagcaactgatgctgtaagaaatgagacttcaaaccatttacccacactgggtga

SEQ ID NO: 842355 - DNA, 66 bp, Artificial Sequence
  ENSG00000270641_218 (sequence is synthesized)
taagaaatgagacttcaaaccatttacccacactgggtgattaaggtagtttaaaaaaagaaatga

SEQ ID NO: 842356 - DNA, 120 bp, Artificial Sequence
  ENSG00000270641_219 (sequence is synthesized)
cctgggcaacaaagcgagactccatctccaaaaaataaattaatttattaatttaaaaagaaaaagaaaaaagaaatgaagaacttacggtaattagtgtggttagggacagtgagttag

SEQ ID NO: 842357 - DNA, 120 bp, Artificial Sequence
  ENSG00000270641_220 (sequence is synthesized)
gaacttacggtaattagtgtggttagggacagtgagttagaaattgtcacatcaaaatacaaagttttcaaaacagtatattttattttacaatagcaaccaactccccagtttgtttca

SEQ ID NO: 842358 - DNA, 120 bp, Artificial Sequence
  ENSG00000270641_221 (sequence is synthesized)
attgtgacatctagatggcttaagattactttctggtggtcacccatgctgaacaatatttttcaatcttccaaacagcaaagactcaaaagagattctgcatttcacatcagttcacaa

SEQ ID NO: 842359 - DNA, 120 bp, Artificial Sequence
  ENSG00000270641_222 (sequence is synthesized)
gttcaagagtcttccatttatcttagcttttggaataaattatctttgaggtagaaggacaatgacgaagccacttaattccttgtgtctgcataaaagcagatttattcatcacaactt

SEQ ID NO: 842360 - DNA, 120 bp, Artificial Sequence
  ENSG00000270641_223 (sequence is synthesized)
catttatgtgaataaagcagatgatgataaaatgttctcttattcttgtttaatcagtagtggtagtgatgccagaaactgtgaaaggaaggcttttagttactttcttctttccatttt

SEQ ID NO: 842361 - DNA, 120 bp, Artificial Sequence
  ENSG00000270641_224 (sequence is synthesized)
ccaataatccattccccatccccagctgaagaaaggggtgttactgagtccagctgataccacacattgaaaggtaaacattaatatttcaaatctgatgtctaactaaaaatgtacaga

SEQ ID NO: 842362 - DNA, 120 bp, Artificial Sequence
  ENSG00000270641_225 (sequence is synthesized)
atgaaaactagaaaatttcaaccccagattatcttcaaccttgctccctccaccaatcatactttgacatttatctatttccttctccacttatggatgtaattggcttgctatagaaac

SEQ ID NO: 842363 - DNA, 120 bp, Artificial Sequence
  ENSG00000270641_226 (sequence is synthesized)
tacagttcagatgctttgaatgtatgaactacaatgaacaataaagtcctcttcttttgaagcatattttggcttcagctttaagataatcttatgacaagaagggtcacactgattcac

SEQ ID NO: 842364 - DNA, 120 bp, Artificial Sequence
  ENSG00000270641_227 (sequence is synthesized)
ttaataaattccattcttacctaacacaaggtttagttgataagcacttggacaaaaataatacttttcaaaaatgtaaagcaaactagtgaggacaaaggattttgtcctcatctcaac

SEQ ID NO: 842365 - DNA, 120 bp, Artificial Sequence
  ENSG00000270641_228 (sequence is synthesized)
aatgatcagctattggaactgcatgaaactgaacaatttaaacctggagctggtaatgttcttaagaccaattcagaacaaaggcaggttgcccttaaaacaggtttgaccttttccttc

SEQ ID NO: 842366 - DNA, 120 bp, Artificial Sequence
  ENSG00000270641_229 (sequence is synthesized)
actcttcctcctgtcccaccctctgtgagtgatttaaaaacggaaaaggtcaaagcccagccaggcctacatttagagaaattttaaaaaaatttttcctttcaattttggccaattatt

SEQ ID NO: 842367 - DNA, 120 bp, Artificial Sequence
  ENSG00000270641_230 (sequence is synthesized)
tccaatttttattttattcttaaaacttaagcatggtaaaatgttaagctgttttcatccactgatattattctactataaaaagcccttcttgagcagatttgatgataaaaaggagaa

SEQ ID NO: 842368 - DNA, 120 bp, Artificial Sequence
  ENSG00000270641_231 (sequence is synthesized)
catttctaaggtataattagagaagctgttgcatgagaaatcatgtctccatctccattttgctatgcgttatctgaggattgtttctgaaagagatctatttaggcagtgtatgtatgt

SEQ ID NO: 842369 - DNA, 120 bp, Artificial Sequence
  ENSG00000270641_232 (sequence is synthesized)
gtcagcatgtaaaaagtaaagaactgaaaatagacaaaccttgtaaatgcacttcaaaaccaattgtggctcaagtgtaggtggttccccaaggctggtaccaatgagactggggtttgg

SEQ ID NO: 842370 - DNA, 120 bp, Artificial Sequence
  ENSG00000270641_233 (sequence is synthesized)
gaattagttggtcatcatccctcctgctgcccagcagtggtcagtcatttttcatgagggatggactaggaaaatgaagtgtctattataaggagagttcctgtaacttaaggagcaagc

SEQ ID NO: 842371 - DNA, 120 bp, Artificial Sequence
  ENSG00000270641_234 (sequence is synthesized)
tcactacaaaacccagctacctgcttatcgtagtggccagagtggtagaagagatacggagtaggaattaaaccacacaatgttatttagggactaagccatgcccctaacaagaaaaca

SEQ ID NO: 842372 - DNA, 120 bp, Artificial Sequence
  ENSG00000270641_235 (sequence is synthesized)
agccaaaaggaaagtattaggcattctctgggaaggcatgcatttttttcccatgtctctggggccaaaaaccttataccaagtacctattggcacccgaatatatttgtagaatgaatg

SEQ ID NO: 842373 - DNA, 120 bp, Artificial Sequence
  ENSG00000270641_236 (sequence is synthesized)
aatacatgaaaaaaaataaacagtaacctttctcctatattctactttccaagccaattaataagcaagtgtcttttcgtcatgattttttttgttttctgtttaggatttaacaaaatg

SEQ ID NO: 842374 - DNA, 120 bp, Artificial Sequence
  ENSG00000270641_237 (sequence is synthesized)
gttgagataacagtcacttctgtttgatgaagagtatcacttcattccatttttgtgtttttgttgcatctccaagtcagaataaatgccttttggagcagatatatttcatttagcatt

SEQ ID NO: 842375 - DNA, 120 bp, Artificial Sequence
  ENSG00000270641_238 (sequence is synthesized)
tagtatcatcttcatcaatactcgtatgaacgaaaaaataaaaagccctctcttattcccactctacaacgcatgtcaaaggtgatctgtttagtttttccttagtatcgaacatatcac

SEQ ID NO: 842376 - DNA, 120 bp, Artificial Sequence
  ENSG00000270641_239 (sequence is synthesized)
agctactcaatgaagtttcttctcaactaaagaaacacagtctcttagagaatttgttcctgtgtttccaccataagataaatgagataaagtgcactttggtttacgtctttcaagcac

SEQ ID NO: 842377 - DNA, 120 bp, Artificial Sequence
  ENSG00000270641_240 (sequence is synthesized)
ttaagaacagcactttattcagttttaataaatttttactaaattggtaaatgcaaaagaatcttttttttattgctcatatgtcttcctgtctctaagccagaccaatgagcaaatacc

SEQ ID NO: 842378 - DNA, 120 bp, Artificial Sequence
  ENSG00000270641_241 (sequence is synthesized)
tttaaaactagttgttacatcttgaaccatttaactgtaataaaagcagaatgtttagttaatgaattaaagaacaaaccctgagcccttttatcagtctcctggctttaaactaagcca

SEQ ID NO: 842379 - DNA, 120 bp, Artificial Sequence
  ENSG00000270641_242 (sequence is synthesized)
atcagtctcctggctttaaactaagccaatgaggaagtgatttgggggattcctgaaactaggaaaaatgtctctttattttgaaagaaacttgcatttttctttctttttttttttttt

SEQ ID NO: 842380 - DNA, 120 bp, Artificial Sequence
  ENSG00000270641_243 (sequence is synthesized)
ttctgggccagacctatttaatttacgaaacatagtaccttgcagagaataggcattgaaatattatttaaacaatcaaaccaaagatgttcttctatcttcagctgtcagtgatctaat

SEQ ID NO: 842381 - DNA, 120 bp, Artificial Sequence
  ENSG00000270641_244 (sequence is synthesized)
gccctcatctctcttatcctcaggacccagaatggtatattccacataaaagatgctttgtttatcaaatgaatcaaaaagcacgcctgaggcatttatttttactcctttacttctgta

SEQ ID NO: 842382 - DNA, 120 bp, Artificial Sequence
  ENSG00000270641_245 (sequence is synthesized)
ggccaggtcaaggtgggtctaattcacttttatcatcagcacttaagaaactggatggaagaccacaacaccttgttttttgcaaaaattttccatctcctcaatcaggccaggaagcat

SEQ ID NO: 842383 - DNA, 120 bp, Artificial Sequence
  ENSG00000270641_246 (sequence is synthesized)
gtatcttctggacaggactttatctctctactcagcttagtacactgccttatattagtccatttgtcccatgttttcatcactgaataaacttgttaaatgacttttggtctggatctc

SEQ ID NO: 842384 - DNA, 120 bp, Artificial Sequence
  ENSG00000270641_247 (sequence is synthesized)
acacctatattacttcatttccttctgtgagcactctataatgataacatcatttttatatcctagggcatgtagttccgagccccacagaaagtaatcaccattcagtaagccaatagt

SEQ ID NO: 842385 - DNA, 120 bp, Artificial Sequence
  ENSG00000270641_248 (sequence is synthesized)
tcattcctatctgtatagaactgtaggctttgtaaatctacacatagatctctgttgtaggttcaataatgataataaatgtttgtgcccccagttgttatctctaaggataagagtaat

SEQ ID NO: 842386 - DNA, 120 bp, Artificial Sequence
  ENSG00000270641_249 (sequence is synthesized)
caatgatcattcagcagatatagcttatatatgggtggcagtttacaaattataaattgattttacacatattttcttctgctacccaagacacaataaagatggtttatctttgcatcc

SEQ ID NO: 842387 - DNA, 120 bp, Artificial Sequence
  ENSG00000270641_250 (sequence is synthesized)
ccaatgcctagcaatgagattggcacacaatagataactactatagtggcattcttcagacaaccaatcccttgcgtatgcgtattcaaaagataatcattgttattcaaattttcctac

SEQ ID NO: 842388 - DNA, 120 bp, Artificial Sequence
  ENSG00000270641_251 (sequence is synthesized)
tttatttgcacaatataataactatcatacaattttataaacctagtacccagcaccaagtgagaaaatcaacagttacatttatatggtgccttagagttcacaaaatgctaacatagg

SEQ ID NO: 842389 - DNA, 120 bp, Artificial Sequence
  ENSG00000270641_252 (sequence is synthesized)
tattgccttatttttggctgtggctaaatgaaatatgataaattttcagtgcctttaacagtgagttcacatagtaggcaatcaaaattgatctatttaacaggtatttaaacccttggt

SEQ ID NO: 842390 - DNA, 120 bp, Artificial Sequence
  ENSG00000270641_253 (sequence is synthesized)
ttgtataactacttatagaacccttctcactgtggtttaactatacaatgagaattttgtagagacaatacctagcttacagaaagttttattcatacagaaagcatcaaatttttcatt

SEQ ID NO: 842391 - DNA, 120 bp, Artificial Sequence
  ENSG00000270641_254 (sequence is synthesized)
tacaagtgctttataatttagaaagcacattcgcaagctgaattaagtgactttcggtctggatctcacatctattacttcatttcctcatactagctctttcctggttacctggaaaaa

SEQ ID NO: 842392 - DNA, 120 bp, Artificial Sequence
  ENSG00000270641_255 (sequence is synthesized)
tgtatcagtaataatttaacttaacctcaccagtaaagtcttgattgtttaaaattaagcaatatatcattccttacatctgaatagtatagaggataaactttcctcttattacatagg

SEQ ID NO: 842393 - DNA, 120 bp, Artificial Sequence
  ENSG00000270641_256 (sequence is synthesized)
agaattaatcttgtattttacagtacccaaaatagctggtatgtaagaggcacttaatattcattcatccattcattcattcataaatatgtagcccattgacatttgtatcatgcttta

SEQ ID NO: 842394 - DNA, 120 bp, Artificial Sequence
  ENSG00000270641_257 (sequence is synthesized)
gtttacaaagcactttaatatgcacctttctgaaattttttgttctatgagaatacttttccccctttggtagctctagcacccagcatggtatctggcacattataggtgaccacaaca

SEQ ID NO: 842395 - DNA, 120 bp, Artificial Sequence
  ENSG00000270641_258 (sequence is synthesized)
agcttagtcccttatgttttcagtatattttaaagtttaaaagcagtttccatgtgttttcgtttctgatacctggaatactgcatttttactcaaaattaccagagcagcaaacacaaa

SEQ ID NO: 842396 - DNA, 120 bp, Artificial Sequence
  ENSG00000270641_259 (sequence is synthesized)
ttggcctcaaatatacatataatttattcatttatcaaacaattccttgtgtctgcatagtactatatccttttgaaagagcacttttttatgcttgctcctttctttgtatccacaacg

SEQ ID NO: 842397 - DNA, 120 bp, Artificial Sequence
  ENSG00000270641_260 (sequence is synthesized)
cttatcacagtagaatacaagtgctttacagtttacaaagcacattcactattttttttcaggtcacctagatatcaataatcattgcatttttagtgcctagcacagggacaggcacag

SEQ ID NO: 842398 - DNA, 120 bp, Artificial Sequence
  ENSG00000270641_261 (sequence is synthesized)
aaaaggaaactagtagtattcagaaattttctctgaataacaaataatacatcagggggtggtaagctatgaacagcaggccaaatccaattggctcaaaaactaagaatgattttgacc

SEQ ID NO: 842399 - DNA, 120 bp, Artificial Sequence
  ENSG00000270641_262 (sequence is synthesized)
ttataaaaacgttgtttaaaaaacaaatatgtaacagaaaccatatggcccacagtctaaagtatttatgatttgaccccttacagaaaaactgtggacccctgatttacataatgcttc

SEQ ID NO: 842400 - DNA, 120 bp, Artificial Sequence
  ENSG00000270641_263 (sequence is synthesized)
acaatttacactgcactttcaaatgttaactgcatgattgccaatacactaattggtttttctcttatgttttacagtgctttcatacacattatcagtcatttaaatcaacttcccaca

SEQ ID NO: 842401 - DNA, 120 bp, Artificial Sequence
  ENSG00000270641_264 (sequence is synthesized)
taaacaggaagaaaaaaatcaaggaaagtattaaacatgctcaacagtcccaggttctctcatctttaagcctagagatgggtattaaacccaggagtagcgttggcacagtccaccaaa

SEQ ID NO: 842402 - DNA, 120 bp, Artificial Sequence
  ENSG00000270641_265 (sequence is synthesized)
ttatttggccactactatgagcagggagttcaggctgtccccttgggacctcgctttgtcccaggcacagtcaccctttccataaccatcactagaaatcccaaaccccagaatcctgct

SEQ ID NO: 842403 - DNA, 120 bp, Artificial Sequence
  ENSG00000270641_266 (sequence is synthesized)
cacctaagctcaaagaaggaagctgttgctggcaggtgcttctcagaagtctggcacatctgtgtatttcttgtctaattcttctcattggcctggagcatctcttcacatttttctcta

SEQ ID NO: 842404 - DNA, 120 bp, Artificial Sequence
  ENSG00000270641_267 (sequence is synthesized)
gagagcctggcacttttttttccccaacaacctgaccattttatcttctcagtctagggcttctggggtcaaaagaaaggactgaaatacagtatcacctatatgaatgtctgctcctga

SEQ ID NO: 842405 - DNA, 120 bp, Artificial Sequence
  ENSG00000270641_268 (sequence is synthesized)
gggaagttaacaaaagccagattagatactgactggattttggtgtctctctcaagtggagaagatgtgaatagaaacagaagtttacaaaacactatagcctaacaaataggtaaaagc

SEQ ID NO: 842406 - DNA, 120 bp, Artificial Sequence
  ENSG00000270641_269 (sequence is synthesized)
tgtgatttaaagctggctcaagactggcccaggcataatactgtcaatctaaaggtaaccggcaacatcaaaaagtacatctcaaaagaatcaggcttaaagataaacaggagaactgga

SEQ ID NO: 842407 - DNA, 120 bp, Artificial Sequence
  ENSG00000270641_270 (sequence is synthesized)
aatatctaagagtaagaagtgtaaacaatagaaaagaggtagggtttagggttctcatcttgggatttccccaggtcttcaagcttctatccttcctgggttctgggtcatgggcctcca

SEQ ID NO: 842408 - DNA, 120 bp, Artificial Sequence
  ENSG00000270641_271 (sequence is synthesized)
gattccggccgttagtcttgagatacctttttcgcttgggtcctctatccatctaggtaggctttgtgacaggggccttccatccttgggttgtaggtcttccagctacaaccctgggct

SEQ ID NO: 842409 - DNA, 120 bp, Artificial Sequence
  ENSG00000270641_272 (sequence is synthesized)
aatcttaggtcgttggccttgtgtcacaagtctcagttcttaggccttccatgtgtcctgtcccaggtcttaagacttctaactcaagccttgagacttccatccaactcaggccttcgg

SEQ ID NO: 842410 - DNA, 120 bp, Artificial Sequence
  ENSG00000270641_273 (sequence is synthesized)
tccaattcaggccaccctctgttttcttggctcttgaggcttttgttggtttcaggcctgaggcttctatctatcttggaacatgggctttccatcttagtcctcgggtctcaagtctca

SEQ ID NO: 842411 - DNA, 120 bp, Artificial Sequence
  ENSG00000270641_274 (sequence is synthesized)
aaccatctgtcttatactttgggccttctatccatatgagccttccaccttctgccctacttgagttctgggttttactgcagtctagggccttgttttggtcttggatcatctcacatg

SEQ ID NO: 842412 - DNA, 120 bp, Artificial Sequence
  ENSG00000270641_275 (sequence is synthesized)
gcagcctggcataaggaaccgctccacaatgcttgctctgatagccgacgttctgcacctatcaggcaggggttaggaagcccctctgccacacatgacacacacacacgtacacttgcc

SEQ ID NO: 842413 - DNA, 120 bp, Artificial Sequence
  ENSG00000270641_276 (sequence is synthesized)
cacatatgcaaagaaatatttaaggagagattacatgaaatcaaagagagggagatagattcatgaagaggctgaaatactcaaaggtgagtagaaagggaagaagcagagaacaaatac

SEQ ID NO: 842414 - DNA, 120 bp, Artificial Sequence
  ENSG00000270641_277 (sequence is synthesized)
aagccaacagagattaatactgaaatagaaaatcacaaacagcaagagatgctgaggcacgcaggggaggagagagagaatagcccaagagaggcagaaaggaaatgcagaaatgagaaa

SEQ ID NO: 842415 - DNA, 120 bp, Artificial Sequence
  ENSG00000270641_278 (sequence is synthesized)
tgtgagataaaaagtagaaacagcagaaaggaggccagactcagaaaaaaggtgaaatttaaaacgaacgagaaggggaaggggtaacaaataatcacagttcacaaagagaaaagagag

SEQ ID NO: 842416 - DNA, 120 bp, Artificial Sequence
  ENSG00000270641_279 (sequence is synthesized)
gtaggcagagaaaggagaggtagacagaacaagaaaaggacaaaaagcacacagcatgtgacccaaaaaggagacatgaaataaagcgtgaaagaagagccacatctaggagagcaaaga

SEQ ID NO: 842417 - DNA, 120 bp, Artificial Sequence
  ENSG00000270641_280 (sequence is synthesized)
gaaatagcaacaaaatgaaaaatgagagatatgtctaagacaagacacagaccactcttgtgaacaaaaagagaaaatgaggcaaaggcacacacgaaagaaattagcaagagaaacatg

SEQ ID NO: 842418 - DNA, 120 bp, Artificial Sequence
  ENSG00000270641_281 (sequence is synthesized)
gaaatgggtaagacacactttagatagagaacaaagagcaaagacaagaaagaaagagacaaagaaatacacacttgagtgcaagagataagcaaaggcagacattcagaggaagtaagt

SEQ ID NO: 842419 - DNA, 120 bp, Artificial Sequence
  ENSG00000270641_282 (sequence is synthesized)
agtagaagaggcaagatacagtgaggggcacaagaggcatgaaaagcatcacagaaagataaaaaaaatcaaaaagtgtcattagtaattataataaactattgttactacgaatactac

SEQ ID NO: 842420 - DNA, 120 bp, Artificial Sequence
  ENSG00000270641_283 (sequence is synthesized)
ttatagtactacaataataacaaccaccaataccaacacagatgctcttctatttataaacttttaccttagggatttcttacatagaaccaaagcatgccaactctgcctgctacctga

SEQ ID NO: 842421 - DNA, 120 bp, Artificial Sequence
  ENSG00000270641_284 (sequence is synthesized)
tagtgctagtggtcacttatattgtgggaaatgaacttatgagtcttcttgggttaccttttacttgacatgtgccaggcactgcaataggtgagcactttacatacatgatttcattta

SEQ ID NO: 842422 - DNA, 120 bp, Artificial Sequence
  ENSG00000270641_285 (sequence is synthesized)
accctcacaaacagagaagtctagagactttaagttgtcaaaggtcatatacctaatgagtagcagaggatttaaaacacacaatgtatgcctcttaacatcctgttacaactatttact

SEQ ID NO: 842423 - DNA, 120 bp, Artificial Sequence
  ENSG00000270641_286 (sequence is synthesized)
aggatttctggaagagccaaatgggatgtcacagatgactaagtattttcataaaaggctctttgataggacttgctcaatcccctcctttagcatcacctttccccaactctttagaaa

SEQ ID NO: 842424 - DNA, 120 bp, Artificial Sequence
  ENSG00000270641_287 (sequence is synthesized)
actgacttcattctcacacttttataatggctacttcagagtttagttttctttttacactaatcttaactgacgacagagtctctcacaaacggagatgagaaagggttaccctttcag

SEQ ID NO: 842425 - DNA, 120 bp, Artificial Sequence
  ENSG00000270641_288 (sequence is synthesized)
cagaaagcagaaatggtgttttaagcttctcaacgtttaaggctctaagaatgacagagggcctatacagtgaagacatagaacacacaagcaaaggctaaattcttctgtgatacaact

SEQ ID NO: 842426 - DNA, 120 bp, Artificial Sequence
  ENSG00000270641_289 (sequence is synthesized)
ggtaagaagaccataatgtctttgagttgcttcagtgaacccagtcagtaatatggaagactggtcatctttccatctcacatttagccccacttcacattagaccaacacaccccatcc

SEQ ID NO: 842427 - DNA, 120 bp, Artificial Sequence
  ENSG00000270641_290 (sequence is synthesized)
aacaccagctcccaaaaaacagctgttataacagttctgaagtgatcctcacaggactgcaacatcaacaacttacttcattcagctatcctcaagtgctagagtgccaggcatgttgat

SEQ ID NO: 842428 - DNA, 120 bp, Artificial Sequence
  ENSG00000270641_291 (sequence is synthesized)
cttcaggtgggaaggctgacttccttcagtgtgttcaaatttcttggacctgctgaagactcagctctctgcactgcttgtaggaagtataatgatttggcagataggaacaatgaagag

SEQ ID NO: 842429 - DNA, 120 bp, Artificial Sequence
  ENSG00000270640_0 (sequence is synthesized)
cacacacacacacacacacacacaaaattccccagagtgaacttttgccaactgtaccagactgggacattcctcacatcaaagaacttttaccagaaatgactgtgattcccaagctag

SEQ ID NO: 842430 - DNA, 120 bp, Artificial Sequence
  ENSG00000270640_1 (sequence is synthesized)
ggaatgtatttttccagtcccagagagtgttaaattggtgagtttggaattcttaggatgctttttctttttaatgagggacaaataaatgccacatatttaaccgtggttaactaggaa

SEQ ID NO: 842431 - DNA, 120 bp, Artificial Sequence
  ENSG00000224972_0 (sequence is synthesized)
ctgaatattaatttgggggaagactggtggagttcaggcctgaggtgctgagaaacagtgtctgtggggacagtgtttgcaggaaaagatggaggaggacaggagatgctgtgtttatct

SEQ ID NO: 842432 - DNA, 120 bp, Artificial Sequence
  ENSG00000224972_1 (sequence is synthesized)
catattcagcagaagtagaaaaagatttatcatccatataaactgtgacatggagtgcatgaattcagaacaaaacaactttatctacccccgaatactaaagagttcaatttcatgctg

SEQ ID NO: 842433 - DNA, 120 bp, Artificial Sequence
  ENSG00000224972_2 (sequence is synthesized)
ttcagttcaggctggcagcatttctgctggtataaaagtctcaaaatccttgtcagtcttctgtgtagttcatggacatccaagcatcaagcaagacagtcctgcacagctctctcctgg

SEQ ID NO: 842434 - DNA, 120 bp, Artificial Sequence
  ENSG00000224972_3 (sequence is synthesized)
ataaccacattctctcttcctggcttctgctgacatggttgattggatccacgagtcacatacttcatctgtttagcaagtttgtccagcagtaccatcctccagtctcggagcacactc

SEQ ID NO: 842435 - DNA, 120 bp, Artificial Sequence
  ENSG00000224973_0 (sequence is synthesized)
ggaagtaaaggggctacaagggatccatggaaagagcattcccagaagcggggccagggcagtgcgcacagtgaggagagcaggtgtgtgtgaggttgaaacaaaacgttcaaagccccc

SEQ ID NO: 842436 - DNA, 120 bp, Artificial Sequence
  ENSG00000224973_1 (sequence is synthesized)
tcggaagcccatccacaggtgtgtgactgtgaaccgcatcgtaatctcctagaaagcaagaacatcaggcttacattttccacttgcctctcacggctcagagctctgcagtatatacat

SEQ ID NO: 842437 - DNA, 120 bp, Artificial Sequence
  ENSG00000224973_2 (sequence is synthesized)
tgaggaaactgggccctgagacattaacttgcccaaaagatcacagtgggcaacattctagagcacagtggaagccgacagcaatgtcagtgaagatggaaaacagaacgtggagagaga

SEQ ID NO: 842438 - DNA, 120 bp, Artificial Sequence
  ENSG00000224973_3 (sequence is synthesized)
tgtagcttactagagccctgtggcttcaatccccaccaggaatgtcgtttaagaggaaggacatatcacacaccaaccgtgtgcaaagcactctacctaaagatcagcgctaacagagga

SEQ ID NO: 842439 - DNA, 120 bp, Artificial Sequence
  ENSG00000224973_4 (sequence is synthesized)
ataagcagaggcctccaggagcaaagagtgaaaagtctcccaaggattcaagtacgggggaagtgggtggagctttcaccgtagaatctttcctggagaaaaagcaaagagtgggacaac

SEQ ID NO: 842440 - DNA, 120 bp, Artificial Sequence
  ENSG00000224973_5 (sequence is synthesized)
gcattaaaaataactgtcaagttgaagaaaaaatctgaagtttatcaatacatgatctcctcaaaaacgaaaggaataaaacaagtatctgcaatttgctgagaacttaatatgtgtcag

SEQ ID NO: 842441 - DNA, 120 bp, Artificial Sequence
  ENSG00000224973_6 (sequence is synthesized)
ttgcctgcaaaactcatcattctttagactttcaaatacatctgtgaggacggtattgttgtttccacttacacatgagaaggcaagagacaagcccacggtcacccagctggtattttg

SEQ ID NO: 842442 - DNA, 120 bp, Artificial Sequence
  ENSG00000224973_7 (sequence is synthesized)
ccaaagactaaggattcggagatgactacggaaagcagagcatgatgttgttcgatcatcatctctctccatccactaggaaaactaagctccatgagaagaggggacttgcccatgtgg

SEQ ID NO: 842443 - DNA, 120 bp, Artificial Sequence
  ENSG00000224973_8 (sequence is synthesized)
ctcagggctctatgcccagtgccctagacagtgcctgactgtgtgtgcggaatgaatgaataaccttggtgatccacccaatggcactggcgctcagtgacctcatctgaaatggaataa

SEQ ID NO: 842444 - DNA, 120 bp, Artificial Sequence
  ENSG00000224973_9 (sequence is synthesized)
ggattttatgaaaatgcatgtttgttgaataacacaaaggagaatattatctaatgtggcttggggtcaatatcaagcagtaatattgttttagtattaattagagccgtgtcattgcaa

SEQ ID NO: 842445 - DNA, 120 bp, Artificial Sequence
  ENSG00000224973_10 (sequence is synthesized)
cccgctggctgtgaatccagtccaagtgcgtgcaaattatgcctttgctttatatttactgagcaacaactatgtgccgcaacagatttttttaatactctattttatttgcaatcacag

SEQ ID NO: 842446 - DNA, 120 bp, Artificial Sequence
  ENSG00000224973_11 (sequence is synthesized)
aagaggaaggtgatctagcacaaattcacatttgcttgaggaagaatacaaatagaagcagcctcggggagcgggcggggctggggaatccctggcctccctcctttccttctggctgat

SEQ ID NO: 842447 - DNA, 120 bp, Artificial Sequence
  ENSG00000224973_12 (sequence is synthesized)
cttctgcagaagacctcacaaaagggagctgaggggccaggaagcctgtggatgccctgaagaagaatgagtagatctgaaagggcagtagaacagaaccagaatccagtgcaaaggccc

SEQ ID NO: 842448 - DNA, 120 bp, Artificial Sequence
  ENSG00000224973_13 (sequence is synthesized)
agttcgcaggagaagcggggagaaggaaccagcctatgatccaggaatgcagtgaacaagatttgggaagttgacagagaatatgaggcctcctctccaaacagaaactccaggacgctt

SEQ ID NO: 842449 - DNA, 120 bp, Artificial Sequence
  ENSG00000224973_14 (sequence is synthesized)
ggttgagtcactgacacatgcacagtgctgagcatagtaccagacaccagagtctgtgttccagaaatggaagaataggacatatcacacaccaaccgtgtgcaaagcactctacctaaa

SEQ ID NO: 842450 - DNA, 120 bp, Artificial Sequence
  ENSG00000224973_15 (sequence is synthesized)
cgcaaatggggaaaagattgaatgtatagggctgcatatattagaagccccctggaatctctgcatccagaagattgcagtcacctttgaagcactcaccaccagagtctactcgcacac

SEQ ID NO: 842451 - DNA, 120 bp, Artificial Sequence
  ENSG00000224973_16 (sequence is synthesized)
gttcacctcggcccttttcctagggatttgccttcaagtcccagaatgggcctcagggtctttgcattcgcctttctatgagtctgaaacaccacccaccccctcacctgtgggcaggca

SEQ ID NO: 842452 - DNA, 120 bp, Artificial Sequence
  ENSG00000224973_17 (sequence is synthesized)
aagcacctcctgtgttcatgtcatctcctgtatcaagcccttcctgatgaccaacttgcagccgggtgccctctatccatgcctccatggccgcctatgataatgtcccccatatcattt

SEQ ID NO: 842453 - DNA, 120 bp, Artificial Sequence
  ENSG00000224973_18 (sequence is synthesized)
accattctgctcatgaatttggcttcattcatctcgcaacaaccccagagtattaagccactcgagggtggaagctggtgcttttacctccgcacctctcatgcccgacagagtccatgg

SEQ ID NO: 842454 - DNA, 120 bp, Artificial Sequence
  ENSG00000224973_19 (sequence is synthesized)
cagaaggccggctctcagattttagctgcattcctgaatgaaggaatcaataaaagccacacagcattaagtggcagactctagtaatttaattcctggtcctgggctctttgatataaa

SEQ ID NO: 842455 - DNA, 120 bp, Artificial Sequence
  ENSG00000224973_20 (sequence is synthesized)
ataactcttctatttttaatacaccccacattcctgaagatgacactactgcaaaattaaagaaatgtgatgaacagcttacaacctgcaacacactcggcagctcaaaatgacaacatt

SEQ ID NO: 842456 - DNA, 120 bp, Artificial Sequence
  ENSG00000224973_21 (sequence is synthesized)
aatttaatgaacttaaacactggtgaactttttaacacatccagagttatttacactgggaaatgcatacttaagactgcctgccaaagagactcaaatagagatgacacatatatcttt

SEQ ID NO: 842457 - DNA, 120 bp, Artificial Sequence
  ENSG00000224973_22 (sequence is synthesized)
cacatgttaatttgcatttgaaactttgagctttgatacaggttggcttttctcttttggaatgaagaaatcaagagactaattttttacccatccatccatctatccatctatccatcc

SEQ ID NO: 842458 - DNA, 120 bp, Artificial Sequence
  ENSG00000224973_23 (sequence is synthesized)
ggcctccccagaagccaagcagatgccggtgccatgcctgtatagcctacacaaccatctgaagtttatcaatacatgatctcctcaaaaacgaaaggaataaaacaagtatctgcaatt

SEQ ID NO: 842459 - DNA, 120 bp, Artificial Sequence
  ENSG00000235419_0 (sequence is synthesized)
gagcctgtctaggatgtgaagtcaacatatataaagccagaatgttctatccttggcccaggtgatgctcttggaacacagcaagcaaacacatgcacccaatgcctagggaactcgagg

SEQ ID NO: 842460 - DNA, 120 bp, Artificial Sequence
  ENSG00000235419_1 (sequence is synthesized)
ctctccaagtaaaaaaggagagagggtcagaagagatgcccagcagactgccacatggtagacaagagttccctttctggtaaaatggccattactgtcaagttttctcaagcaagaaat

SEQ ID NO: 842461 - DNA, 120 bp, Artificial Sequence
  ENSG00000235419_2 (sequence is synthesized)
aggcgtgtaaccaagcccctgaaataatcgcgttggaggagatgcctggaggaaggtgattggatcatgggggaggacaacccccttgttgttctcatcataatgaattctatgaatagt

SEQ ID NO: 842462 - DNA, 120 bp, Artificial Sequence
  ENSG00000235419_3 (sequence is synthesized)
tgaaacatatcttctatgggaggacatgtttggaaaaaatgctaaattttcgtcaacattccggtgtagttggcagaattttggagtgacctccctggacgacatatgcggcctccgacc

SEQ ID NO: 842463 - DNA, 120 bp, Artificial Sequence
  ENSG00000235419_4 (sequence is synthesized)
ctagttttgtgctcccggaagacatccagatggcaaggaaggcgtgtaaccaagcccctgaaataatcgattctatgaatagttgaaacatatcttctatgggaggacatgtttggaaaa

SEQ ID NO: 842464 - DNA, 120 bp, Artificial Sequence
  ENSG00000235419_5 (sequence is synthesized)
aatatgagactcatcgatgctgaccactatttttaggctgctgggtcaaggtttctgatacatcatcctataaagtacactgcaagtgggccccaagaaagaataaataccacaggcaaa

SEQ ID NO: 842465 - DNA, 120 bp, Artificial Sequence
  ENSG00000224977_0 (sequence is synthesized)
ggagaccggcgacgctctccgccgcgaccgaaagtctcacacgccctgagcagatgaaccggtccctcggtccggtctgccctcccgcaccggcgcctttgggctcagcgggccagtggc

SEQ ID NO: 842466 - DNA, 120 bp, Artificial Sequence
  ENSG00000224977_1 (sequence is synthesized)
acacgctactccaaaacgtctctcctgggctgtgtgaacaataagagctatttggggacgacaggaaaagatatggcccatagaagggctcctgaaatctaaccttgcgactctttaaaa

SEQ ID NO: 842467 - DNA, 120 bp, Artificial Sequence
  ENSG00000224975_0 (sequence is synthesized)
gattcctggagggagaggggaacggacagcaaacaatagacacaatacgatcgtgaggtatatagttaatgttggtgatgagtgctcctcaaaggaaacaactaaaaccagacaagggaa

SEQ ID NO: 842468 - DNA, 120 bp, Artificial Sequence
  ENSG00000224975_1 (sequence is synthesized)
gtcggggtgtcagggagaatggtttgtagtattgatgacaatggttaaggaaggcctgagttctgcaaagacctcaaggatatgagggactagagtgccctctgctgtggaagagcctgc

SEQ ID NO: 842469 - DNA, 120 bp, Artificial Sequence
  ENSG00000224975_2 (sequence is synthesized)
gcaaagatcctgaggtgggaggggtcagggagccaactcattttacggtaagtggaggtgggatccaggggaggattctgagcagaggagggacgtggcccaatttgggctttgaaagga

SEQ ID NO: 842470 - DNA, 120 bp, Artificial Sequence
  ENSG00000224975_3 (sequence is synthesized)
tgtctggcccattgtctccagtctgttcctgtccacagcttccctttatgctgagcccctgccacatgcatcatcatcctggccatgtggcattgtcacagaccgtctctcctgctagcc

SEQ ID NO: 842471 - DNA, 120 bp, Artificial Sequence
  ENSG00000224975_4 (sequence is synthesized)
cacagaccgtctctcctgctagcctcctaactcagggcctgggtcttccccagcattaagtaaatcagtctcaggcagacagccctttataggtgtttgggccaggtgcggtggctcacg

SEQ ID NO: 842472 - DNA, 73 bp, Artificial Sequence
  ENSG00000224975_5 (sequence is synthesized)
cgggaggctgaggtgggaggatcgctgttccagcctgtgtgatggagagagaccctgtctcaaaaaaaataaa

SEQ ID NO: 842473 - DNA, 120 bp, Artificial Sequence
  ENSG00000235412_0 (sequence is synthesized)
gccaggtctgcagttggagcccattgtgtgaggcagtctgtgaaggaagtgtgagaaccaccctcatgaggaaagctgtagaggaagagtgaggaatgcgacagactccctgaaagcaaa

SEQ ID NO: 842474 - DNA, 120 bp, Artificial Sequence
  ENSG00000235412_1 (sequence is synthesized)
ggtggaaaaagaattcacgtggtgaagtcagtgactaatcagtgatgtaactttcctctctggaatgggccctgctcaaagaaaaggtagtgacatgattcaagactgagaacacaggaa

SEQ ID NO: 842475 - DNA, 120 bp, Artificial Sequence
  ENSG00000235412_2 (sequence is synthesized)
cattatgacatatcttgaagtaacatctggaagtgtgacgctcgtctcctacctgggtcctgaccgcagaatgaattgtgacatacgacggagtacaaaacctaggtgaaattatgccat

SEQ ID NO: 842476 - DNA, 120 bp, Artificial Sequence
  ENSG00000235412_3 (sequence is synthesized)
atacctgagacagatcaaaggaataataacaactttatacctggagccaggatgtgcagaatggtgactctcattcctgaacatttccaccagtgctattgtgacatacaccttggtcca

SEQ ID NO: 842477 - DNA, 120 bp, Artificial Sequence
  ENSG00000235412_4 (sequence is synthesized)
gctcctcagtgatttaataatcctgcctaattatagcctgcatatgacattttgacatatacctggacctagaaccttggtgatttgactctcctgttgtagagggtcctcagaaaaaac

SEQ ID NO: 842478 - DNA, 120 bp, Artificial Sequence
  ENSG00000235412_5 (sequence is synthesized)
taggtaatgtgatgttccccatttgtctgaacctcctttcagtgaagagtgtggcatttctaaacactgcatccaaatgacatgactctcttgcctgggccatttcaacaggaggccttg

SEQ ID NO: 842479 - DNA, 120 bp, Artificial Sequence
  ENSG00000235412_6 (sequence is synthesized)
tgacatatctctgagcccatcattttggtgatatgactctcctcacctgcctggacattgtccacaagaggcattatgcgatagagctgggactggcaccaaagttttctgacttttcgg

SEQ ID NO: 842480 - DNA, 120 bp, Artificial Sequence
  ENSG00000235412_7 (sequence is synthesized)
ttagtgccctgctgacaaagagaacgttgtaatacttctggcttagaatgtaggtgatgtgtttgttctatctcttttataaccaaagacgggatggtgacatataactaggcacagcta

SEQ ID NO: 842481 - DNA, 120 bp, Artificial Sequence
  ENSG00000235412_8 (sequence is synthesized)
ataggcatgataatgactctcttatgtggacccagccaatagaagaaatgttgcctcttataactaggtttagggacatgagtgatgtagaatctccttctggtaaaaaggtcacagaag

SEQ ID NO: 842482 - DNA, 120 bp, Artificial Sequence
  ENSG00000235412_9 (sequence is synthesized)
attgcaacactcacacatattttttaacacccttgtgttgaatagagggtgtcacaaagcacctagcacacagaataaattgtgagtattgtatgcacacccagctgacagcaaggaatt

SEQ ID NO: 842483 - DNA, 120 bp, Artificial Sequence
  ENSG00000235412_10 (sequence is synthesized)
tcaccatcacaggtggatgaaggcatctgtcctacatgaaaacaggacatgtgtggtattctaaatctaatccccagaattttatttcttcaagactgtgatataaatctttgccagtta

SEQ ID NO: 842484 - DNA, 120 bp, Artificial Sequence
  ENSG00000235410_0 (sequence is synthesized)
ctcggcacgacccaggttccatgctacaggcctctacttgtccagacctgagggtcagattcagatggtgcaaatgtttaagacctgggtcttcaacgagatgaattatcagctatttca

SEQ ID NO: 842485 - DNA, 120 bp, Artificial Sequence
  ENSG00000235410_1 (sequence is synthesized)
tagctgcagtgttggatatgccgagacgataaaagcaacagcaatcagaatcaacagttgaaacgacatggcagacgctgtgaatgctatgaactgctgtgctgagcagcaggattcctg

SEQ ID NO: 842486 - DNA, 120 bp, Artificial Sequence
  ENSG00000235410_2 (sequence is synthesized)
tgtcctggcgcaatgcccatggggattcatgctttcagagggtcacgcctcaggaacacgtagaagggcaagcatttcatctggcagggcactgatttaatctgcacgcatgtttggctg

SEQ ID NO: 842487 - DNA, 120 bp, Artificial Sequence
  ENSG00000235410_3 (sequence is synthesized)
gtccaggaactcgttgatttgtcaaacttatggctacacacagctggaatggagacggactccactgaggagactcatacaggacaggagggaattttaagaggataaccctgagattga

SEQ ID NO: 842488 - DNA, 120 bp, Artificial Sequence
  ENSG00000235410_4 (sequence is synthesized)
aaacatcaaaccaaacctgaagcactgagaggttgggtaaccagctctggtcactgagttggtgagggatggattcagaagaggtctccaattgtgacaccgcagaggacctgctcttgg

SEQ ID NO: 842489 - DNA, 120 bp, Artificial Sequence
  ENSG00000235410_5 (sequence is synthesized)
ccactacactctaccagctctgcaagaagcgcttccacacttttcatctcagacccacagagccagtgtgtgcggctgaggtgctcagactggcaggtgaaatgacttcattagtgccct

SEQ ID NO: 842490 - DNA, 120 bp, Artificial Sequence
  ENSG00000235415_0 (sequence is synthesized)
cttgagctgggcaatcctcatagaaggtcggggacgacctgcccttcagtgttcctggagcatcttctccaaagtggaggtcgagccaggcctaggaggaaagagagggcaactgcggac

SEQ ID NO: 842491 - DNA, 120 bp, Artificial Sequence
  ENSG00000235415_1 (sequence is synthesized)
aaaccgacgggctccagggctttttcactcattccctaggcatgtgggacctcgaagatgccgaatcagctaaacgggaggtggcttgagtaggatttgctgccagctaaagcgtgagat

SEQ ID NO: 842492 - DNA, 120 bp, Artificial Sequence
  ENSG00000235415_2 (sequence is synthesized)
gctattgcatgtgcaaggcaaggctttcttcagcggcatcatcttccaaaatagcccagtgagcatgcctttctcctgaaaaataaaaaatagttggtgtttactgcaatcgtatggcaa

SEQ ID NO: 842493 - DNA, 120 bp, Artificial Sequence
  ENSG00000268873_0 (sequence is synthesized)
atgctcagcctccttactatgtgtgccctgcaccatcttgagactctgcagagagtcccactagtaagcagactctcaccagaggcagccccttgacttggacttctgaaccaccataac

SEQ ID NO: 842494 - DNA, 120 bp, Artificial Sequence
  ENSG00000268873_1 (sequence is synthesized)
tgtggagagtcggatgcgatccagatcttgagcccctagtgcggggaaaaaggacacataaggttcctttccaatcgtgcatgtgccgacttcagccaacactctcaaggatggcctgcc

SEQ ID NO: 842495 - DNA, 120 bp, Artificial Sequence
  ENSG00000268873_2 (sequence is synthesized)
attgtggatcccattcaacagatgatgaaaccaagagtctgatggacttggtgaatgaaggatgcagacgtttggattctaagaccagtatggcttccatctcatcctgttgccagttgt

SEQ ID NO: 842496 - DNA, 120 bp, Artificial Sequence
  ENSG00000268873_3 (sequence is synthesized)
cccttatacactcaaaacctcaatttataaacaggactgtcggtttcatgaaggcgtgtctctgtgatgttcattagtgccacttgtgcctaaaatgagtgaagttagggagcactacac

SEQ ID NO: 842497 - DNA, 120 bp, Artificial Sequence
  ENSG00000236858_0 (sequence is synthesized)
ggtagatccgtacctgggccttgactccactgtgtgacttttggcaaagcacctaattctctggggttcaatttcccccgtctgtcaaatgaaaacagtactctagggccatggttctca

SEQ ID NO: 842498 - DNA, 120 bp, Artificial Sequence
  ENSG00000236858_1 (sequence is synthesized)
acgtgtgttgcctgggctggcagcattagccgtcaccagggagcttgttggagatgcaaattctcgagccctccctgaatggactaattctgggactctgggagtgggatccagtaatct

SEQ ID NO: 842499 - DNA, 120 bp, Artificial Sequence
  ENSG00000236858_2 (sequence is synthesized)
gtgtttcacaagccctcctgagccccggttttgtggctacagcacagcacgaggcagaggaacggagacaggtcctcggaagcctctttccagaaaatctaatttcatcattgagaaatc

SEQ ID NO: 842500 - DNA, 120 bp, Artificial Sequence
  ENSG00000236858_3 (sequence is synthesized)
ttctgtcttaaacagcctccaccaccgccataaatttacatattctatatgccgccggaacggagtgggccctatttgcataatgctgctggaggggctcacgctcctcttgaacctgaa

SEQ ID NO: 842501 - DNA, 120 bp, Artificial Sequence
  ENSG00000236858_4 (sequence is synthesized)
tcccaggctgaaggtggatcccagggctgggaaaaatcagtgtgaattgctttctccaggttatgtctgcagccaggccgaggccagatatggattgcattaaggatcagccatgtttca

SEQ ID NO: 842502 - DNA, 120 bp, Artificial Sequence
  ENSG00000236858_5 (sequence is synthesized)
agagctgctggctaccctcccagcatgcctctgatgaagttgcaacctctgagggcaattcctggtgacagtaacaagcagtgcaaggtaccaaccagcaggacagcacaaagtaaagga

SEQ ID NO: 842503 - DNA, 120 bp, Artificial Sequence
  ENSG00000236858_6 (sequence is synthesized)
aacagttgcatcatatgaaaacacaaaagctcacctaattaagaaccagcagtgttgtaattgtttgtttgacagtaactcctaaacctgaacaggtgccaacaccataacccagagatc

SEQ ID NO: 842504 - DNA, 120 bp, Artificial Sequence
  ENSG00000236858_7 (sequence is synthesized)
ccacattaggtacacacctgacaaaaatgactgcatatgtgcactgaaagacatgtgtgagaatgttctgggtgcattcctctaatccctgaaactgagaactacccaaatgtccatcag

SEQ ID NO: 842505 - DNA, 120 bp, Artificial Sequence
  ENSG00000236858_8 (sequence is synthesized)
cagttaagtggatacattgtgccatattcccagaaaggtgtaccatatcacaggcttggcaaatccagccggtggccaaatccagccacctcctgttttgtaaataaagctttatcagac

SEQ ID NO: 842506 - DNA, 120 bp, Artificial Sequence
  ENSG00000236858_9 (sequence is synthesized)
acacagagatgaacaaaacaaatggacttcctgccctcacaaggattacggctctagagcaggaagacaaaccttcatcaaacaacatgtaaatacagtcatgcgtcatttaacaacagg

SEQ ID NO: 842507 - DNA, 120 bp, Artificial Sequence
  ENSG00000236858_10 (sequence is synthesized)
gatacgttttgagaaatgtgtcattaggcgatttcatcatcgtgcgaacatcatggggtacttacacaaacctagatggtattaatatttttgcatgtttttatttacatattaggttgg

SEQ ID NO: 842508 - DNA, 120 bp, Artificial Sequence
  ENSG00000236858_11 (sequence is synthesized)
tgcaaaataattgtggttttgccttaaaagtaatggcaaaaaccatgattacttttacaccaacttaatatttttttcatatggaaaaccaaatgtttcagcaccattactgaatatcag

SEQ ID NO: 842509 - DNA, 120 bp, Artificial Sequence
  ENSG00000236858_12 (sequence is synthesized)
tcatttttcctacttgatctgcaatgtcaatatcaaatgctattcatcaggtttctatatatattccattataatcttatgggaccacaatcatatatgtggtccattgttgaccgctat

SEQ ID NO: 842510 - DNA, 120 bp, Artificial Sequence
  ENSG00000236858_13 (sequence is synthesized)
tttgttatgcagtgggtaactgtatatatcatatccccactaaggagagaggttaagatggagtcacagtagttggcctggtctgatagatggggaacggcatctctgaggactagggct

SEQ ID NO: 842511 - DNA, 120 bp, Artificial Sequence
  ENSG00000236858_14 (sequence is synthesized)
tgggagtaaaataatggatatgagaagctctcaagaggtacacgaaggattgcataaaactctaaaatgtttagaaccctgttatctgagccaatgattctggaactgtggcctaaagaa

SEQ ID NO: 842512 - DNA, 120 bp, Artificial Sequence
  ENSG00000236858_15 (sequence is synthesized)
cacttattcagaaatgcaggccccagacctcttgaatcagactccagtggcaggactctgggatgtatattttactgaaagattagatacaccttaaagctttaaaacttgtctgtttgc

SEQ ID NO: 842513 - DNA, 120 bp, Artificial Sequence
  ENSG00000236858_16 (sequence is synthesized)
atgactatgtccctctgtagcctgcaacctgggaggactgggaccctatcttatatatccgtatgtatctcctgtgcttgacacagaagagaatatacttgttgaatgagtgaatgaaat

SEQ ID NO: 842514 - DNA, 120 bp, Artificial Sequence
  ENSG00000236858_17 (sequence is synthesized)
gattcaatgtttgctcaatgtgaaatgttgtcatcatcatcattaaggagaatattgcaagacaagttataaagctcatgtcacaaacaggtcctggagactctgggtcctctgagatca

SEQ ID NO: 842515 - DNA, 120 bp, Artificial Sequence
  ENSG00000236858_18 (sequence is synthesized)
aatcttgaagtgcaattggcatttccaggagtggaatccaggactcacacccaggacaagcaaagacacagtggcagtgagatcattacatatactctcctgaagcactcccctaccatc

SEQ ID NO: 842516 - DNA, 120 bp, Artificial Sequence
  ENSG00000236858_19 (sequence is synthesized)
cccctacaacacagtattttggcaactattgctagaaaaatgggaactacgatgtattaagtacctaccatgtgttacctcctatatgagctttatctcatttaatcttggcagtggtct

SEQ ID NO: 842517 - DNA, 120 bp, Artificial Sequence
  ENSG00000236858_20 (sequence is synthesized)
tattttacacacaatgaaactgaggctcagagaggtgaagtcactaagtcaggtaatggcagatctggcatgcacacctaagtctatgtatcacctgagcccaagctcattgcttcttcc

SEQ ID NO: 842518 - DNA, 120 bp, Artificial Sequence
  ENSG00000236858_21 (sequence is synthesized)
tgaccatgcttcttccctttcagcccttccactcccaaggctccccactccatcctcatgataagccaaagttgagtactctggacaccagaataataagtgggaaagagagggacgggt

SEQ ID NO: 842519 - DNA, 120 bp, Artificial Sequence
  ENSG00000236858_22 (sequence is synthesized)
ctgatgagttaccatgaaatgagcaccggactgtgggtcaagaggccaaccccagctttgctgctgacattctgtgttgtcttgaacaagtcacaccctctcttaaggtctccatttctt

SEQ ID NO: 842520 - DNA, 120 bp, Artificial Sequence
  ENSG00000236858_23 (sequence is synthesized)
catccataagtgaaataaatctataaaaatatccacctgtcttgtatcatggactttaatgagataatgtctagaaaaaagagttctatggcacaaataaaataagtgaatagtaactaa

SEQ ID NO: 842521 - DNA, 120 bp, Artificial Sequence
  ENSG00000236859_0 (sequence is synthesized)
ggcctggccgtgttaggcttcgctggcgtaaagtccccgggagctttgcccctcacggagaacgttagttgaccctgatggggacccgtagggtaaaggttttgtttttgttttttttta

SEQ ID NO: 842522 - DNA, 120 bp, Artificial Sequence
  ENSG00000236859_1 (sequence is synthesized)
cggaaaaggttgtggttaggccccttggaaagttgcgacaaaactcgagttagacaaggaaggtcggaactaagtggccacagcaacaatgcaccagcaagcagggagcgtgataggaag

SEQ ID NO: 842523 - DNA, 120 bp, Artificial Sequence
  ENSG00000236859_2 (sequence is synthesized)
cagcaacaatgcaccagcaagcagggagcgtgataggaagagctaaagaggaatcgggaaaccctggagatgggtttcaccatgtttcccagccttgtctcaaactcctgacctcaagtg

SEQ ID NO: 842524 - DNA, 120 bp, Artificial Sequence
  ENSG00000236859_3 (sequence is synthesized)
agtgagccaccgcatctggcccggaaagtgttttggagcgtagaaaaatgcaaattatagggctgccttcaaggatcccgaaggacccacagatttgccgcatcaggctcctatgcacgc

SEQ ID NO: 842525 - DNA, 120 bp, Artificial Sequence
  ENSG00000236859_4 (sequence is synthesized)
ctttcaaaaccagaaaagccgcatgtttagatcgctctaggagattcatctccattacgatacaggtgggtaatgagtttccctcataaactttttttttcttttcttttttatttaatt

SEQ ID NO: 842526 - DNA, 120 bp, Artificial Sequence
  ENSG00000236859_5 (sequence is synthesized)
aatgtgccaaggtagtaacaaggtttgagggaggcacatctcacacgaatgtgaaaactcaaaagatctaaactaagttttgaaacaaatccacaagtgggtttttcctccacagggtaa

SEQ ID NO: 842527 - DNA, 120 bp, Artificial Sequence
  ENSG00000236859_6 (sequence is synthesized)
gattttctccacatgttttgacttgggtgcatgggcgttgccttccctgcctgtggccttcaaaagaccatgggtgcgaagtccaagctttgactcttctgcctatgattctctgtcaaa

SEQ ID NO: 842528 - DNA, 120 bp, Artificial Sequence
  ENSG00000236859_7 (sequence is synthesized)
tgagaggccaaaattaaaaccacaatgaggtatcactaaacacccactagagtggctaaaattgaaaattctgactatacaaaatattggcaaggatgtagagcgactgggactcccata

SEQ ID NO: 842529 - DNA, 120 bp, Artificial Sequence
  ENSG00000236859_8 (sequence is synthesized)
cattgctgttggaaatagtttggcaggttcctataaagttagaataaatttatcatataacccagagatccaacttgtacgtatttatccaagagaaataaaaacatatgttcattcaaa

SEQ ID NO: 842530 - DNA, 120 bp, Artificial Sequence
  ENSG00000236859_9 (sequence is synthesized)
gtgtggaacggtgcctgacacactgttcgtttatctgttctttgaccacggtcctgaagaaatgcccaggaggattgacgagattgaggtcaagatcgtggcccagtgtgtggcgctcca

SEQ ID NO: 842531 - DNA, 120 bp, Artificial Sequence
  ENSG00000236859_10 (sequence is synthesized)
atcattcagttcagccacttgagattttcgcctctccaaaaatgttggtgtacaaactggtgtggggccctggattcaacaagtaaagattataatacataaatgtaaaacatgattatg

SEQ ID NO: 842532 - DNA, 120 bp, Artificial Sequence
  ENSG00000236859_11 (sequence is synthesized)
acttggtacagaaattcacaattaacaaatatagcatgttccattataaggttttaggcagaaaattgctaaatcaacaataaagatctaccaaatgtcacaatatttaatttgaaatct

SEQ ID NO: 842533 - DNA, 120 bp, Artificial Sequence
  ENSG00000236859_12 (sequence is synthesized)
taaaatgagagtagcagaaactgcttctcctccttcaaattatttctataatatctggtgtctggagtattgaaaaccattttacctggctatccacagtcttctcaggagtgtcaagag

SEQ ID NO: 842534 - DNA, 120 bp, Artificial Sequence
  ENSG00000236859_13 (sequence is synthesized)
tacctgaaacttttttcttcttcttacgtaaaaccttaaaataaattttaaaacacatcaatttgaatattgatcagctacagtagtcttgaatatgttttcctacttatccttctctaa

SEQ ID NO: 842535 - DNA, 120 bp, Artificial Sequence
  ENSG00000236859_14 (sequence is synthesized)
tatcttgcatgtaaaatgataaaaaaaattttacctggccttttgtagacgtctgacgattagtttttgaaatactttccgttttctgtaaaatctttaataaagaagttagaaattgac

SEQ ID NO: 842536 - DNA, 120 bp, Artificial Sequence
  ENSG00000236859_15 (sequence is synthesized)
gagcgtgataggaagagctaaagaggaatcgggaaaccctggggtctcaccgccgtcgcccaggccggatggagtgcagtggcgcgatcacggctcactgcagcctcgacttcccaggct

SEQ ID NO: 842537 - DNA, 120 bp, Artificial Sequence
  ENSG00000236859_16 (sequence is synthesized)
tcctcagggtcttaggaggtatggtcggagaggctaagctaaagtatgaaagccgtgtgtaggcccttctgtgtagtgcagaaaaggtagaggtatgtgatttgaaagagtagggatgac

SEQ ID NO: 842538 - DNA, 120 bp, Artificial Sequence
  ENSG00000236859_17 (sequence is synthesized)
atggaggatgcgactcctggttggatctataaactaatgtctttggaacgaaagcacatgcaaccttttgaaaatggatgggtgataatgaaagaccattccagagaagaaacaccatgg

SEQ ID NO: 842539 - DNA, 120 bp, Artificial Sequence
  ENSG00000236859_18 (sequence is synthesized)
tgcaaaggctcaagaggcatactggaagtacaatgaagagagcaatctaactgaaatgggaaaaaaagaaacaaagagtaaaaagtaagatttgatgagaaagatggaatcgatttttaa

SEQ ID NO: 842540 - DNA, 120 bp, Artificial Sequence
  ENSG00000236859_19 (sequence is synthesized)
atttttttatctacacaacaaaatttattatcttaaccatttttgagtgaataattcgttagtattaagtatatttacctcgtgcggccagtctccagaattcttttcatcttgcaaaac

SEQ ID NO: 842541 - DNA, 120 bp, Artificial Sequence
  ENSG00000236859_20 (sequence is synthesized)
aaaccccgaacccattaaacaatttctcattcgccattttccagctagccttggtaacctccattctagttctgtctctgtgaatttgactgtgtaccccgtgtaagtggtatcatacag

SEQ ID NO: 842542 - DNA, 120 bp, Artificial Sequence
  ENSG00000236859_21 (sequence is synthesized)
tatttgtatttttgtgactggcatatttcacatagcataatctccttgtggtttatccatcttgtagcatgtgtcagaatttccttcccttttaagactaaataatattccattgtgtgt

SEQ ID NO: 842543 - DNA, 120 bp, Artificial Sequence
  ENSG00000236859_22 (sequence is synthesized)
ccaagtggaacttcctttggtcgggggtctgatactcgaaggaaacggtctttcacttctgggttagggcgtccgcccagagggcgactgcaatgaaggaaattgtgccctgcgacttcc

SEQ ID NO: 842544 - DNA, 120 bp, Artificial Sequence
  ENSG00000236859_23 (sequence is synthesized)
cgtaacagagctgtgtgtccacgctcccttttccgagcaggcgcggacgcttgtgccggaagtaaacttgttaacggttctttgccttttggggaggggagacagcccagagaaggcttt

SEQ ID NO: 842545 - DNA, 120 bp, Artificial Sequence
  ENSG00000236859_24 (sequence is synthesized)
ggagacccttgagtcggccagcgagcagggtttcttacttgagcgcctccacaaataaacgctccttcgctcctccgtcgcgtgcgtttccctgggataataagtgggaaagtggtggct

SEQ ID NO: 842546 - DNA, 120 bp, Artificial Sequence
  ENSG00000236859_25 (sequence is synthesized)
ttattgtgaataatactgcttcaaacatgagtgtacagataactcttcaagatccttttagggtaatacagagatagtaagttatcttgattgttcactgccagttacagaccaaactcc

SEQ ID NO: 842547 - DNA, 120 bp, Artificial Sequence
  ENSG00000236859_26 (sequence is synthesized)
ttgttctccttgtgctccacttctcaaccactgcacttggctagtcttaaacaaaaaaagaaaaaccctaattttaatagcttgtggggacagacgcagtggctcacgcctataatccca

SEQ ID NO: 842548 - DNA, 90 bp, Artificial Sequence
  ENSG00000236859_27 (sequence is synthesized)
ggcaggagaaatgcttgaacccaggaagtggaggttgtggtgaacggaaattgcgccgccgcactcaagttagtattaatagaatgtggg

SEQ ID NO: 842549 - DNA, 120 bp, Artificial Sequence
  ENSG00000236859_28 (sequence is synthesized)
cgtctcaaaaattagtattaatagaatgtgggagattttgaaaccaagtatagaaattcatactttatattgtttaaggtccgtgactaggcatagtaacatgatgaaagaactgttttg

SEQ ID NO: 842550 - DNA, 60 bp, Artificial Sequence
  ENSG00000236859_29 (sequence is synthesized)
ccgtgactaggcatagtaacatgatgaaagaactgttttgggtttgtttggtttttttcc

SEQ ID NO: 842551 - DNA, 120 bp, Artificial Sequence
  ENSG00000236859_30 (sequence is synthesized)
ggattacaggcaggagccaccacgcccagctagaaagatctgtttcagaaagcaactctggcagtggaagctgaatacatactccatttctataaagcatttatggaggcctctagatgt

SEQ ID NO: 842552 - DNA, 120 bp, Artificial Sequence
  ENSG00000236859_31 (sequence is synthesized)
ttatggaggcctctagatgtgccaggcattgtactactgctttatgtaaattattgatgggtccgcgaatccattaatataaatgtgagccagttgttgtgcaccccaatttacaggcaa

SEQ ID NO: 842553 - DNA, 120 bp, Artificial Sequence
  ENSG00000236859_32 (sequence is synthesized)
gaaaatcaaggttctgagttgcagatgggctgagaaaaggctcaccaaccacatgtacgcacaagagattaggaaagaaaactgccattggagccaggctccagtaagcactgagtattc

SEQ ID NO: 842554 - DNA, 120 bp, Artificial Sequence
  ENSG00000236859_33 (sequence is synthesized)
attggtttggatgaggatactgaaagaaaaaaatgacatgtaagagtgacttttctcaggagaaagaataggctgacatcaagagtctttgctgtcacattagtggtatgtataagggca

SEQ ID NO: 842555 - DNA, 120 bp, Artificial Sequence
  ENSG00000236859_34 (sequence is synthesized)
caacacaacagaagtacatttttcaaggttcgtaaaagaaccctggggtttgcttttaggtttgtttattacctttaacaaatataaaatgccaggtaaatatatctttgtatgtagtag

SEQ ID NO: 842556 - DNA, 120 bp, Artificial Sequence
  ENSG00000236859_35 (sequence is synthesized)
aggcgctggcctggccgtgttaggcttcgctggcgtaaagtccccgggagctttgcccctcacggagaacgttagttgaccctgatggggacccgtaggagatgggtttcaccatgtttc

SEQ ID NO: 842557 - DNA, 120 bp, Artificial Sequence
  ENSG00000236859_36 (sequence is synthesized)
gggccgcgagagggctcgggtctgaccctccgccccctgaccgggtacttacagccctgtttttcgttactgttgccgctgcggaccagagagccgccgccttctcctccaccccaatga

SEQ ID NO: 842558 - DNA, 120 bp, Artificial Sequence
  ENSG00000236859_37 (sequence is synthesized)
aaaaaaagaaaaaaaaaaaaaagaccgagagagcgagagagacgccgagggcgcctgcgcagtgcggtcaccctttttcttcttaccgccaccaacccgggtacaccatagagagcgtaa

SEQ ID NO: 842559 - DNA, 120 bp, Artificial Sequence
  ENSG00000236859_38 (sequence is synthesized)
gttgagatgcactgcccagtgcgttgtttttactggaggagcttgtgtgcggagctccttgctagtgtatgtgttgggatgggagagaagtgcgggagaactatgagataatgccccctg

SEQ ID NO: 842560 - DNA, 120 bp, Artificial Sequence
  ENSG00000236856_0 (sequence is synthesized)
agattccgtccttagcatcaggaaagaaaagacccggcttgtgagctccttgtcccaccttctttcactccagacgtccatctccatctttctccatcagggactttctgggcaggacac

SEQ ID NO: 842561 - DNA, 120 bp, Artificial Sequence
  ENSG00000236856_1 (sequence is synthesized)
ttccttgatcacatccccagttttccacccaggactttgtgaaaactcctccaggcctggctcttgtgtgctggaccttctcttgcgtggttagttgtaaaacttgatgcttctgcaggc

SEQ ID NO: 842562 - DNA, 120 bp, Artificial Sequence
  ENSG00000236856_2 (sequence is synthesized)
tgacggcagaaagctcccgccccaccacgctgatgatggcactctcgttgggtggttgtgtggtcttcatacaatttcagggtaaatcgccacttgatgtcattgctaaatgggatacct

SEQ ID NO: 842563 - DNA, 120 bp, Artificial Sequence
  ENSG00000236856_3 (sequence is synthesized)
gagctatgatgattttgcctgattgttaaagttagtattttaagaccaaagatggacaaaatacgttaaaattgtctgtaaaaaggcacatttctgaatttgcttttaatactttaaaag

SEQ ID NO: 842564 - DNA, 120 bp, Artificial Sequence
  ENSG00000236854_0 (sequence is synthesized)
gcccacccacctgcacctgacagctgtgggctgtgctctcagggaggcaccgtcagatgctaccagactacagaggagagcaccctcaatcctgactgaaggtttgggaaaaggctgctc

SEQ ID NO: 842565 - DNA, 120 bp, Artificial Sequence
  ENSG00000236854_1 (sequence is synthesized)
gggtacagtcagaaatgatgaatccagaaatgatgccctccagaacttctggtgaggaaggcactcaggaaaatgcagcaccctatggaggcccagaaaggagggcattcaggaagaaca

SEQ ID NO: 842566 - DNA, 120 bp, Artificial Sequence
  ENSG00000236854_2 (sequence is synthesized)
cagtctgatggtgtcaagtgcagcggaggctaagagaattcatttttcacatcttcattcactgggattctggaccataatatatgtaaacacacaaaatactaaagattgaaaatacaa

SEQ ID NO: 842567 - DNA, 120 bp, Artificial Sequence
  ENSG00000236854_3 (sequence is synthesized)
gattctacctatccatctctttacaccatgccttctgaagagaagattttcggagagaatccttggatttagtcaggaatattagatccctaaataaaaatgtctaaaatcctttcccca

SEQ ID NO: 842568 - DNA, 120 bp, Artificial Sequence
  ENSG00000236854_4 (sequence is synthesized)
ggaggcagcatgaagggactgttggctgcagaaacctggcaaggctcttagagacagagacgaagagggagatggggctggagatggagatgatagagacagaaagattgaagatggcag

SEQ ID NO: 842569 - DNA, 120 bp, Artificial Sequence
  ENSG00000236854_5 (sequence is synthesized)
agtgggggctatggggaagggtgatgaagcaggaaagatagatcgaacgagactgcgaggagcctgtgtgcctgggctttattttggaggcaatgagaaacagaaagtgtttttgagcat

SEQ ID NO: 842570 - DNA, 120 bp, Artificial Sequence
  ENSG00000236854_6 (sequence is synthesized)
ttctttttttttttttctttaaacttttcttaagactagtcaagtacagtatcaagaagacgggaaagagtagaacaaggaattggatccgtaactgactgtgaacaatcaattgaggta

SEQ ID NO: 842571 - DNA, 120 bp, Artificial Sequence
  ENSG00000236854_7 (sequence is synthesized)
actcattacctttgaaccaacctgggaggcagccttgtgactcacctcaatcctcaatcttctcagctagttcactttggcctggctcaggggctgacctagaatgatcctgtccagaag

SEQ ID NO: 842572 - DNA, 120 bp, Artificial Sequence
  ENSG00000236854_8 (sequence is synthesized)
gaccctggatgttcttagagacacagactgctagggctggcagggacttttcatccaattcctctgtgacagaggaggaagtggaggtgcagaaggagaggtgagctgcctgtggtcctt

SEQ ID NO: 842573 - DNA, 120 bp, Artificial Sequence
  ENSG00000236854_9 (sequence is synthesized)
cagcttactaatggcagtgttaggactggacctgagggctcttccctccagtccggcgctatttattccatgacagtgcctctcaaactgtgttctcacaagcagctagtgctcaggcag

SEQ ID NO: 842574 - DNA, 120 bp, Artificial Sequence
  ENSG00000236854_10 (sequence is synthesized)
ctggactgaggccctgcctgccaaatcaaatattggaggtctttctccaatgtgcagaaaaaaaaagtaattaatgggttaagtttccttagggttaaattatttttccattaatgcttc

SEQ ID NO: 842575 - DNA, 120 bp, Artificial Sequence
  ENSG00000236854_11 (sequence is synthesized)
ttaaaccattgtcacctgctaccaattgtctactagccaatgcatgcaggcaacaaaacaaaaggataagccacaagtaaataagaacaagaacaaccaaagccttggaaacacaccatc

SEQ ID NO: 842576 - DNA, 120 bp, Artificial Sequence
  ENSG00000236854_12 (sequence is synthesized)
attcttaagttaaaggcttaaaaaaaaaatagaggaagactgctatgactgtggactttctattgcattcacataataaaatcatgcgacattgttttgaattcaaatgctaaaagtaaa

SEQ ID NO: 842577 - DNA, 120 bp, Artificial Sequence
  ENSG00000236854_13 (sequence is synthesized)
ggcatccgggcaggcgagaaatgcaaagggaagagaggtcatccaggacaaaagtacagaatgaaaagaaaaagcaactaagcacgaaatcttggagaatgtcctcattgaagggtgagc

SEQ ID NO: 842578 - DNA, 120 bp, Artificial Sequence
  ENSG00000232194_0 (sequence is synthesized)
gccgactgccctccaggtgatttttatgcccactaaagtctgagcagcattggcctaggacacagctgtttaaaaaattctcctgctgagatagacaagaaaaataaatttggatgattt

SEQ ID NO: 842579 - DNA, 84 bp, Artificial Sequence
  ENSG00000232194_1 (sequence is synthesized)
tcctgctgagatagacaagaaaaataaatttggatgatttctggactttagattccttaacctttaactcacagggaaggctga

SEQ ID NO: 842580 - DNA, 120 bp, Artificial Sequence
  ENSG00000232194_2 (sequence is synthesized)
ggaaggcgaggctgcagtgatccgcgatcgcaccacgggactccaacctgggtgacacagcaagactgtctcagaaagaaggaaggggtggatttctattccaatttggagctgttctaa

SEQ ID NO: 842581 - DNA, 120 bp, Artificial Sequence
  ENSG00000232194_3 (sequence is synthesized)
cttgtagcattttatataggaatgtcttcatattgtcatttagtctcatcacaaacctctgatagaccatacggttgcatataattaagataggaaataaaataatagggggcgattttc

SEQ ID NO: 842582 - DNA, 120 bp, Artificial Sequence
  ENSG00000232194_4 (sequence is synthesized)
agtcttggggatagtcatggaaataatttaatgaatgttctgttctgacccattttagaaccttagcattcatctccttccttaagggtatgaccataatagctacatgcttaactgagt

SEQ ID NO: 842583 - DNA, 120 bp, Artificial Sequence
  ENSG00000232193_0 (sequence is synthesized)
agctaaaagaaaagaaagaagaaaataaaaataaaagaaaggtagcttcacctccacccaaatttggaaacatctattcatgcattttacagatatatgtgtgacatacactatgtagga

SEQ ID NO: 842584 - DNA, 120 bp, Artificial Sequence
  ENSG00000232193_1 (sequence is synthesized)
gaaaattcaagctgtgaaagagaaaaccagtgcaatggctgcctgcatggagattacagtgcaatgaggaaaatagatgtgaataaatgaatgcaagtgtcatcgagaggaaacccaagc

SEQ ID NO: 842585 - DNA, 120 bp, Artificial Sequence
  ENSG00000232193_2 (sequence is synthesized)
agctactggaatgtagaagccatggacttcaacaagtcttgaaaatggagtgagtgagaaggaaagattcttggcggaaaaaaaaagctggagttaactgaagaagtgaaaagaacattt

SEQ ID NO: 842586 - DNA, 120 bp, Artificial Sequence
  ENSG00000232193_3 (sequence is synthesized)
taaaagaagccaagcattggatggatcttaaacgacaagtgagaaaaaggcacaaaacaagtctgaagagaaatacatgaagaaactaaggatcaagcaccaagtcaactgcacaagatg

SEQ ID NO: 842587 - DNA, 120 bp, Artificial Sequence
  ENSG00000232193_4 (sequence is synthesized)
ttataatatgttcggcttaacttggaaccattgcagtattacctcagtcaactttctttactataattgaaagtgaatgattaccggctttttagctaatatcaaaaaagattcattcca

SEQ ID NO: 842588 - DNA, 120 bp, Artificial Sequence
  ENSG00000232193_5 (sequence is synthesized)
atctagaagactgcctgcaagcaatgcgaacacgtgtgtctagtttcttggcagggtctcccagtttcccctgtcttttttctttctcctgatgcaaaatcacagaatgctttgacagct

SEQ ID NO: 842589 - DNA, 120 bp, Artificial Sequence
  ENSG00000232190_0 (sequence is synthesized)
atttcctctctccttggggacaccgaaaagcagaccacccgggcatactaaggtcaagatgtcgttgatcggtttctttgttttattgtattacttgttttatttacctatttactttct

SEQ ID NO: 842590 - DNA, 120 bp, Artificial Sequence
  ENSG00000232190_1 (sequence is synthesized)
tggtaaaaccagcctgccggcttgctcaggacatgaactatgacgtccctggagatggtctcttgggagaggagccccccaggccagcgaatcccgctcacctggggattaacgagcagg

SEQ ID NO: 842591 - DNA, 120 bp, Artificial Sequence
  ENSG00000232190_2 (sequence is synthesized)
cccggccatttcccagggccaccggtgctccctgatctcagtgtctccgtctgtaaaatgggtataaccagagccagcctgtgtggccctggggaaagcggcactgaggacagaccaggt

SEQ ID NO: 842592 - DNA, 120 bp, Artificial Sequence
  ENSG00000232190_3 (sequence is synthesized)
gtccagcagggtcctgccccgactcccacgcccccctcgccggccccctcgccgcggtcttgcaccctccactccccgtgcctgcaaagcctctgccccgtccctacaccaggctaatcc

SEQ ID NO: 842593 - DNA, 120 bp, Artificial Sequence
  ENSG00000232190_4 (sequence is synthesized)
tttgcacctcagctcagaggccccgtctccaaagccttccctgaaacttcctccttgagacacccaccatccccaccaagcctgccacacccaggcctgctatcgcccgtgcggtgtcgt

SEQ ID NO: 842594 - DNA, 120 bp, Artificial Sequence
  ENSG00000232190_5 (sequence is synthesized)
ccttctgataagctgtggaggggtaagggtcgccctggtctcttgttcatagccttaaacctagagccactcaagtgccgggcacatagcaggtgctcaataaatactccttgctgattg

SEQ ID NO: 842595 - DNA, 120 bp, Artificial Sequence
  ENSG00000232190_6 (sequence is synthesized)
aacggcaaccagctgcaagagtgaatgcatggatgccgctcgtgggcctgggtttggagatcttagaaacaaagcttccttttgccacactcatgccttcttctatcacactcatgcctt

SEQ ID NO: 842596 - DNA, 120 bp, Artificial Sequence
  ENSG00000232190_7 (sequence is synthesized)
cttctaccacaatgtcacacccttacatcttgtatccgtagggaaatgtggccaggggcgttttaccaagttggtctgggatgacgtgagttaaccctcacactccacagtcagagagat

SEQ ID NO: 842597 - DNA, 120 bp, Artificial Sequence
  ENSG00000232190_8 (sequence is synthesized)
gggtaacccaggtgacccagcgctaagtgacaaatatgctctcggatagaacagcccagaaagggcaagagggagagttggaacactcagataattacccttcagcgacgcagtgcactt

SEQ ID NO: 842598 - DNA, 120 bp, Artificial Sequence
  ENSG00000232190_9 (sequence is synthesized)
aagtggtgaaaggagattcactggttggaaaaacactccagggcgaagggccagcgtgtgcaaaagcaccgaagcatgaccgagcgcgggcattcccgccagccaccagtgggccacgca

SEQ ID NO: 842599 - DNA, 120 bp, Artificial Sequence
  ENSG00000232190_10 (sequence is synthesized)
tcccaacatgtgagtgccgcaaggatacaagtgcctaatgtgaacctccaagtggacgatcattcagtactgactttgggcctggccccctttcctcatgcaagccttccaggcaggaac

SEQ ID NO: 842600 - DNA, 120 bp, Artificial Sequence
  ENSG00000232190_11 (sequence is synthesized)
taagagtgagccatcctctacagaagagaaaagcaagacacagcaagctgagaaacttaccagggtcacccagttggttggagtcagagatgtgttacgggcagcagctcctctgcccgc

SEQ ID NO: 842601 - DNA, 120 bp, Artificial Sequence
  ENSG00000232190_12 (sequence is synthesized)
ttacgtctgggctttgggggctggcccagagatagtcataatgcagccctttattcagcacttgctatgggccaagtccttcattcacaagctcaagtcttcccaacccagaaagaaaga

SEQ ID NO: 842602 - DNA, 120 bp, Artificial Sequence
  ENSG00000232190_13 (sequence is synthesized)
tggttagttccatttcatgtaggaggaaactgtcgaggctcagaaaatttaaggaatttaccggtcatcagtaaacgagagtaaaggcctgtgtgaacccaaatctgccctcctctgaaa

SEQ ID NO: 842603 - DNA, 120 bp, Artificial Sequence
  ENSG00000232190_14 (sequence is synthesized)
ctctcgctgcagacatcgcaccccactgtttttcaatttcatcttcttatttattcactcaaccaatatttatttaccaaagcactatgaggcccagttaagaatgtgtggtcctcgatc

SEQ ID NO: 842604 - DNA, 120 bp, Artificial Sequence
  ENSG00000232190_15 (sequence is synthesized)
tgacagcctggattcaaatccctgttgccccacaactctccacactagctgtgtggccttgcaaatttcactcaacctctcagggactcagtttccttgattgtcaaatgggagtaatga

SEQ ID NO: 842605 - DNA, 120 bp, Artificial Sequence
  ENSG00000232190_16 (sequence is synthesized)
catttcctacctcattgacttgttgggaggtagcattgagttatcccatgccgcacccgctcccttgtaaactctggataattaccgagctttcttataagtgcagctcatggatcactc

SEQ ID NO: 842606 - DNA, 120 bp, Artificial Sequence
  ENSG00000232190_17 (sequence is synthesized)
gcactgggaatatagcaatcacaacaaagattctagtcatgggagatggtcacctaacaaattaaaaactaaggcatttgttaaaggactgaatgaccaagattagcgttccaaggaaaa

SEQ ID NO: 842607 - DNA, 120 bp, Artificial Sequence
  ENSG00000232190_18 (sequence is synthesized)
gtatggcgctctggagtggtcaggagagcctctgtcactgagtagcagtgtggccctgtccaagctcctggcctggctaggcctcatgcccatgtctgcatggcaagtgcctggaaccgg

SEQ ID NO: 842608 - DNA, 120 bp, Artificial Sequence
  ENSG00000232190_19 (sequence is synthesized)
atggccatggcagcttttgctctgtgaaagcccaactgctcccctggactgctcccatgttttctgtctccaccgagcaagcctctttcaaagccctagagagagacctgggtccccagc

SEQ ID NO: 842609 - DNA, 120 bp, Artificial Sequence
  ENSG00000232190_20 (sequence is synthesized)
accctctcctggaggagatctggactgaaatgtttgggacgcctcccattcaaatgctcaagtctccaaaccgctggggaggcgttgcacaagagacaggcaggggtttcagtttctggc

SEQ ID NO: 842610 - DNA, 120 bp, Artificial Sequence
  ENSG00000232190_21 (sequence is synthesized)
acttgtttgctcaaaggatctcagccttcttcttcctgacatgcagcttaaacatgtgagctgacccttaaatgaaacccccacagttttccatctccttccaagagaatttcacggggt

SEQ ID NO: 842611 - DNA, 120 bp, Artificial Sequence
  ENSG00000232190_22 (sequence is synthesized)
gcagggagaatggggaggacgtgaaacgtggtgtatcctgcaggattcactcccccactgacgggactaaaggtttctgaagcctgaaatattttcaactaaatgagaaaatctttgctg

SEQ ID NO: 842612 - DNA, 120 bp, Artificial Sequence
  ENSG00000232190_23 (sequence is synthesized)
ttgaatggcctattagagctgtcacaaatgtgatttctggaaataaacaagattataagaaggctggctggcgcagaaacagcccgatggatacaccctgggagaggcgacggggtggcc

SEQ ID NO: 842613 - DNA, 120 bp, Artificial Sequence
  ENSG00000232190_24 (sequence is synthesized)
cctgtgacttcgggctgcgacgcggtgtcgtccccacccccacccccctcactctagaagtcacagcgccatctactggacagcggacaaacctccccacccagggacgggcttctctgt

SEQ ID NO: 842614 - DNA, 120 bp, Artificial Sequence
  ENSG00000232190_25 (sequence is synthesized)
ttaaggccatccaaactagaaagcttaaaaatgcgtttaagaggtagaataccatagtttacggaacagaagaacaagaacaaaactctctaatcaaaatcacagggacctggaaatatt

SEQ ID NO: 842615 - DNA, 120 bp, Artificial Sequence
  ENSG00000232190_26 (sequence is synthesized)
ggtctatagcaatttggtttttgggggttttgttgttgttgttgttgtttcgggggcggggagggagttggttttggttttttggttggtttttgtttttgtttttgttttgagacggtc

SEQ ID NO: 842616 - DNA, 120 bp, Artificial Sequence
  ENSG00000232190_27 (sequence is synthesized)
ttgttttgagacggtctcactctgtcattcaggctggagtgcagtagtgcgatctccactcaatgcagtctggaccttctgggctcaagcgaccctcctgcctcagcctcccgagcagct

SEQ ID NO: 842617 - DNA, 120 bp, Artificial Sequence
  ENSG00000232190_28 (sequence is synthesized)
tacaggcaggagccaccacgcctggcctatagcaattttgaaaactggctcaagcccattcctctatcccctgacataaccccccaaagagaagactttttaaaaaggtaagaaaactgt

SEQ ID NO: 842618 - DNA, 120 bp, Artificial Sequence
  ENSG00000232190_29 (sequence is synthesized)
ctgtttttttttcatttttaagagttttatattagctataaatttctggagtaaagatttggttccacctagtcagctcccacatttttctccccatcatccttggggctaaggtgtagg

SEQ ID NO: 842619 - DNA, 120 bp, Artificial Sequence
  ENSG00000232190_30 (sequence is synthesized)
agagctgggtagagacacacacactcacacacacgcgcacacacacgcacacacagacacacacgtgcgcacacacacgcacccagacacacgcgcgcgcacatacacgcacacacatgc

SEQ ID NO: 842620 - DNA, 120 bp, Artificial Sequence
  ENSG00000232190_31 (sequence is synthesized)
acccagacacgcacacacgcgcacacagacacgcacacgcatgcacacacacaaaaacactccttgtgatggagctctttaatcctcctggaccctgaacgctttggtgaacacaagcgt

SEQ ID NO: 842621 - DNA, 120 bp, Artificial Sequence
  ENSG00000232190_32 (sequence is synthesized)
acaaaactaggataacccaaatattattctgaattctttttttcagtcgtttaagcaaaacaactttcatttttaaagtttatgtgatttttccttataaatatcatcacattccacgat

SEQ ID NO: 842622 - DNA, 120 bp, Artificial Sequence
  ENSG00000232190_33 (sequence is synthesized)
caccaatgcgcagctattcctgcctcccacctgaggccactccgtgcagggtcccatctcggaggacattttctgagactgatctcagcaaagacaggggtgtttggagcgtctgctgca

SEQ ID NO: 842623 - DNA, 120 bp, Artificial Sequence
  ENSG00000232190_34 (sequence is synthesized)
gtgacgacaatgaaagccaagttgtttaaactgtattctcattcatttttatttgttacgctaatgtcccatggcgctgagtgcagtgacaagatcactttaaataaactgaaattctgc

SEQ ID NO: 842624 - DNA, 81 bp, Artificial Sequence
  ENSG00000250806_0 (sequence is synthesized)
cccggtgctgggtaaattagagaaaatgaggaacaaaaccacacctggaatctgaaactaaaattaactttttccagcaat

SEQ ID NO: 842625 - DNA, 120 bp, Artificial Sequence
  ENSG00000250806_1 (sequence is synthesized)
atccatcttcataaaaagaactcttgcagtcaaataacctgtttccaggaaaggaatggccatggcatatagaccaacctcgacttgcgtatgaaactacactaatgggcatcaagttta

SEQ ID NO: 842626 - DNA, 120 bp, Artificial Sequence
  ENSG00000250806_2 (sequence is synthesized)
tttgaattcgagatataaactgaacgtctgccagagaagaattgatttgatatttttatataatctgtattttagtaaactaaagtctatgtatgtaatctgatatatatgtaataaata

SEQ ID NO: 842627 - DNA, 120 bp, Artificial Sequence
  ENSG00000250801_0 (sequence is synthesized)
ctctcacctagaaattctctcttaggagctgatcaaaatcaaactaagaaattttttacacatgtgagtcttggggacttcagggtcattcaaggcagaatcaggccataaatagtaatg

SEQ ID NO: 842628 - DNA, 120 bp, Artificial Sequence
  ENSG00000250801_1 (sequence is synthesized)
ccagagatgacaggatgtgtagagggacaggggaaaaatcttacagtgaaagaagagtaggggagtcttgaagtataagtcctttgggggtcagaggactttagagaagctgatgttgta

SEQ ID NO: 842629 - DNA, 120 bp, Artificial Sequence
  ENSG00000250801_2 (sequence is synthesized)
aaagaaaacagacttgtcacctctggcaaagcctcaacatatgggtatgtatccgtcagggttcagccagagaagcagaacaactggaagataattagaattatcagcagattccaaaaa

SEQ ID NO: 842630 - DNA, 120 bp, Artificial Sequence
  ENSG00000250801_3 (sequence is synthesized)
ctcactctgaacttggagaccagaatcctacctgctggagcaaattgcatctcgagttttgagaatcagcacccttattaagcagagaatgactgaaagatcattgaggatcacatatca

SEQ ID NO: 842631 - DNA, 120 bp, Artificial Sequence
  ENSG00000250801_4 (sequence is synthesized)
aaggcactttatttgaaattttcaaagaatcaacagaaaatatttttatctactttaaatgaatgacagaaaagaacacagagacccatgaattcaatgaaaaagacatattattcatga

SEQ ID NO: 842632 - DNA, 120 bp, Artificial Sequence
  ENSG00000250801_5 (sequence is synthesized)
agaaaagtgatggcctcacctggccctacactgtctcgtgacatcaagctctcaccaaatgtgacccaccccttggatccctgattcattcacctggcaccctccacttttaaagcattc

SEQ ID NO: 842633 - DNA, 120 bp, Artificial Sequence
  ENSG00000250801_6 (sequence is synthesized)
tatcctaccactgccagactccaccttaagtcccaatctggtgtgatttccacatgactgaacaccattccagagagctcatctctagctggcacccctggttggcctcctctgttctaa

SEQ ID NO: 842634 - DNA, 120 bp, Artificial Sequence
  ENSG00000250801_7 (sequence is synthesized)
cattcctaagcatggaccactcatacctgcatgtttcacatttccctgagggctggcgtctcgtacctcctccaccaggtttttgagcaagagcttctttcacttcaaccccctctgggg

SEQ ID NO: 842635 - DNA, 120 bp, Artificial Sequence
  ENSG00000250801_8 (sequence is synthesized)
agagtctgtaagcaggcctatgggaacaaacagcatctttgtcctcaccctttacatccaagtacatctgaagatatcagttataaagagagtggatttctaaactttggaaattggaaa

SEQ ID NO: 842636 - DNA, 120 bp, Artificial Sequence
  ENSG00000250801_9 (sequence is synthesized)
tttccttagtccaataatcctttaggggcactatgggtcatcctggctgtatccccgtctcttcagattgcccactaacctagatcaatgggcctactaaagcagcttttgttctaataa

SEQ ID NO: 842637 - DNA, 87 bp, Artificial Sequence
  ENSG00000250801_10 (sequence is synthesized)
ctagtttactttctgcagaaagggtgccactcgctagcagtctcgccatgagagcacacaagtgtccacccttctgctgtgtccagt

SEQ ID NO: 842638 - DNA, 120 bp, Artificial Sequence
  ENSG00000250801_11 (sequence is synthesized)
acctagaaattctctcttaggagctgatcaaaatcaaactaagaaattttttacacatggttcagccagagaagcagaacaactggaagataattagaattatcagcctgtgccaccccc

SEQ ID NO: 842639 - DNA, 120 bp, Artificial Sequence
  ENSG00000250801_12 (sequence is synthesized)
agacctcctgacttcaggggaagacaacgagcggcccttcccatcccctctccaactcccctctccgctgagagctgttttcatcactcaataaaattctctgcccccaccgtccttcaa

SEQ ID NO: 842640 - DNA, 120 bp, Artificial Sequence
  ENSG00000250802_0 (sequence is synthesized)
aaacacagatcctggtgccgaacatgaggacagggcaggccgaaggagaaagtggaaggaggggagcttctctctcagcctcatccttctgggcctggatgctggagagtcatgaggtgc

SEQ ID NO: 842641 - DNA, 120 bp, Artificial Sequence
  ENSG00000250802_1 (sequence is synthesized)
ttcagagtactctgggtgaggagggaaagatggtgcccaccacatggaggccagcctaggtcttgtatgaaacctgtgagctctcatgaaccagtacaggcctgcttcagcatagcactg

SEQ ID NO: 842642 - DNA, 120 bp, Artificial Sequence
  ENSG00000250802_2 (sequence is synthesized)
agcagatgcaactctggagtgggggaagagggcgggaagagagcctgtgctgctgagcacctaccaggacttgtcagggcccaggcaccctatgaaacaccttatgttggttatcccaca

SEQ ID NO: 842643 - DNA, 120 bp, Artificial Sequence
  ENSG00000250802_3 (sequence is synthesized)
ccaagctcgcaaacctctgaggtaggcaactttgtcacagagagaggctgagtaacaagcccaaagtcaaacagccaagaagagacagaactgtattaaacttatctactggaccccaaa

SEQ ID NO: 842644 - DNA, 120 bp, Artificial Sequence
  ENSG00000250802_4 (sequence is synthesized)
cgtgtgttacagtgtgctcttttagccttaccatcagctgacggcttaagtgttaaccagctcaatagaccctctgcctttttgcaagcgcagagggtcagtgtgacagtttctgtatct

SEQ ID NO: 842645 - DNA, 120 bp, Artificial Sequence
  ENSG00000250802_5 (sequence is synthesized)
gtatgaaacctgtgagcgctctgatcagtggcagtccaagttcacacagccctggtctgcttgaagttgtttgcatacatcagtatttgggaaactaagttcggtccaagaacagaaaat

SEQ ID NO: 842646 - DNA, 120 bp, Artificial Sequence
  ENSG00000250802_6 (sequence is synthesized)
gtttcctggctacatggagggtaaagcaaacgtgaagttgcctcatacgagaagaatccagacatgagaaatctcagcctttggtccattattttgtaaatctgctcaaaagagcatgga

SEQ ID NO: 842647 - DNA, 120 bp, Artificial Sequence
  ENSG00000250802_7 (sequence is synthesized)
ttcacaagagaagtgtccaggaggagggtagtgtcagccccactgctctgtggggcagtaggaccacatctcaggcactgggtccaggtcttggcagtcaggatgtctccaggggctgtt

SEQ ID NO: 842648 - DNA, 120 bp, Artificial Sequence
  ENSG00000250802_8 (sequence is synthesized)
cctccagaggggagcaatggggacagaagaatctggaaactgggtcaaagaaggagcagttgaatgaacaacgtgtgttggcctgaagaagataagttgcagcggggacaagaagctgtt

SEQ ID NO: 842649 - DNA, 120 bp, Artificial Sequence
  ENSG00000250802_9 (sequence is synthesized)
ttcaaagttttcaaagatttgaagtgctgtcaggtggaagagcagtgaaaattgcgtggctccaaacggtaaatacaggaccaatgagtacgagtcatagggacggtgtccgctgaaaag

SEQ ID NO: 842650 - DNA, 120 bp, Artificial Sequence
  ENSG00000250802_10 (sequence is synthesized)
aaggaagcattttataatcattaaagatgttcaaagtaggtggtgatacttggttatataggaaatgtttgtatgaagactagatatatataaaaatgttggaggaagaatttttgagct

SEQ ID NO: 842651 - DNA, 120 bp, Artificial Sequence
  ENSG00000250802_11 (sequence is synthesized)
ttttttttttgtctcaccaagcaaatgaaactttttggagagagatgacctagcaaaagattttttctcttggtgatcaggaaaggcagtctttgcagaccgaaccactagagggagtca

SEQ ID NO: 842652 - DNA, 120 bp, Artificial Sequence
  ENSG00000250802_12 (sequence is synthesized)
gggcagcagcgttgcaaggccgccgtccattctcttcaccgaagcagcaactgatagccaggcctggctctcaggttctaagttcccctgatttcaatatcacccccatgaatctttctg

SEQ ID NO: 842653 - DNA, 120 bp, Artificial Sequence
  ENSG00000250802_13 (sequence is synthesized)
gaatgtttacatctgattaaattcttcaatgtctgagaggcctctgtgtgtagagaggcacaatcactgctatttgtagtctgcttacatctttattaattatttaataaacagtattct

SEQ ID NO: 842654 - DNA, 120 bp, Artificial Sequence
  ENSG00000250802_14 (sequence is synthesized)
ttctcctaaaaattcaaatactccctaaacgactaaaaatgaaaacttatgcatttaacaaatgtgacattttccaaatatctaaatattagtttataaactaattgattatcctaaata

SEQ ID NO: 842655 - DNA, 120 bp, Artificial Sequence
  ENSG00000250802_15 (sequence is synthesized)
gacatcaagcaagtcccagttacagaaagaacccactgcagggcgtccagtcacttgcccagtgaaaagactgtaatcagacaactttaataaagggagagcaggagagtggtgacgaat

SEQ ID NO: 842656 - DNA, 120 bp, Artificial Sequence
  ENSG00000250802_16 (sequence is synthesized)
ttccacattccgaacaagcttgtcgaaagaggagtgcagggaaggagcaagaatgaggcactggaagacggctgtaggcgcatgatgtcacaagttattggaagaaatccctccaaccta

SEQ ID NO: 842657 - DNA, 120 bp, Artificial Sequence
  ENSG00000250802_17 (sequence is synthesized)
ggttgggacagatgaaggcggcgcttattggtgttcaccaaaacaccagcatggtgtaccagctttggctagatgatgctcagaacaccagagactgggtaattaataaaaagaagaaat

SEQ ID NO: 842658 - DNA, 120 bp, Artificial Sequence
  ENSG00000250802_18 (sequence is synthesized)
ttgtatgaaacctgtgaggtatgaaggagtaatttttctttctaagccatttctctgcttatttctcagatcagtgccctttatgtttgaacttggtgtgaatgaccatcttagtgattc

SEQ ID NO: 842659 - DNA, 120 bp, Artificial Sequence
  ENSG00000250802_19 (sequence is synthesized)
ttactgcaatgacaatagggagttaaatgacataagtttctttttcatgggaaaggatataaaaatgtatctgcatgtggtcagtgtagaatattcccagccagaggtgcagttttctgg

SEQ ID NO: 842660 - DNA, 120 bp, Artificial Sequence
  ENSG00000250802_20 (sequence is synthesized)
cagaatagagaagcatcctctttgcccttttcacaggggtggggatgaggttaggggtggggttataccttctttgctcacccagctgcttctatatatcttagcctggatatgcctaaa

SEQ ID NO: 842661 - DNA, 120 bp, Artificial Sequence
  ENSG00000250802_21 (sequence is synthesized)
cttaagccaaaacaaaaactcatagacaggtagtttatttgcaaaatgatactagggatcaggagtaaggaatgagagtaaagcaggggaggaagaaaagccactgcaagcatgcactgt

SEQ ID NO: 842662 - DNA, 120 bp, Artificial Sequence
  ENSG00000250802_22 (sequence is synthesized)
caacagaggaaggaccaacaagcacatgaaaggtctcagtgttactagtcaccagaattcaaatgaaaaccaccacgagatacctactagatgcctattagaatggctacattaaaaaga

SEQ ID NO: 842663 - DNA, 120 bp, Artificial Sequence
  ENSG00000250802_23 (sequence is synthesized)
ctgcagcaacaaatgttggtgagggtgtggaacagtcagagctctcatcaattgttggtaggggtgtaaattggtacaactttggaaaggtctggcactttcttaaaaaactaaacacac

SEQ ID NO: 842664 - DNA, 120 bp, Artificial Sequence
  ENSG00000250802_24 (sequence is synthesized)
acacactttctatgacccagcaatttcattcctagatatttgcccagcagaaatgaaaatatctgtatataaacagacttgtttaagaatgttcatggcctggcgtggtggctcacgcct

SEQ ID NO: 842665 - DNA, 120 bp, Artificial Sequence
  ENSG00000250802_25 (sequence is synthesized)
tgtggctgcagggagctttggcagtactccaccagttttcttcactccaggctgaaaggtcaacttttctgggccatgctccctgctgggctggtaaaccaactttgagggagaaggggg

SEQ ID NO: 842666 - DNA, 120 bp, Artificial Sequence
  ENSG00000250802_26 (sequence is synthesized)
aagtccagatatgtagtgtttgctatttctatgatgtaaatgctcccacaatggccgatttcaagctacaaacagtccaacaagtggcttgccaagttcctggaaatttaacaattagct

SEQ ID NO: 842667 - DNA, 120 bp, Artificial Sequence
  ENSG00000250802_27 (sequence is synthesized)
ttctcacagtcgcgacagccggcccggagaagggcagcccagcgaagggcacgccccgcgcgggtgccagggaggccggcaggggcgtccgcggtcgctgctcacctgcgctccccgctg

SEQ ID NO: 842668 - DNA, 120 bp, Artificial Sequence
  ENSG00000250802_28 (sequence is synthesized)
cccggcccagcccgcctcgccaccgagtctggaagcccacactcacccctttacccgggaaacgcggccggagccggcggcgggtcgggagtccgagatggtagatccccctccaggcgc

SEQ ID NO: 842669 - DNA, 120 bp, Artificial Sequence
  ENSG00000250802_29 (sequence is synthesized)
ctcgctgacattttgtcccggacggaaaacctccgcgcgtgccccttaaagacacagcgctgcattcacacgtctgcggggaaaggggggccgtcacgtgtggccttcgcccgaaagcgg

SEQ ID NO: 842670 - DNA, 120 bp, Artificial Sequence
  ENSG00000250802_30 (sequence is synthesized)
taggggagtcgctctgaaaccgccaaggatcgcgagcgacagatttgtgttggccagggttttaagatgacgcaatagctgagtgtggttgaaatgtaactattgttttacaactttgca

SEQ ID NO: 842671 - DNA, 120 bp, Artificial Sequence
  ENSG00000250802_31 (sequence is synthesized)
gactaccaatgtgtgagtaaacccattctcaagcccaagagaacctctcagctgaaccaggcccaagttgctcacccactgaactgccagttaaataaatggtggttgttttaatccact

SEQ ID NO: 842672 - DNA, 120 bp, Artificial Sequence
  ENSG00000250802_32 (sequence is synthesized)
aaatgctgggatggtttgttatacagcagtaggtatcaatacagtgtacttgtcaatctaggaattcctgtcttgtcaaatctgagaaaattctcggtcactgtcacttcaaatattact

SEQ ID NO: 842673 - DNA, 120 bp, Artificial Sequence
  ENSG00000250802_33 (sequence is synthesized)
tctttcccattttctattcactcattccaaaactcctagtggatgtcttttctgtcatttctggttctgtcttttgtgatcttaaactttcattcattgtttttccatttttacttccgt

SEQ ID NO: 842674 - DNA, 120 bp, Artificial Sequence
  ENSG00000250802_34 (sequence is synthesized)
gttacattttgagtcatttccttagttccagtttgcttattttctattcaaccattaaatatttctatttagttttaagtttcagtggctataagtttcatttataaaagaactatttgg

SEQ ID NO: 842675 - DNA, 120 bp, Artificial Sequence
  ENSG00000250802_35 (sequence is synthesized)
ttattttctaaatctgcattttgttttcacatgtttttctgttttttaatttgtattttcctttgcccttgtaaatcatttaaaatgtacttattttataatcatctgtggcttgatctg

SEQ ID NO: 842676 - DNA, 120 bp, Artificial Sequence
  ENSG00000250802_36 (sequence is synthesized)
tttctttacttcttgggcattactttttctgttaatttcatgatctgaccctcaaggtggtttcctcctatggtttgtaatttttattatgagcttattttcagcagggatttctcccct

SEQ ID NO: 842677 - DNA, 120 bp, Artificial Sequence
  ENSG00000250802_37 (sequence is synthesized)
ctggtgaagatctgtatgccttgggtaatgtgattgtcacttcactatgcctgcaagtttgcttctgatggcatcctaccgatatcaccaactctcaaccagctctaatgtttcttggta

SEQ ID NO: 842678 - DNA, 120 bp, Artificial Sequence
  ENSG00000250802_38 (sequence is synthesized)
tttctgcccacagtgaaaattcagagctcacttcaatgcatggcatgggcttggcttcaagtttttctgtatgacctttttttaaatttatttttatttttttaaacctatagcccaagg

SEQ ID NO: 842679 - DNA, 120 bp, Artificial Sequence
  ENSG00000250802_39 (sequence is synthesized)
actcacaccagagacaatattttattggcctgcaagggtgttaaaatcccaagggtgttaaaatccccagatctccagggcctatcattggtccaaaccctgcagaggctacagtgacat

SEQ ID NO: 842680 - DNA, 120 bp, Artificial Sequence
  ENSG00000250802_40 (sequence is synthesized)
tagcccctacttactgcccagcctctgagctccctctttgtttctagaatctggggatttccctttctctctgtctagagattgttgtgctggacccctattgactccaataggaatggc

SEQ ID NO: 842681 - DNA, 120 bp, Artificial Sequence
  ENSG00000250802_41 (sequence is synthesized)
accaggttcaagaggccaaagaagagacctggagccagcaaatgagacataagatttgatttgggggaacttatgtacagggatggactagtggcagtgggctggataagagaaccacaa

SEQ ID NO: 842682 - DNA, 120 bp, Artificial Sequence
  ENSG00000250802_42 (sequence is synthesized)
ctgctttccaaaagcctgcagtttatacagcaccttcactcagcaccctctctccagcaacatccacatggcaacccccatttcctaggctaagttattgctgtcagatgtgtttgccat

SEQ ID NO: 842683 - DNA, 120 bp, Artificial Sequence
  ENSG00000250802_43 (sequence is synthesized)
acaggctgctgtacagagtatgcttaagttattgctgtcaggtacatccaccgtatatatacatacacatgtacgtatatatacacatacatgtatgtgtgtgtgtacatatttgtactc

SEQ ID NO: 842684 - DNA, 120 bp, Artificial Sequence
  ENSG00000250802_44 (sequence is synthesized)
atatacatgtgtatatatagatatataaaaaaattttctctgtgtttccctgtaacagtaactgaagagggaattcttctatataatctcagtccactatattgctagaagttctcttct

SEQ ID NO: 842685 - DNA, 120 bp, Artificial Sequence
  ENSG00000250802_45 (sequence is synthesized)
ctatacttttgagatatgaattttacctttcaatattctaaaattataacaaagctataaattttgggaattggtatatgtttgtttttagaaaaattgttagaaacataatagcaatgg

SEQ ID NO: 842686 - DNA, 120 bp, Artificial Sequence
  ENSG00000250802_46 (sequence is synthesized)
gatgctttaacatgctaccttgaacctttaccaaatcaagagagtaaaaattaagcacaaaagagggatctaatactataaacaaggtagatttaatacatatgtatcaaacatagtaac

SEQ ID NO: 842687 - DNA, 120 bp, Artificial Sequence
  ENSG00000250802_47 (sequence is synthesized)
ctagaagcaatgaatatacattttctggtgctcatttaacattaacgaccttcaagaaggctttaaacagcaacagatagagttgagttgctttggcctattgctaaaggcatctaaccc

SEQ ID NO: 842688 - DNA, 120 bp, Artificial Sequence
  ENSG00000250802_48 (sequence is synthesized)
acctgctttgtgggaggtcatctgctttgaatctcaactgtatccaagtcagatttaaactctatggggcattggaattgtcctctgaatcatctccaactctgcaggatacataatagc

SEQ ID NO: 842689 - DNA, 120 bp, Artificial Sequence
  ENSG00000250802_49 (sequence is synthesized)
accactttgttgttctggaatttaaagacagggtcttattcaactttggctatttttgtgcagtccatggatccttgaaacaggacattctactttaccaatatctgactcatagaagac

SEQ ID NO: 842690 - DNA, 120 bp, Artificial Sequence
  ENSG00000250802_50 (sequence is synthesized)
ctatctatatacctaccaggtggctactacccagtaactcctaccgccaataccatgacatttgttttgaaaaccttagcttattgcaatattgcttataattatgaaaccttagaaaca

SEQ ID NO: 842691 - DNA, 120 bp, Artificial Sequence
  ENSG00000250802_51 (sequence is synthesized)
actgaaatgcctatcaaagagagaatttataaataaaatgtaacatattcacgttctattttgatatgaattaccataatattctattaggatatgaattgttataatggccattagaag

SEQ ID NO: 842692 - DNA, 120 bp, Artificial Sequence
  ENSG00000250802_52 (sequence is synthesized)
gaatggattgttcccatatataacataatatatccatgtataaagtatctatataataccaacacgtaacataatgtaaagaaaagagattcatggaataaaatgtgcatgtcattgata

SEQ ID NO: 842693 - DNA, 120 bp, Artificial Sequence
  ENSG00000250802_53 (sequence is synthesized)
taaattttaaaaacacagaaataatacattatattaagactatatatgtatgtaaaattattaccagtggactgatttggatatacactaaattcatgctacttgcttctggaggttgca

SEQ ID NO: 842694 - DNA, 120 bp, Artificial Sequence
  ENSG00000250802_54 (sequence is synthesized)
gtaaagaactggaactgtgtctggggatgtcacttttatctgttttatttagttcattttttataaacaatccttgaggcaaatatgagctgttaataaatgccaattagtctttttgca

SEQ ID NO: 842695 - DNA, 120 bp, Artificial Sequence
  ENSG00000250802_55 (sequence is synthesized)
agatgatgctcagaacaccagagactgggtaattaataaaaagaagaaattgatctggcctacagttctggagccttggaagtccgagatcaaggagctgcatctgggttctaggatgcc

SEQ ID NO: 842696 - DNA, 120 bp, Artificial Sequence
  ENSG00000250802_56 (sequence is synthesized)
tcataaaggcccgtagtgtactttctgtctacttcacttagctccgcatttgcaatttctgttaacatgcatacagttgaatggatggccaggatcaaagctatctgctgtgagacacaa

SEQ ID NO: 842697 - DNA, 120 bp, Artificial Sequence
  ENSG00000250802_57 (sequence is synthesized)
aggtcttgtatgaaacctgtgaggagattctctctcccttgctgtctttgaaaaagcaagttgccatgtgaagagggccatatagcataggagctgaaggcagcctccaactgacggcaa

SEQ ID NO: 842698 - DNA, 120 bp, Artificial Sequence
  ENSG00000250802_58 (sequence is synthesized)
gaaaatgaggtcctcagtctgacaacctgcaagaaactgaatgttctaaaagccacatgagcttgggagcagatctgaccccagccaaatctctgaagtccgcaggcaggaaatgaagat

SEQ ID NO: 842699 - DNA, 120 bp, Artificial Sequence
  ENSG00000250802_59 (sequence is synthesized)
cagaaaaaggctattgtctcatgaatatgagccagactccacagaagctggagtccttcattatggagctaaacacatacacctggcttaggagtcagaaaaactgaaagagaattcagg

SEQ ID NO: 842700 - DNA, 120 bp, Artificial Sequence
  ENSG00000250802_60 (sequence is synthesized)
gaagtagagaaattgcaagcccagatgctgcttcataccaaagaagcaagtcagcaggtcagcaacaatgtgtatcagttccaaaatgacttacacaggtaccaagacaagacattatat

SEQ ID NO: 842701 - DNA, 120 bp, Artificial Sequence
  ENSG00000250802_61 (sequence is synthesized)
catcttggaagcagagaccagctctcaccagacgctgaatctgctggctccctgatcttggacttcccagggtccagaactctgagaaataaatttctattgtttataatgtactcagtc

SEQ ID NO: 842702 - DNA, 120 bp, Artificial Sequence
  ENSG00000250802_62 (sequence is synthesized)
tgtggtattttgttatagcagcaggaatggactgagagaaaagcagctagttgaggatttgagaatttgggtgtttttttggtttttggttttggtttgagtgaatctttttgcaaaaca

SEQ ID NO: 842703 - DNA, 120 bp, Artificial Sequence
  ENSG00000250802_63 (sequence is synthesized)
ttttagacattttatgtacaataaaatgcttccattttaaatatgcatttgagtaggctttagaaatgtatacaaccatgtaaacaccttaatcaagacacagaatgttttcataaccct

SEQ ID NO: 842704 - DNA, 120 bp, Artificial Sequence
  ENSG00000250802_64 (sequence is synthesized)
caaaagttcccttgtatccagttgcagtaaatctccccttctccccacccccaggtgactcctaatctgctttctatcagtttagaaaagtttgcattttctagaattttgtatagaggg

SEQ ID NO: 842705 - DNA, 120 bp, Artificial Sequence
  ENSG00000250802_65 (sequence is synthesized)
aatgagtcagactttcatgtatcataatgcttttgagattcacccatattgttgcatgtatcagtggattcttccttttccttgctaagtttcattctgttatatagatatactgcaatt

SEQ ID NO: 842706 - DNA, 120 bp, Artificial Sequence
  ENSG00000250802_66 (sequence is synthesized)
gaaaacaatacacattcagtagaattcatacttcaagtacccatacaaccattctgtttttcactttcagtacattgcttaataaattatgtgagatattcaacactttattataaaata

SEQ ID NO: 842707 - DNA, 120 bp, Artificial Sequence
  ENSG00000250802_67 (sequence is synthesized)
ggcttgtgttagatgattttgcctcgccataagctaatttaaatgttctgagcacatttaatgtaggttaaggtaagctatgatgtctggtaggttaggtatagtaaatgcacttttgat

SEQ ID NO: 842708 - DNA, 120 bp, Artificial Sequence
  ENSG00000250802_68 (sequence is synthesized)
ttatgatattttcaacttacgatggctttattgggacataactccattgtaagtaagccaaggagcatctgtatattaaaaagctgctatgaacatctgtatacaagtctttttgtaaat

SEQ ID NO: 842709 - DNA, 120 bp, Artificial Sequence
  ENSG00000250802_69 (sequence is synthesized)
gcatgttctgatttctttcagataaatacctggagtgggattgctagatcacatggtaaatatgtatttaaatttatgagaaactgccaaagtattttccaaagtaatagtaacatttta

SEQ ID NO: 842710 - DNA, 120 bp, Artificial Sequence
  ENSG00000250802_70 (sequence is synthesized)
cactcctaccaggactgtctgagagttccaggtgctccacatccttactgacacttagtattgcctgtctctttaattttggttgttctagtgggtgtgaaatggtatcttggtttagtt

SEQ ID NO: 842711 - DNA, 120 bp, Artificial Sequence
  ENSG00000250802_71 (sequence is synthesized)
ttaatgtgcattttcctaatgcctaatggaattttccttcacctaatggctaatgaggttggggtctttccatgtgcttattagtcattcatatacctcctttagcaaagggtcttttca

SEQ ID NO: 842712 - DNA, 120 bp, Artificial Sequence
  ENSG00000250802_72 (sequence is synthesized)
attatcttgcttatatttaattggtctgccttcacagttgagttgtattagttctttatatattcaacgtacaagtcctttgttagatatatgtttgcaaatatttttttcccattctgt

SEQ ID NO: 842713 - DNA, 120 bp, Artificial Sequence
  ENSG00000250802_73 (sequence is synthesized)
ggtttctctttcatcttcctaatggtgtttttcaatgagcaaaaattaattttataaaagcttagtttaccaattatgtttttaatagtttgttggtcttatgctctattcaataaatat

SEQ ID NO: 842714 - DNA, 85 bp, Artificial Sequence
  ENSG00000250802_74 (sequence is synthesized)
gaacaccagagactggataaatacctggagtgggattgctagatcacatgctaaatcctactcatccttcgagactctgttcaga

SEQ ID NO: 842715 - DNA, 120 bp, Artificial Sequence
  ENSG00000250802_75 (sequence is synthesized)
acatgctaaatcctactcatccttcgagactctgttcagattgttcatctcctgtaaatcttttgcacccattcctacttactgattacttccatttaaaaaaaaattaaattatatgtt

SEQ ID NO: 842716 - DNA, 120 bp, Artificial Sequence
  ENSG00000250802_76 (sequence is synthesized)
gtttaatgtaatatgttaaaatagtataatttcaacatgctatcaatataaaaatgatacttcacatttttctgtaccaaatatttgaaacccagcacgtattttatatttacaatgaat

SEQ ID NO: 842717 - DNA, 120 bp, Artificial Sequence
  ENSG00000250802_77 (sequence is synthesized)
cataattggaagtaggctcatttccagtgcttagtggctagtggctactgtactggacagcacaggtttacaatctaaccttcagtgtgatactcaccttaaaatgtacaaaaagaggta

SEQ ID NO: 842718 - DNA, 120 bp, Artificial Sequence
  ENSG00000250802_78 (sequence is synthesized)
cataatagttgatccaaaattaaataatgctgtgttaaaatgggaagtgaaagacaaaatatcgtagcatttggacattatctgattaccaagagacattttactgtgattgaagagtgg

SEQ ID NO: 842719 - DNA, 120 bp, Artificial Sequence
  ENSG00000250802_79 (sequence is synthesized)
ctaagcaaatctttttgacatcatttttacaaacacattgcagactggttttctctttccattatctcgttgaaagtctgtctgggcacctagttattttgttctatttctccacttaac

SEQ ID NO: 842720 - DNA, 120 bp, Artificial Sequence
  ENSG00000250802_80 (sequence is synthesized)
agttgttgttcattctgacctatctcaaaataataagagctatttgtgacaaacctacagccaatatgatactgaacgggcaaaaactggaagcattctctttgaaaacaagacaaggat

SEQ ID NO: 842721 - DNA, 87 bp, Artificial Sequence
  ENSG00000250802_81 (sequence is synthesized)
caaaaactggaagcattctctttgaaaacaagacaaggatgccctctctcactacttctattcaacatagtcttggaagttctggct

SEQ ID NO: 842722 - DNA, 89 bp, Artificial Sequence
  ENSG00000250802_82 (sequence is synthesized)
taatagacaaacagagagccaaatcatgactgccctcccattcacgattgcttcaaaaggatgtgacggacttcttcaaggagaactac

SEQ ID NO: 842723 - DNA, 90 bp, Artificial Sequence
  ENSG00000250802_83 (sequence is synthesized)
ggaaaactggctagccttatgtagaaaggtgaaactggatcccttccttacactgtatacaaaagttaactcaagatggattaacgactt

SEQ ID NO: 842724 - DNA, 60 bp, Artificial Sequence
  ENSG00000250802_84 (sequence is synthesized)
aagatggattaacgacttgtaggcatgggcaaagacttcatgactacaacaccaaaagca

SEQ ID NO: 842725 - DNA, 73 bp, Artificial Sequence
  ENSG00000250802_85 (sequence is synthesized)
gcaaaagaaactatcattagagtgaacaagcaacctacagaatgggaaacaatttttgcaatctacccatctg

SEQ ID NO: 842726 - DNA, 69 bp, Artificial Sequence
  ENSG00000250802_86 (sequence is synthesized)
ggaaacaatttttgcaatctacccatctggaaaaacaaagaaacccatcaaaaaatgggcaaaggatat

SEQ ID NO: 842727 - DNA, 90 bp, Artificial Sequence
  ENSG00000250802_87 (sequence is synthesized)
agacacatgaaaaaacgctcatcatcatggtcatcagataaatgcaaatcaaaaccatagtgagataccatcacaccagttagaatggcg

SEQ ID NO: 842728 - DNA, 64 bp, Artificial Sequence
  ENSG00000250802_88 (sequence is synthesized)
acaccagggcctgttgtgagttgatgggtgcagcatatcaacatggcacatgtatacctatgta

SEQ ID NO: 842729 - DNA, 120 bp, Artificial Sequence
  ENSG00000250802_89 (sequence is synthesized)
acaaacctgcacgttgtgcacatgtacgctagaaccgaaagtatattaaaaaaaaagatttaaacattttaaaatctataatagacgagaggaaagttaaaaaaataaaatccaattgaa

SEQ ID NO: 842730 - DNA, 120 bp, Artificial Sequence
  ENSG00000250802_90 (sequence is synthesized)
attaaattctagaagattaatgttgccagttatattttgatgacaacaataaacataatgcaattttgttaacttattgctttaaaatgcaagttgataaccaacaatggtaccatttta

SEQ ID NO: 842731 - DNA, 120 bp, Artificial Sequence
  ENSG00000250802_91 (sequence is synthesized)
gcacaggtaactaactacttgtgtttgagtttcccaagagataacctgaattgcaataatgaagaggcacataactcattaatgttttttagtctcttaaataacattaaaattgtctca

SEQ ID NO: 842732 - DNA, 120 bp, Artificial Sequence
  ENSG00000250802_92 (sequence is synthesized)
gagtctctagtatatttaacaattatataaagaaaaaaaaagagttgttcatcctgccattcagtaaatacctgctgacaccttattggccaaatgtgccagatgcagggatgtgaaata

SEQ ID NO: 842733 - DNA, 120 bp, Artificial Sequence
  ENSG00000250802_93 (sequence is synthesized)
taccccatgtctgctttcacaaagcttccaaagtagtgataaagagaaagagagtgaaagacatgggaaaacatatctttgtgttttatttgatgattatcattctgtgtctattatttg

SEQ ID NO: 842734 - DNA, 120 bp, Artificial Sequence
  ENSG00000250802_94 (sequence is synthesized)
tttgaatattagtttacccccatttctttaactggagtgagaggaatggactatatcttcttattctttttatcttcttgggacctaggagaatgccttaataaatacgtgtggaatcca

SEQ ID NO: 842735 - DNA, 120 bp, Artificial Sequence
  ENSG00000250802_95 (sequence is synthesized)
tatcatttccaatgacctcctggggaactttgtgcttcttgtctctacaactctgggctctatgagattagaggttttggtcctcaaatgaggtgcagcttggcaggagacacagcaagt

SEQ ID NO: 842736 - DNA, 120 bp, Artificial Sequence
  ENSG00000250802_96 (sequence is synthesized)
gtcccattgaactatatactatggctgccaccagggcattttggactctttctatgaagagaccagcaggtgaaaagaagaaatcattgacttccatcagcagaaagaggccagcaggag

SEQ ID NO: 842737 - DNA, 120 bp, Artificial Sequence
  ENSG00000250802_97 (sequence is synthesized)
gctgctgtgtggagtattctcttatctgctcatattacactgtgcttattcattcatcagttaatggaaatttgggttgtttcctgattttgactgtaatgaataatgttgctgtaaaca

SEQ ID NO: 842738 - DNA, 120 bp, Artificial Sequence
  ENSG00000250802_98 (sequence is synthesized)
ttcatgtacagttttgtgtggacatgcttttctttctcttgggtaggttcctatgagtggaatcactagattgtatggtaaatgtatgtttaacttttaaagaaactgtcaaactgtttt

SEQ ID NO: 842739 - DNA, 120 bp, Artificial Sequence
  ENSG00000250802_99 (sequence is synthesized)
gagccagcctcactggttccagagcgatactcagagctgttctcagataccagactggaataaacgagagacatctggagaaaggagacctcttcctatcccaacaggactgtgtttcac

SEQ ID NO: 842740 - DNA, 120 bp, Artificial Sequence
  ENSG00000250802_100 (sequence is synthesized)
aatgaaacaggagagttccctgatttcctcccggcccccgccctcccacagccctttgcaggacgtgcaacagggttgtggctcgtgtgttcggtctctgcctgctgaaaccccttatgg

SEQ ID NO: 842741 - DNA, 120 bp, Artificial Sequence
  ENSG00000250802_101 (sequence is synthesized)
gaggtggagcatgcagacggacgggtgcaggagccagggtgcaaaagctggggcgctgggcttccagccccacggcagtgtccaggggcaggatcccgtgattcccggagcccaaatggg

SEQ ID NO: 842742 - DNA, 120 bp, Artificial Sequence
  ENSG00000250802_102 (sequence is synthesized)
ctgggggatggcagagccagcagagagagggtatggatccaccaggcataggatggaacagagcactattgaccacagtgaactggggcatgggcaatcaataaacacatattagattaa

SEQ ID NO: 842743 - DNA, 120 bp, Artificial Sequence
  ENSG00000250802_103 (sequence is synthesized)
ataatatatatatacttctaaaatcacaaatatcctatatctaagtcttttaaatgctacaaatgccttaaaagcagaaacacacaaatgaatcatcacaatgatacatatacaaagtga

SEQ ID NO: 842744 - DNA, 120 bp, Artificial Sequence
  ENSG00000250802_104 (sequence is synthesized)
tgaaatatagctaaaaagatttccaagcaaagtgttgaaggtaccacctggtttcttcttggtgcttatagtaaaatgcaagaggagagtgataaatcgagggaagaactgttaaacaaa

SEQ ID NO: 842745 - DNA, 120 bp, Artificial Sequence
  ENSG00000250802_105 (sequence is synthesized)
aaggaatcaaagatgattctgaaaattctcagtctctccagatggcaaaagatgttaaaattaagaaatcacttttgagcttgtggcatagagataagtcctggcctagagaaaaagcta

SEQ ID NO: 842746 - DNA, 120 bp, Artificial Sequence
  ENSG00000250802_106 (sequence is synthesized)
agtagtgattgtacaagcttttgttaaaatctcaggaagattaagggatcagagtagtattcagtcatacaaagggccctctccagagattaatggtgtatctcacagaacctctcaaat

SEQ ID NO: 842747 - DNA, 120 bp, Artificial Sequence
  ENSG00000250802_107 (sequence is synthesized)
aataggaccttttggaagcttaattgagttatctttcaaccatctcagcaggaactcaaggtagaagggggcctagctcaaaaagaaccttggatgtggcctttatgtaaagggaaattt

SEQ ID NO: 842748 - DNA, 120 bp, Artificial Sequence
  ENSG00000250802_108 (sequence is synthesized)
actggagacccacaaagtatttaagaaaagtatttcagcaaaaacactgccaacttaaactgaaagggacggaaagagtacaaaatgaaaggaggctgttagatctccaaaattctactg

SEQ ID NO: 842749 - DNA, 120 bp, Artificial Sequence
  ENSG00000250802_109 (sequence is synthesized)
gcaggaagcagaatgataaaactactcagctgcaaacatgtgctacttttcatgaaaaaaggaaagatgactcagagggtggaaccaagagctatggtgaattattcccagcccttgaaa

SEQ ID NO: 842750 - DNA, 120 bp, Artificial Sequence
  ENSG00000250802_110 (sequence is synthesized)
ctctttttaactagaaatgtctataactattttactatattcattccttcattgtgcattaggagcaagacgatttgtctttagttttatagattgagaggaactacgctcaaggagcct

SEQ ID NO: 842751 - DNA, 120 bp, Artificial Sequence
  ENSG00000250802_111 (sequence is synthesized)
catgcatacctggacctgatttaaatgatgagatgctggacttcaagcagatgctgtaatgatatgaggttctcagggaccttgggaaatagtaaatgtattttgtgtgtgagagggaca

SEQ ID NO: 842752 - DNA, 120 bp, Artificial Sequence
  ENSG00000250802_112 (sequence is synthesized)
caaatcattggaggccaaaagggtgaactgaggacagatgctagggtagctcccacaatccccacctcctggtttcacccttgtgggatctcgccatgagtgtggatggaacctgtgatt

SEQ ID NO: 842753 - DNA, 120 bp, Artificial Sequence
  ENSG00000250802_113 (sequence is synthesized)
tgcttctaactagtagaatttggcaaaaaatgatgagatatatgtgattatgtttacatgattatattatataagattctgagtacattgagctgcatagagagagcacgggggcaagtg

SEQ ID NO: 842754 - DNA, 120 bp, Artificial Sequence
  ENSG00000250802_114 (sequence is synthesized)
agagccaggtgggtactggaaagctctgtgcctcactgaggaaaaataactaaacatgggcaaaagagatccatggaacctgagaggcaaggtgttattatatgcattctttggcaaact

SEQ ID NO: 842755 - DNA, 120 bp, Artificial Sequence
  ENSG00000250802_115 (sequence is synthesized)
tgtcaggaggcgcataagaagaagcacccagatggttcagtcaacttctcagttttctaggaagtgctcagagaggtgcaagaccatgtctgctaaagagaaagggaaatttgaagacat

SEQ ID NO: 842756 - DNA, 120 bp, Artificial Sequence
  ENSG00000250802_116 (sequence is synthesized)
ggcaaaggcgaacaaggctcgttatgaaagacagatgaaaacctatatccctcctaaagatcccctttaggacgaaaaagtagttcaaggatcccaatgcacccaagaggcattctttgg

SEQ ID NO: 842757 - DNA, 120 bp, Artificial Sequence
  ENSG00000250802_117 (sequence is synthesized)
ctgttttcttgttctgttctgagtattgcccgaaaatcaaaggagaacatcctggcctatccattggtgagttgtaaagaaattggaagagatgtggaagggcactgcctcagatgataa

SEQ ID NO: 842758 - DNA, 120 bp, Artificial Sequence
  ENSG00000250802_118 (sequence is synthesized)
gcagccttatgaaaagaaggctgtgaagctgaaggaaaaatatgaaaaggatattgcctcatactgagctaaaggaaagcctgatgcagcaaaaaagggagttgtcacggctaaaaaaag

SEQ ID NO: 842759 - DNA, 120 bp, Artificial Sequence
  ENSG00000250802_119 (sequence is synthesized)
caaaaaaaggaagaagaggaagatgaagatgatgatgatgatgataatgagtaagttggttctagcacagttttttttcttgtctagaaagcatttaaaccccctgtttacaactccttt

SEQ ID NO: 842760 - DNA, 120 bp, Artificial Sequence
  ENSG00000250802_120 (sequence is synthesized)
taaagaaagacattgagatgtaaggctgtgtaacatttgtttttaaactgcacagtgtcttttttgtatagttaacacactactgaatgtggctttagatagccctgtcctggtgtattt

SEQ ID NO: 842761 - DNA, 120 bp, Artificial Sequence
  ENSG00000250802_121 (sequence is synthesized)
tcaatgggcactaaccttgcctgatacagtatgggggttgtaaactggcaaggaaatttaaagcaggttcttcttagtgcacagcacaaattagttatacatggggatggtagatttttt

SEQ ID NO: 842762 - DNA, 120 bp, Artificial Sequence
  ENSG00000250802_122 (sequence is synthesized)
attttcacttgtctctgatgcagcttatatgaaataattgttgttttgttaactgaataccactctgtaattgcaaaaaaaaaagtggcagctgttttgttgacattctgaattctgaat

SEQ ID NO: 842763 - DNA, 120 bp, Artificial Sequence
  ENSG00000250802_123 (sequence is synthesized)
aatgacttacacagctagctgaaagcagagaacccagcagaggattctgggaaggtcctgggggatggcagagccagcagagagagggtatggatccaccaggcataggatggaacagag

SEQ ID NO: 842764 - DNA, 120 bp, Artificial Sequence
  ENSG00000250802_124 (sequence is synthesized)
ctcagggctcccactgattctacattacggaggatctcatttctgtaccctgccctggaagttggcaaaaaataaatacctggagtgggattgctagatcacatggaaaacacagatcct

SEQ ID NO: 842765 - DNA, 120 bp, Artificial Sequence
  ENSG00000224356_0 (sequence is synthesized)
agtaagaccaggtgccaatccccgaggtgtgtttctgctgctcttatacaccgaggcagacccatcagcttttgagtgttaattacctcttcctgctgttgtcatctgtacttgggagta

SEQ ID NO: 842766 - DNA, 120 bp, Artificial Sequence
  ENSG00000224356_1 (sequence is synthesized)
cgaggcagaaataagctatcatcttctgcagaagacaattactgaactgattttccagagttggaattaaccttctgtggcctaatcaccttcatttctacttgaatccccggaatagtg

SEQ ID NO: 842767 - DNA, 120 bp, Artificial Sequence
  ENSG00000224356_2 (sequence is synthesized)
aaaacaatgaccattgcgtgctgagtacctgctctgtcctggcatcttacaactctgttccaaagtctgtgctgcttccataggactgttctcacttctttccattttgcaagttctcag

SEQ ID NO: 842768 - DNA, 120 bp, Artificial Sequence
  ENSG00000224356_3 (sequence is synthesized)
cctggcggcagtctccctgcccgagtggatggtgccaccacctcttactgaaggagcggtttctgagggagagtgcctgtgctgtgcagctgtctcccgcgaggcgccctttgacaagtg

SEQ ID NO: 842769 - DNA, 120 bp, Artificial Sequence
  ENSG00000224356_4 (sequence is synthesized)
tgtcttctgtctcccctcaatgacactgtggcttcatggagtctcattgcatgcccagcacttagcacagggcatccctgcatggctgcgttgttccctgcatggctgcatttaggcttt

SEQ ID NO: 842770 - DNA, 120 bp, Artificial Sequence
  ENSG00000224356_5 (sequence is synthesized)
ccttttcctgcaagtgctgcctcgtctttcctttctctcgtctcagcagcaggaagagcaagttctttctctgcctccccgctgcctggctccttcagctatcaccagccatcccctcta

SEQ ID NO: 842771 - DNA, 120 bp, Artificial Sequence
  ENSG00000224356_6 (sequence is synthesized)
cccagccctcactctggtgccacaattgctactttcctggcttcttcacggggacctgacatacccttgagtctcctgtacctgaagaaaacctccttgccatccttctaagcaagcagt

SEQ ID NO: 842772 - DNA, 120 bp, Artificial Sequence
  ENSG00000224356_7 (sequence is synthesized)
ttctgtcttgtcgcttcctttctggctcacatcaagtctctcagaggaaggggctagggctggcggtgcagcaagggagaagacagggaggacaggccctgtgtccagcttcctcctaat

SEQ ID NO: 842773 - DNA, 120 bp, Artificial Sequence
  ENSG00000224356_8 (sequence is synthesized)
gctactcaaacgacccacaaggacagtggaggaaagcgggcgacacgcttctggaagacggaaaacagaagtgagtgacagcagacttaacctagagacacccaaaacttaagctcctgc

SEQ ID NO: 842774 - DNA, 120 bp, Artificial Sequence
  ENSG00000224356_9 (sequence is synthesized)
ccaagacacggaaaggctgggagtgtgcacaaggtgcagggagaccccactgcttcccctcacacctggcagaggatggcgggttcctttctggagagcctgacaagaacacctccgctg

SEQ ID NO: 842775 - DNA, 120 bp, Artificial Sequence
  ENSG00000224356_10 (sequence is synthesized)
gggacacaggcctagctgagtggtggtgaggtggcaccctgaaaacaagcattgggggaaagtgcagagctcccagcgccgctccccagagtcccgtgtgaggcctgccacctgacagct

SEQ ID NO: 842776 - DNA, 120 bp, Artificial Sequence
  ENSG00000224356_11 (sequence is synthesized)
cagcctcacttccaaagagtggctcagctttcccagccaagatcacatgtgaagaaaatctcttgaaacacagataccaaaacagagagaaaagagggagttaggagaaatggaggcaat

SEQ ID NO: 842777 - DNA, 120 bp, Artificial Sequence
  ENSG00000224356_12 (sequence is synthesized)
gaagggaatgaagaaaacttaaaaaatatatatatattgagcctgtgaatgaacaagaagttgaaaaaaaaaacacacaacaagaaaaatatattggaaataaatatcatggcaaaaaaa

SEQ ID NO: 842778 - DNA, 120 bp, Artificial Sequence
  ENSG00000224356_13 (sequence is synthesized)
tttttaatagaagaaatgcaagataaagcagaatataatatagacctggaggaaaggagaaaatataaaaacattggaggctgaagtcaggacctccactgccggaatattgggagagcc

SEQ ID NO: 842779 - DNA, 120 bp, Artificial Sequence
  ENSG00000224356_14 (sequence is synthesized)
agaaagagaacagagaggaaggaggggtaagaaaatgcccccgtgatccaggataaggagcattcagatcaaaattccagcacaatcaatgaaaacagagtctacatcatcagaaaattc

SEQ ID NO: 842780 - DNA, 120 bp, Artificial Sequence
  ENSG00000224356_15 (sequence is synthesized)
tagaatctgagggataaaaggaagcccttaagagcctccagggaagagctcgagtcacacacacaggggacctggatcacagcacactgacttctctgcaagaactcggaaagttagaag

SEQ ID NO: 842781 - DNA, 120 bp, Artificial Sequence
  ENSG00000224356_16 (sequence is synthesized)
acaatgaagaaatgtctttaaagttctgagggaaatgatttctagaatcctctacgcagccatgttattaaccaaaagtgggagagaatacacttcagcaaaatgtggccaacatcccag

SEQ ID NO: 842782 - DNA, 120 bp, Artificial Sequence
  ENSG00000224356_17 (sequence is synthesized)
ccagaggacgggacaggaatgagggtggcctggatggcagcgacacagagagcccagactagagctggcagggaggaccttccagcggatggtcaggacccgggttctggccatgctctc

SEQ ID NO: 842783 - DNA, 120 bp, Artificial Sequence
  ENSG00000224356_18 (sequence is synthesized)
agaaactgcgaggctgaattacaatcctagaaactaagcgaaatgcaaaacaaacaaaaaaaacaaacttgaagcaatttttaatttcaaggaaaacataaagttgtccaagaaaggaaa

SEQ ID NO: 842784 - DNA, 120 bp, Artificial Sequence
  ENSG00000224356_19 (sequence is synthesized)
cagatggcttcactggtaaattctaccaaacatttacagaattcacaccagtcctcctgaaactcttctaaagaatgaagaagaaggaacatttcagtgttgagcatcaccctgatacta

SEQ ID NO: 842785 - DNA, 120 bp, Artificial Sequence
  ENSG00000224356_20 (sequence is synthesized)
aggccaaagacactccaagaaagaaaactacagactaatattcttgatgaagatcgatgccaaaatcctaaacaacacactagcaaacagaattcaacaacacattaaaaggattatatg

SEQ ID NO: 842786 - DNA, 120 bp, Artificial Sequence
  ENSG00000224356_21 (sequence is synthesized)
caatggccaagtgggatttattcctggaatgcaaggatgtttcaatataagaaaatcaatcaatgtaatacactacattaacagaatgaaggaaaaaacacacaatcacttcaattgata

SEQ ID NO: 842787 - DNA, 120 bp, Artificial Sequence
  ENSG00000224356_22 (sequence is synthesized)
aattacctcaacatcataaaggcagtatatgaaaagcccacagctaacatgatactcagtgatgccagaatgaaagcttttcttctgagatcaggaacaagaaaaggatgctgctttcat

SEQ ID NO: 842788 - DNA, 120 bp, Artificial Sequence
  ENSG00000224356_23 (sequence is synthesized)
aggacaccagcaggctggtgtggaagtgtagtgcagccatgcttgaagaggggacaggacccaaggaaaggtgacagtaagaggacagaaacacgaaatattcgcagccctctttagaac

SEQ ID NO: 842789 - DNA, 120 bp, Artificial Sequence
  ENSG00000224356_24 (sequence is synthesized)
atcctccatctaggcaaactctattaggaattttaagagttctcaattaaacatgactgcccagtgtcctgctgaacaggaattcattcttcagttgaagctctattgtcagtaaaacta

SEQ ID NO: 842790 - DNA, 120 bp, Artificial Sequence
  ENSG00000224356_25 (sequence is synthesized)
ctcaggataaggcagccgtgtttaggccgtgaggacctgcccctggactgcggagcttgctccgtaaaaggcatcgtgatacccccttaaatggatttacagaaaagacttagctattgg

SEQ ID NO: 842791 - DNA, 120 bp, Artificial Sequence
  ENSG00000224356_26 (sequence is synthesized)
ccagaggcagtgtgctgttggaactgagaggactgaaaactggatatttggtccccatggactttctggtcaccctgtgaagtggacttaactttttcttgaatcatgtggaaggattct

SEQ ID NO: 842792 - DNA, 120 bp, Artificial Sequence
  ENSG00000273209_0 (sequence is synthesized)
attcgctcagggacgaaaacgcgcagaaagggaatttgcttcaaagatttgttcctcttcctggtgcactcagatgcgcattcctgagcaggggcgccttcgccagcggcgtttgagggg

SEQ ID NO: 842793 - DNA, 120 bp, Artificial Sequence
  ENSG00000273209_1 (sequence is synthesized)
agcgaggaccgcgcagcgccccttcggggagagacgtgaccaggagtcgcgttaggactgcaaaggctggctctggcggggctttcgggtcgccgggtcctcaatgtggggtttgggacg

SEQ ID NO: 842794 - DNA, 120 bp, Artificial Sequence
  ENSG00000273209_2 (sequence is synthesized)
ggacgagaagggggtgcgccttgcggatcgcctctttccccccggacccaaagagtccacgcgaggccacagtcccctctcccctcccccgagttataaaaaggaggaggggccgcctcc

SEQ ID NO: 842795 - DNA, 120 bp, Artificial Sequence
  ENSG00000273209_3 (sequence is synthesized)
aggacccctcggaggaagggcccgaagcagggagagcggggaacccgggctcaggccaccccgcccgcgcgcacggcctggagtctggggaactggggtgactctagcgaggttttaagg

SEQ ID NO: 842796 - DNA, 120 bp, Artificial Sequence
  ENSG00000273209_4 (sequence is synthesized)
aaacgaagacggcgttggggagactggttctagaagtaacctgagaccgagcgcccaggaacactctgtacgacgcgccgggcgtctcagtggccccgtgtgccttggttctgcggcgtg

SEQ ID NO: 842797 - DNA, 120 bp, Artificial Sequence
  ENSG00000273209_5 (sequence is synthesized)
tgccctttcgggatcccatcttcgttgcagaagcaaccatttgatcctccatttagaatctgcgtaggaatgttttaatgcgtcttagaaaccaggctaattaaagagttttcaaaacac

SEQ ID NO: 842798 - DNA, 120 bp, Artificial Sequence
  ENSG00000261529_0 (sequence is synthesized)
tttttgtatcagttatccaatatgacttatagaacttatcaagggagtgatgctctgttgtatgtacccatgtttctgctatttccattattttttccaagattccatcttttattactt

SEQ ID NO: 842799 - DNA, 120 bp, Artificial Sequence
  ENSG00000261529_1 (sequence is synthesized)
ccattagccagtcttcaaaggcagttctgctagtgagaaattctttttgtttttctctttctgaagatgactttattttccctttattcccaaagaatagttttatttgtgctatttggg

SEQ ID NO: 842800 - DNA, 120 bp, Artificial Sequence
  ENSG00000261529_2 (sequence is synthesized)
gttcgctcagcttcttgaagctgtaagtttgtgtcttttgccaaacatggaaaattttcaaccattatttcttcaggtgttctttcagcgtcactcttttctccattctaggcctctaat

SEQ ID NO: 842801 - DNA, 120 bp, Artificial Sequence
  ENSG00000261529_3 (sequence is synthesized)
gatacaaatgttgagtcatttgttactgttccacatggacctgaggcatggttcatttttcagtctattttctctcttttgttcagatttctctcctttgtcatcttcactctactgttg

SEQ ID NO: 842802 - DNA, 120 bp, Artificial Sequence
  ENSG00000261529_4 (sequence is synthesized)
agcccatctaatgattatttttctcctattgtattttttaggtctataatttccatttgcttttttttccttgtatcttgtttccttgctgagattttctattgtttcgtttttgaaaca

SEQ ID NO: 842803 - DNA, 120 bp, Artificial Sequence
  ENSG00000261529_5 (sequence is synthesized)
gtagaacttgtaattgcttgtcaaatcatttctctgatggcagcattaagatccttgccagataatttcagcatcttactcatcccagtgttggcgttttctttccttcatgtaattttc

SEQ ID NO: 842804 - DNA, 120 bp, Artificial Sequence
  ENSG00000261529_6 (sequence is synthesized)
cattttagttattatatcaggagactctgtactttttaaaaattttaacttcagtagtaacctgttaaggtatagcatgtaggtactagcatatatttgtgagctgtggttccagtgacc

SEQ ID NO: 842805 - DNA, 120 bp, Artificial Sequence
  ENSG00000261529_7 (sequence is synthesized)
atttttcagaggctttatggtgctgttttggtttgttgcttttatctcagtccactggggctcgcactggttcctagtagtgctgcttgaggggccttctccaggctgagctgcgcagag

SEQ ID NO: 842806 - DNA, 120 bp, Artificial Sequence
  ENSG00000261529_8 (sequence is synthesized)
tgtgtttgggtgagggaagaggacccccactagattttcgtgggctggagagtgcttcctgagccttgtgcctgttgtggcaggctcccccttgctggtgttcctggcagtgctcctgac

SEQ ID NO: 842807 - DNA, 120 bp, Artificial Sequence
  ENSG00000261529_9 (sequence is synthesized)
cacattgtgtccctgggctgtggaacacttgcaggaaaggtgaacactgccaggaccaattatagcagaattcctcctgccagtacacagcagcactgtggctctggaccagcaaggaga

SEQ ID NO: 842808 - DNA, 120 bp, Artificial Sequence
  ENSG00000261529_10 (sequence is synthesized)
gtctcaagcatgggtttgtttctttttgattttaagatttttcttctgccttcaggttctggtattattgttctgttttattcacctttatgtttcttctagtttagttttagtttcttt

SEQ ID NO: 842809 - DNA, 120 bp, Artificial Sequence
  ENSG00000261529_11 (sequence is synthesized)
gtatttgatgggatttttttccttgcatttctaattactccttagttgtgtcatgtcttcctttttttcagttaccctcattcagaaatttcccatttctaatgatttgttattttttaa

SEQ ID NO: 842810 - DNA, 120 bp, Artificial Sequence
  ENSG00000261529_12 (sequence is synthesized)
attctttttagctcagtttgaaatttgtttacagttttcatgttttatttgcatattgtttcatgtactttgattttctgtagggacaccattctcatgtatatgcacatactttttctc

SEQ ID NO: 842811 - DNA, 120 bp, Artificial Sequence
  ENSG00000273204_0 (sequence is synthesized)
acctccgaaagccaatcctttcctccatttcttctccaaggtaacaacttttaaacattcacgtgacggaccaccttccctcagccaaacaacttccctgaaaggcgcccgaaggagcct

SEQ ID NO: 842812 - DNA, 120 bp, Artificial Sequence
  ENSG00000273204_1 (sequence is synthesized)
tcccaccgaggggccagcttctgcctgcacgttgctgaaactggcctggaggttctgacaagaattagagcggcggccgttgccccggggatgacctggaagcgaaagagaccggcacga

SEQ ID NO: 842813 - DNA, 120 bp, Artificial Sequence
  ENSG00000273204_2 (sequence is synthesized)
attctagagtttcggggtttccgcgggttgagattgtacgggaaacaatgcattaaccaaacctaaaaatcaaacaaacacgtctggtagaacctaccattaaaaagcttctttcctata

SEQ ID NO: 842814 - DNA, 120 bp, Artificial Sequence
  ENSG00000261523_0 (sequence is synthesized)
aaatttctacacaacaatgttcttgtctcaagtccaagaatgcctcctacacctcccataatactggctttctggctggagtgcagtggcgtggtcactgttgactgcagcctcaaattc

SEQ ID NO: 842815 - DNA, 120 bp, Artificial Sequence
  ENSG00000261523_1 (sequence is synthesized)
actgttgactgcagcctcaaattcctgggctcaagaaatcctcccgtctcagcctcccaaaaccaaagattggatcttctgagaacatcagagaaagaatgtccttgccatccacaatac

SEQ ID NO: 842816 - DNA, 120 bp, Artificial Sequence
  ENSG00000261523_2 (sequence is synthesized)
aagatcacagatcaagacttctagtttttttttttgagacagagtcatttttttttttttttttgagacatagtctcggtcttgttgctcaggttggagtggaatagcgcgatcttggct

SEQ ID NO: 842817 - DNA, 120 bp, Artificial Sequence
  ENSG00000261520_0 (sequence is synthesized)
acttgctcttttttcctcccattttagcagccaaggatgggaattacacagcgaaatgcaggctaatcagctaaatctagattaaatatgctagtccttggggaccttgagctgaattaa

SEQ ID NO: 842818 - DNA, 120 bp, Artificial Sequence
  ENSG00000261520_1 (sequence is synthesized)
tggaaaccgaggtttttaatgttccagactaattttggaagctcacttccagcagaggcaaacttgaggctgtccaaagggagcagatggcaaggctttctccaggtgcaccaacctttg

SEQ ID NO: 842819 - DNA, 120 bp, Artificial Sequence
  ENSG00000261520_2 (sequence is synthesized)
gtataccattctggaacagagaaaagactgcctgcagcaatatctctaaaaactacctgtggcagactcagtggatggtcaagtttggctctgaaacaagtctcctcatttgtcagagaa

SEQ ID NO: 842820 - DNA, 120 bp, Artificial Sequence
  ENSG00000261520_3 (sequence is synthesized)
aggacagagaagatccagtttatgtgattaattcaatgatattagtagagatcatagatacaatgatcaaaataagaacattgctttttgcaaaatcagattaaactgcactccaaaaca

SEQ ID NO: 842821 - DNA, 120 bp, Artificial Sequence
  ENSG00000261520_4 (sequence is synthesized)
tgatcttaccttcccaattatgaagtaagcaacgatgacctcttaaactcgtgaatctaacagtggttgggcatagataattgctgtgaaatacttgatgactgattagctttgataaag

SEQ ID NO: 842822 - DNA, 120 bp, Artificial Sequence
  ENSG00000261520_5 (sequence is synthesized)
aattctgagataatttttatgctgttgttactaatcccaccctcagcattctttcaaaaatgagattatttgtctttttcttcatggccttggtggaaatataaatttctttttaaccct

SEQ ID NO: 842823 - DNA, 120 bp, Artificial Sequence
  ENSG00000261520_6 (sequence is synthesized)
aaacagccctcggcaaaaccatgaggaaggaatgctcttcccttagagatcctcgtggtgaattccctcatttccttcaagtctgctcaaatgttacttctcaaacagagcaagaagatc

SEQ ID NO: 842824 - DNA, 120 bp, Artificial Sequence
  ENSG00000261520_7 (sequence is synthesized)
ttaggtcacaggataccatgttcttgagactgtatgtccttactaagtttcattttcattcagatatgtacaagaccatttggtatttgtaaagaggttatgtttatctgtgttttcctg

SEQ ID NO: 842825 - DNA, 120 bp, Artificial Sequence
  ENSG00000261520_8 (sequence is synthesized)
aatatagaatgaatatctttatgacaaaaaactttagctcagaagaatctttatcgcatttaaaataattaacaactatagtgcataatgtataattcaagggttttctgtagcccattt

SEQ ID NO: 842826 - DNA, 120 bp, Artificial Sequence
  ENSG00000261520_9 (sequence is synthesized)
cccatctaccctgtccctgtccccatactccttcctcacctccacccaacctccaccagagataattaagcttttaagaatgagattgatcacttaaaagtaatatatttttactttatt

SEQ ID NO: 842827 - DNA, 120 bp, Artificial Sequence
  ENSG00000261520_10 (sequence is synthesized)
tctttaatccatgtttagactttcctacctgccaaaactttgtatcttttaaacttggtattctacttctttctcccatctcaaactatacgtaaatcagtgtgttagaaattccagtga

SEQ ID NO: 842828 - DNA, 120 bp, Artificial Sequence
  ENSG00000261520_11 (sequence is synthesized)
cacttgtgattccagaatctatcttggtatgattcaacaccttttatcagctgcttctaaacaactttcaccaccatattgcctcctcattcttccgaaaatacactattttctagtcag

SEQ ID NO: 842829 - DNA, 120 bp, Artificial Sequence
  ENSG00000261520_12 (sequence is synthesized)
gccaaactatacattctttccagagctgaccacacttgttatgttatattcccagctaaatgccttctgtaacatttactacttatccttctggatacaaccccaatgtcaccacctcct

SEQ ID NO: 842830 - DNA, 120 bp, Artificial Sequence
  ENSG00000261520_13 (sequence is synthesized)
tgagagcacccctgattccacagggttgagagtcagggtggcctgggaagaccacacatgtcctctgccatcattcagaggtgggtataagtgaaatgggagagttccctggtccccctc

SEQ ID NO: 842831 - DNA, 120 bp, Artificial Sequence
  ENSG00000261520_14 (sequence is synthesized)
acaggatgtgtgacaggggtatggctctcttcttggctgctatgagctcaaagcccttacaagaggtggagcatgcagatgagcaggtgcaggaaccagagcgagagcttttggggtccc

SEQ ID NO: 842832 - DNA, 120 bp, Artificial Sequence
  ENSG00000261520_15 (sequence is synthesized)
gccccacagcagtgtctaggggtgagtttctgtgattcccaaaacccaagtgggcacatgttacagtgtgctcttctagtgttgctgtccaagtgttaactagcttagtggaccctctgc

SEQ ID NO: 842833 - DNA, 120 bp, Artificial Sequence
  ENSG00000261520_16 (sequence is synthesized)
ctttttgcaagggcagagggccaatgtgacagctttctgtattctgagctcttatccagcatccaggaagaatcaggtgacacagggacttgaaggatgaatgtgggggttttattgagt

SEQ ID NO: 842834 - DNA, 120 bp, Artificial Sequence
  ENSG00000261520_17 (sequence is synthesized)
ggtggaggtggaactcagcaggatagatgggaaactggacaggggatggagtgggaagatcatcttcccctggagcttggccatccactggctgattctctgaccatccccagctgaact

SEQ ID NO: 842835 - DNA, 120 bp, Artificial Sequence
  ENSG00000261520_18 (sequence is synthesized)
cctcctaacagtccttctcttctttcctctgctgcattgttctgccatccagtttgctaatctccttgtttcctgtctcctcatctgctcctggagcctggggttcggagtttatacggg

SEQ ID NO: 842836 - DNA, 120 bp, Artificial Sequence
  ENSG00000261520_19 (sequence is synthesized)
tacaggacagggtgtgtgtcaggtcaaaaggcagctttttgggcatgaaaacaggaatgcccgtcctgtatccaggctagagggtggggcttttgctggggaactgccctcttctaccca

SEQ ID NO: 842837 - DNA, 120 bp, Artificial Sequence
  ENSG00000261520_20 (sequence is synthesized)
gtatttccctgtctcctttctgcatcataaagatgtgtggtacccagttggtgcagacgcgaaattcatctgtttctttatgttttctccctttgctctaaaagggtccatatttgcctg

SEQ ID NO: 842838 - DNA, 120 bp, Artificial Sequence
  ENSG00000261520_21 (sequence is synthesized)
cattctagtgctcaccacaccacattggggtatttggttatgtgtctggtttcttcagtagcctaatggtgttccctgtgcaagattcttagatgggcctcaataaaatggttgagttgc

SEQ ID NO: 842839 - DNA, 120 bp, Artificial Sequence
  ENSG00000224359_0 (sequence is synthesized)
tctacacacctagctctcaacattcctctctaaaatatatgactctgtttactagtgtaaggatcaaaaggatcacatgtggcttccatgaaaagaaaggtatcttaaaattgttgtgca

SEQ ID NO: 842840 - DNA, 120 bp, Artificial Sequence
  ENSG00000224359_1 (sequence is synthesized)
atgctagccacgtatgaagaactccaagccaaacgctattccttcggttgtatttttccttgaatctaaaggacaaaaatagggcctcacagtttgagagaatcattcactttgtctagc

SEQ ID NO: 842841 - DNA, 120 bp, Artificial Sequence
  ENSG00000264734_0 (sequence is synthesized)
aacttgctgccccagccctccccttctaaggaactcccacacctgccctgtcttcctgctacagtctctgagaaaagccctttcatctgtcaagaactacaaaagtcattctttaagcct

SEQ ID NO: 842842 - DNA, 120 bp, Artificial Sequence
  ENSG00000264734_1 (sequence is synthesized)
gtgagcagaaccagaagggacactctcacagcctgttcaccacggaatccaggaggcaggtcaattttggtggctgtctccacaacatggctttttccccttgaagaccatcaggagaag

SEQ ID NO: 842843 - DNA, 120 bp, Artificial Sequence
  ENSG00000264734_2 (sequence is synthesized)
agcctgtatctccgcatctgtggaaatcgtctttgccatgtaatgtgccataaccacgggagtgacatcgcatcacatcccagggccaccgctaaggaggagggtgaggatcttgaccct

SEQ ID NO: 842844 - DNA, 120 bp, Artificial Sequence
  ENSG00000264734_3 (sequence is synthesized)
catcttagaattctgccctgcctggcttccacttgtcctcttctaaatctgtcttaactcattcctttggtgcctgtttttgctgcctaaattttggcaataaagggaggaataaaaaca

SEQ ID NO: 842845 - DNA, 120 bp, Artificial Sequence
  ENSG00000264734_4 (sequence is synthesized)
tgaggaggtgtcatgcaacttgctgccccagccctccccttctaaggaactcccacacctgccctgtcttcctgctacagtctctgagaaaagccctttcatctgtcaagaactacaaaa

SEQ ID NO: 842846 - DNA, 120 bp, Artificial Sequence
  ENSG00000264734_5 (sequence is synthesized)
actcaaatcttcaatcaacagtggagatggctgtgagctcttctgattccagatgacaatactcctgcctttaattccttgatatgtttaattatgtaagtaaatttaatataaaaatca

SEQ ID NO: 842847 - DNA, 120 bp, Artificial Sequence
  ENSG00000264735_0 (sequence is synthesized)
ggcggtgaacagaaccctcaccccgtcctgtctcggggtgcctctcctgaagcacagagtcccctctgggccttcgtttccccagctttcctgccgcggggcacacagagtctaggctca

SEQ ID NO: 842848 - DNA, 120 bp, Artificial Sequence
  ENSG00000264735_1 (sequence is synthesized)
gtcagaagccccggcgccacctgaatgggagcctggggaaccctgtatggtcctccctgaacaggacagtggggatggggcagggccagggaagcagagaagggcacaccctgtgaggga

SEQ ID NO: 842849 - DNA, 120 bp, Artificial Sequence
  ENSG00000264735_2 (sequence is synthesized)
caccacacgcaaccatgcagcctgggatgggcactgtggtgctctcgtcgccaggcccccatgtctgccctcgcagtcaaccttggtccctgggggatcgcctgcaatcccacgacgcct

SEQ ID NO: 842850 - DNA, 120 bp, Artificial Sequence
  ENSG00000264735_3 (sequence is synthesized)
cgttttacagacgaggaacctgagacgcaactgcaggccccgcagcagccggtacttggctgtcctaacccatccgctctggtgcagacaaagtggatatctgtctaacatgcaaaagga

SEQ ID NO: 842851 - DNA, 120 bp, Artificial Sequence
  ENSG00000264735_4 (sequence is synthesized)
gggttctgaaacaccctacctgccaggaaggtttctagagaggagccggcccactccaccccaagctggccactccgctcacggggcctcaggcctcatccccgccacctggtgccctgt

SEQ ID NO: 842852 - DNA, 120 bp, Artificial Sequence
  ENSG00000264735_5 (sequence is synthesized)
gcccagcctgatcgttgttggtcttacccactgattcttttagatggaagcgggatcttgctgtgctgcccaggctggtctcgaacccctgggctcaagcaatccttcttccaggacttc

SEQ ID NO: 842853 - DNA, 70 bp, Artificial Sequence
  ENSG00000264735_6 (sequence is synthesized)
aagcaatccttcttccagaactaactactttaaaatatcagggtgggtgccatggctcatgcctgtaatc

SEQ ID NO: 842854 - DNA, 120 bp, Artificial Sequence
  ENSG00000264739_0 (sequence is synthesized)
aaagcctttcagggtctgtctatattttcagtctgattcagctctgaaggcatcgaatactacctttgtgtgcctcagggcctctgggggcttcacgaagggagggaggcccctagcctg

SEQ ID NO: 842855 - DNA, 120 bp, Artificial Sequence
  ENSG00000264739_1 (sequence is synthesized)
tggcccaggctctctccaccacgctgcctcaggccctaggctggcctaggaagctcagcaaacagcacaatctcaccctcacaggaaaactgaaaccacagcctccatcacttggcaagg

SEQ ID NO: 842856 - DNA, 120 bp, Artificial Sequence
  ENSG00000264739_2 (sequence is synthesized)
gtggggcctcggtcagggttggggaaccctcatgggcccagtgagcaggatcagaaagaagaaggagtcaaagagtggtaaggagacagaagggtggagaagggggcagggggcaggggg

SEQ ID NO: 842857 - DNA, 120 bp, Artificial Sequence
  ENSG00000264739_3 (sequence is synthesized)
cagagagcagagaggagcggcaccagcagagggaagtggagagggtaggctgggaccaggccctggggacccgggtggggtattttcccatggaaacatgggaggtggggagctgcctgg

SEQ ID NO: 842858 - DNA, 120 bp, Artificial Sequence
  ENSG00000264739_4 (sequence is synthesized)
ctgcctcagtttgcagatgtgacccaccaccctttctacacacactggggcagaagggtgctctttccgtttcataccgtttagcccatctgtgtccccaaccaaaccctggcccattcc

SEQ ID NO: 842859 - DNA, 120 bp, Artificial Sequence
  ENSG00000264739_5 (sequence is synthesized)
tccagccctagactcccaagccccagcagcaacagttgtctgtccagcccccaccccacctcctgggaccctcacccaccctggcagcagaggaaggggtgtggaggtccagggagaggg

SEQ ID NO: 842860 - DNA, 120 bp, Artificial Sequence
  ENSG00000264739_6 (sequence is synthesized)
tgctggagccccacacagaccctggctccaggctgtagaagccaggagcccactaggccttccccaccccatcattcactgtcaggcttggagacccggccccctccaacgtccccagca

SEQ ID NO: 842861 - DNA, 120 bp, Artificial Sequence
  ENSG00000264739_7 (sequence is synthesized)
ttgcccaccgacttaccccgcaggctgaggccagggcgtggcggctgctgggatcccggagcttctcagtagcaggggctgcgggaggaagtgaagccgggaggggctgccggcgctgac

SEQ ID NO: 842862 - DNA, 120 bp, Artificial Sequence
  ENSG00000264739_8 (sequence is synthesized)
agcagaggagcggcggaacctccctccccagctctgagcactaagctccagcaagcaggttctggtctctcggtcaccctcagcccacctggccagccggcacggtggagaacgggagct

SEQ ID NO: 842863 - DNA, 120 bp, Artificial Sequence
  ENSG00000264739_9 (sequence is synthesized)
tcccctgtcaggacaggctagccaccagagactgaccatctggacacaccctgctgcgaatcaggctccacccccacccctcccccttctagccactaaggtctcaggtgggggtgggtg

SEQ ID NO: 842864 - DNA, 120 bp, Artificial Sequence
  ENSG00000264739_10 (sequence is synthesized)
acactcagaggcagcccttggatgctggggacttgccacccatggaagctgccatggatgggggattcttccccaagtccactgacagctatctcctccccttctccaccacatgccttc

SEQ ID NO: 842865 - DNA, 120 bp, Artificial Sequence
  ENSG00000264739_11 (sequence is synthesized)
caagcagccgtgtggcccataaatgggcctgagttgacccatggcaggggagaaagctgatgtggacagcccccagggagaggctcagcccagcagatgcccctgggaacacagtcccac

SEQ ID NO: 842866 - DNA, 120 bp, Artificial Sequence
  ENSG00000264739_12 (sequence is synthesized)
ccacccatccacccagcagttgggggactttcccacctcccaggaccttctcccagcctcctgaccccaggactctgatggctaaagttcccctaaaggtgctccaagcaccagccagca

SEQ ID NO: 842867 - DNA, 120 bp, Artificial Sequence
  ENSG00000264739_13 (sequence is synthesized)
ggtggagacaaggaggtgggcacgcactgctaaaatcagacctcaccaccaacggggccctggtctggactcagtcttggagcttggggacccaaccaccaccgaagtagccctaggaat

SEQ ID NO: 842868 - DNA, 120 bp, Artificial Sequence
  ENSG00000264739_14 (sequence is synthesized)
ctctctccctcactcccaaaacctggcatcagctcttcctccaaaatttgtctttctgagtggtccaagccactatcactgctcccctgggcaactgcagccacctccaaactggtctcc

SEQ ID NO: 842869 - DNA, 120 bp, Artificial Sequence
  ENSG00000264739_15 (sequence is synthesized)
ccacctccaaactggtctccctgcttcattcttgccccacactcataatccatttctccttatagcaactgaagtgaccttttaaaaatgggaaccagggccgggcgcagtggctcacac

SEQ ID NO: 842870 - DNA, 120 bp, Artificial Sequence
  ENSG00000267278_0 (sequence is synthesized)
cccggggctgggcttcgtgtcctgcgttccgggagcgccaacccctccagcagaggggacgtggctggtggctggagaagctggatttgccctttgatggtggccctcttgatccccggc

SEQ ID NO: 842871 - DNA, 120 bp, Artificial Sequence
  ENSG00000267278_1 (sequence is synthesized)
ttgctgaagtcaaaggagaggctgtcgatgctgaggcacgagagaatttgctcctgctcctccagagaaaatggctgggacaggctgttgaggaataattctgcagggaaaagtggaaga

SEQ ID NO: 842872 - DNA, 120 bp, Artificial Sequence
  ENSG00000267278_2 (sequence is synthesized)
aaagactgggaggaggctggctgtgttttcaggggttcttcctgcacagtcggtagaagctgagctgctggggaaggggctggaagaaagcccacaccgcaggtaaagagaaacaccggc

SEQ ID NO: 842873 - DNA, 120 bp, Artificial Sequence
  ENSG00000267278_3 (sequence is synthesized)
ctccgcgggtggcccagggccagtgctcagggccccactgcagccacggctgcccgtacctatttccagctgctgcagttcctgctccgggacggttgctttccgctctggtgagctggg

SEQ ID NO: 842874 - DNA, 120 bp, Artificial Sequence
  ENSG00000267278_4 (sequence is synthesized)
ggccgggctagtagggctggatcaggcggaagccggggcccggggctgggcttcgtgtcctgcgttccgggagcgccaacccctccagaggggacgtggctggtggctggagaagctgga

SEQ ID NO: 842875 - DNA, 120 bp, Artificial Sequence
  ENSG00000267278_5 (sequence is synthesized)
tcaagagctcccaggcaaagtggcatcctggacccaccatctctcctaccccatcctcagtcggtacttccccaggcaccgtttgttctggcatggggctagttcagccctgggaccacc

SEQ ID NO: 842876 - DNA, 120 bp, Artificial Sequence
  ENSG00000267278_6 (sequence is synthesized)
ctcatccttataactaccagctgtctttggtgaggtgcaagatctctctggttttctttatttcattttcattcctataatcacagccttttttgtgcccatccctcaggtgacattcta

SEQ ID NO: 842877 - DNA, 120 bp, Artificial Sequence
  ENSG00000267278_7 (sequence is synthesized)
ttatgtttgatgtgtcatttttgatttggttgtgtccttgcaaaatgtgcgttgttttatttatcaatttatttttatttttatttttttaaagagatgaggtctcatcatgttgcccag

SEQ ID NO: 842878 - DNA, 120 bp, Artificial Sequence
  ENSG00000267278_8 (sequence is synthesized)
ctcctgggctcaagcgatccttccacctcaatcttctgagtggctgggactacagatgtgcgccaccatacctggctattgatcaatttttagtttaccaaacaggcattatgttctggg

SEQ ID NO: 842879 - DNA, 120 bp, Artificial Sequence
  ENSG00000267278_9 (sequence is synthesized)
ttatgttctgggtcccattctgtgtcgggttctcttttcactcggcaccatggctttaggatccatccatgctgctctgtgaacgccgagttgctttaactgcttggtgctccatgaggc

SEQ ID NO: 842880 - DNA, 120 bp, Artificial Sequence
  ENSG00000267278_10 (sequence is synthesized)
gggaccccatcgtaccctactcccctcccacaaaggaagctgtagtgcgcgtcctcaggcgtgtccccatatggatctgctggcattcgtttgtcagtgcacccaggggtagaagtcctt

SEQ ID NO: 842881 - DNA, 120 bp, Artificial Sequence
  ENSG00000267278_11 (sequence is synthesized)
ggtctcagtctgcagacgtctgcctgagtgcagccaggtgcccccccagagtgggtagccttgtccacatgcccatcagcagcacctgaggggtcccaacagccctacatcccaccaact

SEQ ID NO: 842882 - DNA, 120 bp, Artificial Sequence
  ENSG00000267278_12 (sequence is synthesized)
caccaactttctgcttttttccagtcaaatggctcttgagtgttacctggctttatttatttatttattttttgagtcgggtctctgttgcgcaggctggagtgcagtggtgcaatcatg

SEQ ID NO: 842883 - DNA, 82 bp, Artificial Sequence
  ENSG00000267278_13 (sequence is synthesized)
caatcatggctcactgcagcctcgaccttccaggctcaaacaatcctctcacctcctgagtagctaggactacactgcagag

SEQ ID NO: 842884 - DNA, 62 bp, Artificial Sequence
  ENSG00000267278_14 (sequence is synthesized)
gtctttattttgtattcttggattcctagtgagtttgagccccctctatacatcataaccct

SEQ ID NO: 842885 - DNA, 120 bp, Artificial Sequence
  ENSG00000267278_15 (sequence is synthesized)
ttcctagtgagtttgagccccctctatacatcataacccttatgatactagtaaacatatattttatctttaaccccatttctggcacagaactcctaaaagccttactctccaaaatga

SEQ ID NO: 842886 - DNA, 120 bp, Artificial Sequence
  ENSG00000267278_16 (sequence is synthesized)
tctctttctgtgtactaatggattgactgaaggctggcagcccctaggtagcttcaagatgggggctggtcatcagagagacataggcaggattagagggttgggactttcatcccacca

SEQ ID NO: 842887 - DNA, 120 bp, Artificial Sequence
  ENSG00000267278_17 (sequence is synthesized)
tcccacgtactgggagggaagggggctaaaggttaagcggttcgccaatggccagtgatttattcaatcatgcctacgtaatgaagcctacacaaaaacccaagaagaccgggttcagag

SEQ ID NO: 842888 - DNA, 120 bp, Artificial Sequence
  ENSG00000267278_18 (sequence is synthesized)
aacttctggtagctgggcacatggaggttcctggagggtgccaagccctggaagctctgtgctccctcccacatgccttgccctatgcatctcttcatttgtatcctttgtaatatcctt

SEQ ID NO: 842889 - DNA, 120 bp, Artificial Sequence
  ENSG00000267278_19 (sequence is synthesized)
gagcacatgggtgtgcaccgcgcaggggctgaggctgggagccgtagtcaggggcaccgggtgggctttggcggcgggtcgacctgcctttcaggtgccgggggtttgggagcaggggaa

SEQ ID NO: 842890 - DNA, 120 bp, Artificial Sequence
  ENSG00000267278_20 (sequence is synthesized)
cgggccctgggcggattcctgaccgcccccttcgcgcccctccccctctcactttcgctttccccgcctgccccaaccctcgcccccgggcgctcggccgctcccacctgtcacccccat

SEQ ID NO: 842891 - DNA, 120 bp, Artificial Sequence
  ENSG00000267278_21 (sequence is synthesized)
gcagaccgaggctctgtcctggaggcggggagcgggctggtggatgctgcctctccgcctccagtgtgctctttggctgagggactggtgggcgctggaaatattagaggcgccggtgcc

SEQ ID NO: 842892 - DNA, 120 bp, Artificial Sequence
  ENSG00000267278_22 (sequence is synthesized)
tgtgatgtcgccgcctctgtgacgtccccgccgcgaccccacaggcagggagccgcatttaggtttcgggcgggcggacgggggacggcccgagtgaggcgtcctccgaaggctgcgggc

SEQ ID NO: 842893 - DNA, 120 bp, Artificial Sequence
  ENSG00000267278_23 (sequence is synthesized)
ccgaagccagaactccttcctctccgaagacctcgggggtggggctcgcgcttccgcagcgggcctagagcgagaggcaggcggcaggtaagcctggctgtgctggacaggacttgcacc

SEQ ID NO: 842894 - DNA, 120 bp, Artificial Sequence
  ENSG00000267278_24 (sequence is synthesized)
cgctctgcacgccagcggctcagggctgccgcccttttcgtggtcccagggcccttccaagaaccggctaaaccaacccaagccgcgcgcacacacacttgtgcacacagggagtgtgga

SEQ ID NO: 842895 - DNA, 120 bp, Artificial Sequence
  ENSG00000267278_25 (sequence is synthesized)
gccagattcgataaggcaccccgtgtgccccagctccatgaccaaggaactcagcaccccgtgtgccccagctccatgaccaaggaactcagcaccccgtgtgccccagctccatgacca

SEQ ID NO: 842896 - DNA, 120 bp, Artificial Sequence
  ENSG00000267278_26 (sequence is synthesized)
aggaactcagcccacaaaggcatccctggccccatgcagggctcaggaggcagcggaaagggttaagagtccaggcctcaaggacaggaggggagggtggagggcctgtggtgtgcatcc

SEQ ID NO: 842897 - DNA, 120 bp, Artificial Sequence
  ENSG00000267278_27 (sequence is synthesized)
ggcatccctggatggtcagggcccagaacccatccctatttcccttctggtggtagggggctgcctaacttgggcagtggcacaaagcatgcaggctttgttgtcctcctcctccacccc

SEQ ID NO: 842898 - DNA, 120 bp, Artificial Sequence
  ENSG00000267278_28 (sequence is synthesized)
tcagcctggcatattttggcgagggacttccctgatgccaccgggcaaggtatcttgcctaactggtctgaatgactagcccagcgttgggactagaagcagccactgggaggagtggtg

SEQ ID NO: 842899 - DNA, 120 bp, Artificial Sequence
  ENSG00000267278_29 (sequence is synthesized)
ggcaaagagaggcagctgttagggtcgtgaggttcagcaggccggcaggcaagagagaggacaccgatggcctggaaacatttgtcatcaccccaaactttattgcttacaaagagttct

SEQ ID NO: 842900 - DNA, 120 bp, Artificial Sequence
  ENSG00000267278_30 (sequence is synthesized)
ctacaacccagactctgcagtaccaaggctgcagttctttatgtgctgggggccggggctctctccccgggagcagtctgactcaatgtggacagctggacaaaggctgtcttggcaaga

SEQ ID NO: 842901 - DNA, 120 bp, Artificial Sequence
  ENSG00000267278_31 (sequence is synthesized)
ggagaggaggctggagcttaggggctctgcctgttgtctcctcagctggccggggccctggggcccttggcgaaagctctctcggctgggcatggagggtctggtggtaattggcttgat

SEQ ID NO: 842902 - DNA, 120 bp, Artificial Sequence
  ENSG00000267278_32 (sequence is synthesized)
ttggcggtggatgtcttggttctttatattctcccctccaagggctcttcagacctcccactagaaaacagagagtacaatggtgaggggaagcgtgctgtgcacagacagcggtccagg

SEQ ID NO: 842903 - DNA, 120 bp, Artificial Sequence
  ENSG00000267278_33 (sequence is synthesized)
caggagcggcctctcctgagtgcagaagggctagaggcaaacaaaggggaggacactgccccgggccaccatgggaggtggctccagagggcagcatggtggtctccacaggagacttcc

SEQ ID NO: 842904 - DNA, 120 bp, Artificial Sequence
  ENSG00000267278_34 (sequence is synthesized)
tcaataaaatggtcccaatatgacagggataggactggatttctgtctttgattctgtttttcttctaggtatcagtagcaaattcaaaaactacagaatcagctccagaggactttgtt

SEQ ID NO: 842905 - DNA, 120 bp, Artificial Sequence
  ENSG00000267278_35 (sequence is synthesized)
ccatcaggaaaggctcatgggtgattgggacctttgcttgaaacccaacttactggccaggaacctcaagttctgggaccaggcgccttcctccctcccactgtgccagaggaggggaga

SEQ ID NO: 842906 - DNA, 120 bp, Artificial Sequence
  ENSG00000267278_36 (sequence is synthesized)
actgttccccacccctacccagctgtgtgaggacccctgccacgttctagcacagcccctctatgggagctgcggggctggcctcactcactcttccttgcttccctgcagcagagggga

SEQ ID NO: 842907 - DNA, 80 bp, Artificial Sequence
  ENSG00000267278_37 (sequence is synthesized)
cgttccgggagcgccaacccctcctcaacctcccaaggctcaaacgatcctctcgcctcagccttctgagtagctgggat

SEQ ID NO: 842908 - DNA, 120 bp, Artificial Sequence
  ENSG00000267278_38 (sequence is synthesized)
tggctgtctagctccaggcagatcagctgccacggggactgctgagcaggtgggaattggactgtaccattgaaatagcttggggtgtcggtgggccgcccccgggccagcaccatgttc

SEQ ID NO: 842909 - DNA, 120 bp, Artificial Sequence
  ENSG00000267279_0 (sequence is synthesized)
cgccaagagcgcacagactttgaagcaggaaaagacagtctctagagcaacatggaaaggatccagtatttgttttcaggcaaaagcaagcctccaaaagccccttggttcttctctgtg

SEQ ID NO: 842910 - DNA, 120 bp, Artificial Sequence
  ENSG00000267279_1 (sequence is synthesized)
tgtctcgccccttctgccttgtacaccagactgccggcaagcaagcggggaggtggcgaacagctgggatcctccagtgaaaagtttgctcagcgcgagagatgtcaagaggctgggatt

SEQ ID NO: 842911 - DNA, 120 bp, Artificial Sequence
  ENSG00000267279_2 (sequence is synthesized)
ggagaactaataggcagcccgcatttgcagccagccaacctgggtggtattccttgaagtgaagcgctcataaatcccttctggggccagagccggtttcacaagctgcaggatttgggt

SEQ ID NO: 842912 - DNA, 120 bp, Artificial Sequence
  ENSG00000267279_3 (sequence is synthesized)
ggcctgcctgctctttgggagcgggcttgggaagctgaagaaattgaatcaggacctcaggccctttacagactcccttctacacttggttgctgattaagaacattatgtggcatttaa

SEQ ID NO: 842913 - DNA, 120 bp, Artificial Sequence
  ENSG00000267279_4 (sequence is synthesized)
aatggcacaattatcttccgttggccgttcctagctaaaagtagactcctatcagcccgtgactgacgacaagaaggctcttcgtccctgtttttgaaataaacatgggtataatctgaa

SEQ ID NO: 842914 - DNA, 120 bp, Artificial Sequence
  ENSG00000267279_5 (sequence is synthesized)
ttatttcctaagggagtctaatggataatttttaaaatctaacttggacgtattcataataagcatcgtccattttgctaagttctttcctaaggcaaataaatagagtcttgcaattgc

SEQ ID NO: 842915 - DNA, 120 bp, Artificial Sequence
  ENSG00000267279_6 (sequence is synthesized)
ttattttctgatgtccagtgtggcagcctggcagagacatttagttgaaagaacacggggctctggaaacaaccagtcctccttggttcatattctcgtgttgtcacttattaaccgagt

SEQ ID NO: 842916 - DNA, 120 bp, Artificial Sequence
  ENSG00000267279_7 (sequence is synthesized)
atgctgcagtttatcactgaggtcctgagatggtccatactctaagctttgtgtctactgtggggggcaaagggaaaacttcccccttgctctctgaagagtcattgaaaatcaactgac

SEQ ID NO: 842917 - DNA, 120 bp, Artificial Sequence
  ENSG00000267279_8 (sequence is synthesized)
aaaagaatctaaaatattcctggaaatggagagtcctgacatgatggccccatgatgaaaagaacccaggttcctgagtcacgacgtggacatgaggcaccaaggagaaaacacgtgaac

SEQ ID NO: 842918 - DNA, 120 bp, Artificial Sequence
  ENSG00000267279_9 (sequence is synthesized)
cttaataagtttgggggtacacctccttgccatgtgttaccttctgtcatgttatgatgcagcaagaaggccctaatcagtggtagtccctcagtcctggacttctcagcctccagaact

SEQ ID NO: 842919 - DNA, 120 bp, Artificial Sequence
  ENSG00000267270_0 (sequence is synthesized)
agctgctgccctgggcgcactgccttgcgggtcactgtggctgctcctgtgcttcagcgggactagaagctgccgcccacgggcagcggggaagaaatctgggcaaagccatgagccctc

SEQ ID NO: 842920 - DNA, 120 bp, Artificial Sequence
  ENSG00000267270_1 (sequence is synthesized)
cgaggctgagctccagtttaggggctcacctgccttgcatcgttccgagtcctgtactggactgcatcaggccgcgtctcctcaggaaaggaaaggggatgcccctgaggagactcggtg

SEQ ID NO: 842921 - DNA, 120 bp, Artificial Sequence
  ENSG00000267270_2 (sequence is synthesized)
ctccccacagaactccccagcgatcccagatgggagaagctgagctgcgcgggcgctgccctcactccgggggtgaaacgtggctgtgatttccacaggtgacagaaaccaggcagtgat

SEQ ID NO: 842922 - DNA, 120 bp, Artificial Sequence
  ENSG00000267270_3 (sequence is synthesized)
tcaactcgtatttgactttcacattctccagcaatgttcttcaatctgggaagggtagaaaattaaagaaaggtaaggagagttaaaaaatgagatcatttcaaagtagatgcagtcttg

SEQ ID NO: 842923 - DNA, 120 bp, Artificial Sequence
  ENSG00000267270_4 (sequence is synthesized)
gtcggaaagggtggggactgaatttcgggtaagaggacgccagtggttctggagcacgcggccttcagccatgcctgcgttcacaagtacattatttcagactcactccaagtttacatc

SEQ ID NO: 842924 - DNA, 120 bp, Artificial Sequence
  ENSG00000267270_5 (sequence is synthesized)
tctaagcccatccaagccatggcagcgcgaacctctccctcccccagctcaaggcctctgggcccccaggacagaggacagaagagccagcccctcctggctcagggttgccgggacccc

SEQ ID NO: 842925 - DNA, 120 bp, Artificial Sequence
  ENSG00000267270_6 (sequence is synthesized)
gtgatggctgctgtgcctctcctgaggtgccaggtgagagctgagacttctgctcccgctgcaccagctccgtttgtctccaggcgcagtgtcagtctcgttctttaagcgcttctgagg

SEQ ID NO: 842926 - DNA, 120 bp, Artificial Sequence
  ENSG00000267270_7 (sequence is synthesized)
tcccatcagcacaggtctcgtcttacctggaaaggcttgttgccttgtgcctgggactttttattctgtgcttttcttctggatattaaatttcatatccacgcttgcttgtcactcaga

SEQ ID NO: 842927 - DNA, 120 bp, Artificial Sequence
  ENSG00000267270_8 (sequence is synthesized)
ctttccatggcaacaccctgatggccgaaagttactacccttattccagaaatctctgcataatctgtcggtttgcatataattaacagtggctataaatgtgagtgcagccctgtcctg

SEQ ID NO: 842928 - DNA, 120 bp, Artificial Sequence
  ENSG00000267270_9 (sequence is synthesized)
gttcctggccagcacccggcctctctgcacctcatagacactgcaaatccttactcagtgacttcagggatacaggtttccagggtccttctctcggatggagcctgtccaactgcactc

SEQ ID NO: 842929 - DNA, 120 bp, Artificial Sequence
  ENSG00000267270_10 (sequence is synthesized)
tggggaagggagagaaacaggaaggcgtcgccttcacgctccggtcactcaggaaggtggctgtgcatgcctgagagcttgcaccggggtggaggtagccacggtcccgagacacgccct

SEQ ID NO: 842930 - DNA, 120 bp, Artificial Sequence
  ENSG00000267270_11 (sequence is synthesized)
agtcacattggagatacagctgtggtttgctcctaagacccacccagcacacgtgagatggggagacctggattgcatccccatgtctgtcccagtggagatatcattggaaaagctgca

SEQ ID NO: 842931 - DNA, 120 bp, Artificial Sequence
  ENSG00000267270_12 (sequence is synthesized)
gtgatctctataaaaatctcaaccacccgctcccagtaggttcagtgctgcactctaagaggagaacaggtctgactcctcaaggagatgcctctggtccaggctttgtaaacttgggcc

SEQ ID NO: 842932 - DNA, 120 bp, Artificial Sequence
  ENSG00000267270_13 (sequence is synthesized)
ttccagccagattcctccgagctcagtgtccgctgctgctgggctgaggggaaccccactccttcaccaccgactcctgctcctggctgcacctgcccttccaacagtgtctcctctcaa

SEQ ID NO: 842933 - DNA, 120 bp, Artificial Sequence
  ENSG00000267270_14 (sequence is synthesized)
caaactaaagattttctaagaaatattttcttacaaataaccccttctgttacataagggcttgacctgatttattaaaactatcctgactctctggcgaggaagggtgggaactgctga

SEQ ID NO: 842934 - DNA, 120 bp, Artificial Sequence
  ENSG00000267270_15 (sequence is synthesized)
gtggcagctgcagaagtaatgacaactcatgggcatttggagaacgcaccaggcccacgctcaacattgcatttgattcctgcgagcgctcaacaagggaagcaccagacagatgctgaa

SEQ ID NO: 842935 - DNA, 120 bp, Artificial Sequence
  ENSG00000267270_16 (sequence is synthesized)
atttaggcatggcagcactgctttgcctcccttggcagcacagggctgcagaaggactcagaattgcggggaaccctctgcctcaaggcgctccaccaggacacagacaccccctcagcg

SEQ ID NO: 842936 - DNA, 120 bp, Artificial Sequence
  ENSG00000267270_17 (sequence is synthesized)
gcccctctgctttttcttcagaatctgatacatctggcctggacgggagatggtgccctcgggcgccagagtgtggggtcctcttcacagccactcccaccccaattcctgatcttccga

SEQ ID NO: 842937 - DNA, 120 bp, Artificial Sequence
  ENSG00000267270_18 (sequence is synthesized)
gtttcctggctcacagtgttccttgttctcaaaccgctcgcttcactgcttccgattcaacttcattacctaaagtgagagatacagcttctttctttccctctcaggatcaatgactcg

SEQ ID NO: 842938 - DNA, 120 bp, Artificial Sequence
  ENSG00000267270_19 (sequence is synthesized)
gttttaggtcaccatggagaggggattcagagctcacgcatccgccacacttgatttcaggagatgagtggctgcgagtcaccctgctgtgagccgccatggtcccctggtgaattgccc

SEQ ID NO: 842939 - DNA, 120 bp, Artificial Sequence
  ENSG00000267270_20 (sequence is synthesized)
aggccaaacgccatggcctcacctgctcacgggcaaagcagctgccagcttaaatggtaagaaattagtaaaggaaggaaggaaggagggaagaagccggaagggagagcacgtctccgt

SEQ ID NO: 842940 - DNA, 120 bp, Artificial Sequence
  ENSG00000267270_21 (sequence is synthesized)
aagggtggttaagaccaaattccttccccataattaaacagcatgtagacacatacaaaaataccgcagaagaactacaccactgggtcaaaacacatgccagaacaatatttcatttta

SEQ ID NO: 842941 - DNA, 120 bp, Artificial Sequence
  ENSG00000267270_22 (sequence is synthesized)
aaagacaacataaatgtcaacatttaaaaagcctgccacataaggtgaaaaacaaaacctgttgtgtactgactagtctcagaactccttggcagttttatcttttccagaaaactctgt

SEQ ID NO: 842942 - DNA, 120 bp, Artificial Sequence
  ENSG00000267270_23 (sequence is synthesized)
cttcaaaccccaagacctgtctccttgtggcatcctccacaggcttggtctacagcatgcatcctcaggggattcttccaggcttacctggccacgatccccagcacagaacagctcaag

SEQ ID NO: 842943 - DNA, 120 bp, Artificial Sequence
  ENSG00000267270_24 (sequence is synthesized)
atcaccgtctacccccatctgccagagcaaatctattttccaccaagagcaggactgtcggctgtcagtcaccaaggacacccaggttgatagttggaggcgaccagcacattctgatga

SEQ ID NO: 842944 - DNA, 120 bp, Artificial Sequence
  ENSG00000267270_25 (sequence is synthesized)
agtaggtgatggtgcctgccccaggacctgtgtgcactgcaacaggcagcctgcagggcgtgtgccagaggccagggcctgagcaacagacacagcgctgcccagtgggccctgcaccct

SEQ ID NO: 842945 - DNA, 120 bp, Artificial Sequence
  ENSG00000267270_26 (sequence is synthesized)
tgcagtgaggggcagcctcaaccaacgaaaacaccacacactaagtcctagtttccatctaagaagtgttttctggaactttaagcaacattttatttccacagatgtggggaaaaggga

SEQ ID NO: 842946 - DNA, 120 bp, Artificial Sequence
  ENSG00000267270_27 (sequence is synthesized)
accctatggtgcataattattaacttactttagggtcctgtttctggactcagtggactcaagtgtagccaggtccaatctgtgcacttgcctctggaatgttctgccaacaccctttcc

SEQ ID NO: 842947 - DNA, 120 bp, Artificial Sequence
  ENSG00000267270_28 (sequence is synthesized)
ccagttttgctggggaaggctgcaggcaaggagaggaggctattcctggccctgacccaggaggagagacgggaaaggaatgagcagacttgagcttaaattttcattggaagtatttaa

SEQ ID NO: 842948 - DNA, 120 bp, Artificial Sequence
  ENSG00000267270_29 (sequence is synthesized)
gaaacacctcatgttggtcctggttctctattatttctctctattaaaaataccaccccaagtaatctgtactcactatagaaaaactggaagtaaaagtaataattaaaaaaatccctg

SEQ ID NO: 842949 - DNA, 120 bp, Artificial Sequence
  ENSG00000267270_30 (sequence is synthesized)
aagccataactcactcttctattactatagtcagcatttgctgtgcctcgtccaacaagctggggtcgcctcaggaaagaagactctaccgtgcccactgccctccctccaagtcctcct

SEQ ID NO: 842950 - DNA, 120 bp, Artificial Sequence
  ENSG00000267270_31 (sequence is synthesized)
cctgtggcgtccctcgtcgggtagtgctgccttttgggaagtcactctgggtgggggtctccaccctcctgggaagtctccggaacagaaagcaggagacaccggcgcatccaggcccca

SEQ ID NO: 842951 - DNA, 120 bp, Artificial Sequence
  ENSG00000267270_32 (sequence is synthesized)
tccctccccgaattcacgggcagccagcagggggcgccacagcagcgcagcaacaggcacccggttgccggcatcaccggcccacgctcgttccctgtgcattttgtttaaaatttttga

SEQ ID NO: 842952 - DNA, 120 bp, Artificial Sequence
  ENSG00000267270_33 (sequence is synthesized)
gagaaaatttacataacataaaattaaccattttaaagtgtacaactcagtagctttagcgtgttcacaatagagtggaaccattaccgctaattacagcacatttccatcaccctaaaa

SEQ ID NO: 842953 - DNA, 120 bp, Artificial Sequence
  ENSG00000267270_34 (sequence is synthesized)
gaaaaagtccgtttctcccaatgccttcctctcctcagccccacacccattaatctactttctgtctctgtggattttcctgccctggacacttcatataaatggaatcttacaacacgt

SEQ ID NO: 842954 - DNA, 120 bp, Artificial Sequence
  ENSG00000267270_35 (sequence is synthesized)
gagcatccctggagaatcccagcttgcagccatcttccctcaagcgcatttccagtgtccagcctggctttctgatcatttttgctttaggaaggcctccgaccatggcactttggtaaa

SEQ ID NO: 842955 - DNA, 120 bp, Artificial Sequence
  ENSG00000267270_36 (sequence is synthesized)
accatgtcccagcccccagtctccctagcaacgccgactctcaccccagatggttcctgccaggatgggagggtggagctcacagagtttgaaggagtgccaccttcacatggcacaagt

SEQ ID NO: 842956 - DNA, 120 bp, Artificial Sequence
  ENSG00000267270_37 (sequence is synthesized)
gtccacgaatctgggcagatggacacatgccgacagcatggcaaggtcccctcctttgccctgccccatcacttcctcccatgtgtaggagcaggtccacccaaaacagtgtgaaggtgt

SEQ ID NO: 842957 - DNA, 120 bp, Artificial Sequence
  ENSG00000267270_38 (sequence is synthesized)
caagccagtagctcctcttctggggagggagtgaggaaggaagagcaggagacaggcagaagaactcactgggcgggtggcgacctgcagggagacagagaaggacacgccagagcccag

SEQ ID NO: 842958 - DNA, 120 bp, Artificial Sequence
  ENSG00000267270_39 (sequence is synthesized)
ggagagcactaaccaccactgacagtttcccatttcatatattttttccgaggccacgaagaggaggagcctgtcacaaagcgccagtgggaactcactgcccccgacacctcccgacgc

SEQ ID NO: 842959 - DNA, 120 bp, Artificial Sequence
  ENSG00000267270_40 (sequence is synthesized)
atcagctggtgagcaccagaagccggcccagtgcccacagccaagcccacgtggtgtggcccacagcaccttcacaggaagggcctgagggttggctgcagtcatttttttttttttttt

SEQ ID NO: 842960 - DNA, 120 bp, Artificial Sequence
  ENSG00000267270_41 (sequence is synthesized)
caaactggaggggaacgtttttccttggtaaacccccggcgctgaagtcactcaggtgagcctcggtgaagaagcctcagacgctcagcaaggcccagggaggatgagctcatctctgga

SEQ ID NO: 842961 - DNA, 120 bp, Artificial Sequence
  ENSG00000267270_42 (sequence is synthesized)
ggccaagctcacatgccctagactgcagcaacatgccctcccgcccacgcccgctcccttgccagggtgtgtcctgccctcagcgggccactggcccccaaatccaccacagaaggccaa

SEQ ID NO: 842962 - DNA, 120 bp, Artificial Sequence
  ENSG00000267270_43 (sequence is synthesized)
caggacaggggagtcccagtgacatgccactgcctccccccacccaggaggcttgctttagggtcccctgctgccctgggcccacgttaaatcagctgttccatgcaaagacttgcagag

SEQ ID NO: 842963 - DNA, 120 bp, Artificial Sequence
  ENSG00000267270_44 (sequence is synthesized)
ccaagaggagaggtgcaggcgagttgttaggagcatgagtttcacaacggtgtggtctcactgctgcccctggccactgcctgtgccttccgggcagcgactgcacctcctcctcagtta

SEQ ID NO: 842964 - DNA, 120 bp, Artificial Sequence
  ENSG00000267270_45 (sequence is synthesized)
acaagcacagtggcggatgcccatgccatgggttccgtgcacggcggtcaccatcaccacacggagtccaagagcaagaactctgccaagacactgttattatcaaaagcaaatggtttg

SEQ ID NO: 842965 - DNA, 120 bp, Artificial Sequence
  ENSG00000267272_0 (sequence is synthesized)
acgcaaggtcaggcgtcctgctggcgccctctcgccaccctgccctcccgtcagaagcccggctcctcgccggggaaggccggatgctggcccgccgggacctgggacttgtgccacatg

SEQ ID NO: 842966 - DNA, 120 bp, Artificial Sequence
  ENSG00000267272_1 (sequence is synthesized)
gagtgtcgggagtctccattgccgcgagttctacaccacagggccaggctgtttgctccccatcggtcgctgcccccagcaccctgttgttattaaggactcatttgcttggagcggcat

SEQ ID NO: 842967 - DNA, 120 bp, Artificial Sequence
  ENSG00000267272_2 (sequence is synthesized)
cattacaagggtgtggggctccttggctccactggggtctccgttcccttctcccggtcccccctccaggtcgcggctcctttgtccaggactacgcaggggcttgaccccagggcgctg

SEQ ID NO: 842968 - DNA, 120 bp, Artificial Sequence
  ENSG00000267272_3 (sequence is synthesized)
gtttaggccggatctggggtcccttgtcactcccaggcttcttccacttccgaattctggagaaccgggaatcaagccctgcgcgttcctcttcttcctccttcgtgccgaaagcacgct

SEQ ID NO: 842969 - DNA, 120 bp, Artificial Sequence
  ENSG00000267272_4 (sequence is synthesized)
tcatgtctgccagggcatcagttctgaaagtgagcggagaacaaggagtttctttttcttccccagaagttgccttttcaccagatactgctacaccatctcatcggcatggacctatat

SEQ ID NO: 842970 - DNA, 120 bp, Artificial Sequence
  ENSG00000267272_5 (sequence is synthesized)
gtggcagcaagtccatctcatcgcttttggtgaaagtcagtccagtttgtaaagattctcattgtcactgtagacgaggaactgggacaccaaaaggagaaactctggccacgcttgcac

SEQ ID NO: 842971 - DNA, 120 bp, Artificial Sequence
  ENSG00000267272_6 (sequence is synthesized)
cctgttcccaatcctggtccagtgtcacccacagatggtaaggagctctagagacctcaccagcccctgggattggtcacctcactcttctatggacagagattcctgctgggatccttt

SEQ ID NO: 842972 - DNA, 120 bp, Artificial Sequence
  ENSG00000267272_7 (sequence is synthesized)
gagggcaagcagacccttcttccagctcggactgtgaactccactgcagccgtaaggactgtctgtgacagtgagcccgagatgactgggctctgtgctccctcccggccctccaatcct

SEQ ID NO: 842973 - DNA, 120 bp, Artificial Sequence
  ENSG00000267272_8 (sequence is synthesized)
tggcctgccacagagaactgagctcttttattagcaccatgaatgtgactgatacagctagccattcccttgtgcgaatgactcagtttattaatgctctgctaaagatggcttctttgc

SEQ ID NO: 842974 - DNA, 120 bp, Artificial Sequence
  ENSG00000267272_9 (sequence is synthesized)
ttgccagcagccttaaacagtatttcattaaaactggcttaattattttgagaagacggcccaattaaaagctatacactccctctatgtgagtgtttatacatagagctgtatatataa

SEQ ID NO: 842975 - DNA, 120 bp, Artificial Sequence
  ENSG00000267272_10 (sequence is synthesized)
tacatatttgtaagtgtgtatatatatatgtgtgtatgtatgtgtctataaatatataggcttagcaatttcattacatgggataaattgttggaaaaaatacccaggagctggtcccct

SEQ ID NO: 842976 - DNA, 120 bp, Artificial Sequence
  ENSG00000267272_11 (sequence is synthesized)
ttctgttgctagattcagagtagaggccacccctccactctgggagaggctggtgttggtgatctctcaatgactctgcaatggaagtcccaactgcacagagccctgccccagtttcag

SEQ ID NO: 842977 - DNA, 120 bp, Artificial Sequence
  ENSG00000267272_12 (sequence is synthesized)
gagccagcagcctcggagaggcggatcctgacctctgctctgctcttgggatagcctttcccttcccagcagggttgagatacttgggccgggaaatgttgtggcaaagtgtttgccaaa

SEQ ID NO: 842978 - DNA, 120 bp, Artificial Sequence
  ENSG00000267272_13 (sequence is synthesized)
gctcaggagagacacagacttggggcttttgtttcttgagctggctgtctagctttcctaatgagcaaatatgttctctttaaggaaacaaacaaacaaagcaaaaacaccaattcatct

SEQ ID NO: 842979 - DNA, 120 bp, Artificial Sequence
  ENSG00000267272_14 (sequence is synthesized)
ttcatttgttttaaatacaaacaaacaaaaggagagtggttatttctgcaccaactatttcaaatgcaagttactccatcgctcggggtggttggatggtgcttgtcaccataggaccca

SEQ ID NO: 842980 - DNA, 120 bp, Artificial Sequence
  ENSG00000267272_15 (sequence is synthesized)
cagggctagttccaactgttattcggtaaggcttttttctttccaaaattcccagtgttcctttaaggcccatttagctgcgggttttgtttattctcccggcaatcagcatttaaaata

SEQ ID NO: 842981 - DNA, 120 bp, Artificial Sequence
  ENSG00000267272_16 (sequence is synthesized)
agacaaacaagcattttttcctgggctgtgaatccccccggccagcctccacctgcacacctgaagccagcatgtccaatcaaatttctctgtaacccatatcccctttagagacttgcc

SEQ ID NO: 842982 - DNA, 120 bp, Artificial Sequence
  ENSG00000267272_17 (sequence is synthesized)
cccgtcgtataccaggctggaaatagagaacttaagcagggcaaatgtaattttaagaattgctaatgatgctagaaatctgcaatgcaattagcgtcattggatttggcgctcctccga

SEQ ID NO: 842983 - DNA, 120 bp, Artificial Sequence
  ENSG00000267272_18 (sequence is synthesized)
aggcacaaaactccttgtcatagcgcagtggcagcagcggcaagtgcctccgcatgtgccgggctgtccgggtatgctggcagccgctttgcactgagatgtgagcagttggttaggctt

SEQ ID NO: 842984 - DNA, 120 bp, Artificial Sequence
  ENSG00000267272_19 (sequence is synthesized)
cctctctttctttctcacagatactgacttctttgtctcttttctgggttgcagagggatgggtattttccattgattattactttagcatttgaccctccagtggagtcaccctgtttt

SEQ ID NO: 842985 - DNA, 120 bp, Artificial Sequence
  ENSG00000267272_20 (sequence is synthesized)
ttttttagaaaactgagactctcactttgtgaattcactgtgctctctgggatttcagtgctgtagttcaaccaccaatccccctgtcctgaactccagtacttctgatgctattaattg

SEQ ID NO: 842986 - DNA, 120 bp, Artificial Sequence
  ENSG00000267272_21 (sequence is synthesized)
gttcctcaacaattgtggccttttccatcattgcccaccatagtatatactttttctttctctctcttttttctaatttccttgtcttcttcactctccatggagccagaggtagtatga

SEQ ID NO: 842987 - DNA, 120 bp, Artificial Sequence
  ENSG00000267272_22 (sequence is synthesized)
agagttaaaaataggaatataaagaaagccagagggacagagggagtgagaaagaaaaattttaaaaagggaggaaatgaattattggattaaaaataaacttttacttttttgcagaaa

SEQ ID NO: 842988 - DNA, 120 bp, Artificial Sequence
  ENSG00000267272_23 (sequence is synthesized)
aattatttttgctctctgggaaaataacatgggccaggcataaaaagcatgtcagctggctaaaagattgcaaaatccagaagatgatctcgatgtgtctgttcaatttagcaagggtat

SEQ ID NO: 842989 - DNA, 120 bp, Artificial Sequence
  ENSG00000267272_24 (sequence is synthesized)
ctactaggggatcctcttttaaatatggaggcccaaatcagaagcttgtagaggggagctattcttccaagattccagatgtgtctgtgagacaacacgttatggggcaaattgatttca

SEQ ID NO: 842990 - DNA, 120 bp, Artificial Sequence
  ENSG00000267272_25 (sequence is synthesized)
cccttgggaaaccagggagattttcaaagttatgtctgcaaagccagctaatgcaattccccattagtgcattaaagtgcgcccttattaattcaaacataaaggcaacaaaataagctt

SEQ ID NO: 842991 - DNA, 120 bp, Artificial Sequence
  ENSG00000267272_26 (sequence is synthesized)
ttaaatttaaaatataatacatatataatgagcatgtgtgaaagccttattcaaatgaaaatacaggagtgtttgaactactgaggtatcttttgtattgaattatgagcatatgtaata

SEQ ID NO: 842992 - DNA, 120 bp, Artificial Sequence
  ENSG00000267272_27 (sequence is synthesized)
gatttaattattaatttccccattgttctatgcacacagacagggttcaaggcacagtcattctctggctttcatagatctaatttgtataattattgcctgaataaaaaattgctccaa

SEQ ID NO: 842993 - DNA, 120 bp, Artificial Sequence
  ENSG00000267272_28 (sequence is synthesized)
aaataaagggcctgtgcacagctcggcgaactgctccgtggacctcccagcggggctgctttctgaggtgatggtctcctcgctccttagccagcctggtggagccagctactgacgttg

SEQ ID NO: 842994 - DNA, 120 bp, Artificial Sequence
  ENSG00000267272_29 (sequence is synthesized)
cggcctcgtctcggtgctgctcggtcaggctgtcccggcgcggcggcctcgggaggccctgccgtccttcacccctggaggcgggctggggggcgggtgcggggcgcttcccctcctcag

SEQ ID NO: 842995 - DNA, 120 bp, Artificial Sequence
  ENSG00000267272_30 (sequence is synthesized)
aggactatgtctgcgccagggcttgatacatgttgctactcctgggagtgtgagactgggaagctgatggaaatgtcagcattagctttaatggtgaggccaaagggaggatggacccag

SEQ ID NO: 842996 - DNA, 120 bp, Artificial Sequence
  ENSG00000267272_31 (sequence is synthesized)
cattgttttgcaggcttagaggtcttggcttccaaagggagaaagcttccaccaggggacacagaagggtcccattgaactctaagctatggttactggtggggcacttcagattccatg

SEQ ID NO: 842997 - DNA, 120 bp, Artificial Sequence
  ENSG00000267272_32 (sequence is synthesized)
gggtaagttggttaactttttgagcctcagtttcctgttctgtcaagtgggaatacaacttcctagctcacagagttgtggtgaggattatgaactattatgcatctacagtgtcctcct

SEQ ID NO: 842998 - DNA, 120 bp, Artificial Sequence
  ENSG00000267272_33 (sequence is synthesized)
ggcaagtgaaaaggctcagtaaagggtaactgttatcatggtccagtctaaacttccgtgctagcccttcaccaaattgatcttacagaaatcaaaaggttcctgcttttcccaccttgt

SEQ ID NO: 842999 - DNA, 120 bp, Artificial Sequence
  ENSG00000267272_34 (sequence is synthesized)
ttggaattagaaaaaacttcccctgcactattagtgttttataggcctcttctctccaagacagaaaggaggagagggtaacggggcttattttcttctcccaggactcttgaagaagga

SEQ ID NO: 843000 - DNA, 120 bp, Artificial Sequence
  ENSG00000267272_35 (sequence is synthesized)
ttcaggatgtggctgtgccgctggggataaacggtgtaacactggggcaggtcagtttccttgttggtacgatgggactcttacacaggccccttcctttccagcaccagatactgctac

SEQ ID NO: 843001 - DNA, 120 bp, Artificial Sequence
  ENSG00000267272_36 (sequence is synthesized)
ctaaaccatccctttgactaaaaaccaaaccagatactcctttacctatcaatacctcctgctgctaaaaagcagcagctaaaaagcagcaggaggtattgataagggaagtcctatcta

SEQ ID NO: 843002 - DNA, 120 bp, Artificial Sequence
  ENSG00000267272_37 (sequence is synthesized)
aattcctggtttagagaatgactatcctcattttatgagttaaacattacccccaattaacacctctgaaaaaccctcccaacatgtttatctcattaatatcacggggttggcaggtca

SEQ ID NO: 843003 - DNA, 120 bp, Artificial Sequence
  ENSG00000267272_38 (sequence is synthesized)
agtatgatgacctgcaaaagcagcccttccatttacatttcaaactccaagtcagccgtgtcaaagtttgaaccagaactgtggaggataatgggtcagatgcaattagcagcccagaga

SEQ ID NO: 843004 - DNA, 120 bp, Artificial Sequence
  ENSG00000267272_39 (sequence is synthesized)
accacacgttgcagtctgatttatttttttgcccatcagattccaagaatcctagtgcttaaaagcaactaaacaatcgctctattgtactgaaataaagcccggttaattcagaaatca

SEQ ID NO: 843005 - DNA, 120 bp, Artificial Sequence
  ENSG00000267272_40 (sequence is synthesized)
tcttgttaaattaaaaacttgatccaggagtggaacaaatagggagccatgaatggaatggagtcaggtccactcaggcggattctttcttctcccactccttttcctttaaaaaagaaa

SEQ ID NO: 843006 - DNA, 120 bp, Artificial Sequence
  ENSG00000267272_41 (sequence is synthesized)
aattccccatttcactttcatcagtgttagcatctatgcagaaacgcagccatccaccctttgcagttgaatgtgttactttaattagtctgaaaattaaagggcaactccgggccaatg

SEQ ID NO: 843007 - DNA, 120 bp, Artificial Sequence
  ENSG00000267272_42 (sequence is synthesized)
tgaatgattatgaaaatacatgtgcatcccatgcaatcttctcatttaattaatagtcttgtaaactatatggctcactttaagtcagtcaagaggtataacaactccattttaaatatc

SEQ ID NO: 843008 - DNA, 120 bp, Artificial Sequence
  ENSG00000267272_43 (sequence is synthesized)
cacttaatacttaacaggatgtgaggaacacactatagcatacggtcccttctcaagtttcactgtctgaaatttttcaaagctgacccaagtcaacctgaaaaatgtttaacaccctgg

SEQ ID NO: 843009 - DNA, 120 bp, Artificial Sequence
  ENSG00000267272_44 (sequence is synthesized)
gcttgaacacaagaaactctgtgatgaacagacattcaattacattttttaaaagtgagaagcatttttgtaaaatagcgactctggaaactaattggcagccgcaaaacttgtgagcaa

SEQ ID NO: 843010 - DNA, 120 bp, Artificial Sequence
  ENSG00000267272_45 (sequence is synthesized)
aggccaaatcttgtggggaacttttactacagtaacacgactcaaagaaaatgtgaataaaaggcatctttgtttcccagtcaaattagctgattaagaaataaaacatcttaacatgtt

SEQ ID NO: 843011 - DNA, 120 bp, Artificial Sequence
  ENSG00000267272_46 (sequence is synthesized)
ggaagtaacattgatataaatccaagtggagggagaagttttctccttcatgtccccttcccaaacaacctagcttagttcatcagcttctgttgacattatttataaatgctaatgaac

SEQ ID NO: 843012 - DNA, 120 bp, Artificial Sequence
  ENSG00000267272_47 (sequence is synthesized)
tcataagtgctaattaataactccatgtgctgctatttactagcaaatataggaatccaggtgcagtatagacctgtccccaaatacagtacatttcttcatctctgagccaagtagcat

SEQ ID NO: 843013 - DNA, 83 bp, Artificial Sequence
  ENSG00000267272_48 (sequence is synthesized)
acacccaggagctacacttaaactctcacaacagcatcatcttcttattacccacttagataagaaaccagggtcaagtccag

SEQ ID NO: 843014 - DNA, 120 bp, Artificial Sequence
  ENSG00000267272_49 (sequence is synthesized)
tgaggctgagaagtcccgcaatctgctgtctgcaagctggaggcacaagaaagctggtggtgcagttccattccaaacccaaaagcctgaaaaccgggggagccaatgatgccttggaaa

SEQ ID NO: 843015 - DNA, 120 bp, Artificial Sequence
  ENSG00000267273_0 (sequence is synthesized)
agttggacaggatggaactcttcaggattctagtttccctccgcgtgggtgcggaggtatcaaggggtcggctcagtgcctgggtgggcaagagagaaatggacccacagagaaagatat

SEQ ID NO: 843016 - DNA, 120 bp, Artificial Sequence
  ENSG00000267273_1 (sequence is synthesized)
tgccactgaagaagaggcgggataaagcctgttccatgccaagcaaccctggcagcagaatgggattggatcctggtgtggtgtaaagaagaagcattgaaagtctgctaccaatgacag

SEQ ID NO: 843017 - DNA, 120 bp, Artificial Sequence
  ENSG00000267273_2 (sequence is synthesized)
ccccaagtcacaatgtcttcagttaacatagattgttttctagccagtgggccaagacattgggtccatggagcggggtaggaactattgaagggaatccattccatatagtcaacacaa

SEQ ID NO: 843018 - DNA, 120 bp, Artificial Sequence
  ENSG00000267273_3 (sequence is synthesized)
ttggggtgattgggccgggaatggttggttagcacaccagttacattaatagaactaagacctaataagcacatgacttttccatggtgactcaaccatgcttgagcttgaattgtaaga

SEQ ID NO: 843019 - DNA, 120 bp, Artificial Sequence
  ENSG00000267273_4 (sequence is synthesized)
cagctactacagttgagcaatatctttgtagtgatacaccaggggagtccttccagtggggccatataattgatgacattgttctgagagtctaactgttctatgtcaggaggagttaga

SEQ ID NO: 843020 - DNA, 90 bp, Artificial Sequence
  ENSG00000267274_0 (sequence is synthesized)
ttttttttgagacagcaggctggagttcagtggcacaacctcggctcaccgcagcctctgccttttgttacactgaactgagatcacgcc

SEQ ID NO: 843021 - DNA, 120 bp, Artificial Sequence
  ENSG00000267274_1 (sequence is synthesized)
ccttgaaggccaaatgcaccctgatacttttcaccaaagagtagaaacaccaccatccacttgaccccaaatgtgactttccacaggatgcaagcacagtgttggaatagccaaagacag

SEQ ID NO: 843022 - DNA, 120 bp, Artificial Sequence
  ENSG00000267274_2 (sequence is synthesized)
taacaatagaagtgcagggtgagggtgatgaacaggacacactggagagcctgacattggcctagactacgggggtgtcttgatccttcacaaagagcccaaggagcaacccaaagagac

SEQ ID NO: 843023 - DNA, 120 bp, Artificial Sequence
  ENSG00000267275_0 (sequence is synthesized)
ccgggcgccccgggctcccgcctgcgcgagcatcccggggacctggagcgggggcggtgtcggggcctctcagagactctcaggggagcaccgggcttggcggtctccccggatcccttg

SEQ ID NO: 843024 - DNA, 120 bp, Artificial Sequence
  ENSG00000267275_1 (sequence is synthesized)
acggaaggggagattggctccagcctcagagagggctgcagaaccctggatggatgggaagtctggagtctccaggattcatggatgggaaaccctacttggctgtgcttcctgctaaca

SEQ ID NO: 843025 - DNA, 120 bp, Artificial Sequence
  ENSG00000267275_2 (sequence is synthesized)
acctttcagagccctgaactcccaccagcccgaggacggctccgatagctctgacaaatgagccgggactgtgcccagggctcccaggctgggaggggaccccggctcccttgttccttc

SEQ ID NO: 843026 - DNA, 120 bp, Artificial Sequence
  ENSG00000267275_3 (sequence is synthesized)
ctaaggtcggaaaaaaaagcgcgtgtcccttcctccaccacagaggaacagagaagtgtttgcattggtggatttttaaatacttgtttatttttattaaagtgcaattcacatgaaatt

SEQ ID NO: 843027 - DNA, 120 bp, Artificial Sequence
  ENSG00000267275_4 (sequence is synthesized)
tttttttctccctgcctttagaagatttttccagcatcacccaaacacccggccacgggagggggtggagaggttgctgtttacaattctaggaataaatgtgaaggtcttgagtccaaa

SEQ ID NO: 843028 - DNA, 85 bp, Artificial Sequence
  ENSG00000267275_5 (sequence is synthesized)
ttacaattctaggaataaatgtgaaggtcttgagtccaaaatggccagcttggctaggcgcggtgactcatgcccatcgcttgag

SEQ ID NO: 843029 - DNA, 120 bp, Artificial Sequence
  ENSG00000267277_0 (sequence is synthesized)
ggttacctggagtcgcattgggtctagagtcgttccggtcccgcggggcatgctttgaagaggccttcgtgtcaggaagaggactgggccttggccctcccccgccgcctctagggccgc

SEQ ID NO: 843030 - DNA, 120 bp, Artificial Sequence
  ENSG00000267277_1 (sequence is synthesized)
agcaaatagcagcgctgtttttccagatcctggtgtaccgagcagcagcaaaggcggtccggcggcaggcatgttctcctccccggaccaggccgcaccgcccctggttagcacccgcct

SEQ ID NO: 843031 - DNA, 120 bp, Artificial Sequence
  ENSG00000267277_2 (sequence is synthesized)
actcctgacctcagatgatccgcctgtcttggcctcccagagtgccaggattataggcatgagccactgtgtctggcctgtcttcacatcttgacagaagaagatttaccatagaggaga

SEQ ID NO: 843032 - DNA, 120 bp, Artificial Sequence
  ENSG00000267277_3 (sequence is synthesized)
tcttcacatcttgacagaagaagatttaccatagaggagaatcatggaggaatgtacctgcctgcagagacatggtcttgctctgtcacccaggctacagtgcagtggcatcatcacagc

SEQ ID NO: 843033 - DNA, 120 bp, Artificial Sequence
  ENSG00000267277_4 (sequence is synthesized)
tcacgacagtctcgacttcctgggctcaagggactcccatctcagcctcctgcatagccgggactacaggtacgcaccaacatgcccagctaattttaaaatatatatatatatatatat

SEQ ID NO: 843034 - DNA, 120 bp, Artificial Sequence
  ENSG00000275964_0 (sequence is synthesized)
cagccctcaactcccggtcgggttgtctccccgccggtctcccgcccccagctaccgggtccgccagggtcaggagcccgagattcgccgcccgtcgtagcggcccgcttcggcccctcg

SEQ ID NO: 843035 - DNA, 120 bp, Artificial Sequence
  ENSG00000275964_1 (sequence is synthesized)
gggcccggggctctccgggacctacacagcccgggagactccggcggggctgcctgccctcgcccgagcccgggggcccaagctgcggcagcggctcccaacgcctctgctcgaggagag

SEQ ID NO: 843036 - DNA, 120 bp, Artificial Sequence
  ENSG00000275964_2 (sequence is synthesized)
cggcggcctggatgccccagcgccctccctgtccagttccttgaaggcccccaagaggggcgaggccggggaggtgctggagcggggccaagtgagctttcggggccgcggttgaactgg

SEQ ID NO: 843037 - DNA, 120 bp, Artificial Sequence
  ENSG00000275964_3 (sequence is synthesized)
agtcttgagtgcgctgcggtcagtggaggcccttccaccctcgccgcgccccgtggggaatagtcccccacctcccgccatggctgcagcaggaggagacgacgtcctccattttgtcgg

SEQ ID NO: 843038 - DNA, 120 bp, Artificial Sequence
  ENSG00000275964_4 (sequence is synthesized)
cggcgtctgcgtccgcggggcagtactggtcgggcgcgacggtggagacacccagacgcagctccccgcctccatcaaccaagatggagggagctgcaggctcccttggagctgggctct

SEQ ID NO: 843039 - DNA, 120 bp, Artificial Sequence
  ENSG00000275964_5 (sequence is synthesized)
cgcgggttggaggggctgaggcctgccctggggcgtccctgggcgccgccgtcctgtgctagcagcccggggcgctggccctgcctaggcctttttactgcctgccaccgtctcctggtc

SEQ ID NO: 843040 - DNA, 120 bp, Artificial Sequence
  ENSG00000275964_6 (sequence is synthesized)
cggaatggttgatggagactccatggaggctccctccacagcccgctctatcgcggggcgcacccgctgcggcccctgcggggagcagaatcagggacagatggcgcccggtgagggcgg

SEQ ID NO: 843041 - DNA, 120 bp, Artificial Sequence
  ENSG00000275964_7 (sequence is synthesized)
gccccacaggccacctccacgaggggtcttctcttttgttcctcgtctacacctacgtcttcggcggatgtcatggtgctgaaccatttcccggactccacgtaaagatggaagcgattc

SEQ ID NO: 843042 - DNA, 120 bp, Artificial Sequence
  ENSG00000275964_8 (sequence is synthesized)
cgctttcgtctcgccctggcggttcttagtgggattacaattgaggatgttagtttggatgaaagttggtgaaatacttaccttatgtctggaaatacagataatgtgatttttaaaaaa

SEQ ID NO: 843043 - DNA, 120 bp, Artificial Sequence
  ENSG00000225756_0 (sequence is synthesized)
ggagtgcagacccatcacccctcactggggccccccatgaggcctgcctgactgcatgccccacccgggcccatggcagcgcacctggaagcggacggctgaggacttgttgcagtgcat

SEQ ID NO: 843044 - DNA, 120 bp, Artificial Sequence
  ENSG00000225756_1 (sequence is synthesized)
ggagatgggcgcgaagctgtacagggccttcagtacgtcgcggttgaaggagttccagggaacagaggatcccgaagcccccctgcaagttggaggagacccgtcagccccgggccatgc

SEQ ID NO: 843045 - DNA, 120 bp, Artificial Sequence
  ENSG00000225756_2 (sequence is synthesized)
cacgcagacgctgccatccagcagctttcgccgcacccacgtgtacactgcgtccactcgtctgttcactgcaccgtgccaggcatgctctggggaaccgagtccctgccctcaaggaat

SEQ ID NO: 843046 - DNA, 120 bp, Artificial Sequence
  ENSG00000225756_3 (sequence is synthesized)
tgccaccattggcaggagagacaggcagtgagtgagtgagtcaaccaggaaattcgtatcaggtactgatgatgctgtgaggaaaaatgaaacgggacaagcggatggggtgttattgtg

SEQ ID NO: 843047 - DNA, 120 bp, Artificial Sequence
  ENSG00000225756_4 (sequence is synthesized)
cccattttatgggtacagaaactgagtctcagagcaggcaaggggatgccccgtggtggccacagcatcggtggcacagcctgagtgcacccagcgtcccggccattgtctggaagctgt

SEQ ID NO: 843048 - DNA, 120 bp, Artificial Sequence
  ENSG00000225756_5 (sequence is synthesized)
ccccatgacctccagcgagagcctggagccaaggactgcaagggaggccctttccactgcagccccgcaccgtccaccagtcatttctccaacgtggctctgaggggagcagggactcta

SEQ ID NO: 843049 - DNA, 120 bp, Artificial Sequence
  ENSG00000225756_6 (sequence is synthesized)
taagacaggaccgtgactagaggccgcgacaacctccagcctctcacggcaaccctacggcctgccatcgcatgggaggggcagggcaggcaccctctgagtccccactgccagctttaa

SEQ ID NO: 843050 - DNA, 120 bp, Artificial Sequence
  ENSG00000225756_7 (sequence is synthesized)
gcccctcgctgggttgctgctcttggagctggtgaccgtggagcctcagccataggaggaagaacagcagcagcttggaggagctggggctggagagagcaaagctcccccggcagcagc

SEQ ID NO: 843051 - DNA, 120 bp, Artificial Sequence
  ENSG00000225756_8 (sequence is synthesized)
tcatctggctggtggggaagaaaggcaatctttactctatggcagaacaaagggactgggcaaagcttggcgtggcacttacaccagctgccgccccctcctcccgtgcagacaaagagc

SEQ ID NO: 843052 - DNA, 120 bp, Artificial Sequence
  ENSG00000225756_9 (sequence is synthesized)
atgggacagttctgcccagagacgaaacctggcacctgttggccaggacgcgtttttgccagcattgttctctgggccggattcctcctttcccagcttttctcatccatcccgcccccg

SEQ ID NO: 843053 - DNA, 120 bp, Artificial Sequence
  ENSG00000225756_10 (sequence is synthesized)
tcagatcgggacgattgccctcctgtgtgagttcctgtccctccccaccctctgccaccacagacatcaaaagggaactgagtccgaccctgtgtagaatctgttctcctctttcacctg

SEQ ID NO: 843054 - DNA, 120 bp, Artificial Sequence
  ENSG00000225756_11 (sequence is synthesized)
gggaaggaaatcgaatttcaaaggccactgtgtcttggatcagcaggcgagggcttgtcagagtgtgagaagctcaggtccacctggggagctgccctcccctttgatcccacctggtgc

SEQ ID NO: 843055 - DNA, 120 bp, Artificial Sequence
  ENSG00000225756_12 (sequence is synthesized)
tgtgatgtggccactgccaagaggacgacatgggccagggaagccacagaactgcccacggggacgctggcaccgagggcctcaacctgcagaacggccatctgagatgtccgcggtgct

SEQ ID NO: 843056 - DNA, 120 bp, Artificial Sequence
  ENSG00000225756_13 (sequence is synthesized)
caccaggcctggcagccccgaacgccctgggacgtggcgtcagttccgccgccgtgaagccagattgggcagggaatatgcagtctcctcgctggatgcccggcaagaccctcccatccc

SEQ ID NO: 843057 - DNA, 120 bp, Artificial Sequence
  ENSG00000225756_14 (sequence is synthesized)
tggccccggggccgcgcctgcagaatggggctgatggtggggacttgcctggggtgctccacctgcagagccctctgtttgcgagcccactcagtcactgcacaggtgcttagccgagag

SEQ ID NO: 843058 - DNA, 120 bp, Artificial Sequence
  ENSG00000225756_15 (sequence is synthesized)
gcggcacagtcggggttggcacctgcacccataccagccctgcctcctgttcgctgtgtggcctgagtggctggacctcactgtatctcctggtgggattgctcagaggtctcagcaagg

SEQ ID NO: 843059 - DNA, 120 bp, Artificial Sequence
  ENSG00000225756_16 (sequence is synthesized)
cttggtgtggttaggatgagttattagagcagtgctgagctgtggcaagcacccgacatcagccactgctgtgatatactgagcacctcctctagagagaataaaggactgacaaagctg

SEQ ID NO: 843060 - DNA, 120 bp, Artificial Sequence
  ENSG00000225751_0 (sequence is synthesized)
ctgacagcttcttggtggagcccatctcttatctaaaaatacctgaaacaattagctttattttccctgctttcaaacacaagagcacttatgagaaagaaaattgacatcggagaaagt

SEQ ID NO: 843061 - DNA, 120 bp, Artificial Sequence
  ENSG00000225751_1 (sequence is synthesized)
tcttactcaactatgatacagcctgtgagaaggaattagtcctctacaacacactgccactctgaaaggttcagatccagacagtgaaccaatccaaaacacaagcagatacacagaacc

SEQ ID NO: 843062 - DNA, 120 bp, Artificial Sequence
  ENSG00000225751_2 (sequence is synthesized)
caaggtggtcatttgcgtggttccaatcagataaaggagcacagaagaactctcagggaggcacactgagctacgtggtcagcctccaatctcctttgagcaagagatggccaagtttgg

SEQ ID NO: 843063 - DNA, 120 bp, Artificial Sequence
  ENSG00000225751_3 (sequence is synthesized)
aatgagtttagcaacatgaatcctacacgagctaggagtgaatccagaagcagagaggagggtcactcttggacacaggacctcaaattatcctgttcaaatgacccaagggagtacaga

SEQ ID NO: 843064 - DNA, 120 bp, Artificial Sequence
  ENSG00000225751_4 (sequence is synthesized)
aacaccttggagggtctcctaaattcacctgttcatagatacaaaacgcttatcactgaaacatactctaaaccactagctgttaattcctcaggacataataaattttttttaattgtg

SEQ ID NO: 843065 - DNA, 120 bp, Artificial Sequence
  ENSG00000225750_0 (sequence is synthesized)
cagtggtgcagtctcagctcactacagtctccaccaaccaggttcaagtgattctcctgtcagcctcccaagtagttgggatcatagaccaaaatcttcgaatgcattggaaatacgaaa

SEQ ID NO: 843066 - DNA, 120 bp, Artificial Sequence
  ENSG00000225750_1 (sequence is synthesized)
tgctagtgatgaaggcaaagtggatattcagagaacagagtcagaacttcatctgggatcagagcttcttgtgttcactattgctgggcccaattgcaaatgagactagtatgatgtccc

SEQ ID NO: 843067 - DNA, 120 bp, Artificial Sequence
  ENSG00000225752_0 (sequence is synthesized)
cctaatcaagcaaaactaaccaacacaatattttgtttaggagtatatactactaaaaaaggaggaggatataaacacaaaattcaggatggcagctacttcagggcaggaggcaaaatt

SEQ ID NO: 843068 - DNA, 120 bp, Artificial Sequence
  ENSG00000225752_1 (sequence is synthesized)
gaaatgaaaagaagcctttcgagatgcttattatctctgagtcaaacggaaaagaatcttatggacgccacctcagattttagaccagcagatatggggggacatcaatcacatagaggc

SEQ ID NO: 843069 - DNA, 120 bp, Artificial Sequence
  ENSG00000225752_2 (sequence is synthesized)
acacctcattttaccgcactcaactcacagatgggtagttttgttttgtttttaacaaattaaaggttttgtggcaaccctgcatcaagcaagggtatcagtgccatttttccaacagca

SEQ ID NO: 843070 - DNA, 120 bp, Artificial Sequence
  ENSG00000250129_0 (sequence is synthesized)
aatccacctctgcatgtgatcatctgcatttgactccttgaactatggcagccagctggagccatgaagtaagccaccctaacatgagtggcagaaacatggagagacagggtttcacca

SEQ ID NO: 843071 - DNA, 120 bp, Artificial Sequence
  ENSG00000250129_1 (sequence is synthesized)
cgatccacccacctcagcctcccaaaatgttgggattgcagatatgagccatagttcccctccatcagtcttatagttaaatagacttcaaaagaatggaagtggctcagatccctctca

SEQ ID NO: 843072 - DNA, 120 bp, Artificial Sequence
  ENSG00000250129_2 (sequence is synthesized)
ccttctaatagagctattggcattcacatcctattttcagcccaaatgtcagttcctggagtacaaaggcggtggctgcttcagatgcttcagactgaaactgctctttgccattctcat

SEQ ID NO: 843073 - DNA, 120 bp, Artificial Sequence
  ENSG00000250129_3 (sequence is synthesized)
ggacactggagagttaagtttggttaaattgatgcctttttcttttaaaaaagaaagaatacacatatacctttgtgtacacacaagctaggaaacatcaatctaatacatggatggcaa

SEQ ID NO: 843074 - DNA, 120 bp, Artificial Sequence
  ENSG00000250129_4 (sequence is synthesized)
gaaaaaccagatctggctcatgccagttacaatggtctgtgaagataaaaagatttcttcagatttatttctcagccaatttctgcttttcctagggagaaattaaaagtttgttaaata

SEQ ID NO: 843075 - DNA, 120 bp, Artificial Sequence
  ENSG00000225759_0 (sequence is synthesized)
cccgtggtaaacaacaagcagcatttaattaacttgtaagtctgtgggtcagctgggttggcttggctggggtagctcagctctgccccctcctcctcccaggaccagcaggctaggctg

SEQ ID NO: 843076 - DNA, 120 bp, Artificial Sequence
  ENSG00000225759_1 (sequence is synthesized)
ggcatgttcttgtggcagtagctgaggcacaagcaggcaagcccaaccacggaagtgcttatcaagcccctgctcgatgcacctctgctctcatcccattggccagagcaagtcccatgg

SEQ ID NO: 843077 - DNA, 120 bp, Artificial Sequence
  ENSG00000225759_2 (sequence is synthesized)
tgtagacacatagtaaatatttatcagaaggaaggaagagaaagagagggagggaagaaggaagaaatggaaggagagagggaaggagagatgatgaggatgtgagtcccaagacggcag

SEQ ID NO: 843078 - DNA, 120 bp, Artificial Sequence
  ENSG00000225759_3 (sequence is synthesized)
ggactgtgtgttgttcactgctatatcctaagatctccatccagcagccagtagcaggctcaaaactatttgttaaatcaatgaatgaatagaactgcagtaaatatgtgtgcagaggca

SEQ ID NO: 843079 - DNA, 120 bp, Artificial Sequence
  ENSG00000229625_0 (sequence is synthesized)
ggaaatcattttccaaaccataactgttctattcagagctttgaagacagatatcaggtcttcagaaccaatgaagaagaaaccattacttatcaaagaagacggagtctcgctctgtca

SEQ ID NO: 843080 - DNA, 120 bp, Artificial Sequence
  ENSG00000229625_1 (sequence is synthesized)
tgggattacaggcgtgagccaccgcatgtggcccaccattaaaattcttaacctaaagaggataattcccatgaaaaatggatgctatgggtcaattaaataaaatcaaacaacacattt

SEQ ID NO: 843081 - DNA, 120 bp, Artificial Sequence
  ENSG00000229621_0 (sequence is synthesized)
aagaaggacatgtttgcttccctttccaccatattgagagaagactgttctctggtcaagtttgtgcttctgggaacatctcatcaaacgtcctgccagcgggcttagtactggaatttg

SEQ ID NO: 843082 - DNA, 120 bp, Artificial Sequence
  ENSG00000229621_1 (sequence is synthesized)
aatatgggcttctcttttcatcaaccagctgtgttgctgtcagcttttatctcgggctggacactttggagtgtttaactgaaagtgatgaaagctcaatacgagtcagagtcaagaact

SEQ ID NO: 843083 - DNA, 120 bp, Artificial Sequence
  ENSG00000229621_2 (sequence is synthesized)
tcctggaagcataatttaggatctaaatagaagaacataatggagagaagggcagtgtttgtcctattccaaaaagagagacaggaaaataaaatcaagccctgtcgtttcaatcatatg

SEQ ID NO: 843084 - DNA, 120 bp, Artificial Sequence
  ENSG00000229621_3 (sequence is synthesized)
tttgatattggcggcaccaggggagccagaagagcagaagaggtgacagctgaccagaaagagactggctctgcagcctgggcaacctgtcatggaaaggtactgcagctgcaggcctca

SEQ ID NO: 843085 - DNA, 120 bp, Artificial Sequence
  ENSG00000229621_4 (sequence is synthesized)
gagctgtccagaattactctcatgaacatgtttgggaaagaagttatgaagtagaggcaagagtgtgttacagaactgcttaatcccattgcctgagccttccagcctggagattatcca

SEQ ID NO: 843086 - DNA, 120 bp, Artificial Sequence
  ENSG00000229621_5 (sequence is synthesized)
gcctgagccgttaaggtactctcagggcaggaatgacctagaagagatggaatataagctcaagacaataagatgggggcctggtcaaacacccttccttatgtgaactaggaatcttgg

SEQ ID NO: 843087 - DNA, 120 bp, Artificial Sequence
  ENSG00000229621_6 (sequence is synthesized)
ttatagcccatgtttttccttcttctccaaacccaggtgatgattttggtttaagagcctcatctatgagaaattccatatcaaaattattgcagggagaatagacctcttccattatct

SEQ ID NO: 843088 - DNA, 120 bp, Artificial Sequence
  ENSG00000229621_7 (sequence is synthesized)
agaacaaaagttagtattttcccctatgtcttctcttttctttcttctgtacttcctattacttttggtgctgtagaaaaatttctctgtccaaaaagacgtgaaatatttcagacatat

SEQ ID NO: 843089 - DNA, 120 bp, Artificial Sequence
  ENSG00000229621_8 (sequence is synthesized)
tttaccaagggtgtgtgtagcacacatcaacttgcttgagcttctctgatatatagccaatgttttaatgttcccatttagccaatccataatacatcttcacagtgttggcctaatcac

SEQ ID NO: 843090 - DNA, 120 bp, Artificial Sequence
  ENSG00000229621_9 (sequence is synthesized)
aaatgacaagggtggaaaatgtaataaagacaggggcacattaatctactttgtatgaaaatgtggaaaggtaatccaattttgaactgcttgctcttacaaaatatacataagtttgta

SEQ ID NO: 843091 - DNA, 120 bp, Artificial Sequence
  ENSG00000229621_10 (sequence is synthesized)
tcctcagtcccttacatgtatgcacagaggtagtggcccatactgagaaataaagatggggactctggggaatgagttgcctgatggtctattggaagcctctatatctggcaatattca

SEQ ID NO: 843092 - DNA, 120 bp, Artificial Sequence
  ENSG00000229621_11 (sequence is synthesized)
ggggtgttcattcctgtaggtcttagagagagattccaatattagggatgctgttgtgtcttcccctgcatagcccctaaggctagttcatatgaaaagtaaatctgactctgctcccta

SEQ ID NO: 843093 - DNA, 120 bp, Artificial Sequence
  ENSG00000229621_12 (sequence is synthesized)
aaaacaaagatgaaaaatccatagaagggaggtagattcagctagaaagtgtatttctagcaggggagttggtgtgagggagagaatagttatgatgaagtcaggcttgtcttaaaccac

SEQ ID NO: 843094 - DNA, 120 bp, Artificial Sequence
  ENSG00000229621_13 (sequence is synthesized)
atctgatgtcattccaatcactgtgtgtgtctgcacttgtgggttgtctgcatggcatgcatgaatgttgatgcatctgcagtgctctcacccagcagagaagcatagagaaatgtgagc

SEQ ID NO: 843095 - DNA, 120 bp, Artificial Sequence
  ENSG00000229621_14 (sequence is synthesized)
tctggacttaaagagcgctgagtgttaatctcactttctatttgctctgcgacatgactagcagtccaactcctctgaatcccagtttctttttcagtgaaacagagattgtactagtta

SEQ ID NO: 843096 - DNA, 120 bp, Artificial Sequence
  ENSG00000229621_15 (sequence is synthesized)
tctcttaggattagtagaaatacaggacccagaaattctattcttagatatctacccaagataaatacaaacaaaacataggcaaatgtgtacaaaaacttgtacatggatgttcatagc

SEQ ID NO: 843097 - DNA, 120 bp, Artificial Sequence
  ENSG00000229621_16 (sequence is synthesized)
aacattattcactatagataaaaggtggaaacaacccaaatgtctatcaactgacaaatgcataaacaaaatgtggcttattattgaaataaacaatggaaaattattcagccattaaaa

SEQ ID NO: 843098 - DNA, 120 bp, Artificial Sequence
  ENSG00000229621_17 (sequence is synthesized)
tgaagtagaggcaagagtgtgttacaggtaggagtctttttaggggagcaataggattgtcctcttcttagaaatagatttttttggccatgatcccttctttctcctaccagaactgct

SEQ ID NO: 843099 - DNA, 120 bp, Artificial Sequence
  ENSG00000229628_0 (sequence is synthesized)
aaggaacagacaagccctcagctctaccactttggagagggggggattggacagcatgagccttcaattgtatctcttggatgaccaaggaaggctggatttctgcacctaaaaaatgga

SEQ ID NO: 843100 - DNA, 120 bp, Artificial Sequence
  ENSG00000229628_1 (sequence is synthesized)
agcacaaactgtacaacaaatactctccattcaagttgaagttctcaaataaggtcttggcctgttctggagaatgctccccatcaaaaataattgactggagacaagccaagtcaggat

SEQ ID NO: 843101 - DNA, 120 bp, Artificial Sequence
  ENSG00000229628_2 (sequence is synthesized)
ttcaaattcctcttcccactggtcctcatgaaagccgccacggtaaggctggctctggaacttttccaggaacaagtccgtggcatcgtctgaggtggggtcctgctcaggttactccat

SEQ ID NO: 843102 - DNA, 120 bp, Artificial Sequence
  ENSG00000229628_3 (sequence is synthesized)
aactgatgccctgccctccagcccaggtcccggcaccgtgaagtgtagaaaatactctacaatgaataaaaataaaatacaatattcaagatttatgaatgcaataaaagcagtggtcag

SEQ ID NO: 843103 - DNA, 120 bp, Artificial Sequence
  ENSG00000269959_0 (sequence is synthesized)
agtggtctggggtcagaggtcaggtttcagttggtggtcaaatgtcatgctctggaggaagggtatgaggagtcaggggtcagaagtcaggccagcaattccccaggtgtgtggttgggc

SEQ ID NO: 843104 - DNA, 120 bp, Artificial Sequence
  ENSG00000269959_1 (sequence is synthesized)
cagacgccaggctcccaagaacctcacctgtgaccctggatgtcctcacaggttaaagggtctcagggacctagagactggcaacatggtgtgcggtggcccggtagaccctggggtggg

SEQ ID NO: 843105 - DNA, 120 bp, Artificial Sequence
  ENSG00000269959_2 (sequence is synthesized)
ggtcagagatggagataggcacagagacattctgagagccagagacagaaagaccaaaaacgacagaaatagagacacagagagatatcgggaggggcagagacctagaaagccagaata

SEQ ID NO: 843106 - DNA, 120 bp, Artificial Sequence
  ENSG00000269959_3 (sequence is synthesized)
agagggagtcagaggatccactgtgaaagagacacagaagccacagagacacagcagagatggagacagacagggaaggaaaacagatttcaggggaaggaggggatgcagggacaagga

SEQ ID NO: 843107 - DNA, 120 bp, Artificial Sequence
  ENSG00000269959_4 (sequence is synthesized)
cagaaaagagcccggctcttcctcccagggtccctggggcagcccagtggggctaagggtccctgagtggggctgggggtccccgccgggccccgtcccgtgcagggcgcagcctgggga

SEQ ID NO: 843108 - DNA, 120 bp, Artificial Sequence
  ENSG00000269959_5 (sequence is synthesized)
aagctaggaggccgtatagtgatctccttgggtgtcctcctcaactatacaacctcctacctcagcccggggggcgcggcaggtggacagacccgacagacagacagacagggaccagga

SEQ ID NO: 843109 - DNA, 120 bp, Artificial Sequence
  ENSG00000269959_6 (sequence is synthesized)
ggaccagggatgagggggagggccggggaggccccagccgcgatggtgagcccccgacacggacccacagacacgagcttgtgtgcggcgaaggccccgcaagatggagctcacagtctg

SEQ ID NO: 843110 - DNA, 120 bp, Artificial Sequence
  ENSG00000269959_7 (sequence is synthesized)
atggaagagacagagccagccgcagacagtcccaatcccgggtgatctgggtatgacacagggagaggccagaggctgtgagagcccagggcgggaggaatcctggcagctggagacggc

SEQ ID NO: 843111 - DNA, 120 bp, Artificial Sequence
  ENSG00000269959_8 (sequence is synthesized)
agagaggacctccagagaaggcgtggttgtggcatgacctccactaaggcccttccaggcagagggcacagctgaagcgaaggcccaaggcaggaaaccaaggaggtgctgggaggacaa

SEQ ID NO: 843112 - DNA, 120 bp, Artificial Sequence
  ENSG00000269959_9 (sequence is synthesized)
caaagcccttaagtctgactagagcctccgaagccaggagccaaggagcacaggagatgaggctggtggggcgagcgggcggggtcagattcttagggagtttcaggccaggctgggaac

SEQ ID NO: 843113 - DNA, 120 bp, Artificial Sequence
  ENSG00000269959_10 (sequence is synthesized)
ttagccttctgagggtgacagggagccctggaaggttgtgagcaaggggcggggacacggttatagctgaatgtcagaccccgctgaggctgtgtggagtggagggggagagacgggtgg

SEQ ID NO: 843114 - DNA, 120 bp, Artificial Sequence
  ENSG00000269959_11 (sequence is synthesized)
aggctggggaggaggccccctccctgcagtttgcgggctaggacctggggagagaggaaggggtggggcaggaatgtgaggagctggagatggctggagactgctgggcactgggggcag

SEQ ID NO: 843115 - DNA, 120 bp, Artificial Sequence
  ENSG00000269959_12 (sequence is synthesized)
agaacaggaacctgtgggcgggaaacaggtaggaaaactacaactccctgagtctggcccaggaacggatggggcaggagttgctttcaatggggaactaggaggaagaagagggtagag

SEQ ID NO: 843116 - DNA, 120 bp, Artificial Sequence
  ENSG00000269959_13 (sequence is synthesized)
gagagagatgctgtgggcatctgagaacttagtggacattaagagccagggaaaacgttcaggatgcatggtgctgggctttcaacagtgcatctccctccctccctatcctccagccac

SEQ ID NO: 843117 - DNA, 120 bp, Artificial Sequence
  ENSG00000269959_14 (sequence is synthesized)
ccagttctcctctctggggacagcatatattcactaatttcttatgtatctttccagaggaattttatacatctatgcacatatataccaccctcctcttttctgtcccctgataggatc

SEQ ID NO: 843118 - DNA, 120 bp, Artificial Sequence
  ENSG00000269959_15 (sequence is synthesized)
acattattctgcaccttggtttttttttttttttttacatgatatccaaagatcctcccatatctaggcttatagaacctcctcattcattttaatagtgatataatattccattgtatt

SEQ ID NO: 843119 - DNA, 120 bp, Artificial Sequence
  ENSG00000269959_16 (sequence is synthesized)
tctatttattcctagtgtattcagttaattgggagattgggaggttttttatgtcaagaaactaatggttatgcatattgatatttacagatttgcttatgtatgtatgtatgtatgtat

SEQ ID NO: 843120 - DNA, 120 bp, Artificial Sequence
  ENSG00000269959_17 (sequence is synthesized)
agcctcccacgtggttggaactacaggcctgcgccaccaggcccggctaatttttgtgtattctgtagagatggggttttgccacgtttgctggactggtcttgaacttctgacctcaag

SEQ ID NO: 843121 - DNA, 120 bp, Artificial Sequence
  ENSG00000269959_18 (sequence is synthesized)
tgatcctcccaccttggctgagccaccacacctggcccaaatttgctgatttttaaagtgattttgtccaatgcttttaagcctctaaacccagatattcgataaatgcttacttctaga

SEQ ID NO: 843122 - DNA, 120 bp, Artificial Sequence
  ENSG00000269959_19 (sequence is synthesized)
tcctttaaaatttgttgataattactaacaatgggataataataatgacaacagataccctttattgaatgactacttggagccagttcctgggatgagtatttgttatacattatatca

SEQ ID NO: 843123 - DNA, 120 bp, Artificial Sequence
  ENSG00000269959_20 (sequence is synthesized)
ttgattacacagaaaccttattattagaaactattattatcccaattgtaaggatggaatactgaataggatgcagttctgaatagcgagttgcccaagctcacaaagtatgtgatggag

SEQ ID NO: 843124 - DNA, 120 bp, Artificial Sequence
  ENSG00000269959_21 (sequence is synthesized)
ctagagattcaaacccaggcctctctggctccttctttggggtgggcttgctctgggaaaatatgctatttctaaggattgacactgggtacatttaaacttgtcatgcacacaaattca

SEQ ID NO: 843125 - DNA, 120 bp, Artificial Sequence
  ENSG00000269959_22 (sequence is synthesized)
tgtatgattaagaaggaccctttgtcagacccctcactttcacttacgatctagagttactgtcattctacattcaccctggatgccctgtagacagatcaggacaggcaccacatcaca

SEQ ID NO: 843126 - DNA, 120 bp, Artificial Sequence
  ENSG00000269959_23 (sequence is synthesized)
gtccttgtcctggccctgatcctgttgtgttgtgattttctacgtctgggtctgtctttgggaatttactgagggcacagtctgggtctgagtcatttctgtgtcctcaatatcactcca

SEQ ID NO: 843127 - DNA, 120 bp, Artificial Sequence
  ENSG00000269959_24 (sequence is synthesized)
cccaggcatggctcagagcaggggctcaggaaaatgtttgctaagtgaatgaatgaggagatgagtgaataataaatgacttgtggattaggctgggacttgcttaagccccccaggaac

SEQ ID NO: 843128 - DNA, 120 bp, Artificial Sequence
  ENSG00000269959_25 (sequence is synthesized)
agtgaccataattcccattagtttctgaaacataaggcctctgttctgttctcatcagttagcaagtcacagggaccactggttccttcattctctgaaatacagggctccaaatctctc

SEQ ID NO: 843129 - DNA, 120 bp, Artificial Sequence
  ENSG00000269959_26 (sequence is synthesized)
agcacataagactcatctactgcaattcctacaaatatccagaactcaggatccatcattgccttcactccctgaaacagggggccaccattcccatcagacattggcacacaagtacag

SEQ ID NO: 843130 - DNA, 120 bp, Artificial Sequence
  ENSG00000269959_27 (sequence is synthesized)
gttgagcatccttaatgcaaaaatctcgaatctgaaatgctccaaaatcaaaaactttttgagcaccgacgtaacgtcagaagtgaaaaatttcattccatcacttgatctcatgtgata

SEQ ID NO: 843131 - DNA, 89 bp, Artificial Sequence
  ENSG00000269959_28 (sequence is synthesized)
aagtgaaaaatttcattccatcacttgatctcatgtgatagattgcagtcaaaactttgtttcatggagctgtttgggaggctaaggca

SEQ ID NO: 843132 - DNA, 90 bp, Artificial Sequence
  ENSG00000269959_29 (sequence is synthesized)
ttgagaccagcctgggcaacatagtgggattcccatctctacaataaaaaaatttaaaacttagcagggcatggtgatgcatgcttcttc

SEQ ID NO: 843133 - DNA, 120 bp, Artificial Sequence
  ENSG00000269959_30 (sequence is synthesized)
gaagttgaggctgcactccagcctggttgatagagtgagaccctgtcttaaaacaaacaaaaaaccttgtttcatgcacaaaaatattgtataaaattatcttcaggctatgtgtagaag

SEQ ID NO: 843134 - DNA, 120 bp, Artificial Sequence
  ENSG00000269959_31 (sequence is synthesized)
gcatatataaatgaaatgaaaacaaatgaattttgtgtttggacttgggtctcatccccaaatatctgattttatatatatgaaaatagtccaaaatacaaaataaaaaaatcaaacctg

SEQ ID NO: 843135 - DNA, 120 bp, Artificial Sequence
  ENSG00000269957_0 (sequence is synthesized)
acaagcagagttctgtgcagggagatgtctcagaaaaagtgtttctttagccctctccctgacttgcatcctcatgagactcttaaaccccctcctgaccttcagagatgtttatcatca

SEQ ID NO: 843136 - DNA, 120 bp, Artificial Sequence
  ENSG00000269957_1 (sequence is synthesized)
gagatgggttatggaagtgatcctatagaacctgagagattgcttaactcaaactctgcttctacattagaggcactaggatacagcagtgaacaacaacaacaacagcaaaacaaaatc

SEQ ID NO: 843137 - DNA, 120 bp, Artificial Sequence
  ENSG00000269957_2 (sequence is synthesized)
caagccctcaagaaacttactccttggactacgtgtctttccccaggactatatgccgttccctttccaggactatgtgtctttccgcaggactatatgccattccccaagtgccattcg

SEQ ID NO: 843138 - DNA, 120 bp, Artificial Sequence
  ENSG00000269957_3 (sequence is synthesized)
aagacacttgaagaaccaggtaggaaggacttgttctaccagctattgatttattatattattactccaattaagacaccgagattgtcatcaatattgaaaaatagatcagaagcaaca

SEQ ID NO: 843139 - DNA, 120 bp, Artificial Sequence
  ENSG00000269957_4 (sequence is synthesized)
aattaaaaatccagaaaccagtcatttttccatactaatttggtctcaatgagaacaacataattctcattcatctccctgtagaagttatatatttccaaagtggttcaaatgtactga

SEQ ID NO: 843140 - DNA, 120 bp, Artificial Sequence
  ENSG00000269957_5 (sequence is synthesized)
aagccaactcaccactaggaattgaatcaaaattgacccacagacgtacaacattaagtttgctgcgaagatttaaatcagtgggacataaaataaaaattgtatgctacccaaaccaaa

SEQ ID NO: 843141 - DNA, 120 bp, Artificial Sequence
  ENSG00000269957_6 (sequence is synthesized)
tctacattagagtgtcttctgaaaaatgacctcaacaaaatttgctatctacctatttactaacataaatgaggaaaccaaaaaggtcaacggtgaggcaggaaggtttcagttcagtgg

SEQ ID NO: 843142 - DNA, 120 bp, Artificial Sequence
  ENSG00000269957_7 (sequence is synthesized)
gaaatgtcattaacttccatatttggaataagctataaaagcttgtcgaaggtctaatttatgtgcaagactgaaagctgtttaaacggataatatgcctccttcatgagaaataccacc

SEQ ID NO: 843143 - DNA, 120 bp, Artificial Sequence
  ENSG00000269957_8 (sequence is synthesized)
cctttatgctccattaagttcagacgttgactctataagctacgtaccaattatttctttccagaaacagcaacgtagtttttttctgcaagggacaacagattattgtaggcggctatt

SEQ ID NO: 843144 - DNA, 120 bp, Artificial Sequence
  ENSG00000269957_9 (sequence is synthesized)
aatctccacatagttcacaaaatacacaggacactagggagaaaacaatcacgttgctattttaacatttgcaaaatgctatgtggagaggaaataaaaagaagatgcttgtctgattgc

SEQ ID NO: 843145 - DNA, 120 bp, Artificial Sequence
  ENSG00000269956_0 (sequence is synthesized)
atttcattccaagtccagccttcaaccccagtgcctgagcaggagggagggacattgctctgactcttgagttgcgaggactggaagaccttcactttagccctgcaagctctggcttcc

SEQ ID NO: 843146 - DNA, 120 bp, Artificial Sequence
  ENSG00000269956_1 (sequence is synthesized)
agcacagctgagaggccccagtggcacaagactccgaaggcttctttgagcgatcacaggttcttgaccacttgtctgggcactgctcctgtctcctggagctcaggctggatggagtct

SEQ ID NO: 843147 - DNA, 120 bp, Artificial Sequence
  ENSG00000269956_2 (sequence is synthesized)
ctcccctagttcaggctgcagccccagccgccacagctacagcggtgagagcaggctggatcccagatctgcaggcgggtgagcaggtggagcccagtgaagagatgttcctgctgcagg

SEQ ID NO: 843148 - DNA, 66 bp, Artificial Sequence
  ENSG00000269956_3 (sequence is synthesized)
gagcaggtggagcccagtgaagagatgttcctgctgcaggcaattatgcaaaatgctccgtctgct

SEQ ID NO: 843149 - DNA, 120 bp, Artificial Sequence
  ENSG00000269956_4 (sequence is synthesized)
ggcattacagcacctgccaccatgcctggccatggctcaccaagaaacaaccacctcccgcctccacacaccctgcaaaactaatttgactgaaagatggtctcatatattttccaaact

SEQ ID NO: 843150 - DNA, 120 bp, Artificial Sequence
  ENSG00000269956_5 (sequence is synthesized)
ctcaggcttacatcaatcacactgatgatcaagagcgaagaaaggacgaggatgggcagaaacatcacacaatcacgatgagcaatgcctgacatgacaaagagcaaaaaaatggttaac

SEQ ID NO: 843151 - DNA, 120 bp, Artificial Sequence
  ENSG00000269956_6 (sequence is synthesized)
atatgcagataattatcaaacattccacacacaattaattttttccaaatgctgtagttcgcagattaattcccaattatggtacattaaaaaatcaacgagctgcaggaggcagaagta

SEQ ID NO: 843152 - DNA, 120 bp, Artificial Sequence
  ENSG00000269956_7 (sequence is synthesized)
accagcgacacaaaccaaaagcacagttgattctgcgggttcttttgaagaggaggctttagaagtctggcagggataagaagggctaaatgaatcccagccagcctacccctcagtacc

SEQ ID NO: 843153 - DNA, 120 bp, Artificial Sequence
  ENSG00000269956_8 (sequence is synthesized)
acagtgaccaccaagaagaaggcctaatgcagagcagagcagagagctctgcaaacggcaatgcttggaacagcaatgcagaaataattagtgccttgtttaagagcatctcagggggct

SEQ ID NO: 843154 - DNA, 120 bp, Artificial Sequence
  ENSG00000269956_9 (sequence is synthesized)
taactgctctacctcatttcttcttgtgtggccgatttaaaaaaaaaaattccttcagtgcgactgtctgaatgttcagaggagcaagtgttagttaccaaatctcccaaagtgacctat

SEQ ID NO: 843155 - DNA, 120 bp, Artificial Sequence
  ENSG00000269956_10 (sequence is synthesized)
cagagcaaagaccgctttggcaccaggatgctgttatttttgttttttaaaatagagatggagtctcgctatagccaggctgttcttgaaatcctggccttaagcaatcctcctcccttg

SEQ ID NO: 843156 - DNA, 120 bp, Artificial Sequence
  ENSG00000269956_11 (sequence is synthesized)
gcctccctaagcatggggattacaggtgtgagccacctcgctaggcccactgagggttgctgtttttaagagaaaacctctgcactttggccaggcctcctgaaggcgactggagatagc

SEQ ID NO: 843157 - DNA, 120 bp, Artificial Sequence
  ENSG00000269956_12 (sequence is synthesized)
agcttagcccatgaggggttaacctgctgacctggccaagaaggcacctcggggagagccctcttctaaccaaagaaagggacaaagaactaactctgggtcatggtgttttggtggagg

SEQ ID NO: 843158 - DNA, 120 bp, Artificial Sequence
  ENSG00000269956_13 (sequence is synthesized)
acacagaaacctcccttttgtctttccttccacagcacatgcagcacagagacagggctggaaggctgagcaagagtcagagctacagttggaagtattggaaagcggcagcggattctc

SEQ ID NO: 843159 - DNA, 120 bp, Artificial Sequence
  ENSG00000269956_14 (sequence is synthesized)
ggggtgatgggaaaagcaaaatctgcttcactaaaactccgtcggtgatcaactttttcagcagtcctccgattcccgactagaaggcaaaagcctggcccaggccacgggaggcacttc

SEQ ID NO: 843160 - DNA, 120 bp, Artificial Sequence
  ENSG00000269956_15 (sequence is synthesized)
actaaagaagaaaaacctgagctccagcaagctcagtaacttcatcagtcacctaattgaacgagaacccagagcaactcagtccaggctgcacaaattgagtagcactgctctgcagct

SEQ ID NO: 843161 - DNA, 120 bp, Artificial Sequence
  ENSG00000269956_16 (sequence is synthesized)
cgctgcactaaaagtggaagatattttccattacagcaagtgctcccacagaaggatcacgagccacacacggagccttactctccaaataggcgcccatggcccagtcgtcccttagcc

SEQ ID NO: 843162 - DNA, 120 bp, Artificial Sequence
  ENSG00000269956_17 (sequence is synthesized)
taagaactcagagagccaggctgtaataatggggctgccgtgtgagcacagcagccatcgagctgctccggttcatttcccagaggttgagctgcagtgtgtccagtatttaaaagtatg

SEQ ID NO: 843163 - DNA, 120 bp, Artificial Sequence
  ENSG00000269956_18 (sequence is synthesized)
gaacttgtttcagggctgacccattcttgcccaattcatcttccccgtgtgaagttatttagcaaacagccaagttcagctggaaatcgtttttcatcccctccaacttctagtcacatg

SEQ ID NO: 843164 - DNA, 120 bp, Artificial Sequence
  ENSG00000269956_19 (sequence is synthesized)
ggcagctggccagctacatgttaacaagcgcctcagaactcctaagacaccaccggcctctgttcccttcagtgcattcttgtaaataaataaataataaaacctgcctttaccaccccc

SEQ ID NO: 843165 - DNA, 120 bp, Artificial Sequence
  ENSG00000269956_20 (sequence is synthesized)
gccacttccaggctggcctattggattatggaagcaggactctgagttgatgctattgctctccccagtcctctaagccccttctatttcattccaagtccagccttcaaccccagtgcc

SEQ ID NO: 843166 - DNA, 120 bp, Artificial Sequence
  ENSG00000269956_21 (sequence is synthesized)
tgagcaggagggagggacattgctctgactcttgagttgcgaggactggaagaccttcactttagttcttgaccacttgtctgggcactgctcctgtctcctggagctcaggctggatgg

SEQ ID NO: 843167 - DNA, 120 bp, Artificial Sequence
  ENSG00000269954_0 (sequence is synthesized)
agaccacgcgggactccctggctgcgccacgcctgcgccccgtgctcgtcctgcacgcgatgtccagcttgtcacagcctgcccagatggctgtctgcccacctcagcggaaaaaggcgt

SEQ ID NO: 843168 - DNA, 120 bp, Artificial Sequence
  ENSG00000269954_1 (sequence is synthesized)
tgtggcatcagttcctgcagcggcgctactggaaagttctgcatgtgaacgtgagggacactgaggaccagtcctgggtagccaaggaggtccagcactcgcaattccctggtggcagaa

SEQ ID NO: 843169 - DNA, 120 bp, Artificial Sequence
  ENSG00000269954_2 (sequence is synthesized)
ggaaatccagcaggcatcctaagaaaagagaagttgcaagtgcccttctgcaaagtgacccgcccctggtggtgccagcctctctctggttaacctgagcccgggggagtgaagaagcca

SEQ ID NO: 843170 - DNA, 120 bp, Artificial Sequence
  ENSG00000269954_3 (sequence is synthesized)
atcagaagacagagagcttgctcggaggtgatcccttaaccaaaatcgggaggacatgggccttggcagggacctgggtacagctcctgccaaaagcaccgtgggcatcagccccaggct

SEQ ID NO: 843171 - DNA, 120 bp, Artificial Sequence
  ENSG00000269954_4 (sequence is synthesized)
ctggaacatcatggctcatcacgtttaacctcctgtttccatctgggtgatgaaaagctaaggggagttaacgcgccgctgcagctcattgtcaaagccagcttcaggcagagaacgaag

SEQ ID NO: 843172 - DNA, 120 bp, Artificial Sequence
  ENSG00000269954_5 (sequence is synthesized)
gagggagcgacttcggggctgggttaatgttttcccgcaggcaagtggtagcagatgtcaagggttaaggacaatttaggaggtaagaatttccaggctgcacttgtgtcgggtgcctcg

SEQ ID NO: 843173 - DNA, 120 bp, Artificial Sequence
  ENSG00000269954_6 (sequence is synthesized)
ggcgatgagcccaggagcccgctctccacgcagtgacgcttcccaagctggtgctttagacccctcacttgcctggctgctctgaggccccgtccctgatggcttctgacaatttggtgt

SEQ ID NO: 843174 - DNA, 120 bp, Artificial Sequence
  ENSG00000269954_7 (sequence is synthesized)
gatgaagatttctcagcactgaaggaccgcctgcctttgagctgtgaaactagtctatcctcacatagacaccagtaaactgaggcttgagaggctcaaggacaccccggaggccacgaa

SEQ ID NO: 843175 - DNA, 120 bp, Artificial Sequence
  ENSG00000269954_8 (sequence is synthesized)
gggtagaactcactcccctgcttccatccctgtcttgcattcactgctgtggctcggagaagcagaggggtcttgctttggagttgtgtgtgtgtgtgcatatgtacgtgtaaggtgtgt

SEQ ID NO: 843176 - DNA, 120 bp, Artificial Sequence
  ENSG00000269954_9 (sequence is synthesized)
acatgtgttgcacacgtgttcattgcatctgtgcatatgtgcacatgtatatgtgtgcgtgtgtgtgtatatgtgcatgcgtggacatgtgtatgtgtttgcatgtgtatgtgtgcacac

SEQ ID NO: 843177 - DNA, 120 bp, Artificial Sequence
  ENSG00000269954_10 (sequence is synthesized)
atgcctgtgtatgcacatgtgtgtatatgtgtgcatttgtgcatatgtgcatgtgtgttcatgtgtgcatgtgtatgtgcgtgtggtggtgatgatggttgaacagtcctgcagccctgg

SEQ ID NO: 843178 - DNA, 120 bp, Artificial Sequence
  ENSG00000269954_11 (sequence is synthesized)
tcccatatggcctattcccagcttggactggcttcctggggtggacatggacaggaaaagatgccagactcatagagaaccccttcttcctccacaccagattgggcagggggtggggag

SEQ ID NO: 843179 - DNA, 120 bp, Artificial Sequence
  ENSG00000269954_12 (sequence is synthesized)
gctttcaccttagcaataggcaatggttgaaatatcatttccagggtgacatgacatgatgtttgggatttacttcgaaagaacaggggtggagcgggagatacagatgaaacaagactg

SEQ ID NO: 843180 - DNA, 120 bp, Artificial Sequence
  ENSG00000269954_13 (sequence is synthesized)
gctcagttgataattgttgaagctggctgttgggtaccaggggttccactaaactattttctctacttctgtgtatgtttgaaatgtcctggaacaacaataaaacacttatgtcatctc

SEQ ID NO: 843181 - DNA, 120 bp, Artificial Sequence
  ENSG00000269954_14 (sequence is synthesized)
aggtcccttctatatggggcctcaggcagtggaggaatgtaccctgcctggggggcatttcacctatttgccccacaccctgggcctgtgtccttctgtcctgcacggaacctgtgtcct

SEQ ID NO: 843182 - DNA, 120 bp, Artificial Sequence
  ENSG00000269954_15 (sequence is synthesized)
tcccccacccctcccctacataatgagtctcttctatcacacaataactccttggtggaaataagcacacagcctggggtacactgggcaggaggatgacgcatgggggtctccttccct

SEQ ID NO: 843183 - DNA, 120 bp, Artificial Sequence
  ENSG00000269954_16 (sequence is synthesized)
ctaacagtactcgttctgataactaatatttattgaacagtaccagaaatatattttaaaaaatgttgagtagggcccagatctgctttcaagaagaagctgcccagatctgctgagcaa

SEQ ID NO: 843184 - DNA, 120 bp, Artificial Sequence
  ENSG00000269954_17 (sequence is synthesized)
gaacagtgcttccgggaacacctgagctaagggctctctggcagtttcttgtccagggaaaccttcatagaaatgacattacgcttgagccatggatgatgataaggattctgccagcct

SEQ ID NO: 843185 - DNA, 120 bp, Artificial Sequence
  ENSG00000269954_18 (sequence is synthesized)
aaccctcctctccactctgctcttcaccccatggagtccagaaagttctgcatgtgaacgtgagggacactgaggaccagtcctgggtagccaaggaggtccagcactcgcaattccctg

SEQ ID NO: 843186 - DNA, 120 bp, Artificial Sequence
  ENSG00000269954_19 (sequence is synthesized)
gtggcagaaggtggggctgtcctccagggctcagagaagtcatgtccctggcatctgtgtgtagctcaggcctgcccatcagcctggggtcgacgccagggctgtgcaaaggctgagggc

SEQ ID NO: 843187 - DNA, 120 bp, Artificial Sequence
  ENSG00000269952_0 (sequence is synthesized)
gttgttgctttggctactggtctgttctttcattttgggcttatagtgctttaaaattcaatatattggatattaaatgcatgtgattaggaaacagtcttgaaatatgcccagagttac

SEQ ID NO: 843188 - DNA, 120 bp, Artificial Sequence
  ENSG00000269952_1 (sequence is synthesized)
tctttaattttcagaagcactgtccatttcatttcggtttataaaaatgcacatcttttgtttattgttatgatttatccatgtgtgttttctagccaataaactgtgtcttgcagtcat

SEQ ID NO: 843189 - DNA, 120 bp, Artificial Sequence
  ENSG00000269951_0 (sequence is synthesized)
tagcgggttattgccaagactgaagtggtaatgtttagtaaaaatatgctttatcttggttagtagggtagtaaagtttttgtgagctgtgataaggaagttaagcagatacgctggggg

SEQ ID NO: 843190 - DNA, 120 bp, Artificial Sequence
  ENSG00000269951_1 (sequence is synthesized)
caaatgtgtcacagtgcaatgtagctaatgaggaaacagcattaggtatgtctcccaagaaagtattagtttgtggactaactgtgggaatctgatgatgatgggtaatggcaactaaca

SEQ ID NO: 843191 - DNA, 120 bp, Artificial Sequence
  ENSG00000269951_2 (sequence is synthesized)
agggaatattaggtacattttagaggagaacattaaggttgactgagccaaagtagcacacccaaggtgtgatacagcctgcgttcaaacccaggttgtcccatactctagagactgtga

SEQ ID NO: 843192 - DNA, 120 bp, Artificial Sequence
  ENSG00000269951_3 (sequence is synthesized)
tgttaggacaaagtgtgatttcagaagatttgtaaagagaagaaagttgttagaatcacttctctaaagcatgctgattttgagattgctaaaattagaaactgtaccagaatttacatg

SEQ ID NO: 843193 - DNA, 120 bp, Artificial Sequence
  ENSG00000269951_4 (sequence is synthesized)
acactttgtttggttttgaattaagtcattatgaggaagtacattaaaaaatgttaaaaggttcttcctgggaatttgtaatgcattcttcagttctaataaatgtattcttatatgctg

SEQ ID NO: 843194 - DNA, 120 bp, Artificial Sequence
  ENSG00000269950_0 (sequence is synthesized)
aaccctcataataactgtccagtaacatttatccccagtaaagctaataacatagcctcttcctatatccctgtggtatctcacctagtagctgaatttcaaaaatgtgtatgatctcag

SEQ ID NO: 843195 - DNA, 120 bp, Artificial Sequence
  ENSG00000269950_1 (sequence is synthesized)
taattgcagcactttgggaggctgaggcaggcgtgagccactgcgcccagcctatcaagttggatcttggtgatattcattcaatatgaagtaccaagtgaaaatgatcaggatatttaa

SEQ ID NO: 843196 - DNA, 120 bp, Artificial Sequence
  ENSG00000269950_2 (sequence is synthesized)
agtgaaaatgatcaggatatttaaaaatcctaagattatagttaagcattttgagtgtttgattgggttattgattacactgactccttgtcagtaggtagatatcactagccattttag

SEQ ID NO: 843197 - DNA, 120 bp, Artificial Sequence
  ENSG00000269950_3 (sequence is synthesized)
caagagggtttagccaaagtctttgtcaaaaaggaacacgccattaatttgggtgtaaattttttgggagaaaattacgtgtgtgtgtgtgtgtgtttgtgtctgtgtgtgtgtctgtgt

SEQ ID NO: 843198 - DNA, 120 bp, Artificial Sequence
  ENSG00000269950_4 (sequence is synthesized)
gagagacagacacacacacatagagagagaaagagagacagagagagagacacacacatacacacagaattttgtagtttaaatctttcaagtcgcacacttgaaactctaagagggcac

SEQ ID NO: 843199 - DNA, 120 bp, Artificial Sequence
  ENSG00000269950_5 (sequence is synthesized)
agagattcccgtaaaagtggttcatagaggagcttttcttgtctttggaggcctaattaatattatgtggcaataggtgaagctattaaaaatttttattttaattacactaaaattaga

SEQ ID NO: 843200 - DNA, 120 bp, Artificial Sequence
  ENSG00000265069_0 (sequence is synthesized)
gaattcacagagagtgatggcaggagctgcagaagacagacaggagcccaggtctaagggggtatgacagggtggcacagccaatgacaacaagacgggcagggcatggcagagactgca

SEQ ID NO: 843201 - DNA, 120 bp, Artificial Sequence
  ENSG00000265069_1 (sequence is synthesized)
ggcaagcctggcaggtgagctggaggacctcaggaggagagaggagcaacatggagtccgggagccccaagctccaggccttgagatcttcccttggcagaagggtcccagggacaggca

SEQ ID NO: 843202 - DNA, 120 bp, Artificial Sequence
  ENSG00000265069_2 (sequence is synthesized)
gccgactgattaaaaggcaagatgaaatggctgttttgtgtgagaccaaactggtgagcgccgggaacgtactccagagctgcatccaccacacactgttcctgtaagagacacacaggg

SEQ ID NO: 843203 - DNA, 120 bp, Artificial Sequence
  ENSG00000265069_3 (sequence is synthesized)
acactcagccgccacccgcagcccgaaccccactgacacacgcgtgttccgccatgaagggccatctacgaagcaatcccattagaacagcaacaaccaccagtgcctgttggcgctcac

SEQ ID NO: 843204 - DNA, 120 bp, Artificial Sequence
  ENSG00000265069_4 (sequence is synthesized)
tccatcttcggtttaaatgatgcactcgccagcgctttatctccctgaagaaagcacttagagcttctgtctgtcaccttaatcccactcggcttcactgaaattcataaggacactgaa

SEQ ID NO: 843205 - DNA, 120 bp, Artificial Sequence
  ENSG00000265069_5 (sequence is synthesized)
gtctctcctacaaattttcatcaggcttaaggggcaaaggccttgctgtccccctaggcccccgccgtgacccgaggttttgggaatggccctaaggatgcagctgccgagacgagctgc

SEQ ID NO: 843206 - DNA, 120 bp, Artificial Sequence
  ENSG00000265069_6 (sequence is synthesized)
ggaccaggcactggaaaactggaggtgcccacaggtgacatgttttgcagggcctcagagtgtgaacctaggtccacactgacagggcaggatgcagacaagaggagccaggcgggaagg

SEQ ID NO: 843207 - DNA, 120 bp, Artificial Sequence
  ENSG00000265069_7 (sequence is synthesized)
gcccctgaaccccacgcaaccatctgcgggctgtcctaagagtgcccaagtcatgggggtcccagatgctgttttctgcttcagcacaggcagatgctaccatgaaaactgccccgaact

SEQ ID NO: 843208 - DNA, 120 bp, Artificial Sequence
  ENSG00000265069_8 (sequence is synthesized)
caaagcctcgccctgctcagaaggtcctgctcttgaatgcttctgccatcttctaaattattagagtgcacactttaaaccagggaaacagagaaagcaaaaggggagaacatgaaaaat

SEQ ID NO: 843209 - DNA, 120 bp, Artificial Sequence
  ENSG00000265069_9 (sequence is synthesized)
tcaaaatatttggccagaactggcttttcctaatgaattgaatctttttttttttttaaagcaacaaatatgtgcacaatggctttacatgaagtacttattttcatgctttcctggcta

SEQ ID NO: 843210 - DNA, 120 bp, Artificial Sequence
  ENSG00000265069_10 (sequence is synthesized)
aatgtaaattgataatgagtccttatagaagctctgccaaaagcatattatacatcagcccaatgcgcggcctgggtgttggggcctacaatctatggattgggccgtgtcatctgagtt

SEQ ID NO: 843211 - DNA, 120 bp, Artificial Sequence
  ENSG00000265069_11 (sequence is synthesized)
gcttgaggcaccctttccctccctgtccccgctctgatttttagcacagctccagctccagctccagctccagctttcgcaggcacctttacagcaaggccccattttaactccctctgt

SEQ ID NO: 843212 - DNA, 120 bp, Artificial Sequence
  ENSG00000265069_12 (sequence is synthesized)
cctaggccctcctttgctgactggacctgactgatagtaaaggaagccgctcctactggaaaagcccggggctctggcaagagcttgctgtcctctgcatcgggagccagcttaggcctt

SEQ ID NO: 843213 - DNA, 120 bp, Artificial Sequence
  ENSG00000265069_13 (sequence is synthesized)
tctgacagccagcaggtgtccaggtcgacttgctcatggccaactgcactgttgaaatccaaaagtctaggtagaaacaagagagtgttttcaaaattaggatatcacaaaccagtccat

SEQ ID NO: 843214 - DNA, 120 bp, Artificial Sequence
  ENSG00000265069_14 (sequence is synthesized)
gaacccaagtcatctgataactgtacaatgaaaatcaattaaaaaccatgtatatatttctcttagagtaaccaaagtgccaatccttcactgtgactcagagtccaaacatgctatctt

SEQ ID NO: 843215 - DNA, 120 bp, Artificial Sequence
  ENSG00000265069_15 (sequence is synthesized)
aatatttcttgtctgaagcttctgcttgcaatggcacccagcctagcatatccccatgtcagaccctggccattcctgagcaccccccaggtcagctccgatgccatcgcctcctcctgc

SEQ ID NO: 843216 - DNA, 120 bp, Artificial Sequence
  ENSG00000265069_16 (sequence is synthesized)
agccttgactgggctgcctcagggacacgtttttgtctctagttcccaagcgctgcacagtgacctccacgaaacactgatttcttgtttacgtgcttccccttgccaggaggttgtggg

SEQ ID NO: 843217 - DNA, 120 bp, Artificial Sequence
  ENSG00000265069_17 (sequence is synthesized)
ctacgcttgtcacatgcactttcactctgcagctcctgtgctgtgtcctgtgcctgcgcacgtccccctggcactttcccgggcacagctgggaactccacagaaacgtttctgctctac

SEQ ID NO: 843218 - DNA, 86 bp, Artificial Sequence
  ENSG00000265069_18 (sequence is synthesized)
gggcacagctgggaactccacagaaacgtttctgctctaccgagtccacaaacccatgactttcaggagcatgaggatgcctcaga

SEQ ID NO: 843219 - DNA, 120 bp, Artificial Sequence
  ENSG00000263388_0 (sequence is synthesized)
ctgggagggcctgttcgcaggcaggaatgcactggctgtgcctcgccccgccatgtccttccacaggtccttaaatgataacagaagtttcccaaaccatcctatggatgaaaatctgtg

SEQ ID NO: 843220 - DNA, 86 bp, Artificial Sequence
  ENSG00000244468_0 (sequence is synthesized)
accagaaggaagaatctgagacatgccgcctttaagaactgcaacactcactgcgagtgtccgcggcttcattcttgaagtcagtg

SEQ ID NO: 843221 - DNA, 120 bp, Artificial Sequence
  ENSG00000244468_1 (sequence is synthesized)
ttggcgacctagatgggacaatcgcctatcaccgagtggtgagaccatcgcctatagctgagcggcgagacaatcacctatcgccaagcaattacctaccacttccagggtcagagccct

SEQ ID NO: 843222 - DNA, 120 bp, Artificial Sequence
  ENSG00000244468_2 (sequence is synthesized)
tcacttcatattcatgaggagacggggaattggaatatacccgcagccgacaatctcagtgtgaaatactggtttactgtttggagaacaatagacaatgatcaacaactgaagagctga

SEQ ID NO: 843223 - DNA, 120 bp, Artificial Sequence
  ENSG00000263382_0 (sequence is synthesized)
atcactaacaattctgttttcacacttatccagccaagttgcgagagaaacccctgaagtagtctaaaacacatattcagttatcaaaatttttggtcctcaagtcactttgattttact

SEQ ID NO: 843224 - DNA, 120 bp, Artificial Sequence
  ENSG00000263382_1 (sequence is synthesized)
aaaagcaatcatttgaaggacatcttgtcagctggaatcccaaacaaacagacgagcgtgaaacaggagaaaaaagaacagaaaaataaacgtgaaagagctacataatgtgagatacca

SEQ ID NO: 843225 - DNA, 120 bp, Artificial Sequence
  ENSG00000263382_2 (sequence is synthesized)
tctactcaaaagtgttttaataagcagattttgttgatttatacatttctattgcgtgaatagattcattggatctgtaaaacaacaccggattttaagggattttaaactacatttgct

SEQ ID NO: 843226 - DNA, 120 bp, Artificial Sequence
  ENSG00000263382_3 (sequence is synthesized)
taaagacacggggcattatccaagggctgccattctgtatgttgatacagctgttgacctaccagaacctacatacttgatgataataactcaaaaactgtctctttaccagcctttaat

SEQ ID NO: 843227 - DNA, 120 bp, Artificial Sequence
  ENSG00000263382_4 (sequence is synthesized)
caagtaggaaagatttgttggagctctcactgccttctataaaacctgctgtttggtacccatggaataccaaattctcacaactgctaggccactcgctagtgctgtatatccatacaa

SEQ ID NO: 843228 - DNA, 120 bp, Artificial Sequence
  ENSG00000263382_5 (sequence is synthesized)
tattactgtcattatgcagtctcattaaatattattaaaagcaattattatggatatgaagaacaaaagatctacttcctctacaaaaaccaaatcaaatgcattgaaaagagacaataa

SEQ ID NO: 843229 - DNA, 120 bp, Artificial Sequence
  ENSG00000263382_6 (sequence is synthesized)
agtcaggtcaccttaaaaataaatactgtcatcttaagtttgaccaagacaaccataaaagattgaggaaggaaatcagatcatttaaaaatgggaagaatagtggtcttagattgcttt

SEQ ID NO: 843230 - DNA, 120 bp, Artificial Sequence
  ENSG00000263382_7 (sequence is synthesized)
gtaagtttctgtaagttcctccttcacctaagaaactgaagcttcacatggccaatgatgctgtgtaggtgtcacttgtctgtgagagccaatgaagaacattaatcagaagaaccaaac

SEQ ID NO: 843231 - DNA, 120 bp, Artificial Sequence
  ENSG00000263382_8 (sequence is synthesized)
tcaagaacaaggtcatttcctgcttcacaagataatcagagcccggataatggtcctgagattgtctaggtgccactgtgaaaaatgcctcaaccacaaatggatttctaagtagccaga

SEQ ID NO: 843232 - DNA, 120 bp, Artificial Sequence
  ENSG00000263382_9 (sequence is synthesized)
cctaatgggccacctttaatgatcaacagagccaaatcttgttatttcatacttaaggtaactggagcaggtaaaccacatatgatctgatcagtgtactcattaaagaaaaagttgatg

SEQ ID NO: 843233 - DNA, 120 bp, Artificial Sequence
  ENSG00000263382_10 (sequence is synthesized)
caatcagtagcatctgtttctaggtcagatggcatacaagttcctcctctgctaagagttactgcttttgtgcctccccaaaaagatataataaaaataagattgaatatggtcttttaa

SEQ ID NO: 843234 - DNA, 120 bp, Artificial Sequence
  ENSG00000260725_0 (sequence is synthesized)
ctgggaggcagagaccctgtcttcaggtgttggctgaaagaaatggtaacttattttagcagccttgagctttctcatgcgggcacatgaagaggactagtgtcatcttagggaatgcgg

SEQ ID NO: 843235 - DNA, 120 bp, Artificial Sequence
  ENSG00000260725_1 (sequence is synthesized)
cctcgcaccattggaaacaatgattctaaagaccatttccacatggagaagctgccagaacaagcactgctacccttggaggccattgacattgtgaggtcgctgggactgaaaggaggt

SEQ ID NO: 843236 - DNA, 120 bp, Artificial Sequence
  ENSG00000260725_2 (sequence is synthesized)
tgaccagaagttctgtttggcaatgcaaagccaggaggaaaagttaatggagtttgtcccccgggtcccaagaaagctgacccaggacgatgaagctagaatttgtgttctaggaggtgc

SEQ ID NO: 843237 - DNA, 120 bp, Artificial Sequence
  ENSG00000260725_3 (sequence is synthesized)
tgcttcttccaggaaagtctactcaaagcacacactgtgagctgctgcatgtctcttgagctagttcactgcagttttcatgatgaaagtgatctgtttcagtaaactttctgttatttg

SEQ ID NO: 843238 - DNA, 120 bp, Artificial Sequence
  ENSG00000260725_4 (sequence is synthesized)
agagcatgggaaaaatatttgctgtgatttcccaattccccattttttctgattctttgttgcagtttccacaactttgttatcaggctgtgacagaggtttgtgaactgatgaaagctc

SEQ ID NO: 843239 - DNA, 120 bp, Artificial Sequence
  ENSG00000260725_5 (sequence is synthesized)
cagagcctcccaggccctctgagtctgatgcctgcactccacaatcaggcctcaagctcagggcgcctgccaccaacccacgctgggcttcaggggcaggcagcacttgaatggggtttg

SEQ ID NO: 843240 - DNA, 120 bp, Artificial Sequence
  ENSG00000260725_6 (sequence is synthesized)
ttctttattttctcttattttaagccttaaaaaaaaaaagataaggtcttgctctattgcccaggctggagagaaatggtgtgatcatagctcactgcagctttgaattcctgggttcaa

SEQ ID NO: 843241 - DNA, 120 bp, Artificial Sequence
  ENSG00000260725_7 (sequence is synthesized)
ccgatcctcccacctaagcctcccgagtaaccaggactgcaagtatgcaccaccacacccagttaattaaatttgtgtgtgtgtgtgtgtgtagaggtgggttcttgctttgttgcccag

SEQ ID NO: 843242 - DNA, 85 bp, Artificial Sequence
  ENSG00000260725_8 (sequence is synthesized)
caacctcatcagcctccttaagccatttgcttaagtggctttattgcaaaacaatatcagaataacaaagaaatataaggtcaaa

SEQ ID NO: 843243 - DNA, 120 bp, Artificial Sequence
  ENSG00000260725_9 (sequence is synthesized)
gcaaaacaatatcagaataacaaagaaatataaggtcaaactttccctgttcccatctagtccaataagcattgctgctcttgccagggattctcgcccatctccatgtgccagtgcaat

SEQ ID NO: 843244 - DNA, 120 bp, Artificial Sequence
  ENSG00000260725_10 (sequence is synthesized)
ccatactggttgttctccttggctaccccacatctgagtctctgccttgtctgcattcttccccactttatgaagagatgagtcagtgcctgattttttctgcctctcttgtcactaggg

SEQ ID NO: 843245 - DNA, 120 bp, Artificial Sequence
  ENSG00000260725_11 (sequence is synthesized)
cacagccatgtgcatgggccctgtcactcagaagcccccatccaccaacaacatggctctgggggcctcctctctctggaagaattggcagttttagcaagaaaggttttcagaggcagc

SEQ ID NO: 843246 - DNA, 120 bp, Artificial Sequence
  ENSG00000260725_12 (sequence is synthesized)
aatgatggtggagatgtccagggccagtggcaggtcaaaccattctctgtgtcatttggggcagtgtttatgctgtccctcattttggttccctaagcctccgaacatgtacgtgaattt

SEQ ID NO: 843247 - DNA, 120 bp, Artificial Sequence
  ENSG00000260723_0 (sequence is synthesized)
tctcattgctagtttcatggatgtatcctgtggcttctccatgagataatgaagttcttgaaagtgggagtgtcatttacactcctacctgcagacagcacctgatacagagtataaagc

SEQ ID NO: 843248 - DNA, 120 bp, Artificial Sequence
  ENSG00000260723_1 (sequence is synthesized)
aatgaagcattctgtgcctgccccacaaaccaccaagggactgtgggtttatttgtctcaagatggtcaacactgctgttttcacattttacttgctgtcaaatataaagagatatcata

SEQ ID NO: 843249 - DNA, 120 bp, Artificial Sequence
  ENSG00000260723_2 (sequence is synthesized)
gtttcatggatgtatcctgtggcttctccatgagataatgaagttcttgaaagtgggagtgtcatttacactcctacctgcagacaggtatactggcacttattacataccaaatcctat

SEQ ID NO: 843250 - DNA, 120 bp, Artificial Sequence
  ENSG00000260721_0 (sequence is synthesized)
gtggatccgtgagagcatcagagaaccacggcattttcctacatcactgctgtgtgctttgcacagatgcaaaatgttaaaagagttcagaggctgcaggacttggcagggctagggtaa

SEQ ID NO: 843251 - DNA, 120 bp, Artificial Sequence
  ENSG00000260721_1 (sequence is synthesized)
gttggaaaagccttcctaagagcctagatatttggacagggcgtgcaaggtgggtgtgatttagatgtgagaatggagtttcatgcattccacctaaaggaatgtagcagaatgggacgt

SEQ ID NO: 843252 - DNA, 120 bp, Artificial Sequence
  ENSG00000260721_2 (sequence is synthesized)
cctgtaagatacaggcacatcgagaatttacactggaggccaaatgaagtagacagggaaacaaggggaaggaattcttggtgcaaaaccaactgtgaggggctgaaatgtggcccccag

SEQ ID NO: 843253 - DNA, 120 bp, Artificial Sequence
  ENSG00000260721_3 (sequence is synthesized)
attcctaacccccaggacctcagaatgtgactgcatgtgaagatagggtttcatcaaacaggactggggtccttacaggaaggggtgatcacgacacagacacacacacagagggatgac

SEQ ID NO: 843254 - DNA, 120 bp, Artificial Sequence
  ENSG00000260721_4 (sequence is synthesized)
taaatgttgttgaaaccacactatctgtggaattttgtaatgacagccccagcagaggaacaccagccttgaaagctttgatcaaaagctgtccattattttataacatagaactgtgga

SEQ ID NO: 843255 - DNA, 120 bp, Artificial Sequence
  ENSG00000260721_5 (sequence is synthesized)
attccaatgtggatttagggttctgcattctctgctgtgctgtaagctccaagcaggaaggggctgtgtgtgcgggaactagctcagtgtctacctgtgtcccactccgggcaccgggcg

SEQ ID NO: 843256 - DNA, 120 bp, Artificial Sequence
  ENSG00000260721_6 (sequence is synthesized)
tcacgtgcacagagttgagggtgacacctagtatgtgcggaggacctgcgtttggcacaggaacggacgatcagttgtggatgctgtattacaggaagacgccacttagagccatcgcag

SEQ ID NO: 843257 - DNA, 120 bp, Artificial Sequence
  ENSG00000260721_7 (sequence is synthesized)
tcaatttgacctttgtgctgggagagcatcaggaatagatggttccaggctaagtaaaagtttacctacatgctgcagagatgccttggatttcaagccagcacgggctgctgcggctgt

SEQ ID NO: 843258 - DNA, 120 bp, Artificial Sequence
  ENSG00000260721_8 (sequence is synthesized)
atttctggagtcagcagataatgaattattagatcaccagctaatgaggtaacgctgtagcataccacatgctttatgccaaaaataaaaaattgatatacggcaccagacgcacaaaaa

SEQ ID NO: 843259 - DNA, 120 bp, Artificial Sequence
  ENSG00000260720_0 (sequence is synthesized)
agtcactgtcaggaagctgagctaggatgcctttagctttgatgactggggtgacttggctcattccacatgtttctcatcctctagtgggctatactgggaatgttctcacagtaatgg

SEQ ID NO: 843260 - DNA, 120 bp, Artificial Sequence
  ENSG00000260720_1 (sequence is synthesized)
cacagagaaaggaaatctccggcataaaagacattggaactaagaaatgtgttgattaaaaaaatataggaagtgacagcaggaacacagtactaccttaattaccaaagccatttctaa

SEQ ID NO: 843261 - DNA, 120 bp, Artificial Sequence
  ENSG00000260720_2 (sequence is synthesized)
ctttgggtgtcagctaatacttattctgcctaggtggtgttctgatttatatgagtgtctgaaagatataatgtctttcccagaggactttattagaatctaatgattcaacttgaatgc

SEQ ID NO: 843262 - DNA, 120 bp, Artificial Sequence
  ENSG00000260720_3 (sequence is synthesized)
gaaaacataaaaatgtgtgtgttcaggaaaggcagaagctggaggtaagttgtggggagacacacttagtgagacagatgagtccaggcctgaggcacctcaacccatccacattcttct

SEQ ID NO: 843263 - DNA, 120 bp, Artificial Sequence
  ENSG00000260720_4 (sequence is synthesized)
tccactattagttttatattttcttcataaaagcaagatttttttttctcagaaagatatatgtgcttttcatgtctgcattctgataaggaaaatagtcaagagaaatcatgaaagtat

SEQ ID NO: 843264 - DNA, 120 bp, Artificial Sequence
  ENSG00000260720_5 (sequence is synthesized)
taaagaatggccactaattgaattactttagacaataaaaatgcagctgttctttgcacccaaatgagtgttaccattcaatttttcaaataaagttaaaaaaggagtaatttttgctca

SEQ ID NO: 843265 - DNA, 120 bp, Artificial Sequence
  ENSG00000251031_0 (sequence is synthesized)
cagaaccatggagcctttgctggacatagcgtctgggattggaggcgtgagttcccggtgtctggaatctgtcttcacggtgcagtgaaccactcgggcccgagcagcggtggcaggcga

SEQ ID NO: 843266 - DNA, 120 bp, Artificial Sequence
  ENSG00000251031_1 (sequence is synthesized)
cagagcagggagaagctggaagctggaacttatcacccactatctcttaactgagccaggagccaatgcccactgtgatcaaactcaataggaagctagatgggaagggagcttgctgat

SEQ ID NO: 843267 - DNA, 120 bp, Artificial Sequence
  ENSG00000251031_2 (sequence is synthesized)
gccatccacacggatcatccttggaggtgcagggcagggtgaagaagtgtggaaggaggtctggagatgctcagagctgtgtcctcctcaaactttacaatagagctcagatccactcag

SEQ ID NO: 843268 - DNA, 120 bp, Artificial Sequence
  ENSG00000251031_3 (sequence is synthesized)
tcaaatgccagagaagaagaaagaagaaaggagactcctgtggatgctcaggtccatgtaaaagggcatgaaagaacttctggcttagggaagatgagatgtagacccattactctctgt

SEQ ID NO: 843269 - DNA, 120 bp, Artificial Sequence
  ENSG00000251031_4 (sequence is synthesized)
tcctctttgtgaagcacagctacaaactctggaattaatgcaagaggcagccaaaggggaactgtgaaagatgttaagaagaaaactggctttcaatgctagaaaaggaggaaattcaca

SEQ ID NO: 843270 - DNA, 120 bp, Artificial Sequence
  ENSG00000251031_5 (sequence is synthesized)
acccagcgactgaaggaagctcagtcaggcttattcctcccctggatagattaggagagcttgtgctatcaatcaaggctaacataattgtcaagaaacattaatcaaaagtcccacaaa

SEQ ID NO: 843271 - DNA, 120 bp, Artificial Sequence
  ENSG00000251031_6 (sequence is synthesized)
aaataagtggccaaagtgttcttctctgacatgcctaagacttttctctgttattgacaaatatcaaggtggtaggctatatcagtaagaggaactcaggcacaaaagtgacctagttca

SEQ ID NO: 843272 - DNA, 120 bp, Artificial Sequence
  ENSG00000251031_7 (sequence is synthesized)
ggaaaccttttctcttttgtgggtctgagacttccctcatttatgtgaacacatcaggtggccctgcctgagtaaccacctactaccctctcagccagcaccaacaagtaccagggaagc

SEQ ID NO: 843273 - DNA, 120 bp, Artificial Sequence
  ENSG00000251031_8 (sequence is synthesized)
ttcagtagcaaagataaaccaagcacagcaaaataatactgcaataactttgaaaattaaagtgtttttggaaccacactccataaaaatagtacaggacctttatgtgaacttgaaaca

SEQ ID NO: 843274 - DNA, 120 bp, Artificial Sequence
  ENSG00000251031_9 (sequence is synthesized)
gcatgattacttgctaaaataagatttgaatgagaccctgagtattctaatataacaaacaaaatgaccaggatgcaaaagaaaatcatctgtcatacaaaaaaaaaaaaaaccagaaaa

SEQ ID NO: 843275 - DNA, 120 bp, Artificial Sequence
  ENSG00000251031_10 (sequence is synthesized)
ttggctccaagcttcagtgccttcttcctggcttcctcgaagtcttccttctggccagtattggccaggtaggcagtgacatcatagccttgttccttcagccacacgaggatgcaggag

SEQ ID NO: 843276 - DNA, 120 bp, Artificial Sequence
  ENSG00000251031_11 (sequence is synthesized)
ttttttcatagcactcatcactgtttaattcacctgtttaatgcttgcctttttcattacactgtaaactccatgtgtttactgctatatgcaagaattagcctgataacttacactggg

SEQ ID NO: 843277 - DNA, 120 bp, Artificial Sequence
  ENSG00000251034_0 (sequence is synthesized)
cggtgctacggcgtccatccctccgcgtcttggctgctggactggaccagaaacagccaagctctgccactgcccaggactggatggaatcaggttatgtaagtgaacatcacataagaa

SEQ ID NO: 843278 - DNA, 120 bp, Artificial Sequence
  ENSG00000251034_1 (sequence is synthesized)
aagtgaacatcacataagaagaaacaatcatactacagaaggtttttcttcacctttttggtagcctgtttaaaaaacaaaacttttatatgcttcattcaggacataggcatgggcaaa

SEQ ID NO: 843279 - DNA, 68 bp, Artificial Sequence
  ENSG00000251034_2 (sequence is synthesized)
tggcaacaaaagccaatattgacaaatggaatctaattaagctaaagagcttctgcactgcaaaagaa

SEQ ID NO: 843280 - DNA, 81 bp, Artificial Sequence
  ENSG00000251034_3 (sequence is synthesized)
tcaaccactgtggaagacagtggggtgattcctcaaggattagaaccagaaataccatctgacccagcaatcccattatcg

SEQ ID NO: 843281 - DNA, 67 bp, Artificial Sequence
  ENSG00000251034_4 (sequence is synthesized)
gggagttgaacaatgagaacacagggaggggaacatcatacactggggcctattggtaaggttgatg

SEQ ID NO: 843282 - DNA, 120 bp, Artificial Sequence
  ENSG00000251034_5 (sequence is synthesized)
gtaatataggctccctctttcacactctgtcaatggcacaaagccctattgttaatacagttctctactcacactcaagataagagtaaacaacactgtccttcgactacacaactttct

SEQ ID NO: 843283 - DNA, 120 bp, Artificial Sequence
  ENSG00000251034_6 (sequence is synthesized)
tcctctacacacatctgctctgacagctttcctccaggcgtctcatcacagcaatactgaaagggactgtggcaagccagttttgggacccgtcctccagacggagtctcgctctgtcgc

SEQ ID NO: 843284 - DNA, 120 bp, Artificial Sequence
  ENSG00000251034_7 (sequence is synthesized)
caggtgcgagccaccgcgcccagcttggatgaaaattcttaaaaggttaaactttatagatatggtacagttgaaaattttggagatcagctaccatatttacataaaatagggcagggt

SEQ ID NO: 843285 - DNA, 120 bp, Artificial Sequence
  ENSG00000251034_8 (sequence is synthesized)
agagggagcagattttagctttactcattctgaggctggagagactcctgaataatgaccatgaacagcaagtccagctgtgtctcatgcaggcatggcttataatatttttcctataga

SEQ ID NO: 843286 - DNA, 120 bp, Artificial Sequence
  ENSG00000251034_9 (sequence is synthesized)
gatcagctgtgcctcaaaccgtgtgtttttaaagcactcagagggaagaggatctaagggacaatgccaaaaggcaaaaaaggccccgaaattatccaatttttaaaaatcttcccttgc

SEQ ID NO: 843287 - DNA, 120 bp, Artificial Sequence
  ENSG00000251034_10 (sequence is synthesized)
tccttaatgacattcaataatagtctattgacaaaacaaataagggtttctctgttcctattttgaacaatgtcaggaaatcatccctaagttatcaggatggcaaagaaagctaatctt

SEQ ID NO: 843288 - DNA, 120 bp, Artificial Sequence
  ENSG00000251034_11 (sequence is synthesized)
aagaaggcaaatctttgctattgagagaaacttgcttcattgaattgttcatggaagaaccaaaaaaggcaatgaaagacataaaaaatactgatgttcctggagaggctgagtctttta

SEQ ID NO: 843289 - DNA, 120 bp, Artificial Sequence
  ENSG00000251034_12 (sequence is synthesized)
ctcctaggcaaggagcagtatcaagctcatcagagtgtgataagcaattcttaccttgccaatcaatatccagtcacaaaagaccagcaaatcagcaatgcctctacttgtaaccaaagt

SEQ ID NO: 843290 - DNA, 120 bp, Artificial Sequence
  ENSG00000251034_13 (sequence is synthesized)
agaccagcaaatcagcaatgcctctacttgtaaccaaagtgtcaccttgagagtttaaggaaaacggaggctatttttgttttatcattctattaaagaaacacacacacacacacacac

SEQ ID NO: 843291 - DNA, 120 bp, Artificial Sequence
  ENSG00000251034_14 (sequence is synthesized)
cttttgctctaaacattcagaacacggaaataaaaaaaggatatatgttttgaacttacattagatgagttttcaaatttgtaaaagaaataatcatctgatcgatttaaatgtcctgtg

SEQ ID NO: 843292 - DNA, 120 bp, Artificial Sequence
  ENSG00000251034_15 (sequence is synthesized)
atatgtatgtcactaaaagtgagaaacctggtccatgtgaagcatcattttcaaaatggcatttcagaaaagtttacaaaggagtcctgacatgcctgaggaattgttttgtttttgttt

SEQ ID NO: 843293 - DNA, 120 bp, Artificial Sequence
  ENSG00000251034_16 (sequence is synthesized)
tcctaaatgggagaagttgcagaaaaagaaggtccctgtgggccttccacaaggaaggtcctgtgaaggaaaacacaatgtaactgtttccagtatctttagcacacacagggggaaaca

SEQ ID NO: 843294 - DNA, 120 bp, Artificial Sequence
  ENSG00000251034_17 (sequence is synthesized)
ttcaataaaacagaagagactttgaaaacaccaaaactgcagaactttgacagcaattaaaatgtctgtttaatcatggccctagacaggaaaagtagtcttcgagcaaacccagggcag

SEQ ID NO: 843295 - DNA, 120 bp, Artificial Sequence
  ENSG00000251034_18 (sequence is synthesized)
ggtccagccatcttggaagttgttgtttacattaaaacagctacagaacggaagggataactttatctttagaattcaaccgaattttcaaacttaacctcctctaagagttagtgctgc

SEQ ID NO: 843296 - DNA, 120 bp, Artificial Sequence
  ENSG00000251034_19 (sequence is synthesized)
gtcaaggaaacttgctttatcattctgctttttgagacaatagtgaagccattcctaaataatcatccgtaataaaatattattttttgcttataaggatttacagtaactatttctact

SEQ ID NO: 843297 - DNA, 120 bp, Artificial Sequence
  ENSG00000251034_20 (sequence is synthesized)
actgcctgcttatggaggcccctaagagtggtttctacctgtggattgtatatatgtaacagccttaatgaaaaggagaaaagggataaggtactagcagctctgcagtctgtcacatgg

SEQ ID NO: 843298 - DNA, 120 bp, Artificial Sequence
  ENSG00000251034_21 (sequence is synthesized)
aatgactttcatcagtgaaatttccaaagacaggatcttttctaatcctgggattggaaaagaaaggagcataaggatatctaggtgcttaatacccgatttgagttcaacaacaatcag

SEQ ID NO: 843299 - DNA, 120 bp, Artificial Sequence
  ENSG00000251034_22 (sequence is synthesized)
gaaaagacagttactagagacttttccccccttctttcacaggttttactcacaacccattcagagatcctttatctccttcctatctttttattaatggagcaatctatgcaggcagat

SEQ ID NO: 843300 - DNA, 120 bp, Artificial Sequence
  ENSG00000251034_23 (sequence is synthesized)
tccattccctaagagtgccttgatttctgccataaacaaatcagaaactgttagaaaaaaaggtataggaaaacagagatagatgggctaagtcttcattcttctaatgagaagtatggt

SEQ ID NO: 843301 - DNA, 120 bp, Artificial Sequence
  ENSG00000251034_24 (sequence is synthesized)
tttttggggaaaaaaaaaaacaccaccaaaattatgttgttctttgtttttctggtttcctggaaactcccaatatgaagtattactgtctgaaatacttgctttagtgctagactgccg

SEQ ID NO: 843302 - DNA, 120 bp, Artificial Sequence
  ENSG00000251034_25 (sequence is synthesized)
catcacaaatgacactaaggaatgccataaatgtgcacgttccatgctctgatgtaatgttcccaggcatgtacattcactgcagagctgaccaatgactattatgacacggctcctgcg

SEQ ID NO: 843303 - DNA, 120 bp, Artificial Sequence
  ENSG00000251034_26 (sequence is synthesized)
atgaggctagttaaaatgggagcctaagtagccccaaaatttccttcactagttggttgtgacttgaaaatcaaactaagggaagataattcacacactacatctgaacacttgcttttc

SEQ ID NO: 843304 - DNA, 120 bp, Artificial Sequence
  ENSG00000251034_27 (sequence is synthesized)
gcattccaaaatatgctaatgaaggctgaaataccattcaacctaaagagtaactgatatagaagacaggaaatcctcacttatccaatgttctttagcaagaccttcaattcacaaggg

SEQ ID NO: 843305 - DNA, 120 bp, Artificial Sequence
  ENSG00000251034_28 (sequence is synthesized)
gaccattgaactcttgtcagtttctactaccccagctggtttcagtaatactgacagggaacaacagaaggatgatgggaaggcacatgcgagagctgatgccaacagcctagaagggca

SEQ ID NO: 843306 - DNA, 120 bp, Artificial Sequence
  ENSG00000251034_29 (sequence is synthesized)
tatatacatcttgttgtagaaggtgctgctgagggcatttatcaaatatttagaaagtgacttcctttacagaagtcacctggggttcaaaaatgaaagtaaaataatctggcaattgtg

SEQ ID NO: 843307 - DNA, 120 bp, Artificial Sequence
  ENSG00000251034_30 (sequence is synthesized)
aaagctttctgaaaatctttctcctccaaagtcctaaggaaatttaaaccaatcatgcccatggtcagatgaacagattttaagtaaatctaagaacatcccttattattttttattttg

SEQ ID NO: 843308 - DNA, 120 bp, Artificial Sequence
  ENSG00000251034_31 (sequence is synthesized)
tttactagaacatatttaaacgaactgagagtccagagaaagtaggttattatagaaaacatttcccttcgcccttaaaatcactggatttgggttattcactttgaagttctactatga

SEQ ID NO: 843309 - DNA, 120 bp, Artificial Sequence
  ENSG00000251034_32 (sequence is synthesized)
tccagtttcccatcaaaagggaagcacttttagccactgaaatctaagaggactttcttcaatggcacccagcagaaaaggaaaaaaatgaaaaggaaaaaaatcttcttgcatttgaaa

SEQ ID NO: 843310 - DNA, 120 bp, Artificial Sequence
  ENSG00000251034_33 (sequence is synthesized)
cgttattagtcttacatgaaagacattaccttccaaaaaacaataatgaagactgactagttcaagtcagaaacccaggtttgaggtttccaaggcccttttattaggggaagttcccct

SEQ ID NO: 843311 - DNA, 120 bp, Artificial Sequence
  ENSG00000251034_34 (sequence is synthesized)
ttatagcacaagacttcacaaatgtgttgacaacaatcagattcatttcttaaaattatggagaaaaaagggaaaaacaaaacagatgcactttttatatatattgaacataaattaaaa

SEQ ID NO: 843312 - DNA, 120 bp, Artificial Sequence
  ENSG00000251034_35 (sequence is synthesized)
gaatttataaaacagccacctttttacagaataaatgcagactgaattataaatgcacctccacgttgaagttgttttgagttgcttttcattttccaataataaataaatagaatttgt

SEQ ID NO: 843313 - DNA, 120 bp, Artificial Sequence
  ENSG00000251034_36 (sequence is synthesized)
acacaactttcttcctctacacacatctgctctgacagctttcctccaggcgtctcatcacagcaatactgaaagggactgtggcaagccagttttgggacccgtcctccaggattctgg

SEQ ID NO: 843314 - DNA, 120 bp, Artificial Sequence
  ENSG00000251034_37 (sequence is synthesized)
gaagatgaggtggcctacaggaccaagagaccaaagctgtatcgagaaccagagttccctctgttgccagtgtcagtaaggaattcctccatgggagttccacacttgaatagagctagc

SEQ ID NO: 843315 - DNA, 120 bp, Artificial Sequence
  ENSG00000251034_38 (sequence is synthesized)
gaagctaagagtcatccctggtcaacaactaacaggacaacagggaccttaatcctacagttacaaggactgccaacaagtgaccttggataaagaccctaagccccagatgagaactga

SEQ ID NO: 843316 - DNA, 120 bp, Artificial Sequence
  ENSG00000251034_39 (sequence is synthesized)
aaccctggcaacaccttgatttcagtgagatcctatacagagaatctagccacactgtggcctggacttctgacctacaataactatgagataataaatgtgttctttttagccactaaa

SEQ ID NO: 843317 - DNA, 120 bp, Artificial Sequence
  ENSG00000251034_40 (sequence is synthesized)
gcactccagcctgagcaacagagtgagcctctgtctctaaacaataaaaaataaatgtttggcttaataaattatattttgatgtggctgtcaacttggggctacagaataaggaaatac

SEQ ID NO: 843318 - DNA, 120 bp, Artificial Sequence
  ENSG00000251034_41 (sequence is synthesized)
ggaaatacatcagtgggtggaaggaggagtctctacaaatctctggaaaggaaaagtcatgaaataataggtgggaaactggaaaatgggtgtttaaagagaaaaaggaacattttcttc

SEQ ID NO: 843319 - DNA, 120 bp, Artificial Sequence
  ENSG00000251034_42 (sequence is synthesized)
ttccttggccttggtttcaaaaagtcaagctgtgctcagggatgtgtgtgggtagagaagacgagaaatatagtcaggcaaccctgcagaaccgtgagctccttctcctcttccaggatt

SEQ ID NO: 843320 - DNA, 120 bp, Artificial Sequence
  ENSG00000259209_0 (sequence is synthesized)
tgtcacttagaaagatagtgatcaattagaataatttaagagtattgaaatgcatggtaggtggtctttcctattctcattcaggggacagaaacatgggccccatgccttccacccttc

SEQ ID NO: 843321 - DNA, 120 bp, Artificial Sequence
  ENSG00000259209_1 (sequence is synthesized)
tttcctgaaagaatgggaaaataagggcaccgagcagcagctcctacatctctttcaccaatttgaaatctcaagcttctttgtaaataggctcccatggttctaggccatcagatggga

SEQ ID NO: 843322 - DNA, 120 bp, Artificial Sequence
  ENSG00000259209_2 (sequence is synthesized)
caaggatgatgagaaagctgaggaaaccagtaacacagaaacccactggtccacagaaggaggttttcacttacagagaatctttacacactgttcaccagctgatttgaaaatacccac

SEQ ID NO: 843323 - DNA, 120 bp, Artificial Sequence
  ENSG00000259209_3 (sequence is synthesized)
agaaagttaatttaacttcaaagatctctgaaaggcaactcatggctaggtcacctttgagcttcccattggctgctaaagttctcttgatgcatcatcaattatatattcttcatgact

SEQ ID NO: 843324 - DNA, 120 bp, Artificial Sequence
  ENSG00000259209_4 (sequence is synthesized)
tacctctctgggaatcttcacgtgaaaaggcaatcaaattaacttattactccactgctaaaataatgctaagaaagaggtgagaataattctctttggtggtttttcctctaatgatca

SEQ ID NO: 843325 - DNA, 120 bp, Artificial Sequence
  ENSG00000259209_5 (sequence is synthesized)
ttgaaatctcaagcttctttgtaaataggtgagagttcttatgtgtaactgacattgggggagggctgcccagccagttgtggaggggcccttgtctcatctcccttaagctttatagat

SEQ ID NO: 843326 - DNA, 120 bp, Artificial Sequence
  ENSG00000259209_6 (sequence is synthesized)
ttccttctttgatatgacgtgtgcagaggtactctttgcagctctgtttccaataggccaagaagaatgaagtgctgtgggtgtggtctccatagtggagggccagcactgcaattgttc

SEQ ID NO: 843327 - DNA, 120 bp, Artificial Sequence
  ENSG00000259209_7 (sequence is synthesized)
ctagtggagaatatttctcaagccccctcatcagtaagaagggggcccatggaagacatagatatgagatgcagagcataagcaagcagctgttaccatagcaacagacatattagacac

SEQ ID NO: 843328 - DNA, 120 bp, Artificial Sequence
  ENSG00000259209_8 (sequence is synthesized)
atcagggtggaatttacttttagtgggactgaaccgaactcaagctaaatcctgagactttggacacagacagcaaaaaatatttaccagaatttacagctgtaaataccccggacacac

SEQ ID NO: 843329 - DNA, 120 bp, Artificial Sequence
  ENSG00000259209_9 (sequence is synthesized)
cccatgtctgccaggaatcatctatttgggggattttgcaagcttttcctattctgcagccaatggcaactaactcagtcaacccatttggaaagaaagaagattcactcttgctgccat

SEQ ID NO: 843330 - DNA, 120 bp, Artificial Sequence
  ENSG00000259209_10 (sequence is synthesized)
tcatcctagccactcagggacaaagcagacataacttccttctcctggagcatgaatgaccgtagaactggccattccttaatgatatggtttagaaaatggagccctgattagaggggc

SEQ ID NO: 843331 - DNA, 120 bp, Artificial Sequence
  ENSG00000259209_11 (sequence is synthesized)
atttttcatcatgctgttttcactttcctgctctagttggccatgaacaaacatatatcgttagaaagcctaaccaatactttcccggggccaatcttctaataaaatgacagtaaaata

SEQ ID NO: 843332 - DNA, 120 bp, Artificial Sequence
  ENSG00000259200_0 (sequence is synthesized)
cgccgagcctcggagagcaggggctttgcttttccggctgaggtgttcaataaacatctcttaaacaaaggagtgcgcaagtgagataatataagggggatgcccaactatacaacaaag

SEQ ID NO: 843333 - DNA, 120 bp, Artificial Sequence
  ENSG00000259200_1 (sequence is synthesized)
agttgccaaacatttctctggagcaaataaatggtgtgatggatggaactaactggatcaccaacctgtgagagatggctggttcactggccttggcctcctcgggccatgacattaatt

SEQ ID NO: 843334 - DNA, 120 bp, Artificial Sequence
  ENSG00000259200_2 (sequence is synthesized)
ccttgccttctgtttggatcctgccaatgaggactcctagcaggagatgggggctctcatatttaactgaaaggctcagctccacgcagcgtttctgtctccagcccacacagcacgatg

SEQ ID NO: 843335 - DNA, 120 bp, Artificial Sequence
  ENSG00000259200_3 (sequence is synthesized)
agataaagactagaggctgctcactgctgagagtggaccatccagctcatttggtcacataatttccagccagccaccttatgggcaagattttggctcacctgtaagctattagctgga

SEQ ID NO: 843336 - DNA, 120 bp, Artificial Sequence
  ENSG00000259200_4 (sequence is synthesized)
aaatactggcttcatgaaatggcttggaagatttggaggcaacctaaatgtccatcaacagatgaatggataaagaacaacagggtgactaaagtcaataataatttaattatacattta

SEQ ID NO: 843337 - DNA, 120 bp, Artificial Sequence
  ENSG00000259200_5 (sequence is synthesized)
tccgccaaggcacccggttccccgcctccgccaaggcaaccggtcccccccccccccgccccccgctacggcacccagtcccccgacggctctcggtctcctccacgccgagcctcggag

SEQ ID NO: 843338 - DNA, 120 bp, Artificial Sequence
  ENSG00000259200_6 (sequence is synthesized)
cgagcctcggagagcaggggctttgcttttccggctgaggtgttcaataaacatctcttaaacaaaggagtgcgcaagtgagataatataagacagaatctcgctctgttgcgcaggctg

SEQ ID NO: 843339 - DNA, 120 bp, Artificial Sequence
  ENSG00000259200_7 (sequence is synthesized)
tcccaggttcaagcgattcttctgcctgggactacagatgaagaaactgaggccttgaggaggcaagtaatatatccgcaaagaggggctgtcctgcctgggaagatgagcgacacatgg

SEQ ID NO: 843340 - DNA, 120 bp, Artificial Sequence
  ENSG00000259200_8 (sequence is synthesized)
gaagatgagcgacacatgggttttccgagaagcgacacatctgaagagtgaaagaccaccatcatgaaggcttcgcagcatcggtgcaggtgccaggaaggggcatcagtgaccagtgga

SEQ ID NO: 843341 - DNA, 120 bp, Artificial Sequence
  ENSG00000259200_9 (sequence is synthesized)
tttgctgcttccaagtgagaagctcttccctctggccttggcctggaaactgaactcactttcctttgagctcctccaccctccaaagtcaagtcttaacaaaacaacatattccccatg

SEQ ID NO: 843342 - DNA, 120 bp, Artificial Sequence
  ENSG00000259200_10 (sequence is synthesized)
gatttcattggtctagaagctctgagatagagcaagtcaaaatcatctctctgcatctagtggcatcctgaacacagagaggagagctctactgttttgtgaacacatcacagctggggg

SEQ ID NO: 843343 - DNA, 120 bp, Artificial Sequence
  ENSG00000259200_11 (sequence is synthesized)
tcctgtgcttttgcattctttccatgagtccagtattacctgagatattctgcaactttggagccaataacagaatcatgaactaaataaattgttagagaatgagttagcattttcagc

SEQ ID NO: 843344 - DNA, 120 bp, Artificial Sequence
  ENSG00000259200_12 (sequence is synthesized)
aggtaatgataataatatcttcctatcttgtagactactgagcagtttttcaaacatcaattattgcattgtaaaaacctcagtgacaggagtatatggaatcctcaggattgatcacag

SEQ ID NO: 843345 - DNA, 120 bp, Artificial Sequence
  ENSG00000259200_13 (sequence is synthesized)
tgttctgcttgatgtttgcacctgggaaaatgcttgtggttgattttaaccactctgaaacaacagctcagggaaggacagcgcagaagagggaaaatcttgatagctccttgccattaa

SEQ ID NO: 843346 - DNA, 120 bp, Artificial Sequence
  ENSG00000259200_14 (sequence is synthesized)
ccacttgctttcactacctattgaaatcaccagctttaatcgcttcctgcagcaaattcctggagagaagagactaaaaaaagtgagaaaacgtgtctagaagtgccatcttggatgatt

SEQ ID NO: 843347 - DNA, 120 bp, Artificial Sequence
  ENSG00000259200_15 (sequence is synthesized)
ttaggttattaaataacagccttacagaggggttgactgtcatgattttattgccgattccatccttggttatatttcccgaagttttaaaatcatctttcccctgcatttgtagaatta

SEQ ID NO: 843348 - DNA, 120 bp, Artificial Sequence
  ENSG00000259200_16 (sequence is synthesized)
tctgaaatggcttgttaaaagtatacaatgactattaaaggatgtcattttaaaaggcaaataggtatctgtctggatactcaaatggtatctgcttaatgatctaagaaattgctaagc

SEQ ID NO: 843349 - DNA, 120 bp, Artificial Sequence
  ENSG00000259200_17 (sequence is synthesized)
tgtttttttaaagtggctgtaatattttgtactcctactagcatagaataattccagttgcaccacatctctaccagcacttgatattgtcagtcattttaattttagccactctagctg

SEQ ID NO: 843350 - DNA, 120 bp, Artificial Sequence
  ENSG00000259201_0 (sequence is synthesized)
gccaggcacaaaaagatcaaatattgtttgattccacagatataagctgtccagaataggcaaatcctaagaaacagaaagtggatgagtgattgccagagcctggcaggggccaaaaga

SEQ ID NO: 843351 - DNA, 120 bp, Artificial Sequence
  ENSG00000259201_1 (sequence is synthesized)
aatggtcaaggcagaaggccagaaaagaacacagataaccagaaccagaagagcacaaaggccattgagaagaaggggctaataaaatattaaattcctcaagtaatgctacccacacag

SEQ ID NO: 843352 - DNA, 120 bp, Artificial Sequence
  ENSG00000259201_2 (sequence is synthesized)
ggacctgaaatccttgagccctttaaagagatcactgtgctctgatgcatgtgtgtggaggtctacgaacacctataataggtgatacctgcgaggtcacacaattctgtatcagaagca

SEQ ID NO: 843353 - DNA, 120 bp, Artificial Sequence
  ENSG00000259201_3 (sequence is synthesized)
cttgtcaaagcttcttctaattctggatcaagagacactttttcttctgtaaaagtctgtacaggtttctgtttggggataaatattttccctgtaaaataaagcattttgttaattcca

SEQ ID NO: 843354 - DNA, 120 bp, Artificial Sequence
  ENSG00000259202_0 (sequence is synthesized)
cctttcaactctgcctggctgtaaccaggatctctttccacaactagttttaccatgtctacttcagcctcattaaggagttaacactgaccagttgcttcctagaagcaagttttatgg

SEQ ID NO: 843355 - DNA, 120 bp, Artificial Sequence
  ENSG00000259202_1 (sequence is synthesized)
tcattgagcaaaaggacatgccagagaaaatgaggaggatgttccaacccaggagtgagccgacgggtatgcagaggctggagctgtctcctgcacatgggatcatgtccctgtgttcca

SEQ ID NO: 843356 - DNA, 120 bp, Artificial Sequence
  ENSG00000259202_2 (sequence is synthesized)
gctctacatggggtgcccaccagctgccccacagggcccttatcacaaacatcacaagcctatttcacaagctcttttctccttgaaatgttgagatcaatatatctccactgttactta

SEQ ID NO: 843357 - DNA, 120 bp, Artificial Sequence
  ENSG00000259203_0 (sequence is synthesized)
gcaggaatccgcgggcccggatgctgcccagctgaccctcctgccccgggcctggctgcagagaaagtcttcgggcaggaggccatcctgttcctgtctttaaaatgagcacaataaaag

SEQ ID NO: 843358 - DNA, 120 bp, Artificial Sequence
  ENSG00000259203_1 (sequence is synthesized)
ggggcaaatcctcgaacgcgaacctgatctcatgtcacagaagcaacttgccatgaaatccgctaatgcgctgcgactcgcccaccaggataaataaccccatcgtccgtgtaatcagca

SEQ ID NO: 843359 - DNA, 120 bp, Artificial Sequence
  ENSG00000259203_2 (sequence is synthesized)
cgttcccaatgaagtcgttttcctagaatgcgctctccgcctgccacacttgaggaatccagcccacagaggtttcggaaacccagtttgagtgattccagcctagactgaaaccctgag

SEQ ID NO: 843360 - DNA, 120 bp, Artificial Sequence
  ENSG00000259203_3 (sequence is synthesized)
gaaggctggatgcggatctgggaggcggtggctaagcgaaccaggaagactgtgacggaaaccaatacagcagtgtcatcttgaaagttatttggaagaacaggacctggagtctgggtt

SEQ ID NO: 843361 - DNA, 120 bp, Artificial Sequence
  ENSG00000259203_4 (sequence is synthesized)
tgaatcaaaaaattgtgagcaagggacagatcaccctgtatttctctggaacgaggcagaactgagacctgctcagctgaaccagcgtggccacatattggggactaggaaattgttctc

SEQ ID NO: 843362 - DNA, 120 bp, Artificial Sequence
  ENSG00000259203_5 (sequence is synthesized)
agacactgtagcacacacatcctctgacagcgagctcactcctgcgcagtgggcttctggttctgccactgcactccacaaacgccctacaggcctcctccaggttttgccaggcaaatg

SEQ ID NO: 843363 - DNA, 120 bp, Artificial Sequence
  ENSG00000259203_6 (sequence is synthesized)
aaacgagcacaactcgatagtaaattattttgttcagccttctctctttttatgaaaataagaggcaacactttgtcatttttaatcacataagcagacaataaatctaattttgatatt

SEQ ID NO: 843364 - DNA, 120 bp, Artificial Sequence
  ENSG00000259203_7 (sequence is synthesized)
gcgcccagcggcgccttctcgccagcgccatgccgggccggaacccagtgggcctccacatcccggcgggccgccagctgggagctgtttatttatggctgcaaatgtgtgtgttcaaga

SEQ ID NO: 843365 - DNA, 120 bp, Artificial Sequence
  ENSG00000259203_8 (sequence is synthesized)
gagagagggaattgatctttgcctggacttaaagatggagccgaagaagctggagggaatttgggcttgtgcgtctggcccagaccctgtgcgccgagcccgaggtctatcctccccgca

SEQ ID NO: 843366 - DNA, 120 bp, Artificial Sequence
  ENSG00000259203_9 (sequence is synthesized)
gtagaaatggagcccaccggattccctcacccggagaaatgcccaaactgaaacttgactacacttccctgggctggttcacggtttcataatctcccaggtttgctggctgtgtcacca

SEQ ID NO: 843367 - DNA, 120 bp, Artificial Sequence
  ENSG00000259203_10 (sequence is synthesized)
aatccaagccaaacctgctataaacatgatcacaggccactgacctcgcagcactgaccgataactcggtggcaaaatcagctcctctggtcagaggttattaaagcagcggctgaattc

SEQ ID NO: 843368 - DNA, 120 bp, Artificial Sequence
  ENSG00000259203_11 (sequence is synthesized)
gtgtttgtttttttgaagtggtcagaaaaacgtagtcttcttaaacctacaaaaacagtcaaacacatttgcaaatgtgctttacttgtattggttcgagtgctggaagctgtctggcgg

SEQ ID NO: 843369 - DNA, 120 bp, Artificial Sequence
  ENSG00000259203_12 (sequence is synthesized)
tgagctttttcgttgcgtgtggtttatgcagagcacccgggatgtttttctcgtcttttacgtcttggtatcttttaaaaatgtagaatgtgtctctgattgtttcacagtatgttcctt

SEQ ID NO: 843370 - DNA, 120 bp, Artificial Sequence
  ENSG00000259203_13 (sequence is synthesized)
aacaaccagatatgtaagaaaacgtttgggattgagtggtgagaaaagcagactggaaagtacaaataaacccaatccaaatggaaaacaaattaaacagatgaaatgattatgaaagaa

SEQ ID NO: 843371 - DNA, 120 bp, Artificial Sequence
  ENSG00000259203_14 (sequence is synthesized)
aaatgcaagttgcatccccaaatgcgaggctggcctgaccaaaaagagccagtcggcgcccggaagaggcgagactcgcgcttgggttctcaatccttctcttttctcctttctttttcc

SEQ ID NO: 843372 - DNA, 120 bp, Artificial Sequence
  ENSG00000259203_15 (sequence is synthesized)
ggcccggcctccggccctggaaggcggcagaaaggagacaaaacctctgtctttctaggccgaaggcctgagttccagcatcctgggtccccacgcgtcggggtctggggccaagaccgc

SEQ ID NO: 843373 - DNA, 89 bp, Artificial Sequence
  ENSG00000259203_16 (sequence is synthesized)
ccactgagggaaaatataaacataagcaaaaaaaaaaaaagcctcccctgcaggcgcgagcgggggtggcgaggaggccgacgaaggcg

SEQ ID NO: 843374 - DNA, 120 bp, Artificial Sequence
  ENSG00000259203_17 (sequence is synthesized)
gcaggcgcgagcgggggtggcgaggaggccgacgaaggcggtaatgcaaccctaatgcatagatagctgacatcaacttccgtcaggcagctcctggagatcgaacctttcgattgtaac

SEQ ID NO: 843375 - DNA, 120 bp, Artificial Sequence
  ENSG00000259203_18 (sequence is synthesized)
tctgaactttacagattaaatggcaacacagaacaaatccaaaggaattaaatctattcttttgccctcctaggcatctgggtcagatgcacattttgaggcatttcaacagacagatca

SEQ ID NO: 843376 - DNA, 120 bp, Artificial Sequence
  ENSG00000259203_19 (sequence is synthesized)
gctctgggacacttgcacacttttttggtaaactgcaacctattacgtgacctttaatcctggtggaaaacaatttaaaatgtattcctggctttaggaaacaaaagaaaaattttaaac

SEQ ID NO: 843377 - DNA, 120 bp, Artificial Sequence
  ENSG00000259203_20 (sequence is synthesized)
cctggcagttaaattattactggtctctacagggttaatttaatgtaaataatctactctcctgagggaaaaggtggaggcctggcattctggaagggccagtcaggtggtgacaaaact

SEQ ID NO: 843378 - DNA, 120 bp, Artificial Sequence
  ENSG00000259203_21 (sequence is synthesized)
gtgtgccttggggttttgaggggtgtgttgggtggctctgaacctggctttgggtttgttacatctctcgctctcttaaaacagtaactcaagatgtaagtaaaagtgttttcatttttt

SEQ ID NO: 843379 - DNA, 120 bp, Artificial Sequence
  ENSG00000259203_22 (sequence is synthesized)
attgatcctgctaacatctttcattatccagcatgtagccacagcaaattattgctcatttgatactgagaattctattgaccatcgctttcgttggagagagaattctaactactcggc

SEQ ID NO: 843380 - DNA, 120 bp, Artificial Sequence
  ENSG00000262380_0 (sequence is synthesized)
cagctttcatagtcacaaattattgcaatattttgctgttatactaaatatgggttttttttgtttgtttttaagacagagtctagctctgttacccaggttgcagtgagctgagattgt

SEQ ID NO: 843381 - DNA, 120 bp, Artificial Sequence
  ENSG00000262380_1 (sequence is synthesized)
cagagtgagacttcatctcaaaaaagaaaaaaaaaggtgaaaggatgacttaaacccagggtgtcgaggttgcagggaaattcagaaatgccactgaagggccaggcatggtgtccaaca

SEQ ID NO: 843382 - DNA, 62 bp, Artificial Sequence
  ENSG00000262380_2 (sequence is synthesized)
tttgaaccccggaggcagaggttgcactccgcctgggtgacaagagtggaactccatcttaa

SEQ ID NO: 843383 - DNA, 120 bp, Artificial Sequence
  ENSG00000263033_0 (sequence is synthesized)
gcagcctcctctttcctctctctcaggtcactttccctgggggtagtcagctgtcgtgtcacgaggacattcaaacagccctgtgggaagacccatgtgacaaggagctgaggcctccag

SEQ ID NO: 843384 - DNA, 120 bp, Artificial Sequence
  ENSG00000263033_1 (sequence is synthesized)
caaacagccagatgaagaccatgaggcacagagaggtttgttaacttgcccaaggccaaacagctggtggggaagctgaggcccagagaggtgagtggcatgtccgaagcagcccagcgc

SEQ ID NO: 843385 - DNA, 120 bp, Artificial Sequence
  ENSG00000263033_2 (sequence is synthesized)
agggtgcgaggtaggcagggctgggcccccgggccttccctgtgaaccatctgcccgccggttgcaggaggcagttcctggaaagcaagcgggccgagttcctcacagagatcagaagag

SEQ ID NO: 843386 - DNA, 120 bp, Artificial Sequence
  ENSG00000263033_3 (sequence is synthesized)
caacaagatctccaggccagggcagaggtccccgccctggatgctggtgacacttcccctgggcgggaggggctgggagcatgcagatctcagccctgaacagcctgtcctctcgcctcg

SEQ ID NO: 843387 - DNA, 120 bp, Artificial Sequence
  ENSG00000263033_4 (sequence is synthesized)
cccgggagaggggggtctctggggatcttagcaggccatggtgggggtgtcttggggccagcctgaactgaaagaccatcacagcttgcaagccacctccctgctctgttgctggctctc

SEQ ID NO: 843388 - DNA, 120 bp, Artificial Sequence
  ENSG00000263033_5 (sequence is synthesized)
cttgaagacaagtgtttttcaattaaccaaagcggtgcatggcaatgtgataggggaatgaaacacagcaacagaatcaatgccccacgctgggcaatagccgactttctgttcgctccc

SEQ ID NO: 843389 - DNA, 120 bp, Artificial Sequence
  ENSG00000263033_6 (sequence is synthesized)
atcccttccttccctccccgcctccttcccctgctccttccattccacaaacatttattgagcacccgctgtgtgccagccactgttctaggccctgaagacacagaagtgaacaaaaaa

SEQ ID NO: 843390 - DNA, 81 bp, Artificial Sequence
  ENSG00000263033_7 (sequence is synthesized)
cactgttctaggccctgaagacacagaagtgaacaaaaaaaaagagtccctgtgcacatcctggagggactttcagtgtat

SEQ ID NO: 843391 - DNA, 120 bp, Artificial Sequence
  ENSG00000266604_0 (sequence is synthesized)
gctgcctatcatttgcttttcctcatgagctcctggaccacctcatatcaccagcaccctctacccaaggtcctggagccaacactggagtaaaagagcacaagagaactccttagaggt

SEQ ID NO: 843392 - DNA, 120 bp, Artificial Sequence
  ENSG00000266604_1 (sequence is synthesized)
ggaaggataccctctgaggtcaaatcattgggcttgtggccatgagaccacagactttgcctggcttccagtgactgtccgagatgacctgtggagtgcaccgcctgtacttggacatca

SEQ ID NO: 843393 - DNA, 120 bp, Artificial Sequence
  ENSG00000266604_2 (sequence is synthesized)
ctgtcttttcggatccatacccgtcatccttggaatttcccctgcatccaaacctgttcctgatacaggtataaccctaaggaatatcttggatgtcttcacggggcttatgacttattc

SEQ ID NO: 843394 - DNA, 120 bp, Artificial Sequence
  ENSG00000266604_3 (sequence is synthesized)
cccccagctgagcaaagagagggctgcagcgccgagggaacagctgccggactcaccggagaggcctcctggagcacgccgggaccccctccaccccctggctttggctgcatcaatggc

SEQ ID NO: 843395 - DNA, 120 bp, Artificial Sequence
  ENSG00000266604_4 (sequence is synthesized)
tagtttgcctgaactatatctgagccactgagagtatttattaagcagagaataattttgagtttcacttttataacttttgtttcaaaagttgttttggataatttaatgaaatgactg

SEQ ID NO: 843396 - DNA, 120 bp, Artificial Sequence
  ENSG00000266604_5 (sequence is synthesized)
taaaccagaattccccttttcattatttctttgtgtcaatataaaaagagttgatgattttaaaagccagtgagatgtccctgtctgtggatgtcagcgggagggtggggtctgacgcct

SEQ ID NO: 843397 - DNA, 120 bp, Artificial Sequence
  ENSG00000266604_6 (sequence is synthesized)
ttctctggtggctgtccaggaagattgccccagcttgcactcccttttggcgggttccagagccttccatttgaaaggagcatctctcaccactctgccccacccagcaccagctcttct

SEQ ID NO: 843398 - DNA, 120 bp, Artificial Sequence
  ENSG00000266602_0 (sequence is synthesized)
gatctgcctgcctcggcctcccgaagtgccgggattacaagcgtgagccaccattcccggcccaaagaggagaagaagtatgaagtgcttgcttggacctttctactgtgcttattattc

SEQ ID NO: 843399 - DNA, 120 bp, Artificial Sequence
  ENSG00000266602_1 (sequence is synthesized)
actgtgcttattattctgtcttctcctcatggcaaggatggggtcatgctttgttgtccaggctggtctcgtactcctggaatcaaggaacccttccacctcagcctctgaaagttctgg

SEQ ID NO: 843400 - DNA, 120 bp, Artificial Sequence
  ENSG00000266602_2 (sequence is synthesized)
gattacaggcataattcatcctgcctggccaagaatctttaatgctctgctcaggcaactcttcctctgaggatccttccagtgacaattcaagaattagcgactcaattcccagggtcc

SEQ ID NO: 843401 - DNA, 120 bp, Artificial Sequence
  ENSG00000266602_3 (sequence is synthesized)
cttagaccttcgacctgcttgtgggcaatttggaaacaaggattgtgcctgaatcacctttgcattcctagcatcgtttttcctggataataatttgttcaatatatgttcaataattgt

SEQ ID NO: 843402 - DNA, 120 bp, Artificial Sequence
  ENSG00000266602_4 (sequence is synthesized)
gtgttaaatgaatgaccacagctcctatagcaggtagctgactttgtgtctcctcaaccaatctctgagctctttgaaacaaagcctattttgtttgaatgtaaatttatcatcccagtt

SEQ ID NO: 843403 - DNA, 120 bp, Artificial Sequence
  ENSG00000266602_5 (sequence is synthesized)
tctggtacagggtagggaactaatgcatatgtggtgaaacaatcaatgccttagtgcttatgaagaatatcactgtgttacacagaagcatggaatgactaatgttaagctaaactcaag

SEQ ID NO: 843404 - DNA, 120 bp, Artificial Sequence
  ENSG00000266602_6 (sequence is synthesized)
ttacttagggaatattaacttgcatttattatactctgggggaaaaacacatatatgtgtatatatgtataacatatgtatgtatacacatatcagaatttgtatatgagaatgtctgat

SEQ ID NO: 843405 - DNA, 120 bp, Artificial Sequence
  ENSG00000266602_7 (sequence is synthesized)
tactatcaaaatactatgattaagaattaattgcaagactttgtaattaaaggtgtcgacacctcttatgtctccctatttcttgtatttggattatctctttccctgcctatgctagat

SEQ ID NO: 843406 - DNA, 120 bp, Artificial Sequence
  ENSG00000266602_8 (sequence is synthesized)
atacaaggtgatgccgtgattgtgtctgatttaagcaccatgacagtgatttggagtaactgtgaaattattcattttgtgttttttccaagccttctgtgtttcagttgcacagactgc

SEQ ID NO: 843407 - DNA, 120 bp, Artificial Sequence
  ENSG00000266602_9 (sequence is synthesized)
tctgacactgttagcgatggcaatcaaatgccagcacaagaagcaagggggcacaaatgaatctcctgatgaggtctatttacagttcttgcagaatattatacgttttttacttcaaaa

SEQ ID NO: 843408 - DNA, 120 bp, Artificial Sequence
  ENSG00000266602_10 (sequence is synthesized)
gacttggactggccccttgctcctcagcttcccaatggcctactgtgggaccttgtgatcatgtgatcaaagatgacttttaacacaattggaaccaagctgctcataagaatgacaaaa

SEQ ID NO: 843409 - DNA, 120 bp, Artificial Sequence
  ENSG00000266602_11 (sequence is synthesized)
aaaaaaaaaaaaaaacagacaactaatttgcacttgcttaatgttggtcaaaatgcagtggaacctcgtgttctttttcatcaatatctcttgaatgtggtcaagagccagaagctcagc

SEQ ID NO: 843410 - DNA, 120 bp, Artificial Sequence
  ENSG00000266602_12 (sequence is synthesized)
tgcatcaattatgtgaacttgtgtgaatcctttgattataatcatgttgtcaagatccaattatgtttcattgataaagcaagaaatggcaataataaccagaaatattctagaactgga

SEQ ID NO: 843411 - DNA, 120 bp, Artificial Sequence
  ENSG00000266602_13 (sequence is synthesized)
tcggctcactgcagccttgacctcccgggctcgagcagtcctcccacctcagcctcgcaaatagttgggaccacagatatgcaccaccacgtcagcctaatttttgtatttttagtagag

SEQ ID NO: 843412 - DNA, 120 bp, Artificial Sequence
  ENSG00000266602_14 (sequence is synthesized)
acctcccaaagtgctaggattacaggctaagccaccgagccattttatacaatattttatgcatctttagttaaagagttaaaagtttctttaagatctttgaaattattttaaaatact

SEQ ID NO: 843413 - DNA, 120 bp, Artificial Sequence
  ENSG00000266602_15 (sequence is synthesized)
gtttctttaagatctttgaaattattttaaaatactgatcactgttgtttttttccaccagtttctcaattcttaaattctatgttcttttaaataaaattttgacacgctgaaatttaa

SEQ ID NO: 843414 - DNA, 120 bp, Artificial Sequence
  ENSG00000266602_16 (sequence is synthesized)
cgtgggtatggtcgatgtggcaggtcctaaacataaattgggtgatgaatggtccggacctgatttcggttacaatagctccactgaaaccatccttgtgaggtgacttcttggccacta

SEQ ID NO: 843415 - DNA, 120 bp, Artificial Sequence
  ENSG00000266602_17 (sequence is synthesized)
aatccaaggaccccctttcagtccttgtcctctcagcatattggcagaattataccgttcccttttgcctaaaacacgccttcactttgaggtaggaggcaggactcaaatccattggtg

SEQ ID NO: 843416 - DNA, 120 bp, Artificial Sequence
  ENSG00000266602_18 (sequence is synthesized)
aggctcagacagcagaccaaattgaggactagcaaaacagggacaggatgaaagcagctttccataaaacacactcaccggtgtgccatgtcagtttatcgttgccatggcaacacccag

SEQ ID NO: 843417 - DNA, 120 bp, Artificial Sequence
  ENSG00000266602_19 (sequence is synthesized)
atgttaccgctcctttccatgacaacaacctgacaacccagaagttgccacccttttcctagaaatgtctgcataatctgccccttaatttgcatataattaaaagtgggtattaatata

SEQ ID NO: 843418 - DNA, 120 bp, Artificial Sequence
  ENSG00000266602_20 (sequence is synthesized)
actgcagaggtgccttgaagcttccactctgggcatactgcctgtggggtagccctgacccactagtgtctctgctactgctgtacactgccacttcaataaaagttgcttttagcacca

SEQ ID NO: 843419 - DNA, 120 bp, Artificial Sequence
  ENSG00000266602_21 (sequence is synthesized)
cctcatggcaaatttcttttttattttcatttattaaatacagaagaaatatttcgctgaagacacaggaaaccctattttgtataaacgagggattgcaagagattgttggaagatcaa

SEQ ID NO: 843420 - DNA, 120 bp, Artificial Sequence
  ENSG00000266602_22 (sequence is synthesized)
atcaaagaagttctgagtttaaattctgttttgtccacttactagccatttggccttgggcaagtcactttactggacctcagtttccttgtatgtgaaaggttttggtaaaaatcatat

SEQ ID NO: 843421 - DNA, 120 bp, Artificial Sequence
  ENSG00000266602_23 (sequence is synthesized)
tagttaaagaatgtaaagagttttataaattacaaagtgattaaaaaaagtaaaatgtattgttgtttaggaacaatgaaaaaaaaagaaaccttgacattttttcttcaagttcttgcc

SEQ ID NO: 843422 - DNA, 120 bp, Artificial Sequence
  ENSG00000266602_24 (sequence is synthesized)
taaaatgtttatttgtttggccctttttagatttaacaaattctatgtgtctaaatatcagtgtagaccccttcttaccctactggatttataaggtactaaaagtagatatgcatctct

SEQ ID NO: 843423 - DNA, 120 bp, Artificial Sequence
  ENSG00000266602_25 (sequence is synthesized)
tctgtcttggttcgctctaaaatgggatgtttgcaaacctcttggtttttcttttttaatatggatgaagcttatattaatttttggcttggtattaaattttgtttggaatattattaa

SEQ ID NO: 843424 - DNA, 120 bp, Artificial Sequence
  ENSG00000266602_26 (sequence is synthesized)
agatgggtgaattggaggggaaacgggaaggctggaaccatgtccagctgggataaggcttcagtctcatcctgtgatgaagaaattttccctgtagaacaggcctttgttatggagaaa

SEQ ID NO: 843425 - DNA, 120 bp, Artificial Sequence
  ENSG00000266602_27 (sequence is synthesized)
ctattgtgggacttcaccttgtgatcataagctgacaaacggtttatatcagaaggtggaatcgtgggtatggtcgatgtggcaggtcctaaacataaattggaaacatagcatctcaga

SEQ ID NO: 843426 - DNA, 120 bp, Artificial Sequence
  ENSG00000266602_28 (sequence is synthesized)
tccagaagaggaccttggcctaccatatgcctaatgcttgaatttccttacctgtccaagaagtcccttatgatgtactcttgtaataccatctttcatccttagacaacttaactgata

SEQ ID NO: 843427 - DNA, 120 bp, Artificial Sequence
  ENSG00000266602_29 (sequence is synthesized)
tgaagttcaaacttatattgcctgcttgactgtggtttcaacaccttatacctaatatcactcctaggaccataaggggtaaatctttcacatgactgctcctacagttgtttgaagcca

SEQ ID NO: 843428 - DNA, 120 bp, Artificial Sequence
  ENSG00000266602_30 (sequence is synthesized)
tcaatgatattcactcatagagggctttgaggcttaccaacctttgctacaacaatattcctcaggagacagtcttgagtacagtgcctgcaatacattttgttatcattgcataattaa

SEQ ID NO: 843429 - DNA, 120 bp, Artificial Sequence
  ENSG00000266602_31 (sequence is synthesized)
tattcaaattctttcttcaatatcataggctctctcccttaggcatctcaaatttatcttcacagcttttcaactgcaaatttaagaacaaaatgtaaaacctctgatacctctaagcag

SEQ ID NO: 843430 - DNA, 120 bp, Artificial Sequence
  ENSG00000266602_32 (sequence is synthesized)
cataataaaatgaaggttttaaggccttcttttgctccataatatacgtatgtcagtgtggcataggttattagctaccatttattgtgcaattataatgtacttggaactaagctaagt

SEQ ID NO: 843431 - DNA, 120 bp, Artificial Sequence
  ENSG00000266602_33 (sequence is synthesized)
acatattatctcatttaattttcactattttgtaaaattgaagatatgtatttgttttatattttaagaaactgaagccagagaagcaaaacaattgctcaaagtcattcagttagttaa

SEQ ID NO: 843432 - DNA, 120 bp, Artificial Sequence
  ENSG00000266602_34 (sequence is synthesized)
tgaggcaacaagatttgaaaccaagtttgtctaatctcaaagctcatacttttaaccattattttattactgcctttgtagatgcttggcaacctcattaaagcattaacatatgttgaa

SEQ ID NO: 843433 - DNA, 120 bp, Artificial Sequence
  ENSG00000266602_35 (sequence is synthesized)
ttgatgctggaagacggctataatatcttcattatttctttcctatgtcaagctcagagccttccacatttttttctaatatttattggttttgagctagccccgttcagaacacaatat

SEQ ID NO: 843434 - DNA, 120 bp, Artificial Sequence
  ENSG00000266602_36 (sequence is synthesized)
tctcttttgatttgaaagtgctttcattggcaacacctgagattttcatgaccagtgttgtgacacttaactccctacaggcatttgaaccaatcagtaatactccaggccttctctaca

SEQ ID NO: 843435 - DNA, 120 bp, Artificial Sequence
  ENSG00000266602_37 (sequence is synthesized)
agtcaacttactggcaaactatgtctcttttgactcatgcctatgaaattgcccttggagcatgtgctgaaaattctattcctactcattgttatcctgttagatcttgacatttatgct

SEQ ID NO: 843436 - DNA, 120 bp, Artificial Sequence
  ENSG00000266602_38 (sequence is synthesized)
tgccagcattcttttaggtatggataaacctctcttcaaagcttcacatcagatacaaattttaccagtgttctctggtgtctttattttcagtaaaaacaacatcaagacccaagtggt

SEQ ID NO: 843437 - DNA, 120 bp, Artificial Sequence
  ENSG00000266602_39 (sequence is synthesized)
gatgggatccttcaacacaacatatgtttctctctattttgggagtggtcaccccaacagcattctagtcaggtaaccaatgctgaaccctactatatactatcatcaaacccatatata

SEQ ID NO: 843438 - DNA, 120 bp, Artificial Sequence
  ENSG00000266602_40 (sequence is synthesized)
tttttttcataaagatttgtgaagaaagttcacaaaccttcttcatactttatacttccttcacaataggagctccattatgtaggaatttgtactggctaatccaagcacctagcttct

SEQ ID NO: 843439 - DNA, 120 bp, Artificial Sequence
  ENSG00000266602_41 (sequence is synthesized)
agcctgtggaagcagaggcacatccaagcaacaaaatgttgggaaagaaaggttatgaccactaagatagtatatcaaatagttttcagatgaaaccaataaaaatcagatttagacaag

SEQ ID NO: 843440 - DNA, 120 bp, Artificial Sequence
  ENSG00000266602_42 (sequence is synthesized)
gaattatccgactactactcaaattcctggaacatagtgactactctaaaaatttattttaaaatgtaaaatgtgtatgtaacaataaagtaatttagaacccctcacccataaatggtg

SEQ ID NO: 843441 - DNA, 120 bp, Artificial Sequence
  ENSG00000266602_43 (sequence is synthesized)
ttgtactagttggtgtgtaagtatgaattctaaatagtaagttttaagtagtcttccataggtacaatttgagactcacttcttacttaaattttagaatatcccagttgcagagaataa

SEQ ID NO: 843442 - DNA, 84 bp, Artificial Sequence
  ENSG00000266602_44 (sequence is synthesized)
tcttacttaaattttagaatatcccagttgcagagaataaacataacctttcattgtatttatatatatacttcaagttctggc

SEQ ID NO: 843443 - DNA, 120 bp, Artificial Sequence
  ENSG00000266602_45 (sequence is synthesized)
cgggctccagaacattttgatcatcccaaactaaaactttacacccgttaagcaataattcttcattactcccacccacaagtccctgttaaccactatcatactttctgtctctataaa

SEQ ID NO: 843444 - DNA, 120 bp, Artificial Sequence
  ENSG00000266602_46 (sequence is synthesized)
ttttacagttctaggtattgcatatgtctcagtctgtttgggctagtataacaaaatatgataaactgagtagattataaacaacataaatttatttgtcacagttctggagcctgggaa

SEQ ID NO: 843445 - DNA, 120 bp, Artificial Sequence
  ENSG00000266602_47 (sequence is synthesized)
gtccaagattaaggcactgacagatttggtgtctggtgaaggcctattccctggttcaggagatgatgccttctagctctgtccttatatggtggaaggagcaaataagattccctgagc

SEQ ID NO: 843446 - DNA, 120 bp, Artificial Sequence
  ENSG00000266602_48 (sequence is synthesized)
cttttttataagcacactaaacccatttatgaaggctttactttcatgacccactttccaaaaggccccttctcctaatactgtcaccttgggggttactatttcaacatataaatttgg

SEQ ID NO: 843447 - DNA, 120 bp, Artificial Sequence
  ENSG00000266602_49 (sequence is synthesized)
aaggtaagggttgcaagcattcagaccatagtatcatataaatggaaatgtacaacatgtacttttttctgtctggtttatttcactttgcctatgtttttaaggtttattcatgtggtg

SEQ ID NO: 843448 - DNA, 120 bp, Artificial Sequence
  ENSG00000266602_50 (sequence is synthesized)
catataggaatttctacactatgttttgctgatgcattcattcatcgatgaacacttaggttgtatccacctttcgactattgcaaattatgctgctgtaataaacattagtgtacaaaa

SEQ ID NO: 843449 - DNA, 120 bp, Artificial Sequence
  ENSG00000266602_51 (sequence is synthesized)
attgatctagctggcagaaccagagtgtgctctttaaacacatttgtccctgtgtaattgctgtgcacacattctgtgctctggaggtatgggattgatacccgtccgtcaactctctgg

SEQ ID NO: 843450 - DNA, 120 bp, Artificial Sequence
  ENSG00000266602_52 (sequence is synthesized)
caaagaaggaactataatcccatttcagggactgagccttgccatcttctaagggttcaaatgtgcctttatagatatttcactgaactaataggaatgagaagatattatctcacattt

SEQ ID NO: 843451 - DNA, 120 bp, Artificial Sequence
  ENSG00000266602_53 (sequence is synthesized)
ggcaagttgctatgaagtcataacttaaattaagcacaaggctgatgttctcaccataagacagtaagttgcttgtctggttatttgttagctgagcaattctgggaagagaatgaaaaa

SEQ ID NO: 843452 - DNA, 120 bp, Artificial Sequence
  ENSG00000266602_54 (sequence is synthesized)
cattttgttgatgagaatctgtattcatcagtttttgtacaagactaagaactcggcatgcttttacattggaaatttggtaattaatatcagaagctgacaaacggtttatatcagaag

SEQ ID NO: 843453 - DNA, 120 bp, Artificial Sequence
  ENSG00000266602_55 (sequence is synthesized)
ctactgtgggaccttgtgatcatgtgagagagaaagactagaggaggctggtttgggaagactgtccttctcctaggtgggataaaactctgggaaagccttttttcctctggagagtag

SEQ ID NO: 843454 - DNA, 120 bp, Artificial Sequence
  ENSG00000266602_56 (sequence is synthesized)
gattttcttgtggagaaggatcttggtgtatttgacaatgatctgccagaaggatcctccttagtttcattcaccatgagaacctggtggtcttcctggaggtataaaggtcatgaaatt

SEQ ID NO: 843455 - DNA, 120 bp, Artificial Sequence
  ENSG00000266602_57 (sequence is synthesized)
gtggggtcctcctaagaacgtgttcttgtgccagaaattttttacacttatgctctttcacttatcttccagcagtttgtcaaagttaccatttaattgttcttacaagtttatgacact

SEQ ID NO: 843456 - DNA, 120 bp, Artificial Sequence
  ENSG00000266602_58 (sequence is synthesized)
cttttgctccaggtaagcatatctcagcagggactaggttcacctgtctctccagatttccagatggcagtttgctctgcaattgcagtaatctgatgggtccaagagaagtcattgatt

SEQ ID NO: 843457 - DNA, 120 bp, Artificial Sequence
  ENSG00000266602_59 (sequence is synthesized)
ccaactttctccagccctttttttccccttgcaatgacaggagtgatgacttctaagctatttgcatgttaaaactgaatccagaagtcaccaaaaagccttttaatcatatcttttttc

SEQ ID NO: 843458 - DNA, 120 bp, Artificial Sequence
  ENSG00000266602_60 (sequence is synthesized)
tctgttttctctatttcagttttaggcctttgagaaattaaaaattagcagaaaatacattattttaggagctaacagtttagggataaggatcatacatgcatacatacatatggatat

SEQ ID NO: 843459 - DNA, 120 bp, Artificial Sequence
  ENSG00000266602_61 (sequence is synthesized)
tataaagtgcctaattctacttaatctgtaactccatatctctctggaatgtgaattttctagacaattgattctctggaaaatagtttttgaatttatgtgtctgatatttttttccca

SEQ ID NO: 843460 - DNA, 120 bp, Artificial Sequence
  ENSG00000266602_62 (sequence is synthesized)
aagtgagaaaaaaaaatcagtcttcttgagcggtatatatcaaacataatttatgcttcttttgatgactcagagttcagatataattataatgtgtggtctcaggtactctgtaaaaac

SEQ ID NO: 843461 - DNA, 120 bp, Artificial Sequence
  ENSG00000266602_63 (sequence is synthesized)
ctcagatcttattggtctttatgttggctttatagattagcctgtatttgcaagttcttgggttgtctttcacattatttatttttcttgttcatttcaggtttcagttgacacttattt

SEQ ID NO: 843462 - DNA, 120 bp, Artificial Sequence
  ENSG00000266602_64 (sequence is synthesized)
atgttgccagtttgcttccatcagggtcaaagttgtgaattctgtgtctaaaataaagcacgttgttttccatatgtcctcaaaggttatttcatcagcaaattaataaactttgagatg

SEQ ID NO: 843463 - DNA, 120 bp, Artificial Sequence
  ENSG00000266602_65 (sequence is synthesized)
aagtaagtttcttttaggcagcaaatatttgtctttaaaaaaaaaatccattcaggcagtctgcatcttttaattgggaaatttcagctatttacattcaagattgttactgataggagg

SEQ ID NO: 843464 - DNA, 120 bp, Artificial Sequence
  ENSG00000266601_0 (sequence is synthesized)
ttgcctgctcactggaggggcaggggaagaagcagaagcaacagccatttgagggttgactggctctaaggaaaagctgtttgctggcagacacaggtggctggtgacaaagggaacaga

SEQ ID NO: 843465 - DNA, 120 bp, Artificial Sequence
  ENSG00000266601_1 (sequence is synthesized)
gtcctttacatgcttgaggcggacttgcctgtctcttcaggccggatgctcttcagggccctgtggggcttaaacacatgtactgagctagctccaatcttaatctgcacaacatcgcaa

SEQ ID NO: 843466 - DNA, 120 bp, Artificial Sequence
  ENSG00000225497_0 (sequence is synthesized)
agcggctttgaataaagactgaagaacacgaacccatgcaagaggcacaaaaccatctgcttagtggtcatgtggcagcagacagtatctcagaagtcctcgcagcatatgacttcactg

SEQ ID NO: 843467 - DNA, 120 bp, Artificial Sequence
  ENSG00000225497_1 (sequence is synthesized)
tcatacacaacaggaacaatctcacagataagaaaaactccagaagttggtctcgggctatgaaaatttctgccacaatatgatttatatgaaaataaataaagtgggtctactacttta

SEQ ID NO: 843468 - DNA, 120 bp, Artificial Sequence
  ENSG00000225497_2 (sequence is synthesized)
ataaaaacctgaactcaaagaagagaactggaataatcctcccttatcccacttcccatggtgagccccagctgggacgctgacacatggccccaacttttcctcctgcctgatgtctgg

SEQ ID NO: 843469 - DNA, 120 bp, Artificial Sequence
  ENSG00000260814_0 (sequence is synthesized)
tgagactctgcctcaaaaaaaataaaaataaaaatttcattagtgataatacagtgacatgaagtactgatgcctttacagcaccttcttcaaaaccaacagttttgtgcaagaaatgta

SEQ ID NO: 843470 - DNA, 83 bp, Artificial Sequence
  ENSG00000260814_1 (sequence is synthesized)
catgaaaaacaactgaaagcattttaatgaggatttcttaagtctggaatctgggtacttccagtcttaggccaaagcgagtc

SEQ ID NO: 843471 - DNA, 120 bp, Artificial Sequence
  ENSG00000186594_0 (sequence is synthesized)
aagagacagcgccgccggccgtggggagcggacgcagtgatttgctccccctcgtgcagcaacccccacacccagcaccaggagcctgttcctctcacgccctcacctggctgagccgca

SEQ ID NO: 843472 - DNA, 120 bp, Artificial Sequence
  ENSG00000186594_1 (sequence is synthesized)
gtagttcttcagtggcaagctttatgtcctgacccagctaaagctgccagttgaagaactgttgccctctgcccctggcttcgaggaggaggaggagctgctttccccatcatctggaag

SEQ ID NO: 843473 - DNA, 120 bp, Artificial Sequence
  ENSG00000186594_2 (sequence is synthesized)
aggagcggttttagattagagacactggctggattgaggagtagaaggctcaaacaacccaaggtggtatgtgatccccagctcaggcctgtgcagacaggaaattctcccctgcagcaa

SEQ ID NO: 843474 - DNA, 120 bp, Artificial Sequence
  ENSG00000186594_3 (sequence is synthesized)
gtaggggaggtgggttgtgggatgtgacctccttccagatatcaggcagtgagtgtaaacctgccacctccagccctgatccattctcacctagcggctacaggaagctgtgtctgttcg

SEQ ID NO: 843475 - DNA, 120 bp, Artificial Sequence
  ENSG00000186594_4 (sequence is synthesized)
attagagacactggctggattgaggagtagaaggctcaaacaacccaagcggctacaggaagctgtgtctgttcgatttggtgggaggagatgtgcagggagctgtatcttgtcctccgc

SEQ ID NO: 843476 - DNA, 120 bp, Artificial Sequence
  ENSG00000186594_5 (sequence is synthesized)
ttgtgaaaaactcaaggatgtggagaagagtagaccgtggaaccctgctcttctgcagccaagctgaggggcaggatgcgtgtgggacagtggtagagaagcaggggatagactcatagg

SEQ ID NO: 843477 - DNA, 120 bp, Artificial Sequence
  ENSG00000186594_6 (sequence is synthesized)
actctgtccctggacactgcctccgtactttctccttgcttcactggccacagcatctccctccagccctcgctatgtgcctctgccatcttcacccatcatggagcagaggtgaggaga

SEQ ID NO: 843478 - DNA, 120 bp, Artificial Sequence
  ENSG00000186594_7 (sequence is synthesized)
ccccagaactctccttccagctgaactccctgggaacaagtcagttgggctgatcactgaactcacatttctggacctgaggagcctgttcctctcacgccctcacctggctgagccgca

SEQ ID NO: 843479 - DNA, 120 bp, Artificial Sequence
  ENSG00000186594_8 (sequence is synthesized)
aagtaggcctgagtcagtgaagagctttggagggcgggactgaatgggggttaatcagaggatgcgattgctgaccctttgcactttggcatggcccatcccctaatttctgaccagaag

SEQ ID NO: 843480 - DNA, 120 bp, Artificial Sequence
  ENSG00000186594_9 (sequence is synthesized)
tgtgacagtgggaagaagtggagagaacactctgtctccccgacttccttcttgaccctccttccgtatctttcattcttccccactggcctttccagatgaggtccaaaagtaagctca

SEQ ID NO: 843481 - DNA, 120 bp, Artificial Sequence
  ENSG00000186594_10 (sequence is synthesized)
ctcttcagggaaaagtgatactaaacccaggcgtgaggagtcatccttctgctcttacttttccctgcatttccttaggctggcccagactctagattcctgggcacttacctgtatctg

SEQ ID NO: 843482 - DNA, 120 bp, Artificial Sequence
  ENSG00000186594_11 (sequence is synthesized)
cccaagaggagggagggcagccagcctccattgacggcgagcctccagccctctcctactttgatcaccatttctctccaggctttctgcctccgagatgtggcaccatagtgcggtgcc

SEQ ID NO: 843483 - DNA, 120 bp, Artificial Sequence
  ENSG00000186594_12 (sequence is synthesized)
ttcattagtaattaaagaaaggcaaatagagctggaagcatttttcccttagcaaaccataacagaaaaaaataagacccaatattggcaaagagactactgaaaaaacattcccataca

SEQ ID NO: 843484 - DNA, 120 bp, Artificial Sequence
  ENSG00000186594_13 (sequence is synthesized)
ttgcgtgtgggagtatacatcggtgcaggcttcctggatgacagttgggtgatatgtgtcatgtggcctaaaagcctccatgtcatttgacctacgaattctatctttgggaatttatcc

SEQ ID NO: 843485 - DNA, 120 bp, Artificial Sequence
  ENSG00000186594_14 (sequence is synthesized)
taagaaaatacttaaggatttagttagtgataagatgttcatcccagcattgcaatggagaaaaatgggaagcaatggtttggttgggaatttattccttttctgctgtaacgaaagttt

SEQ ID NO: 843486 - DNA, 120 bp, Artificial Sequence
  ENSG00000186594_15 (sequence is synthesized)
gcaataggggattgcttaagtaaattattgtatctccatccagatggtggagtaccgcgcagacattaaaagtcatgtaaaagaacatctgactgaaagaaaaatgctccttgaatatta

SEQ ID NO: 843487 - DNA, 120 bp, Artificial Sequence
  ENSG00000186594_16 (sequence is synthesized)
aaaggttgtaaaaatagtgcatgttatgtgatttcaattttgttttttaaaatatgggtgtatgcttgtatacgtagagcagataaaaaagacggaaggcatactaaaaaatgttgagtg

SEQ ID NO: 843488 - DNA, 120 bp, Artificial Sequence
  ENSG00000186594_17 (sequence is synthesized)
gttatctttgtatggtggaacaaagtcactgtaattttcatctttggtttttctgtaatttccaaattttccacattttgtatttcatataatataatttaagagatcagtgttattatt

SEQ ID NO: 843489 - DNA, 120 bp, Artificial Sequence
  ENSG00000186594_18 (sequence is synthesized)
gcccccgggtgggcggggccacgttgcccagcagtgggcggtgattggccccgggccgtgcattcgcagctcgtgcgtcacgacgccgccagctgatcggagcctggagccggtgtgtgc

SEQ ID NO: 843490 - DNA, 120 bp, Artificial Sequence
  ENSG00000186594_19 (sequence is synthesized)
acctgtgagatgggcagtcacacagatgagtgtgcatgagggaatcagaagcccatctgggttgactcagaacccgggctctccccctgctgtgggtggaaacaaaacaccttttcacag

SEQ ID NO: 843491 - DNA, 120 bp, Artificial Sequence
  ENSG00000186594_20 (sequence is synthesized)
aagctgttgtccctcccccatccctgataccatcacccagaagctgggtggggaatgggaagctggaggagggggttagagttagaccaatgcgaggagctagtaagagctcgcctctcc

SEQ ID NO: 843492 - DNA, 120 bp, Artificial Sequence
  ENSG00000186594_21 (sequence is synthesized)
gtgacttccccccatgcaagggtggcccaaggcttcccctgatatccaaagcaggacagcagccccttggtgggattctaactgctgctactctgtttctttcctcactttgctttccaa

SEQ ID NO: 843493 - DNA, 120 bp, Artificial Sequence
  ENSG00000186594_22 (sequence is synthesized)
accgccctacttccacctccgcccagcctgtaatgtttatataagcagcctcaaggaccaagaaccatctgcgaaaggacacacacaggaaattcataaaagaaatctgaatggataaaa

SEQ ID NO: 843494 - DNA, 120 bp, Artificial Sequence
  ENSG00000250781_0 (sequence is synthesized)
agcccccattcctggggctccccgaggagctggctttcagcagggtttagagcagcacgaaaagtgaactgaccctggaaaaatgccttagaccttgtgatccaagatggctgctggacc

SEQ ID NO: 843495 - DNA, 120 bp, Artificial Sequence
  ENSG00000250781_1 (sequence is synthesized)
ctcactggccaattctatctgcaaggatgataagaaatattttattttagctgagcacattgctgcccagtgttctattaccatgaaaataagaggaaaatggatgttgtgtaacccaga

SEQ ID NO: 843496 - DNA, 120 bp, Artificial Sequence
  ENSG00000250781_2 (sequence is synthesized)
ggcttggtgcatgcatcagaatcttctggtggccttattaagacacggtagttcccccttattcacgggagatccattccaagacccccaatggatgcctaaaaccacagatagtactga

SEQ ID NO: 843497 - DNA, 120 bp, Artificial Sequence
  ENSG00000250781_3 (sequence is synthesized)
gagctggctttcagcagggtttagagcagcacgaaaagtgaactgaccctggaaaaatgaatccacacgttcatggagtcatagaacctaagggttgaaaagaacccttaaggccaggca

SEQ ID NO: 843498 - DNA, 120 bp, Artificial Sequence
  ENSG00000250781_4 (sequence is synthesized)
ggagaccgaggcaggcggatcacgagtctgcgccatttgtggagaactgcatttcaccagcactccattcatgaagaatctacgagcgccctctagaggaattttctctctttcacatct

SEQ ID NO: 843499 - DNA, 120 bp, Artificial Sequence
  ENSG00000250781_5 (sequence is synthesized)
tttaagtacattttctgcgagaagcagatgcattggtttgcaagtcagagcgaaagccagtgctgctgttcagagtcagagctgggcaggatgaagtttaatgaacattattaaccattg

SEQ ID NO: 843500 - DNA, 120 bp, Artificial Sequence
  ENSG00000250781_6 (sequence is synthesized)
agaagatgcatttcttgctgagtagcccccagggcagacgacagctcagtcaccctggaagaattcaaccagaaaaagacctcacaaaccgacagttctgtgctagtgagaaccattatt

SEQ ID NO: 843501 - DNA, 120 bp, Artificial Sequence
  ENSG00000250781_7 (sequence is synthesized)
agagaggccagcccccattcctggggctccccgaggagctggctttcagcagggtttagagcagcacgaaaagtgaactgaccctggaaaaatggtaatcttctcatctgtgaggatatg

SEQ ID NO: 843502 - DNA, 120 bp, Artificial Sequence
  ENSG00000250781_8 (sequence is synthesized)
gcttgtgatgggctcagagtcttgaaacacagaactatgagctcatctcatatcccaatccagcagcatggaaacctcagactgcaaggcccaagactggcacttgttctctcccaactc

SEQ ID NO: 843503 - DNA, 120 bp, Artificial Sequence
  ENSG00000250781_9 (sequence is synthesized)
ttttctttctctctctcctttcttttatcccttaattccttcttgcttccttccaagatttatactattaccttttaggcaaaacatcctgaacatgtaaaataaactaattaaaatcaa

SEQ ID NO: 843504 - DNA, 120 bp, Artificial Sequence
  ENSG00000250781_10 (sequence is synthesized)
ctcctgagacatgcccaaagctaggagaagaggaggatgagagagggtgtcagatgatcacagtgtaaggacaggccttactggacagaccttatttcagctggatttctacaaggtgta

SEQ ID NO: 843505 - DNA, 120 bp, Artificial Sequence
  ENSG00000250781_11 (sequence is synthesized)
gccccaagcacagtagatggattctcccctaacaccacccctttctcagcaaggggcatttccttctgagtgcttgcagactgaagagaggccagcccccattcctggggctccccgagg

SEQ ID NO: 843506 - DNA, 120 bp, Artificial Sequence
  ENSG00000250781_12 (sequence is synthesized)
agctggctttcagcagggtttagagcagcacgaaaagtgaactgaccctggaaaaatgcaagcagggcccacatcatggctgactcccgcgagagctgaaacagagaaagaggcaaaccc

SEQ ID NO: 843507 - DNA, 120 bp, Artificial Sequence
  ENSG00000250781_13 (sequence is synthesized)
cactctgcttttgaccttaccatgaagtttccgctaccctcccgtctcacatggacttggaaagaagtaaccagaatacacttgtctcaccaattgcttcttaactttctaccccttctt

SEQ ID NO: 843508 - DNA, 65 bp, Artificial Sequence
  ENSG00000250781_14 (sequence is synthesized)
atcatttactgagttcttatgacttttttttttttttttttggacatggagtctccgttggttca

SEQ ID NO: 843509 - DNA, 120 bp, Artificial Sequence
  ENSG00000250781_15 (sequence is synthesized)
tttagtagagacaggttttcaccatgctggccaagctggtctcaaactactgaccttacatgatctgcccacctcaacatcccaaagtgctgggattacaggcatgctaactatcacttt

SEQ ID NO: 843510 - DNA, 120 bp, Artificial Sequence
  ENSG00000250781_16 (sequence is synthesized)
aagtgctgggattacaggcatgctaactatcacttttaataaaccaaagtcacacaggcatagctcttaatacataaaggagagcttaaggaattgagaaaatgttcaactgtctcaaga

SEQ ID NO: 843511 - DNA, 120 bp, Artificial Sequence
  ENSG00000250781_17 (sequence is synthesized)
ccattgtctccctatgaacttacaaaagaaattccaaattggtagccaaaacgtgagcattgaccttttcttcctctttcctgttttaacaaattctaaacatctggaggcaagtggatg

SEQ ID NO: 843512 - DNA, 120 bp, Artificial Sequence
  ENSG00000250786_0 (sequence is synthesized)
cccggtacaggacccccaccttcgctcctgggagccccgctgcaccccaggagttccattccagcctccccagtgcgagtgcggccgagcgctgacttttgggggctccctcccccgtct

SEQ ID NO: 843513 - DNA, 120 bp, Artificial Sequence
  ENSG00000250786_1 (sequence is synthesized)
cactgggtccctctgcggctcccccgcccgctgtcccggttcagacgtggctgcaccccggaggggggcgccggccgagacctgagacgtggcgctccctctctgccggcctcggcttca

SEQ ID NO: 843514 - DNA, 120 bp, Artificial Sequence
  ENSG00000250786_2 (sequence is synthesized)
gtgcttgaatttcagccacatccctaagctgccatctcagaccagaggaacagggaggggggctttctggaaagaacatcacctggaagaaatcaggacatgactgtgggccatgagtga

SEQ ID NO: 843515 - DNA, 120 bp, Artificial Sequence
  ENSG00000250786_3 (sequence is synthesized)
ttcaaaggaaagccgggtatctgtggtctttaagatgtggtaagattgtattaaaattatagaaaaaaacctcaatccagaaatcgtggcctcttgacatttacatcttaactgcatttt

SEQ ID NO: 843516 - DNA, 120 bp, Artificial Sequence
  ENSG00000250786_4 (sequence is synthesized)
cctaccaatgagatgcattacaatcatcctccataagtgttctctttttacccctgtttccattcttttagatccatgacatttaaaaactgaagaaatggaaagatcatctgatcaggc

SEQ ID NO: 843517 - DNA, 120 bp, Artificial Sequence
  ENSG00000250786_5 (sequence is synthesized)
ccatcagtctttttcctaatgctaaacattggtacaaagacgtgaagtttgatgtctcactaagattgcctagggctgctttattgctcacctacttcaaagtattgggaaaacatgatt

SEQ ID NO: 843518 - DNA, 120 bp, Artificial Sequence
  ENSG00000250786_6 (sequence is synthesized)
atgggtacaggtgatgctgtgttgcccccagacaggtttcttttgtcaggttcttttgatggattaggaacctacaagtggggagattttagggaaatagcccctccacttggatttcac

SEQ ID NO: 843519 - DNA, 120 bp, Artificial Sequence
  ENSG00000250786_7 (sequence is synthesized)
tttcctggcccttaaactgaagggccaggtcagtctgctcctccaggcacagcctgggaccccatcatgtgccccactctgcagtctgagcttccactcaagtccaccagggcctgcctc

SEQ ID NO: 843520 - DNA, 120 bp, Artificial Sequence
  ENSG00000250786_8 (sequence is synthesized)
acatatatatacaagacccaatgtcagagtctgcctctgcccatgtctggtcagagggttgcactttgccactgctacatgttcccagaggttggcacagcatgacctggacctcaccta

SEQ ID NO: 843521 - DNA, 120 bp, Artificial Sequence
  ENSG00000250786_9 (sequence is synthesized)
acccaggcaaactctgctcatcttcgagctctctggaacccatttctcaagggagaaccacattcccccacctcacagccaagttcaaggaagcagcctggctaaagcaatgactcaagg

SEQ ID NO: 843522 - DNA, 120 bp, Artificial Sequence
  ENSG00000250786_10 (sequence is synthesized)
ataccagaagcagagcacgcatttaagaagatgcgctgactcgcaggagcagctgactcttcttaagaagagtttactgattcttctttcagtacgggccttttaataagatattgtatt

SEQ ID NO: 843523 - DNA, 120 bp, Artificial Sequence
  ENSG00000250786_11 (sequence is synthesized)
ttacttcagctatgggtgcagacaattaaaggattctagaaatctgaaagtgttttgccttgtcctcttggttaaatttctggatatattgtctagcaactcaatttgcttaaacaaaat

SEQ ID NO: 843524 - DNA, 120 bp, Artificial Sequence
  ENSG00000250786_12 (sequence is synthesized)
tgttgtgtcaaaaaagcccaagtcatcttttataagtgtggtctggggagaagaaaaaaatgctaagtttaaaagatttttggaatatctgaagaaaatacagatagcttgtaatggaga

SEQ ID NO: 843525 - DNA, 120 bp, Artificial Sequence
  ENSG00000250786_13 (sequence is synthesized)
tgaagcctctggatggtttccagggtgttattttccgacattgagtcttgtatatatcttgaatgtctataagcaaagaatggctatactgtttttaaaaagatatgttttatacttatt

SEQ ID NO: 843526 - DNA, 120 bp, Artificial Sequence
  ENSG00000261898_0 (sequence is synthesized)
gttggccaggctggtctcgaactctgtcaagccactgcgcccggcccattctttccttttagaggaagaaacccgctctggatggccggctggggaggtctggtcctgcccagttaatgc

SEQ ID NO: 843527 - DNA, 120 bp, Artificial Sequence
  ENSG00000261898_1 (sequence is synthesized)
cccagttaatgctccaccctggatcacccaagcctgaggctttgacccagagctggggttcgctcgcagaaccccccagacacaccgacctgggtgaggtagcggatctgagctgacagc

SEQ ID NO: 843528 - DNA, 120 bp, Artificial Sequence
  ENSG00000261898_2 (sequence is synthesized)
tccgcctccacgtgttgcactgaagcggtgaaggccgccgcctgccggtctaggagccgctcgttagttttttccttggacaattctaggatcacagtacctgccagggcggagagaggg

SEQ ID NO: 843529 - DNA, 120 bp, Artificial Sequence
  ENSG00000258556_0 (sequence is synthesized)
ctgacggctcccaagcctcaatcccttcacccttgccactggcaaactgcggtttaggttgctgccttggcagtcctggctgtcctcacggaagagcatgtgaaccacggacctggctgt

SEQ ID NO: 843530 - DNA, 120 bp, Artificial Sequence
  ENSG00000258556_1 (sequence is synthesized)
gccattgaatcggcctaatgcagcccctcagcagccagcctggtgttccctggggctgaggatctaatgtcagcagggcatgattcgattcacattaaagatggatattaagtcttttta

SEQ ID NO: 843531 - DNA, 120 bp, Artificial Sequence
  ENSG00000258554_0 (sequence is synthesized)
tcagaaaggcgattctcgccggttcccacataactccactccatggagagtcttggacctcatctcagagacctcctttctctccccgagtctgtagtcgcacatttgggggcacgatcc

SEQ ID NO: 843532 - DNA, 120 bp, Artificial Sequence
  ENSG00000258554_1 (sequence is synthesized)
ggctcagtttgggaagaaagttttccatggattccacaccaccctatactctccccagggagtataagtatactcttcaccttctactggcccccaacccacctctccacttctaaagaa

SEQ ID NO: 843533 - DNA, 120 bp, Artificial Sequence
  ENSG00000258554_2 (sequence is synthesized)
gtttctggctttgtacacaactccgtacgtgccctctccgatcttttccaccttttggaagttctccatgaagcgccagcgagtcgggtcagcccggccctggagcgggggcctgggaac

SEQ ID NO: 843534 - DNA, 120 bp, Artificial Sequence
  ENSG00000258554_3 (sequence is synthesized)
cctgcagaaggcggaccctggctctcgggggccgaggagggggaaacagggcccagtaccgtggccccgggtcgggatggaacgcagtatacctctcgctcttgtcaatttggccaactt

SEQ ID NO: 843535 - DNA, 120 bp, Artificial Sequence
  ENSG00000258553_0 (sequence is synthesized)
tggcagatctccaaccgctcggggtcccgtgatttccattaatgaattcgcacactggcgttaccactcaacacaccgacgaagcaagacgatagacaacaattagctaaatctacatta

SEQ ID NO: 843536 - DNA, 120 bp, Artificial Sequence
  ENSG00000258553_1 (sequence is synthesized)
ttggacatgatggctaagtaaaaaacatcacaccagaatcaaggattttggtatctgcatgagtcctggaatcaatcccccagagatactgatgggatcttaacaatgacagtaattgat

SEQ ID NO: 843537 - DNA, 120 bp, Artificial Sequence
  ENSG00000258553_2 (sequence is synthesized)
gatcaggagactttaacctgtggtattcccatgtttagaagcaaaatggggaacaaaaaggaagcgaataacaatcagaaaaataggaggataacaatagtgtaatatcatggatgccaa

SEQ ID NO: 843538 - DNA, 120 bp, Artificial Sequence
  ENSG00000258553_3 (sequence is synthesized)
aggagagtttcaaaaagaagaaggcaaccaatagtgtcaaatgtttcagacaattgtaaaaattcaaaaataaaaatatttaaaactttcaaaataaaatatcaaaatatcaaaataaaa

SEQ ID NO: 843539 - DNA, 120 bp, Artificial Sequence
  ENSG00000258551_0 (sequence is synthesized)
agatagccactggctccatgaagagtcaggaagctggtgacaaagaaatcggagggctggagggtaaaagcaggcgaaggtgatactcagaggagaaggacactggagaagtcagtcctg

SEQ ID NO: 843540 - DNA, 120 bp, Artificial Sequence
  ENSG00000258551_1 (sequence is synthesized)
ggagaagtcagtcctgaacccaccaatgaggcttgccctctctcacctgctgccatgtaagatgtgcctgcttcaccttccgccatgattgtcagtttcctgaggcctccccagccatgt

SEQ ID NO: 843541 - DNA, 120 bp, Artificial Sequence
  ENSG00000258551_2 (sequence is synthesized)
aggaagagaaggcccctgaaccatccatggacggcagttatcaagtctacagaaacatcaaatgaaagttatcttaccaagtgttatcatctctactcaaaaactctactggcaagtaaa

SEQ ID NO: 843542 - DNA, 120 bp, Artificial Sequence
  ENSG00000258551_3 (sequence is synthesized)
tcagaagaaatgggctaaaattacaacatgaaaaatataagttaggcatgcagggaagtttcctaccttagagggttggtacatattgttaaatatcttgaggttagttgacagcttttc

SEQ ID NO: 843543 - DNA, 120 bp, Artificial Sequence
  ENSG00000258551_4 (sequence is synthesized)
cttccaaatctgtctgtggggagtgatgagggaaggagagaaatgactgacatttattgttaagaaggagctggaagtctcatgcatggtatcatattaacatcacataagcccagccag

SEQ ID NO: 843544 - DNA, 120 bp, Artificial Sequence
  ENSG00000258551_5 (sequence is synthesized)
gaaaagaattcaggattgtttgagttggatacattatcccccaaggtaatactgttaggaaatggtgggattggccttaaacctagcctctgatgttccacattatcacattttgatttt

SEQ ID NO: 843545 - DNA, 120 bp, Artificial Sequence
  ENSG00000258551_6 (sequence is synthesized)
taagatatgcacctggatttggaaagttttattggctataggacaagcagggagatagacaaagttaatgctcacaaagtccttttcaatcccagacatctgtgagtctatgatatgtaa

SEQ ID NO: 843546 - DNA, 120 bp, Artificial Sequence
  ENSG00000258551_7 (sequence is synthesized)
caaattatttcctctgcagacccaaaccgtaggctacattgtacatattttttccttgttttcagctgtcagctacttgactgcccctcatggccacttttcaagtcttgattgccaagc

SEQ ID NO: 843547 - DNA, 120 bp, Artificial Sequence
  ENSG00000258551_8 (sequence is synthesized)
atttattttctttttccagtttgtctggaagacagaatgcctcaggaagggattgttgggtttttcatataaagcacgtgaaatatctgtaattatggattacatttttgtacccaatat

SEQ ID NO: 843548 - DNA, 120 bp, Artificial Sequence
  ENSG00000258551_9 (sequence is synthesized)
atggctgaaaggagtcctgtgatagaaacttttagaagataattgaatgtgtcagctgcatcaagaaattatgtacttgcttcacttcaacaaactgtgataaatagtctattgtctgga

SEQ ID NO: 843549 - DNA, 120 bp, Artificial Sequence
  ENSG00000258551_10 (sequence is synthesized)
tggagatggggcctggtgggaggtgatcggatcaggggggtggatttctcacagatgctttaggaccatcctcttggtgctgttctcatgatagttcagtgaattctcactcgatctggt

SEQ ID NO: 843550 - DNA, 120 bp, Artificial Sequence
  ENSG00000258551_11 (sequence is synthesized)
tggtcgtttgaaagtgtgtggcatctcccccctcgctctctctcttgctcctgctccagccatgtgacctgcgtgctccctgccttcacctgccgccatgattggaagctttctgaggcc

SEQ ID NO: 843551 - DNA, 120 bp, Artificial Sequence
  ENSG00000258551_12 (sequence is synthesized)
gccttagaagccaagtagatgccaacatcaagcctctaatacagcctgcagaaccgcttgccctctctcacctgctgccatgtaagatgtgcctgcttcaccttccgccatgattgtcag

SEQ ID NO: 843552 - DNA, 120 bp, Artificial Sequence
  ENSG00000258551_13 (sequence is synthesized)
ctgaggcctccccagccatgtggaactctctgtcttttccagaatatcatataaatggaatcacacgataggcagccttttgagtctggcttctttgactgaacagaatgcattcaagga

SEQ ID NO: 843553 - DNA, 120 bp, Artificial Sequence
  ENSG00000258551_14 (sequence is synthesized)
aggatgtgagaagaagaaaggaggggggagaggaggagaaaaggacgtgcatcatctgaaaatgaagggtgttctttaaagcagcaaagttagctcaacaaaacttattgtgctttatca

SEQ ID NO: 843554 - DNA, 120 bp, Artificial Sequence
  ENSG00000258551_15 (sequence is synthesized)
tggggaactgacatagcagaaagtggaaccaacggtaaggggggactactgtaactatggaggaataaggacaagaattacagcagacgtctcaacagaaaccatgcaagccagagacaa

SEQ ID NO: 843555 - DNA, 120 bp, Artificial Sequence
  ENSG00000258551_16 (sequence is synthesized)
cggagtgagatttttaaagtgttgaaagaaaaaaactgtcaaaacagatttctacatccaggagaaatatctttcaaatgtgaaaaacaaataaatacttttgtgtaccaacataaactg

SEQ ID NO: 843556 - DNA, 120 bp, Artificial Sequence
  ENSG00000258551_17 (sequence is synthesized)
aggaagttcagtaatatttcctactttactggaaatattaaaggtagttcttcaaacaaagaatttgtttggaacttagatctgcatacaggacataaatgaagggaaatatgctttatc

SEQ ID NO: 843557 - DNA, 120 bp, Artificial Sequence
  ENSG00000258551_18 (sequence is synthesized)
tatgtaagagtaagatgagttacaatgatagtgcaaaagatgagaagaaagaattgggaaacactgttgtaagatcttacattacatgtgtggcaacactgttatttgaaggtggactta

SEQ ID NO: 843558 - DNA, 120 bp, Artificial Sequence
  ENSG00000258551_19 (sequence is synthesized)
gattatttaaaattgtatattataaaacctagggcaatcactacaagtgttaacaacacaaaatgtgtaaaaatcaattgactatatttatgtaggtctagttcggggctttctcttcta

SEQ ID NO: 843559 - DNA, 120 bp, Artificial Sequence
  ENSG00000258551_20 (sequence is synthesized)
tatttatgtaggtctagttcggggctttctcttctatttcattgatctatgtgtctatccttttgctactgtctttattactatatctttataataatcccagcactttgggagaccaag

SEQ ID NO: 843560 - DNA, 74 bp, Artificial Sequence
  ENSG00000258551_21 (sequence is synthesized)
tccagcctggcaatagagtgagactttgtttaaataaaaggcttgaaattgggtagtgtaaatccttccatttt

SEQ ID NO: 843561 - DNA, 120 bp, Artificial Sequence
  ENSG00000258551_22 (sequence is synthesized)
taaaaggcttgaaattgggtagtgtaaatccttccattttttaaatctctttcagaatcattttgctattctagcatgttttgctttttagaatcagtttgttgatatctacccaatgct

SEQ ID NO: 843562 - DNA, 120 bp, Artificial Sequence
  ENSG00000258551_23 (sequence is synthesized)
tgctggaattttggttaggattgtactggggagaattggtaaatttgccacattgaacctttcaatccgagaatatgttatatctctatacttaattagatcttccatgatttatttgag

SEQ ID NO: 843563 - DNA, 120 bp, Artificial Sequence
  ENSG00000258551_24 (sequence is synthesized)
cagtgttttgcagtttatagtatataattcctgagcacgttttgttagaatttaagtatttcaatggggcaggagatgctattataaatgatactgtctttaaattttgaaatccaattg

SEQ ID NO: 843564 - DNA, 120 bp, Artificial Sequence
  ENSG00000258551_25 (sequence is synthesized)
ttgattgccactatctagaaaaatggttgacttttgtaattctgcaacctcagtaatttattaattctaggagcattttggtgggtttctttgggaagataaatatgtctttttggataa

SEQ ID NO: 843565 - DNA, 120 bp, Artificial Sequence
  ENSG00000258551_26 (sequence is synthesized)
tatgaagataccccaaggtctcatccaagcaatgcacctaactcaacatcgaggattactgggtgaaatatacccctctctgttccatctagatgtggcttcttgtgatccggcttttgt

SEQ ID NO: 843566 - DNA, 120 bp, Artificial Sequence
  ENSG00000180259_0 (sequence is synthesized)
gggattctccgcagggcggggaaggacttgaaagagtctggcaatatggagcacatcaggattatggaagctgtggctgcctgcagcccatcctgcccccagcacctagagtcatcttta

SEQ ID NO: 843567 - DNA, 120 bp, Artificial Sequence
  ENSG00000180259_1 (sequence is synthesized)
gaaatgcaagcctgatcgtggaatccaccttcctaacacccttcagtgccctcctcttcgttacacccttactatacaaacgatagtccatggaccagcagcatcaacataaccagggag

SEQ ID NO: 843568 - DNA, 120 bp, Artificial Sequence
  ENSG00000180259_2 (sequence is synthesized)
cttgttagaaatgtagaatctggtccatcccaaacctgacgaagcagaagctgcattttgccaagatcccagggaatttgtgtgcccgttatggtttgcgaagtgcttcccaagagaaca

SEQ ID NO: 843569 - DNA, 120 bp, Artificial Sequence
  ENSG00000180259_3 (sequence is synthesized)
tacggcaagccagagggatctttgcagatcttgctcctttcattctctggcctcatcttgtcgctctcctccatccgtgcccacatccccactgtactggaccgcttgcagctccttgaa

SEQ ID NO: 843570 - DNA, 120 bp, Artificial Sequence
  ENSG00000180259_4 (sequence is synthesized)
tgcagcatagtcttgttttcttttttgcagtgattctacatctttcccatcttctccacctggatgcctccatccatcctttcagacttcccttctctagcaaacctttcttgctaattc

SEQ ID NO: 843571 - DNA, 120 bp, Artificial Sequence
  ENSG00000180259_5 (sequence is synthesized)
ccatgtctaacacaacacttccccatactgcatggccattatcctttctgcatcagactgtgagcaccttgaaggcagtggcagtgactcattcattgtggcatctgcagattccagtgg

SEQ ID NO: 843572 - DNA, 120 bp, Artificial Sequence
  ENSG00000180259_6 (sequence is synthesized)
actgccaggcatgcaatagaaaatcaaaaaagatttactgctaaataatcctcaactccagtggcagctccatgtgccatttctcttccgctctggcctcggctcttcctgtgcctacct

SEQ ID NO: 843573 - DNA, 120 bp, Artificial Sequence
  ENSG00000180259_7 (sequence is synthesized)
cccggttgagatgacttcagctctgatttggaagagctatgatattgtttataggagtgaattaatatgtgtaaaggttacaaagtaaacagttaaattaaattaattgtgctggagcag

SEQ ID NO: 843574 - DNA, 120 bp, Artificial Sequence
  ENSG00000180259_8 (sequence is synthesized)
gtcaaacaggcttctgagagatgaacatacacatctctattaactccacattcagtgagtgtgggtaacttgaaattggctgggtcaccatttacatcatagaaattggcaaatagtaca

SEQ ID NO: 843575 - DNA, 120 bp, Artificial Sequence
  ENSG00000180259_9 (sequence is synthesized)
aattagggctccctcacccctactcgggcatagagctggtacactagcacacctctggttatacatgcatgcgtgtgccaccagaacaaaacacctaacagcaggcacgttgcctctgtt

SEQ ID NO: 843576 - DNA, 120 bp, Artificial Sequence
  ENSG00000180259_10 (sequence is synthesized)
gcccaccattacagctcccgcacggagcagacagactcatggcaggaattgaatgcatgtttgtcgagtggaagcatgaacaaatccacaaaatgcccaagatgaggcaaagaaggacat

SEQ ID NO: 843577 - DNA, 120 bp, Artificial Sequence
  ENSG00000180259_11 (sequence is synthesized)
tggctcaaatgttaaacataagttaggagctgagataatgcccagaggaaaaatgttctgtaattctaagtaaaacccatctctaaggcaggatgctgcttatgagggctccacagacag

SEQ ID NO: 843578 - DNA, 120 bp, Artificial Sequence
  ENSG00000180259_12 (sequence is synthesized)
atgggggaggcctgggtcctgcccttggaaagagtctgacagctcgacttctggaaacagccatctgcacaggtcaacatcttcttagctgacagggagcagatttgcagaccacatcac

SEQ ID NO: 843579 - DNA, 120 bp, Artificial Sequence
  ENSG00000180259_13 (sequence is synthesized)
atttgaaattccagaagaaacttcttggagtctgctcttgtgcaaatgagcctagaaagcccgttaactttgggtggaggcttccactgtttggctatcccaagtgggcccaaagctaag

SEQ ID NO: 843580 - DNA, 120 bp, Artificial Sequence
  ENSG00000180259_14 (sequence is synthesized)
gaaaacccaccagccctttgcttcctgcttcctctatttgtttgccccaggaaatcagaggtgatgacatgatttggcttgggcacgacaggaataaacgatatttaagagacgtcataa

SEQ ID NO: 843581 - DNA, 120 bp, Artificial Sequence
  ENSG00000180259_15 (sequence is synthesized)
gtccctagagacagcctggaaagattgggtgccagctgcagagaggagagcaaggcgaccaaacgcagggtaaggtctggaggtgctcatagttcactacgggacatgtacatggaagtg

SEQ ID NO: 843582 - DNA, 120 bp, Artificial Sequence
  ENSG00000180259_16 (sequence is synthesized)
ccttctcccatgcatggtgaaatgcccttaaaggattttgaatagatttaaaagacactcaaaaacaaaaaacggtagattcaaaatagacggtagggatcgctttcttccgttttcttt

SEQ ID NO: 843583 - DNA, 67 bp, Artificial Sequence
  ENSG00000258559_0 (sequence is synthesized)
tactgggaatctgcgctggggtggggttgtgaggtgggcagggctgggtgtgtaaaaaagttgcttt

SEQ ID NO: 843584 - DNA, 120 bp, Artificial Sequence
  ENSG00000258559_1 (sequence is synthesized)
aaaaaaaagaaaaaagttgcttttggattctgcagcctctgctcatgaagctctggggaaggcaggttagtttgtagagtttcagatgagttcttctgtggcctctgtgcaaaatctgaa

SEQ ID NO: 843585 - DNA, 120 bp, Artificial Sequence
  ENSG00000258559_2 (sequence is synthesized)
atctccctccaccttttctgcctagcgaatttcttcccatccttgaaaccccagatcacctcctctggagagccttcccagactcccttaatggctaagcctatctgctgccatggccct

SEQ ID NO: 843586 - DNA, 120 bp, Artificial Sequence
  ENSG00000258559_3 (sequence is synthesized)
ctgcctgccctctggactgagagctcctcaaagacagagataattttctcatttctttattgcactagctaactagtgcaatgcctggtacacctagtgaccgctctgtgtatgtttatt

SEQ ID NO: 843587 - DNA, 120 bp, Artificial Sequence
  ENSG00000258559_4 (sequence is synthesized)
taacaatagtttttatttattgagggctccttatgtgcttggcactttatatttagaaacttttaattctaactctaacctattacataggtattattggctccattttatagattaaaa

SEQ ID NO: 843588 - DNA, 120 bp, Artificial Sequence
  ENSG00000258559_5 (sequence is synthesized)
aaactgaggcttggaggcttaagtagcctgcctgtgtcacgcagctagtaactggccagagccaggatttgaactaggtctgcccaactctagagtttatgttcttcacacagacaatac

SEQ ID NO: 843589 - DNA, 120 bp, Artificial Sequence
  ENSG00000258559_6 (sequence is synthesized)
cattaaggcatgactgaagccgtgaatgggcgctaccagtagacagatcctgagaccaagatcatttgaatggccttggtttctaaaggagggtgtgatatgggacaggccgctgattca

SEQ ID NO: 843590 - DNA, 120 bp, Artificial Sequence
  ENSG00000258559_7 (sequence is synthesized)
aggaagaggggctcctctcctcttcctttgactgttttggggtctgtacccagatctcacctcattctttctgtccttaaggagagatgcccactgggacaaggaaagtgatgccttcct

SEQ ID NO: 843591 - DNA, 120 bp, Artificial Sequence
  ENSG00000258559_8 (sequence is synthesized)
tcacccaccccttcccttatgaagatctgcaacctgtggtttcaaagccttcgcccagcattctgaggcccccacccctgcatcatccatgatgtgccctgtctattctttttttttttt

SEQ ID NO: 843592 - DNA, 120 bp, Artificial Sequence
  ENSG00000258558_0 (sequence is synthesized)
gtcctgtccagacctccatggtttcccccacttctagctctaagccactagcgccgggtattgttacagttctttccccagcaatcgtttttcccataccaggtccgtacctgttttaat

SEQ ID NO: 843593 - DNA, 120 bp, Artificial Sequence
  ENSG00000258558_1 (sequence is synthesized)
acacccaacactggacagatcgtgtttttggtgtcatatctaagaaattgaggaaccatcagaggggatcattaaaagccaaagaaaaggctttcagttctggaaggatgggcaaactcc

SEQ ID NO: 843594 - DNA, 120 bp, Artificial Sequence
  ENSG00000258558_2 (sequence is synthesized)
tactggaaacattattacttatcaaggttttcttagtcgtccatgaaaacaccttatcttggtatagctggatggctttggtttcggctggttcaggtgagtaagtggttttctttctct

SEQ ID NO: 843595 - DNA, 120 bp, Artificial Sequence
  ENSG00000273769_0 (sequence is synthesized)
ggccgtggctggcgggtttctatggtgatgcagcccaagtcccagagaccagggtcttggctgggatccccatcctggcagacctcctcacaggaccccaccactaccccaggttctccc

SEQ ID NO: 843596 - DNA, 120 bp, Artificial Sequence
  ENSG00000273769_1 (sequence is synthesized)
atgaacgtgccctcctggagcctgggccactctgcgaggccgcatcaccctcacacccagaaaagcactcagtgcagccatttcgagctttgaaagggaacttggtgatcaaggtgcatg

SEQ ID NO: 843597 - DNA, 120 bp, Artificial Sequence
  ENSG00000273769_2 (sequence is synthesized)
ccaaggaaggcgccagctgtagttccagtggtggaaagggctcggacctgggagaggccgattgggggcacaatctgggcaccctgctcactgtaggagccctcaggccaggcccttcct

SEQ ID NO: 843598 - DNA, 120 bp, Artificial Sequence
  ENSG00000273769_3 (sequence is synthesized)
cactctttgcctcccttttcccttcagataatcatcaagaaaaaagaaaacaagtgacaccccacgaagacagggacaatgctggtccagtttgtcactggctcttccatgggcagccca

SEQ ID NO: 843599 - DNA, 120 bp, Artificial Sequence
  ENSG00000273769_4 (sequence is synthesized)
gagcccggcccaaaggagcactggccatgagcagctgcccagtacacgactgcccatcgctgggatcctgagcgcctggagcctgtggaaacgggctccagaggcgccctacgcctccgg

SEQ ID NO: 843600 - DNA, 120 bp, Artificial Sequence
  ENSG00000273769_5 (sequence is synthesized)
ttacccctcacctgtcgggctcgggcacccggcatccctcccccgccccgcttacagcccgcggtgcccggagcccgacgcccggcatgggtggggctccggcagcaacgccggttaccg

SEQ ID NO: 843601 - DNA, 120 bp, Artificial Sequence
  ENSG00000273769_6 (sequence is synthesized)
gggactccctgccctgcacaggatcgagaaggaaggagctcctccccagtgccccctcctaggctcaaggccatgacctcacaggcgaggaagcaaaatggaggggccctcatagacaca

SEQ ID NO: 843602 - DNA, 120 bp, Artificial Sequence
  ENSG00000273769_7 (sequence is synthesized)
gtggactggacaagggaagccccagactctgaccctgtgatgagcatgcagaagacgcagaagccacagacgacagtggggcagtaaggaagtgccagcaggcaggcggggtgggctcag

SEQ ID NO: 843603 - DNA, 120 bp, Artificial Sequence
  ENSG00000273769_8 (sequence is synthesized)
ccagacgtgtctttctctgttctcctttcaatctttctgtgtcttcatatctcaggtgtagcgcttggaaacagcacatagttgggttttggtttggtttgattctgtctaacaattctt

SEQ ID NO: 843604 - DNA, 120 bp, Artificial Sequence
  ENSG00000273769_9 (sequence is synthesized)
gtctttttaaaaatcagctttgagacctgcctgggcaacacagcgagaccacgtctctacaaaaaaaattttaaaattaggcatggtggtgcatgtctgtagtcccaactactcaggagg

SEQ ID NO: 843605 - DNA, 120 bp, Artificial Sequence
  ENSG00000257060_0 (sequence is synthesized)
tgggcctcggggagagagacggactgcctccgggtgctcatgacctttccagcagtaagccaataatgtatgactcctgcgttgccgttgctcgtttgaggaacatctgtccagtccctg

SEQ ID NO: 843606 - DNA, 120 bp, Artificial Sequence
  ENSG00000257060_1 (sequence is synthesized)
ggatggtgaggctataaccacaaaggaataagagaagacgactagttttgtaatgggcacagtggattgaagaggggggcagtgctgagtcattcacgtggtgtgtgagggctcctgttt

SEQ ID NO: 843607 - DNA, 120 bp, Artificial Sequence
  ENSG00000257060_2 (sequence is synthesized)
gtaaatcagggattcttgcagcctgctttttcagggacattggctgctgtcttctgacccaccctgtgtggctttggcgtctcctgtgacctcccagtatgggtcttggcctcatcctgc

SEQ ID NO: 843608 - DNA, 120 bp, Artificial Sequence
  ENSG00000257060_3 (sequence is synthesized)
ctcactgcccagacacaccacacaggagaacatgaaagggtgaatgaatctttcatcatttgatgaccaagttggcattcttttacattccagccaccagaggaaggtgtattttaacac

SEQ ID NO: 843609 - DNA, 120 bp, Artificial Sequence
  ENSG00000257060_4 (sequence is synthesized)
aattgccctcacatcctccttaacaggatttacataagtttattaacacatatgtttctacaaaatcaagttttgagaaccatttttatacactgatctgggacattttggggatatgaa

SEQ ID NO: 843610 - DNA, 120 bp, Artificial Sequence
  ENSG00000257060_5 (sequence is synthesized)
attaactttagcacacacagcaagaagaaaaccgaacaacaaattctacaaacaccaaatttgctgtgaaatttacatttcagaatctctcaagaaatagtgcccagcagcaattcttac

SEQ ID NO: 843611 - DNA, 120 bp, Artificial Sequence
  ENSG00000257060_6 (sequence is synthesized)
tgttttcactttttcccccgtcttcacatttttatgtttgacagtgccaacatattttctcaacatttattctgaaaggaatgtactttgtgaattccttaaatgcaggatgattctgat

SEQ ID NO: 843612 - DNA, 120 bp, Artificial Sequence
  ENSG00000257060_7 (sequence is synthesized)
ttgtttaactttcagttgctgcagcaactgagtatactgggcccagccagattctctgggtgctttcttctttcttagttccccctttattgtgggccctcctcagtgccaacattgctt

SEQ ID NO: 843613 - DNA, 120 bp, Artificial Sequence
  ENSG00000257060_8 (sequence is synthesized)
tgtctctcgctggagaagcctgtgagaacgaggatgggcaaagtgtcaggctcttggtgcagctgaaaatcctttgagatggaagaaatggctggaacaaaggggcagaggaacaaaaag

SEQ ID NO: 843614 - DNA, 120 bp, Artificial Sequence
  ENSG00000257060_9 (sequence is synthesized)
cgactagttttgtaatggctttgaatgatgcattggcccacgtggaccaccttccatttcccaagactttttgaaggcaatgaatgagaagaaagcagagaaaacagtgggcgtgaggtc

SEQ ID NO: 843615 - DNA, 120 bp, Artificial Sequence
  ENSG00000257060_10 (sequence is synthesized)
agatgactcaggcttgagtactgatcacatcaaggattggacgcactgctcttaggaaggcacaacttctactactttcagtcttatcaactgtgagagtgtacccttgctgtagatgcc

SEQ ID NO: 843616 - DNA, 120 bp, Artificial Sequence
  ENSG00000257060_11 (sequence is synthesized)
acccgcccagcagtcctcatcatcttggcccaggatcacctgaaacagatgatcctccttttgagctaccatcagaaggtccacagtactagcccagcgctacatcccaatgcctacgcc

SEQ ID NO: 843617 - DNA, 120 bp, Artificial Sequence
  ENSG00000257060_12 (sequence is synthesized)
attcatctcacctcatctcatcacgtagacatttcatcatgtcacatcatcacaagaagggaagaagaagcaaagcacaccattgatgtgtgtgggtttgatgtagcatcttctaagagg

SEQ ID NO: 843618 - DNA, 120 bp, Artificial Sequence
  ENSG00000257060_13 (sequence is synthesized)
tctacaaagagacattgcaaagccaggcctctaaatgattcctctgtgaaacattgggccaaacattccgtaaccccttcctgctctggtgatcatgtaagtagatattctggaagcact

SEQ ID NO: 843619 - DNA, 120 bp, Artificial Sequence
  ENSG00000257060_14 (sequence is synthesized)
cagatggagaattgtcaccatctgccaggacagctcctgctcatctttcatgactcagctcacatgtcataacttcaaggggccttcagctctctggcccttcctgccccatgaaggctc

SEQ ID NO: 843620 - DNA, 120 bp, Artificial Sequence
  ENSG00000257060_15 (sequence is synthesized)
tacccagtgcccccaactttgctccttcggctgcatttgaagcatttacctgtgcttgttaattgttggtggaattgtctgtagactgtgaccttgagtgtgcagagtcttgtagagtca

SEQ ID NO: 843621 - DNA, 120 bp, Artificial Sequence
  ENSG00000257060_16 (sequence is synthesized)
tctctggattccccactctgagaaccacgcttggccattgcaggctctcaacaaaggcttgctgaggggatgaatgaatgaatgtatggatggcatgaatgtatgggctctggtgaattt

SEQ ID NO: 843622 - DNA, 120 bp, Artificial Sequence
  ENSG00000257060_17 (sequence is synthesized)
tttgcccacattttgctggccagcggctgcattgggtctgcacactgaaccctttggctcaaggtatcagagctgctctccttccagtgaagacttggatggaagacttgagatgcaggt

SEQ ID NO: 843623 - DNA, 120 bp, Artificial Sequence
  ENSG00000257060_18 (sequence is synthesized)
tatggggatacgtgtcacctctattcctcattcagaaggatacatacctcactggaccataaaaaatgagaactgaattatctgagtgtttgaataaacttccaccttgttactccacta

SEQ ID NO: 843624 - DNA, 120 bp, Artificial Sequence
  ENSG00000257060_19 (sequence is synthesized)
aacttccaccttgttactccactacagtctgagaaaacttcactgcacaaatagaggcagtgtacacccctcacagacactttcctttctcctgttgagaggtgaagccagctggacttc

SEQ ID NO: 843625 - DNA, 86 bp, Artificial Sequence
  ENSG00000257060_20 (sequence is synthesized)
gtgctctgtaaaaacgcaccaatcagcgccctgtggctagctagcggtttgtaaaatgcaccaatcagtgccctgtaaaaacgcag

SEQ ID NO: 843626 - DNA, 75 bp, Artificial Sequence
  ENSG00000257060_21 (sequence is synthesized)
aacacggtcgcgtccctttccacggtttggaagctttgttcttttgctctttccaataaatcttgctacccttca

SEQ ID NO: 843627 - DNA, 120 bp, Artificial Sequence
  ENSG00000257060_22 (sequence is synthesized)
ttttgctgtgagatcaacacactcctttctaagtttttgtcaaaatcataacttatgaaaagcaactctggggatgttgacaaaactggaaaaacagatgtcttgagccaactgggatca

SEQ ID NO: 843628 - DNA, 120 bp, Artificial Sequence
  ENSG00000257060_23 (sequence is synthesized)
atatgagccgagcagaagcttgagaaactcaggaacatctgtccagtccctgggatggtgaggctataaccacaaaggaataagagaagacgactagttttgtaatgggatttgctctct

SEQ ID NO: 843629 - DNA, 120 bp, Artificial Sequence
  ENSG00000257060_24 (sequence is synthesized)
atcaagagccacagaatgctaaagggaggcagagtctcggaggtcccctgtgaagtgggaaatcacctggatgcagtggggcccttcaagtgcatcaccaaaaaaaaccatcccagaagg

SEQ ID NO: 843630 - DNA, 120 bp, Artificial Sequence
  ENSG00000257060_25 (sequence is synthesized)
aaagaagccaggagacaacatcagaggcaggagctgtgctgtattcatcctgaaaagttctggaggaggaagccacctactggtctctgagtgggtggtggggggcagatggaagtggag

SEQ ID NO: 843631 - DNA, 120 bp, Artificial Sequence
  ENSG00000257060_26 (sequence is synthesized)
gggcaaggctaaaaccttaaggaactgcctgtcagtgagcactcctgggagaatcagaacactgggaggaaagaggtcaaggagacagccttcctgccacatagatagaacattctggtg

SEQ ID NO: 843632 - DNA, 120 bp, Artificial Sequence
  ENSG00000257060_27 (sequence is synthesized)
gatggaaatttccacgagtgcttcagcctttctgcctggcttacacagaaatggatcttagagctactggccagaagatcacctttaccgaaagcatcttgcagtcatcctcctttccaa

SEQ ID NO: 843633 - DNA, 120 bp, Artificial Sequence
  ENSG00000257060_28 (sequence is synthesized)
gctcctccttatgcgtgggttagtataacagaatgcatttgagacctgctatactattttaaattaagacatttcatgtagcacatagtattttaaaatgaagaacattgtcttggaaag

SEQ ID NO: 843634 - DNA, 120 bp, Artificial Sequence
  ENSG00000257060_29 (sequence is synthesized)
cacacaggctaactgctattttcttgatgcaagaaatatttaaattctctgtgcttcagtctatacaatcagttttccagggatgctgtgtatataaaacgagggagtgtattaagagta

SEQ ID NO: 843635 - DNA, 120 bp, Artificial Sequence
  ENSG00000257060_30 (sequence is synthesized)
gaatgttatctctctctccatctgcttgccgtggttttctttctagacacctctgatgattgctgcatgtattctgcccagggtttttggctgtgatcactgggagagatagaagggact

SEQ ID NO: 843636 - DNA, 120 bp, Artificial Sequence
  ENSG00000257060_31 (sequence is synthesized)
gtatttgctccatcttacccagctctgcaaacctgctggagagtttaattggcatatgacttctatcctcaaagtcacaagatggctgctggagttccagtcaggatgtctgtacagcac

SEQ ID NO: 843637 - DNA, 120 bp, Artificial Sequence
  ENSG00000257060_32 (sequence is synthesized)
gctccgctgaagcgttccacctcctgggactctcagagctgccataggctctgctgctggggtgagggagacctctctggctctctgtcgtgcacatggagccaccaaggccaaatgact

SEQ ID NO: 843638 - DNA, 120 bp, Artificial Sequence
  ENSG00000257060_33 (sequence is synthesized)
ttaccgtatgctgcaacatcagcttcacaatcagcatagttatataaaagtctatctagtgttgagtatataaagcaggctcattgtttccaagatgaagacttggcaaggctgcagtgt

SEQ ID NO: 843639 - DNA, 120 bp, Artificial Sequence
  ENSG00000257060_34 (sequence is synthesized)
ctgaagatatgtagattgttgttagcgcttcctaccttgcacagcctcttgtcccgtcactggccccatgcatcttcctctgctgccttcaagaagctccagatcctgccacagacgtgc

SEQ ID NO: 843640 - DNA, 120 bp, Artificial Sequence
  ENSG00000257060_35 (sequence is synthesized)
tccactcagaggactggagtccaatcccctgacagtgcttttctctttgggaagcaccccctcccccactgccattaaacctctggaattctatggaataaagtaaacattaacttataa

SEQ ID NO: 843641 - DNA, 120 bp, Artificial Sequence
  ENSG00000257060_36 (sequence is synthesized)
cacagcgcaggagggacaggaggcttttagtaaaagtgccagtcaccaggggctgctgataccatcgcacaccaggcacagtggattgaagaggggggcagtgctgagtcattcacgtgg

SEQ ID NO: 843642 - DNA, 120 bp, Artificial Sequence
  ENSG00000257060_37 (sequence is synthesized)
gaaccattctagagacttcaaatccattgagatgggattaatgcctttgcctactcaggcagaggacagactgaccattgcaagtgttcatcagcattttcctgctcttagacggaaagg

SEQ ID NO: 843643 - DNA, 120 bp, Artificial Sequence
  ENSG00000257060_38 (sequence is synthesized)
ccaaggccaccccaagcatgctgaaattaatgggccatcgtcaggaaggagttcacaactgtatatggagccagaacaaatggagagacctcgttcagtcgatggatggtagcaacaagg

SEQ ID NO: 843644 - DNA, 88 bp, Artificial Sequence
  ENSG00000257060_39 (sequence is synthesized)
atttcttaaaatattttccttctgcaccaatttatttctcccatcctctgggactctaatgatacatatattaaaccttctgatgttg

SEQ ID NO: 843645 - DNA, 120 bp, Artificial Sequence
  ENSG00000257060_40 (sequence is synthesized)
tgggactctaatgatacatatattaaaccttctgatgttgtcctattggtccctgaagctgttcttttttaaaaaaaaaacctttctattgttgtttttcttcaattggataacttttat

SEQ ID NO: 843646 - DNA, 120 bp, Artificial Sequence
  ENSG00000257060_41 (sequence is synthesized)
tgatacacctttaagttcactaactcttctctcatatcctttcttctgtataacacaaacagtaagttttctatttctattttatagttctaacttttttttggtcctttgtatttttct

SEQ ID NO: 843647 - DNA, 120 bp, Artificial Sequence
  ENSG00000257060_42 (sequence is synthesized)
tctcagaatttctatttttccaggtatttcaagagaattttcgtttatttcatacagcatagttataatggctgtttaaaaatgactgtctgatatttccaacattgggttatctgaatg

SEQ ID NO: 843648 - DNA, 120 bp, Artificial Sequence
  ENSG00000257060_43 (sequence is synthesized)
ttggcatctgtggttatcttttcctgatttgtatattgtgtaattttggattgtgccctggccatttaaaatattacattatgagactctggccctcattgaaatcctctggagaatgtt

SEQ ID NO: 843649 - DNA, 120 bp, Artificial Sequence
  ENSG00000257060_44 (sequence is synthesized)
gatattttttcttttggcaggcatctgcttggttaggctcaggctttgagtcctgagctgtcttctgttgcctatgttaggtcagccttcaaacatttactgtgttatgttgacctatgg

SEQ ID NO: 843650 - DNA, 120 bp, Artificial Sequence
  ENSG00000257060_45 (sequence is synthesized)
atcgtgtattccttccagggaccagttttagacctggacaatgatctacaacttagttcatttcttaaagccattgttaagttatttgaagttagctccatgcatgcatagttcagtgac

SEQ ID NO: 843651 - DNA, 120 bp, Artificial Sequence
  ENSG00000257060_46 (sequence is synthesized)
gggcccaggacagcatacacatttgtttgtggtccatttctcaaactccttcctcttcatgacttcttcaacacccttcagctccctaggaccccttttcctgattctcaggctagaaag

SEQ ID NO: 843652 - DNA, 120 bp, Artificial Sequence
  ENSG00000257060_47 (sequence is synthesized)
gagagaaaggaccaggattccctccttccttttcatccctctggttagaaaaaaggattttctttcagagtttcaggtgccttcgtggctgctgctgctgtcatgggagtgcagtcttac

SEQ ID NO: 843653 - DNA, 120 bp, Artificial Sequence
  ENSG00000257060_48 (sequence is synthesized)
aacatttgcctggggcaggagacagagaaagaaaaaaacagtggatttcctcctctctctccattcctcaggggcccctttcctggtcttgtgaccatagagggatggtttctcctgggc

SEQ ID NO: 843654 - DNA, 120 bp, Artificial Sequence
  ENSG00000257060_49 (sequence is synthesized)
tgctccatcttacccagctctgcaaacctgctggagagtttaattgagataaccgctggtaagagtttggcttatattcttctacatttttttccccacaagaaactgaaatttgaattt

SEQ ID NO: 843655 - DNA, 120 bp, Artificial Sequence
  ENSG00000257060_50 (sequence is synthesized)
tcttctacaagtgagaaaaaaaaaaagtaaaatctctaactgtcttagtgatgataattctgagaagacaggcccattgagccaagtaggaggataggtttcctgaggatggagatgcag

SEQ ID NO: 843656 - DNA, 120 bp, Artificial Sequence
  ENSG00000257060_51 (sequence is synthesized)
aaatagttgactttgccttcacgaagcatcctgacatttttagatgtggctacactctgtgggccggaagtcgaattccctggagggctagagctctcagtattttggacatatgtgaag

SEQ ID NO: 843657 - DNA, 120 bp, Artificial Sequence
  ENSG00000257060_52 (sequence is synthesized)
tcagcacagggggcaggcggtaagttaacttgaagagaattccagttacaaatttagctcagcttctaaaaaacactcccatcgaagagagattcctggttgctgtggaactgcgtcccc

SEQ ID NO: 843658 - DNA, 120 bp, Artificial Sequence
  ENSG00000257060_53 (sequence is synthesized)
tgtgggattttccttgtggagttaactagacacagttgttactaggtagcgggacaacagatttgcttaagatctcttcgattttgacagtttgatgatgggtgacttatgtggtattgt

SEQ ID NO: 843659 - DNA, 120 bp, Artificial Sequence
  ENSG00000257060_54 (sequence is synthesized)
ggacatctgttggctttatattttgcctgccaagcatccatactttcttttttctggtatccatactcaatttttcttctggttcaccacctataccgggttgaataatgcctccctccc

SEQ ID NO: 843660 - DNA, 120 bp, Artificial Sequence
  ENSG00000257067_0 (sequence is synthesized)
cctatcaagtggaacaccatcaatcacatggtggactcgttgggttccaagacagataggacaccatgaacagatgctatggctgagactgctggcctgggcagcactgtactttttgct

SEQ ID NO: 843661 - DNA, 120 bp, Artificial Sequence
  ENSG00000257067_1 (sequence is synthesized)
tttcctggaaggggaagaagagaacaatccactttctgtatggtcctgtccttcattcgagtttataacgttctccccagctgaagtctacacaatctttacccagacatcagaaacagc

SEQ ID NO: 843662 - DNA, 120 bp, Artificial Sequence
  ENSG00000257067_2 (sequence is synthesized)
acagaaggacaacgtgatgaagcgccatcacatggctggtagcctgtggtgagtcaccggacttctcgactcccacctcactagggtggaaggaacagtaaccacaacgctctgcaactc

SEQ ID NO: 843663 - DNA, 120 bp, Artificial Sequence
  ENSG00000257067_3 (sequence is synthesized)
gggctgcgcccgcatgattggaaacaatctgtgaaatgccttcagctctccaaaacaacagaaatgatcaaagatggaggcaagaagaccagagaaccctaaatgtttactgtctccagt

SEQ ID NO: 843664 - DNA, 120 bp, Artificial Sequence
  ENSG00000257067_4 (sequence is synthesized)
caggtgggcgctcagcagcaagggcaggtgaagggcatggacatcagattgttctcccctcagtcttcagtttttcagctaagttctgacatgacgacacagactgaacaccctcagaca

SEQ ID NO: 843665 - DNA, 120 bp, Artificial Sequence
  ENSG00000257067_5 (sequence is synthesized)
agagttctgggagagaacataggcagggttaggcatgggagaatgtgtctgactcacaacgaaggaatgaagcatgccgggcctcatctcggacctgcacactgcccctcattatgttca

SEQ ID NO: 843666 - DNA, 120 bp, Artificial Sequence
  ENSG00000257067_6 (sequence is synthesized)
tgatcgggtgaggattcttgtctcatgtctttccaagtccttgcaaggcagtgtctctctgcttacagcattctattccagcaggaaatggataaagagtggccagaaggtgaaaaagaa

SEQ ID NO: 843667 - DNA, 120 bp, Artificial Sequence
  ENSG00000257067_7 (sequence is synthesized)
cattgtgctgacacacctaagggtggtttggaaacagttggcatgttttctttatgtatttttcacctctgccatctgtaactgagaaagggtatccttcctcctgccagttctccccag

SEQ ID NO: 843668 - DNA, 120 bp, Artificial Sequence
  ENSG00000257067_8 (sequence is synthesized)
ttttggagattattaacccaactcccagattctacagatgagaaaagggaggcccagggaggtggagaaacatgtgtaggatcacagagatgccttcagctctccaaaacaacagaaatg

SEQ ID NO: 843669 - DNA, 120 bp, Artificial Sequence
  ENSG00000257067_9 (sequence is synthesized)
atcaaagatggaggcaagaagaccagagaaccctaaatgtttactgtctccagtgtgtttggaaacagcttggaccagtgtagagtgctggaacagagagtcaagagcatcaggttcgat

SEQ ID NO: 843670 - DNA, 120 bp, Artificial Sequence
  ENSG00000257067_10 (sequence is synthesized)
tcccacccttacaaactgctcagcctatggaaattactttatgtttcaggcctcactcttgccatctttaaaatggcgacacatgtacacacccctccacagtaaatacagaggtcctgc

SEQ ID NO: 843671 - DNA, 120 bp, Artificial Sequence
  ENSG00000286466_0 (sequence is synthesized)
gtttcctagtggccccagtggaattcattccaagcgagtgggagttataaggacgcgaaaggaccaaggccactatttggggagtctgacgaaggagttgtagcactcctggaggaaaga

SEQ ID NO: 843672 - DNA, 120 bp, Artificial Sequence
  ENSG00000286466_1 (sequence is synthesized)
aggaagtcaaggcttagcagccgaggtggaccagctggtgttttcacaatctgcagagacatacagggaaggacgatggggggacgacatggtggaaaatattcaatgtcataccacgga

SEQ ID NO: 843673 - DNA, 120 bp, Artificial Sequence
  ENSG00000286466_2 (sequence is synthesized)
tgtacagaagaagaaagaaatcctatttggaactgaagtcagccagttggaattttcagaaggaaatcctggcagcccgcggtgtttgaggcattacataaacatctgatacttgactca

SEQ ID NO: 843674 - DNA, 120 bp, Artificial Sequence
  ENSG00000286466_3 (sequence is synthesized)
tgaggcctccccagccacgtggaactgaaattgtgagctcaacctggaagacagaggaagacatgttcttacctttctgctggatgagaataccaagggcctgaacagaatggctgaaac

SEQ ID NO: 843675 - DNA, 120 bp, Artificial Sequence
  ENSG00000286466_4 (sequence is synthesized)
tggatgagaataccaagggcctgaacagaatggctgaaacctagcctggactattctttggaagccccatacctggtggactcagtattcaatgctctatgctctgagaaatagacaata

SEQ ID NO: 843676 - DNA, 120 bp, Artificial Sequence
  ENSG00000286466_5 (sequence is synthesized)
tcatactgaagtgttctgatgtttttttgggggaacccaatgattagatcttaaatttgaagggatgtattccactgccaaccagcttggggtgagaaggacagattggagtgggagacc

SEQ ID NO: 843677 - DNA, 120 bp, Artificial Sequence
  ENSG00000286466_6 (sequence is synthesized)
acagactttacttgtgcctcagagaactatgtcctggatgttgagtggaggagctaccttcctgggtattgctgctgttgggagagaggctgactcttacaacctggtggcattccagga

SEQ ID NO: 843678 - DNA, 120 bp, Artificial Sequence
  ENSG00000286466_7 (sequence is synthesized)
ccttgggaatgagagttctactcttcaggggccaagtctgtgcatctgagaacagctacagctagtctatagagggaagttgtcagcattgtcattctcttgttaattccaagcctttct

SEQ ID NO: 843679 - DNA, 120 bp, Artificial Sequence
  ENSG00000286466_8 (sequence is synthesized)
cgaagtccatcaagcattatagtctggcctggcttccactgtggggaagaatggtgaagaagcatggccacacctgcggtgattcagggaacagcagcaacttaagagaaacagtggaga

SEQ ID NO: 843680 - DNA, 120 bp, Artificial Sequence
  ENSG00000286466_9 (sequence is synthesized)
cttgactgtatcacttgaattcctgatagtagactgtattttccaaagatagagcaatctctcccctcccgcagcctcttccaacatgtgaccttgacaaccctttcatttaatgatgtg

SEQ ID NO: 843681 - DNA, 120 bp, Artificial Sequence
  ENSG00000286466_10 (sequence is synthesized)
tgaccttgacaaccctttcatttaatgatgtgttccctgtctcctagcctggagcctaggaagagctttgcaattgcctctgtcagaggcgtctgaaccagagcaactccatcttgaata

SEQ ID NO: 843682 - DNA, 120 bp, Artificial Sequence
  ENSG00000286466_11 (sequence is synthesized)
ggctgcattcccagacaggtgaggctggaactaggctcaccacgtggacaggcgtgatctgtgtacatatgagccaacacatttagacgactggatgcctcctccacgtcttcttctctt

SEQ ID NO: 843683 - DNA, 120 bp, Artificial Sequence
  ENSG00000286466_12 (sequence is synthesized)
gcctgccaactgggagaaaaccgaagaagactccaggatcctgggagatacaggtggaggccacagatggaaaaaaaaccaagtcctggattcactgtatggaaaaaatatgtgcattaa

SEQ ID NO: 843684 - DNA, 120 bp, Artificial Sequence
  ENSG00000286466_13 (sequence is synthesized)
ccaggaacatctacagtagataattagaggagagggtgatgatccacggagacttggggggtttatttgttagagcagctaacgttaccctaactattacagagtcagaggaaataatgt

SEQ ID NO: 843685 - DNA, 120 bp, Artificial Sequence
  ENSG00000286466_14 (sequence is synthesized)
atatagaatgataagtccagtgtctgggagatagccatgctcagtaaatgtttttgtttgtccctttgaatgaatggagggtatctacctatcttccacctattcaggatctcacatgag

SEQ ID NO: 843686 - DNA, 120 bp, Artificial Sequence
  ENSG00000286466_15 (sequence is synthesized)
gcagcacatttagcacacttgtgtagttgtaatcttccatgcttatctttgtgagtctgtttgaaaagttggataaatagcaatgactgaccacatttgcttgtataaagcacacgtctc

SEQ ID NO: 843687 - DNA, 120 bp, Artificial Sequence
  ENSG00000286466_16 (sequence is synthesized)
ctttcaaatttcatgttagtattgatatttgtgctgtatatttagcatcattgaaaaaggagaacgaatttatgaaaaagacataaatgttcccatagaaacactcatatccagcctggg

SEQ ID NO: 843688 - DNA, 75 bp, Artificial Sequence
  ENSG00000286466_17 (sequence is synthesized)
tctctacaaaaaatacaaacattagccaagcatggtggccggcatgcctctagtctcagctactcaggtgactga

SEQ ID NO: 843689 - DNA, 120 bp, Artificial Sequence
  ENSG00000286466_18 (sequence is synthesized)
tggccggcatgcctctagtctcagctactcaggtgactgagctgggaggatcccttgagcccaggagatggaggctgcagtgagctatgatggagctactgtactctagtctgggcaaca

SEQ ID NO: 843690 - DNA, 67 bp, Artificial Sequence
  ENSG00000286467_0 (sequence is synthesized)
gcacatttctgggttcacattttggtaaccacagggggattctgagtggagatacccctgacctttg

SEQ ID NO: 843691 - DNA, 120 bp, Artificial Sequence
  ENSG00000286467_1 (sequence is synthesized)
ctgagacttgtctcagattttctgggttcacattttggtaaccacagggggattctgagtggagatacccctgacctttgacaaatatcctgttggtgcttggtaccagcatgagctaac

SEQ ID NO: 843692 - DNA, 120 bp, Artificial Sequence
  ENSG00000286467_2 (sequence is synthesized)
ctccagagaatccctgagctccaaaaatttggttgagatcaaaagtttattttgctgtacaactcctctttttgagggagttttacttgcttccaacaggaaggcaggttttcttgcttc

SEQ ID NO: 843693 - DNA, 120 bp, Artificial Sequence
  ENSG00000286467_3 (sequence is synthesized)
catgatgatggaaggcagacaactcctttatggagtttgagcttgcttccaacagggaagatgaggttttttttttccttcttctaggatggtagagagcggtctacagcctgagaccca

SEQ ID NO: 843694 - DNA, 120 bp, Artificial Sequence
  ENSG00000286467_4 (sequence is synthesized)
tcaccagctattgcaacagaggctactctttggttttcaagaaagagtgtggctgcgcgtggtggctcatgcctgtcatcccaacactttgggacaccgaggcgggaggatcacgaggtc

SEQ ID NO: 843695 - DNA, 90 bp, Artificial Sequence
  ENSG00000286467_5 (sequence is synthesized)
gggacccaagaggtgaggttgcagtgaaccaaggtcatgccacagcactccagcctgggctgcagagcaagactccatcacaaaaaaaaa

SEQ ID NO: 843696 - DNA, 120 bp, Artificial Sequence
  ENSG00000286467_6 (sequence is synthesized)
agtttaattttatgtataatttggctcaaagaaaaataaaagcatctccctctagcaccaccagattttcttctctctgtaccttatgatgcaaattttgctatttgattttcacctgag

SEQ ID NO: 843697 - DNA, 120 bp, Artificial Sequence
  ENSG00000286467_7 (sequence is synthesized)
ctatttagctgacaactgcctaggattgtgaaagaggttatcaagaatctgaaagtctaagatagaaaaaaaaaaaatagggtgggcgtttctttataaacctataaaatgtacttctat

SEQ ID NO: 843698 - DNA, 120 bp, Artificial Sequence
  ENSG00000286467_8 (sequence is synthesized)
tttctttataaacctataaaatgtacttctatggtcatgcctaatatacattgacatgtatttatatgttctgtacaaaatgtttcactgctaaaaatatataaaagagctctaattaat

SEQ ID NO: 843699 - DNA, 64 bp, Artificial Sequence
  ENSG00000286467_9 (sequence is synthesized)
taattggcttaaagaaaataaaagcacttaaatcagctactaaaaaagaaacgactagtcaaat

SEQ ID NO: 843700 - DNA, 120 bp, Artificial Sequence
  ENSG00000286467_10 (sequence is synthesized)
aataaccaacatatatttgtgttgcatttattaatcaagtaaattttatactcatctctgtcaaatatatttgtgtcaaaatttggcataggagacacaaaactataaacccagcccaaa

SEQ ID NO: 843701 - DNA, 120 bp, Artificial Sequence
  ENSG00000218357_0 (sequence is synthesized)
catgtagccaccttatcctgcacaggtctgtggcaggccgtgagacggtgaccagagaagcagtcagcactcacggcccctgccctttcagagtttacgcttgcttggaagcctccagaa

SEQ ID NO: 843702 - DNA, 120 bp, Artificial Sequence
  ENSG00000218357_1 (sequence is synthesized)
tggggataagcacaagacatttatgctgggcttcatccaggaagctctggtggaaggaagagaaagcagcccacacagcaaggttcaggagaagattcccatgaaggacaactggggttc

SEQ ID NO: 843703 - DNA, 120 bp, Artificial Sequence
  ENSG00000218357_2 (sequence is synthesized)
agccccatccagcagatgacacggagccggcctcggaggtgtcctcaccgtgggacactggcatctgagctacctcagggcgtagccggccgatgttcccagcctccccctgggcacagc

SEQ ID NO: 843704 - DNA, 120 bp, Artificial Sequence
  ENSG00000218357_3 (sequence is synthesized)
cagcccaggccaagtggtctagccccggcccccactcagcatggcccaaaaaaggagcaaaaagcagaaagctcaaggaccctcagaatcaagttttgcagaaagacacaaagctcaaga

SEQ ID NO: 843705 - DNA, 120 bp, Artificial Sequence
  ENSG00000218357_4 (sequence is synthesized)
accctgtaagactgcctcccagacacaccactgcagccagtgaattgcactgtttagactttgacttcagggtcagggtgagctgatgagactggccccttgatgaagtaagaggccacc

SEQ ID NO: 843706 - DNA, 120 bp, Artificial Sequence
  ENSG00000218357_5 (sequence is synthesized)
aaggagtgagagcggctgagtttgagccctgcctctgccgtctgcaactctctcatcttgagcaggtccagccccagtgtgggcctcagatctcccatccttgagatgagagaattcaaa

SEQ ID NO: 843707 - DNA, 120 bp, Artificial Sequence
  ENSG00000218357_6 (sequence is synthesized)
tccagctccacctctgcagcccacgcccttcccctgcactgcatggcatccgataggcttgaagaaggcgtgaatgacattcaaagggccacatcatctaagtcgcactcctctcccatc

SEQ ID NO: 843708 - DNA, 120 bp, Artificial Sequence
  ENSG00000218357_7 (sequence is synthesized)
ccatcccttgttgtcctttacatgattcccattcatctttcttctcttgggcccaggggtgtgctggtgaatgtttaacagccactccatgaaaaaataaaacggtcttgattgatggca

SEQ ID NO: 843709 - DNA, 120 bp, Artificial Sequence
  ENSG00000218357_8 (sequence is synthesized)
gccaagtggtctagcgaacactctgtgtggcttccctcataaatgccccccaggactcagaattctcaccccaaaggatttgagaccgagtctgcaagacacggatcgtccagatgagtg

SEQ ID NO: 843710 - DNA, 120 bp, Artificial Sequence
  ENSG00000286469_0 (sequence is synthesized)
gaaaagactcttagagtactctctttgaagttacgaaataatgactggaatataatagtatgcaattagcagcttacttcctatatttttttcttcttagtggaagagaggccatgatca

SEQ ID NO: 843711 - DNA, 120 bp, Artificial Sequence
  ENSG00000286469_1 (sequence is synthesized)
atttagtatcttgtcctagatcagagatttcggcacaggttatatatctgtgactaattttaagaacgacgactgagagaaatacagaaagcaggattaaacatagaagctgagctgcag

SEQ ID NO: 843712 - DNA, 120 bp, Artificial Sequence
  ENSG00000286469_2 (sequence is synthesized)
tgatgttgcagcagaggcgtcagccaatccatttgtaagcactgagccttggtggcctttcagagttttccacttcagaaaagaggagagaaaatactggagagggattcagctgtatcc

SEQ ID NO: 843713 - DNA, 120 bp, Artificial Sequence
  ENSG00000286469_3 (sequence is synthesized)
aagtttctggatggtgaatcacatcattactatgattctgactatattttctaccactctgtacaaatggattttaaaattaggaggactggacaattttctaagactatatactttcct

SEQ ID NO: 843714 - DNA, 120 bp, Artificial Sequence
  ENSG00000286469_4 (sequence is synthesized)
acgttcgaccccaagagatatcagtttaaacacaatgatttttttaaattataggaaattatcttatcaggcccaattgttttcaaagcaaacaatctttaaagaactgataattccaat

SEQ ID NO: 843715 - DNA, 120 bp, Artificial Sequence
  ENSG00000286469_5 (sequence is synthesized)
gtgatttagagtagtacaatattacattcagacagtcattcaagtaaaaattaattttaataagaaatgagcccaatatatataaaaataaataagacaaaattgtctgccaatatgaaa

SEQ ID NO: 843716 - DNA, 120 bp, Artificial Sequence
  ENSG00000228999_0 (sequence is synthesized)
agttctgtaatatatgaagaaatctgtggattctgtagagacaggaacagcgtgacataaatctcaggaaggcatcttatttcacaaatttcccatttgattcctgctattgtgtgaggc

SEQ ID NO: 843717 - DNA, 120 bp, Artificial Sequence
  ENSG00000228999_1 (sequence is synthesized)
tgggctcttcatctctatcaaaatcagtctggaagccttctgagattgcctctagaaaagccaatactcccgcggattggaccacagatgctgtgacaccactgacttgtcctgatctgg

SEQ ID NO: 843718 - DNA, 120 bp, Artificial Sequence
  ENSG00000228999_2 (sequence is synthesized)
agaggctctggcttgctcagcctgctgttgagtttgcaatgagagtgtaaagtcaagacagctacagatgctaacaggacatggacaccttttcagataactgacttcatctgtctgcct

SEQ ID NO: 843719 - DNA, 120 bp, Artificial Sequence
  ENSG00000228999_3 (sequence is synthesized)
gtttatgtggagagctgattatcagccatgtgcaaatactggggaaccgatctgatctctgtgatgttttacactacaggcggagcagagccatctttctatccaacattcactcagcga

SEQ ID NO: 843720 - DNA, 120 bp, Artificial Sequence
  ENSG00000228999_4 (sequence is synthesized)
ggcaggaaatataattaagctttcatgcatattcccatggtaccctgcacagtcaatcattgaaaaaaagtcagtgccacaagagcttgtttgtttgaagacatcacctaagaacttaag

SEQ ID NO: 843721 - DNA, 120 bp, Artificial Sequence
  ENSG00000228999_5 (sequence is synthesized)
agctctgagaggcaggagaagggatgtaagccatgtgaggcatgggtaggagtggtgggttccttaggggcgtgaaaactgggctcaaggtgattgtgggcaattattctgcaatgcaca

SEQ ID NO: 843722 - DNA, 120 bp, Artificial Sequence
  ENSG00000228999_6 (sequence is synthesized)
taaagtatatttagtccaataagcacaatccagagagtttttcatgggaaaatttcactccaacattgcagtgcctaaaagaatggaaattacttgaaaatggtcagtattgctagagta

SEQ ID NO: 843723 - DNA, 120 bp, Artificial Sequence
  ENSG00000228999_7 (sequence is synthesized)
taataattgcttgttaggccaaatctattgtgcggaggactttacagaaaatatttatagacacttttaatacaaagaaatgttataggaccaagaattataatatctaatttgaattcc

SEQ ID NO: 843724 - DNA, 120 bp, Artificial Sequence
  ENSG00000228999_8 (sequence is synthesized)
agctttgtcaattattgtgtaaacttgagcaaattactgaaccactaaaacatcaatttcttcatccataaaataggtatggtaagatataatcatactattgttctgtggctcaaacta

SEQ ID NO: 843725 - DNA, 120 bp, Artificial Sequence
  ENSG00000228999_9 (sequence is synthesized)
aacaatgtaatatatttaaagtaactcatagactacctagacctcaataagctgtgattggttttattaatctttttgttgttattcacgaaacactagttcaaatacatatagtgaatg

SEQ ID NO: 843726 - DNA, 120 bp, Artificial Sequence
  ENSG00000228999_10 (sequence is synthesized)
catttagaaagctatacatactagactctctttttgatagttacagtgcatgtacgaattttaaaggctctgaaatggtctaagttaaaaacaataacaaaatagcaataggaaaaaaaa

SEQ ID NO: 843727 - DNA, 120 bp, Artificial Sequence
  ENSG00000228999_11 (sequence is synthesized)
aaaaaaaaaaaaaggacacctgtgtggttaacccagtattttccaaatgtatttgaaaataagccctgttttttttcttttctttttttttgcagagtctcactctgttgctcaggctgg

SEQ ID NO: 843728 - DNA, 73 bp, Artificial Sequence
  ENSG00000228999_12 (sequence is synthesized)
ccacggctgggccctatttttttctatatttaattcttactactatgtcatagaactaggatttcacatactt

SEQ ID NO: 843729 - DNA, 120 bp, Artificial Sequence
  ENSG00000228999_13 (sequence is synthesized)
ttcttactactatgtcatagaactaggatttcacatactttggtaaaagtcaactttgtccaaattctttagttttcagatccccaaacaagtctctatccaatatgaggttatagccct

SEQ ID NO: 843730 - DNA, 120 bp, Artificial Sequence
  ENSG00000228999_14 (sequence is synthesized)
taccacaggacactccataccatgcgctatggtgaaagacagacatctattacaatctcaaagttggttccatattggaatcacctagattactttaaaaattactggtgtttgggtccc

SEQ ID NO: 843731 - DNA, 120 bp, Artificial Sequence
  ENSG00000228999_15 (sequence is synthesized)
accagagatttctatataattggaatagattaaggcctggtctgaaaatctgtttgaaacagcctagataattccaaaaggcagccaagtttaagaactagtgcaaatgataatcctagg

SEQ ID NO: 843732 - DNA, 120 bp, Artificial Sequence
  ENSG00000228999_16 (sequence is synthesized)
gctacttttttttaacaccattgtcatatttttcattcagatttgagggtaagcctgcaatgttttttacaaagctcaagaatttggtaaatacccaatgatcatgatcaggtatctctc

SEQ ID NO: 843733 - DNA, 120 bp, Artificial Sequence
  ENSG00000228999_17 (sequence is synthesized)
tgtaatcattcttttattaactcatttaataatcatatactgatcacaaaggaaacagctaggttcaataggttctgttcaaccctcctaactaactccttgcccacccacttcccaaag

SEQ ID NO: 843734 - DNA, 120 bp, Artificial Sequence
  ENSG00000228999_18 (sequence is synthesized)
ccctcccgtgtttctcagtactactactcacttggattattttaccatgcagaataccacatggggtgttctgcccagctaataattatctttttgtttgtgcctaattcacgaagcatc

SEQ ID NO: 843735 - DNA, 120 bp, Artificial Sequence
  ENSG00000228999_19 (sequence is synthesized)
catccccctgccctccagctgaaccatgaggtcctaaactcatatatcagcaatggagatagataggaaggcagagacagcctcatacagaataaaggacaaaagcttcagagtaaaata

SEQ ID NO: 843736 - DNA, 120 bp, Artificial Sequence
  ENSG00000228999_20 (sequence is synthesized)
tacatgagtgtaaaccctgattctacctcttataatctgcatggtcttagaaattttaatttctctgagctcagttttcttatttataaaataggcgtgataatattaacctcacatagt

SEQ ID NO: 843737 - DNA, 120 bp, Artificial Sequence
  ENSG00000228999_21 (sequence is synthesized)
gtgaagattcaatgagataaaccacgtgaaatttatagatccaggcataacacactagagatgatcaaacaagaaagtgcttatttatccatgttgaccattttgagaccttagcttatt

SEQ ID NO: 843738 - DNA, 120 bp, Artificial Sequence
  ENSG00000228999_22 (sequence is synthesized)
gcaccacacttgtactgagcaggatgtagactcctcaaagggtaatcttggaaaatagacatttcaagagccaggagaaagaaagacttatggtactttcagcaaagttagttttcttga

SEQ ID NO: 843739 - DNA, 120 bp, Artificial Sequence
  ENSG00000228999_23 (sequence is synthesized)
actcattgtttttctgctataaataaaaaattgaagaaaaaataatatggtcatattgatacatgaatgtagagagggaatatattactattctggataactaatatccttaaataaata

SEQ ID NO: 843740 - DNA, 120 bp, Artificial Sequence
  ENSG00000228999_24 (sequence is synthesized)
atcccatgctcagtcatgactgtaggtggtacagactggacataattgttaagaggaagaaagaagagaaggaatagaatcaaaccagagagcccagaaatatggatggctttgaaagaa

SEQ ID NO: 843741 - DNA, 120 bp, Artificial Sequence
  ENSG00000228999_25 (sequence is synthesized)
atgccccgtgattacctggagtcagatggagcatcagcccagaattccacatgaggaagtcatgggtgctggtttttttcactctgcactgctccccagaagttctctacatgaaaggat

SEQ ID NO: 843742 - DNA, 120 bp, Artificial Sequence
  ENSG00000228999_26 (sequence is synthesized)
gaagttgctgatcttctttcccctttacctgcccccatgctggattcttggatgtggatgatgggggaggtaatatgggaagaattttatatcttgagggatacttcttattctgcgatt

SEQ ID NO: 843743 - DNA, 120 bp, Artificial Sequence
  ENSG00000228999_27 (sequence is synthesized)
gtatactgtgtttaaagtcattttatctaggcaggggtgaactacaaatagcttctccgtatccttctgttcccttctccttgccctgagagacacaagtaataattactttctaaacaa

SEQ ID NO: 843744 - DNA, 120 bp, Artificial Sequence
  ENSG00000228999_28 (sequence is synthesized)
caaactacagaaatccacccaaaaccgagagaaggagagtatctgttttcagaggagctgtctgctttgggaggaagttccagaagtgagcctcaggaattacaacattaattgagaaac

SEQ ID NO: 843745 - DNA, 120 bp, Artificial Sequence
  ENSG00000228999_29 (sequence is synthesized)
tcatcatgtgtgaaagaggtactataataaaaaccctagcagtgtctactgcgtgcttcgtgcaaggtatccatgatggtcttaactcaccacagaagaacttgggggagtgtggtcaat

SEQ ID NO: 843746 - DNA, 120 bp, Artificial Sequence
  ENSG00000228999_30 (sequence is synthesized)
gccaggggttcacggggaaaaatgaagttgtccacaggttgacctcctttttgcaccactgggaattactctttgcataagaaaatactgcctattggaaatgggaggtgaaattacaca

SEQ ID NO: 843747 - DNA, 120 bp, Artificial Sequence
  ENSG00000228999_31 (sequence is synthesized)
ttggacaaatggggcagaaattgacccagaggtttttatttttctgtgttgctccttgtccctaaatacactgaaaattcttgacattcatacagtattttctctttcatccaagcaccc

SEQ ID NO: 843748 - DNA, 120 bp, Artificial Sequence
  ENSG00000228999_32 (sequence is synthesized)
agttcactggtgatgcacaggaaagaattgttgatgttctttgggcttgtgtgggaactaaggtgatagatacttgtatttaatgaatgatgagtctgtggcaaatgccttggaaagtgc

SEQ ID NO: 843749 - DNA, 120 bp, Artificial Sequence
  ENSG00000228999_33 (sequence is synthesized)
tacatatacatcacctatttaatcctcagaaccattctctggggtcaaaattattggtcccaatttacagctgggaatgtcgaggctctggtgtgctaaataaatttgccataatcaaaa

SEQ ID NO: 843750 - DNA, 120 bp, Artificial Sequence
  ENSG00000228999_34 (sequence is synthesized)
taggtggtacagactggacataattgttaagaggaagaaagaagagaaggaatagaatcaaaccagagagacaggacccatactggcttaaaaggctaattttgtcaaagtatcttgaag

SEQ ID NO: 843751 - DNA, 120 bp, Artificial Sequence
  ENSG00000228999_35 (sequence is synthesized)
ctgtatttacttcagtgttgatccacaagcactctctcagcctccagatagagttgctggctatggctttgtgagtaaaagcaactgaaagagaaatccgttctgattctaaatatgcat

SEQ ID NO: 843752 - DNA, 120 bp, Artificial Sequence
  ENSG00000228999_36 (sequence is synthesized)
atggaagatcgttttgaaagattttgtttttagtttgaggcttaacctcaaagaaacagaattaatagaagaaggaaatgatcctgggagatcctcaatgcagtaatgaattcaacattc

SEQ ID NO: 843753 - DNA, 88 bp, Artificial Sequence
  ENSG00000228999_37 (sequence is synthesized)
gctaagtaacttgcccaagaatgcatagtaataaaagatggagtttcactcttgttgcctgggcccacggaattactgggttcaagtg

SEQ ID NO: 843754 - DNA, 80 bp, Artificial Sequence
  ENSG00000228999_38 (sequence is synthesized)
cctacttacctgtggtgaccctggattctgtacaactgatttgttgatacagaagagagtcatgcaaactacagaaatcc

SEQ ID NO: 843755 - DNA, 120 bp, Artificial Sequence
  ENSG00000228999_39 (sequence is synthesized)
agtcatcccatgctcagtcatgactgtaggtggtacagactggacataattgttaagaggaagaaagaagagaaggaatagaatcaaaccagagagaataaagacttgctggcagaggct

SEQ ID NO: 843756 - DNA, 120 bp, Artificial Sequence
  ENSG00000228999_40 (sequence is synthesized)
atgagggtctgctcaatgctcatgtcagtcattctacagtagcttcagctgcctcaaacttgcaagtgacagtctgtaaaacagcaccattcaaacccaccagagaaatgacgcgcatta

SEQ ID NO: 843757 - DNA, 120 bp, Artificial Sequence
  ENSG00000228999_41 (sequence is synthesized)
actatcactttggacatttaaatgttaattatcttggttttctaaattattgtatctgacttttccatgcccagtgccctggatattacaagccatcactaagctggtgtttgtgaagat

SEQ ID NO: 843758 - DNA, 120 bp, Artificial Sequence
  ENSG00000228999_42 (sequence is synthesized)
atcacagcttctatctcttgcctgatggtagaatgcatacttcatgctgaattatgaagacccaattaagagtgtatttcaatctgctggcttattataaaaagaggatatagaacaaag

SEQ ID NO: 843759 - DNA, 120 bp, Artificial Sequence
  ENSG00000228999_43 (sequence is synthesized)
agattgggggatttggagcctttatgtgaccaggcaggggaattgtggtcagaaatgggcatggagaggccgtaatggagtccaataaaggttggcatgttagattccatctaagatggc

SEQ ID NO: 843760 - DNA, 120 bp, Artificial Sequence
  ENSG00000228999_44 (sequence is synthesized)
tgggcacacaagggcaagaaattagctggaaagctagctggcaaagcaaattgttcacacaaaattaccttcttaataatgaatcttagcagactttccctgtgtgggggtatgtgtgtg

SEQ ID NO: 843761 - DNA, 120 bp, Artificial Sequence
  ENSG00000228999_45 (sequence is synthesized)
tctgcacgtgcgcatgtgcgtatgtgtttcatgatttattaaatagattaactacattgatttttactttgagatttccaggcaatcacacaatacttgaatttttcaatcttgttgcta

SEQ ID NO: 843762 - DNA, 120 bp, Artificial Sequence
  ENSG00000228999_46 (sequence is synthesized)
cattatatgttaataaaagccaatagcaaacatttaaaaagttttcctagattagggccctttcaggaatcgataatctcattgtcacggttcaaaaagctatcaattctatgaggacca

SEQ ID NO: 843763 - DNA, 120 bp, Artificial Sequence
  ENSG00000228999_47 (sequence is synthesized)
ctaatggctgcagaaagaatgcatgtaaacaccaccagaaaaaaatcaatgttctctctaagtcatcgataattcttgatggcaattggaattatgaaaaacattacatgtacctcgtgt

SEQ ID NO: 843764 - DNA, 120 bp, Artificial Sequence
  ENSG00000228999_48 (sequence is synthesized)
cttaagcatttggaagggatccacatcaggtagctggaatcctggtgtccaggacaacgcagctatcatttaggctttgttgatctgttaactggtgcttggataataccttatggttcc

SEQ ID NO: 843765 - DNA, 120 bp, Artificial Sequence
  ENSG00000228999_49 (sequence is synthesized)
atttggcagccacagcaaccctgtgaaatgaacactgaagtaaaactagcctccttgttgtagacgaagtgccagtgaagaggtggcacattggccaagccaatcacaggagagttggga

SEQ ID NO: 843766 - DNA, 120 bp, Artificial Sequence
  ENSG00000228999_50 (sequence is synthesized)
atgacgtgtagctcttttgactcctgttcttcccccttggtggtgatgggtgcctccaccaatataactgtggatgcaatgtttacttattcaccaattctcaataggctataatgaagc

SEQ ID NO: 843767 - DNA, 120 bp, Artificial Sequence
  ENSG00000228999_51 (sequence is synthesized)
agtttagtgagaaatctggatattagtaaataatccagaggttcaactgcatagtacatctcatctaggtttacagagttactacaaatgagtattcactcaaggataagggctatcctt

SEQ ID NO: 843768 - DNA, 120 bp, Artificial Sequence
  ENSG00000228999_52 (sequence is synthesized)
ttttcatgctcttcaattttctcaggggttgctggagtatctctactctctcaagtatggtatttggcatttattcccatacttccccattttaaagggagatgataacaaatagagctg

SEQ ID NO: 843769 - DNA, 120 bp, Artificial Sequence
  ENSG00000228999_53 (sequence is synthesized)
tgcctactgaggtcactcagctcttagccttagcactgcatagcaatgaacacattttttatcctctaacatcgtaatttttttaggtagctgtctctgcctttggttaaggcttatttt

SEQ ID NO: 843770 - DNA, 120 bp, Artificial Sequence
  ENSG00000282950_0 (sequence is synthesized)
acatctatcaggagaaagctgtcagtctctgaagcatgttcttttttcaagcccagagagactccacttcaccaccttatcttgcccaaggctccaagcgtatgttcctgatgcttcttt

SEQ ID NO: 843771 - DNA, 120 bp, Artificial Sequence
  ENSG00000282950_1 (sequence is synthesized)
aaatccccaaagtgcgaaggcatgcctgatatatttgacattcagtaaatattaatgaatgatgacttttctgtggtgaaatgcaccccactttcactgttcctttcggatttgcactta

SEQ ID NO: 843772 - DNA, 120 bp, Artificial Sequence
  ENSG00000282950_2 (sequence is synthesized)
cttggatacttgtggatgattctgaagagctggttgttcacatctgtctctgttatgtggcagagatatttctcatttaacttgacagggtatttcaggatggagaacaccctgtagaag

SEQ ID NO: 843773 - DNA, 120 bp, Artificial Sequence
  ENSG00000282950_3 (sequence is synthesized)
agtgcccttcacaaaggagaaatgacaggagagggtaacatcagtgaatgggtgggcccgcagctcctctgtagacaccgagaatgtcaaagaagaaatgaagttaataaagaccaatca

SEQ ID NO: 843774 - DNA, 120 bp, Artificial Sequence
  ENSG00000282950_4 (sequence is synthesized)
gcactgcatcaggctcaacaacactgcagtactggtcttctggaagaacagttgcctctgccttatcaagaagctggtgatgcaggaagtcatcaccacgggtgttgcttccatagccaa

SEQ ID NO: 843775 - DNA, 120 bp, Artificial Sequence
  ENSG00000282950_5 (sequence is synthesized)
tctgcacctgctagattgcactggccaatgaaagaatgcgtcatgcactataacctttctccccacttcaatcagttgccatttaattcttgagaaaatatatctgattggcagactcta

SEQ ID NO: 843776 - DNA, 120 bp, Artificial Sequence
  ENSG00000282951_0 (sequence is synthesized)
acaggtgtaaacaatgctttatgggggtagggtgggtgctggacaggcctccaggtaataaataacaggtactagcaacagcagggccagatggggagttggggacaaatgaccctggtc

SEQ ID NO: 843777 - DNA, 120 bp, Artificial Sequence
  ENSG00000282951_1 (sequence is synthesized)
tcaggctttgggagctcttggggtatggttaggggttcagggggacagacgttagccaagacagaggaagcagcagcaggtacgggattcccccttcccccgtggctcagtcttgcccca

SEQ ID NO: 843778 - DNA, 120 bp, Artificial Sequence
  ENSG00000282951_2 (sequence is synthesized)
aagccaggccccaccaggccagggaagggggacaggtggcaacgtagcttctccggggccagggcaggttaggacacggcctctcagagcctgggcctgggccccagcagggctggtcct

SEQ ID NO: 843779 - DNA, 120 bp, Artificial Sequence
  ENSG00000282951_3 (sequence is synthesized)
ggagaacaggtgagctgaaagagaagggtgtggtgacctgcagggtccccggggtctgtccagccggtctctatctcatttccaggtatttccttcccctcctatctgcatcggtctgtc

SEQ ID NO: 843780 - DNA, 120 bp, Artificial Sequence
  ENSG00000282951_4 (sequence is synthesized)
tacattgtctgattttccgcctctcccctgcaggtaatttggggcttgtgctgagggtacctgcatctccctctttgtttgcctcagagagctgtctgagtctgtaaagccacatttcaa

SEQ ID NO: 843781 - DNA, 72 bp, Artificial Sequence
  ENSG00000282951_5 (sequence is synthesized)
gcctcagagagctgtctgagtctgtaaagccacatttcaacatctaaatatcatgaatctggagcaggagga

SEQ ID NO: 843782 - DNA, 120 bp, Artificial Sequence
  ENSG00000282951_6 (sequence is synthesized)
agtgagacctcatctctatttatcttttaattaagaaaaagtcctgaaaccacttcagaatctctagggtgaggcctgggcatcagtatcttttaaaattctccaggtcattctaatgtg

SEQ ID NO: 843783 - DNA, 120 bp, Artificial Sequence
  ENSG00000282951_7 (sequence is synthesized)
tgtcactgccttggtggggaaatcagtttggtgggtcttgaccaatttttaaattcaaacagaatagcacagaacggcaaataccagagtgcatcatatataataagaatattctattgg

SEQ ID NO: 843784 - DNA, 120 bp, Artificial Sequence
  ENSG00000282951_8 (sequence is synthesized)
ttgggcagaaacaaaccaataggtaacagtaacagataactcttatgtagtacttgccatgtgccaggcacattctatatattttttttcaacttttattttagattcagggagtacatg

SEQ ID NO: 843785 - DNA, 120 bp, Artificial Sequence
  ENSG00000282952_0 (sequence is synthesized)
ctttaggatagtgggctagagaagaacaaaccctcgctcaccaacactaccaagctcccagggttctccagccttgtgatgtggcctcctcggcgcctcaccacgatgagaaaatgaaga

SEQ ID NO: 843786 - DNA, 120 bp, Artificial Sequence
  ENSG00000282952_1 (sequence is synthesized)
ctcagagacgtgaagctacttggcagagatcaaatggctcataaatggtaacgctggctttaagcccaggaacataaacgcggtgtctccgtgtttttaggaataaattgggaagtgctc

SEQ ID NO: 843787 - DNA, 120 bp, Artificial Sequence
  ENSG00000282952_2 (sequence is synthesized)
actctgcttttcttttgcttttttcctaactagtgatatttgagaaaattaagtatgttttattttacactcaggacccagatcctcagacatacttggggactgaaacaggagaatgcc

SEQ ID NO: 843788 - DNA, 120 bp, Artificial Sequence
  ENSG00000282952_3 (sequence is synthesized)
agttggttacagaagcaaatatttcattgcatccttccccagcccctatgaatgtcttcataaatgaaataatagattttgttttgacactaccttaaatatttccactgaggcaagact

SEQ ID NO: 843789 - DNA, 71 bp, Artificial Sequence
  ENSG00000284452_0 (sequence is synthesized)
gcaccgtcccacacggacacaggaactgaaaggctggagctgggggtccgtgaaaagtgatggcagaggtg

SEQ ID NO: 843790 - DNA, 120 bp, Artificial Sequence
  ENSG00000284452_1 (sequence is synthesized)
ggctggagctgggggtccgtgaaaagtgatggcagaggtggcaggaggtggcggcagccaccgggatccccaggctggagggcagaagcccctcgcacatccggatggctaatcctcctc

SEQ ID NO: 843791 - DNA, 120 bp, Artificial Sequence
  ENSG00000284452_2 (sequence is synthesized)
ctgaggaaattcactctctctattttgcgactgttcccagtcacctgagcatcctgagcatcgatggtgagaagctacaggaggccgagcggctgttgacgcccaggaccgtgggcagca

SEQ ID NO: 843792 - DNA, 120 bp, Artificial Sequence
  ENSG00000284452_3 (sequence is synthesized)
gggaaaccggcttcctccggtctcccagaagaagagttcaggccttctctcctctctccaggcctccagctcttccccatccccgctctcagcggaggactggcttctgttttcactgaa

SEQ ID NO: 843793 - DNA, 120 bp, Artificial Sequence
  ENSG00000284452_4 (sequence is synthesized)
gaaatcacagcctcctgagaggacttccccagacgcagccctcccctgtacccgctcctcctccacatccccaccttccatgcccagggcagcaaaccaccccccatctgcttggggatg

SEQ ID NO: 843794 - DNA, 120 bp, Artificial Sequence
  ENSG00000284452_5 (sequence is synthesized)
tcaacaggctccctgtttcctgaatcttcagtttctccttcctgcttgattcccatccacaaacttaccattatgtttcttgtctttaaaagaaaaataaaatttttgctttttatccaa

SEQ ID NO: 843795 - DNA, 120 bp, Artificial Sequence
  ENSG00000262815_0 (sequence is synthesized)
gcccggccttttacatgcttttaactcatttgatcctcacaacaaactctgtgaggtgggttcttatttttcctactttataaatgtgataactgaggcgtacagaagttaagtaatttg

SEQ ID NO: 843796 - DNA, 120 bp, Artificial Sequence
  ENSG00000262815_1 (sequence is synthesized)
ccaaatcctagaggcttccagagctctctgtcttaatcactaaggctatgctgtagggtctggagggtgaaagcagtacccagcttcaggactgcaacagtgttgcagaggatccagtct

SEQ ID NO: 843797 - DNA, 87 bp, Artificial Sequence
  ENSG00000262810_0 (sequence is synthesized)
gaaaactgaaagtgagatgtggagaggcgataccggaggctgttctctcctaggctcagttccttagagagagataatgtaagcatc

SEQ ID NO: 843798 - DNA, 78 bp, Artificial Sequence
  ENSG00000262810_1 (sequence is synthesized)
gacagtcatgcatcaccatgcccagctaatttttgaatttttatttttgtagagatggggcctcgctatgctgccagg

SEQ ID NO: 843799 - DNA, 120 bp, Artificial Sequence
  ENSG00000262810_2 (sequence is synthesized)
tgaactcctggtctcaagcagtccttctgctttggcctcccaaagtgttggggttacagccgtgagccactgcacccaacctactttatatttttcatgatacttttaggatctagaaat

SEQ ID NO: 843800 - DNA, 120 bp, Artificial Sequence
  ENSG00000262810_3 (sequence is synthesized)
cctctgcactctttgatgcagttactacatccagatgatgtagatgaggaaactaaaattcaaataaattcaatgacattctcaggagaactaagatccaaagccagataaaatgacttc

SEQ ID NO: 843801 - DNA, 120 bp, Artificial Sequence
  ENSG00000256339_0 (sequence is synthesized)
cagccttggtactgatcatcaaaagaacctggtgcgaagtcgaagtcgattttaattgcaacctgtaaaaaaagaaaaatcttgagtttaatttttcaaatcagatggtgaatgtggttg

SEQ ID NO: 843802 - DNA, 120 bp, Artificial Sequence
  ENSG00000256339_1 (sequence is synthesized)
tctcagttcaattcctggtgctccttcttcctaaatgtgtgatcttggacaagctacttaacctctctgtctctctgtttcctcatgtgttgaatggagataataatagtaccaacttca

SEQ ID NO: 843803 - DNA, 120 bp, Artificial Sequence
  ENSG00000254863_0 (sequence is synthesized)
agttttggaggaatgggagaggagctttccactcctctgagagtcatgtcgagagtctgtcttagccctcgacccctcagtctttgtagatctcatcccagaaccccgagggagagcact

SEQ ID NO: 843804 - DNA, 120 bp, Artificial Sequence
  ENSG00000254863_1 (sequence is synthesized)
ttatctacagaaggacaatttgaaaactaactcaaagcatcgagaacaaataaataaattcctctttccgttcccagcactctccatcctatttctacaggagaagttctggtctctcct

SEQ ID NO: 843805 - DNA, 120 bp, Artificial Sequence
  ENSG00000254863_2 (sequence is synthesized)
cggtgctgcggctgccccgggaagagtttccaggagctgacaagcattcagatgagtaaagatgggatcggattgagaaaaggagaagggagagcatattcgttctctttccacctccct

SEQ ID NO: 843806 - DNA, 120 bp, Artificial Sequence
  ENSG00000254863_3 (sequence is synthesized)
ggaggaatgggagaggagctttccactcctctgagagtcatgtcgagagtctgtcttagccctcgacccctcagtctttgtagatctcatcccagaaccccgagggagaggtaattgctg

SEQ ID NO: 843807 - DNA, 120 bp, Artificial Sequence
  ENSG00000254863_4 (sequence is synthesized)
aaggatttttgcttcaaacaggctcttgtttgcatcaagtgtggggtgcagcaaagtggactcgggactggccgatgtctggccagaaatgccaggcaagggaaacagtgactctagtgg

SEQ ID NO: 843808 - DNA, 120 bp, Artificial Sequence
  ENSG00000254863_5 (sequence is synthesized)
ggtcaggagaggggcatctgctggcccaggagcgcaaggcagagggacttcattgtcccccttataggtgaggcgactctgaggcaggaggtccaagtttgctggacaatggcagaaaca

SEQ ID NO: 843809 - DNA, 120 bp, Artificial Sequence
  ENSG00000254863_6 (sequence is synthesized)
atactaacaagtttgaagacccccacagaggaatggaatcagtatgagaacacagtttcttcatctccctgtcccagaacttcaccctggactcctcgaccaatcaacaatctccacact

SEQ ID NO: 843810 - DNA, 120 bp, Artificial Sequence
  ENSG00000254863_7 (sequence is synthesized)
tcggcccactccaaaactcctaaaatcccaagctccaaactcctctgggagatggatttgaggcttcctcccgtttccttgtgtggaagccctgtcattaaacctctttctctgctgcaa

SEQ ID NO: 843811 - DNA, 120 bp, Artificial Sequence
  ENSG00000254863_8 (sequence is synthesized)
cagaaagggaaaggagaggagtaaagaggaaaagagaacagtggtgggtgcctataaagagccacacaccttgctgcatgctctatatgtgggctattgtttgttctcacaatgaatctg

SEQ ID NO: 843812 - DNA, 120 bp, Artificial Sequence
  ENSG00000254863_9 (sequence is synthesized)
atctagcagtaaaggatggattctgttatttcagtgatgtggggctcagggtaatgaaagtgatcatcaaaaagcaaaagtaaagctgtcctcacagggttaacaagaattctgggcaga

SEQ ID NO: 843813 - DNA, 120 bp, Artificial Sequence
  ENSG00000254863_10 (sequence is synthesized)
aatacggctataattaggcattaatcaggctgcactttaacccacttccttgtaactgacagacactgtaggactagatactggccgtttgcatccctaatgttcctatagatgggattt

SEQ ID NO: 843814 - DNA, 120 bp, Artificial Sequence
  ENSG00000254863_11 (sequence is synthesized)
ctgatgttagagctataaggcttttaagacagacaagatctttgacattagaatcataaggctcctgtttaaaaattgcttaagatgtttctcagatcctgaattccagcgaaacagatg

SEQ ID NO: 843815 - DNA, 120 bp, Artificial Sequence
  ENSG00000254862_0 (sequence is synthesized)
gcccgctgagcgagggccctcatgagaagggaaggtcgcgtggacaggctgccaggggcaagcgtttttagattacttcctccttcttggccccagatgcacttggttgcacgctctggt

SEQ ID NO: 843816 - DNA, 120 bp, Artificial Sequence
  ENSG00000254862_1 (sequence is synthesized)
tcccaaacccccggccgctggcttatgcaaatcacttaggtacatgcaaaagtatcccttctcccggagcgccattggcccggggaggtctcgagctcattactatgcagagaggagagc

SEQ ID NO: 843817 - DNA, 120 bp, Artificial Sequence
  ENSG00000254862_2 (sequence is synthesized)
cgccattggccaagaggaggaccagaggggcgtgtttctcgggcaaattggatctcctaaattggatgacctggtaagtagaacttccctccagcgttcagttaagttttaaatgactct

SEQ ID NO: 843818 - DNA, 120 bp, Artificial Sequence
  ENSG00000254862_3 (sequence is synthesized)
ccgctgttccaaagggcgaggacgtctggagctctgcaaacggaaaaaagattttgaagaggaggaaaaaagtttccctcgatctgacacacatctttgggttttagctatacactaagt

SEQ ID NO: 843819 - DNA, 120 bp, Artificial Sequence
  ENSG00000254862_4 (sequence is synthesized)
taaaagtgtaccctctccagtgcctcacttcacctgggatctttacacctatcttgatacacatttggtagctaagtcttagcaattcattctccccagtcctctctctgtatttggtgt

SEQ ID NO: 843820 - DNA, 120 bp, Artificial Sequence
  ENSG00000254862_5 (sequence is synthesized)
cacgcactttaaaatcctgaaacacaggaattttgtaaaaggtcagagaaagtgatgtttctgaacactggacaatttccaaaacatctgagtgggaggtgactacggctgagaagccag

SEQ ID NO: 843821 - DNA, 120 bp, Artificial Sequence
  ENSG00000254862_6 (sequence is synthesized)
cagcaacgttggtgttagggctgaaagacaacttaaagacccccagaaaactctggttttatagataagaaatctgaggctcgagagagagtgtgttctgcccaacatcatcacggaaca

SEQ ID NO: 843822 - DNA, 120 bp, Artificial Sequence
  ENSG00000254862_7 (sequence is synthesized)
gctcctgggctcctggctcctaatctgagcacacaggacttgttgactgatggataagctggacttcggttctaccacccctttacccaagaactcttgtaaacatagaacctgaacaag

SEQ ID NO: 843823 - DNA, 120 bp, Artificial Sequence
  ENSG00000254862_8 (sequence is synthesized)
tatatgcagaggccctacctgttgggtgaacggttcaaggtgccctgttacaacaacagctcagatacagtgggggctctgagtgctgtaatgattgactggataaaagtcctcaaacat

SEQ ID NO: 843824 - DNA, 120 bp, Artificial Sequence
  ENSG00000254862_9 (sequence is synthesized)
gtagaatttcactttttatgaactatttcgacttagaaaaagagttaacagcaatcagcttaagaaatattacgaatgtagttgaagctccctttgtaccactccccaatcatattcctt

SEQ ID NO: 843825 - DNA, 120 bp, Artificial Sequence
  ENSG00000254862_10 (sequence is synthesized)
ttcttcctctccctgagaagtaagcagtttcctaaactttgtagttaattcccatgcatattttcatgcttttcgtatgcatgtatccctaaacaataaacagcattgtttttcatatat

SEQ ID NO: 843826 - DNA, 120 bp, Artificial Sequence
  ENSG00000254862_11 (sequence is synthesized)
aattggatgacctggctaatgttaaaacatacttcgtgatctgtagaacgtaagagaaaatttagaaaatgtttgatatgaaagagaaaatgaaggatgttgcgataatagggaaaaact

SEQ ID NO: 843827 - DNA, 120 bp, Artificial Sequence
  ENSG00000254862_12 (sequence is synthesized)
tgcgataatagggaaaaactttatagtaattctaccaatttgccccttttattctaaaataacacaaacttgtcaagcttttcaacattttttgaattttttttttttttttttgagatg

SEQ ID NO: 843828 - DNA, 120 bp, Artificial Sequence
  ENSG00000254861_0 (sequence is synthesized)
ggcagattccaggagtggggcagggcaaatacaatatgagtcttaaatatcttgtggtgccagaaggagtggatgttatgacagaggaatgtaggaaggaaggacatcaggctctgaaca

SEQ ID NO: 843829 - DNA, 120 bp, Artificial Sequence
  ENSG00000254861_1 (sequence is synthesized)
tccatccatgtaaaacattgaataagactagctgttaaacagggctttttccctagaaaggtgtcataattttgactccatcaaattcttctaacagcaagtactcatttgggcccattt

SEQ ID NO: 843830 - DNA, 120 bp, Artificial Sequence
  ENSG00000254861_2 (sequence is synthesized)
tctgcctcctggattcaagcgattctattccccagcataccaagaagctgggattacagttttgaagatgaagaaaaaccgaagctataaggactgagataaaatgccaaggacatatag

SEQ ID NO: 843831 - DNA, 120 bp, Artificial Sequence
  ENSG00000254861_3 (sequence is synthesized)
cttgaaaaaggcatggctagaatgtgcactcagtatgacctcagcacccaagctctttaccaatatatgctgcaatcttaggctcatcaactgcacacagtgaattgtggtgctacttcg

SEQ ID NO: 843832 - DNA, 120 bp, Artificial Sequence
  ENSG00000254861_4 (sequence is synthesized)
tctaagcctgcattctccttcagagcctacacctccctttcagctgttttcaccttcactgttccaaaaaaagcagactttgaaaacttaagaaatgacattaaaaaaaatcaaaatcga

SEQ ID NO: 843833 - DNA, 120 bp, Artificial Sequence
  ENSG00000254860_0 (sequence is synthesized)
agtgcgaagggccgggaggctgggcagtcctggtgcccgccttggcctagccccggccccgggacggaagggggcctctggggtggcagcctgggcccagtagagctttgcatctcttgg

SEQ ID NO: 843834 - DNA, 120 bp, Artificial Sequence
  ENSG00000254860_1 (sequence is synthesized)
atatctttcccgggcgcagaagctgcggggcttagggagtcgccattgcgctggaaagtcctcccgcccacggagaccccagcaaactccgagtgtcacacagtcgcctctggcgacccg

SEQ ID NO: 843835 - DNA, 120 bp, Artificial Sequence
  ENSG00000254860_2 (sequence is synthesized)
tgcgggccggagccgttcgcgcacaggcagggcgggtgctgagcgtggaaacggggctggaattggccgagccatgcctttccgggatgcccaccgccagtcaaagggttgggggtggtc

SEQ ID NO: 843836 - DNA, 120 bp, Artificial Sequence
  ENSG00000254860_3 (sequence is synthesized)
tctgcaccttaagtactaacctgccgcccacgcgcctcctgaccacagcaccccgtcggctttctaattctgtgagctgccctcgtgggcgtggcctccctgtggagctccccatgtgcc

SEQ ID NO: 843837 - DNA, 120 bp, Artificial Sequence
  ENSG00000254860_4 (sequence is synthesized)
tccccttggtccagcctgcagctaggaagtgggtcacagcgacggggctgggctgggccaggccaggctccgggagatgtggaattggcgaaacaactgccccagtagtatcctccgcct

SEQ ID NO: 843838 - DNA, 120 bp, Artificial Sequence
  ENSG00000254860_5 (sequence is synthesized)
aggactccaagaggtggcgaattggggcactacgcccgggaaccagggtggcagggctagatgtcctctcaccagactgcccagtgaaggtgctgtcactttgatgaattatcaaggctt

SEQ ID NO: 843839 - DNA, 120 bp, Artificial Sequence
  ENSG00000254860_6 (sequence is synthesized)
tgtagtgggtcttctactggacaaaggacaaactggagactccctggatcaaatgtgttgaaaatgttatagtgctgtcaggaagtgctgttctggaatacagaatgtggctgccgtgag

SEQ ID NO: 843840 - DNA, 120 bp, Artificial Sequence
  ENSG00000254860_7 (sequence is synthesized)
tggagtgtgactatgagatagtcgcctgactggagacaatgaagcctcaggccaaggatgctccctcctactcagccctgtttagtgggatttttcagcccactgtaaagcctactgctg

SEQ ID NO: 843841 - DNA, 120 bp, Artificial Sequence
  ENSG00000254860_8 (sequence is synthesized)
cctgtaaagccacctaagtgcatcacttgctggtgttcaccatgataacaacaatttatggggacagaatatgtttctagagctgctggtgccactgctgatgttactgggttccctgaa

SEQ ID NO: 843842 - DNA, 120 bp, Artificial Sequence
  ENSG00000254860_9 (sequence is synthesized)
ataaaacaccacagtgcaggtgagtaccaaagtggggagaatttttagttccttttagaggtgctaaatcaatattgttgatttcccagtaccttagaatatttaatgaaaacaggtcag

SEQ ID NO: 843843 - DNA, 86 bp, Artificial Sequence
  ENSG00000254860_10 (sequence is synthesized)
agccaaaaaaacttaatgaatacagtccctcctaagattttcaaataaatgaaataccacattaatcatattgttttatttttatc

SEQ ID NO: 843844 - DNA, 120 bp, Artificial Sequence
  ENSG00000254860_11 (sequence is synthesized)
gaaataccacattaatcatattgttttatttttatcattacattaaaaatcaaatagtatcactaggtttataatgaaaaacagcagaccctgtcccagccctccacactctcagtttct

SEQ ID NO: 843845 - DNA, 120 bp, Artificial Sequence
  ENSG00000254860_12 (sequence is synthesized)
actccctagatataatctctattcacccagctacctcttctggtatttatctccgtatttctaaatagcatgcttatactactaattcttaatttttcagtttgggccattattttactt

SEQ ID NO: 843846 - DNA, 120 bp, Artificial Sequence
  ENSG00000254860_13 (sequence is synthesized)
taggtagagtactattcattatactattataaaggtatgtaattgatccagttagcataatatgattatatttcctttattttgattgaagttaactattgcctctttctccatgcaact

SEQ ID NO: 843847 - DNA, 120 bp, Artificial Sequence
  ENSG00000254860_14 (sequence is synthesized)
ttcttaagtacctagcattcaagtgtctataatcaatttattccaaactgtcctttcaaaacattgaaacacatcaagtagtctatcaatcagtttattttttaaattggagacaactct

SEQ ID NO: 843848 - DNA, 120 bp, Artificial Sequence
  ENSG00000254860_15 (sequence is synthesized)
ctaggagcccatcatcctccttcactgtggactagtttttctctaagcctactgcacagcttttgtcctgaaataattttatcctttctaccctgttttccacttctttttgtttttctg

SEQ ID NO: 843849 - DNA, 120 bp, Artificial Sequence
  ENSG00000254860_16 (sequence is synthesized)
aaagatttccaccttccagcttttcttttgaattttaaaatttctgttatgttttaaatttgccagaatactttcttgtcaacctctcttttaattaaaaatattttttatttttgtaat

SEQ ID NO: 843850 - DNA, 120 bp, Artificial Sequence
  ENSG00000254860_17 (sequence is synthesized)
ttaaaggtttattgtaaattgacaagtacaaattggatatatttatggggtacaaagtgatgttatatgtatacaatgtggaaagattaaatcaagctaattaacatatccatcactaca

SEQ ID NO: 843851 - DNA, 120 bp, Artificial Sequence
  ENSG00000254860_18 (sequence is synthesized)
aatacttctttgtggtgagaatacttgacatttaccttcagcaattttgaaatatacagtacattattattaaccatgctatactctttatctcaaaaaatgtattccctttatctaact

SEQ ID NO: 843852 - DNA, 120 bp, Artificial Sequence
  ENSG00000254860_19 (sequence is synthesized)
gaaacttcgtactctaaccaacatctccttgtttcccctaccaccccttccccctactctctgataaccatcattctactctgattctgtgagtttgttttagattctacattaggaatc

SEQ ID NO: 843853 - DNA, 120 bp, Artificial Sequence
  ENSG00000254860_20 (sequence is synthesized)
atgtgactttgtctgtctgtgcctggcttattccattcagcataacgtcctccagggaagcactttcttgtccacccccttcccctttttaaatagcagtctgttccatttggtggatgc

SEQ ID NO: 843854 - DNA, 120 bp, Artificial Sequence
  ENSG00000254860_21 (sequence is synthesized)
agtatcttattactctaagaatattgctaatgttttcttttgtttcttgaattgtctgtgttgaatttttaaggcttgtttctgttttgtgttggaagcttttcttaaacgtctagagat

SEQ ID NO: 843855 - DNA, 120 bp, Artificial Sequence
  ENSG00000254860_22 (sequence is synthesized)
ttaaacgtctagagatccttggccatccattcatatgtaagagtggggcactagaaagccaatagaaagttctgtgtacactggccagtgaggtggctcacacctgtaaccccagcactt

SEQ ID NO: 843856 - DNA, 71 bp, Artificial Sequence
  ENSG00000254860_23 (sequence is synthesized)
ggtggcgcacgcctgtaatccttgctacttgggaggctgaggcttgagaatctcttgaacccgggaggcag

SEQ ID NO: 843857 - DNA, 120 bp, Artificial Sequence
  ENSG00000254860_24 (sequence is synthesized)
cccgggaggcagaggttgcagtgagctctccagcctaggcaacagaccaaaactctgtctcaaaaaaaaaaaaagttctgtgtacatacttaggacttgtaattggtaggacatactgca

SEQ ID NO: 843858 - DNA, 120 bp, Artificial Sequence
  ENSG00000254860_25 (sequence is synthesized)
ggacttgtaattggtaggacatactgcagtatttttcaaacttctggtcgcaaacccattagtagtttgtgaaatcaatataatcagttttatttcccccaaatgacagaacagaataga

SEQ ID NO: 843859 - DNA, 120 bp, Artificial Sequence
  ENSG00000254860_26 (sequence is synthesized)
aaacaccacctcagaatacatctacatagaaagagaattattttatgaaactttggtttcttacacatatcatatatacatattatgtactggtttgatcccataaaatgggagtttttt

SEQ ID NO: 843860 - DNA, 120 bp, Artificial Sequence
  ENSG00000254860_27 (sequence is synthesized)
ttttttattgtgggtgtttcttcaaagaaatttgaaaaagtacaacttaggataatcaaagagatctccaactgtcaggacaggtaggtcttttctcttagagaggttaagttccggccc

SEQ ID NO: 843861 - DNA, 79 bp, Artificial Sequence
  ENSG00000254860_28 (sequence is synthesized)
tggactccgaaagtgctgggatgtgctcaatattaaatgtcatgaagatactgttaaaataataattgtgctcaatagt

SEQ ID NO: 843862 - DNA, 120 bp, Artificial Sequence
  ENSG00000254865_0 (sequence is synthesized)
tttactggtggctactctgacttttcaggctcaagaaagccacacatcttaatctgaccattatatcaatgtgtagccactcggctacacgtaagactgagaagtcttatggggtctttt

SEQ ID NO: 843863 - DNA, 120 bp, Artificial Sequence
  ENSG00000254865_1 (sequence is synthesized)
ttgctcaaagccttcttaaaatccatcttttatttttgagagtttaaaaacagtcattttttccaattctgaatttctggttattattttctttcactcctgtaaaccaaacaatagttt

SEQ ID NO: 843864 - DNA, 120 bp, Artificial Sequence
  ENSG00000254865_2 (sequence is synthesized)
caattacaatgaacacacactactaacaacttcttttcttaaaccttcaatcttggtagaaacatgaaatggcctccaagttgccaaagatagtcatccaaaaccttggaacaactctga

SEQ ID NO: 843865 - DNA, 120 bp, Artificial Sequence
  ENSG00000254865_3 (sequence is synthesized)
aggtccctcatatggattccttgcttcccagctccctttacaactggatgtgaaaggtgctgtcttctgtactttctcttgagaggcagaaagaaataaacaatggctaattctgaccta

SEQ ID NO: 843866 - DNA, 120 bp, Artificial Sequence
  ENSG00000254864_0 (sequence is synthesized)
cactgtttctaaggaaaatggcaaagaattatctttgccagctgacccaggtgcagttaagcagtttcaataatgagaggtgcttatgttatctttgtctgaaaaagaaaaattaaaagc

SEQ ID NO: 843867 - DNA, 120 bp, Artificial Sequence
  ENSG00000254864_1 (sequence is synthesized)
tgttttctcatatgaagcccatgctgacctcattctttgggatttcacttcccagcatttgtccctgactcccacctagtggcttcttccagcactgcacagggacaaagaaccaccact

SEQ ID NO: 843868 - DNA, 120 bp, Artificial Sequence
  ENSG00000254864_2 (sequence is synthesized)
tcctttctcatctctcactcaagttcacacctgtcacaggggagcagcccattcttctgatggaccacagatgctccagtgccagaagatctgcagtcccagatgagcagcagcagtaca

SEQ ID NO: 843869 - DNA, 120 bp, Artificial Sequence
  ENSG00000254864_3 (sequence is synthesized)
agatacatttcccactatgtaatccctcccctctgctaacagttgattcactctggggtagacactggacctaaggtgtgcatccatagcttgtgaataaattaaaagtctttaatgtct

SEQ ID NO: 843870 - DNA, 120 bp, Artificial Sequence
  ENSG00000228338_0 (sequence is synthesized)
gggcacccaagtgaaggatcctgctgtgtactcaggggctggtgttgctgtcagggatgttagcctagagcctcagcttcctgtaaaatgaggatgatgatatccaacagcttatgggac

SEQ ID NO: 843871 - DNA, 120 bp, Artificial Sequence
  ENSG00000228338_1 (sequence is synthesized)
ttcatctttcaatctcacctccttttcctgataatagagaggcaacaagaactcagggcatgcaatggggctcaacttctactctctgccacaatttcatcatgattcccccaaagagca

SEQ ID NO: 843872 - DNA, 120 bp, Artificial Sequence
  ENSG00000228338_2 (sequence is synthesized)
gagccccaggagccagcagggggcagggtgggcatttctggactggattcattcataataagatcaaaatttccaatccgtatgtctcgggtgccatctgctgatagatcggaccagatg

SEQ ID NO: 843873 - DNA, 120 bp, Artificial Sequence
  ENSG00000228334_0 (sequence is synthesized)
gctatttcaaagaagaaggactttgaagtgttgaggtaggagcctgtatcatctctttgctggtttgcagttgctgtgttccaccagcaagtagcaattgggactaaattaccagcattc

SEQ ID NO: 843874 - DNA, 120 bp, Artificial Sequence
  ENSG00000228334_1 (sequence is synthesized)
caaaccagggtttggtttaggacatccccccagagtgagttccttggtgccgcacctcagctggtggggtgggcagggagtgttgtattagttttagcttccagagccaatcacagtttc

SEQ ID NO: 843875 - DNA, 120 bp, Artificial Sequence
  ENSG00000228334_2 (sequence is synthesized)
accatctgcctctcccacatccctggcaggcaggctgaggacagcacccacttaaatggtacctagcccattataaatgcaaacctttttatttccttgtaaataaatctctgcttcttt

SEQ ID NO: 843876 - DNA, 120 bp, Artificial Sequence
  ENSG00000228334_3 (sequence is synthesized)
ctgtcggaggctggtggagaaagctgctggcagccagcccgtgtgcaaggggagcagagagaaggctcattccaggatcatccgtcaatgccagcaagtgaagatacagatttcctgagc

SEQ ID NO: 843877 - DNA, 120 bp, Artificial Sequence
  ENSG00000228334_4 (sequence is synthesized)
ttctggcaaaactcggtggctgaaagcacacacctgttccaaggagggtctgccagggtaggacaatgacagcatcacccgagagaattccacaggggaaggtgtggggctgggcagctc

SEQ ID NO: 843878 - DNA, 120 bp, Artificial Sequence
  ENSG00000228334_5 (sequence is synthesized)
ttcctcaaggtgaaaagagagaacccacgtctcctgcagccagcagccctgttcagtggcaccctgatggcacggtggttgcttccactggggttggagtctaggctttctcccccaggt

SEQ ID NO: 843879 - DNA, 120 bp, Artificial Sequence
  ENSG00000228334_6 (sequence is synthesized)
aagaggagcccaccttgatttgccgctgcaatctaagaagcctagacatttctcagggagagaggcaggcaaggctaccatgagaaggtgtggacatgggcttctaagacacgaaaatga

SEQ ID NO: 843880 - DNA, 120 bp, Artificial Sequence
  ENSG00000228334_7 (sequence is synthesized)
aaaatgacactcttcagctcagcaaaatttgaaagcaagaccactcctgaatctctctgaatgcttgctttgtagcctgcgggcaaagctgtcatttcagactaaactcagccagcgagg

SEQ ID NO: 843881 - DNA, 120 bp, Artificial Sequence
  ENSG00000228334_8 (sequence is synthesized)
aactaatgctgatagtctcatcattttcttccacttctcctgacttttttgtcttgttaatacatcgtaagtaattcttcctcgtgttaacagtggccttgtttcacgccccggcattct

SEQ ID NO: 843882 - DNA, 120 bp, Artificial Sequence
  ENSG00000228334_9 (sequence is synthesized)
gcgggtgtgacattgagttctgtggaagaaggttccactgtcaaatttagataaatgaataaggtgagatcgtccacattttcccggtcccacacctcatctcaaaatattaagcccctg

SEQ ID NO: 843883 - DNA, 120 bp, Artificial Sequence
  ENSG00000228334_10 (sequence is synthesized)
cttttcaaatatacggtcggcatctgtgtgcattttgtaaggacaaaatagtaaatattatcttcctcttctctggccatcagctgaggacatgcgggaagacagtgttgtaattcttct

SEQ ID NO: 843884 - DNA, 120 bp, Artificial Sequence
  ENSG00000228334_11 (sequence is synthesized)
ctttatgaaggtgaaaggcattacctgcgggagattagctaagtctgaccttgactctcacgtgcttttggctccatctttcagctatttcaaagaagaaggactttgaagtgttgaggt

SEQ ID NO: 843885 - DNA, 120 bp, Artificial Sequence
  ENSG00000228334_12 (sequence is synthesized)
aggagcctgtatcatctctttgctggtttgcaggtaagtaggcagtacccctaggcctccatccgtgaatctctgagatcctctttacaatttctgaaacaaaaatgggctaaacctaca

SEQ ID NO: 843886 - DNA, 120 bp, Artificial Sequence
  ENSG00000228334_13 (sequence is synthesized)
ttagtcagaactatgctctcctgacaatgggctctgaaaaaaacaaacaaacaaaaacaccaaaacagctgacgcggagggaaaatatcacttcattcattgggtttctgtttgggtttg

SEQ ID NO: 843887 - DNA, 120 bp, Artificial Sequence
  ENSG00000228334_14 (sequence is synthesized)
ttttttttttttttttcctttttgatctataagatgccaacaactgatttgactgatttcctctattatttccagaatgcttagcattctgaacacactcgggttttcgtatattaattt

SEQ ID NO: 843888 - DNA, 120 bp, Artificial Sequence
  ENSG00000228334_15 (sequence is synthesized)
atcaggtttaagctggaagttgttttcatcctaagaaccctggatttaaaatcagggacctgaattcctgaatcagccttgtacatgtttttcccaatgagtcttctattctgagccctg

SEQ ID NO: 843889 - DNA, 120 bp, Artificial Sequence
  ENSG00000228334_16 (sequence is synthesized)
attttgtcggcctggagatgagacaagggacaaggggccttcatacctgcctgcctcctgaccactaagagtcctttgtaggctgtaaagctctggtcaccgctcccatctatcacttgg

SEQ ID NO: 843890 - DNA, 120 bp, Artificial Sequence
  ENSG00000228334_17 (sequence is synthesized)
tgacctcaggatcccaccagtgtcacccctgacatgtcattagaatattgtcacctaaaattcccagttcagtcttggtcctcttctccaactccgggattgtgtcttcctctgatgtca

SEQ ID NO: 843891 - DNA, 120 bp, Artificial Sequence
  ENSG00000228334_18 (sequence is synthesized)
ggaacatgaaggggtgttggatgggacagggtcactgatgacactgaaacaggagaacctcccttatccccctctcagggcattgtgacaggagtacggctcgattctttggtgccccgc

SEQ ID NO: 843892 - DNA, 120 bp, Artificial Sequence
  ENSG00000228334_19 (sequence is synthesized)
tgcccaaacccctgggggagcatacagacaggcagttcgtggggagcgttttggggctctgaccccacagcagcatctagtgttgaggggttacagctcccgaagccccagtgggcgtgt

SEQ ID NO: 843893 - DNA, 120 bp, Artificial Sequence
  ENSG00000228334_20 (sequence is synthesized)
gttacagtacactctttcagctttgctgtctgcaggcagcttgtggtcatcagctcaattagaccctctgccttatcgcaaggacagagcgctactttctgtatcccaggttcttgcctt

SEQ ID NO: 843894 - DNA, 120 bp, Artificial Sequence
  ENSG00000228334_21 (sequence is synthesized)
ttctgtatcccaggttcttgccttagagtaccagaaaaatcagaccacacatgggcttggagaatgggtgcaaggttttttgctgttgttgttgtttttgttttgagatggagtctcgct

SEQ ID NO: 843895 - DNA, 120 bp, Artificial Sequence
  ENSG00000228334_22 (sequence is synthesized)
ggatgcaaggttttattgagtggtggaggtggctcctagcaagatggatagggaaaaagaaggggaatggagtgggaaggtggtcttttcctggagtcaggccacccagcagccggactc

SEQ ID NO: 843896 - DNA, 120 bp, Artificial Sequence
  ENSG00000228334_23 (sequence is synthesized)
tcctgcagccacccccggccaaattccccttggcgtcagcgtagttctgctgtcactggctgccagcgtctgctggtgtctgttggtgtgctattctgctcctcttaatgtccagctact

SEQ ID NO: 843897 - DNA, 120 bp, Artificial Sequence
  ENSG00000228334_24 (sequence is synthesized)
tgtgtctgcgctcgctagggtctggggtttttatgggcacaggatgggcagcgtggtgggccaaaagacaacttttcgagtgtgaaaacagaaatacctgtcctcattcaggtccgtagg

SEQ ID NO: 843898 - DNA, 120 bp, Artificial Sequence
  ENSG00000228334_25 (sequence is synthesized)
cccaggtccaagggtggagcttttgccagggacactgcccttctctacccagcacttctctgcccccgcttccatactaccacctccagggactctctagggcccatcattgtcccccgt

SEQ ID NO: 843899 - DNA, 120 bp, Artificial Sequence
  ENSG00000237271_0 (sequence is synthesized)
atgacatcttgtagtagggattgaagagagaccagcttcatctccactcgaccaacatgatgcaggttttctactggaatgccgagttatttcaggacaagggggaagagctacaggcca

SEQ ID NO: 843900 - DNA, 120 bp, Artificial Sequence
  ENSG00000237271_1 (sequence is synthesized)
gtcaacaacaccagctgcccatcccagcaggatcactctaaggcatcccctttaccatgcatcacttggggctgaatccttgtgcatttgctgtctggagaactgagtaacgaaaatgct

SEQ ID NO: 843901 - DNA, 120 bp, Artificial Sequence
  ENSG00000237271_2 (sequence is synthesized)
gcaatcattccaattgattgaataaaaacatcctgcaggatgtttatcagggaaagaaagcttggctctcacaaggcagattggtcagtatcctgatattgcagcaaaaggtgccaattt

SEQ ID NO: 843902 - DNA, 120 bp, Artificial Sequence
  ENSG00000237271_3 (sequence is synthesized)
tttttttctttttagaatcacatttgatgtggaaggtgaaataaggtttcactgaagcaagagaacaaatggggaagataatctttaagaaaaagctccagaccattttaaacaaactgt

SEQ ID NO: 843903 - DNA, 120 bp, Artificial Sequence
  ENSG00000237271_4 (sequence is synthesized)
agtgacagcactgaacagaaagcaagccaaaaagggtctttagctgctttgctcagaactggaatccttgtgcatttgctgtctggagaactgagtaacgaaaatgctggggctgggccc

SEQ ID NO: 843904 - DNA, 120 bp, Artificial Sequence
  ENSG00000237271_5 (sequence is synthesized)
gctgaagaaccaactatgaacaagacaaaagattgctgccctcatggaactttctgtccagatggagagacagacaattaaacaggactggagcccttataagaagatggagagacacca

SEQ ID NO: 843905 - DNA, 120 bp, Artificial Sequence
  ENSG00000237271_6 (sequence is synthesized)
gagaaatgaagacacggcaagaaggtggccacctgcaagccaaggagagaggcctcaccagaagccctgttggcaccttgatctcgaacttccagtctccagaactgtgagacaataaat

SEQ ID NO: 843906 - DNA, 120 bp, Artificial Sequence
  ENSG00000237271_7 (sequence is synthesized)
ctatgttgtttaaaatacttaccctaaggtattctgttatgacagccctagcagactaatatacccccaaatggaataataataataatgatatacagagatgattatgcatcaagcaaa

SEQ ID NO: 843907 - DNA, 120 bp, Artificial Sequence
  ENSG00000177369_0 (sequence is synthesized)
ggagttaggtgaagaggagaacgatgtccaggcaggggccggggaagctcgtgccaaggcactgaggggaagtgctgcaatgaacctcagaggctggatcttgctgactcatctggggta

SEQ ID NO: 843908 - DNA, 120 bp, Artificial Sequence
  ENSG00000177369_1 (sequence is synthesized)
ccaaggacagacaaaggacatggagtccaggcccaggaggcgataccaggccagcagtttcactgatgctcctgtcatgacgatgactgcctccctcctccccttggtccctgactcagt

SEQ ID NO: 843909 - DNA, 120 bp, Artificial Sequence
  ENSG00000177369_2 (sequence is synthesized)
gtctgcagtgaccaggcaccaggcagggagcaaggaaccaagcctttcacctgctcccaccaactcctatggtgctccctttccaaggctaggtctcctctccacccagttccttatcac

SEQ ID NO: 843910 - DNA, 120 bp, Artificial Sequence
  ENSG00000177369_3 (sequence is synthesized)
gcactgctacaactgcttgtggcatggtaaagttgcaccaggacctctgctgtccatgagatcaaagttccaggccaaggcaccaggggcacgaacagtgttgcccgcatggaactcaca

SEQ ID NO: 843911 - DNA, 120 bp, Artificial Sequence
  ENSG00000177369_4 (sequence is synthesized)
cttaatgggagcggcagccaacagcagaagctgcagccagagaaagagggcgacggtcccgtcacattctgagcccagcaacggagggctttccaggccgggactgcgggcagatgggaa

SEQ ID NO: 843912 - DNA, 120 bp, Artificial Sequence
  ENSG00000177369_5 (sequence is synthesized)
ttctcctctcctttctgctggacgtatctcccctcagtttcgctatctgtaagatggggcattgtccctgccaaacccgcaggccaggacggcctaagaggatcaaacgaggagaggcaa

SEQ ID NO: 843913 - DNA, 120 bp, Artificial Sequence
  ENSG00000177369_6 (sequence is synthesized)
ggcgggccgcccgaggccacgcctccctcctgccccggaggctccgggagcgccagctaagatgagaaacaggaggaacaggatgtatgtaacttgcccaaggtcacagagccaagaggt

SEQ ID NO: 843914 - DNA, 120 bp, Artificial Sequence
  ENSG00000177369_7 (sequence is synthesized)
ggctgaagccagacttgaacccaggcattcagctaagaaactgcattcttaagcaaaacatcacaagacctgctctagagaaagtgttcctgcctcctgctaggcaaggtgatgccctag

SEQ ID NO: 843915 - DNA, 120 bp, Artificial Sequence
  ENSG00000177369_8 (sequence is synthesized)
gacaagtaactgacagagagggagcacacacagtttctaacctggagtgcccgttgcactggtcaggaggaagtgcctgacctagaggacttgttccctgatgtaacagatatctctttg

SEQ ID NO: 843916 - DNA, 120 bp, Artificial Sequence
  ENSG00000177369_9 (sequence is synthesized)
gagcagagaaggtgagaagcatttccttactcatactccagagttcccccagtgctcttgttcctcctatagatgtgatggtggtggcctgcggaggagataggagtggagaagcctgcc

SEQ ID NO: 843917 - DNA, 120 bp, Artificial Sequence
  ENSG00000177369_10 (sequence is synthesized)
tgctctgcctttagcacacaaaggcgcccctatgggaaggtcctggctttcaatctggggatcatcaatatgtaaaaagtctaattaattaagatgcctgacccacaaggactccacacc

SEQ ID NO: 843918 - DNA, 120 bp, Artificial Sequence
  ENSG00000177369_11 (sequence is synthesized)
cacacatcaatcattgcttggcatcatgagggatgaacgacgactggactttgtaataagggaaaatttcttaaataatcaaaatacatgaataagctttgagctaagaggctattccag

SEQ ID NO: 843919 - DNA, 120 bp, Artificial Sequence
  ENSG00000177369_12 (sequence is synthesized)
aagagatttaaaagtgggatctttctttagaaggttgagaataaagctaacgtactttattgctcccttgtggacaaagccagaactgctgatggaaaacagtcacacagcccatgtcaa

SEQ ID NO: 843920 - DNA, 120 bp, Artificial Sequence
  ENSG00000177369_13 (sequence is synthesized)
gaaatgaataaaatgcatattcaaatttatggaagattgagaagaaatcatcccattttcagaggctacatatatgcccttggggagacaacttaagaagtaaacaccaaaattatgtca

SEQ ID NO: 843921 - DNA, 120 bp, Artificial Sequence
  ENSG00000177369_14 (sequence is synthesized)
tcgctggaacctgggaggcagaggttgcggcgagccgagatcatgtgaggaaataaggccatctggaaatatccttcccatcacaggatgatacccggcaaattcttcaaagcagtgttc

SEQ ID NO: 843922 - DNA, 120 bp, Artificial Sequence
  ENSG00000177369_15 (sequence is synthesized)
aggatgatacccggcaaattcttcaaagcagtgttctccaacttgaatgtttgtgatgtgggcgattctgactgagggggtctgtagaccacatcttgataaacaatgctttttaaaaaa

SEQ ID NO: 843923 - DNA, 120 bp, Artificial Sequence
  ENSG00000177369_16 (sequence is synthesized)
gaggagggaggaagacttacttttcaccgtgttcttttttgtaccttttgagttttgtacgacatactgaatctttgacccatttgcaattataaataaaggcacatttatttggccggg

SEQ ID NO: 843924 - DNA, 120 bp, Artificial Sequence
  ENSG00000177369_17 (sequence is synthesized)
gagagcggaaagggtgctgtttaacaaagggcagttggagaatgcctccctgatcaggtgttgagcccagtgaaggaaagaaatgagggatccagccatacaagtgcctgggggaagagc

SEQ ID NO: 843925 - DNA, 120 bp, Artificial Sequence
  ENSG00000177369_18 (sequence is synthesized)
tcactatgttgcccaggctggtctcaagttcctggattcaatgttcttgccttggcttctcaaagtaccaggattataggcatgagccactgtgccaggcccaaacctagcttctgagtg

SEQ ID NO: 843926 - DNA, 120 bp, Artificial Sequence
  ENSG00000177369_19 (sequence is synthesized)
acctagcttctgagtggaaaaatttctgctgccccaccagcttcaggaagtgggagtcaactctagtcactgtggtgatgcagagataatacggctgataaaccccttatttttctctcc

SEQ ID NO: 843927 - DNA, 120 bp, Artificial Sequence
  ENSG00000177369_20 (sequence is synthesized)
cacctcttttcttggggacacttgggctccagctttctccattcatcagcttagcatgagcttgaggaacgcagaggggggctgactgagaggagcaggcactggggacaatggggacat

SEQ ID NO: 843928 - DNA, 120 bp, Artificial Sequence
  ENSG00000177369_21 (sequence is synthesized)
ccacggttcctagcaatggatttgaggtgggatttccaattcctcttctcccaccttggatttgaccatctgaataccaaattcctgtcacttctaggatgtcacctaagatgagactgt

SEQ ID NO: 843929 - DNA, 120 bp, Artificial Sequence
  ENSG00000177369_22 (sequence is synthesized)
tgccacagggcctacaataaggcaaggaaggctcagtgaggtccgtgttcaccccacccccacttcaacacgaggagttctgcttttattttgcctctgtgtgtgtgtgtgtgtgtgtgt

SEQ ID NO: 843930 - DNA, 120 bp, Artificial Sequence
  ENSG00000177369_23 (sequence is synthesized)
gtattattttatttggagaaaggatttgctcctaaggacacacacacgcacacacacatgcacactcacgcacacgtactcacaggttctgcaaaacactagtgtggcagaaagtgttga

SEQ ID NO: 843931 - DNA, 120 bp, Artificial Sequence
  ENSG00000177369_24 (sequence is synthesized)
agtgtggcagaaagtgttgaaaactagttctagacctggcatgaatttgaccaggttcagccttagtctcctctcttagaaataaggtcatctgggccaggtgcggtggctcaagcctgt

SEQ ID NO: 843932 - DNA, 120 bp, Artificial Sequence
  ENSG00000177369_25 (sequence is synthesized)
tctgctgtggctggagggaaccatttccaggctcactcatgtgactgtcggcaggcctcagaagacccactgcaagcccactcactgggtgctggcaggcttgcgatccatggcacgact

SEQ ID NO: 843933 - DNA, 120 bp, Artificial Sequence
  ENSG00000177369_26 (sequence is synthesized)
tccgtaggctgcctaagtaacctcgtgacatggcggctggtgaatggagagcaagagaccacaccaagtctgtttgtataataacttaatcttggaagtgacatctcatcatttctgcca

SEQ ID NO: 843934 - DNA, 120 bp, Artificial Sequence
  ENSG00000177369_27 (sequence is synthesized)
ccagtgcctaagcccagccctgtttatgaactggaggcaaacacctttggaaggaaggctactcccagcccctcgccaggcatctgtgttactgtggcttctgctccaccaacgactagc

SEQ ID NO: 843935 - DNA, 120 bp, Artificial Sequence
  ENSG00000177369_28 (sequence is synthesized)
agttcgcagcttctaaacggtgttccctctgttgcagctgagcttcctgcaatcctgtaaaacaggctctattgctattatcaccatcttcattgaaccaatgaagaaagcagtcttgtg

SEQ ID NO: 843936 - DNA, 120 bp, Artificial Sequence
  ENSG00000177369_29 (sequence is synthesized)
agaatcattgagagggagctactctctccaggcaatcacgggggtgagaaagaaaaaaaaaaagagagggagttactcatgtactgacttattcaatgaatgcttatgttgtaataccta

SEQ ID NO: 843937 - DNA, 120 bp, Artificial Sequence
  ENSG00000177369_30 (sequence is synthesized)
cagccttgaaaacatgttattcatgaagagatcaggcagggtttgaggttgattactgacctgtttgttgtgaagatgctgctgcaataagcacaaacagaactcatggccagagagctg

SEQ ID NO: 843938 - DNA, 120 bp, Artificial Sequence
  ENSG00000177369_31 (sequence is synthesized)
cagcacagttttcaaccagctcctgacaagaactggctgtgtggctcattgaatcactcaaatgaaaaaaagatattcctggaaactgtgtgcaattcttccagtgttgcagcaccaaag

SEQ ID NO: 843939 - DNA, 120 bp, Artificial Sequence
  ENSG00000177369_32 (sequence is synthesized)
catgagtcaaaaaggtttggtattatggcaagagcagagcactagtgatttttcttctgaagagagctgcaagggacttgggagcatcttatctacaaagaaaagcaaagaggaaaaaaa

SEQ ID NO: 843940 - DNA, 120 bp, Artificial Sequence
  ENSG00000177369_33 (sequence is synthesized)
acagacaagggcgtggtgcttctggtgaactcaggagggacacccatcccagtccaaagggaggaccagggagggagtgtctgtgatgtcacaggagggttccatgagcaataacttata

SEQ ID NO: 843941 - DNA, 120 bp, Artificial Sequence
  ENSG00000240152_0 (sequence is synthesized)
attatgtaatatgcctcaggcagtggcagaaacctaggctgaaataaccagcactacttgccaaacactttagaaagattatgtttcttctccattacagaagtggaacatatggttcag

SEQ ID NO: 843942 - DNA, 120 bp, Artificial Sequence
  ENSG00000240152_1 (sequence is synthesized)
gaatttaccctaaaggcaaactacagaggttaagcatgtgatgcaggggccaaaattgtgagttcaaatgccaacatgtttacttactaacttcatgacctcacaaacttgcttcaactt

SEQ ID NO: 843943 - DNA, 120 bp, Artificial Sequence
  ENSG00000240152_2 (sequence is synthesized)
aagatcctcccaggaaagtgaagcggagaaaatggaggtagaaactattctcctcattaaactacctgccctctgtaatgtagctcttctgtgctgcagaaattgatactacacaagaaa

SEQ ID NO: 843944 - DNA, 120 bp, Artificial Sequence
  ENSG00000240152_3 (sequence is synthesized)
gctgcagaaattgatactacacaagaaaagaaatgatgggagaatagtgaagaagagaagaactggccaggtagcaacatataagaggccaagggccgggcgcagtggctcacacctgta

SEQ ID NO: 843945 - DNA, 120 bp, Artificial Sequence
  ENSG00000240152_4 (sequence is synthesized)
ttatgtaatatgcctcaggcagtggcagaaacctaggctgaaataaccagcactacttgccaaacactttagaaagattatgtttcttctccattacagaagtggaacatatggttcaga

SEQ ID NO: 843946 - DNA, 120 bp, Artificial Sequence
  ENSG00000280623_0 (sequence is synthesized)
ttttctttctctatactttgtctctgttgtctttcttttctcaagtctctcgttccacctgaggagaaatgcccacagctgtggaggcgcaggccactccatctggtgcccaacgtggat

SEQ ID NO: 843947 - DNA, 120 bp, Artificial Sequence
  ENSG00000280623_1 (sequence is synthesized)
gccactccatctggtgcccaacgtggatgcttttctctagggtgaagggactctcgagtgtggtcattgaggacaagtcaacgagagattcccgagtacgtctacagtgagccttgtggg

SEQ ID NO: 843948 - DNA, 120 bp, Artificial Sequence
  ENSG00000280623_2 (sequence is synthesized)
tgaaggtactctacagtgtggtcattgaggacaagttgacgagagagtcccaagtacgtccacggtcagccttgcgacatttaaagttctacaatgaactcactggagatgcaaagaaaa

SEQ ID NO: 843949 - DNA, 120 bp, Artificial Sequence
  ENSG00000280623_3 (sequence is synthesized)
gtgtggagatggagacaccccaatcgactcgccagtctacaggtgtatccagcagctccaaagagacagcaaccagcaagaatgggccatagtgacgatggtggttttgtcaaaaagaaa

SEQ ID NO: 843950 - DNA, 87 bp, Artificial Sequence
  ENSG00000280623_4 (sequence is synthesized)
aaccctgtgctcacggaaacatgtgctgtaccttgttaacaatatgtttgcaggcagtatgtttggtaaaagtcatcgccattctcc

SEQ ID NO: 843951 - DNA, 78 bp, Artificial Sequence
  ENSG00000280623_5 (sequence is synthesized)
gctcaatgcactgtggaaagccacaggaacctctgcccaagaaagcctggctgttgtgggaagtcagggaccccgaat

SEQ ID NO: 843952 - DNA, 85 bp, Artificial Sequence
  ENSG00000280623_6 (sequence is synthesized)
gggaccccgaatggagggaccagctggtgctgcatcaggaaacataaattgtgaagatttcttggacatttatcagtttccaact

SEQ ID NO: 843953 - DNA, 81 bp, Artificial Sequence
  ENSG00000280623_7 (sequence is synthesized)
aagctcaattggttaaacaaaaaaaaggaaaagacaggagtataacactccccagatgcaacttaatctagcactctatac

SEQ ID NO: 843954 - DNA, 89 bp, Artificial Sequence
  ENSG00000280623_8 (sequence is synthesized)
gttttaaacatttatagaaatcagaccactacctctgcagaacaacatcttactggtaaaaggaacagcccacatgaaggaaaactgat

SEQ ID NO: 843955 - DNA, 120 bp, Artificial Sequence
  ENSG00000280623_9 (sequence is synthesized)
actagacatttaaagttctacaatgaactcactggagatgcaaagaaaagtgtggagatggagacaccccaatcgactcgccaggtaaacaaaatggtgatatcagaagaacagaaaaag

SEQ ID NO: 843956 - DNA, 120 bp, Artificial Sequence
  ENSG00000280623_10 (sequence is synthesized)
ttgccttccatcaaggaagcagagttgccaatataggcacaattaaagaagctgacacagttagctaaaaaaaaaagcctagagaatacaaaggtgacaccaactccagagaatatgctg

SEQ ID NO: 843957 - DNA, 120 bp, Artificial Sequence
  ENSG00000280623_11 (sequence is synthesized)
cttgcagctctgatgattgtatcaacggtggtaagtcttcccaagtctgcaggagcagctgcagctaattatacttactgggcctatgtgcctttcccacccttaattcgggcagttaca

SEQ ID NO: 843958 - DNA, 120 bp, Artificial Sequence
  ENSG00000280623_12 (sequence is synthesized)
tagatggataatcctattgaagtagatgttaataatagtgcatgggtgcctggccccacagatgactgttgccctgcccaacctgaagaaggaatgatgatgaatatttccattgggtat

SEQ ID NO: 843959 - DNA, 120 bp, Artificial Sequence
  ENSG00000280623_13 (sequence is synthesized)
ccttatcctcctgtttgcctagggaaggcaccaggatgcttaatgcctacaacccaaaattggttggtagaagtacctacagtcagtgctaccagtagatttacttatcacatggtaagt

SEQ ID NO: 843960 - DNA, 120 bp, Artificial Sequence
  ENSG00000280623_14 (sequence is synthesized)
ggaatgtcacagataaataatttacaggacccttcttatcaaagatcattacaatgtaggcctaaggggaaggcttgccccaaggaaattcccaaagaatcaaaaagcccagaagtctta

SEQ ID NO: 843961 - DNA, 120 bp, Artificial Sequence
  ENSG00000280623_15 (sequence is synthesized)
gtctgcggagaatgtgtggctgatactgcagtgtagtacaaaacaatgaattttgaactatgatagactgggtcccttgaggccaattatatcataactgtacaggccagactcattcat

SEQ ID NO: 843962 - DNA, 120 bp, Artificial Sequence
  ENSG00000280623_16 (sequence is synthesized)
gttcacaggccccatccatctggcccattaatccagcctatgacggtgatgtaactgaaaggctggaccaggtttatagaaggttagaatcactctgtccaaggaaatggggtgaaaagg

SEQ ID NO: 843963 - DNA, 120 bp, Artificial Sequence
  ENSG00000280623_17 (sequence is synthesized)
gaatttcatcaccttgaccaaagttagtcctgttactggtcctgaacatccagaattaggaagcttactgtggcctcacaccacattagaatttgttctggaaatcaagctataggaaca

SEQ ID NO: 843964 - DNA, 120 bp, Artificial Sequence
  ENSG00000280623_18 (sequence is synthesized)
agagatcgtaagtcatattatactatcaacctaaattccagtctgacaattcctttgcaaaattgtgtaaaactcccttatattgctagttgtaggaaaaacatagttattaaacctgat

SEQ ID NO: 843965 - DNA, 120 bp, Artificial Sequence
  ENSG00000280623_19 (sequence is synthesized)
tcccaaaccataatctgtgaaaattgtggaatgtttacttgcattgatttgacttttaattggcagcaccgtattctactaggaagagcaagagagggtgtgtggatccttgtgtccatg

SEQ ID NO: 843966 - DNA, 120 bp, Artificial Sequence
  ENSG00000280623_20 (sequence is synthesized)
gaccgaccatgggaggcttcgctatccatccatattttaacggaagtattaaaaggaattctaactagatccaaaagattcatttttactttgatggcagtgattatgggcctcattgca

SEQ ID NO: 843967 - DNA, 84 bp, Artificial Sequence
  ENSG00000280623_21 (sequence is synthesized)
cctctgttcaaactgcagaatacgtaaatgagatccaaatagatcaaaaattggcaaaccaaattaatgatcttagacaaactg

SEQ ID NO: 843968 - DNA, 84 bp, Artificial Sequence
  ENSG00000280623_22 (sequence is synthesized)
cctgccatctgcaaggaggagaagataatcttactttagacatttcaaaattaaaagaattttttttttctttgagacagagtc

SEQ ID NO: 843969 - DNA, 86 bp, Artificial Sequence
  ENSG00000280623_23 (sequence is synthesized)
ttacagtcgtgagccaccgtgcccagccaagaaaaaatttttgaggggagacaatcgtgaaagctgctgatagcctcacaaatctt

SEQ ID NO: 843970 - DNA, 120 bp, Artificial Sequence
  ENSG00000280623_24 (sequence is synthesized)
ggagacaatcgtgaaagctgctgatagcctcacaaatcttaagccagtcacttgggttaaaagcatcagaagtttcactattgtaaatttcatattaatccttgtatgcctgttctgtct

SEQ ID NO: 843971 - DNA, 69 bp, Artificial Sequence
  ENSG00000280623_25 (sequence is synthesized)
aaattcttttcctagcaaggaatataatactaagaccctagggaaagaatatgtggttgagataaggac

SEQ ID NO: 843972 - DNA, 67 bp, Artificial Sequence
  ENSG00000280623_26 (sequence is synthesized)
agtcctggtaaatttgaggtcaggccggttctttgctctgaaccctgttttctgttaagatgtttat

SEQ ID NO: 843973 - DNA, 88 bp, Artificial Sequence
  ENSG00000280623_27 (sequence is synthesized)
tgcaccgctgaacatagacccttatcaggagtttctgattttgctctggtcctgtttcttcagaagcatgtcatctttgctctgcctt

SEQ ID NO: 843974 - DNA, 64 bp, Artificial Sequence
  ENSG00000280623_28 (sequence is synthesized)
actccctgttcatacgcatcatggacctaccaatacgtgatgtcacccccggtggcccagctgt

SEQ ID NO: 843975 - DNA, 73 bp, Artificial Sequence
  ENSG00000280623_29 (sequence is synthesized)
aaactaagagggggagttagagcttctacagaaaatctaattacgctatttcaaacaatagaacaattctgcc

SEQ ID NO: 843976 - DNA, 83 bp, Artificial Sequence
  ENSG00000280623_30 (sequence is synthesized)
tgcccatggtttccagaacagggaactttagatctaaaagattgggaaaaaattggcaaagaattaaaacaagcaaataggga

SEQ ID NO: 843977 - DNA, 120 bp, Artificial Sequence
  ENSG00000280623_31 (sequence is synthesized)
ttattaaagcaactttagaaccatttcaaacaggagaagatattgtttcagtttctgatgcccctaaaagctgtgtaacagattgtgaagaagaggcagggacagaatcccagcaaggaa

SEQ ID NO: 843978 - DNA, 120 bp, Artificial Sequence
  ENSG00000280623_32 (sequence is synthesized)
cggaaagttcacattgtaaatatgtagcagagtctgtaatggctcagtcaacgcaaaatgttgactacagtcaattacaggagataatataccctgaatcatcaaaattgggggaaggag

SEQ ID NO: 843979 - DNA, 120 bp, Artificial Sequence
  ENSG00000280623_33 (sequence is synthesized)
gtccagaatcattggggccatcagagcctaaaccacgatcgccatcaactcctcctcccgtggttcagatgcctgtaacattacaacctcaaacgcaggttagacaagcacaaaccccaa

SEQ ID NO: 843980 - DNA, 120 bp, Artificial Sequence
  ENSG00000233542_0 (sequence is synthesized)
acactttccccatatggcacggagcagaacgtgcacctttggctctggaaggaatgaacatcctacccgttagttagccctgggagtcactgactcggttcttccctggacaccaatgtc

SEQ ID NO: 843981 - DNA, 120 bp, Artificial Sequence
  ENSG00000233542_1 (sequence is synthesized)
ctatggagcacacagaaagccacggaagtgtggtctgcgggttgagacggactccgttcatgtggataagcagaggaaatttggcagaaacgaccaaatgcaaaatacgtgtagcagcct

SEQ ID NO: 843982 - DNA, 120 bp, Artificial Sequence
  ENSG00000233542_2 (sequence is synthesized)
gagaccggccgtctactgaaacaaaggatgcagttcagtcggaaaccacgcttagctgagtagctgtctttagccatccaggccctgagaaccaatgaacaacccagcttggccgcttag

SEQ ID NO: 843983 - DNA, 120 bp, Artificial Sequence
  ENSG00000233542_3 (sequence is synthesized)
aacattttttctatacttgagttaaatagatatccaagaaccattactcgtttttaatgtggagaagtcggtattctattctcgtgttctatgttttttaaagtggcaatttgaattatt

SEQ ID NO: 843984 - DNA, 120 bp, Artificial Sequence
  ENSG00000233542_4 (sequence is synthesized)
tcgtgcgatagaaaaccttaaacacaaagtaacgtttctaacaaaagggctgtcgatcaagtgacaaacacgtcctacttttagatacaagcacgactgaggcaacggcacgaagacgcc

SEQ ID NO: 843985 - DNA, 120 bp, Artificial Sequence
  ENSG00000233542_5 (sequence is synthesized)
taaagtgggctgctggggagacaagatctggccgcgaatggaactcgcggcagctcattaacgggaccgtccagcaggaaggtgggttggcagccttctcccagggctccccacgatccc

SEQ ID NO: 843986 - DNA, 120 bp, Artificial Sequence
  ENSG00000233542_6 (sequence is synthesized)
tacccctggtgtggcgtggccttcctcctcacatgtcgtctggaccaagcagtgtgttgttctcatccataaagagtgatgggccgggcacgatggccacacctgtgatcccagcactgt

SEQ ID NO: 843987 - DNA, 120 bp, Artificial Sequence
  ENSG00000233542_7 (sequence is synthesized)
gggaggctgaggcgggaggatctcctgagcccaggagtttgacaccagcctgggtagcatagggagaccctgtctctacagaaaaaaagttagccaggtattccagaggctgaggtggga

SEQ ID NO: 843988 - DNA, 72 bp, Artificial Sequence
  ENSG00000233542_8 (sequence is synthesized)
aggtggagactgagacccagtttctaaaacaaataataaaaaggcagggtgcagtggctcatacctgtaatc

SEQ ID NO: 843989 - DNA, 90 bp, Artificial Sequence
  ENSG00000233542_9 (sequence is synthesized)
gaggtcaggagttcgagaccagctggcccacatggtaaaaccccatctctactaaaatgcaaaaatcaaccgtcttcaggaggccgaggc

SEQ ID NO: 843990 - DNA, 69 bp, Artificial Sequence
  ENSG00000233542_10 (sequence is synthesized)
tagacaccatcttgaaaaaaaataaaagttaaataaaaagagtgatgaggcatcctgagattcatttat

SEQ ID NO: 843991 - DNA, 120 bp, Artificial Sequence
  ENSG00000233542_11 (sequence is synthesized)
taaataaaaagagtgatgaggcatcctgagattcatttataaaatgccgtgattcaggtctcagggcactgtcgcccctactcactttgatgaagccagtgctgggttgctgctgaggtg

SEQ ID NO: 843992 - DNA, 120 bp, Artificial Sequence
  ENSG00000233542_12 (sequence is synthesized)
gggaggttcatgggccaggaactgaaggcagccatgagagccagacccctccaccacccccaagacagcagggaactcactccaacagccaccctgggatgctgccacagctgagcctgg

SEQ ID NO: 843993 - DNA, 120 bp, Artificial Sequence
  ENSG00000233542_13 (sequence is synthesized)
aggtgaccgtgaccctggctgacgtcggactgcagctttgtaagggagactgagccgggacccagacctacaaaagctgagatgataaacactgttttaagctgctgtgtgtcgcagtga

SEQ ID NO: 843994 - DNA, 120 bp, Artificial Sequence
  ENSG00000233542_14 (sequence is synthesized)
ctcgtgtggtagtggatttctagcagagccgtcgttcgtgtctgccttctctcagctcaacactctgtagggccacccatgccgttgtgcatgtcaacggtggattttttattgcgagta

SEQ ID NO: 843995 - DNA, 120 bp, Artificial Sequence
  ENSG00000233542_15 (sequence is synthesized)
atatttcattccattgcatgctcacacctcggtttgtttaactgtctacctgttgatgagctctgggacatatgcagttctgggctattatgagtaaagctgcttttaacatttaaatac

SEQ ID NO: 843996 - DNA, 120 bp, Artificial Sequence
  ENSG00000288081_0 (sequence is synthesized)
cctttacactgcattctccttggggaaggtcacagagcaggatgagaatggaaccgggagacaggaacaaagcagagaccctgaagcctggtctgtgggcagaaaagcctctagaggccc

SEQ ID NO: 843997 - DNA, 120 bp, Artificial Sequence
  ENSG00000288081_1 (sequence is synthesized)
gactatcaaagggacatgatgcctttaaggaggatgaagtcatcgggggatgaggccacctggctctgcagccagggctgctgccgaaaaggaggagcagaaggtggaaggtgctttggg

SEQ ID NO: 843998 - DNA, 120 bp, Artificial Sequence
  ENSG00000288081_2 (sequence is synthesized)
acttagaaggtacctgaagtgacagcccactgagactgcatcaggtggcagctggtgcctccccaaaggatgactggcgactgttagcagaaggagcagaatggatgccagacaggtgaa

SEQ ID NO: 843999 - DNA, 120 bp, Artificial Sequence
  ENSG00000288081_3 (sequence is synthesized)
atacaggtgcccacaccctgaggctttagtgtagagtagctaataacatgactctggagttggatgaatctggattaaatccagggtctcttctcaatagttacttgatttggacaaatc

SEQ ID NO: 844000 - DNA, 120 bp, Artificial Sequence
  ENSG00000257880_0 (sequence is synthesized)
aggcggaggctccgaacagggaggagaatgtcccagagggaggctactgcttttcattccaagatatggatagcaccagaaggccttgacctgcagcacagcagttctctgaagctggtg

SEQ ID NO: 844001 - DNA, 120 bp, Artificial Sequence
  ENSG00000257880_1 (sequence is synthesized)
aaccacttataacttgcagacatcggtctggggcagctgggataaaaatttaatcccacaactaaataataggaaactgttaaaatatttacagtaaaatctgccaacttcccaggacaa

SEQ ID NO: 844002 - DNA, 120 bp, Artificial Sequence
  ENSG00000257880_2 (sequence is synthesized)
atctcttcataaaacacatttacccaagaacacatcatgctctggggaaataaaatacacattgccgctttggtattgtctttctaaagtccttatattaaaaaatacaaaaaacaataa

SEQ ID NO: 844003 - DNA, 84 bp, Artificial Sequence
  ENSG00000257883_0 (sequence is synthesized)
tgtaagcgagaagactacgaacccacctggaggaacgaacaactccagactcgccgcattaagagcggtaacaccgcgaaggtc

SEQ ID NO: 844004 - DNA, 63 bp, Artificial Sequence
  ENSG00000257883_1 (sequence is synthesized)
ggcgagaagactacgaacccacctggaggaacgaacaactccagactcgccgcattaagagcg

SEQ ID NO: 844005 - DNA, 76 bp, Artificial Sequence
  ENSG00000257883_2 (sequence is synthesized)
aacatcagaaggaacaaactccggacaggccgccttcaggaactgtaacactcaccgcgagggtccgtggacacaa

SEQ ID NO: 844006 - DNA, 120 bp, Artificial Sequence
  ENSG00000257883_3 (sequence is synthesized)
gacctaattaatacccaggagatggtggtgtttattttttccagctgggacaactaaggccccgagaggagaaagggactatccggggtacagaggccactgagtcagagctaggaccaa

SEQ ID NO: 844007 - DNA, 120 bp, Artificial Sequence
  ENSG00000257883_4 (sequence is synthesized)
catatcaccagctctccctcttcagcgcagaccccaactcaccagcggtggcttcctgaagagctgggttaaggaggattctgaggtgcagcagagctcgctaagaggctgacgggtaag

SEQ ID NO: 844008 - DNA, 120 bp, Artificial Sequence
  ENSG00000257883_5 (sequence is synthesized)
gggtgctgcgctgtgagcacaggagccagtgacacagatcagatgctgctgctgtcgtggctgccaccacaagaaacaagagtgttggagtgcaaattcattatccagctgttaagagcg

SEQ ID NO: 844009 - DNA, 120 bp, Artificial Sequence
  ENSG00000257883_6 (sequence is synthesized)
acagagcatgcacacatctctccccgaccgggttatctgagagccagccctgctgtatgattgagtggctgccagcctcctcttctctgtaaccttgacacgccagagccgggcctccag

SEQ ID NO: 844010 - DNA, 120 bp, Artificial Sequence
  ENSG00000255015_0 (sequence is synthesized)
atgctttattttatgcttaaaataaaacatatcacatagtagcattgtaacttttattttaataatgatgatgtgagattgggtttatttccacaaatatcctgatattttcattcacct

SEQ ID NO: 844011 - DNA, 120 bp, Artificial Sequence
  ENSG00000255015_1 (sequence is synthesized)
aaaaaattccaaaacatttcagttttagataaagcaatgttataagttttcatcacccagcaggtctatgtattatgaatacattgagcaatgacccaaccctcagctttgttggaatgg

SEQ ID NO: 844012 - DNA, 89 bp, Artificial Sequence
  ENSG00000255015_2 (sequence is synthesized)
tttgttggaatggcacttgtctcatgagtaggcattattttgaattttcccgaaaattttatttgcatgtcccttttaagagatggagt

SEQ ID NO: 844013 - DNA, 120 bp, Artificial Sequence
  ENSG00000255015_3 (sequence is synthesized)
cagctcactgcaacctctgcctcccgaatctcctgcctcagctggattacagcatagatgctggctcctagggtgggcagattctggtcctgcaccaaccctgactggtgaccttcttgt

SEQ ID NO: 844014 - DNA, 120 bp, Artificial Sequence
  ENSG00000273059_0 (sequence is synthesized)
tgatatttatatttttaatgagagaaaacaaactccagaatttgggaactgtttttccggttttgctttatacctcttggacactccttcgaaggactggatctgaggggcattggggtg

SEQ ID NO: 844015 - DNA, 120 bp, Artificial Sequence
  ENSG00000273059_1 (sequence is synthesized)
tcaccagtctaacagtagtttaaaacagaagatcagcaacgtttggagagtttttttttctttgcgttttaatgataaacttgatttattcaattctattctgaggttgtctttctatat

SEQ ID NO: 844016 - DNA, 120 bp, Artificial Sequence
  ENSG00000273059_2 (sequence is synthesized)
tttgagtataaaacgatggccatactatgttggaaccactaaggttcttctcttcacttgttattcgtaaagtctctttgtaatctgagaatttcctgagtaaactgggaactgttatac

SEQ ID NO: 844017 - DNA, 62 bp, Artificial Sequence
  ENSG00000225258_0 (sequence is synthesized)
ggggaaaactcaccctgaggacttgaaattgtgtccagaactggtgggttcttggtctcact

SEQ ID NO: 844018 - DNA, 120 bp, Artificial Sequence
  ENSG00000225258_1 (sequence is synthesized)
ggagaggaaggaggtggaattctcactcagctgatgtggcctcagcacctgcactctcctgttttctgctgaactgcattctgctctcccattttatgcctgtggaacagtaaaagatgg

SEQ ID NO: 844019 - DNA, 120 bp, Artificial Sequence
  ENSG00000225258_2 (sequence is synthesized)
gtatgacaaaaagcaagactttgtcttgctttcatcagtgcatggacatttgagctctttcaactttttggctatgatgaacatgtttggaatgctatgaacatttatgcacaagttctg

SEQ ID NO: 844020 - DNA, 120 bp, Artificial Sequence
  ENSG00000241288_0 (sequence is synthesized)
catttcctgggacctagaacgggcctagctcagagcaggtgctcactattgatggaatgcatgttgaaagaatgcatgaatctcatctccttttgtgggtgaaaatctcatcctattctc

SEQ ID NO: 844021 - DNA, 88 bp, Artificial Sequence
  ENSG00000241288_1 (sequence is synthesized)
tctcatctccttttgtgggtgaaaatctcatcctattctcactcctgattaactttctttcttttttttttttcaaaacggagccctg

SEQ ID NO: 844022 - DNA, 120 bp, Artificial Sequence
  ENSG00000241288_2 (sequence is synthesized)
ctgagattcttcaaagcccgcagcccttttggaggttagatggttattctcagagcctttatgatgcataataaagacctagcttggaccaatattaggatgagttatcttgctattaac

SEQ ID NO: 844023 - DNA, 120 bp, Artificial Sequence
  ENSG00000241288_3 (sequence is synthesized)
ctggtcccatcttgctcacaatcctccaaagtttgaaagttattttccaggagacttggcttgcactgagagctgccctcccaccctctctccaaatttcctcttgggggtagcctaaca

SEQ ID NO: 844024 - DNA, 83 bp, Artificial Sequence
  ENSG00000241288_4 (sequence is synthesized)
ttgcactgagagctgccctcccaccctctctccaaatttcctcttgggggtagcctaacaaggtgctgtcacagacccttgtc

SEQ ID NO: 844025 - DNA, 120 bp, Artificial Sequence
  ENSG00000241288_5 (sequence is synthesized)
ttaatggaaatatttagagattctttcttttctgggttctagagtcttctctgtaacctctgcaggggagtccttgagcagaaggaagcaagttgcctgagattcttcaaagcccgcagc

SEQ ID NO: 844026 - DNA, 71 bp, Artificial Sequence
  ENSG00000241288_6 (sequence is synthesized)
cctcctgaaactcctggagggcagagccatgcctgccattttcatcattgcattaccaccacccagcacag

SEQ ID NO: 844027 - DNA, 120 bp, Artificial Sequence
  ENSG00000241288_7 (sequence is synthesized)
caaaagagttgctcaataaataaatcaggatgaatggacaaatacacggataggcactttgaactacagatgagcttaaatactttgtgtttttcttagtcaaacatgtgcaattaagca

SEQ ID NO: 844028 - DNA, 120 bp, Artificial Sequence
  ENSG00000241288_8 (sequence is synthesized)
ttcccaaatggtccccagcttccccgttcactgaaggccctgcagtcgggaacagtcaggactttgcacccagttgttgtgggtgtttggccaacccttcctcttgtgtgattcatggac

SEQ ID NO: 844029 - DNA, 120 bp, Artificial Sequence
  ENSG00000241288_9 (sequence is synthesized)
ctgcagcattgcgtcacctgtgagcttttggaattgaagactctcagggctcacccgggaggacctgctgggccagaatctgcattttaacaagatgcctgggtgatctgcatacacgtt

SEQ ID NO: 844030 - DNA, 120 bp, Artificial Sequence
  ENSG00000241288_10 (sequence is synthesized)
ctcagcctcctgagtagctgagaccacagagaacatgtgcccatgtctggagagttttggttgttgcagctggaggaggtggtgctactggcatctaatgggtagaggccacggatgctg

SEQ ID NO: 844031 - DNA, 120 bp, Artificial Sequence
  ENSG00000241288_11 (sequence is synthesized)
tggcatctaatgggtagaggccacggatgctgctaaacatcctacaatgccccggacaactcccactaagacaaagtaatgatccagccccaaatgtcaatagtgctgaaagtgagagac

SEQ ID NO: 844032 - DNA, 120 bp, Artificial Sequence
  ENSG00000241288_12 (sequence is synthesized)
catcttagagcttagagatcatccaagcacatttggccaaattgtttttgctactgtcccatgaaaaaaagacagactcatgactgatggcaacatcgatgggaattttgtttacctctt

SEQ ID NO: 844033 - DNA, 120 bp, Artificial Sequence
  ENSG00000241288_13 (sequence is synthesized)
ggcttcagaagctctgctatccacaggcaggtgagatattaccttccctaccacctggcagtcatagtctatgatgcaactcagctttgtggaagtgcttctctaaagaacttcccccaa

SEQ ID NO: 844034 - DNA, 83 bp, Artificial Sequence
  ENSG00000241288_14 (sequence is synthesized)
ctgtgatctgcccgatttggcctcccaaagtcctgggattacaaacatgagccaccgtacccagccactcttgattaacttaa

SEQ ID NO: 844035 - DNA, 65 bp, Artificial Sequence
  ENSG00000241288_15 (sequence is synthesized)
acagggtcttgttgtgttgcccaggctggactcaaactcctgggttcaaatgattcttctgcctc

SEQ ID NO: 844036 - DNA, 65 bp, Artificial Sequence
  ENSG00000241288_16 (sequence is synthesized)
ctggactcaaaccaggtactattctagattgtcttgtgatatttacaatctaggagaaggcagga

SEQ ID NO: 844037 - DNA, 120 bp, Artificial Sequence
  ENSG00000241288_17 (sequence is synthesized)
aaaatcattccttgtatcccctgatcttaaagtcaagactgaaccagcctccagatgcaagccttcatggggcttcagataccatgaggaatgggcgtccctgcaatattgtcatggctg

SEQ ID NO: 844038 - DNA, 84 bp, Artificial Sequence
  ENSG00000241288_18 (sequence is synthesized)
aattgagcagaaggaaacaaagttctgcagataaacaccaatgaaacaaaaaaccacgaatcctcctgccagtgaacggtcacc

SEQ ID NO: 844039 - DNA, 61 bp, Artificial Sequence
  ENSG00000241288_19 (sequence is synthesized)
aaaggagaaccttcccagaatcctcctgccagtgaacggtcaccagagcaagagcatggag

SEQ ID NO: 844040 - DNA, 120 bp, Artificial Sequence
  ENSG00000241288_20 (sequence is synthesized)
aagcgtcgttggggcaggtcctggggagagttcaggttggcgggtcctggggcggggccaggacagggcgatcctggaagcggggcttcggaagcgtccagcgccacccgtctggggccc

SEQ ID NO: 844041 - DNA, 120 bp, Artificial Sequence
  ENSG00000241288_21 (sequence is synthesized)
gataggagggagctttctgtctgtcccccagcctttggactgtcaccaaacaagccatccgttcaccaaatacttattaagcgcctaccatgtgtctggcaagggaggtgtaacagtgag

SEQ ID NO: 844042 - DNA, 78 bp, Artificial Sequence
  ENSG00000241288_22 (sequence is synthesized)
aggttcatcttttattccgccaaacactttcatctaaatcaagagggtgggatgtggttattgctgtgtttttagaca

SEQ ID NO: 844043 - DNA, 120 bp, Artificial Sequence
  ENSG00000241288_23 (sequence is synthesized)
tcaagagggtgggatgtggttattgctgtgtttttagacagaatcaacagtttctgggtctgagatattgcatacaccctctcagtccctgtatcctcagatggagtcacctgagaatcc

SEQ ID NO: 844044 - DNA, 120 bp, Artificial Sequence
  ENSG00000241288_24 (sequence is synthesized)
gtagctgggattacagagtcttctctgtaacctctgcaggaatttggggagctatgcgggatctccataaaatgagctccagaaagacacatgtgtgcgcgcacacacacacacacacac

SEQ ID NO: 844045 - DNA, 86 bp, Artificial Sequence
  ENSG00000241288_25 (sequence is synthesized)
gtgtaccgcaccacaattgaatctgtttatttgggacccatgattattttcaacaaacacttctgagaaataatctgaacacttaa

SEQ ID NO: 844046 - DNA, 70 bp, Artificial Sequence
  ENSG00000241288_26 (sequence is synthesized)
acctcctgaatgacggacgctggggctttgatgggcaccgggtgaaatgggcagagtggcgcttacccgg

SEQ ID NO: 844047 - DNA, 120 bp, Artificial Sequence
  ENSG00000241288_27 (sequence is synthesized)
acccgggatggcggtgaagcgggaccgggaggtcatcgtgacaaagggtggcatgaggtacctggccttgacgccctccccggctagacggtccagattgggggtgtccacatcctgatc

SEQ ID NO: 844048 - DNA, 120 bp, Artificial Sequence
  ENSG00000241288_28 (sequence is synthesized)
aaaaatcctccataatttggtgaattggtcattcatttaattagttttctacaaaagggactgctttctgtatgttcacaaggagatcatgggcagtggcttacaagaagagaaaggatg

SEQ ID NO: 844049 - DNA, 120 bp, Artificial Sequence
  ENSG00000241288_29 (sequence is synthesized)
tggcttacaagaagagaaaggatgtatatcacccctgccctcccttcttttccttttttttttttttaaggcaggaatcggagtgccgtagtacaatcacagctcactgcagcctcaaac

SEQ ID NO: 844050 - DNA, 82 bp, Artificial Sequence
  ENSG00000241288_30 (sequence is synthesized)
cactgcagcctcaaactcctgggttccagcgatcctcccgcctcagcctccccagtagctggggctacagcccagtaaaggc

SEQ ID NO: 844051 - DNA, 120 bp, Artificial Sequence
  ENSG00000241288_31 (sequence is synthesized)
gcccactgcagcctcaaaattcctgggctcaagcaatccacccacatcagcttcccaagtagttgggactacaggcccacactactatacccaggggagtccttgagcagaaggaagcaa

SEQ ID NO: 844052 - DNA, 120 bp, Artificial Sequence
  ENSG00000241288_32 (sequence is synthesized)
acctgcggagggtttgaggcaggcccaggagcgagcccacggtctgccgacgcggggccagcggcgggccccaggatccggagcttcgggcggggccgagtccaggctttggtatcagga

SEQ ID NO: 844053 - DNA, 120 bp, Artificial Sequence
  ENSG00000241288_33 (sequence is synthesized)
atttgaaatccgagcctgttccagatagactctctctctttctgccctgaccgtgagagaagccctgctggacggtggagacactcgtgggctgtgagcaagggatgcaaaggctgccgg

SEQ ID NO: 844054 - DNA, 120 bp, Artificial Sequence
  ENSG00000241288_34 (sequence is synthesized)
gaatcccatctttccagcatcatctgccaaggcacattagttcctgggtatctggatgggttctagcagcattactgtcattgaaggaaaaattttagccatattaaaggttaatgcagc

SEQ ID NO: 844055 - DNA, 120 bp, Artificial Sequence
  ENSG00000241288_35 (sequence is synthesized)
aatctccacataggctgcctggaagggaagcaggacaaggttaggttttccttgtgatggacaggaggcaggcggccctcccacagccctgcctggcaatacagatgtgtccccaaaagg

SEQ ID NO: 844056 - DNA, 120 bp, Artificial Sequence
  ENSG00000241288_36 (sequence is synthesized)
cactgggggccagctggagtgctatgccgaggcggactgacccgggccgtgggttcactctgctggcagcggtttcccgccagctccttgcagagttggcagatggcccagccccacagc

SEQ ID NO: 844057 - DNA, 120 bp, Artificial Sequence
  ENSG00000241288_37 (sequence is synthesized)
aggagccgggaatggcagaacgagacacaacaatttgatatccacttgccagatgagccgggtgtcatcagtcgcctggctctatgcccaacctctttttgcataaacacttatggattc

SEQ ID NO: 844058 - DNA, 120 bp, Artificial Sequence
  ENSG00000241288_38 (sequence is synthesized)
accatttatgcaagttgtacattgcacacctccagggggcgccacccacatatttatgaaaatgccgccccaggaattgcacagtacacagtctgtggcttatggctataagcagttgct

SEQ ID NO: 844059 - DNA, 120 bp, Artificial Sequence
  ENSG00000241288_39 (sequence is synthesized)
gagcgagcccacggtctgccgacgcggggccagcggcgggccccaggatccggagcttcgggcggggccgagtccagcgcctaccatgtgtctggcaagggaggtgtaacagtgagaaaa

SEQ ID NO: 844060 - DNA, 120 bp, Artificial Sequence
  ENSG00000241288_40 (sequence is synthesized)
cttttgctgttttgatcagctctctgcccgcaggagacaaggaaaaccaatgggaacagctggggaaactgagttacagagcttgtctacactgagtcaacaggagcaaatgctagatca

SEQ ID NO: 844061 - DNA, 120 bp, Artificial Sequence
  ENSG00000241288_41 (sequence is synthesized)
gtctacactgagtcaacaggagcaaatgctagatcagataggatctctctctctctgccacccaggccagagcgcagttgatgcaggtcaggggagccccccagtggagcatagtgtgtc

SEQ ID NO: 844062 - DNA, 79 bp, Artificial Sequence
  ENSG00000241288_42 (sequence is synthesized)
cagaactggtgggttggaaactcctggagggcagagccatgcctgccattttcatcattgcattaccaccacccagcac

SEQ ID NO: 844063 - DNA, 120 bp, Artificial Sequence
  ENSG00000241288_43 (sequence is synthesized)
gggctcaggggccgagagggagctgggcttggggcggggccgagacggagcgaggggtccagggtgtgagaaacggggaggggtttgaggaggggattggagtgtggctcaagttcggga

SEQ ID NO: 844064 - DNA, 120 bp, Artificial Sequence
  ENSG00000241288_44 (sequence is synthesized)
ggcgttacctgcggagggtttgaggcaggcccaggagcgagcccacggtctgccgacgcggggccagcggcgggccccaggatccggagcttcgggcggggccgagtccaggtttggggc

SEQ ID NO: 844065 - DNA, 120 bp, Artificial Sequence
  ENSG00000241288_45 (sequence is synthesized)
ccgggaggtggggccggttagggcgagggtccccgggatcgtagtgtcaggccttgggccaacgtaggcactcgcagttcctccgccttcaggaaggtctttttggcaggggccttacgg

SEQ ID NO: 844066 - DNA, 84 bp, Artificial Sequence
  ENSG00000241288_46 (sequence is synthesized)
acttcaagaatgaagccacggaccctcggggtgagcgtcacagttcttaaaggcggtgcgtccggagttttttccttctgatgc

SEQ ID NO: 844067 - DNA, 120 bp, Artificial Sequence
  ENSG00000241288_47 (sequence is synthesized)
tagttactgattctagggaacaattgggtagaaagagatggactccctgtgtttgaaattcagaactcaagcttggctctaagtgtttccttgctttgctgtgctccaggggagtccttg

SEQ ID NO: 844068 - DNA, 120 bp, Artificial Sequence
  ENSG00000241288_48 (sequence is synthesized)
aggagaggctttaaggtggtaattagatcttttctccacctacaagaatcttagtttcttcatgttaaatctattaactgtggcaatggcatgggggttataaaacaaaacaaaacaaaa

SEQ ID NO: 844069 - DNA, 120 bp, Artificial Sequence
  ENSG00000241288_49 (sequence is synthesized)
cccttacatcaagaatgcaccctggtgtgttatggatgtgggtgaaatgaaatgtctggaatttgctttaaaatattgtaaaatagcaagaaggaaaagaaaagcgggaactggaatgag

SEQ ID NO: 844070 - DNA, 120 bp, Artificial Sequence
  ENSG00000276122_0 (sequence is synthesized)
tacattggcatctggggagggggggggctccatgtgtggtcacgtgaactccgagaacgaacctggctgagcacagtcgaccttgtcactgtcatgacccaaggtgtcctctgtgactgg

SEQ ID NO: 844071 - DNA, 120 bp, Artificial Sequence
  ENSG00000276122_1 (sequence is synthesized)
acatggggcggggtgcgttacgtagatgactcgttaagctctagtggctaactcagtgcgtccatgaaggctgtgcggagatgcggccggcagaaggcaaacatagatgacgctggggat

SEQ ID NO: 844072 - DNA, 120 bp, Artificial Sequence
  ENSG00000276122_2 (sequence is synthesized)
atcggtgtaaatacgggtatggccagttggtcgatacagaagggtttgtttgaaggccttcgctcacacgattgtggctgctggcaaatccaaaatctataaggcaggctggcggctgga

SEQ ID NO: 844073 - DNA, 120 bp, Artificial Sequence
  ENSG00000276122_3 (sequence is synthesized)
gcctcaggcaggatttctacgaggcagaatttctcctccttcgggaaacctgcttcccctcggaaggccttctgtgggctgcgtgatgtgctcccacatgctcaggggcaagctccttta

SEQ ID NO: 844074 - DNA, 120 bp, Artificial Sequence
  ENSG00000276122_4 (sequence is synthesized)
ttggctgtaggcatcggccacatccccaaaacacctgcccagcaaccctgagatgactgcttgggttcgtctccaggtacgctaagcctgcccacataaaactgactgccacacactgac

SEQ ID NO: 844075 - DNA, 120 bp, Artificial Sequence
  ENSG00000276122_5 (sequence is synthesized)
gttctccggtgagagatgggagactcagagaggccacttcctttgccagggttgtagagcaatggaagggcttgagtggtcaggtctttgggtctcattgcctgtggttctaaactagca

SEQ ID NO: 844076 - DNA, 120 bp, Artificial Sequence
  ENSG00000276122_6 (sequence is synthesized)
gagtgtggaatgcctcggcttccactgaccctgtggccccggcagggcctccaccatcaggaccgccgagcacgccctcctgccaggagcgacgtcctccttcctgagaagtttctcgtg

SEQ ID NO: 844077 - DNA, 120 bp, Artificial Sequence
  ENSG00000276122_7 (sequence is synthesized)
ggtgggagggatgggaaccggactcttgacacctccctggtgccccagccccaccctcgcaaggcggaccacccagaaggttcttccggccccttttccaaagccctcctgcctcactta

SEQ ID NO: 844078 - DNA, 120 bp, Artificial Sequence
  ENSG00000276122_8 (sequence is synthesized)
tgtttccagcagcacactgtcttgtaatccaaggggccctggaaaaaggggtttcgcagcggcactgtggtctcagagtccatgcgagaggaaacacatctgtccctgtattttccgcag

SEQ ID NO: 844079 - DNA, 120 bp, Artificial Sequence
  ENSG00000276122_9 (sequence is synthesized)
acaccccccctcgcctcccccacgtccccacaggctgtcatattgtttccagttgtgtttatggtaaactcaggccataacacgcctctgtcgttgtaaaagatggaaagagtcttagga

SEQ ID NO: 844080 - DNA, 120 bp, Artificial Sequence
  ENSG00000276122_10 (sequence is synthesized)
gagaaattttcatcccaggcctttcaagcggcattttcccggtggtagaggtgaatgggaaacatgaagcagctgcctgcaggaacgtttttccctctgtggcaaggataaacagtgaaa

SEQ ID NO: 844081 - DNA, 120 bp, Artificial Sequence
  ENSG00000276122_11 (sequence is synthesized)
ggcgtttgctgaagatggaaagagacactgtgcaaaccaatatgcacagctcctgaggcctgtgctgggggccgtggcttgctgacgtctctccaaatacgcaagtcagagaagggctga

SEQ ID NO: 844082 - DNA, 120 bp, Artificial Sequence
  ENSG00000276122_12 (sequence is synthesized)
ctcacaggtcatggattgcaaaaaatatggcacaagcctgacttcgaactttcaaagggacaaggacgtgcacgccacagccacagccccagaccagggtgtaggccgtggggctccagc

SEQ ID NO: 844083 - DNA, 120 bp, Artificial Sequence
  ENSG00000276122_13 (sequence is synthesized)
tcccttctgggcatcactgctgtgtgtccttgggagagtgtctccgcctctctggcacctcccttcactctggaaacctgtccatcaggccaggggactggggtggcgtgcggcctacct

SEQ ID NO: 844084 - DNA, 120 bp, Artificial Sequence
  ENSG00000276122_14 (sequence is synthesized)
cctcccaccttccgagcccaaccccaaaactggataagcagtcagcttgcactctgaacccagaactgaaacgaggattaagcttcgctttgtgcgtgccacaaaccagacaccacatcc

SEQ ID NO: 844085 - DNA, 120 bp, Artificial Sequence
  ENSG00000276122_15 (sequence is synthesized)
aacctccggctctagggccaggaactccaatcaccaagcatttttggaaaaccaaatcaaagctagatggcttttctaacatgttatattgtattaaagattgaaaatgacattgagaag

SEQ ID NO: 844086 - DNA, 120 bp, Artificial Sequence
  ENSG00000276122_16 (sequence is synthesized)
taaaaataaattggaaataactggaaaaatctaaatgtccagtaacattgggggattcattaaaaattctgacccaatggaacgtcgacgagccaccacaatgacctttttaaagaatgt

SEQ ID NO: 844087 - DNA, 120 bp, Artificial Sequence
  ENSG00000241280_0 (sequence is synthesized)
tcagtaaatggcatggggaaaatctgattgccacagacagaagaatgaaactggatgcctatttctcacaatacacaaaagcgattcaagattaaagacttaactataccttgactatga

SEQ ID NO: 844088 - DNA, 120 bp, Artificial Sequence
  ENSG00000241280_1 (sequence is synthesized)
ataatagtttcaataaggaagacagaatgagttctgacacgatggttgggagctgtgacaggcagacgaaaaatggagccaaatggcatggaggtgtgtcatcactgctggattttacct

SEQ ID NO: 844089 - DNA, 120 bp, Artificial Sequence
  ENSG00000241280_2 (sequence is synthesized)
tgatctacattcagttatctacttcttttcaaaatgctgggcattcattcaagaaacagcatatatgttctgactttgaagtaatggatgaactgtcatgtgcagtatatggaaataagt

SEQ ID NO: 844090 - DNA, 120 bp, Artificial Sequence
  ENSG00000241280_3 (sequence is synthesized)
tttattaccttcttcccacattaactcatccatccattcaatagccatttattgagaagctcactctgtgttaggcacagtggtgtcatgatgttggaacagtaacaataactcaaccaa

SEQ ID NO: 844091 - DNA, 120 bp, Artificial Sequence
  ENSG00000241280_4 (sequence is synthesized)
ccagggcttgtctgaatacaatcctacagcagcaggagctgtggagatatagaaggcaaggaagaccaggttgtgagggaagacgaatttactcccaggaatgttgggattgagagtaat

SEQ ID NO: 844092 - DNA, 120 bp, Artificial Sequence
  ENSG00000241280_5 (sequence is synthesized)
attctccaataatggtggaagacagaacaataaaagcccaccagctccttctgcatggtgggataagagaaaagccaagggcagaagtgagaaaaataaccatcaccaaactgaaaagaa

SEQ ID NO: 844093 - DNA, 120 bp, Artificial Sequence
  ENSG00000241280_6 (sequence is synthesized)
aacctttataaaaaaactggattgataaatgacctttagtagtggaaagataccattccaatgaagcatgaattgaaaggatttcttctgaaagctaatttacatttttctttttttttt

SEQ ID NO: 844094 - DNA, 120 bp, Artificial Sequence
  ENSG00000241280_7 (sequence is synthesized)
ctggatgaaagaatccgttaggtgattatgattgaagacagattaagccttgttatgaggggaatatttgggggcttaccctgaggtgatatttgatgatttagctgtgggagaatttcc

SEQ ID NO: 844095 - DNA, 120 bp, Artificial Sequence
  ENSG00000241280_8 (sequence is synthesized)
ctcccaagatcagcgtgactgacactgaaattgctacaggggaaccggacctttccaagaggtgacaaggacatttacctggtacaacacaatggttctggactggaagtctagtcccat

SEQ ID NO: 844096 - DNA, 120 bp, Artificial Sequence
  ENSG00000241280_9 (sequence is synthesized)
tgatgaagttcccaaaagatgtccaggtcctaatccctggaatctgtgaatatgtcatcttacacatcaaaagaactttgaaaatgtgattgaggttaaggaccttggaatgaggagatt

SEQ ID NO: 844097 - DNA, 120 bp, Artificial Sequence
  ENSG00000241280_10 (sequence is synthesized)
accttggattatctggttgggtccaagctaatcacatgagtccttaaaggagaagaaccttttttagctgggtcagagagagatgtgatgatgaaaacaggctcagggagatgcactgta

SEQ ID NO: 844098 - DNA, 120 bp, Artificial Sequence
  ENSG00000241280_11 (sequence is synthesized)
agaagggcttgaccagttgtttttgactttgaagatggagggaagggccaggagccaaggaaggtgggtggcttttggaaggtggaaaaagcaagggaacattctctccagagcctccag

SEQ ID NO: 844099 - DNA, 120 bp, Artificial Sequence
  ENSG00000241280_12 (sequence is synthesized)
aaaggagctcagccctgttgacatctttgtttttattttttatttttagtagcattgaggtctcactatgttgcacaggctggtcttgaactcttgagctcaagcactcctcccgccttg

SEQ ID NO: 844100 - DNA, 120 bp, Artificial Sequence
  ENSG00000241280_13 (sequence is synthesized)
cccaaagtgctgggattataggcatgtgccaccacatctggcttcctactgacatcttaactttagtgcagtgagactcatatttgaatttctgaccttatattatagaaccataagaca

SEQ ID NO: 844101 - DNA, 120 bp, Artificial Sequence
  ENSG00000241280_14 (sequence is synthesized)
gacattatagaattatatagaattatagaaccataagacaataactttgtgttgttttaagatactaaatttttggtaatttgttatggcagcacaataaaaccaatatagcattatatt

SEQ ID NO: 844102 - DNA, 120 bp, Artificial Sequence
  ENSG00000241280_15 (sequence is synthesized)
tgccacagacagaagaatgaaactggatgcctatttctcacaatacacaaaagcgattcaagattaaagacttaactgtaagacttgaaactgtaaaaatactagaagaaaatctaggga

SEQ ID NO: 844103 - DNA, 120 bp, Artificial Sequence
  ENSG00000241280_16 (sequence is synthesized)
aaactgttctggacattggcctagaaaaagaatttctgactaagacttcaaaagcacagtaaacaaaaatagacaaacgggacttaatgaaactaaaactcttctgcagagcaaagaaaa

SEQ ID NO: 844104 - DNA, 120 bp, Artificial Sequence
  ENSG00000241280_17 (sequence is synthesized)
gcaaaatgggagatagacaatggagactaagaagagcaaaggaatgacagagaggtggaggatgagaaattacttaatggataccttgactatgaataatagtttcaataaggaagacag

SEQ ID NO: 844105 - DNA, 120 bp, Artificial Sequence
  ENSG00000241280_18 (sequence is synthesized)
aatgagttctgacacgatggttgggagctgtgacaggcagacgaaaaatggagccaaatggcatggaggtgtcatgatgttggaacagtaacaataactcaaccaaccagggcttgtctg

SEQ ID NO: 844106 - DNA, 120 bp, Artificial Sequence
  ENSG00000276121_0 (sequence is synthesized)
gtatccataaattccctgacatgcaggcaatatgcacatgcttctgagtgaggagagaaaattcatgagattcccataggggtccaagagtctaaaaagatgaacaactacaggattaat

SEQ ID NO: 844107 - DNA, 120 bp, Artificial Sequence
  ENSG00000276121_1 (sequence is synthesized)
ttttgttttatgtttgtttatttatatctatttgatctgtcaatagcattataactgtgcttttaacaattttgtcttgtttttatacttcttttcattctatatattgaagcaatgttg

SEQ ID NO: 844108 - DNA, 120 bp, Artificial Sequence
  ENSG00000276121_2 (sequence is synthesized)
tcttttcattataaaatgttaattataaagtcattaagaatcctttttaatatatttgccctgaattcagcagtgtctgattttattactcaattgtagctttcagtttatttgtgtttg

SEQ ID NO: 844109 - DNA, 120 bp, Artificial Sequence
  ENSG00000276121_3 (sequence is synthesized)
tctgatgtattttttcaactttaggctttttgcttagttggattctttttgtatcaattatatttaatacggaattttaatctttctatgttcattgcaataaatgatatatttgctcct

SEQ ID NO: 844110 - DNA, 120 bp, Artificial Sequence
  ENSG00000286666_0 (sequence is synthesized)
actgagatgagaaaggcttggagagaagcagtttggtaaggaaaacaaagaattatactttccacatgctacatttgagaacggatattaggtatctaagtggagatttcaaggaagctg

SEQ ID NO: 844111 - DNA, 120 bp, Artificial Sequence
  ENSG00000286666_1 (sequence is synthesized)
ttgaatataccaattggagctcagaagggagtagattccgagagtcttttcagcagatctatggcacttataactactggactaataaggtcacctggaaaagctgtgatccttcagttg

SEQ ID NO: 844112 - DNA, 120 bp, Artificial Sequence
  ENSG00000286666_2 (sequence is synthesized)
gagagagtcggctgtttctgggcttatttttcatctgtccattggcatttctgggttgtcagcctctccagctcaagatctggcatctatgaggaagaaacaacagcagagaactcatca

SEQ ID NO: 844113 - DNA, 120 bp, Artificial Sequence
  ENSG00000286666_3 (sequence is synthesized)
ccctgttgttcctctgcacccagtgtcactggccagtctgccttcttctacctttcagagtcttctttgttattactgttgttgttctaaattaggatataatttatataccacagaact

SEQ ID NO: 844114 - DNA, 120 bp, Artificial Sequence
  ENSG00000286666_4 (sequence is synthesized)
caccacttagaagtgtacaattcagtggtttttagtgtattcacaaggtgcaaccattaccattatctaatcccagaacacttctgttctgttctgttctattctactcttttttcttac

SEQ ID NO: 844115 - DNA, 120 bp, Artificial Sequence
  ENSG00000286666_5 (sequence is synthesized)
ccccagaagaaaacttgtatcttatccatcacttcctattgcctcacaccccaccgccagccttattctggacatttcatgtgaatagaagcataaaatttgttgccttttgtgtctgac

SEQ ID NO: 844116 - DNA, 120 bp, Artificial Sequence
  ENSG00000286666_6 (sequence is synthesized)
tttttttacttagcataatgttttaaaagttcatccatgttgtagcatgaatcagtatttcattttcatggctaaataatattccactgtaggtatataccacattttatttatccactc

SEQ ID NO: 844117 - DNA, 120 bp, Artificial Sequence
  ENSG00000286666_7 (sequence is synthesized)
atcagttgatgggcgttcagttgtttaactttttcactagtgtgaataatgctactacgtgcattcacatccaagtttttctatgaacatatgttttcaattattttgggtataaaccta

SEQ ID NO: 844118 - DNA, 120 bp, Artificial Sequence
  ENSG00000286666_8 (sequence is synthesized)
ggaaaggaattgctgggtcatatggtagctttatttttaaatttttgaggaaccgtcaaactattttacaaggtcactgtactattcaacactcttaatagcaatgcatgagggttccaa

SEQ ID NO: 844119 - DNA, 120 bp, Artificial Sequence
  ENSG00000286666_9 (sequence is synthesized)
ttacttcatatccttgtcaacacttgctattgcctatcttttcaattttagccatcctagcgggtgcggagttaaacctcattgtgttttttagttgcattctcctaatgactaagaatg

SEQ ID NO: 844120 - DNA, 120 bp, Artificial Sequence
  ENSG00000286666_10 (sequence is synthesized)
atatcttctttggagaaatgtctattcaaaccctttcctcatttttaaattggattatttgtctttttattgttaagttgtaagtgttgtttatatattttggatatgagatccttatca

SEQ ID NO: 844121 - DNA, 120 bp, Artificial Sequence
  ENSG00000286666_11 (sequence is synthesized)
atatattttggatatgagatccttatcagttatatgaacttaaactactttcttctattctgtgagttgccttttcattttcttgatagttccccttgactttctgcaccttgttatatt

SEQ ID NO: 844122 - DNA, 120 bp, Artificial Sequence
  ENSG00000286666_12 (sequence is synthesized)
tgctttgtatatcatgaccaggatttatagttatacttagtggggataatagagaaggttataccaaatctattttcccagaagtagaagtctagactgtagaggacatttcaataatat

SEQ ID NO: 844123 - DNA, 120 bp, Artificial Sequence
  ENSG00000286666_13 (sequence is synthesized)
ttttaaaatatcagtcagtgaaaactaaaaaaaaacaaaaaaccaagagatacaaactggtccaattttttctcataatcatccaatgtagaataaatacacaggcaacactgacaccat

SEQ ID NO: 844124 - DNA, 120 bp, Artificial Sequence
  ENSG00000286666_14 (sequence is synthesized)
attcttcaacctcctggcaagtcctgagcctcactcagagctgatgctgttcacgtagttggttggatgtggataacagaggagttttcactggagcgtacagttgagcccctatgagac

SEQ ID NO: 844125 - DNA, 120 bp, Artificial Sequence
  ENSG00000286666_15 (sequence is synthesized)
ttctttggaatataaattgtgggcctctgtgatacacaatcacaactctctgacctcattttgtaaagggaggagtaggcttcttcaatccaccctttctattttataaagaaaaaacta

SEQ ID NO: 844126 - DNA, 120 bp, Artificial Sequence
  ENSG00000286666_16 (sequence is synthesized)
aaagaaaacagacaggatttctaattccgtgttctttctatgagagaaaaaaatataaaatgctgggtttgatggcctcaggctccatgcaagtgattacctctaagtctattccataac

SEQ ID NO: 844127 - DNA, 120 bp, Artificial Sequence
  ENSG00000286666_17 (sequence is synthesized)
tctagatgataaagatgcaacattatgtagcatttgccagtaataatactattaataaaccaaaataggtagcttctgtataaaattagaaggctagcccttccgccctttcacatttgg

SEQ ID NO: 844128 - DNA, 120 bp, Artificial Sequence
  ENSG00000286666_18 (sequence is synthesized)
gatctccaaaccagtttagttactgtttttctttttcatgaaacagaataccctgtcatttagattaaaagtatgacataattgtaataagtgttaaacattaaaaccgtaactcaaact

SEQ ID NO: 844129 - DNA, 120 bp, Artificial Sequence
  ENSG00000286666_19 (sequence is synthesized)
acataacacaacatttttgggactcaagagcaactggaaagaaaaacatgcagagtggttaatacactacccttgcaccggttttagaccagtgctaagcaggctctgctcttgtcttcc

SEQ ID NO: 844130 - DNA, 120 bp, Artificial Sequence
  ENSG00000286666_20 (sequence is synthesized)
accatctgaccgcttcaggctggggataaaaagaaaaccaagctgaaggagcaggactacctaaggtccagatccaggtcactcactgtgtacttaggacgcaggaatttcctgctcaat

SEQ ID NO: 844131 - DNA, 120 bp, Artificial Sequence
  ENSG00000286666_21 (sequence is synthesized)
tggctccaatcacattttcagaaccggtacaggtctcttctcccaggttggttctcctgaggatagactctgtctacctaggactgtggctaatagggggctgccttgggacattgtgga

SEQ ID NO: 844132 - DNA, 120 bp, Artificial Sequence
  ENSG00000286666_22 (sequence is synthesized)
tgacatttagatgagtggaatgggtgtctctaggtctgcatgcttgtaaatttctttgtggtgcaagtctgagcctcagtagggaaagggtagggaacagccctttcattatggccacgt

SEQ ID NO: 844133 - DNA, 120 bp, Artificial Sequence
  ENSG00000286666_23 (sequence is synthesized)
tcaagtgtggaatataaggaataaagaaactctatttgaagttggcctttccaaaaattagaaagatatatttgtcaatgcagaagcataaaacatatttaacagttggttaacttgacc

SEQ ID NO: 844134 - DNA, 120 bp, Artificial Sequence
  ENSG00000286666_24 (sequence is synthesized)
tgtaacatttcaaatatttaggagggtctgctattgtagtttggttccaccttaaaaatgttaagggtacatctaagcattatcagtctttgacaactctagttcaaaaagtgaataaga

SEQ ID NO: 844135 - DNA, 120 bp, Artificial Sequence
  ENSG00000286666_25 (sequence is synthesized)
aaactgagcatttgaaataattaataatgcatcctttaaaacttttaggcttgcaagcactgtatgtaccttctttagtacaatctttatcacatggtttatacatctccctttttattg

SEQ ID NO: 844136 - DNA, 120 bp, Artificial Sequence
  ENSG00000286666_26 (sequence is synthesized)
atatatgctggttgtctttcaatatcttaaaaaatagaagaccatgagaagttacctttcagtttcttcataacatgagaaacttctacctgtctaatccctctcccatcagagagagac

SEQ ID NO: 844137 - DNA, 120 bp, Artificial Sequence
  ENSG00000286666_27 (sequence is synthesized)
tggctacattccctgtcctatgggacccaagcagctctcagctgacactatgatggatggagcagcagaggcccatacgtcaactctcaggaaagaaaaaccagtaaatcagaggagcat

SEQ ID NO: 844138 - DNA, 120 bp, Artificial Sequence
  ENSG00000286666_28 (sequence is synthesized)
atccagagagagtcagaggaaaggctgcatcaggaagtagattgcaaagccacatctagggaggtcaggaaagaggcagggacagcagacagctcagcagacaggaaaggacagtgagaa

SEQ ID NO: 844139 - DNA, 120 bp, Artificial Sequence
  ENSG00000286666_29 (sequence is synthesized)
tgcatttgtcagggcaaaagacatagctgtggccaagactgggatttggggtttcctatgcgtgtatgatctgaatctatttttaagggtccaggaaggagtgagcatagcctctcattc

SEQ ID NO: 844140 - DNA, 120 bp, Artificial Sequence
  ENSG00000286666_30 (sequence is synthesized)
ctacaattttgtgtgaatgctgtaaagttggtatactgcctaatttatctctttctttttaattctggaatatttaagtgacttaaacatttaataaataactaacatctgttgttttat

SEQ ID NO: 844141 - DNA, 120 bp, Artificial Sequence
  ENSG00000286667_0 (sequence is synthesized)
attaggtgttgctgttgctggggctgtggcaggaagtggttgatcacattcctattctccagttgggtaatgagctcatggttgaatcgtgaatggcatatgtgctccaatagggtggag

SEQ ID NO: 844142 - DNA, 120 bp, Artificial Sequence
  ENSG00000286667_1 (sequence is synthesized)
actgtgatttatcttgttcatgcctggacttccagcagcattcagaacagaacttctttctttctttctttcttttgagatggagtttcgctcgtgttgcccaggctggagtgcagtggt

SEQ ID NO: 844143 - DNA, 80 bp, Artificial Sequence
  ENSG00000286667_2 (sequence is synthesized)
tggagtttcgctcgccgcaacctccgcctcttgggttcaagcatttctcctacttcagcctccggagtagctgggattac

SEQ ID NO: 844144 - DNA, 81 bp, Artificial Sequence
  ENSG00000286667_3 (sequence is synthesized)
tcccgtaagagaattccaggaagcctcgagagtgagtgacggcccgcggcccccggcgaggaggcagcaataccacaggcg

SEQ ID NO: 844145 - DNA, 120 bp, Artificial Sequence
  ENSG00000286667_4 (sequence is synthesized)
gcccgcggcccccggcgaggaggcagcaataccacaggcgaccaccagctgccgccgcagtcaagggcagttggtctcccctcgccaggattaaccctggaccgagggctcccgaaccga

SEQ ID NO: 844146 - DNA, 120 bp, Artificial Sequence
  ENSG00000286667_5 (sequence is synthesized)
atcgtccccacagcctgtcctgcgagggcggctttccccattaccaccctcgtttcaccaaggagaaaacgagctcagagaggcagtgcattggcccgggattgcaccgggcgcgaaccc

SEQ ID NO: 844147 - DNA, 120 bp, Artificial Sequence
  ENSG00000286667_6 (sequence is synthesized)
acgtcagctcccgcagaacctagatcattcgctgccacctccctccgggcctgctctcgcagtgttgggtgggaacagaacagccttggtcgtggctgaggagaaatcccacagatgtca

SEQ ID NO: 844148 - DNA, 120 bp, Artificial Sequence
  ENSG00000286667_7 (sequence is synthesized)
ctggacgagggtgacgggtggggccgggctttcccctgggtacaggcacaaccgtgctcttccctcgcacagtgacccgcggtgtcatccacaattcacagcctgtttcccagaggaggg

SEQ ID NO: 844149 - DNA, 120 bp, Artificial Sequence
  ENSG00000286667_8 (sequence is synthesized)
gctcggagcggtgccctccaggtgccgccagcaacacaaggcccagactacagaacaccaaatactgtgatgagaaattacttcccttttccttcagggccagtcctggctaccccaagg

SEQ ID NO: 844150 - DNA, 120 bp, Artificial Sequence
  ENSG00000286667_9 (sequence is synthesized)
tttacagagagagagcaggcccaagcctggggcagagcataggagctgggaaagcaccaggatgtttaatgcctacagtccaaaattggttggtggaagtacctactgtcagtcccatca

SEQ ID NO: 844151 - DNA, 120 bp, Artificial Sequence
  ENSG00000286664_0 (sequence is synthesized)
atataaaaacaaaagttgagtccggttctggaagtaaagggtgagtccaagaaatccctgaatggatccaccatctctggcctaatcaatgtcaccatgaaggggacctgcaggcattag

SEQ ID NO: 844152 - DNA, 120 bp, Artificial Sequence
  ENSG00000286664_1 (sequence is synthesized)
agtgggtcttagtcatcatctccatgactgagcggtgaagaaggaacccagcatggtgtaatgagccatgtgtagctgtgtaggaagaagcatccctgtctggtttaccactgttatcaa

SEQ ID NO: 844153 - DNA, 120 bp, Artificial Sequence
  ENSG00000286664_2 (sequence is synthesized)
actggagcacattgagggagattagaggactgagagatacaataggaggaaggcgcatgatatcgagaaaagagaacctgagtctttgaagtaatcccctctgacaactcgttttgacac

SEQ ID NO: 844154 - DNA, 120 bp, Artificial Sequence
  ENSG00000286664_3 (sequence is synthesized)
agagctgccaggaatcatccattccaataagaagtgacagtactaagattaaactatcatttctttatgaaggctgtgaagtagcattataatcctgacaacccagaaagtttcaatgga

SEQ ID NO: 844155 - DNA, 120 bp, Artificial Sequence
  ENSG00000286665_0 (sequence is synthesized)
ggaagaaggaaaggaaaggaaaaaaatctttaatggccctgggaactggaaaaactagaaatacaattgctaacatctatgttcctaaattcagagattcctactaggcaaaaagaactt

SEQ ID NO: 844156 - DNA, 120 bp, Artificial Sequence
  ENSG00000286665_1 (sequence is synthesized)
ggcagaaggcttcctgggcctcaactcacagctgagagtgaggatggcaaaaagcagtgctgtgagtggtctgtaagttgatttgaaccattaccagttcctggttctgcacaggttgtt

SEQ ID NO: 844157 - DNA, 120 bp, Artificial Sequence
  ENSG00000286665_2 (sequence is synthesized)
cattaccagttcctggttctgcacaggttgttgaaggcaggacttctctccttcagtggaaactccacctgctcacaatcaaccatcctttcctgcagccttgagacactactcagtgca

SEQ ID NO: 844158 - DNA, 78 bp, Artificial Sequence
  ENSG00000286665_3 (sequence is synthesized)
aaccatcctttcctgcagccttgagacactactcagtgcagcacccctcccagtctagaataagcacactcatcatca

SEQ ID NO: 844159 - DNA, 70 bp, Artificial Sequence
  ENSG00000286665_4 (sequence is synthesized)
tgccaatgtttttaaataagcaactgtacaagcacaacaatgacaacaaaaaccttcctctccccagtgt

SEQ ID NO: 844160 - DNA, 120 bp, Artificial Sequence
  ENSG00000286665_5 (sequence is synthesized)
tatagaaatgatacaactaagaaaaatagaagaaaaggaaaaagaaggtattctgcagaatgattttactgactgctcgtctgtaatgcctgggagtcaaaggatactgtttatagaaat

SEQ ID NO: 844161 - DNA, 120 bp, Artificial Sequence
  ENSG00000286665_6 (sequence is synthesized)
atagaaatgtaggcatacttaatggcatcaggggaaacaaagttaatattattatatcaaattgggagatgaaagatcacatagggaagacaagaaagagttaataccattgttcttagt

SEQ ID NO: 844162 - DNA, 79 bp, Artificial Sequence
  ENSG00000286665_7 (sequence is synthesized)
tgaagttacataaggtagccatcagaataaaaatttaactcttccaaatatcacaacatcaaaacaaaatcaataaaaa

SEQ ID NO: 844163 - DNA, 120 bp, Artificial Sequence
  ENSG00000286662_0 (sequence is synthesized)
ggacagatttagtttcttgcagaacacaattccgaaatcttgagctccacaccccatctgtcccaacggcacctgcaggttcgtcttcctttctgagttactcgttttcacagttcagct

SEQ ID NO: 844164 - DNA, 120 bp, Artificial Sequence
  ENSG00000286662_1 (sequence is synthesized)
cttacaacaaggagagatattttaaccaagacaatcaacgtaacagccacaggatattgaaaaaaaagtcttcttccaaaatcatccagtcttccctcctctatgaatacttgcatcttg

SEQ ID NO: 844165 - DNA, 120 bp, Artificial Sequence
  ENSG00000286662_2 (sequence is synthesized)
tttctccatcaacaacagatgtttgaagagaaccagcagccagtccaatcccctgtgagatctctgaagcatcagcaaaaaggaaaaaagaaatgacatcagatgacctctatgagctac

SEQ ID NO: 844166 - DNA, 120 bp, Artificial Sequence
  ENSG00000286662_3 (sequence is synthesized)
tcatttctgactcttggcatgaaacaatggagagtagaggctccacctcatcttattctagacctttctagggtgactgtgtttaagtaccagtttcttcctcagtcctcaagggtatat

SEQ ID NO: 844167 - DNA, 120 bp, Artificial Sequence
  ENSG00000286662_4 (sequence is synthesized)
cacagcccgaagaaaaacccaaacagaataaacatggaaaagctggtcggaaggtactgtgggtttggagagcgttaaccatctcaccgttaatcaccatgggagactgaattttcttct

SEQ ID NO: 844168 - DNA, 120 bp, Artificial Sequence
  ENSG00000286662_5 (sequence is synthesized)
gttgaagaccaaaattgcaacaaaacaaaacaaaacaaaaatccaagcagtcctccagagagggaaatctcagtttaattgatgtcactagttaaaaaggcgcactgaagtataagaaga

SEQ ID NO: 844169 - DNA, 120 bp, Artificial Sequence
  ENSG00000286662_6 (sequence is synthesized)
aaataagatttttgctcaggctgcttaagattttctctggatgaataagaacattgtttactgatgaattccagctacataatttgctccaactgatgataaacatcttacatgaatggt

SEQ ID NO: 844170 - DNA, 120 bp, Artificial Sequence
  ENSG00000286662_7 (sequence is synthesized)
gctggcttcctccttctgaataccacgtgagtcctttagaaatatgagagaggcgaaccaagcagtcatttaaagattagccaagataaatgatcaaacaaccaattcagggcaatggaa

SEQ ID NO: 844171 - DNA, 120 bp, Artificial Sequence
  ENSG00000286662_8 (sequence is synthesized)
gaaaggcagtctggattattgaacagtttatagaaacagttgcatatcaattttgaaagtatacactgttctgttaatggaggaaggctgctaggtggattgctttaatcaacatattgg

SEQ ID NO: 844172 - DNA, 120 bp, Artificial Sequence
  ENSG00000286662_9 (sequence is synthesized)
aaactatttggagactacatgaatacattgcatgaggccatgggagcaatttcttctacacatgttaagcacagtctctgtaatagtagtgttagtaatagtagtagtgttaactattat

SEQ ID NO: 844173 - DNA, 120 bp, Artificial Sequence
  ENSG00000286662_10 (sequence is synthesized)
ataatagtgttaactattattagtaacagtagtgttaactattattagtaacagtagtgttaactattattagtaatagtagtgttaactattattgtgtgtgttctatgaaaacatgca

SEQ ID NO: 844174 - DNA, 120 bp, Artificial Sequence
  ENSG00000286662_11 (sequence is synthesized)
gtgttctatgaaaacatgcagtatacttcacagtatactatatatttgactccctcatatactgtcagttattttagcatctatatgatttgggaagtatgcatagtccaaatatgttct

SEQ ID NO: 844175 - DNA, 120 bp, Artificial Sequence
  ENSG00000286662_12 (sequence is synthesized)
agaggaaaattaggacacatagttggctccagaatgtgcagcatatagttcattgccacaaccaccaaatattcagcaagtctgatgaaaatcatgaaatgctttgtatgagctagcagt

SEQ ID NO: 844176 - DNA, 120 bp, Artificial Sequence
  ENSG00000286662_13 (sequence is synthesized)
caccatagtaatgttgtataacaaatgactctaaaattgagttttgcctatcttgactgggattagcttaatgatttttctggtcttgcctgaggcccattcacgtgtctggcaggtatt

SEQ ID NO: 844177 - DNA, 120 bp, Artificial Sequence
  ENSG00000286662_14 (sequence is synthesized)
tactgaatggttggctgacatggtagaacctcagctgggaagtccagctctgctgcccatggtcttgtttccagagtggcctggcccaggcttaggttcatgttggaggctgaatactga

SEQ ID NO: 844178 - DNA, 120 bp, Artificial Sequence
  ENSG00000286662_15 (sequence is synthesized)
gaggggaagcagaaacattcaagatctcctgacacctgggtgcattcaggttgcattgtcagtccactttattctgtagaccaaagcaagtcgcaaggtcacactgaagtcaaggggtgt

SEQ ID NO: 844179 - DNA, 120 bp, Artificial Sequence
  ENSG00000286662_16 (sequence is synthesized)
aaaaacgttggaaattagattctcaaaaagtcaatggttgagggttaggaaggagcagggaggcaataattcccctgtttgtctggcctgccctgtgggtggggagctctcagcagcttg

SEQ ID NO: 844180 - DNA, 120 bp, Artificial Sequence
  ENSG00000286662_17 (sequence is synthesized)
agaggagcaggagagaggcagagaactgagagtactgtcagccagaagctggccagagcaaaccggaatgggcagtgacagcctgtgaaacatctgctgtatatgcctgtacctctctgt

SEQ ID NO: 844181 - DNA, 120 bp, Artificial Sequence
  ENSG00000286662_18 (sequence is synthesized)
tgtatctgcctgaagacctccctctacttcgtttgctcggcctactttgaattgccctgagacttcagattaaattctaaggaatatctttccgccctggatattctggtttttgcctgt

SEQ ID NO: 844182 - DNA, 120 bp, Artificial Sequence
  ENSG00000286662_19 (sequence is synthesized)
gctgtaatatctgagtttcttgactctctcacaacactgctcatactgccatttaattgcctgtgtgtttgactgtggtccaacttaggcaatccccaattaaaagcaggagttttccta

SEQ ID NO: 844183 - DNA, 120 bp, Artificial Sequence
  ENSG00000286662_20 (sequence is synthesized)
tgttgttcgccaccgctgagttgcatggtgactggcacatagcaggcacacaatggatatatttttaaattttattttcttctggtaaaaacacgtaacacgagatccactctgttaaca

SEQ ID NO: 844184 - DNA, 120 bp, Artificial Sequence
  ENSG00000286662_21 (sequence is synthesized)
aatatttaagtgtataataaaatactgtaaagcccaggtacagtatttgatgcattctgaatagcatttagccaagttttccagcacatatctaaactcaattttatgacaagcctgagt

SEQ ID NO: 844185 - DNA, 120 bp, Artificial Sequence
  ENSG00000286662_22 (sequence is synthesized)
taaatttcccactagattctgaataaagagttcacattttctcatcaggcattttacctacatgaattttggaaaaagcgtcttctgtctgttgggtacagaaaccgcctttcaggacaa

SEQ ID NO: 844186 - DNA, 120 bp, Artificial Sequence
  ENSG00000286662_23 (sequence is synthesized)
taaaatggaaattgtggaacagccagaaatcaagcagtaagaagacaaacttccccctaaaaatttgatttctaaaaatgtgtgcattgtatgtctccctgtattaactaattcatggaa

SEQ ID NO: 844187 - DNA, 120 bp, Artificial Sequence
  ENSG00000286662_24 (sequence is synthesized)
aatgtgtagtgtggattcagaacagctcgtctaaaatgaagggtctgcagagaccgatgtacggggtgccagagggaaaccacgtgtgagagaacaaggccttcatgctttgtaagagag

SEQ ID NO: 844188 - DNA, 120 bp, Artificial Sequence
  ENSG00000286662_25 (sequence is synthesized)
gacagaaccagatcacaagggctacttaaaaaagccctcctcttgctttgcattcttccaggacctgcaaccggtgattgaactaccagtttctgaaggccacccattcacacctatttc

SEQ ID NO: 844189 - DNA, 120 bp, Artificial Sequence
  ENSG00000286662_26 (sequence is synthesized)
ccgctactccagggggtgttccctacatgccagagctaagcacagggttggaggctagggaatggaaaagcttcccaattcaggcatttctggaagcagttgtggctatttcagggggag

SEQ ID NO: 844190 - DNA, 120 bp, Artificial Sequence
  ENSG00000286662_27 (sequence is synthesized)
ctacaaacacaaggcaaagagtcttttgatcccacacttctgtgtgagcttcggagagacaatcttccggatctggtggtgacttttaaaaaaagcgtctctggaatccatccccaggca

SEQ ID NO: 844191 - DNA, 120 bp, Artificial Sequence
  ENSG00000286662_28 (sequence is synthesized)
ggcagaattcggtctgaagatgctccccaagagcacctcaaagagcaccagcaggccttcctcggcagggacctcctttatccatgagcgttctcttcccagcctcatgtcccacgggtc

SEQ ID NO: 844192 - DNA, 120 bp, Artificial Sequence
  ENSG00000286662_29 (sequence is synthesized)
cctccactctctccctgaagtcagatggcgctggggtttccctgcgggaaccacccgcacattcgtgagtggagagagtgccagccgggagtcaggctcacttgactgaagctccgcttc

SEQ ID NO: 844193 - DNA, 120 bp, Artificial Sequence
  ENSG00000286662_30 (sequence is synthesized)
cctcgctccccacccaccccttccgcggctcagcctggatcccgctgctcgattctccaagtgccgcgttcatgctggaagccagcgttccccacagtgtcttctgtgaagacaaatcct

SEQ ID NO: 844194 - DNA, 120 bp, Artificial Sequence
  ENSG00000286662_31 (sequence is synthesized)
gggagacgttggcgttccgggagaagaaatcgattcctcaaaaataagcaaatttttaatttaaggtgatgtttcaaggagacgtcgatatattaacgtgctttgcgagtgtttaagagg

SEQ ID NO: 844195 - DNA, 120 bp, Artificial Sequence
  ENSG00000286662_32 (sequence is synthesized)
aaggggtgaagggcagggttctccaaagttgttggctacctggagaccgtctcgaggagttggactagaacttggtactcacgatgataagcagtgacaggccaggcgcggtggctcacg

SEQ ID NO: 844196 - DNA, 120 bp, Artificial Sequence
  ENSG00000286662_33 (sequence is synthesized)
gagtggtggcgcacacctgcaaccccagctgctccggaggctgaggcatgagagtagtttgaacccgggaggcagagatcgcagtgagtccaaatcgcgccactgcactctggcctgggc

SEQ ID NO: 844197 - DNA, 85 bp, Artificial Sequence
  ENSG00000286662_34 (sequence is synthesized)
aagtgacaacattccatgctccaggaactggtctcggtgcggtactgaagattgattcaacggtgagaacgtcaagcacgtacta

SEQ ID NO: 844198 - DNA, 120 bp, Artificial Sequence
  ENSG00000286662_35 (sequence is synthesized)
tccacgggcttacactgtggaggaaaaaatataaacaaacaaacaaaaatagctatattatacagcaggaagtgagaagtgactagaagaaaagtcaacccagataagaaaaggaaacaa

SEQ ID NO: 844199 - DNA, 120 bp, Artificial Sequence
  ENSG00000286662_36 (sequence is synthesized)
acaattataatagaacttgaatattttatatcttttctttttacacattttgacatttattatgaaaatgttgcaagttgagataaaattataacaaatccccatatgctaattactttt

SEQ ID NO: 844200 - DNA, 120 bp, Artificial Sequence
  ENSG00000286662_37 (sequence is synthesized)
ttatcttgtttaatctatagacgcaccattcgtttcctggtgtattttaaaacaaattacagacaccattctattttaaataataaatggtttagcatataaatctaacaaataatgact

SEQ ID NO: 844201 - DNA, 120 bp, Artificial Sequence
  ENSG00000286662_38 (sequence is synthesized)
ttttgacacaattgcagtggaattatggcctctaaaacattaacgataattacttaatagtacaggttgattccttgtctgaaatgttcgggatcagaattgtttcagatttcagatttg

SEQ ID NO: 844202 - DNA, 120 bp, Artificial Sequence
  ENSG00000286662_39 (sequence is synthesized)
tggggattttagaatatttgcgtatacataatgagatatcttgggggcgagacctaagtctaaacacgaaatttatttgtccttcatatgcaccttatatgcatagcctgaagataatta

SEQ ID NO: 844203 - DNA, 120 bp, Artificial Sequence
  ENSG00000286662_40 (sequence is synthesized)
tgtattttcactaattttgtgcatgaaacaaaggttgtggacacgaggtcgcgtatgaatttctttacttgtggtatcatgtaggtactcaaaattttacaaatttggagcattttggac

SEQ ID NO: 844204 - DNA, 120 bp, Artificial Sequence
  ENSG00000286662_41 (sequence is synthesized)
ttgatttttggattagggatgctcaacttgcatctaatactcggctagtattattttaataatttgctaatcacctcaaaatgtcttttattatagccagtgtgttagagtgcaaaaaaa

SEQ ID NO: 844205 - DNA, 120 bp, Artificial Sequence
  ENSG00000286662_42 (sequence is synthesized)
taagtattcacattgcatttagttgataaatctcttacgtcttacttggaaggcatttccctccccgctgccaccgaaccatcgtttcttcaatgaaaaggcagatttgtttttcctgtg

SEQ ID NO: 844206 - DNA, 120 bp, Artificial Sequence
  ENSG00000286662_43 (sequence is synthesized)
tttttttctcccattgtgattggctgcctgcatgctagaacttttatgtaacatgttcatctctgtaccatatatcttctgtcaattggtagatagacctacagccttcattaaatttgg

SEQ ID NO: 844207 - DNA, 120 bp, Artificial Sequence
  ENSG00000286662_44 (sequence is synthesized)
cttcattctttaggcaaaattaattcattgactgtgtttgaacttcttgttgcactgtatctggaggcaggtattatggttggccagcacggtcccatggtgccaatctcaatcctcttt

SEQ ID NO: 844208 - DNA, 120 bp, Artificial Sequence
  ENSG00000286662_45 (sequence is synthesized)
caaaaaattgcctcagcatactttgctgctcctgatctaggagctactggtctaggagcaattttattcaggctttcggagttatgattttcaatttctactatttcttctgcataatta

SEQ ID NO: 844209 - DNA, 80 bp, Artificial Sequence
  ENSG00000286662_46 (sequence is synthesized)
gttatgattttcaatttctactatttcttctgcataattagccagaatctttctatgcagaagaaacccttctaaagatt

SEQ ID NO: 844210 - DNA, 120 bp, Artificial Sequence
  ENSG00000286662_47 (sequence is synthesized)
gggcagagggagtcaaaagtatgaagggagaagcagcccacgctcgtcctccaggccctccccacgctgccagggagcagcgtccgtgtcacctgaggaggcagatgctcccctgccctg

SEQ ID NO: 844211 - DNA, 120 bp, Artificial Sequence
  ENSG00000286662_48 (sequence is synthesized)
gcgtgtggagggaagacggcgccaaggcggaggcacgggagcatctttcattcctccccccatgcttgctgcttcatcaacatcaacgtcctgctgccagggctgatgaatggctcagga

SEQ ID NO: 844212 - DNA, 120 bp, Artificial Sequence
  ENSG00000286662_49 (sequence is synthesized)
gcgtcacaactcggtggctcttatgccacgtgcgctggcagctgtcaccgccgtcctacctgtgacccacacgtgtcttcctgaaatggccgaaaacaagctttcccctcaaatgttgct

SEQ ID NO: 844213 - DNA, 120 bp, Artificial Sequence
  ENSG00000286662_50 (sequence is synthesized)
ttcttctcagagtcaatcagcaatgctaatcaagtctgtgtgcttagctaggattttggaccttcttacgtgaaggcgtctgaaaggaggtcccctttcctgaaggctgactgttgcttt

SEQ ID NO: 844214 - DNA, 120 bp, Artificial Sequence
  ENSG00000286662_51 (sequence is synthesized)
ttacgttgactgaagtagatcatatttggcaaagctgtaggtgacagggaaagttaatcaactggaaggaaatggaagggaagaatgtggtctacctcttctctctctacttgaaattca

SEQ ID NO: 844215 - DNA, 120 bp, Artificial Sequence
  ENSG00000286662_52 (sequence is synthesized)
agcaagaccttggagaatacaggtggagctggacctgcaaccggtgattgaactaccagtttctgaaggccacccattcacacctatttcccgctactccaggctatctgcagctggagg

SEQ ID NO: 844216 - DNA, 120 bp, Artificial Sequence
  ENSG00000286662_53 (sequence is synthesized)
aggccgtgagtcaccgttttgagcctagagatgtaaacagaagttgctgggaagagcttctaggaagcctctgtaagatgattatctcagttgggtctgtctttttgctttgtccatccc

SEQ ID NO: 844217 - DNA, 120 bp, Artificial Sequence
  ENSG00000286662_54 (sequence is synthesized)
ttttttaactttggagtgtgcgtgtgatacaggaggtgaagcagtcattttgtgactatgaggagataaagccacatgggtaagttggcagagcaggacactgggagaagcatgtgcttc

SEQ ID NO: 844218 - DNA, 120 bp, Artificial Sequence
  ENSG00000286662_55 (sequence is synthesized)
tgttggcaatgagggatcatcatactattcctaaacagtctaagtcctgaggtctcgtgtgtgttcttacttgttcattactctactttttcaggttgtatattacttacagttcaatac

SEQ ID NO: 844219 - DNA, 120 bp, Artificial Sequence
  ENSG00000286662_56 (sequence is synthesized)
aatctaaaccttaaccagtcattctcctagttagactgtgagctcctagagggaagtttggcatgtgatatgtttcttatggtccctgcagtatctagcacgtgctagtagggatcaggt

SEQ ID NO: 844220 - DNA, 120 bp, Artificial Sequence
  ENSG00000286662_57 (sequence is synthesized)
atgcaatactcatctattgattgatttgggatacagtgagttgaggtaagagagaaacagaagtcaactccaacacgtcaaagaataaagtttgctgttggtctcaacagccccagggca

SEQ ID NO: 844221 - DNA, 120 bp, Artificial Sequence
  ENSG00000286662_58 (sequence is synthesized)
cagtattccttccccatctctggtgtgaaaaaaaaattacgaccagagttttacatctttttctttccgatatttccagaaaagtatgccctagtctaatttgcaggtggaaattgaaaa

SEQ ID NO: 844222 - DNA, 120 bp, Artificial Sequence
  ENSG00000286662_59 (sequence is synthesized)
tgtatctcgctgacctcaagggatgatattcaggagcttcagggaatcttcagctaatgggagaagcacaagcagattaatggatcccaaagacaaaatgcctatcctagctcaaatgac

SEQ ID NO: 844223 - DNA, 120 bp, Artificial Sequence
  ENSG00000286662_60 (sequence is synthesized)
atctcgtggatcttgaaaagtggagctttctgtgcccatcttcagaaagagacatcagacaatcttaacatttctgcagctgaacatgggatgagaagagggcaatcttccagtgggtcc

SEQ ID NO: 844224 - DNA, 120 bp, Artificial Sequence
  ENSG00000286662_61 (sequence is synthesized)
accacattttctttccaattgagccaattcatggtctcttctggcaactgcaaggccagatgtgaatttaccactttattgagtgaagcggtctgggcattgtgagactcacatatgcac

SEQ ID NO: 844225 - DNA, 120 bp, Artificial Sequence
  ENSG00000286662_62 (sequence is synthesized)
ccagaggggaagggaccctcactctgggaatggaaatcaattcataattgtacccagacaaatggggcacacacttcagatctattacaggatttagtcggaatcagaagaacaaaggca

SEQ ID NO: 844226 - DNA, 120 bp, Artificial Sequence
  ENSG00000286662_63 (sequence is synthesized)
taaagtagaaacacattcatatgccaggcacaggtaggggctggggagggtagaaagtccagggttcctggccggcgaagaagggctctgctcagcatctcatgctggagtgcaagagta

SEQ ID NO: 844227 - DNA, 120 bp, Artificial Sequence
  ENSG00000286662_64 (sequence is synthesized)
taaaataaggtaactaaggacatgaagcttggccgcctgcaccatttgaaaaaagaaaaatcaaactgtgttttatgagtttttctggctgagtgggctgatggtaaaagtgattgcata

SEQ ID NO: 844228 - DNA, 120 bp, Artificial Sequence
  ENSG00000286662_65 (sequence is synthesized)
agtgaataaattgaaatatgtatcctggttgtgtcaaaagcaaaaataattattttgttcttggtgagatatagtgtttaactgccaacacatcaacccaaataaaaaggaaatctgcct

SEQ ID NO: 844229 - DNA, 120 bp, Artificial Sequence
  ENSG00000286662_66 (sequence is synthesized)
aaagctaacgagagttcttttgcctaatagctgccacattagaaaagtgtttcactgaactagaagaaggaaaataaaataaaatcttggacaaaaaggatggtagagaacagagatggt

SEQ ID NO: 844230 - DNA, 120 bp, Artificial Sequence
  ENSG00000286662_67 (sequence is synthesized)
agactgccttgaagaaattgaagtttgcagcttgggctgctgctctcattcattttaatacagacacgactaacatctcatccaaaatgtgaaacatagcttttaatttagtaccatggg

SEQ ID NO: 844231 - DNA, 120 bp, Artificial Sequence
  ENSG00000286662_68 (sequence is synthesized)
ttcctgcaggactgagtcgacacactgggaaatatgtcaattaagcttgtttcccaggaagaaacagggaggtcttgcaaacaacccaggatagaaggagcccaggttttgaagggggtg

SEQ ID NO: 844232 - DNA, 120 bp, Artificial Sequence
  ENSG00000286663_0 (sequence is synthesized)
tgtttttacttgtacattgtcattttctatacctaattccaagccttcacaaacttaaagataagggtcctttagaccaggggtcctcaacctccagaccacagatgggtaatagtcctt

SEQ ID NO: 844233 - DNA, 120 bp, Artificial Sequence
  ENSG00000286663_1 (sequence is synthesized)
ggactgttaggaactgagctacacagcaggagatgaggggcaggcaagcaagcaaaacttcatctgtactgcatttacagcagctccccattgctcgcattacggcctgagctcactgcc

SEQ ID NO: 844234 - DNA, 120 bp, Artificial Sequence
  ENSG00000286663_2 (sequence is synthesized)
agatcagtggcagcattagattctcacaggagcatgaaccctattgtgagctgcgcatgcaacggatgtagcttgcaccctccttatgataacctaatgcctgaggatctgtcactgtct

SEQ ID NO: 844235 - DNA, 120 bp, Artificial Sequence
  ENSG00000286663_3 (sequence is synthesized)
gtctcccatcacccctggatggagccatctaattgtagaaaaacaagctcagggcccccactgattctatattatgaaatcattaaatcctgcaattccaggagtcattttattctccat

SEQ ID NO: 844236 - DNA, 120 bp, Artificial Sequence
  ENSG00000286663_4 (sequence is synthesized)
taagctgtcaggttgggagagcattgaggagtcatcttcatgccaaatcatcttatttagccaaataccattgaaacatttgagttctttcctggacctggacctggccaaatacctaaa

SEQ ID NO: 844237 - DNA, 120 bp, Artificial Sequence
  ENSG00000286663_5 (sequence is synthesized)
gccattaacagatcttctccctcaaagaaggcatgtaaatgttttacattattgtcaaactgtaaacaataatgaaccagctctttaggtaaaagaagttaaacaatactactactaata

SEQ ID NO: 844238 - DNA, 120 bp, Artificial Sequence
  ENSG00000286663_6 (sequence is synthesized)
ataatttgcctctataaagggactttttccaaactctcgaggaaccagctgtagctgggtagcatccttccctcaggagtctgagaacacattctgaggggcccctgttctgtgcttcta

SEQ ID NO: 844239 - DNA, 120 bp, Artificial Sequence
  ENSG00000286663_7 (sequence is synthesized)
ggttctgataattcaaccactacttctttccccaatctagggaggtagatgcctcctacagttactattagtagtaacctcatcagggtttttttggtttattttttgtttgtttacaaa

SEQ ID NO: 844240 - DNA, 120 bp, Artificial Sequence
  ENSG00000286660_0 (sequence is synthesized)
tgagtcagtggctacatagcgagagtgtcctaggcagaggaaacagcttctacaaaagccctgaagcaagagaatgtttgaagtgttcaagaataaacaggagatgcagaatgaatggaa

SEQ ID NO: 844241 - DNA, 120 bp, Artificial Sequence
  ENSG00000286660_1 (sequence is synthesized)
tgaggcagtcggatacaagagagactaatatggggcagcactgaagactgctgacagcagccacatgagtgagctcagagtggacacaacagccccttcagaggctgcagggatggcaga

SEQ ID NO: 844242 - DNA, 120 bp, Artificial Sequence
  ENSG00000286660_2 (sequence is synthesized)
cagcctgactgcaatgtcgtgaaagatgctgaggcagaaccatgcagcaaagtcattcccagattcctgactctcagaaaatgtgtgagataataaatgctattattttaagctgctaaa

SEQ ID NO: 844243 - DNA, 120 bp, Artificial Sequence
  ENSG00000286661_0 (sequence is synthesized)
tggccacatcaggggcaggagaggaggggactttgaaggatatggacagaagcctcaaaataccttttatgcctttcatggcccatgatgcaaacttgtcacgatgttgtcaactaatac

SEQ ID NO: 844244 - DNA, 120 bp, Artificial Sequence
  ENSG00000286661_1 (sequence is synthesized)
aagccctgggtcggaaagcctgtttaataaatcgccagggccagaggtgtaatgcagagggataaacaagtttgttaagtggatgacccttgtgagtcttttttcaggttctgctcagat

SEQ ID NO: 844245 - DNA, 120 bp, Artificial Sequence
  ENSG00000286661_2 (sequence is synthesized)
gacacctgctccacaaagttccttggaccctccctcacccgcaaatgccctcatgtggcgttcctcctgcacttccttcagctgttctcattttctatatgttacaactatttagaaagg

SEQ ID NO: 844246 - DNA, 120 bp, Artificial Sequence
  ENSG00000286661_3 (sequence is synthesized)
tctcggcttcctcactgggcctagatccttgagggcagagttttacttgtctatgccggcctgtcagtgtggtgctcatggtgggttcttagtatctgaaaaagggaaaggaggaggaag

SEQ ID NO: 844247 - DNA, 120 bp, Artificial Sequence
  ENSG00000286661_4 (sequence is synthesized)
ctggaaccctaactggggaaaggatcaaataactaaaaattcagcttcttctggcctgcaaagtgtcagggatctataactgtgagtgctctgagattaggccacagacttttgctgtct

SEQ ID NO: 844248 - DNA, 120 bp, Artificial Sequence
  ENSG00000286661_5 (sequence is synthesized)
caacattttctcctcttgggacatttcctttgagttgatgttctgccagtttctacattcaggctcagcctatggtgccaacctgtcagtgtggtgccagcgaggtgctctcagagggag

SEQ ID NO: 844249 - DNA, 120 bp, Artificial Sequence
  ENSG00000286661_6 (sequence is synthesized)
caaggcaagaagaggtgacgagagccccagacacagtctcacactgaggcatgggcagcagtaaatgaggagaggctgggtgaggaccagaggaccaggagtccaggccaggatgcgaca

SEQ ID NO: 844250 - DNA, 120 bp, Artificial Sequence
  ENSG00000286661_7 (sequence is synthesized)
cagaaaaggcaagggttagatgggcaaggtgtgacatcagagcccggcaagaggtctctggctgggctttagggtcgctacatttggcaaatacaaataaagaatgccctcacctcacac

SEQ ID NO: 844251 - DNA, 120 bp, Artificial Sequence
  ENSG00000286661_8 (sequence is synthesized)
cctttaggatggctatttgggaaaacgaaaacatcagatagacgcgttggtgaggacgtggagaaatggaatcctcgtgcacggctggtgggagtgtaaaatgtgcagccagcctggaaa

SEQ ID NO: 844252 - DNA, 120 bp, Artificial Sequence
  ENSG00000286661_9 (sequence is synthesized)
acagtctggcagttcctcgaaaaataaaacagagaatggctgtatgattcagcatcccactgctgagaatagacccacaagaaccgaaagcagagcctcaaagagacctttgcacacccg

SEQ ID NO: 844253 - DNA, 120 bp, Artificial Sequence
  ENSG00000286661_10 (sequence is synthesized)
tgttcacagcagcgttcctcacagcagctacagcgtggaagcaacccagagtccatcaacgaatgaatggataagcaaaacgtggctcgatggaacagtcttcagtcttacagaggaaaa

SEQ ID NO: 844254 - DNA, 120 bp, Artificial Sequence
  ENSG00000286661_11 (sequence is synthesized)
aaattctgacacatcctacaacatatgaatgaaccttgaggatattacactaagtgaaataagccagtcacaaaagggcaaatactgtgtaattccacttatctgcagtgtttagaggag

SEQ ID NO: 844255 - DNA, 120 bp, Artificial Sequence
  ENSG00000286661_12 (sequence is synthesized)
tcaaaatcacagatacacaaagtagcatggtggttgccggggactggggagttgggggaatgtagagttattgtttagtagacataaggtttcaattttacaagataaaagagctcgaga

SEQ ID NO: 844256 - DNA, 120 bp, Artificial Sequence
  ENSG00000286661_13 (sequence is synthesized)
ataaaagagctcgagaggccgggcatggtggcttgcgcctgtattcccagcctttgggaggccgaggcgagaggatcacttgagtcacggagcaggagaccagcctgggcaacacagcaa

SEQ ID NO: 844257 - DNA, 120 bp, Artificial Sequence
  ENSG00000286661_14 (sequence is synthesized)
aacaaataagcaaacaaacaaagttctggagatggatggtgctgatggttgcacacatcatgaatgtatttagtaccactaactgtacacttgaaattggttaagatggtaaacatttta

SEQ ID NO: 844258 - DNA, 120 bp, Artificial Sequence
  ENSG00000286661_15 (sequence is synthesized)
ccacagtttgaaaattgggaaaaaatgcagtgcccacagtgaaatttgaattttaaacacgaataattctttagtatcattatatttcatgcaacattgggtatgtatgtatactaaaaa

SEQ ID NO: 844259 - DNA, 120 bp, Artificial Sequence
  ENSG00000286661_16 (sequence is synthesized)
actattcattgatctgaaatttcatcaggcatcctgtattatgtctggcaacccggacacaggtcagggttctatagtgaatggtgatcatgattcatacacaggctgagggaattgttc

SEQ ID NO: 844260 - DNA, 120 bp, Artificial Sequence
  ENSG00000286661_17 (sequence is synthesized)
acagaagcgaggagaggagcagagaggagctggctgtgaagagagagaatatatgttcttcccattttcctctccagtcctggtaaataaaacaacagtcaaaatgtatctactgactct

SEQ ID NO: 844261 - DNA, 120 bp, Artificial Sequence
  ENSG00000286661_18 (sequence is synthesized)
ccaggcaagtcagccaccccagcactactcatgtttatctcttcaagagcacttacttgttattggatgtttatctgcgacacgtctgcctcccccttgaggagaaagtaaccaaagttt

SEQ ID NO: 844262 - DNA, 120 bp, Artificial Sequence
  ENSG00000286661_19 (sequence is synthesized)
tgagtcagagatctaggctgaaacaagactctgaaacttaaggtgtgtgactttagcaagttatttatcgtctgtgagcctcagtgttccacgaatgtgaataccatcaagatattctaa

SEQ ID NO: 844263 - DNA, 120 bp, Artificial Sequence
  ENSG00000286661_20 (sequence is synthesized)
taaataaatcaagtaatgtagataaaacacatagcaggtgcccagaaatattaagcacaacatctctgaagacctggagtgcagggacccagtcctaacagtacccgcgctgcagagtcc

SEQ ID NO: 844264 - DNA, 67 bp, Artificial Sequence
  ENSG00000286661_21 (sequence is synthesized)
gcagggacccagtcctaacagtacccgcgctgcagagtcctaacagtacccgcgctgcagagtcctc

SEQ ID NO: 844265 - DNA, 120 bp, Artificial Sequence
  ENSG00000286661_22 (sequence is synthesized)
tcccccagcagtgccagcccaccagcgatgtgctcgatttctcaccgggccttagctgccttcccgctcggcagggctcgggacccgcagcccgccctgcctgagcttcccaccccctcc

SEQ ID NO: 844266 - DNA, 88 bp, Artificial Sequence
  ENSG00000286661_23 (sequence is synthesized)
ggacccgcagcccgccctgcctgagctgggcctccccgacgagcgccaccccctgctccaccatgcccagtcccatcgaccacccaag

SEQ ID NO: 844267 - DNA, 69 bp, Artificial Sequence
  ENSG00000286668_0 (sequence is synthesized)
ctggtctccaactcctgaccccccatcacgcccggccatctggtaattttctaaacagttccatgagaa

SEQ ID NO: 844268 - DNA, 120 bp, Artificial Sequence
  ENSG00000286668_1 (sequence is synthesized)
gcccggccatctggtaattttctaaacagttccatgagaacatgaaattgcccatgcttatctccagagacagtgactggacaccaaacctcttgtgcattggattcttctgtcaggatt

SEQ ID NO: 844269 - DNA, 120 bp, Artificial Sequence
  ENSG00000286668_2 (sequence is synthesized)
tctttagcctccttgcagaggctcttgacctgggacttggatagctactttctctggttcagctgcttgatccactggtccagctccttggagaacacctcatccatgatgccacctgcc

SEQ ID NO: 844270 - DNA, 120 bp, Artificial Sequence
  ENSG00000286668_3 (sequence is synthesized)
cgagctggctgctgcacacgggccacatgcatctgtggccactgacagttgcttggtgctgctgctggcccacagactctccacagtgctcggccaacaactactgtgtctcttccctac

SEQ ID NO: 844271 - DNA, 120 bp, Artificial Sequence
  ENSG00000286668_4 (sequence is synthesized)
aaagcaaagcaaagcaaagcaaagaaagaaaagaatccatttccaaaagctcacagcataccacagttcccaatgactgcatcttttttggctttttcttatctaatgggaacggaatga

SEQ ID NO: 844272 - DNA, 120 bp, Artificial Sequence
  ENSG00000286668_5 (sequence is synthesized)
actggatcagggtttctctaacaatgttggagaggaagtcaggtttatttaaaatttaacttcttttggctctgttaccactggccttggctgagccatggctcgagggcatccgaaagc

SEQ ID NO: 844273 - DNA, 120 bp, Artificial Sequence
  ENSG00000286668_6 (sequence is synthesized)
aatgagatccgggcatggtttccaggagagtccctgggagcaagttcagtgtccctgaacttgtcatcatgaaaattgcagtggccttgagggttaatcactgaagttagcatgtaaagc

SEQ ID NO: 844274 - DNA, 120 bp, Artificial Sequence
  ENSG00000286668_7 (sequence is synthesized)
tgggtctgcatctgtgttgttccctctgtctctcctgatcccacacagccaagacacagagcaggtgcgcagtgtggaataaacaaaggaaagtgggcggaaagatttacagtcaccttg

SEQ ID NO: 844275 - DNA, 120 bp, Artificial Sequence
  ENSG00000286668_8 (sequence is synthesized)
aggagactgtttggcctcattgtagagacattaacagagccaaagaaagggtgtgcagcttctcaggagatttgttgctattatagtgagaaaggtttggaaaagattatgagcatgttc

SEQ ID NO: 844276 - DNA, 120 bp, Artificial Sequence
  ENSG00000286669_0 (sequence is synthesized)
tgtgggaccgtttccgggagccttaaaggggccgcgcctccgcgatggatgcgggagcggggccgactggccccccgggtgttccgcaagctcatccaacttccttctgcctgaattacc

SEQ ID NO: 844277 - DNA, 120 bp, Artificial Sequence
  ENSG00000286669_1 (sequence is synthesized)
aacttccaggaaaaggagacaccgtcctcactccctggcctctacctctttcttcaagctgtttccgcctccagcccctcattcctggtttctatcagtagatgccaagcactgggcact

SEQ ID NO: 844278 - DNA, 120 bp, Artificial Sequence
  ENSG00000286669_2 (sequence is synthesized)
cctggcgtggttcgagccccctcgtgccaatgaaaccttagagttcgctttagaagcttcagatgttctaccggccgtgggcggtggctcacacttgtaatcccagcaccttgggaggcc

SEQ ID NO: 844279 - DNA, 120 bp, Artificial Sequence
  ENSG00000286669_3 (sequence is synthesized)
cggatcacctgaggtcagaagttcgagatcagtctggccaacattgtgaaatcccgtctctacaaaaaaaattagccggttgtggtggcgcgcgcctgtaatcccagcaactcgggaggc

SEQ ID NO: 844280 - DNA, 60 bp, Artificial Sequence
  ENSG00000286669_4 (sequence is synthesized)
gcagcctagacgacagagcagaccccttctcgaaaataaaataaaatgctgggcgcagtg

SEQ ID NO: 844281 - DNA, 120 bp, Artificial Sequence
  ENSG00000275426_0 (sequence is synthesized)
gtaggtgagtagtcaaaaaacagtgtaaagttaccatctgtttattgtcttattacatattattctgtgagacaaacacttttgcaatttgcaggtaatttctgaggaatgtaacctttt

SEQ ID NO: 844282 - DNA, 120 bp, Artificial Sequence
  ENSG00000275426_1 (sequence is synthesized)
taagtaggtgtaaataatagttataaaaaaataaaattgccttcttaaacattttcaattgtacggtctagtgatgttaagtatatttacattatattgcaatgggtgtctagatttatt

SEQ ID NO: 844283 - DNA, 120 bp, Artificial Sequence
  ENSG00000275426_2 (sequence is synthesized)
actaatttttatattcttattagtgtcattaatgtctgtttctgtttgactatctaatttaatgtaatgttctcaggctttgtttttgtaagatatgtcagaatatctgttttaaaatga

SEQ ID NO: 844284 - DNA, 120 bp, Artificial Sequence
  ENSG00000275426_3 (sequence is synthesized)
aataatattctatatatatgtcacattttaaaaatccgatactgatctgtaaagggacatttgtgttgtttccaggaattgtcttttgtaaataataataaatgaacatgcatgtgtaaa

SEQ ID NO: 844285 - DNA, 120 bp, Artificial Sequence
  ENSG00000275649_0 (sequence is synthesized)
ctacaggcacctgccaccacgcccagaacatttaaggaagtttctgttttaaaccagccttggagggttttcatgacaaggaattgcacattggatgatcatttctaccttttgcaataa

SEQ ID NO: 844286 - DNA, 120 bp, Artificial Sequence
  ENSG00000275649_1 (sequence is synthesized)
ctacttcttatttgcaagttgtgtttaagtgaacaaaggcaaggaccagatttgcccgtcttctttcaagcagatgactgagtcaatcccacattacatatgaggaaactgagatctatt

SEQ ID NO: 844287 - DNA, 120 bp, Artificial Sequence
  ENSG00000275649_2 (sequence is synthesized)
aggatccagttcagaatcaccactgcacttatttctcacgtctctttcatcttcagtctggaacagttcttcagtctttccttaactttcatgactttacacttctattacaggccaatt

SEQ ID NO: 844288 - DNA, 120 bp, Artificial Sequence
  ENSG00000275649_3 (sequence is synthesized)
attttgtagaattttccttaatttgaatttgttgctttaggattagattccaattatgtattattggcaggagcatcatagaagtgatgctgtgttcttcttgctagactatcaggaggc

SEQ ID NO: 844289 - DNA, 120 bp, Artificial Sequence
  ENSG00000275649_4 (sequence is synthesized)
acacgattgcaatttgtcctattactgaggatgttcattttggttacttgattaaggtggcgcctgccagatttttccactgtgaagtgacttccttttgtaactaatgaataatttgtg

SEQ ID NO: 844290 - DNA, 120 bp, Artificial Sequence
  ENSG00000122043_0 (sequence is synthesized)
gtgctcctctggtctccaaggcaccctccccatgcgctgcttccttccacttaccgccctcgcacggcaccacatcctgagctctgcttgttccctcttcagactggcagtttttcagca

SEQ ID NO: 844291 - DNA, 120 bp, Artificial Sequence
  ENSG00000122043_1 (sequence is synthesized)
attggctaacaagctctaatttgagcgtttgggctggaccttggctcagtgggagcagacgcggagcagacgccttctcggagctgcctgtttggggaagctggtcgtttccactctagc

SEQ ID NO: 844292 - DNA, 120 bp, Artificial Sequence
  ENSG00000122043_2 (sequence is synthesized)
tcagcctcccagaacagggaagctgcaggaaagttgacaaaagcacagcaaagcagggagagcctcctcggtagagagcaacgaccagtccttctaggtcatgtggagtgggccagcttt

SEQ ID NO: 844293 - DNA, 120 bp, Artificial Sequence
  ENSG00000122043_3 (sequence is synthesized)
aatgaacctgtctaaaaggaaggaagagaaagagctcagctccttaggggaacaaggtggaccttggcagctgtctcactcctcaccagctcttcacctcagatcttgtcctgacttcct

SEQ ID NO: 844294 - DNA, 120 bp, Artificial Sequence
  ENSG00000122043_4 (sequence is synthesized)
cggcctcctggatagaagagtcaggcagagaacaaagattggtggcttcctcctgagcacactgggatgtggcattacatcggggctgctgagtgcccttaccttcagctgcccagatgc

SEQ ID NO: 844295 - DNA, 120 bp, Artificial Sequence
  ENSG00000122043_5 (sequence is synthesized)
agaggcaggtatttggctagaagttatcactgatacgtttccagaacacatggaggccaaggcagacaaaagtaaagatggaaaccagaccagtaaataagtcctttgatgaacttctga

SEQ ID NO: 844296 - DNA, 120 bp, Artificial Sequence
  ENSG00000122043_6 (sequence is synthesized)
gtctctacagatgaaggcaaagctccctcacagttgcaggcaacgtctcatcttttgtcacttctggcatgacactgcacagccacagccagtacggtatctctgcctttgcccatgtcc

SEQ ID NO: 844297 - DNA, 120 bp, Artificial Sequence
  ENSG00000122043_7 (sequence is synthesized)
tgccttctttctccctggtcggtatctcctcacctcaaccagcttggccagctccttggtcattggggttgcacccacccaggcatgtgcctggctccgcacaacctcagaagctctcag

SEQ ID NO: 844298 - DNA, 120 bp, Artificial Sequence
  ENSG00000122043_8 (sequence is synthesized)
tacagtgcaggaccagaggttgaaaccaatgaaaggttgttaaataaagagaaaatgtttaatgctgagaacaaagactaggaaagagatgtctaataagaaattttacagtgaaatacc

SEQ ID NO: 844299 - DNA, 120 bp, Artificial Sequence
  ENSG00000122043_9 (sequence is synthesized)
gaacaaagattggtggcttcctcctgagcacactgggatgtggcattacatcggggctgctgagtgcccttaccttcagctgcccagatgcagaggcaggtgggtggggccagggagttt

SEQ ID NO: 844300 - DNA, 120 bp, Artificial Sequence
  ENSG00000122043_10 (sequence is synthesized)
gatgcttcacctccttaagtgagaactgcatcatgcaaacagtcagctctcagccagatggcaccacaaggttctgtgaatttctctcagcacaacaagcacatctgccagttgggttcc

SEQ ID NO: 844301 - DNA, 120 bp, Artificial Sequence
  ENSG00000122043_11 (sequence is synthesized)
gagcatcctccccttgctgtgctcctctggtctccaaggcaccctccccatgcgctgcttccttccacttaccgccctcgcacggcaccacatcctgagctctgcttgttccctcttcag

SEQ ID NO: 844302 - DNA, 120 bp, Artificial Sequence
  ENSG00000122043_12 (sequence is synthesized)
actggcaggtggttatagaggtgtttggggtgtcagctctgaaatgctaaaaataaaaccaggctttctatcctgggatgtctcattagtttgcttacaaatgagtccccctgcagtttt

SEQ ID NO: 844303 - DNA, 120 bp, Artificial Sequence
  ENSG00000122043_13 (sequence is synthesized)
agaatgacacaaacaaaagggcaggactcatgatggaaaagaggccccatgaggaaaggctaaagagtcagaactactgaagctaaagaggaaaactcaagtaacgaaacattattgctt

SEQ ID NO: 844304 - DNA, 120 bp, Artificial Sequence
  ENSG00000122043_14 (sequence is synthesized)
tgcccagatgcagaggcagttccacaaggtactggcacaagaagagtcgtggaagactgacctggccatggcttctcatgtcccagctcaggacctgccacatcaattctccctttcctc

SEQ ID NO: 844305 - DNA, 120 bp, Artificial Sequence
  ENSG00000122043_15 (sequence is synthesized)
tggccgtcacgtgtggagtgaaattctcagaagcggctgtccctgtgcacctctctggctgtgtccagaaaatgaacatctgtttacagcttcaattttctaatgattagaatgccacaa

SEQ ID NO: 844306 - DNA, 120 bp, Artificial Sequence
  ENSG00000122043_16 (sequence is synthesized)
acaagaaaacccagaggaaagctgttgatgctgaaatgtttccttcctctacatattccatgatgcgtcctgtggggttatgcaaacagtaatatctcattaaatattctggtctcttgg

SEQ ID NO: 844307 - DNA, 120 bp, Artificial Sequence
  ENSG00000287045_0 (sequence is synthesized)
gaggaagacttcgctcaatcgtccctttccacacccagggtactggtttaagagagaaaattctctgccaatgaggacatactaacatatgaatttgggatgtgatatgatcaagcttca

SEQ ID NO: 844308 - DNA, 120 bp, Artificial Sequence
  ENSG00000287045_1 (sequence is synthesized)
aatttcataaggatatattaaaacacaaatttacagaggaaaataatccaatgacagtcaaagtcaaatacatttttggcagatgtatgaggacatacataataaagatgactgataaat

SEQ ID NO: 844309 - DNA, 120 bp, Artificial Sequence
  ENSG00000287045_2 (sequence is synthesized)
atttcccatgttatcttaatagacagtaaataataatggaaatatttagcaatcctattcacactgaaaaattccaaaagcatgctgaacactagcaaaaagaattcaaacatgaaaaat

SEQ ID NO: 844310 - DNA, 120 bp, Artificial Sequence
  ENSG00000287045_3 (sequence is synthesized)
aagaaagcgagcaagttggaaaagatacctagcaagaattcagtgactataaaaagcagatcatttttaatatgccactctaaacaatgccttctactgacagagggattttgaaatttt

SEQ ID NO: 844311 - DNA, 120 bp, Artificial Sequence
  ENSG00000287045_4 (sequence is synthesized)
ccagactgataaaacctaacagtgttgcttttgcttattttttttcaagttctaatctctcaccctaaatttctcttcgctgaaaaatctacattttttgtctattttccctctcagtta

SEQ ID NO: 844312 - DNA, 120 bp, Artificial Sequence
  ENSG00000287045_5 (sequence is synthesized)
cgtatctacatagaaaatataatctttattttattttacgggaccttcaagaagaatgaattactcatattctttgaagaatatatttgttaaatctgaaacgtcgttcattaatcacaa

SEQ ID NO: 844313 - DNA, 120 bp, Artificial Sequence
  ENSG00000287045_6 (sequence is synthesized)
aactgtaattatgaggtgacaaggacactggaactttggttatggcagtcaagcagaaaaagatcatgaaattgatttctcattctgtctcactgggaaagaagggataagtgtgagttt

SEQ ID NO: 844314 - DNA, 120 bp, Artificial Sequence
  ENSG00000287045_7 (sequence is synthesized)
tgtgagagaatgaacactgagatcatgaataccgcacatcatactctccccaccaagaagaatccctgctttctccaaaccagggcaattagcaagaaaaatcttaagattggcgccttc

SEQ ID NO: 844315 - DNA, 120 bp, Artificial Sequence
  ENSG00000287045_8 (sequence is synthesized)
ctctgacaactgcctttcccttcaacaactgccattaccactgccactgtttttactttaagttctgatactaatgtgggtgttggtatgtatgagagtgggaaaaaaagaaaggctggg

SEQ ID NO: 844316 - DNA, 120 bp, Artificial Sequence
  ENSG00000287045_9 (sequence is synthesized)
aaacaaatgagtaagaactgggtattgagaatgttttgttattatgattcatatactgtaagcttcaatgaggttcagtaaatataacatagctaattgatacaaaataatatgttatag

SEQ ID NO: 844317 - DNA, 120 bp, Artificial Sequence
  ENSG00000287045_10 (sequence is synthesized)
aacctaaatgaatcctttcaaagattacttgacattttgtcacaggagaaggataaagattttacatcaaatcatgaattccagttctcaaaattgagttctaatgtgtttacaactaca

SEQ ID NO: 844318 - DNA, 120 bp, Artificial Sequence
  ENSG00000287045_11 (sequence is synthesized)
atatcccatcattatagaaggcaaattaggtagaaattttacaaaatcaaagctttgttctgctattctaattaagttttatttgtgtttcattctatgggcatattaagagagaaataa

SEQ ID NO: 844319 - DNA, 120 bp, Artificial Sequence
  ENSG00000287045_12 (sequence is synthesized)
cacagcatgaacaatgcaaaaagtaaaatatcaacccagatggaaagaataaatggtactaataaaaagaacattcagaatgaatatatttatagagtatagaaaagtactaaatacagt

SEQ ID NO: 844320 - DNA, 120 bp, Artificial Sequence
  ENSG00000287045_13 (sequence is synthesized)
acctacattaggaggggtcaaatctgcatttcatgaagcaaaacaggaaagtattatatattatgagacagataacgatagaccacacaaaagacaaataacgaacactgtaattttttt

SEQ ID NO: 844321 - DNA, 120 bp, Artificial Sequence
  ENSG00000287045_14 (sequence is synthesized)
catgtacactaaaaaccttaaaaagagaacaatactagagtcaaactggacctttcaaaggagaaaaacacctacaaataattattttattctaatagataattcattgtccatgttggt

SEQ ID NO: 844322 - DNA, 120 bp, Artificial Sequence
  ENSG00000287045_15 (sequence is synthesized)
ggtagagctgttatgtgatcatttatgagaatattttaaatgtatgatagttttcactaacctcttatggagaaataaaagatttaccccagcattctcttttaaccaaaaccagcaacc

SEQ ID NO: 844323 - DNA, 120 bp, Artificial Sequence
  ENSG00000287045_16 (sequence is synthesized)
accacaatcccctatctctgacagtgaagtaagacaataccataagaagataaatatagcaagtcaattaaaggcagaaagaacgcaccttccagtaaattcatatcgatgtcattatta

SEQ ID NO: 844324 - DNA, 120 bp, Artificial Sequence
  ENSG00000287045_17 (sequence is synthesized)
ttcggcttgtgcaggcacgggtatgtgttaaacaaattagctacaaaagctaaattaagtttaggattgcctgaaaccacatctgcaggagtaacaaactgtttgcagcccagtttatct

SEQ ID NO: 844325 - DNA, 120 bp, Artificial Sequence
  ENSG00000287045_18 (sequence is synthesized)
gcttcttgaagcatgagtccagcacgcttcaggtcatttgtctcctaaacaataaaacaaaaatggttacaattgaagttttaattggcataatttttattggtatacatgtttataagc

SEQ ID NO: 844326 - DNA, 120 bp, Artificial Sequence
  ENSG00000287045_19 (sequence is synthesized)
atacatgtttataagcaattacttttccacaaatatatcaaataataactcaaaataagatcaaaatgtgtagtaattccaagtcaacttacccattcctttatttatttatttatttat

SEQ ID NO: 844327 - DNA, 120 bp, Artificial Sequence
  ENSG00000287045_20 (sequence is synthesized)
gattatagccgtgagccactaagcccagcccccgtgccttttaagttaaaaggaaaaaagtctctgaatttccttgctgggataactgagttatattttaccctttttgctaaaatactc

SEQ ID NO: 844328 - DNA, 120 bp, Artificial Sequence
  ENSG00000287045_21 (sequence is synthesized)
agcaaaatcctcaaatattgtatcagtaagctcctactggttgcactatagataacttattcaagaccagctagtagagtgccctctggataacaggcatagttatcatacccactgtac

SEQ ID NO: 844329 - DNA, 120 bp, Artificial Sequence
  ENSG00000287045_22 (sequence is synthesized)
actgagtgacatttccagaaggctcttcttgatgaaaaacaagttgaaatacatattttaaaaattaaaatcatagggaaaagcacctttcacaattgcaaaaccctggaaacaaatgaa

SEQ ID NO: 844330 - DNA, 120 bp, Artificial Sequence
  ENSG00000287045_23 (sequence is synthesized)
acaacccaaatacctataaacaggagagtagatgaatgaatttgtatattcacacaatgacatccaatatgggtaactcttagagatacaaggccaaaaagaagtactagaaatttaagt

SEQ ID NO: 844331 - DNA, 120 bp, Artificial Sequence
  ENSG00000287045_24 (sequence is synthesized)
ataacatgataaactttaaaggaagttaaaaagtaaaatgaagaatttaattttgtaagggatacatttggatgaagggaaactacataaaaagaaaagcagaacaacaatgaacacaag

SEQ ID NO: 844332 - DNA, 120 bp, Artificial Sequence
  ENSG00000287045_25 (sequence is synthesized)
attcaagactgtggttaccacactgggcgaaaaccgaggtgggatagggaagaactgtacagaaaatgtcacgtcaaagttttagttttcctgttagattgagagttcatgaggcttgtt

SEQ ID NO: 844333 - DNA, 120 bp, Artificial Sequence
  ENSG00000287045_26 (sequence is synthesized)
acaatttcaaaacaaacaaccacacacaaaaataaatttaaaaatgggtatgcacagacccatatgagtatatcatgaccaaagataacctacctaattctgtgcaccagagttgcaaaa

SEQ ID NO: 844334 - DNA, 120 bp, Artificial Sequence
  ENSG00000287045_27 (sequence is synthesized)
taattaatcatataaatgaaatcagagaaagcaacagattattaaattaacaaagaaaagttaccattgtagacatcaaaaaatgacaatatgtggctggacgtggtggctcatgcctgt

SEQ ID NO: 844335 - DNA, 120 bp, Artificial Sequence
  ENSG00000287044_0 (sequence is synthesized)
gggggacgcgagaggacagcggacgggaggaaggcagccgacttggggcggtgggtctgccagcgaagaggaggcgtcgggggaggaaagttgcagcgcactcgactgggcgcgcctggc

SEQ ID NO: 844336 - DNA, 120 bp, Artificial Sequence
  ENSG00000287044_1 (sequence is synthesized)
gggcttggatataagaatctatcagatacaagcatatgtcggcagcaggaatggtgctgaggaaatgtctcctggcatctttcagaagtccatttatgaaagggtctcctaactcagact

SEQ ID NO: 844337 - DNA, 120 bp, Artificial Sequence
  ENSG00000287044_2 (sequence is synthesized)
gctgaacatgacggtactgaattacaaatttacgaagaaagagaatccaggagataccaagaagctagatgttaacctgcaggattctaaatctgaggaactgtgcttggaacagtgagg

SEQ ID NO: 844338 - DNA, 120 bp, Artificial Sequence
  ENSG00000287044_3 (sequence is synthesized)
gaagaggtgtgcaaacagcagaatgtgtcaggctttttcattttacttatggcatatgtcaagggcttccaatctaaaccttcttttaccttatcaagacacaggtgtccctatgctctg

SEQ ID NO: 844339 - DNA, 120 bp, Artificial Sequence
  ENSG00000287044_4 (sequence is synthesized)
agaaacaagaatattgaaattatgtcgattaatagccctacaatgacctctaagtgttcaggtgaaaggaagagtcacacatctctcactctcaaccaaaagctagaaatgattaagctt

SEQ ID NO: 844340 - DNA, 120 bp, Artificial Sequence
  ENSG00000287044_5 (sequence is synthesized)
agtgaggaaggtatgacaaaagccacaacagacaaaaacctaggcctcttgcaacaaaaagttagctaagttatgattgaaaaggaaaagttcttgaaggaaatgaaaagtgctactcca

SEQ ID NO: 844341 - DNA, 120 bp, Artificial Sequence
  ENSG00000287044_6 (sequence is synthesized)
gtgaacacatgaaccacaagaaagcaaaacagccttattattgatatggagaaaagtttgagtgatctggatagaagatcaaaacagccacaacattctcttaagccaaagcctaatcca

SEQ ID NO: 844342 - DNA, 120 bp, Artificial Sequence
  ENSG00000287044_7 (sequence is synthesized)
tctcttaagccaaagcctaatccagagaaaggccctaactcccttcaattctatgaaggttgagagaggtgaggaagctgcagaagaaaagatggaagctagcagaggttggttcatgag

SEQ ID NO: 844343 - DNA, 120 bp, Artificial Sequence
  ENSG00000287044_8 (sequence is synthesized)
taacataaaaatgcaaggtaaagcagcaagtgctgatgcagaaggtgcaacaagttatccagaagacttagttaagatcattgatgaaggtgactacactaaacaacagattttcactgg

SEQ ID NO: 844344 - DNA, 120 bp, Artificial Sequence
  ENSG00000287044_9 (sequence is synthesized)
aaacaacagattttcactggagatgaaacagccttctgctggaagaagatgccaactaggactttcatagctagaaaggagaagtcaatgcatggcttcaaagcttcaaaggacaggctg

SEQ ID NO: 844345 - DNA, 120 bp, Artificial Sequence
  ENSG00000287044_10 (sequence is synthesized)
tgcaactgatgacttgatgttgaagcaaatgttcatttaccaatctgaaaatcccaaggcccttaagaattttgctacatctactctgcctgtgctttataaatgaaataacaaagccct

SEQ ID NO: 844346 - DNA, 120 bp, Artificial Sequence
  ENSG00000287044_11 (sequence is synthesized)
tggatggcagcacatctgtttacagtatggtttactaaatattttaagcctactgttcagagctactgcttagaagaaagattgttttcaaaagattactgctcatgacaatccacttgg

SEQ ID NO: 844347 - DNA, 120 bp, Artificial Sequence
  ENSG00000287044_12 (sequence is synthesized)
tcatcaaagagctctgatggaagtgcacaaggagataaatgttgtttccctgcctgttaacataacatccattctgcagcccatgcatgaatcaagaagtaatttcaacttgtaagtatt

SEQ ID NO: 844348 - DNA, 120 bp, Artificial Sequence
  ENSG00000287044_13 (sequence is synthesized)
tttaagaaatacattttgtaaggctatatctgccataaataccttttgtgaaaggaagagtcaatctatatagcaaccttcaacattatcttaagaaactgccacagccactccaacctt

SEQ ID NO: 844349 - DNA, 120 bp, Artificial Sequence
  ENSG00000287044_14 (sequence is synthesized)
cctttagcagtcaccatcctgattagtcagcagccatcaacatcgaggcaagaccagcaaaaagatgaccactcactgaaagttcagatgattattggcatttttagcaataaagtattt

SEQ ID NO: 844350 - DNA, 120 bp, Artificial Sequence
  ENSG00000287044_15 (sequence is synthesized)
ttttaattaaggttttctttagacataataccattgcacacttaatagactatagtatagtataaatataacctttatatgcactgagaaaccaaaagcttcctgcaactcattttattg

SEQ ID NO: 844351 - DNA, 120 bp, Artificial Sequence
  ENSG00000287044_16 (sequence is synthesized)
aaaccaaaagcttcctgcaactcattttattgcaatactgttgtattgcagtagcctagaaccaaaccctcgatatctctaaggtatgcctgtgcagatatagatagatagatagataga

SEQ ID NO: 844352 - DNA, 120 bp, Artificial Sequence
  ENSG00000287044_17 (sequence is synthesized)
tagaagaatggtgactaagggatttcaggacaagtcaagaaacaactataggctgacattttgtttgcattcaaaatgaaaattgtcttaatggcaattcatgggaaaaatatattttaa

SEQ ID NO: 844353 - DNA, 120 bp, Artificial Sequence
  ENSG00000287044_18 (sequence is synthesized)
gtcttaatggcaattcatgggaaaaatatattttaacaacatcactatttttattaatgaaaaaatgcaattttttttttttcgacagagtcttactctgttgcccagggtggagtgcag

SEQ ID NO: 844354 - DNA, 81 bp, Artificial Sequence
  ENSG00000287044_19 (sequence is synthesized)
tggcatgatcttggctcactgcaaccttctcctcttaggttcaaacaattttcatcaccatgccccggtaatttttgtatt

SEQ ID NO: 844355 - DNA, 85 bp, Artificial Sequence
  ENSG00000287044_20 (sequence is synthesized)
ccacgcccagtcaaaaactgcatttttcaaaccttcggaaccaacgtaattgtggtgggttttaagacttgtacattgtaaaata

SEQ ID NO: 844356 - DNA, 120 bp, Artificial Sequence
  ENSG00000287044_21 (sequence is synthesized)
gtaattgtggtgggttttaagacttgtacattgtaaaataatctctccatcccaacatgttcttcttacaatgtgatgttgatattccagttatcaagaagtgaagtctatgtcccactc

SEQ ID NO: 844357 - DNA, 120 bp, Artificial Sequence
  ENSG00000287044_22 (sequence is synthesized)
cttgaatgttgtgactatgatggaaatggtctatgcaataatatcctaggtgacacttgaggcagcttcttattggttggaatgcttgctccggaactctgaagtgccagttgagcattt

SEQ ID NO: 844358 - DNA, 120 bp, Artificial Sequence
  ENSG00000287044_23 (sequence is synthesized)
aattgcctggaggctactatgctgtgagaaagcttaaactatcccatacagagagaggaggccctggagaggcactgagatgacatgaagacagaggtgttgacagtccccagctgttct

SEQ ID NO: 844359 - DNA, 120 bp, Artificial Sequence
  ENSG00000287044_24 (sequence is synthesized)
agctgtagccactcttactgagggagccagaattgccagctgagcctttaccaaatccttgacctacagaaaccaggagagaataaagtaatgttttttaaacctcttttacagtcattt

SEQ ID NO: 844360 - DNA, 120 bp, Artificial Sequence
  ENSG00000287044_25 (sequence is synthesized)
tacagtaatttgttatgcagcaagagataatcagaacagcaatatctgggcacacttgagaagtagcaatgttcttcctccctgaaagtgcatcctgggttgtactgttacgcaagggct

SEQ ID NO: 844361 - DNA, 120 bp, Artificial Sequence
  ENSG00000287044_26 (sequence is synthesized)
gagggctgtttatcatctgcatccagggcatagattgcatttcccctcctcccatgctgcaggtgctaaggggctcaggagagtaaaataggtgaccaacaatcccctggaaatgagggg

SEQ ID NO: 844362 - DNA, 120 bp, Artificial Sequence
  ENSG00000287044_27 (sequence is synthesized)
tttccccaagactaaggggggtttctggatatagaactttcagtgctaacactaggacaatcctagacaatctgggatgcttggttaccctgagtgaagacccaaagactgggttgtggc

SEQ ID NO: 844363 - DNA, 120 bp, Artificial Sequence
  ENSG00000287044_28 (sequence is synthesized)
tagtataggtatagcattttgattatatatcagcaattctgaatttgattagcataaaataacacccaagaagctggtcctctagggaggcctacaaacctaggcttttgaactaacatt

SEQ ID NO: 844364 - DNA, 120 bp, Artificial Sequence
  ENSG00000287044_29 (sequence is synthesized)
tgaagaacagccctgaaaaactagcaaaagtcatggctccctgcaatgctggcatgagcaacctgttggagtctctatacagatatccctagctcatcactccaagttgtccaaacccaa

SEQ ID NO: 844365 - DNA, 120 bp, Artificial Sequence
  ENSG00000287044_30 (sequence is synthesized)
ctccccaggcctctcctttaggacctgggccctataaccaatcccaccagaggaaaatacagcattgcccaaaaacatgcattctactctctccttgcctcaagatgtcctgtgttttat

SEQ ID NO: 844366 - DNA, 120 bp, Artificial Sequence
  ENSG00000287044_31 (sequence is synthesized)
atatatactacattacttcttgagaagaaaagagatatatgaatatatatttctccccttgcctcaagatgttctgtgtttttcttgatgtcataaatgtgaaaaaatactttctttccc

SEQ ID NO: 844367 - DNA, 120 bp, Artificial Sequence
  ENSG00000287044_32 (sequence is synthesized)
ttgttcctgctataattgcgagagctcagtcacccagtaaaaaaaaaaaagaagaaggaaaaatgtccttatgcagggaacatgtcttactcaatctccctgagaaaaacctgccctact

SEQ ID NO: 844368 - DNA, 120 bp, Artificial Sequence
  ENSG00000287044_33 (sequence is synthesized)
atggtaagcaatggtcaatttttcataagctatctttactacagacatcaaatacagtgtcacaatacagtcatataaatatatttgccaggttctctatttcttttaaactacaattta

SEQ ID NO: 844369 - DNA, 120 bp, Artificial Sequence
  ENSG00000287044_34 (sequence is synthesized)
tcttatatgactcagtattcctaatttagtcaaaaagttttcttattttttgctattaaaaaataaggctaatgaaagttatacagcttcaatttctctttctgggtaactaacttctcg

SEQ ID NO: 844370 - DNA, 120 bp, Artificial Sequence
  ENSG00000287047_0 (sequence is synthesized)
gacacacaggcagatggacatggagaggaatgcaccgacaggcaccagcatgccagcaggccaccgaccaggagaactatcctatacggagtttagctggggcactgagtggccggactc

SEQ ID NO: 844371 - DNA, 120 bp, Artificial Sequence
  ENSG00000287047_1 (sequence is synthesized)
cagtggaaaaccttcccactccatccccttctggcttcctccatctgctgagagctacctccgctcaataaaaccttgcactcactctccaagcccaggtgtgatccgattcttccagtg

SEQ ID NO: 844372 - DNA, 120 bp, Artificial Sequence
  ENSG00000287047_2 (sequence is synthesized)
caccaagctttcccttcagtcatcaaactgactaacagtagaaggaaaaccaggcttttgattttggacaaactcatatacggagagaaccactttcaaaaacacagttaaaagagccta

SEQ ID NO: 844373 - DNA, 120 bp, Artificial Sequence
  ENSG00000287047_3 (sequence is synthesized)
ggacacgcacaggcagaattgtggaatatcacctcaaaaaagaaaaataagaaagcaagatcaggagaaatgagactggagcagaactgtcatgcactgatcatctctgtgtggaatgca

SEQ ID NO: 844374 - DNA, 120 bp, Artificial Sequence
  ENSG00000287047_4 (sequence is synthesized)
aaaatggatatggatattaaactccaggagatgttatttgggaaaggtgactgcaagaagtcaagctattcagagactatacctgatcatgaacattgttctacctgtaatcgtgctgag

SEQ ID NO: 844375 - DNA, 120 bp, Artificial Sequence
  ENSG00000287047_5 (sequence is synthesized)
agaataatatactggtgagggtgtgagggtgaaagtattatcacatttgcaaagtataatgcaatttctctctcatggagtaaaactctccctctctctctctctgtctgtgtctctctc

SEQ ID NO: 844376 - DNA, 120 bp, Artificial Sequence
  ENSG00000287047_6 (sequence is synthesized)
tctttcctacctccactgttctagtagaccttgacattctgaaactggcccaactgtcccatagaactgatgtttatggtttctttgaataaacacagaaattgatcctccttgtcttaa

SEQ ID NO: 844377 - DNA, 120 bp, Artificial Sequence
  ENSG00000287046_0 (sequence is synthesized)
ggactcctgtctcaagagccaagctccccagacccactaatggactaagtaatgtttctgttggtgactctaagcaaggaaaacaaataaggcaaagaaggaggtaaaagagacaagtaa

SEQ ID NO: 844378 - DNA, 120 bp, Artificial Sequence
  ENSG00000287046_1 (sequence is synthesized)
gacatctgagaacctgcaatgactcttgggaagacatcaaagcagaaaaagaaagaagtggcaagtgacaaaagagatgtttttgaccttcgtggagaagaagtttggtggtggggcagg

SEQ ID NO: 844379 - DNA, 120 bp, Artificial Sequence
  ENSG00000287046_2 (sequence is synthesized)
agcagaagttagaactcgggatttctttgttcaccttggctgcgaagccacccatatatgaccagtgttgaaactcattgcaccaggccaaccaattagtctgtattggccccataaact

SEQ ID NO: 844380 - DNA, 120 bp, Artificial Sequence
  ENSG00000287046_3 (sequence is synthesized)
ttgagctgacaagtatcaagtgaaaggttcttgagaataagactgaaaaatccttcttacttccccctacaaaaaaaattctccagccccagaatgttattccttcccaagaaacacaaa

SEQ ID NO: 844381 - DNA, 120 bp, Artificial Sequence
  ENSG00000287046_4 (sequence is synthesized)
ttaactagctgcactaatgacctccagaccaacacaaacccatttccccttgaaattaaccttctattctgaatctaaacagtgtctaattagccccaaacactggtgagctaactggaa

SEQ ID NO: 844382 - DNA, 120 bp, Artificial Sequence
  ENSG00000287046_5 (sequence is synthesized)
gagaagaatgtaggaaatcaaaacaaggggatagttttacggttggaaaaaaaaaaatagcgaaaagccatcctccaattatcctatccttctaacctccgcccccagatccttatcctg

SEQ ID NO: 844383 - DNA, 120 bp, Artificial Sequence
  ENSG00000287046_6 (sequence is synthesized)
catcttcatttgtcttcctttccgtaaaccttgtaaaggagtctgcttttcagacaaatatttttcccagctcatttgacacctagaaggcaggaaaaatattgcccatcacgataaata

SEQ ID NO: 844384 - DNA, 120 bp, Artificial Sequence
  ENSG00000287046_7 (sequence is synthesized)
gtgactaaatcatttagagaccaaggtattctgtctcattctcattaggaaaaaaaaatattccaataatctcattatcccagtgtgaataacagtaaaaaagcaccaagactaatgact

SEQ ID NO: 844385 - DNA, 120 bp, Artificial Sequence
  ENSG00000287046_8 (sequence is synthesized)
tcttccgcgcttgcctccgcagataccagcccaggccgtgcttttataggcaatgcttgggtaatggagtctcccttagcagcgatcctgtagcatctgctgctctgaaagccctgccta

SEQ ID NO: 844386 - DNA, 120 bp, Artificial Sequence
  ENSG00000287046_9 (sequence is synthesized)
acacattctgctttgtctgcagcaaggtttacacacacccctggactccaaagactcttttttatgtactttttaaaaaactaactccaatggaaaaagaatgtgtcatggcatgttaaa

SEQ ID NO: 844387 - DNA, 120 bp, Artificial Sequence
  ENSG00000287046_10 (sequence is synthesized)
ctttatggaaattcttctggagaataacataatttcacggtgcattactctgaaatgacctagtacttgaacaattaatttttaaggtgtagcattgacttccccttgctgtatttaacc

SEQ ID NO: 844388 - DNA, 120 bp, Artificial Sequence
  ENSG00000287046_11 (sequence is synthesized)
catatctgaaattgtcaacaatgccaagggttggacaatgagttgggagaagagcaggagcctgaaaattactccctatctactatgttttcttttatcagacataatgcttccctcttt

SEQ ID NO: 844389 - DNA, 120 bp, Artificial Sequence
  ENSG00000287046_12 (sequence is synthesized)
ggttcaaaaatgaaaagagaagggagcaggtactttagttagggacacttcataggcagcacagcctggcaggtaaatagtgcagtcctggagacataaactcgacgtcttacctttgtc

SEQ ID NO: 844390 - DNA, 120 bp, Artificial Sequence
  ENSG00000287046_13 (sequence is synthesized)
attaatttactgtgtagccttagagaaactcctttttctctctgtagctaaaatgggggaaggagaggttttgtttgttatgcccccaaaaggaattcagtgatagaaaatgaatagatg

SEQ ID NO: 844391 - DNA, 120 bp, Artificial Sequence
  ENSG00000287041_0 (sequence is synthesized)
gcggtttaatggctccaagaagagcgattgtctctcattaaggaggctgcaacactctcactgtctaactccctcccacgcagctcacaacttcattctgccggagaacaggctgccaag

SEQ ID NO: 844392 - DNA, 120 bp, Artificial Sequence
  ENSG00000287041_1 (sequence is synthesized)
aggctccgggaacctgcgggcaagctgagctggaggaagaaaacagaaaggaggagggcctttgtaaccaagatctgaaatgtgctggggcacacaccccgccattatcttaacgtttga

SEQ ID NO: 844393 - DNA, 120 bp, Artificial Sequence
  ENSG00000287041_2 (sequence is synthesized)
agagcgggtcgggggagcctttgctgaaacccttaggtggtctctcaagttgccacatcaaacctctgtgcacaaagggcatttgtcgcctcctgtttccctggctggaagggaggaggc

SEQ ID NO: 844394 - DNA, 120 bp, Artificial Sequence
  ENSG00000287041_3 (sequence is synthesized)
ctccagtgtgcaggaggtcagatggacgcctgggatctcagctcagcaacccagcctggccgcatagcctctttctgaggagcagcagaacccccgagccacagcgggcttccacccaca

SEQ ID NO: 844395 - DNA, 120 bp, Artificial Sequence
  ENSG00000287041_4 (sequence is synthesized)
caaatgtgcccagcagtctagcacctgtcacctggggtcatcctgctcttcttggccacgtgaggtgctggtcaccttacccaacctgcggcctctacacagagaggccttgggggagag

SEQ ID NO: 844396 - DNA, 120 bp, Artificial Sequence
  ENSG00000287041_5 (sequence is synthesized)
gaaaagcttctccagtgattgatgtcagcagctcaccgaggtaagagcaatactctgtctctgaaagtatcccgggaactaatttcccttaatcaaatgaagggccttaggaggagccac

SEQ ID NO: 844397 - DNA, 120 bp, Artificial Sequence
  ENSG00000287041_6 (sequence is synthesized)
gaggcagaaatgaaaataaatctgaagaataccaaattctgtgaggagtttgaaagacctgcattaaaaaagggcactgtaccttcaggactgcagctctggcaatgttccatatgcagc

SEQ ID NO: 844398 - DNA, 120 bp, Artificial Sequence
  ENSG00000287041_7 (sequence is synthesized)
tattaatatgcaaaaaatgccttcataaatacttgattctgttcacagtggggaagcagttcatttgaaagaggaaatgggagcttggagttgaaacatgtctggttgtctcctttttct

SEQ ID NO: 844399 - DNA, 120 bp, Artificial Sequence
  ENSG00000287041_8 (sequence is synthesized)
tttttcattgctctcttttcatctccacatttccccttgtagttttcttacccctgcccccaccacctcaccccctcttccaactcctaggaagttgctgatatcagttgctactctcgt

SEQ ID NO: 844400 - DNA, 120 bp, Artificial Sequence
  ENSG00000287041_9 (sequence is synthesized)
ttcttttgatggattcgctgcctaggccccgctccttgggtcaggtgtggaaggggtgccttgggaaccattcccaccatttgccatcatcgtgtgctggaggaaggagcctaaccgttt

SEQ ID NO: 844401 - DNA, 120 bp, Artificial Sequence
  ENSG00000287041_10 (sequence is synthesized)
ctgctcccactgcagcttggacagcctctgaggagacaaggtgaaggctctcccatcacagcggtagggcctctgcagaagcctccagcccagggaacgccgtcaccccagcctctgcag

SEQ ID NO: 844402 - DNA, 120 bp, Artificial Sequence
  ENSG00000287041_11 (sequence is synthesized)
agcaccctgtggctttctctccaacccacacgccagagattgttttcaaaatctaggtctgcgacttctcattagagggtggtaataccagaatatccacctttgacatgtcttcccctc

SEQ ID NO: 844403 - DNA, 120 bp, Artificial Sequence
  ENSG00000287041_12 (sequence is synthesized)
gctcagctagcagggtgataaaagtacaaatctttcatgtgactgaacccctaatagggtcagatcccaaggaagggagggagggggcagccagtgggggaactgatggaaaggaacggt

SEQ ID NO: 844404 - DNA, 120 bp, Artificial Sequence
  ENSG00000287041_13 (sequence is synthesized)
gctgctaagatcagtattgtgatgtcctctgcttcagggtgggaaaggccgcagggaaggaatcccctggattgccagtggcccatcaaggtagggaactgaaatcagctggacagaaat

SEQ ID NO: 844405 - DNA, 120 bp, Artificial Sequence
  ENSG00000287041_14 (sequence is synthesized)
ttgttctaaatgtgttccagatgctttataataaacatgaaattagtcattgccatggagtaggctgaggaagtagttaaaactgaagtcagtgattaatctaataagaggccattagcc

SEQ ID NO: 844406 - DNA, 120 bp, Artificial Sequence
  ENSG00000287041_15 (sequence is synthesized)
tcgagaagtaagcgggggtgcaggaggccaggaagtcacccccacctccctcccaccctgttttctctgtgtttggggctggtggggctccctagacttctcctcagatgccctttcttt

SEQ ID NO: 844407 - DNA, 120 bp, Artificial Sequence
  ENSG00000287041_16 (sequence is synthesized)
ccagggctgcttctaaaggaattgggactactgcgacttggacaaaccaatgggttctggtgggagccaccccatcatttcacaaaggaggcaggtgcatgggcttctcagggagctgac

SEQ ID NO: 844408 - DNA, 120 bp, Artificial Sequence
  ENSG00000287041_17 (sequence is synthesized)
tttccacagcctcacggggggaaccagcatgagagtttaagacccctcgctctggtgttccttcttctgactacaaagttaacaattcaacctaggatttaatgtgacatggttgagccc

SEQ ID NO: 844409 - DNA, 120 bp, Artificial Sequence
  ENSG00000287041_18 (sequence is synthesized)
gcgtgagccactgcacctggctgagcctctctttcattgcaggtgatagtagctcttttggaatagaaccgtggggctgtgtgaatttggggtgtgtttagggtatgtgaggcctttgca

SEQ ID NO: 844410 - DNA, 120 bp, Artificial Sequence
  ENSG00000287041_19 (sequence is synthesized)
tggcctttgggttgcagaattatcaaaatacaccatattatgttttccttagtcacacactctttcaaaaactctgtctctagatcccgtaaatgggatgtctgcaaagtgggcatttaa

SEQ ID NO: 844411 - DNA, 120 bp, Artificial Sequence
  ENSG00000287041_20 (sequence is synthesized)
aatatgcaaatgttggttctgcagctccttggcagcagggaggagccgctcagctgcgtttcacctcagtggaggcctgacccaggcctagggttgtcacagagagttcaggtcctacct

SEQ ID NO: 844412 - DNA, 120 bp, Artificial Sequence
  ENSG00000287041_21 (sequence is synthesized)
cagagcccagctcaggcacgcagatgaaagcaaacccgtttctttatcattatgtataatgagtgctggggaagaagagatagctaggctgtggcaggaaggaaggtggacagaatggag

SEQ ID NO: 844413 - DNA, 120 bp, Artificial Sequence
  ENSG00000287041_22 (sequence is synthesized)
aagtcaagatcatggcctggaggtgtcacacagtaggatgagacctgggagtcccctggagctgcatgtgctgcctctgcctcaggttctccgaggccctggattcagttctaggaattc

SEQ ID NO: 844414 - DNA, 120 bp, Artificial Sequence
  ENSG00000287041_23 (sequence is synthesized)
ccctgagttgtctctctagagagaatttggagacagttccagcttcaaagcttccaaggaaggaacaaacttataaatatttgtgaacatatgtccttgaaccactaatagatattcttt

SEQ ID NO: 844415 - DNA, 79 bp, Artificial Sequence
  ENSG00000287041_24 (sequence is synthesized)
ttgtgaacatatgtccttgaaccactaatagatattgattctggctgcagcatgatctcagctcactgcaacctccaac

SEQ ID NO: 844416 - DNA, 120 bp, Artificial Sequence
  ENSG00000287041_25 (sequence is synthesized)
gctgggattgcaggcatgagccactgtgactggcccgctaatagaaattcttaatgtatctagatgaagcaccatcctcctttcttcatgattacctttgcactttgtttttcttaattg

SEQ ID NO: 844417 - DNA, 120 bp, Artificial Sequence
  ENSG00000287041_26 (sequence is synthesized)
cactttgtttttcttaattgctaatgtttatctctaattacgaattactaattttacgaatgaaaactagtgcctactgcctcactggatgccacctttctgtgttcccttattcccttt

SEQ ID NO: 844418 - DNA, 120 bp, Artificial Sequence
  ENSG00000287041_27 (sequence is synthesized)
ctgactttgcagaagtcagggaaagaccttgagcttattcacacaagtaaagagccaaataatacagtccaagttaagacattccaagtctaagagtaaaggaacctctgtgatttcata

SEQ ID NO: 844419 - DNA, 120 bp, Artificial Sequence
  ENSG00000287041_28 (sequence is synthesized)
gtctacttgtctcattttactgattaggcaaatgaggcccagagaggtaaagagtctcactgaggggcacacagcaagctgaaacaagaacccaagagttgtgactcctagtgtcatcct

SEQ ID NO: 844420 - DNA, 120 bp, Artificial Sequence
  ENSG00000287041_29 (sequence is synthesized)
cattcagagtcaatactatacctgcttctctgttgtttgggtcaacggtgaggtttcataaaggttcatgtgaagattggctctaggttcagtgtttgctgtagtgaaaatcaaagagga

SEQ ID NO: 844421 - DNA, 120 bp, Artificial Sequence
  ENSG00000287041_30 (sequence is synthesized)
aaaaagatcaaggtggtcagatctggatctcatgactttttatatataccatacacacacacacacctagttcatatgtatgtaagattataagcacatatacacccatggcattcataa

SEQ ID NO: 844422 - DNA, 120 bp, Artificial Sequence
  ENSG00000287041_31 (sequence is synthesized)
tttactcaccaaaaaacacctgtaacctctataggcatagcctaaacaccatgttaaacatagtgttaagaccttatattcaaacatatattattcttgttttggttgctctttaaaaga

SEQ ID NO: 844423 - DNA, 120 bp, Artificial Sequence
  ENSG00000287041_32 (sequence is synthesized)
acaaaagtaaattctttatgctattaaaattcagataaagctgaaattaaaaaggaaatattgatggaaaaaaatctgctgatgctgttgagtataaattttgtatgactgcacttcact

SEQ ID NO: 844424 - DNA, 120 bp, Artificial Sequence
  ENSG00000287041_33 (sequence is synthesized)
gaagtaggaaaaggcttctgcaaacttccaaatagagagatcagaggcttccctttttcctcataatgtggaggggcaagaggaagggtggaaacatgaatcaaacaaaggcaaacgcca

SEQ ID NO: 844425 - DNA, 120 bp, Artificial Sequence
  ENSG00000287041_34 (sequence is synthesized)
aagtggggatggagggaggggactaacagaaaccatggaaaccgcggagccagccgggaagaaggcaccacccggacaccagcatggggctgtcgtgtgatggccatgactcccctccat

SEQ ID NO: 844426 - DNA, 120 bp, Artificial Sequence
  ENSG00000287041_35 (sequence is synthesized)
gttgtcattgtcaatgttctctataggtgtggcagctgaggtgcaaaaggtatagtaacccactcaaagttgtaccactagtgaggttttgagtaaggatttccctccaagactgcccga

SEQ ID NO: 844427 - DNA, 120 bp, Artificial Sequence
  ENSG00000287041_36 (sequence is synthesized)
ctccaagactgcccgaccctaaaactccatggcgcaaaaggataggttttattttgcttttcttttttttcccttaagaaagtaaatttggtcaggtgcggtggctcatgcttgtaatcc

SEQ ID NO: 844428 - DNA, 120 bp, Artificial Sequence
  ENSG00000287040_0 (sequence is synthesized)
agttttcccctgggacttcacctaggttgctatgattactcttgccccattgcccaggaggcgccaagccaacccctgatgagtgtagtctgcagagaagccagcaggatcaggacaaac

SEQ ID NO: 844429 - DNA, 120 bp, Artificial Sequence
  ENSG00000287040_1 (sequence is synthesized)
cagttccacagcaggagagaatctggtcgggtcaacaaagaacttccagccctgaggatgtctatgcagtctcaagagcagtttcttaaattgcgggcctcaaatctgcagctaagaatc

SEQ ID NO: 844430 - DNA, 120 bp, Artificial Sequence
  ENSG00000287040_2 (sequence is synthesized)
acctgggagagtttattaaaaatggaggccctacattagaataagtcaaaagctaaggaactgactttggggagcttgtcttttaacacttcctagctgatggagtttcactcttgttgc

SEQ ID NO: 844431 - DNA, 84 bp, Artificial Sequence
  ENSG00000287040_3 (sequence is synthesized)
gcaacctctgcctctcgggttcaagatggtgcaccaccacaccaagttagttttgtatttgtttgtttgtttttgagacggagt

SEQ ID NO: 844432 - DNA, 120 bp, Artificial Sequence
  ENSG00000287040_4 (sequence is synthesized)
aaagttctgggattacaagcgtgagccacggcgcccagccgactctttctttcatgaaagatttctctgtaggatgtaatgctgtttcatagcattttacccacaatagaacttctttca

SEQ ID NO: 844433 - DNA, 120 bp, Artificial Sequence
  ENSG00000287040_5 (sequence is synthesized)
ttcaaacttggcatcagtcctctcaagccccgccgctgctgtatcctctaagtttatggaatattctaaattcttttttgtcatttcaataatgattacagtgtcttcaccatgagtaaa

SEQ ID NO: 844434 - DNA, 120 bp, Artificial Sequence
  ENSG00000287043_0 (sequence is synthesized)
gggaccccggggggtggcaccagccacacgcacccagggaaagcacgaccctgcagacaccttttcagactctggcctccagaactgggggaacatccctgtttcaagccaccccactgt

SEQ ID NO: 844435 - DNA, 120 bp, Artificial Sequence
  ENSG00000287043_1 (sequence is synthesized)
ggttgtcccacagcagccctaggaggctggcactggcaggtgagagaaatcacctatccggtcttcaggaaatcagagaacagataaagtcacagtaaactcgattcctaaaatcctacc

SEQ ID NO: 844436 - DNA, 120 bp, Artificial Sequence
  ENSG00000287043_2 (sequence is synthesized)
accaccatagccctgggaagatgggatggaactgcagaaagtggtagtcacaggtcaataagaattgacctgcaaagccacaaggatttgttgccattctctgacttatcggtgaacatc

SEQ ID NO: 844437 - DNA, 120 bp, Artificial Sequence
  ENSG00000287043_3 (sequence is synthesized)
tccaggcagacacgctgtggaatgaagggtcctcagtgacaggcgctgtgtgtcctcccaccatccgagatccaggcagacacgctgtggaatgaaggtcctcagtgacaggcgctgtgt

SEQ ID NO: 844438 - DNA, 120 bp, Artificial Sequence
  ENSG00000287043_4 (sequence is synthesized)
gtcctcccaccatccgagatccaggcagacacgctgtggaatgaaggtcctcggtgacaggcgctgtgtgtcctccgaccatccgacatccaggcagacatgctgtggaatgaaggtcct

SEQ ID NO: 844439 - DNA, 120 bp, Artificial Sequence
  ENSG00000287043_5 (sequence is synthesized)
cagtgacaggtgctctgtggcttacgaccatccgagatccaggcagacactctgtggaatgaaggtcctcggtgacaggcgctctgtggcctccatctcatcctacccttcagagcgccc

SEQ ID NO: 844440 - DNA, 120 bp, Artificial Sequence
  ENSG00000287043_6 (sequence is synthesized)
gacctcacccctctggtagaagctcgcacatccagtggccagcccttcccttgctttctgggagaagcaccgtgacttgtagaaatgaccacaatatttttttaaatgaagttatgcaaa

SEQ ID NO: 844441 - DNA, 120 bp, Artificial Sequence
  ENSG00000287042_0 (sequence is synthesized)
gggcaagactaaggagctgggtgagggaccggaagggctggaaggggtgggcacctgggggctgcggcgagtggcgatgggcgagccggacttgcacgtggagaaagcctgtgatgttac

SEQ ID NO: 844442 - DNA, 120 bp, Artificial Sequence
  ENSG00000287042_1 (sequence is synthesized)
tcctacatttttgaatatgtacaagcatattcagtgatgctttgagatccaactgtatgctgggtactactactgtaaggactagtggctttgtggagagcaagagagctaagcaagtag

SEQ ID NO: 844443 - DNA, 120 bp, Artificial Sequence
  ENSG00000287042_2 (sequence is synthesized)
tgggaggccatcttagaaggaagctatcctggtgagaagctctaatcacacagcagcccctgggacttgccagtatgtcatcagatacacaaagaaagattctggttccactatgcctct

SEQ ID NO: 844444 - DNA, 120 bp, Artificial Sequence
  ENSG00000287042_3 (sequence is synthesized)
tcttcctcgttactttctggacctttgcagactttcttcctggtggtgtagctacttatgcagagcagatgctctaatatgtgtctgtttatctctatttatacaaagtttgtatttgtc

SEQ ID NO: 844445 - DNA, 120 bp, Artificial Sequence
  ENSG00000287042_4 (sequence is synthesized)
ttcttgttatctctaactaggcaatgattgcctatcacccccgctttcaacaacattataatttcctcaaggacaggatattcttacatgtctttctatcccttatcatgttctgtattt

SEQ ID NO: 844446 - DNA, 120 bp, Artificial Sequence
  ENSG00000287042_5 (sequence is synthesized)
ccccatttggaatgtaaataccacaagagctaggattttgtctgttatgttcatcactgtactcttgcagtctgaaacagtattcttgaataaacgcaaatagaatgaaggaatataaaa

SEQ ID NO: 844447 - DNA, 120 bp, Artificial Sequence
  ENSG00000287049_0 (sequence is synthesized)
gggcgtgcccgccctctgtgacttcaggggcttggggccgacaccccgcgggcctcggtgccagcctcccgcttacccggtcagcccctgggccgagtacccctgggagagaaagcgcta

SEQ ID NO: 844448 - DNA, 120 bp, Artificial Sequence
  ENSG00000287049_1 (sequence is synthesized)
aattcccccaacactcccgtgatgggggcacagggagcgccgtgggacacctgaggaaactgaggcccaagtgttaattaacttgccctgatcacctagcacgtggagccacgacttgct

SEQ ID NO: 844449 - DNA, 120 bp, Artificial Sequence
  ENSG00000287049_2 (sequence is synthesized)
caagccctgcctgattccagccccggcctttgttcattcagtaaatgtggaaggcgcaagggtaactcgaggcctgcggagggaacgagatgagggaggccgcaagagtcaccgcagaga

SEQ ID NO: 844450 - DNA, 120 bp, Artificial Sequence
  ENSG00000287049_3 (sequence is synthesized)
aggaactggactgggatgtacagaggcaccatggtgggaaacagctgggccttcctgcaaagaggggagaggctcttggaggtgcagggcttgcgttttctcaacccagactgcctctga

SEQ ID NO: 844451 - DNA, 120 bp, Artificial Sequence
  ENSG00000287049_4 (sequence is synthesized)
gaacagggcagggggtgtgaagagctgatgccctggccctccccactggctagctttccggggactaaggactaaggctgggccaggattctggggttctaggggctctgcctccacacg

SEQ ID NO: 844452 - DNA, 120 bp, Artificial Sequence
  ENSG00000287049_5 (sequence is synthesized)
ccagtgcctgtctgttgagttcacttctctctaaaatctcattttacaccacgacccagtacaaaccactcagaaaaatgtttcattaaaagttcggcatactacatgcatgcactctaa

SEQ ID NO: 844453 - DNA, 120 bp, Artificial Sequence
  ENSG00000287048_0 (sequence is synthesized)
atactgatcctgtttcactaatgaccttggacgagagttagaaagccacatggaccttaccatcttttttctttaaattatcaagaggagaccacaagatgaggaatacttcactgcagg

SEQ ID NO: 844454 - DNA, 120 bp, Artificial Sequence
  ENSG00000287048_1 (sequence is synthesized)
tggtgatatgaaactgacaagtagtttataaactagccctaccctattgcttggagaagctttataactgattgttttaataccaaagtgacaccaaagggggtcaagtaaataaatatg

SEQ ID NO: 844455 - DNA, 120 bp, Artificial Sequence
  ENSG00000287048_2 (sequence is synthesized)
caagcctcaccagttcaaaataataaaattccaatgtgtgcaagcctgcttgttgaacatatgtttgaggcacggctaagccatctggctcagtgtcaagcatttacaccaactgtagtc

SEQ ID NO: 844456 - DNA, 120 bp, Artificial Sequence
  ENSG00000287048_3 (sequence is synthesized)
ttacagtacctgacagcagaaaagctttattcccctggtgtttgggcacaaatggagaaatattattgaaatgattatctgcatcaagactcagatttgctttgacatttagctggctct

SEQ ID NO: 844457 - DNA, 120 bp, Artificial Sequence
  ENSG00000287048_4 (sequence is synthesized)
gtttaatccaaagggttgtctgaatgaataaagagaagggttcctccagaagatgctgcgagcagccagggaaagccaaatgattaatgagactgaaaggcagggtggacctgcccacct

SEQ ID NO: 844458 - DNA, 120 bp, Artificial Sequence
  ENSG00000287048_5 (sequence is synthesized)
ccacccagacctcagtgccaagaactgaatatgaaattagtctaaagctttccgtggcttgtcaggaagattcttctaccctcacatgggctctcattttggactctggaacaaaagaaa

SEQ ID NO: 844459 - DNA, 120 bp, Artificial Sequence
  ENSG00000287048_6 (sequence is synthesized)
acatttcacattcaaacactttttgcttttaacagctctaccagaggcatttagatattacgttaggagtagagtctcttttcggaattagaaagctgcggcttgtcgcctggtttctgt

SEQ ID NO: 844460 - DNA, 120 bp, Artificial Sequence
  ENSG00000287048_7 (sequence is synthesized)
tttggcagctggtttctatatgctatggtccttatatcaagataatttcttttggcttagaatgctatgttcctctggttattctgtgttgccattcattttaagatgctatattaagct

SEQ ID NO: 844461 - DNA, 120 bp, Artificial Sequence
  ENSG00000287048_8 (sequence is synthesized)
gagttacttgaaaaacgaggtacagtgctagttttagcattcacctgtgctagcaaaattcaggcatttagccaaaaaagagacatctttcatagtcaaagacaattagcaataaaataa

SEQ ID NO: 844462 - DNA, 120 bp, Artificial Sequence
  ENSG00000287048_9 (sequence is synthesized)
aatattaattttaaaataaaacagaataataacaacaataatagaataggcatcttaatttggaaatctttatcaaagatttataggttgtcacttatttcttcaggtatattgtacctt

SEQ ID NO: 844463 - DNA, 120 bp, Artificial Sequence
  ENSG00000287048_10 (sequence is synthesized)
ttggagggagaattttagtaatgattgttgatttagatttgaaattactttggtgatttggttttaataagaatgttaggcatgatttctttctcactcttacttttaattaacttttta

SEQ ID NO: 844464 - DNA, 120 bp, Artificial Sequence
  ENSG00000287048_11 (sequence is synthesized)
tagagatatgaatgaattctaatgaacacaattggcaagctaattgatttgtttcagatcacagtgagcgatcagtatgctggcaacattgatatactattcaaggatgtcaaacagttt

SEQ ID NO: 844465 - DNA, 120 bp, Artificial Sequence
  ENSG00000287048_12 (sequence is synthesized)
ttgggttaattttctggcagaggttagttggggaaactgcttaaaatatgtactgtttttgattttcaactaagtgcctggttttttaaatattcagtgaattaaaagatatctattcct

SEQ ID NO: 844466 - DNA, 120 bp, Artificial Sequence
  ENSG00000231943_0 (sequence is synthesized)
aaagggcacggggcagagggactatgttgtgagcctgcgaaagaagtttgtgtggggactgtgggcagtgaacgcgttgggaacaatatggaaaactgggagccgccttggaatctacag

SEQ ID NO: 844467 - DNA, 86 bp, Artificial Sequence
  ENSG00000231943_1 (sequence is synthesized)
tccagcctacctaaaatattgaatgctgttaataaatctcctgaggccagcataagaaggtgatgggcaaaactaatgcaggtcat

SEQ ID NO: 844468 - DNA, 120 bp, Artificial Sequence
  ENSG00000231943_2 (sequence is synthesized)
ccagcataagaaggtgatgggcaaaactaatgcaggtcatcctccgaatgaatttatattaccgagtggagggtcacatgaagaaaatggtcaaacagcaccacctacagcaagagctga

SEQ ID NO: 844469 - DNA, 120 bp, Artificial Sequence
  ENSG00000231943_3 (sequence is synthesized)
ggttcttatccaacagacagcagcaaaactctttgtgtatctgcgttcctttcaacaagtgtgacttcctcaatggcatcattcgtgagcgtaacacagagctcagcaataacgtttctt

SEQ ID NO: 844470 - DNA, 120 bp, Artificial Sequence
  ENSG00000231943_4 (sequence is synthesized)
cactaaccctaccaggtcatcctccgaatgaatttatattaccgagtggagggtcacatgaagaaaatggtcaaacagcaccacctacagcaagagctgagaagtgcagcggagccgggc

SEQ ID NO: 844471 - DNA, 120 bp, Artificial Sequence
  ENSG00000231943_5 (sequence is synthesized)
atcacttgaagggaacacacagattccagtaaacagttggaaggaaatgttaataccaggctctgctaaacaatatgaaatgactcctagatgagacaagcgactttcatcaaagtttcc

SEQ ID NO: 844472 - DNA, 120 bp, Artificial Sequence
  ENSG00000231943_6 (sequence is synthesized)
tgatacctgaaaagacagcccaggggatcctgcactacatctggtgtatgtaaattaagcgggttttttccccctttgtaatcaaggctcatacacaaacaaaatcacactttagaaacg

SEQ ID NO: 844473 - DNA, 120 bp, Artificial Sequence
  ENSG00000231943_7 (sequence is synthesized)
gcctatttcaacttgtaactagcttgctttcaggggctccaggtcaaaaagaaatagagcacaaagacgctttctccttagggatcatacacaaattcactctgtccgtttctttcccac

SEQ ID NO: 844474 - DNA, 120 bp, Artificial Sequence
  ENSG00000231943_8 (sequence is synthesized)
atggaacaacaaagccatcagacctctccatccacccatcgggtccttcctgattaaagtgagataaatcacagccctctctctccagatggcaggcgacaagagggggatgcttgcctc

SEQ ID NO: 844475 - DNA, 120 bp, Artificial Sequence
  ENSG00000231943_9 (sequence is synthesized)
aagaagtcctccccatccctctgcattcatgcaagcccgagcagagagatgcaagaaattatggatgcgttttaattccccagaccctgcaattaaaaatggaaattttttggccacgtg

SEQ ID NO: 844476 - DNA, 120 bp, Artificial Sequence
  ENSG00000231943_10 (sequence is synthesized)
tctgagaggctcttcctaatagaactgctgcttcagtttagcttgaaaaagcccacaccgagttcctaatgacagacatctgaacaccgggtcttcccacgagcaagaccatgctatgcc

SEQ ID NO: 844477 - DNA, 120 bp, Artificial Sequence
  ENSG00000231943_11 (sequence is synthesized)
tcctgctcgctctgttctataagcaacccacagattgctccctgtgaagaggagcctgccaggggagcagcattccaccagaccctgatttagcaagatatttccgtatcattcccccaa

SEQ ID NO: 844478 - DNA, 120 bp, Artificial Sequence
  ENSG00000231943_12 (sequence is synthesized)
ccagctggaagtcctccattgctcttgtgtaaaaatctaactcatctcgctgaatttcctgatttaaaagtctaattcatttcaccaaaagtgtgacagaaggaaaccaagtacaccatc

SEQ ID NO: 844479 - DNA, 120 bp, Artificial Sequence
  ENSG00000231943_13 (sequence is synthesized)
tctctcttaccaaaccaaagctattgcatgtgcattctgggggaaaaaaatggtccaaatatgttatggagggggtgccagcccagtgtcatcctcttactattgccataggatcttggc

SEQ ID NO: 844480 - DNA, 120 bp, Artificial Sequence
  ENSG00000231943_14 (sequence is synthesized)
tgatggcatcagaggaaaaacaagtttatcgattactttcaaccattaagctcactcctccatgaaaaataagtcacaagtccaatgtctcttattaaaataagcactgcaaaatataaa

SEQ ID NO: 844481 - DNA, 120 bp, Artificial Sequence
  ENSG00000231943_15 (sequence is synthesized)
cgtcagttgaaacctgctgggactttttagccattctcttcaacataaagaatgggtgtttttggagggggtgagaggaatggggaaatgttgtcaaagagtacaatgttttagttgaga

SEQ ID NO: 844482 - DNA, 120 bp, Artificial Sequence
  ENSG00000231943_16 (sequence is synthesized)
caggaagaatatattttgttgagatctacagcacagcatggtgactgtagttaacaatgaagtattgtgtatttccaaattgctaagacaataaatttcaaatgttctcaccacaaaaaa

SEQ ID NO: 844483 - DNA, 120 bp, Artificial Sequence; identical to SEQ ID NO: 830377
  ENSG00000231943_17 (sequence is synthesized)

SEQ ID NO: 844484 - DNA, 120 bp, Artificial Sequence
  ENSG00000254052_0 (sequence is synthesized)
aagtcctgtatgaagttcagtggtggagtcagaggggtaaacgtagtacagcccagtggttcactgagactttcttgcaaagcgtctggattcaccttttctggcaacagcctgaggttg

SEQ ID NO: 844485 - DNA, 120 bp, Artificial Sequence
  ENSG00000254052_1 (sequence is synthesized)
gggagtgctcaggtttactcttcatgagtacaaataaattaactggtccagcgacaccctttcacgtgcactctaccttacaatgactaacctgaaagccaaggacaaggttgtgtaata

SEQ ID NO: 844486 - DNA, 120 bp, Artificial Sequence
  ENSG00000254053_0 (sequence is synthesized)
agcctggctattctcttagcttcttctgcaaagcatcaagattcaccttcactgactgcagcatttattgggccctgatggctggaggagaggggctggagtgggtggtagccatgagtg

SEQ ID NO: 844487 - DNA, 120 bp, Artificial Sequence
  ENSG00000254053_1 (sequence is synthesized)
ggtgctctgctccagcacaaagaagattcacagttcctggggacaacacttaacatcacaatctcccttaaaattatctactggaaagctgaggagtaggcagtgtattactgtgagaga

SEQ ID NO: 844488 - DNA, 120 bp, Artificial Sequence
  ENSG00000254056_0 (sequence is synthesized)
atagaccacgtctgtgaaaggcagattcacaatctcaagagatgattccaaaagcatcacctatctgcaaatgaacagcctgagagccgaggacacggccgtgtattactgtgcgagaga

SEQ ID NO: 844489 - DNA, 120 bp, Artificial Sequence
  ENSG00000254057_0 (sequence is synthesized)
attcaaagcccagctgcatattgcataacaccttgaattagaaaatccacgacccacaaaacgcttacctactttgtgcggtttaaataaagcagagtgctactcctctttaaagaactg

SEQ ID NO: 844490 - DNA, 120 bp, Artificial Sequence
  ENSG00000254057_1 (sequence is synthesized)
tactcctctttaaagaactgctttacagttatcttcctgtcagaattccaattattctatgactcagtgggaagtgagcagcgtctctgcctggccgcccatcctctgggatgtgaggag

SEQ ID NO: 844491 - DNA, 76 bp, Artificial Sequence
  ENSG00000254057_2 (sequence is synthesized)
ggccacccccggaagtgaggagtgcctctgcccagttgccccgaatgggaagtgaggagcgcctctgcccggctgc

SEQ ID NO: 844492 - DNA, 120 bp, Artificial Sequence
  ENSG00000254054_0 (sequence is synthesized)
agcgatcaaagattctgaaatattgaggccctatttgagagtcatacacttatactagttttatttgttgttgttgtttataatctgaagaaatgaacttcagccatctagaacaaaaat

SEQ ID NO: 844493 - DNA, 120 bp, Artificial Sequence
  ENSG00000254054_1 (sequence is synthesized)
aattggatttgttggagggttacggactgagaaaaagtttggtcaaccttgtaggggaaccagcccgctataccacccgcgggttctccccttcccagtggagacgagggaatgagaaaa

SEQ ID NO: 844494 - DNA, 120 bp, Artificial Sequence
  ENSG00000254054_2 (sequence is synthesized)
gaaataaagacaaacacacaaagttcaagagttaacaaaagtgggtccaggggtccatcgcaatgtggaaactgcgacagccctgagctctggattccactgatatttactgaataatcc

SEQ ID NO: 844495 - DNA, 120 bp, Artificial Sequence
  ENSG00000254054_3 (sequence is synthesized)
tccaagcaccatcagcagggcagcagagctctctgcctctgggaacgagcgagagatagaagactttccccttatcctcagaggacttctcctcttttacaagcaacctcctgctgttcc

SEQ ID NO: 844496 - DNA, 120 bp, Artificial Sequence
  ENSG00000254054_4 (sequence is synthesized)
cttctggggaatggagcaggggtcgcttcccttcccacaagacctttgttcagggactcaagtgggaggttgagcaataagcaagctttcttgcttagaggctccgcacacttcctgtgg

SEQ ID NO: 844497 - DNA, 120 bp, Artificial Sequence
  ENSG00000254054_5 (sequence is synthesized)
ttgtttgttccaccctgcagttaggcaagcaagctcaccgcctgattcttatattgtcggactaagcagaagctattcttatgattcatgactatattaataaagcactattctaaagca

SEQ ID NO: 844498 - DNA, 120 bp, Artificial Sequence
  ENSG00000254054_6 (sequence is synthesized)
atggtgaggaaataggtcatactcattagcatagtcatagaggaagaacagtgtttaataataggcctggctgaaataggctagcagtgaaactagaagggcaaaattattctgttaatg

SEQ ID NO: 844499 - DNA, 120 bp, Artificial Sequence
  ENSG00000254054_7 (sequence is synthesized)
aagaattaatgaagattttcgagtttccttaggtaacccaagaagaaaggtgtgaaaaaggaaggagtgaatgagataagaatggggaggaggatgtgaggaaggaatacatcaagatgc

SEQ ID NO: 844500 - DNA, 120 bp, Artificial Sequence
  ENSG00000254054_8 (sequence is synthesized)
cagggagctgagcaagaggcagccagggagaagttctgggctatggccaaggatctttaaagagcaaggatctttaaatagtcagttttaagatgtttggtgcagcctaaattcctcttc

SEQ ID NO: 844501 - DNA, 120 bp, Artificial Sequence
  ENSG00000254054_9 (sequence is synthesized)
ctcttcccctgcctgaatcttccgtaagaatctactacacagagatgccttgtatctgcagcattttgagaagagggaaagaggctgttgctttgggaatgatgcagagtggagaaaaag

SEQ ID NO: 844502 - DNA, 120 bp, Artificial Sequence
  ENSG00000254054_10 (sequence is synthesized)
aacagccaaaagaggctagacttgagagaaattacagtaattcagtaaaagcaggaaataatagaaaaacattgactccaaagatcctggaaggtgccagcaagtgaggttaggtttccc

SEQ ID NO: 844503 - DNA, 120 bp, Artificial Sequence
  ENSG00000254055_0 (sequence is synthesized)
gcaacatggaggatagattgcaagtggagccaagaacaaaatacagctgactctgaacaaatccttttcgtgacttctggataaaggacaactcaagcccctcgttccagtggcagtgga

SEQ ID NO: 844504 - DNA, 120 bp, Artificial Sequence
  ENSG00000254055_1 (sequence is synthesized)
ttgatgtgcagcttcctatgtgaaggcagagcacacgtctgtctctggagcttcctagaacacatggagaagacagatacagagaaggcaatgtgaacacagaacagaaagagatgtggt

SEQ ID NO: 844505 - DNA, 120 bp, Artificial Sequence
  ENSG00000254055_2 (sequence is synthesized)
tacgagccaaggaatgctgacagccacacacattggaagagatttctaacttggaatcactaaggacaaaaactcctatattcctgaagccctacaagctggaactggacaactcgatgt

SEQ ID NO: 844506 - DNA, 120 bp, Artificial Sequence
  ENSG00000254055_3 (sequence is synthesized)
aaatttcaggagacaacccccatgcctgatgtgtgggccactaagggagtttaccaaaacatccaatgccataaccagagacattcaaactaaaccaagaaaatgtttcaagctcaaatc

SEQ ID NO: 844507 - DNA, 120 bp, Artificial Sequence
  ENSG00000254055_4 (sequence is synthesized)
cagaaatcttgtcaactaactgccctctgaactcagagactgagtttataatttgtcctaagccattaacctttgttaatagcttttttttgttttgtttattttttctggtttggttca

SEQ ID NO: 844508 - DNA, 120 bp, Artificial Sequence
  ENSG00000254055_5 (sequence is synthesized)
aagcatactctaatcccttggtatatcctcctgatagttcccattgtaatctcccagctgcattctctcaagggttttgaaggtgtatttgcagcgattagtggtatactaggtggcctc

SEQ ID NO: 844509 - DNA, 120 bp, Artificial Sequence
  ENSG00000254055_6 (sequence is synthesized)
actgtgattactgcaacaactgcaagatgaccaaaggaatgtgtcttccacaaggctgacattgtgacttatgagtttcatgctaagacaaagacaaccctgccatgatgatgactgaca

SEQ ID NO: 844510 - DNA, 120 bp, Artificial Sequence
  ENSG00000254055_7 (sequence is synthesized)
gtagtgctgatgccataaatttttatcaaatccctcagtacaggttgagtctgatcaaaaggggaaagctgttcagtaaaatatgtgggaggtcattgttttggattaagctcctgcact

SEQ ID NO: 844511 - DNA, 120 bp, Artificial Sequence
  ENSG00000254055_8 (sequence is synthesized)
aggccccaacagaccagatcaaaccagaatggagtcactcatgccagatgccacattgtcaaactgaatgtaaaaataggtcacttgttcaaaaaaaaaaggagattcacagtaaccaat

SEQ ID NO: 844512 - DNA, 120 bp, Artificial Sequence
  ENSG00000254055_9 (sequence is synthesized)
tgaaaggggcccagtcaacctaagctcacatgataaggaagtctcctctagtttaacgtatgcaaggaaagtagctttgaaatcaccagtccactttttgtttcttctttctgctttctt

SEQ ID NO: 844513 - DNA, 120 bp, Artificial Sequence
  ENSG00000254055_10 (sequence is synthesized)
cagtcttttccattataaagcccacacatctgctcagctcagtagggcacctttctatttcatagatggaatgtcacttgattcatgaatcattaataaaagccaatttgatgtttaaaa

SEQ ID NO: 844514 - DNA, 120 bp, Artificial Sequence
  ENSG00000254055_11 (sequence is synthesized)
cgagccaaggaatgctgacagccacacacattggaagaggaactccaaggccagtctcaggccttcactctgactgtgtcttccttaaagcgtggtgtgaatccacagataccagaatca

SEQ ID NO: 844515 - DNA, 120 bp, Artificial Sequence
  ENSG00000254055_12 (sequence is synthesized)
gctgggcagctctctcacaatgcaatttactgggccctatttcaagcaaacaaagtcaaaaccttctctctggaattcagaaatctgcattcatgacgatcttccccaataattactatg

SEQ ID NO: 844516 - DNA, 120 bp, Artificial Sequence
  ENSG00000254055_13 (sequence is synthesized)
aaaaaaacgaaacgttgagcattcctgcttcagagcagaggtcagatggctgcctgtattctgtggccttcaaggcacatgtttacagatgaacattttcaatcaatttgatgagaggga

SEQ ID NO: 844517 - DNA, 120 bp, Artificial Sequence
  ENSG00000254055_14 (sequence is synthesized)
gcgctcactttacaacctaatgaagtgaaatgttatagcctgaaaaaaattattccattcttctcactaatagacctgtattgtaaaagacactgtactcgattatgatatcttgaagtt

SEQ ID NO: 844518 - DNA, 120 bp, Artificial Sequence
  ENSG00000254055_15 (sequence is synthesized)
attttgcctctttcttgtaaaggctgaaatgtttactatctgggcttttacagaaaaatttgtcaaggcctgcttgaaagcttaatatcttaatacagtaaatctgtgacaatcaaggct

SEQ ID NO: 844519 - DNA, 120 bp, Artificial Sequence
  ENSG00000254055_16 (sequence is synthesized)
tgaaaaatatatcttatccacattgtaaaatgtttaaaatctgtggtcttgtaggtatacatagttcacttcattccccttaaagaaaaaaacaacacctgtcatttttctcctctggcc

SEQ ID NO: 844520 - DNA, 120 bp, Artificial Sequence
  ENSG00000254055_17 (sequence is synthesized)
tctagagcagaggtttgggtgagtctgaggacataatacaaagcaggagagggaaccttaattcaggctatgctagtccaacatagagatgaaagccagtccccaaaatctcactttgaa

SEQ ID NO: 844521 - DNA, 120 bp, Artificial Sequence
  ENSG00000254055_18 (sequence is synthesized)
tattctaataattcaaagaaagactcagcatttatacaaatattttgaagaaagttgcaattgaagaatatgtaaatgcaaaagactttattttccaacaagtaaaaacaagcttgagaa

SEQ ID NO: 844522 - DNA, 120 bp, Artificial Sequence
  ENSG00000254055_19 (sequence is synthesized)
actttgaaaggtagatacctgtggggaaatctaccctatgaccagggcttttcttcataatcaaaagacttgattttgattctggaaaaatggtacctactgaagaaggattttaatgtc

SEQ ID NO: 844523 - DNA, 120 bp, Artificial Sequence
  ENSG00000254055_20 (sequence is synthesized)
caaaacgtgacttgttttttaaaagatgcatgtttagtactgtcttcgttgtttttaaacaatatgtaatctgtgatatttgcattgatttccatcaccttcccccacttcctgtgagaa

SEQ ID NO: 844524 - DNA, 120 bp, Artificial Sequence
  ENSG00000254055_21 (sequence is synthesized)
cttgatctccagggccttggttttgctaatcaatgcatttttcttttgtttgtttgtattttttatttctggttggctagagttaattgttgaaaataaaagtcaattctgctcttccaa

SEQ ID NO: 844525 - DNA, 120 bp, Artificial Sequence
  ENSG00000254055_22 (sequence is synthesized)
acaccctaaggacagattatggctaagaagagaaaactaaagggagaagacttagcagtgggatccatttaatgaagaaccaaatagtcttgactcaaaaggccttgtgaaaattcctgc

SEQ ID NO: 844526 - DNA, 120 bp, Artificial Sequence
  ENSG00000254055_23 (sequence is synthesized)
gtgcagcttcctatgtgaaggcagagcacacgtctgtctctggagcttcctagagttggttctaaatgcaatcacaaggatccttacaaaacagacacatggagaagacagatacagaga

SEQ ID NO: 844527 - DNA, 120 bp, Artificial Sequence
  ENSG00000268120_0 (sequence is synthesized)
ctgggggtgagggagggggagagaaaggggcctgcagaaggtgcactgccagagcatttggggcctgtggagagggtgtggccaaaggagacagagggggtgaggcagggggagagggag

SEQ ID NO: 844528 - DNA, 120 bp, Artificial Sequence
  ENSG00000268120_1 (sequence is synthesized)
gggcctgcagaggaggcaaggccagggcaggtggggcctgtggagggggcgtggccaaaggagacagagggggagagggcaggccctgcaaagggggtgaggccagagcaggtggggcct

SEQ ID NO: 844529 - DNA, 120 bp, Artificial Sequence
  ENSG00000268120_2 (sequence is synthesized)
ttgcagagggcatggggctggacaaggtggagtctccagatggggtgtggtcaggggagcagaagctgtctgcagaggaggcggggctagagaaggtaggttctccagagggggtgtggt

SEQ ID NO: 844530 - DNA, 120 bp, Artificial Sequence
  ENSG00000268120_3 (sequence is synthesized)
cagggaagcaggaggtgtctgcagagagggtggggctagggaagattgggtctccagagggggcatgatcagggaagagagaggtgcctgaggagagtgggaggccagagaagatagcgc

SEQ ID NO: 844531 - DNA, 120 bp, Artificial Sequence
  ENSG00000268120_4 (sequence is synthesized)
ctgcagagggtgtatggtcaggggtgagcttaggggtgagacagcaggagagagagaagtctgcagagggggtgaggcaggaagggaaagaggggcctgcagagggggtgaatcaggggg

SEQ ID NO: 844532 - DNA, 120 bp, Artificial Sequence
  ENSG00000272936_0 (sequence is synthesized)
acggaaagaatacacagagctttaaaatacatgcaaattaaaatatcagtaaatattaaaaattcaactcctttataaaatttttttctttacattggatatatcttttatacatcaaat

SEQ ID NO: 844533 - DNA, 120 bp, Artificial Sequence
  ENSG00000272936_1 (sequence is synthesized)
aaataggactgcttccaaactagaaataattattttgaaaattctattaattgctttttagatattaagtcaaatatttactgtgactttaggtaaaaactgacaactttctacatacga

SEQ ID NO: 844534 - DNA, 120 bp, Artificial Sequence
  ENSG00000272936_2 (sequence is synthesized)
ttaccagaagaaaggttaaatgtcacagattctaaccaatgtctatacaaagtaacttttatggttttgactcaaaatgaactcattctacctttgtcaaactactgaggtggagcctaa

SEQ ID NO: 844535 - DNA, 120 bp, Artificial Sequence
  ENSG00000272936_3 (sequence is synthesized)
atacaaagtaagagaaaaaaattcatgatgatgatgtcatatactaaaaatcaaagctgttctatttaaaaagcaaaaatgaaaagcgagaatgaataaaacaaatccccacgtactaaa

SEQ ID NO: 844536 - DNA, 120 bp, Artificial Sequence
  ENSG00000272931_0 (sequence is synthesized)
gacggggtctgtgtggcgagggaggggacccggggttggagactggcggcgagcgactgctagatgcggagcaggtgcttgggaggggaagaacggcagcctacataaccatcgccgtaa

SEQ ID NO: 844537 - DNA, 120 bp, Artificial Sequence
  ENSG00000272931_1 (sequence is synthesized)
tgctctcgcaagcgtccacctgggcagggctcggtgccgggcaggcgcagctgccagttagctgcgaggcatggtcaggagccttcacccgtcctgggcgaaggaggctgtcccgtcgac

SEQ ID NO: 844538 - DNA, 120 bp, Artificial Sequence
  ENSG00000272931_2 (sequence is synthesized)
atctgagctttggggcacacacaactactacttggcatggagagtttctcagcttcatgtgttccgtctgttattgaagctgtattggaaagtcggttcttgtttttatctgagcccgcc

SEQ ID NO: 844539 - DNA, 120 bp, Artificial Sequence
  ENSG00000272931_3 (sequence is synthesized)
gttttcatcccattcttttcgtcaaaaatatgttacatctgaaagaggcagatgaaaagattattctatgctaagagggttttgcagcccgataatgtcaccgttttttgttgttgttgt

SEQ ID NO: 844540 - DNA, 120 bp, Artificial Sequence
  ENSG00000272931_4 (sequence is synthesized)
tgtaggatcggggttcatttgcagtcttttttgtgggtgagcagaggcaggggccaataaataaattaaggcgggatatttggagttatttggttgtaataaaatatgtggttcaaccca

SEQ ID NO: 844541 - DNA, 80 bp, Artificial Sequence
  ENSG00000272933_0 (sequence is synthesized)
cctcgcaggggccggagcccggggtctgcggggccaggaggcgagggcggccgcgccgagggctgctagatccggacggg

SEQ ID NO: 844542 - DNA, 120 bp, Artificial Sequence
  ENSG00000272933_1 (sequence is synthesized)
gcgtcccccggctggctggccgggcgcgggctgcggggcgcgggcgggccgactccggggcgctgcgtgcgcgcaggggcagtcattcagatgaaattccagtccccggccagagacacc

SEQ ID NO: 844543 - DNA, 120 bp, Artificial Sequence
  ENSG00000272933_2 (sequence is synthesized)
agcccgcctctgccttcctcctcccttcacaaatagaaacggaagggggagggagagaagtggaaaaaaaggcaaccggcgagggagggagggagaagccccggcggcgctccggcctga

SEQ ID NO: 844544 - DNA, 120 bp, Artificial Sequence
  ENSG00000272933_3 (sequence is synthesized)
cgggcggctacttctgcgctcccccgaggcccggcgcccccgccgcggagagaccccgcgcgcccgtctccgcgctgggcgggcgcccgggctctgccgaggaaaacaaggattgatcaa

SEQ ID NO: 844545 - DNA, 120 bp, Artificial Sequence
  ENSG00000272933_4 (sequence is synthesized)
tcaaactagaaaggaatttttctcaactgctaatgaacaggaggctcggctcccggccctcccctcccctcccccggccctcccccttcgcccccccggccccctcctccccactttctt

SEQ ID NO: 844546 - DNA, 120 bp, Artificial Sequence
  ENSG00000272933_5 (sequence is synthesized)
cttttcttctcggcctctgctggggcctggaaggctcggggctgcggtcggagccagcctgcggcggcggggccaggccgagccgccaccctcagcgcccagccatcttgggctccgcgg

SEQ ID NO: 844547 - DNA, 120 bp, Artificial Sequence
  ENSG00000272933_6 (sequence is synthesized)
gccccgcggcgtcctctcgctcctgattcttttttttttttttttggtgggatttttttttttccaaggggagggctggcggcctccaacaaattaggagagagagagggagaaaatgcc

SEQ ID NO: 844548 - DNA, 120 bp, Artificial Sequence
  ENSG00000272933_7 (sequence is synthesized)
aagtcccgatttctctccacctctgctccacccaccccggtcctgtccaaaaaataaaagaagatgagaattggaagaagtcggcagaaaggcgagagcccgcggtccccggctgctgcc

SEQ ID NO: 844549 - DNA, 120 bp, Artificial Sequence
  ENSG00000272933_8 (sequence is synthesized)
caggcgacgcgtccggggcgggcccgcacccgttgctcggtccgaggtccgtctgtctgcccgcggcttctcaagggaggggagggcgcttcgggcagggtctccgcagccgctgtcgcc

SEQ ID NO: 844550 - DNA, 120 bp, Artificial Sequence
  ENSG00000272933_9 (sequence is synthesized)
tcagagctttatcctcagatcaaaaaagaaaaaacaggaagaaaaaaatcccaaccccaacactctcatcacagccaccttcagccatcttgcgcgtattattatttcaggaataatctg

SEQ ID NO: 844551 - DNA, 120 bp, Artificial Sequence
  ENSG00000272933_10 (sequence is synthesized)
tttaataaaaatacctgcgtatccagcccctcccccgcgtcctggggtccccgcccccttttaataataatctcgataataaaaacgatcggcgggccgggcagtccgtggcggcccttt

SEQ ID NO: 844552 - DNA, 120 bp, Artificial Sequence
  ENSG00000231949_0 (sequence is synthesized)
cctcagctccctcctcagggagactttctgcttcacagagcttggtcaggaaggaggtagcagaacaggaaccaaagtgagtgcaaagtctgctgggggccaggagctgccaggagcccc

SEQ ID NO: 844553 - DNA, 120 bp, Artificial Sequence
  ENSG00000231949_1 (sequence is synthesized)
cgtatgtgaggttgcatcctcaggacctctcctggaaatctttctagctcagcagccccgcagcttcagaagatgggcatgtcagggcaagctctgctttctgcctcttcgaggagtctt

SEQ ID NO: 844554 - DNA, 120 bp, Artificial Sequence
  ENSG00000231949_2 (sequence is synthesized)
ctgccactcagagacctgctcacagaggcaggaaagtcaaggatctgcttccccaaagaacaggctgagcctcacacggccaaatcccagaatggctttcaaggaagagaacccaggtgt

SEQ ID NO: 844555 - DNA, 120 bp, Artificial Sequence
  ENSG00000231949_3 (sequence is synthesized)
gtttgtgtcctgcctccatctcttactggctgtgtgatctcaggcaaatgactctgtgagcctctatttttcatgtgtgaaatagatttattcgtaataacatacgaagcctatactcaa

SEQ ID NO: 844556 - DNA, 120 bp, Artificial Sequence
  ENSG00000287307_0 (sequence is synthesized)
ggacactcctgtggctggagaaagctggatctgaaggttgtagaaactcgcagaaagaagccatcaaagtgacttggaaaggagggcctgtcactaaacacacttagcaaatcgatgaag

SEQ ID NO: 844557 - DNA, 120 bp, Artificial Sequence
  ENSG00000287307_1 (sequence is synthesized)
atcttgtagcaacacttcgccctctgagatccagttgcatccatctgtcccttttgttatcatttcatccagaaaccaactgtctgaagactcttgcattttcaaaaatggataaaatgg

SEQ ID NO: 844558 - DNA, 120 bp, Artificial Sequence
  ENSG00000287307_2 (sequence is synthesized)
ttatccactaaaaacaaaatccatgactgatggtaagtttctttccctggtgtatacaaacctcaactggagattcctggctggatggacatgggggctgaggctgctgtagccctcttt

SEQ ID NO: 844559 - DNA, 120 bp, Artificial Sequence
  ENSG00000287307_3 (sequence is synthesized)
tattgctagtctgcctccccaccgtggctcagagttgtacacctgttccaagtagctgaggattcatgggatgtttgcagcagctgaacactcctcacaaatgctctggaaggaatgcac

SEQ ID NO: 844560 - DNA, 120 bp, Artificial Sequence
  ENSG00000287307_4 (sequence is synthesized)
atgtctcaagaagttattgaatcttttttttttttcattttctaaggaattcttctaaaaagctctggtcctctggcaaggaatacaggtgaaattttactcctacaagatcattgtcaa

SEQ ID NO: 844561 - DNA, 120 bp, Artificial Sequence
  ENSG00000287307_5 (sequence is synthesized)
tttaaggccaggttcaatctggctggagtcaggaatgacaacataaatgcattgcagctgttttattttttaggctaatattaagagggaaagaatcgcacaccattcccaggtggaggg

SEQ ID NO: 844562 - DNA, 120 bp, Artificial Sequence
  ENSG00000287307_6 (sequence is synthesized)
tataagtggagattttaagaaagaatttataatttttctgattataataacaaaggagtatgatagaaaatctgaaaaatgataataataatactgcaaaatatcacaacccagagataa

SEQ ID NO: 844563 - DNA, 120 bp, Artificial Sequence
  ENSG00000287307_7 (sequence is synthesized)
atgttagagttttgcctttctttccatttaaaaatgtgtctccttttggctttatatataaacaattgtgttcatgttctacctaagctaagtttttgcatacgatagcctgcacatttt

SEQ ID NO: 844564 - DNA, 120 bp, Artificial Sequence
  ENSG00000287307_8 (sequence is synthesized)
ttcattctttaaaaatttccaaaacttattgtaaaatttggttttaaatttctgtacgtatttgatcatgttgaccaatattctaatgtacatatagattatttcctatttttctatcat

SEQ ID NO: 844565 - DNA, 120 bp, Artificial Sequence
  ENSG00000287307_9 (sequence is synthesized)
atattatgccaagaacatctctccatgtaaatcttggtgtgcaacactgattatttattcattacaaattcataaagtttttactgatatgaagatataatatgttttaggctttttttt

SEQ ID NO: 844566 - DNA, 90 bp, Artificial Sequence
  ENSG00000287307_10 (sequence is synthesized)
ttactgatatgaagatataatatgttttaggctttttttttttttttgcgatggggtctcgctctgttgccaggctggagtgaagcggct

SEQ ID NO: 844567 - DNA, 120 bp, Artificial Sequence
  ENSG00000287307_11 (sequence is synthesized)
ggcatgagccaccacgcctggcctttaggctttcaaaatgcatattgacaatgtaaacactagaaaaattatattattgacaagcctgtaagcagtatatgagtaaggccatactttttc

SEQ ID NO: 844568 - DNA, 120 bp, Artificial Sequence
  ENSG00000287307_12 (sequence is synthesized)
atatgagtaaggccatactttttcttccattgcataaaagaattatttgaacacaacaacaaaagcaaaaggacttattgaaaacaaatacagaattatctttgccatacaaacgtggac

SEQ ID NO: 844569 - DNA, 120 bp, Artificial Sequence
  ENSG00000287307_13 (sequence is synthesized)
aaaaggatatttgttttaaatttgcatttctgtctttactggaatttcttctttttgtttgcattatgtgtagtggcctcttctaactcttctgttattttgtctgtttatattcatggc

SEQ ID NO: 844570 - DNA, 120 bp, Artificial Sequence
  ENSG00000287307_14 (sequence is synthesized)
ctgtttttatattagaataaatgagtgttctttttgattgttctataaggcctatttatatattatagctattaatcttctaaccaaaaaacatcttttcattttctgtgtttcaaaagt

SEQ ID NO: 844571 - DNA, 120 bp, Artificial Sequence
  ENSG00000287307_15 (sequence is synthesized)
ttaaattttagtgttatttgtacagttggacctccgaattcatgggttcctcatctgttggttcaaccaatcacaaactgaaaatattcaggtgggaaaaaaaggatggtcacatccata

SEQ ID NO: 844572 - DNA, 120 bp, Artificial Sequence
  ENSG00000287307_16 (sequence is synthesized)
catccatactgaacatgtacaggcttttttcttgtcattatcgcctaaacaattcatcatggcagctatttacacagcattcattaatactataattaggtattataagtaatctagaga

SEQ ID NO: 844573 - DNA, 120 bp, Artificial Sequence
  ENSG00000287307_17 (sequence is synthesized)
tcatgaatactgaaggactggatattgattttttaataatatttatgaatagacctcttttcttctgtcagatagtcacatatatttgacactttaaattgatatttttattcatgtctc

SEQ ID NO: 844574 - DNA, 120 bp, Artificial Sequence
  ENSG00000287307_18 (sequence is synthesized)
taatattttaaatttacatataatctttattttgacacataaattataaatttattttgacaaatgtaatgtgacactagtttcattaaaaacacaatttgtctctcactcttcctcctt

SEQ ID NO: 844575 - DNA, 120 bp, Artificial Sequence
  ENSG00000287307_19 (sequence is synthesized)
ctcaccacatacacatacaatctgaaggcaatacagtatcctggttaaggatgcaaactctggaaccagactgcttgggtttaagtcacggttctaccttaactaactgtctaggcaagt

SEQ ID NO: 844576 - DNA, 120 bp, Artificial Sequence
  ENSG00000287307_20 (sequence is synthesized)
tacttatcttctctgcacctcagtcccctcatttataagatgacaatagatatagtaccatcctcatagagttgtactgagtaataaatgaatcaatacaggcaaagtgctatatgataa

SEQ ID NO: 844577 - DNA, 120 bp, Artificial Sequence
  ENSG00000287307_21 (sequence is synthesized)
ggtactatgcaagaaatgccttattgtattaattgcctaataattgttagctgttactactaccaattaagttctgatatatcctgggttctaggagcaattatatattagtgactagtt

SEQ ID NO: 844578 - DNA, 120 bp, Artificial Sequence
  ENSG00000287307_22 (sequence is synthesized)
atataggatagcatgttgggcttgggaaccaccacagcttgaatatgaattccagctctggcaaactctagtcatgtggctttgaacagaacacttaaggtctcagaactggttttttca

SEQ ID NO: 844579 - DNA, 120 bp, Artificial Sequence
  ENSG00000287307_23 (sequence is synthesized)
cctgtaaaataggaataagtatctcagtttcgcaaaagtttcaaaaacattatacttttctttttggtatcttatttgacacatgaattatatagaagtgtgctattttgttttcatata

SEQ ID NO: 844580 - DNA, 120 bp, Artificial Sequence
  ENSG00000287307_24 (sequence is synthesized)
ttttgagattttccggttatcttcctattatttatttttaatttaattctattgtagtcagagaatacttcatgagtcaaatcactgcagattgattgagacttgttggctagcctagga

SEQ ID NO: 844581 - DNA, 120 bp, Artificial Sequence
  ENSG00000287307_25 (sequence is synthesized)
tatggtctgccttcctaaatgttctgtttacttgaaaagaaagtatattctgttgttattgactggattattctataaaaatcaattacatcaagttggttgatagtcatattcaagtct

SEQ ID NO: 844582 - DNA, 120 bp, Artificial Sequence
  ENSG00000287307_26 (sequence is synthesized)
tttatacccttattgattttctatacttcaactttgttctcaatatttaaaattattttgactattcttggtcttttgaaattctgtataaattttacaatcatcttacccatttcttta

SEQ ID NO: 844583 - DNA, 120 bp, Artificial Sequence
  ENSG00000287307_27 (sequence is synthesized)
gaaaatactgctggcatattgactgggattatgttgaatatatagaaaaatttgagaaaaatggacatcttaacaattgaatcttctcatccatgaacatggtatactgtatctctacat

SEQ ID NO: 844584 - DNA, 120 bp, Artificial Sequence
  ENSG00000287307_28 (sequence is synthesized)
ttatttaaatgattttagatttctctcagcaatattttaaagttttcaaaaatgtaggtgttgtagaatttcatgaaatttatccctaagtatttgtatgtttattgatacttttgtaag

SEQ ID NO: 844585 - DNA, 120 bp, Artificial Sequence
  ENSG00000287307_29 (sequence is synthesized)
tagtaattttgtatatttcagcttctcgtagtctgagctaatatatagaaatataatagattttgttgtgcattgaacttgtgtccttggaacttaacagttatagtagcgtgttttttg

SEQ ID NO: 844586 - DNA, 120 bp, Artificial Sequence
  ENSG00000287307_30 (sequence is synthesized)
tagatttcaatagacttcatatgcagacaatcatgtcttttgagaaaaaaataatattacttcttcatttctgatctgtatatttttaaagcctttttgcaccagcataggcctccagta

SEQ ID NO: 844587 - DNA, 120 bp, Artificial Sequence
  ENSG00000287307_31 (sequence is synthesized)
gattgtttaacagaggcgaataccttgccttaatatagtgaagagagtgttcaaattgccttgttgctaatctctagagataccgttcagtttcttttgtcataaaatacaatgttagct

SEQ ID NO: 844588 - DNA, 120 bp, Artificial Sequence
  ENSG00000287307_32 (sequence is synthesized)
acagattttgcatagacgttctttaccattttgaggaaatttctatttctagtttgctggaatttctgtttataattgaattctgtcatttactttatctgcatctactgagataatcaa

SEQ ID NO: 844589 - DNA, 120 bp, Artificial Sequence
  ENSG00000287307_33 (sequence is synthesized)
tttttattcctttattctgttaatatgttgaaatacaatgatcatgttttcttactatatcacaaatttgatttttaatattttgatggctgcattttattataactggtttcttttgta

SEQ ID NO: 844590 - DNA, 120 bp, Artificial Sequence
  ENSG00000287307_34 (sequence is synthesized)
aagctacttttaatagcgttgtatttgctctttttaatgctttttattttggaatactttaagacacaagaaaataatagaaaagagttcctgtgtgcacttcacccagatttccttcat

SEQ ID NO: 844591 - DNA, 120 bp, Artificial Sequence
  ENSG00000258743_0 (sequence is synthesized)
gttcctgtgtgatggggccggagccagtaaacaggcttccttctcgctctgctgtataagaagaagaagtaggagaaacaaaataaggaggagaagaagtaaaataatttgagaaggaat

SEQ ID NO: 844592 - DNA, 120 bp, Artificial Sequence
  ENSG00000258743_1 (sequence is synthesized)
atgaaggtaatatagaaataaattttgttttcaatattaggctttatttttagagcagttttagattcacagagaacttctgtatataaccacttgcctctagattaagctaaatttgag

SEQ ID NO: 844593 - DNA, 120 bp, Artificial Sequence
  ENSG00000258743_2 (sequence is synthesized)
tttatactgatttctccaaagccaatctatgattgcttggataatgcttatctccttcccttgctttatctgtaaattcctattccaacagtgagaagtttggctctcaccatccactgt

SEQ ID NO: 844594 - DNA, 120 bp, Artificial Sequence
  ENSG00000258743_3 (sequence is synthesized)
tcctttatttaattgttcaattccagggcatatatgcagtagtttcaaagttggtaactagtgcttgccaggaggctactttaccaaatagagtacagtgcttacaggcagtttcttttg

SEQ ID NO: 844595 - DNA, 120 bp, Artificial Sequence
  ENSG00000258743_4 (sequence is synthesized)
cccttactcttacagactttactcatttacaaagttactcagctcagcatcttcctctcctcaccatcttcggtgagattgtttcaataatctactagagacacaggtgtaatttcacca

SEQ ID NO: 844596 - DNA, 77 bp, Artificial Sequence
  ENSG00000258743_5 (sequence is synthesized)
tggaccttctaaatgtttcttttttcttaccttttaattttaaagtttacccccttatgctttaaagttacatgggt

SEQ ID NO: 844597 - DNA, 120 bp, Artificial Sequence
  ENSG00000258743_6 (sequence is synthesized)
tggacaggtgagctacgcagttcgtggaagaaccaggggtcacatggcctagatgctaccctagatgagaaagagtccaatggttatcaacaagttctgaaaggcaaggcctaagacagt

SEQ ID NO: 844598 - DNA, 120 bp, Artificial Sequence
  ENSG00000258743_7 (sequence is synthesized)
ttctttcattcttttctctcaattatggaacccctgacttgcaactgacctgggcccagtgaaagctaatagttccaatcctggctctttgcccagttgcatcaaagaagaccacacagt

SEQ ID NO: 844599 - DNA, 120 bp, Artificial Sequence
  ENSG00000258743_8 (sequence is synthesized)
gtaaggatacgatcaagctgataatccaaagtgcactaacttctaaggacggaaatgtttctctggggctatcattgcaccctcgctctctggaatttcggtatcatgagaacacataag

SEQ ID NO: 844600 - DNA, 120 bp, Artificial Sequence
  ENSG00000258743_9 (sequence is synthesized)
taagagccaaaattcatagggattctgcctggagaggaacacagggattctgaaataaccatgacatacataagtacctccaattatttgcctctcagacaaagccagcagctgttgaaa

SEQ ID NO: 844601 - DNA, 120 bp, Artificial Sequence
  ENSG00000258743_10 (sequence is synthesized)
ctcaagacaagcatttacattatttacacactcaatgtctcttctgacttatgattgccttacaatctatggaatatatttagtgtccctgtggaagcaattatacatgaaacatcaaca

SEQ ID NO: 844602 - DNA, 120 bp, Artificial Sequence
  ENSG00000258743_11 (sequence is synthesized)
tatatttatatagtagacagcactttcataggtccctgcagtgtattttaacagtagtggaaactaaagttttggtgtaatgtgtttttatctatcattcagatcaaagaatacccagta

SEQ ID NO: 844603 - DNA, 120 bp, Artificial Sequence
  ENSG00000258743_12 (sequence is synthesized)
cttgaaaagtttagaaagcagttgaaagttacatagagatgtagaaagcattaaagtggtagaaattaattaaaagtcttagaatatatgagctgtaattagactgggttttaatgttta

SEQ ID NO: 844604 - DNA, 120 bp, Artificial Sequence
  ENSG00000258743_13 (sequence is synthesized)
gtttgttaatatttaaatataaacctcacaatggaacttggcaatttaagagatttacagataatttatccttaaaagtatgaaggatgtctgttactcaaatatccatcccattaaatt

SEQ ID NO: 844605 - DNA, 120 bp, Artificial Sequence
  ENSG00000258743_14 (sequence is synthesized)
gaaaagttttaagtattgattcttctgtaaataatagaagactccattaaattcctttacagttctgtacatctagactaaaatgaaacaccaaaatatgaaattatctcaaaatgaaaa

SEQ ID NO: 844606 - DNA, 120 bp, Artificial Sequence
  ENSG00000258743_15 (sequence is synthesized)
ctgtgtgatggggccggagccagtaaacaggcttccttctcgctctgctgtaagtttttctctttctcccttttcacccaagaagttccgtttttcctacccttctacgtgtccgcgagt

SEQ ID NO: 844607 - DNA, 120 bp, Artificial Sequence
  ENSG00000258743_16 (sequence is synthesized)
atgaagattttattggtggaacagagaaaggaaaagcagttaagaaaacaaagctcaagaaactgaaactagcctgagaaggaagatactgagtcagatggagccatttatatatggaga

SEQ ID NO: 844608 - DNA, 120 bp, Artificial Sequence
  ENSG00000258743_17 (sequence is synthesized)
aacagttatagcatgaaaagcaaataggaagagtacttgtatattcactgacattaaagccttcttcaaatatattactaaagagaaagataggtattgattgatatgagcttcaggtaa

SEQ ID NO: 844609 - DNA, 120 bp, Artificial Sequence
  ENSG00000258743_18 (sequence is synthesized)
tattttgcctacagcatgtctccaaaaatctactagatttttaaagtagtgtaatctattcaataaagttagctatttggatgttagtctctccgtatgccaaggaaaaaagtgttacta

SEQ ID NO: 844610 - DNA, 120 bp, Artificial Sequence
  ENSG00000258743_19 (sequence is synthesized)
tctacctatataactgagtttaataagtaaataaagagatcattcttttaagatacgttaaatgtttcgggttcatgataacatttgttgcatgacattaaaccacaacaacggaaaaaa

SEQ ID NO: 844611 - DNA, 120 bp, Artificial Sequence
  ENSG00000258743_20 (sequence is synthesized)
catggtcagtgatgcttaaggaagactaaaaatacgtatagctatagctttatggaatcggcaggcaggacgccattagtatgacagcattttgcttcagcctcaggtgaaacatgaaga

SEQ ID NO: 844612 - DNA, 120 bp, Artificial Sequence
  ENSG00000258743_21 (sequence is synthesized)
accagccaatggcaggagaccttccccacccctaaaggtgatgctcacctaccgtcatgggtaaaaggaagctctggctcgaattcctcatgtattattcatgtgtgatgccacccaacg

SEQ ID NO: 844613 - DNA, 120 bp, Artificial Sequence
  ENSG00000258743_22 (sequence is synthesized)
tgattcagagaagaaaattctcagtgtgttcaccagaggtgattacatgagaataaagcacggcctgattttttttcttgttcacaggaaaaaaaaaagaaaagaatgtagaatttctga

SEQ ID NO: 844614 - DNA, 120 bp, Artificial Sequence
  ENSG00000258743_23 (sequence is synthesized)
tgtgggattgtttcgaccttggagagtgtccgtatgagacacatgtgtggtatacaaaacacctttaagatttaatcagaattgtatatctttccaaattaaattgattgctccctcaaa

SEQ ID NO: 844615 - DNA, 120 bp, Artificial Sequence
  ENSG00000258743_24 (sequence is synthesized)
tactgagtcagatggagccatttatatatggagatccaggatttataagatccataccattgaatttgaagacactgggttactacgtataatttgaggatatgaggaattatttaattt

SEQ ID NO: 844616 - DNA, 120 bp, Artificial Sequence
  ENSG00000258743_25 (sequence is synthesized)
aatattaaattttcttgttacaatttggaactattatattttaagaatctagttaattccgcacttcaggcaaatctttaagtctgcaatgttttgcaatgcaatgagagacagatagat

SEQ ID NO: 844617 - DNA, 120 bp, Artificial Sequence
  ENSG00000258743_26 (sequence is synthesized)
acaaaactgtccttgcggtttactgtaactaatgtttctaatgcaatcctaaaactacataacactggaggtcatattagtcagcactaggggagaaatgtcttctgctgaacaacatcc

SEQ ID NO: 844618 - DNA, 120 bp, Artificial Sequence
  ENSG00000258743_27 (sequence is synthesized)
ttaacacccctcagcagaatcagagaatgcggacagaagaaatgctctatgagctgggggagtttttattagaaaggacttatccacttggaaaaaaagcagtacagcagaggctaacac

SEQ ID NO: 844619 - DNA, 120 bp, Artificial Sequence
  ENSG00000258743_28 (sequence is synthesized)
caccaatcattgaacagaaaaaggattgtagagtcataactgggaagaagtgtaattcatctagatcgttcttcaagctccagaggattgttattcattcacggattgtgaactaaatat

SEQ ID NO: 844620 - DNA, 120 bp, Artificial Sequence
  ENSG00000258743_29 (sequence is synthesized)
ttctcttaaatgtaaagtggaccagagttagttttttctccctatgactttggtcagatggccatggattttgtgaacattcaataaatatttattagtattaatggttctgtatcttca

SEQ ID NO: 844621 - DNA, 120 bp, Artificial Sequence
  ENSG00000258743_30 (sequence is synthesized)
gtgaaatattgtcctgccctataatcctttcagttttcagtctaaaattttttttcacaacaaattttaacctattctatatttgttgtaaatggaacattaaaaactgagaatgacgaa

SEQ ID NO: 844622 - DNA, 120 bp, Artificial Sequence
  ENSG00000258743_31 (sequence is synthesized)
tatacaaaggaaactcaacattcctcttccccaaagtaaacctattgcaaaaaccccttccatctaataatagcaactcaaggtcccatggagtttcatacattttccagagttacaaaa

SEQ ID NO: 844623 - DNA, 120 bp, Artificial Sequence
  ENSG00000258743_32 (sequence is synthesized)
cctggctaacactgagtcaagttaggaatctcaatcaatgtctttgaccaacttaaagtgtttgtagaatgtttgatgtacctaagagtgagtaaaatgtgaaagtcagttgctggaatt

SEQ ID NO: 844624 - DNA, 120 bp, Artificial Sequence
  ENSG00000258743_33 (sequence is synthesized)
ggttgaatgagagtgtcgggtgaagaaggcaagacatgcaacagaggaagaggaatgtgtcatccaagaggggaaaagagaaatactattactatctgttgtcttggtggttctcatgag

SEQ ID NO: 844625 - DNA, 120 bp, Artificial Sequence
  ENSG00000258743_34 (sequence is synthesized)
gagtgaaaggagaattgctaacctggaagaagatcagagaaacacactatacagtcctgcagtccttcaccaagtagcatgggatagaagctctgaacatcagcataattttgaggccta

SEQ ID NO: 844626 - DNA, 120 bp, Artificial Sequence
  ENSG00000258743_35 (sequence is synthesized)
ttaatttatttttgtattaacttatttttatttagaaatgatggtaaagatgatgatgatgatgatgatgatgcttacaataacagatactcaaggttaaaaaataattgtaaaagttca

SEQ ID NO: 844627 - DNA, 120 bp, Artificial Sequence
  ENSG00000258743_36 (sequence is synthesized)
tgtaaaagttcaaacttacattagagtaaaagttatcctgggtgctgcaacctttgtccaacatgactcatgtaaccaatattaacagtgtaaccacaaagctttgtagtggaatacatg

SEQ ID NO: 844628 - DNA, 120 bp, Artificial Sequence
  ENSG00000258743_37 (sequence is synthesized)
taggcaattatttttacccaacaagatatactagcattggtttttctctgcctctgtttctgatgagttgttcatacaatagaggctagatagaatattcaagtcaatataatacaaaca

SEQ ID NO: 844629 - DNA, 120 bp, Artificial Sequence
  ENSG00000258743_38 (sequence is synthesized)
caactaccactacatatgggctagaagcaggaaccccatcacccacctagagaatacagaagaattgagaaagtgaagagaatattgtcaggatattggagaagagatttctttggcgat

SEQ ID NO: 844630 - DNA, 120 bp, Artificial Sequence
  ENSG00000258743_39 (sequence is synthesized)
gatgggcactcaagtgagataattagcttagggtcacctagggtcctataaaaaggtaacccagcagataaacactgcaggagtatttaacgatgctcaggggcctgagaaatggtaaaa

SEQ ID NO: 844631 - DNA, 120 bp, Artificial Sequence
  ENSG00000258743_40 (sequence is synthesized)
ttacaccatcacccaggcccacggtgctgcatatatcactacatctcatcccctgctgccccccacactgcagccagaagttgtgaaaggcgcgcaggagagagcagagaagcagcagga

SEQ ID NO: 844632 - DNA, 120 bp, Artificial Sequence
  ENSG00000258743_41 (sequence is synthesized)
cctcccctctatctccactgtcggtgtccctaccgaacagggtcctagatgggtaggaaggaagaatttaacactgagtcaagttgggaatttcaattgatagtttgactgattaaaagt

SEQ ID NO: 844633 - DNA, 120 bp, Artificial Sequence
  ENSG00000232354_0 (sequence is synthesized)
gaaccacagcacagactctccaaagagaagccaggccaagaagaatcccaggactggaaggccttgtgggacgtcccaggcacatgccagggactgggcacatggtatgaacaagacaca

SEQ ID NO: 844634 - DNA, 120 bp, Artificial Sequence
  ENSG00000232354_1 (sequence is synthesized)
tcctcttgagctccctggcttggcagcagatgcatacctgggaaggatgctaggtcatccgggaactctacctccttcaaatccctaaggactgtgctcccaatccgcttacgctcaagg

SEQ ID NO: 844635 - DNA, 120 bp, Artificial Sequence
  ENSG00000232354_2 (sequence is synthesized)
acccactccagatggcacggggacggggggagtaggaaaagtggcatggtgagcagagccctggctatgcaggtggcagatggcagagttggaaggaatcttggaattccttgcacagat

SEQ ID NO: 844636 - DNA, 120 bp, Artificial Sequence
  ENSG00000232354_3 (sequence is synthesized)
aaggactgtgctcccaatccgcttacgctcaaggaagaactggtcagccctaggtgcagctgcaacctgagggacttgtcctgggatcagacattttgaggactttcttgacccttggct

SEQ ID NO: 844637 - DNA, 120 bp, Artificial Sequence
  ENSG00000232354_4 (sequence is synthesized)
gatatccttgcaggcaggacctgcagctaagcaagacgtaggactgcaagctgggttggcaccctccccctagggagttctccaggccttgccccctctgtccccagcctggaagccctc

SEQ ID NO: 844638 - DNA, 120 bp, Artificial Sequence
  ENSG00000232354_5 (sequence is synthesized)
gtacccccagaagtacttccgctcagagaagaaggagacggcaagcagggtgtacaggtagaggccctccaccagcagccagaagaagttagccatgacacaatattggaaaaagaccat

SEQ ID NO: 844639 - DNA, 120 bp, Artificial Sequence
  ENSG00000232354_6 (sequence is synthesized)
ggctgccttacagcccacctgcagggggaggagaaaagacggggttcactggggctgtcaagggtccttgactgcccacactcgtgtctggggggacaaacacagttgcagtgcagccaa

SEQ ID NO: 844640 - DNA, 120 bp, Artificial Sequence
  ENSG00000232354_7 (sequence is synthesized)
aaggactgtgctcccaatccgcttacgctcaaggaagaactgagaccaggcccacagagtatggctgtgcaagttgttcactctacaagggcacctggccggggtcttaccttgaatgga

SEQ ID NO: 844641 - DNA, 120 bp, Artificial Sequence
  ENSG00000232354_8 (sequence is synthesized)
ggagaagagcttgaagatgaggggacaggccaagacaactacctggccccgaggggtggctggccagcagatgaggaaatggaggcacagactgattagaaaaccagctcaaggtcatgt

SEQ ID NO: 844642 - DNA, 120 bp, Artificial Sequence
  ENSG00000232354_9 (sequence is synthesized)
tgctgctctctcattcctgttgagggctctctggtggagcctctgtctcacaggtcacctgcaggccaacactcccagaagcagctagcaccatggttgacctcgtccaggtccagggaa

SEQ ID NO: 844643 - DNA, 120 bp, Artificial Sequence
  ENSG00000232354_10 (sequence is synthesized)
cctgcctaagtgctgttgccctggaagccacagtgagcacgagctccatcttgcacctttaccagccaatgggggtaaagacattagctgggttactcaggctgaaatgctcaagacact

SEQ ID NO: 844644 - DNA, 120 bp, Artificial Sequence
  ENSG00000232354_11 (sequence is synthesized)
ctgtctcaagggatttgtggctgtttcatcctcaagtatagggggaatagtggccaggaagatctcagaggtggcttctggaagaggaatctgggtactggctaccctgccttgtgtccc

SEQ ID NO: 844645 - DNA, 120 bp, Artificial Sequence
  ENSG00000232354_12 (sequence is synthesized)
atcattggtctgtcttgcctgtcttggagcacatttctcaccaaggttcgtaggccatgttcaatcccctcaagggaagcctgagaccacagctactgcctcgaatcagaagccccagcc

SEQ ID NO: 844646 - DNA, 120 bp, Artificial Sequence
  ENSG00000232354_13 (sequence is synthesized)
accagccaatgggggtaaagacattagctgctcgctggacagtcccgtcagacacagacatgaaactcctgcgagaagaccaagccctggataatatcaccactcatcctgtggcacttc

SEQ ID NO: 844647 - DNA, 120 bp, Artificial Sequence
  ENSG00000232354_14 (sequence is synthesized)
attacattccggctggggatatttgaatattagatattaagcaattcctgtcaattttgttaggtgtgtaatgacagtatcatagttatatagaagagtgtcctttggttttagagatgc

SEQ ID NO: 844648 - DNA, 120 bp, Artificial Sequence
  ENSG00000232354_15 (sequence is synthesized)
ctccctggtaccataccccagccgatgagtatgtacccccagaagtacttccgctcagagaagaaggagacggcaagcagggtgtacaggcccagaaccagcctgctgtcaggatcagaa

SEQ ID NO: 844649 - DNA, 120 bp, Artificial Sequence
  ENSG00000232354_16 (sequence is synthesized)
caaaagaggaggactgcatatgtatggacccactccagatggcacggggacggggggagtaggaaaagtggcatgatgaggaaatggaggcacagactgattagaaaaccagctcaaggt

SEQ ID NO: 844650 - DNA, 120 bp, Artificial Sequence
  ENSG00000232354_17 (sequence is synthesized)
agccaatgggggtaaagacattagctggtaagtcatttaaaacttattgaaagtaacacagttgtgtgatggagcatgatacagttactcgtataactgttaaaagataggagacttcaa

SEQ ID NO: 844651 - DNA, 120 bp, Artificial Sequence
  ENSG00000232354_18 (sequence is synthesized)
cactctacaagggcacctggccgggagtccctcggattgctccagcctctttgaccactttcctttgcctttccacttccttgagagatgaggaaatggaggcacagactgattagaaaa

SEQ ID NO: 844652 - DNA, 90 bp, Artificial Sequence
  ENSG00000232354_19 (sequence is synthesized)
aatacaaaatttagccaggcatggtggcgggagcctgtaatctcagctcctagggaggctgagccagaagaatcgcttaaacctggaagc

SEQ ID NO: 844653 - DNA, 120 bp, Artificial Sequence
  ENSG00000232354_20 (sequence is synthesized)
gacggcaagcagggtgtacagatcctctgatacttcgggataaactggtgattttaattatccatccatcaattcatctattcaccttcccatctatatatctacccatctgcccattca

SEQ ID NO: 844654 - DNA, 120 bp, Artificial Sequence
  ENSG00000232354_21 (sequence is synthesized)
tatccatttatttacccactcacccactagacattcactatcaactcactcatttatccattttttatccatgtgtccatccatcatctatcatcttcccatctatcaatccatccaccc

SEQ ID NO: 844655 - DNA, 120 bp, Artificial Sequence
  ENSG00000232354_22 (sequence is synthesized)
acacacctatctctccattcttctaccaacccactcagtcatctacccatccattcatctctgcacccacccatcaatccacttgtgcatccacccacatatctacctacctgcccctct

SEQ ID NO: 844656 - DNA, 120 bp, Artificial Sequence
  ENSG00000232354_23 (sequence is synthesized)
gcctatcatctgtccaatcttccttacttaacccatttatcctgctgcctacttagccatccaccaacctgcccatccacactcccaccccacccactcattcatctaatgccaatttgt

SEQ ID NO: 844657 - DNA, 120 bp, Artificial Sequence
  ENSG00000232354_24 (sequence is synthesized)
acggggacggggggagtaggaaaagtggcatggtcccttcccgtggatataattcttcccaggcctgttgtgtgagttggtgatgccatcattcctgcctcacacttgcaaacttccctc

SEQ ID NO: 844658 - DNA, 120 bp, Artificial Sequence
  ENSG00000232354_25 (sequence is synthesized)
aaggactgtgctcccaatccgcttacgctcaaggaagaactggcccagaaccagcctgctgtcaggatcagaacaaaagaggaggactgcatatgtatggacccactccagatggcacgg

SEQ ID NO: 844659 - DNA, 120 bp, Artificial Sequence
  ENSG00000232354_26 (sequence is synthesized)
aggcacacaggacagcagctcaccttcccatccttgctggcttttgcacaaatacttctaaggggccaggcgtggtgactcatgcttgtaattccaagcactttgggaggctgaggcagg

SEQ ID NO: 844660 - DNA, 120 bp, Artificial Sequence
  ENSG00000232354_27 (sequence is synthesized)
catcagcctcgtccatagactcaggagcaccaggcccagtctctggactgcacctgccctctccctggaagagatccaagttccagatggaaccccaataccaacccaagactgaaacct

SEQ ID NO: 844661 - DNA, 120 bp, Artificial Sequence
  ENSG00000232354_28 (sequence is synthesized)
aaggactgtgctcccaatccgcttacgctcaaggaagaactggttgttcaccacggagggatgctccactgagggggtgaagctgtatgcctgaagggctgtgtctacctagacggacat

SEQ ID NO: 844662 - DNA, 120 bp, Artificial Sequence
  ENSG00000232354_29 (sequence is synthesized)
tctctttctaattgtgacagaggccctttatagattagcagtggccctgtgtatttcgggaactaaagggaaatggaaagatgttcacaaaatctgtcccacaggtcagccctaggtgca

SEQ ID NO: 844663 - DNA, 120 bp, Artificial Sequence
  ENSG00000232354_30 (sequence is synthesized)
gaagccaggccaagaagaatcccaggactggaaggccttgtgggacgtcccaggtttgtcttgtgtcaatagcactgatactcaatctcctactcccatctgtgagcatgcagaccctac

SEQ ID NO: 844664 - DNA, 120 bp, Artificial Sequence
  ENSG00000232354_31 (sequence is synthesized)
ttgccttcccacagcctcccttttcatatttttcatgtttctttagctctgtcttcaagccttgttgctcccgcaaaaaaacctgcctcttcctccagtcctcccaagcagggggaacag

SEQ ID NO: 844665 - DNA, 120 bp, Artificial Sequence
  ENSG00000232354_32 (sequence is synthesized)
tcctgacacctttccaagccctggtccatggacattgtgcccccttctccctgcccatggtgacctgctccaaaaccctcaaggagaagggagtgtatgtcatttcctccctgtaaagta

SEQ ID NO: 844666 - DNA, 120 bp, Artificial Sequence
  ENSG00000232354_33 (sequence is synthesized)
aagataattttgcaggggactgtgtggatgaaatgacatgatgcatggaaatcccttagcgtgtgcctggcatgtaaactgcaggtgtcatcattattactgaggaatactgagtcccga

SEQ ID NO: 844667 - DNA, 120 bp, Artificial Sequence
  ENSG00000232354_34 (sequence is synthesized)
acatggctgtctcattggtggactggggtctcccccagggcattcatctactatgtgtttattgcaccctttttccatgtgaggcacatgccagggactgggcacatggtatgaacaaga

SEQ ID NO: 844668 - DNA, 120 bp, Artificial Sequence
  ENSG00000232354_35 (sequence is synthesized)
cattggtctgtcttgcctgtcttggagcacatttctcaccaaggccatgttcaatcccctcaagggaagcctgagaccacagctactgcctcgaatcagaagccccagcctcatcatctg

SEQ ID NO: 844669 - DNA, 120 bp, Artificial Sequence
  ENSG00000232354_36 (sequence is synthesized)
gggccagagaactagggcaggaggagccaagtagcacagcaggaagcatgagtccctccgaggagaagctggtctctgagaggagcacagaatgcagcaggctggataagccccctgctg

SEQ ID NO: 844670 - DNA, 120 bp, Artificial Sequence
  ENSG00000232354_37 (sequence is synthesized)
ccaaagcctccccgctgcaaattcttttttttttttttttttgccagcctcacttcctcttggggaaggctgagctctggtagaagaagagaatgagaactgctgtaaatacttctaagg

SEQ ID NO: 844671 - DNA, 120 bp, Artificial Sequence
  ENSG00000232354_38 (sequence is synthesized)
ggttggaaggcctgtcatttctctgggaattttgctgctgctggactttgtttacccctctctgacagcactgggcacgccctgttttgtaggccggctattgtgtctgagtccctgcca

SEQ ID NO: 844672 - DNA, 120 bp, Artificial Sequence
  ENSG00000232354_39 (sequence is synthesized)
acggggacggggggagtaggaaaagtggcatgagaccaggcccacagagtatggctgtgcaagttgttcactctacaagggcacctggccgagctaatcaaatcctgtgagttctttaaa

SEQ ID NO: 844673 - DNA, 120 bp, Artificial Sequence
  ENSG00000232354_40 (sequence is synthesized)
ttgctggccggctattgtgtctgagtccctgccagactttgggctctctaaacctccggctgccagcacaggccagggagtgaatccggggctgggtctctggccctgagctctgcttca

SEQ ID NO: 844674 - DNA, 120 bp, Artificial Sequence
  ENSG00000232354_41 (sequence is synthesized)
tgggtcggccccgaggaccctgccacagcttcttgatggctcccccattagtgctgcagctgtaactgctttgtctctttgcgggtggcacaactccagatggcggcaagagggcctccc

SEQ ID NO: 844675 - DNA, 120 bp, Artificial Sequence
  ENSG00000232354_42 (sequence is synthesized)
cttagaggcctgagctggccctctggactctgccactctccagcttggtttgagagtctgtccctgtcttgatctccctgatgagtggggccagctcgtgctactactctgttatgtgga

SEQ ID NO: 844676 - DNA, 120 bp, Artificial Sequence
  ENSG00000232354_43 (sequence is synthesized)
ctccctggtaccataccccagccgatgagtatgtacccccagaagtacttccgctcagagaagaaggagacggcaagcagggtgtacagggaaggcctccctctccaggactcctttaga

SEQ ID NO: 844677 - DNA, 120 bp, Artificial Sequence
  ENSG00000232354_44 (sequence is synthesized)
ggccgggctctctggtggagcctctgtctcacaggtcacctgcaggccaacactcccagaagcagctagcaccatggttgacctcgtccaggtccagggaaggcctccctctccaggact

SEQ ID NO: 844678 - DNA, 120 bp, Artificial Sequence
  ENSG00000205396_0 (sequence is synthesized)
agcagttggggcctggtcagaggggatacggcagctgggggttatttggcagggatgcagcagctgggacctggtagggccccgtcatgacagaggctgtgaacccatgctgtcactgtg

SEQ ID NO: 844679 - DNA, 120 bp, Artificial Sequence
  ENSG00000205396_1 (sequence is synthesized)
ccaagtgccgccagcctacctccgtgtcatggagcagttggagacacagaggtgctgtaagtggttgtgcagaaaggacccttttctgggtgagaagcacatctcagcaccgctgcctga

SEQ ID NO: 844680 - DNA, 120 bp, Artificial Sequence
  ENSG00000205396_2 (sequence is synthesized)
gatggacgtggaggaagacgtggctaccctacttgcacaggagcagggggcatcattgcccagtgtgagcagggacgctgtagggcccaaggatgtggacagcttacaaagttaccgatc

SEQ ID NO: 844681 - DNA, 120 bp, Artificial Sequence
  ENSG00000205396_3 (sequence is synthesized)
gcctcgagattctgcagtgagtcctctgtccctgctgcccgaccatcaccaaactcacctcagaggatgagttttgtttttagaaaagcctctctgaggcaggacacgtcttcccagctt

SEQ ID NO: 844682 - DNA, 120 bp, Artificial Sequence
  ENSG00000205396_4 (sequence is synthesized)
acgtttacgctgactcctccagtgcctcatcaatgaagtaagcaggcagctacgttctggatggctagcatgtaccgaaggcacaaaacctccagagttggcagagttaagtcctggcgt

SEQ ID NO: 844683 - DNA, 120 bp, Artificial Sequence
  ENSG00000205396_5 (sequence is synthesized)
gcccgaggctatccaggggaacacgcgggacagacagcaccctcagcctgtccccatgaccctctgctccagtctgaggggcaggacaccatgagacctctcagacacagagtccaccct

SEQ ID NO: 844684 - DNA, 120 bp, Artificial Sequence
  ENSG00000205396_6 (sequence is synthesized)
cagcatccacagcctcagagagcagcggggccccttacccctgaaccccctccaagagcatcaggacaacaagccttgagctgtggagacaagagaatcagtatccctggcccagggagg

SEQ ID NO: 844685 - DNA, 120 bp, Artificial Sequence
  ENSG00000205396_7 (sequence is synthesized)
attccaggagaggacacgggcaggagccctggcccagagccagaaccaagagtccagccagcgaaactggaactagggtccccggcacccaggactctgcgagcatcccccaacagcaag

SEQ ID NO: 844686 - DNA, 120 bp, Artificial Sequence
  ENSG00000205396_8 (sequence is synthesized)
agagaggtggggcctcgcctctcccactgtgccctggtgggaggatcctgggctcccttaggaagcagggtgggagctggttgcccatgcctttgtgcccccacagcccttcacctcagc

SEQ ID NO: 844687 - DNA, 120 bp, Artificial Sequence
  ENSG00000205396_9 (sequence is synthesized)
gccccccagagcttggtggtgtcccaggacggtcctcccaggaaacattttgaataagttgctgaagtgcctgatggacgtggctctcgtcacgaaatgagtttggatccgagaagccct

SEQ ID NO: 844688 - DNA, 120 bp, Artificial Sequence
  ENSG00000205396_10 (sequence is synthesized)
agccctggcccagagccagaaccaagagtccagccagaggcggctagagcatcacctcttcacgcaagtgtcttgaaactcagcttgaagatttcagcaaatgtgtcttacagagaagag

SEQ ID NO: 844689 - DNA, 120 bp, Artificial Sequence
  ENSG00000205396_11 (sequence is synthesized)
aagagggagtcagcccatcgggattaaaaatatagaggcagtgacaacacacactcggcttcagttcttaggagagttttggttttgattttttttttttttttggagaagatttttttt

SEQ ID NO: 844690 - DNA, 120 bp, Artificial Sequence
  ENSG00000205396_12 (sequence is synthesized)
ttaatggatctacactgttaactgagactctgttgagattcactggtttacttaaaaacttctcagggatgtctgtaaatttcagtgttatatgtcatgaaaactggtgtgggcagatct

SEQ ID NO: 844691 - DNA, 120 bp, Artificial Sequence
  ENSG00000205396_13 (sequence is synthesized)
gttggttgaaataatttctactgtttcaaatactgaaggcaggaataattggtttatactgtgttttaaatagaagtattactggtaagtcccccaggacattaaaccttaaaaatcagt

SEQ ID NO: 844692 - DNA, 120 bp, Artificial Sequence
  ENSG00000205396_14 (sequence is synthesized)
agttggggcctggtcaacaggggtccaggagctgaggcctggttggtgggccgtctagcagttgaggcctggtcatctgggcccggcatttggggcctgatcggcggggatcagagcagt

SEQ ID NO: 844693 - DNA, 120 bp, Artificial Sequence
  ENSG00000205396_15 (sequence is synthesized)
gaggcctagtcagtgaggtgtggatgtgggggcctggatggacgtggaggaagacgtggctaccctacttgcacaggagcagggggcatcattgcccagtgtgagcagtgagacgtagct

SEQ ID NO: 844694 - DNA, 120 bp, Artificial Sequence
  ENSG00000205396_16 (sequence is synthesized)
gccacccatcagtgccctggaagtgaagagaagacatcaggagatgagggacacagaaaaatggctccaggtgcttctcgactgccagcgacataggagcggcaaggagagcaagtaatg

SEQ ID NO: 844695 - DNA, 120 bp, Artificial Sequence
  ENSG00000205396_17 (sequence is synthesized)
ttggcccaccccaggctgtccagctccagcagccttgcaggcagcctctccagaaaaagagcctggtcctccccaccctgctccccacaggctgtccctgaccctgaggcccagaggcac

SEQ ID NO: 844696 - DNA, 120 bp, Artificial Sequence
  ENSG00000205396_18 (sequence is synthesized)
aagaggacttctgtagagcccaggggagcaggctgttctcttggggccccagcgggctcaaggtgtggccaggctgtccccaactcaggatagatcataggctgtcctgcgtacctcctc

SEQ ID NO: 844697 - DNA, 120 bp, Artificial Sequence
  ENSG00000205396_19 (sequence is synthesized)
tggaactccctgcccaagctctgccatggacctggacgtcaggggcctgtggtttaactttgaatagggattctggaccttacacgtgtgccctggacagccccagaaccatggggtggg

SEQ ID NO: 844698 - DNA, 120 bp, Artificial Sequence
  ENSG00000205396_20 (sequence is synthesized)
gaccgacccagcaagcccaccggggccctgaaacccggccctgccggacactgtgataataaccaagaggcaagtccagagacatccactttgcccaatggcacctgcatccaacttctc

SEQ ID NO: 844699 - DNA, 120 bp, Artificial Sequence
  ENSG00000205396_21 (sequence is synthesized)
cctcattttctactttctacggggaaacctactccctcagaggccaccagagggaagagtgagcaaggcgttcctgcagtcccgaccagccagcggcatgtcctgtggcctctgactcaa

SEQ ID NO: 844700 - DNA, 120 bp, Artificial Sequence
  ENSG00000205396_22 (sequence is synthesized)
cctatgagacagagctctgatcccagggcacacttcccaggacacggggcccagcctcaaccagagccctgtgaagggaggggcaccaggatgaccacatgggggaccatggcgctgcac

SEQ ID NO: 844701 - DNA, 120 bp, Artificial Sequence
  ENSG00000205396_23 (sequence is synthesized)
acctgggcactgtacttctcattggagaatccaggcaagatcttgaagcaggtgcatgaggtcctgagcctgtgcagcaaacagcactcatctggggttggcacgaaggggtctacagag

SEQ ID NO: 844702 - DNA, 120 bp, Artificial Sequence
  ENSG00000205396_24 (sequence is synthesized)
ccacggccaccgcagcctcttcccggccccatctgtgcagtgcaagtgatccacgcctgctcctaaacccagcccagcaagcagcagcagcccgggcccccaagcccgccaggccaatgt

SEQ ID NO: 844703 - DNA, 120 bp, Artificial Sequence
  ENSG00000205396_25 (sequence is synthesized)
gctgcccagaggcttcgaggccctgcccgctgtacctcccaccacctggaagctgcctcctgacgccttccagccactgctgcagccgcaacaggtgtcgcggccagtgcaggctttcca

SEQ ID NO: 844704 - DNA, 120 bp, Artificial Sequence
  ENSG00000205396_26 (sequence is synthesized)
gacggtggcagcgcccagcagccgttgcctcagctctttggtggcagccaggccaacaagggcagcaacgatgactaggatgatgagtgagcaaacagctccacactggtggacaggctg

SEQ ID NO: 844705 - DNA, 120 bp, Artificial Sequence
  ENSG00000205396_27 (sequence is synthesized)
ggtgcgcacccggtggtcctcaaaggctcgctgggcctgtaccaccgttataaatttgagatcatgagattataccgtttgccttcttgctttttgaagtacgagtatttttatgcacac

SEQ ID NO: 844706 - DNA, 120 bp, Artificial Sequence
  ENSG00000205396_28 (sequence is synthesized)
tttgtagacttcaaaatccatgaagagtctcaaagaagccggatggatggagcctgctgcggatgccttttactctcgtagatcagggtgatttacattccacctgtagtctgcttgcaa

SEQ ID NO: 844707 - DNA, 120 bp, Artificial Sequence
  ENSG00000205396_29 (sequence is synthesized)
acacacagagcagccttgcagctttgtgcctttagactcttggttttgcatttctccctgctcccttcttccttccagtaagctgcaacttttctgattgaaagggtgcaaggctaacac

SEQ ID NO: 844708 - DNA, 120 bp, Artificial Sequence
  ENSG00000205396_30 (sequence is synthesized)
acggaatgactaactcaggatcacatactggcagtgggagaggcaggaggagcagctgccatcaattgccagggccaagtggatgataggatggatgctggtgcatgcggaggaggcaga

SEQ ID NO: 844709 - DNA, 120 bp, Artificial Sequence
  ENSG00000125899_0 (sequence is synthesized)
cttgacaaagtccatggactgtgatcctgggaccaacagcatcagtatcaactgggaacttcttagaaattcaaattcttggggctattccccaaatttctgagtcagaagctctgggga

SEQ ID NO: 844710 - DNA, 120 bp, Artificial Sequence
  ENSG00000125899_1 (sequence is synthesized)
aagctctggggatagggcccagcaagctatgtgttaacagactttttagatcaggggttccccccaactcccaggccaagaaccagtaccagtctgtggcctgttaggaaccaggctgca

SEQ ID NO: 844711 - DNA, 120 bp, Artificial Sequence
  ENSG00000125899_2 (sequence is synthesized)
agggcagccgtctctgcatctacactcttggtaattgagactttgtggctgctcgtttgaagagatagaatctaattccctagccttgtctctggactggccttatgattctctttaacc

SEQ ID NO: 844712 - DNA, 120 bp, Artificial Sequence
  ENSG00000125899_3 (sequence is synthesized)
atagaatgtgggagaagtgatgatgtgcctattctaagtctaggcctcaagaagtcttgaaagattctgttccctcttggttagtccactggaggatgagagacccacggcccaataacc

SEQ ID NO: 844713 - DNA, 120 bp, Artificial Sequence
  ENSG00000125899_4 (sequence is synthesized)
caagacaagaagaaacatccagctgagtccagcctaaattgctgatctgcagaattgtttgagggagaaggctgcaaggagtcctgtgggaggccctggggtcttattagttgaaggaaa

SEQ ID NO: 844714 - DNA, 120 bp, Artificial Sequence
  ENSG00000125899_5 (sequence is synthesized)
caaatcatcatacctttaatactggctccaatttgcccctttcatgagtagtcttggagagataattgctaatctggaatggacatacttcttgatcttggttggcatttttcaaactgt

SEQ ID NO: 844715 - DNA, 120 bp, Artificial Sequence
  ENSG00000125899_6 (sequence is synthesized)
gatgaagacactttttatagccctgttcagaatacagaaggagacctactcttctttgatcacaatctaaagacagacagaggacatgtggaaagatctgtcatggattaaatataaaca

SEQ ID NO: 844716 - DNA, 120 bp, Artificial Sequence
  ENSG00000125899_7 (sequence is synthesized)
aaaatgaagcaagaaacaaaactagtctttcaatgaaaagctgaagatgctgaagaagaaatgcaaaatcatttcacaagaaaaacaaaatcagaccaggatcacttggcgtaccatcct

SEQ ID NO: 844717 - DNA, 120 bp, Artificial Sequence
  ENSG00000125899_8 (sequence is synthesized)
agcaaaatatatcttcttggagttgccctgacaatgctcctcaaaaactactttcttcatcttcttgcgggttaaatactgggattaaatcctagcataaaaattacatctaaaatgaaa

SEQ ID NO: 844718 - DNA, 120 bp, Artificial Sequence
  ENSG00000125899_9 (sequence is synthesized)
agtctcaccattgcctagactaccacagggaccacagacacataacggtgcccagccaagacaagaagaaacatccagctgagtccagcctaaattgctgatctgcagaattgaaaactt

SEQ ID NO: 844719 - DNA, 120 bp, Artificial Sequence
  ENSG00000125899_10 (sequence is synthesized)
gggaggaagacatactataccacatggtcctttcctttttctgtggatggcaaaaagatgcatcacttcccggagcttatgatagaagatgctccttcgccagtgtgagacacttaaaag

SEQ ID NO: 844720 - DNA, 120 bp, Artificial Sequence
  ENSG00000125899_11 (sequence is synthesized)
gacaatgatttgtgcagggaactaaccctgtgtgctacgtgtccttttgctccattttactgatgtgacaattggagcagaatagtttatgtggcaaattttcccagcatttatttgcac

SEQ ID NO: 844721 - DNA, 120 bp, Artificial Sequence
  ENSG00000125899_12 (sequence is synthesized)
tgcttactacattcacattctagtttacaaatcttgacaaagacaactgaataggtgttttgcatgaatgtacttattttgtattgaagtatgacacacatgcagagaagtgacattgtc

SEQ ID NO: 844722 - DNA, 120 bp, Artificial Sequence
  ENSG00000125899_13 (sequence is synthesized)
ataagcaaatggcttgatggcttttacaaactgaatgtatgtataaccaacatcgagaactagaagcagctttttcagcccctccttcctgaaacttttcctctccttccaccttgacca

SEQ ID NO: 844723 - DNA, 120 bp, Artificial Sequence
  ENSG00000125899_14 (sequence is synthesized)
cctctggcagaataggtaattgtactaaactcttccaccataattgtgatctcatcttgggatttgccaaaaaacatttatagcatgtctgagaagtccagaggaagtatatatctcctc

SEQ ID NO: 844724 - DNA, 120 bp, Artificial Sequence
  ENSG00000232359_0 (sequence is synthesized)
acatttgcctccaagcaagttggaagaaaaaaaatggaacatctttttcagtctttggacctcaaaatacataattcaggctgtacaaggagcatggcaccagcatgtgcttctggtgag

SEQ ID NO: 844725 - DNA, 120 bp, Artificial Sequence
  ENSG00000232359_1 (sequence is synthesized)
ggcctcaggaagcttccgctcttgatggacagtgaaggggggacaggcatacatggtgagaggaaggaagccaaaggaagagagaggtgccagactcttttcaacgacaattctcaacaa

SEQ ID NO: 844726 - DNA, 120 bp, Artificial Sequence
  ENSG00000232359_2 (sequence is synthesized)
ctggagatcaaatttcaacaagatacttaatggtgcaaactgcatccaaatcatagcacattaaatgaactacctacttctctgtcactcacctttgagttgctgaatatcagaaggttc

SEQ ID NO: 844727 - DNA, 120 bp, Artificial Sequence
  ENSG00000232359_3 (sequence is synthesized)
cagatctagatagatacagctctagacagatccagataatttttctgtaagccagaaaaatgggggctcaccatgagactacctattgtagaaacatacggctttgatatacaaggaacc

SEQ ID NO: 844728 - DNA, 120 bp, Artificial Sequence
  ENSG00000232358_0 (sequence is synthesized)
tttaatacactggggacatggtgggagtgtggccttttatacagagctggaagaaggagccagatgaggcctcattgtttaggtgacattggagcagagacctgagtgaggttcactgtc

SEQ ID NO: 844729 - DNA, 120 bp, Artificial Sequence
  ENSG00000232358_1 (sequence is synthesized)
tgtctctctgttgccatccctgtgtggaccccacgaaggcaagggcctggtctccaatgctcactgtagcattggagggggtgtcgccggtacccaccctgatgcctatcaatgggatgg

SEQ ID NO: 844730 - DNA, 120 bp, Artificial Sequence
  ENSG00000232358_2 (sequence is synthesized)
gacacctgtgccccagcagctgtggtattcagtgccaaagacccccacctgtacttctttggagaccggctgattagagctgtcttgccaggacacaccaggggcgtcgggacaagacca

SEQ ID NO: 844731 - DNA, 120 bp, Artificial Sequence
  ENSG00000232358_3 (sequence is synthesized)
accttgccaggcagccccgagtgcggcctctccaccatgtcgcgcagtcgccgcatgcagcgccccaggcggccctcgccctcggccgggccctcgctgtcgcggccctcgctgtccagc

SEQ ID NO: 844732 - DNA, 120 bp, Artificial Sequence
  ENSG00000232358_4 (sequence is synthesized)
cgtcctcttcctcccgctccaccatctccgcgaactcctcaatcttctgcaggtagcggcgcttgcagcagccgtccaggtggtcctccgcgatgccccagtacagcagctcctcctgga

SEQ ID NO: 844733 - DNA, 120 bp, Artificial Sequence
  ENSG00000232358_5 (sequence is synthesized)
aggacagcgcgcacatctcgcgcagcagccgcagcttgcccgcgcgcaggaaggtcaggatagtgccgaaggcccccgggttgcggtcgaagaagaactcgttgcaggtgacgtcgtagt

SEQ ID NO: 844734 - DNA, 120 bp, Artificial Sequence
  ENSG00000234210_0 (sequence is synthesized)
cgaatacagacgaggcatgtaagaaaacgatgttttaagaaatatgttttatgctatatcatttcttttactgaaaacaattggacaaacaaacaagaaaagccaaggaaaatgcgaccg

SEQ ID NO: 844735 - DNA, 120 bp, Artificial Sequence
  ENSG00000234210_1 (sequence is synthesized)
ggacgtggaatcggcccgtctgtgagtggaaggatcacactcccagctgagatagaaataaagccacgcgtgcctctgtttctatgcgtggtaaaataaacaagcaacacttcgaggaac

SEQ ID NO: 844736 - DNA, 120 bp, Artificial Sequence
  ENSG00000234210_2 (sequence is synthesized)
tattgattctgttattaaaacacagcctgtttggtttgccagatcgtagccattattaatgcattattaattctatgtaagtgcctgcttgtcagatccattaaccgggggagtaattgc

SEQ ID NO: 844737 - DNA, 120 bp, Artificial Sequence
  ENSG00000234210_3 (sequence is synthesized)
cgagggagagagctcagaaggtgtgtcacgctgctcgctcggtctaggtggaacgaagcggagggaagccacgcggagcaatggaggcagccctgtaaggcagtgtccgtttctgtctgt

SEQ ID NO: 844738 - DNA, 120 bp, Artificial Sequence
  ENSG00000234210_4 (sequence is synthesized)
ggccaaaatggccagggatgtttttggccaagctgatgagacagagattggaagaggaaagtttcatactgatacttcggctggctggctgcagagtaacctgcattttgggccattttt

SEQ ID NO: 844739 - DNA, 120 bp, Artificial Sequence
  ENSG00000234210_5 (sequence is synthesized)
ggttaaatgtatgaaagcaaacatccacataaaggctgaaatggtttgtcaatgacccagaggctgttcccgggatcttttgagccctgggaacctggaggtacctgcagagctgagcag

SEQ ID NO: 844740 - DNA, 120 bp, Artificial Sequence
  ENSG00000234210_6 (sequence is synthesized)
attgcttccgcatcaaggaaacaagcgggacttgtgagaaggggcggtttgtgaggcccctggctgcaggcactggaggtcctgccacccagcggcacaaggctgccctgcctgctttaa

SEQ ID NO: 844741 - DNA, 120 bp, Artificial Sequence
  ENSG00000234210_7 (sequence is synthesized)
ggaggagacaggactattgacttggtccgatttgcctgaacttcttgagtttctcactgcccgtggattccagttgctttaacacgggaaatcggacctgctggaggagaccctgcgctg

SEQ ID NO: 844742 - DNA, 120 bp, Artificial Sequence
  ENSG00000234210_8 (sequence is synthesized)
tcctcaaagacaacactgtttccactaacgcaaggatacagcgtgattgaaacagtgccccacccatagggtggctggcagattgaacgtggtgctctgtggaaaaatgtggtctggcca

SEQ ID NO: 844743 - DNA, 120 bp, Artificial Sequence
  ENSG00000234210_9 (sequence is synthesized)
tacccagtgctatgcacgtgtttaccaccattgcctccccttctcccatctcatgttatcggtctgtaaagtgggtgtcatgagtgacttctggtatctgctgaggggggtggtgtctgg

SEQ ID NO: 844744 - DNA, 120 bp, Artificial Sequence
  ENSG00000234210_10 (sequence is synthesized)
gtgaggcccgagtagttggaggctttggtttttgcataatgggacccctattttccacttaacccgaaccaaagcggaatcatggaaggcctcaatgcaggcagccctgagggcgcaaga

SEQ ID NO: 844745 - DNA, 120 bp, Artificial Sequence
  ENSG00000234210_11 (sequence is synthesized)
aagtttgctttgttcaaagggctcctgggagccgggcgatgggtgaccacgccaggaagcaccttgacttgggtactttgcagaatcttcctcccagcgcacctagacttgccgctgtgt

SEQ ID NO: 844746 - DNA, 120 bp, Artificial Sequence
  ENSG00000234210_12 (sequence is synthesized)
ggcagctttgactcccagcccagtaacaaacacgtccatgacgctgtggactgacagagaccgcagagctggtcaacgtgaggaatggggcccgcgccccgggggacctccaaggctggg

SEQ ID NO: 844747 - DNA, 120 bp, Artificial Sequence
  ENSG00000234210_13 (sequence is synthesized)
ggcacgggagcaagcgggttactcaggcccacactaaccgcacttgtaacttctctccctgagtcaaggcaagttttcattcaagccaacgtaacacaatcttgccaatgactggaaaaa

SEQ ID NO: 844748 - DNA, 120 bp, Artificial Sequence
  ENSG00000234210_14 (sequence is synthesized)
taactagctttgcaaaaatttaaaaagactcagataatactcaaatttggagccctaatgaagtgtgtaaacctcatgtccacagactgtgttactggagccagagggggaagatccctg

SEQ ID NO: 844749 - DNA, 120 bp, Artificial Sequence
  ENSG00000234210_15 (sequence is synthesized)
aatcagcccgcctggggccgcccacggctgctccttgcgtgggaggtggccccatgcggccgcttctctgggggacagaacagaaactggggcgagtttggcccagccgcaacatccaag

SEQ ID NO: 844750 - DNA, 120 bp, Artificial Sequence
  ENSG00000234210_16 (sequence is synthesized)
agacccgggctccgacctcccttctgttctgggcccgtgtgaggccggggacggcccgggcaggtgtcagcagcaggagtgttttccggggtccctgtggagaacgtctctccgcagctt

SEQ ID NO: 844751 - DNA, 120 bp, Artificial Sequence
  ENSG00000234210_17 (sequence is synthesized)
ctcctggaacgttgtctccgaggctcagcagcctcctcacaccccctgggtccacacctcagacccatctgcccgcccggccagcctgcctcgtcgttccccgcgggctcgtgcctcaac

SEQ ID NO: 844752 - DNA, 120 bp, Artificial Sequence
  ENSG00000234210_18 (sequence is synthesized)
aggcagcgtgtggatgccaccgtcaccttcacgggagaggcaggtccgccctggagctgatcccctgatgaggaaatgaaaacacagagaggagaaggcactcgcctgaggtaccctgcc

SEQ ID NO: 844753 - DNA, 120 bp, Artificial Sequence
  ENSG00000234210_19 (sequence is synthesized)
agacgctggggacgggctcacacgcagcggcccaaagcctgctgcctctcggagcagcgggggtctgggacggatattgaggcacagggccttggacgtgcccgtggagctgctcagcca

SEQ ID NO: 844754 - DNA, 120 bp, Artificial Sequence
  ENSG00000234210_20 (sequence is synthesized)
gtggggagttagccagcgttttacaggcaaagctgcggagctgtgctggtgcctgtgtgaagatgctgaacatctccagggacaaattggagcctgaagcctcagagctactgatgatga

SEQ ID NO: 844755 - DNA, 120 bp, Artificial Sequence
  ENSG00000234210_21 (sequence is synthesized)
aggaaagaggcaaacattcaggagccacagtgcaagctgaggacaagagaaagagtcctggcttctggggggcgtaaaagccagaggagccgaggccccggcccacgctcggaaacactc

SEQ ID NO: 844756 - DNA, 120 bp, Artificial Sequence
  ENSG00000234210_22 (sequence is synthesized)
tcagcctggagacatcggctgcagctccccgcacgccctgtcccctcccgctctgcattaatcttgcactgacaccctctttatgctgttggaaaaatcgaaatgccaggaggcgggagg

SEQ ID NO: 844757 - DNA, 120 bp, Artificial Sequence
  ENSG00000234210_23 (sequence is synthesized)
cagggagaatccctcatcagcaacgtttatggtattgacttgcatctcattgactgtgtcaacaagcgcttggcgtctacatgtgggaacagcctataaaactaggaaagctaagcggcc

SEQ ID NO: 844758 - DNA, 120 bp, Artificial Sequence
  ENSG00000234210_24 (sequence is synthesized)
attgaaaacccatcacttcggatccaccagccacataaccctggacaggaagatgaaaagtaccttcttcccagcgctcagcctccagctctgggcctggtgaagacgggcacaaaacag

SEQ ID NO: 844759 - DNA, 120 bp, Artificial Sequence
  ENSG00000234210_25 (sequence is synthesized)
cagcagtgaaacacaaagtgaatcgaattagtcactactcaggcctggggcctcagctggaaatgaccttcagaattcaacggaggaggcccttcgtgggagacaaagaaggatggggcg

SEQ ID NO: 844760 - DNA, 120 bp, Artificial Sequence
  ENSG00000234210_26 (sequence is synthesized)
tcattgtgggagctttaacgctgcacaaaggacgatcaggaggtggcaatgcatgtgtgacctgcgccgggcagggagggaggctctcaagaggcctctgcgcagggcggtgccctgtgt

SEQ ID NO: 844761 - DNA, 120 bp, Artificial Sequence
  ENSG00000234210_27 (sequence is synthesized)
gcctctggaaatgaggcagaatttgtggtgacatcatgcccagtcttcctgccaacaaaagagtgtatcaggttggaagtgagttttccatttcataggagagtgggggtatggcaggag

SEQ ID NO: 844762 - DNA, 120 bp, Artificial Sequence
  ENSG00000234210_28 (sequence is synthesized)
tccctcggaaatagtggagttttgctcctgcacaaaaataagaccctgttctgaggacgtgagtgagccgagcatgtctgtgcttccgtctggaggagccgggagccctggttggcccag

SEQ ID NO: 844763 - DNA, 120 bp, Artificial Sequence
  ENSG00000234210_29 (sequence is synthesized)
gtgtctcgcagcctcgtggctggctctgtccacagggtccacgagctggaggggcacggataaaaatgcttttcccacgacagagcgcgtgtggtgggctgactccggtttatctgtgag

SEQ ID NO: 844764 - DNA, 120 bp, Artificial Sequence
  ENSG00000234210_30 (sequence is synthesized)
cacagaggtgtggcctgctcaccccacaggaggtgaccccgcagaaggaacacttctgccctgatctgctgtttgcagaggacgagggctgtcatcctgctcctctgaggctgaggcctc

SEQ ID NO: 844765 - DNA, 120 bp, Artificial Sequence
  ENSG00000234210_31 (sequence is synthesized)
agccagcaaggcggcggggtcaagcggggtgtctgagccagccacacagtgctcactggaagctttggtgctttgctgaccctgtgacctgaacagccacccacctctccgagccccagc

SEQ ID NO: 844766 - DNA, 120 bp, Artificial Sequence
  ENSG00000234210_32 (sequence is synthesized)
atcctcgtctgtaaagtggggtgacagtagctgcctgacatgactgacagactcgtttgttaagcactgtcacgtgtgggaggcgacttccttctgggttgggggggcttctcttatccc

SEQ ID NO: 844767 - DNA, 120 bp, Artificial Sequence
  ENSG00000234211_0 (sequence is synthesized)
cgacacccatatgagccccacccggcttcaatccctgccttggcccagtgcctggagggtcctccttccctagctaagcgctgccctcacacaccacctcctccagaatggcaacagccc

SEQ ID NO: 844768 - DNA, 120 bp, Artificial Sequence
  ENSG00000234211_1 (sequence is synthesized)
gtaagagcatcagcctctttcatccccatggcaaccctctgagagagccacctttcaatgggagctttgctggtggaagagaaagacagagaagagcacctagcacagtgagaacgtgga

SEQ ID NO: 844769 - DNA, 120 bp, Artificial Sequence
  ENSG00000234211_2 (sequence is synthesized)
gaaggggcatggagggcggggcgggggcagggaaacactgattctcaccagaagcctctgagggaggcgttagtgccccacggagcaggtgaagaaatggaaactcaagggttaaatgaa

SEQ ID NO: 844770 - DNA, 120 bp, Artificial Sequence
  ENSG00000234211_3 (sequence is synthesized)
catggcaaccctctgagtagatcaaggccactacagcagcaacaatggccgctacagcaatcccagtgaccacagccacaatgatccccatcggtgaagagctgggagctagggaagaca

SEQ ID NO: 844771 - DNA, 120 bp, Artificial Sequence
  ENSG00000234211_4 (sequence is synthesized)
gacatcaggacaggcagtactctccttgtcccacctcccccccatccaatgctatgtcctagtgcttgtcacccgaagctcttctgtgtctgagtcactcacttctgcagcactcactac

SEQ ID NO: 844772 - DNA, 120 bp, Artificial Sequence
  ENSG00000234211_5 (sequence is synthesized)
cttatgcctcctgcttaccgaggtttctccaccaaactaataaaggtacatttgtgagcaggcaggaacagagggaagggctccccttagccctcaggggcagtgggaagggtgggccca

SEQ ID NO: 844773 - DNA, 120 bp, Artificial Sequence
  ENSG00000234211_6 (sequence is synthesized)
aagcctcgcatagctggaggcatcattactctatggagcacagccttgaacggtccatgacgtgccaggctttctggagtgaatggctgtaacatgagccatgagaagaataaaggcaaa

SEQ ID NO: 844774 - DNA, 120 bp, Artificial Sequence
  ENSG00000234211_7 (sequence is synthesized)
cctcagttcttaggaatgcccaggagcttagggaacctctgcaccaacgagggagctctgcttcgctgccgtccttagtctggggcctgcatttcaaagtggaacaacagcctggtcacc

SEQ ID NO: 844775 - DNA, 120 bp, Artificial Sequence
  ENSG00000234215_0 (sequence is synthesized)
gggaccgccgccccagctcgaggacccgttagaccggcaaaccgcagtccctgccccgcgggcttcctttactttttgggagtggggggcggtttccctgctttttccaccacagcccct

SEQ ID NO: 844776 - DNA, 120 bp, Artificial Sequence
  ENSG00000234215_1 (sequence is synthesized)
cctcccgccgcaatgtggctgatgctcataaaaagttgtattaaagagctgactgcagccgagaatcgatcaacaaaagcgaccagcctctctgggtctatccacggccttctcaacaga

SEQ ID NO: 844777 - DNA, 120 bp, Artificial Sequence
  ENSG00000234215_2 (sequence is synthesized)
ccaaaattacttacctaagaggactgagcctgctgtccctggagcagttagctaaaacagtgcctcagtacggagcgtacctgtgttaacttctagagtgctgtttccggcagctgctga

SEQ ID NO: 844778 - DNA, 120 bp, Artificial Sequence
  ENSG00000234215_3 (sequence is synthesized)
aatccacgctgaggttatcaagctcatcctacaaaataaagcaagttcttcgcaatttaaagcaaaaatctgggcttatttttagggttttgggggatgtgaaagttgtcttagataaga

SEQ ID NO: 844779 - DNA, 120 bp, Artificial Sequence
  ENSG00000234215_4 (sequence is synthesized)
ttccaggaaagctaagaactaacgatgcaattacagtcacctttcaacaactttggggattgggttgaggaaggtgtgaaattgggaaatataataaaaggtattatattagtgactttc

SEQ ID NO: 844780 - DNA, 120 bp, Artificial Sequence
  ENSG00000234215_5 (sequence is synthesized)
ttaaaattgtttctggattatattgcccatatttgtttctaattctccattttgcctgtgttttaactgctagcgattaataactgccatataataagctaagcatttattatgtttcag

SEQ ID NO: 844781 - DNA, 120 bp, Artificial Sequence
  ENSG00000234215_6 (sequence is synthesized)
gcactgttctaactgcattaaaataatatctcatttaattctcataaattttgagaaaagttttattattcctattttacagttgagtaaactgaggcttaaagttaagcatattgtcca

SEQ ID NO: 844782 - DNA, 120 bp, Artificial Sequence
  ENSG00000234215_7 (sequence is synthesized)
aggtgcctccactccttagtcataagctaaatttgatctgagtgactccaaaacctgttctcttaatggttatgctgaaatgcccttcttagaatgattcctcaggaagtcaaatgctag

SEQ ID NO: 844783 - DNA, 120 bp, Artificial Sequence
  ENSG00000234215_8 (sequence is synthesized)
gtatatagtacaaccactttggaaaactggcaatatctgttaaagttaaacatatgaaaaccctatggcccagcagttccacgcttaggaatataccaatgtcccatgtgtgccaaaaga

SEQ ID NO: 844784 - DNA, 120 bp, Artificial Sequence
  ENSG00000234215_9 (sequence is synthesized)
ctattaaatcactcagagcaaccctattcataaataacccccaaccaggaaacaacccaaatggtcataaacagtaaaatagataaataattggtggtatattcatacaacagagtacat

SEQ ID NO: 844785 - DNA, 120 bp, Artificial Sequence
  ENSG00000234215_10 (sequence is synthesized)
tctaccacactaagaatgaacaatctgcttccaaatgcagtaaaatatatgaaccttacaaatgtgctaagtgaaaaaagggagatgtacaattgcgggactccatttatgtgaagtaca

SEQ ID NO: 844786 - DNA, 120 bp, Artificial Sequence
  ENSG00000234215_11 (sequence is synthesized)
gaaacagacaaaagtcattgatgctattcaaagtcaggatagtggttacccttgagagagagctgatgactaggagagaacaccaatcggcttctggggagctggtagtgttgtttcttg

SEQ ID NO: 844787 - DNA, 120 bp, Artificial Sequence
  ENSG00000234215_12 (sequence is synthesized)
agctgggtactggtgtgttcagtttgtgaaaattcattgagctgtactattgatatatgcatctctgtgtatgtaaattatgcttcaataaaaagctttaaaatgctgtgtatatataaa

SEQ ID NO: 844788 - DNA, 120 bp, Artificial Sequence
  ENSG00000253438_0 (sequence is synthesized)
actctcagctgctctgtaatgcaagtcgacaggaaaatctacaagggcttcacggtcttctttctagaaaaatcccaacaagggtttgatagtaaaaagtacttcgtagtcattttcaaa

SEQ ID NO: 844789 - DNA, 120 bp, Artificial Sequence
  ENSG00000253438_1 (sequence is synthesized)
taggggagaatttcctgaagtatgcagcatctgctctgccgggtttgcaatctgtgcacaggtattgcagttaatgagccaccggcttgccgcttccagggccaggctggagcagtcagc

SEQ ID NO: 844790 - DNA, 120 bp, Artificial Sequence
  ENSG00000253438_2 (sequence is synthesized)
tggtggaatgatgggaactgcaatcggcagctctgcaccaacgtgccccgggttggaaaatgtgatttgtgacagagaagcttgggaataataatgaaaacataattgctccagaagagg

SEQ ID NO: 844791 - DNA, 120 bp, Artificial Sequence
  ENSG00000253438_3 (sequence is synthesized)
cagaggatgttgacacaaacttacagactgggactccaaggatcagccagatgaaatgctatgtgcagagtcttcatttcccagctcagtggtggacagcagaggactctaagagaccag

SEQ ID NO: 844792 - DNA, 120 bp, Artificial Sequence
  ENSG00000253438_4 (sequence is synthesized)
gaactgcatttggatttaaagaaacaaaactttctggcacctactgtgatccagccacctcttgggatgcacacgtttctcttcaactgcgtgatgtgaactgcgtcacatggtcaaatt

SEQ ID NO: 844793 - DNA, 120 bp, Artificial Sequence
  ENSG00000253438_5 (sequence is synthesized)
ataatgaagaaaggaacctctcttgagtacaaagagctacctatggtggtctggagccggaggaccacagcatcaaaggatataagatgcatagccaactgaggaacctgagcaattaaa

SEQ ID NO: 844794 - DNA, 120 bp, Artificial Sequence
  ENSG00000253438_6 (sequence is synthesized)
tcccatcttaataaggccatgaacaccagtggagaagaggcagaaacaccaatggataaggaacattcacatctttcttcccatgtgcctctaagtgccagtgcaggccccacaggccaa

SEQ ID NO: 844795 - DNA, 120 bp, Artificial Sequence
  ENSG00000253438_7 (sequence is synthesized)
gctacagggagaaaggagatgacgcaaaggaacctaactggactttaatcactagaagtgagaagagaaatctattggaacctcccaagataatgccaagggtcaaagggtgcgcagata

SEQ ID NO: 844796 - DNA, 120 bp, Artificial Sequence
  ENSG00000253438_8 (sequence is synthesized)
cataagaggtgcttatttagcaaattcaaccttaaacctgagtgcatggaaactattgatgcagtgtccaaggtggagaaaggtcagagtggatccagaggagccaagagaagacgtcca

SEQ ID NO: 844797 - DNA, 120 bp, Artificial Sequence
  ENSG00000253438_9 (sequence is synthesized)
gcatggtgacctgggctcaagtcaaggtccttatttctctgatttctgttcagaaaacacatcttcaggaaaatcacccctgactcacccaggctaagtcacaagcttttgttataaggt

SEQ ID NO: 844798 - DNA, 120 bp, Artificial Sequence
  ENSG00000253438_10 (sequence is synthesized)
ctcatcacaccatatgcctctctttcaaaaccagcacctgcagaaatgtaagtgtacattgatttatgtaagtatttgaattatgactgtttttgtatatgtccatgagctccctgaagg

SEQ ID NO: 844799 - DNA, 120 bp, Artificial Sequence
  ENSG00000253438_11 (sequence is synthesized)
caagtactttgtctgcttccgcctgtttcataactatcatgcctaacacacaataacctctcaattaatagccaagtttattagcaaaaaaaattgactgaaaaagtgaatgaacgaaaa

SEQ ID NO: 844800 - DNA, 120 bp, Artificial Sequence
  ENSG00000253438_12 (sequence is synthesized)
atgttgagagtactggggaaaagggggatagttgtaagaatgaggtattttaaagtgttagaagaatgagatccaaagagcaagaactggcttgtcttagagaggagtagagacagatct

SEQ ID NO: 844801 - DNA, 120 bp, Artificial Sequence
  ENSG00000253438_13 (sequence is synthesized)
tcaattatcatgggaaggaatgtacagatggagctaggggcatagaatcagtggagggaattgaagataatgtctatttcatctaatttttcagtaaagtatgaaaataaaacatcagct

SEQ ID NO: 844802 - DNA, 120 bp, Artificial Sequence
  ENSG00000253438_14 (sequence is synthesized)
cacggggagaggtcctggagacttaaggagagagaagatatgcaatgattatctcagaaaatggaaaagtaaatctgctatagaaatgttagattaactgatatctgagttagattatct

SEQ ID NO: 844803 - DNA, 120 bp, Artificial Sequence
  ENSG00000253438_15 (sequence is synthesized)
ggtaaccaagtgcacgtgcaaagtgagtcctgcgagtaatattgtgatatttcaacttctcaggagcaagctcagactaagtgattgtttggatttatccagtatttatctagtcaagaa

SEQ ID NO: 844804 - DNA, 120 bp, Artificial Sequence
  ENSG00000253438_16 (sequence is synthesized)
aagaaagataagtggtttttcaaggcactgatcttaatgatgggtcataaattataagctggaaggtgagagaagtgaagatgagaagggaaacatacatacagacaaagctgtagaagg

SEQ ID NO: 844805 - DNA, 120 bp, Artificial Sequence
  ENSG00000253438_17 (sequence is synthesized)
gtgagtggatttgagataatgatgtcagtctccagagggaagatgccagaatgaataagctactaggacagaagagtactgtatgcaagtggaatgtactgaaatcaagattttgaagat

SEQ ID NO: 844806 - DNA, 120 bp, Artificial Sequence
  ENSG00000253438_18 (sequence is synthesized)
gatgcaattgctggagatgacaaatcctagggcatgactatgtgagtaggtggcagaggtgggtggaggaagaaatggtcagagctactaggccaaagagctaaagggccagagtcatag

SEQ ID NO: 844807 - DNA, 120 bp, Artificial Sequence
  ENSG00000253438_19 (sequence is synthesized)
agattccaccttcatgaatgctgaatttgccaagaatgatatcggacagagaggagaagaggaagaagtaagccagacattcaagttatcagtcagttaataacaacaaaataattacag

SEQ ID NO: 844808 - DNA, 120 bp, Artificial Sequence
  ENSG00000253438_20 (sequence is synthesized)
acacttacatggcacttaaaatataccaaacaccattcagtgtacttcacgtgtattacctcatttaatcttcacctctaccctatcctcattctaaagatgaataacctgggtcccaaa

SEQ ID NO: 844809 - DNA, 120 bp, Artificial Sequence
  ENSG00000253438_21 (sequence is synthesized)
gtattaattaatcttttttactgtcataactagtaaatggcagagactgaatccaacctaggcaatctgattccagggtctatgaccttgaccatgagtttcctctactgctctaaaaaa

SEQ ID NO: 844810 - DNA, 120 bp, Artificial Sequence
  ENSG00000253438_22 (sequence is synthesized)
gtactgtgtatgaagatatgtgcagggcacgggcaaccttaagagatggcattgtaactctgtgctttgagtgcagtttctaggggagtaaatactctgatgctattctcctctcttcct

SEQ ID NO: 844811 - DNA, 120 bp, Artificial Sequence
  ENSG00000253438_23 (sequence is synthesized)
cattccttatacagagtgggacagcattggctgagttctactagcaaatgccggagatgtggttcctgttggccttttaactgatgtgatgaaataaagtcttccataatttgacaacta

SEQ ID NO: 844812 - DNA, 120 bp, Artificial Sequence
  ENSG00000253438_24 (sequence is synthesized)
acacatggatattggatatctgcataggcagcttgctccacgccggtgcctacctgtgcagatgggaaggaaaggaaagtggcaaggaggcagagaaagcatctgtacccttacaatttg

SEQ ID NO: 844813 - DNA, 120 bp, Artificial Sequence
  ENSG00000253438_25 (sequence is synthesized)
aacgcctttggcccaggaactgctaatgaaggtacagtgcagtcactgttcaggaagttttgcaaaggagactagagccttgaagatgaggagcatagtgaccagccattggaagtcgac

SEQ ID NO: 844814 - DNA, 120 bp, Artificial Sequence
  ENSG00000253438_26 (sequence is synthesized)
aaagaccaattgagaggaatcattgaagctgatcatcttacaactacacgagaagttgtcaaagaacgcaatgttgaccattgtgtggtcttttcgcatttgaagcaaattggaaaggtg

SEQ ID NO: 844815 - DNA, 120 bp, Artificial Sequence
  ENSG00000253438_27 (sequence is synthesized)
aataatcatttttaagtgttgtcttctcttattctacgcaacaacaataaccattttgcaatcggattgtgatgtgcaatgaaaagtggatttggggccgggcgcggtggctcacgcctg

SEQ ID NO: 844816 - DNA, 79 bp, Artificial Sequence
  ENSG00000253438_28 (sequence is synthesized)
gcgacagagcgatgattttatatatggcaaccagcaatgaccagctcagtggctggactgagaagaagctccaaagcac

SEQ ID NO: 844817 - DNA, 120 bp, Artificial Sequence
  ENSG00000253438_29 (sequence is synthesized)
ggtcactgtttggtggtctgctgctggtctgatccaccgctgctctctgaatcctggcaaaaccattacatctgagaagtatgctcaacaaatcaatgagctacgccaaaaactgcagca

SEQ ID NO: 844818 - DNA, 120 bp, Artificial Sequence
  ENSG00000253438_30 (sequence is synthesized)
tctgcagctggcattggtcaacataacgggtccaattcttctccacgacaacgctcaactgcaccttgcgcaagcagcgcttcaaaagttgaacaaattgggctacatagtttttcctca

SEQ ID NO: 844819 - DNA, 120 bp, Artificial Sequence
  ENSG00000253438_31 (sequence is synthesized)
tccgccatattcacctgacgtcttgccaactaactaccacttcttcaagtatctcaacaactttttgcagggaaaacacttccacaaccagcaggatgcagaacacgctttccaagagtt

SEQ ID NO: 844820 - DNA, 83 bp, Artificial Sequence
  ENSG00000253438_32 (sequence is synthesized)
tccacaaccagcaggatgcagaacacgctttccaagagtttgtcgaatcctgacgcacagatttttatgctacaggaataaac

SEQ ID NO: 844821 - DNA, 74 bp, Artificial Sequence
  ENSG00000253438_33 (sequence is synthesized)
gctgagattacaggcatgcaccaccacatctggctacttttttttctgacctggaactcctgacttcaggtgat

SEQ ID NO: 844822 - DNA, 120 bp, Artificial Sequence
  ENSG00000253438_34 (sequence is synthesized)
aagtgctgggattacaggtgtgagcccttgtgctcagtcagatttagcattttaaacgagttcccagctgatgctgatgctgctggatcaaggaccacgctctgagaagcaagggtttat

SEQ ID NO: 844823 - DNA, 120 bp, Artificial Sequence
  ENSG00000253438_35 (sequence is synthesized)
gaccacgctctgagaagcaagggtttatggggctttcttggactgcactctggccaaacgcagtgactccagtaaggcgtggcctttgcaaccacaggaagagcagaagtctgctgtgga

SEQ ID NO: 844824 - DNA, 120 bp, Artificial Sequence
  ENSG00000253438_36 (sequence is synthesized)
gaagagagagacttcccttctaaagacgtctggccttccagcgggagatccagccacctcttgggatgcacacgtttctcttcaactgcgtgatgtgaactgcgtcacatgtgaattatc

SEQ ID NO: 844825 - DNA, 120 bp, Artificial Sequence
  ENSG00000253438_37 (sequence is synthesized)
aaactacctagagaaacctgtaacttcagatcttctgattaattgattttctttgggtgctgcttgacagtaacagaatggtccatggggacagtttttcagtgaatgttttcaacaatg

SEQ ID NO: 844826 - DNA, 120 bp, Artificial Sequence
  ENSG00000253438_38 (sequence is synthesized)
ataggaacacagagctaagcagagtgtcaagagacatttagtgcagtagagacatctcatctgtttttctgcagaacttgcataaaattagcatctgattattatcacctcagaatgaac

SEQ ID NO: 844827 - DNA, 120 bp, Artificial Sequence
  ENSG00000253438_39 (sequence is synthesized)
cggaacccgtaaagatgtctttgatcgtaaaagtggggaggagaccctgatggaagaagagaagacttcagcctcacaatagaaaagactgtgtttatgcacctaaatctaacttagaca

SEQ ID NO: 844828 - DNA, 120 bp, Artificial Sequence
  ENSG00000253438_40 (sequence is synthesized)
ccatctaattcaagaaacaggcacatttagggaaataaagaaaagaggcagaaagagatgaagcaccttggctgaatcagagaaattaggggttaatgttccagactgatgacttgaagg

SEQ ID NO: 844829 - DNA, 120 bp, Artificial Sequence
  ENSG00000253438_41 (sequence is synthesized)
agggtgtgcattttcatgcaagggaccattctgtagaagaagcagcacattcacccttaaatgagcaaagagaatcccaatcactctccctctcaccctccccttttccttcatttctct

SEQ ID NO: 844830 - DNA, 120 bp, Artificial Sequence
  ENSG00000253438_42 (sequence is synthesized)
agctctttatttccaagaaggccagcccttctcttcagccacatggtatttggacagcctaggctcaatccctgcagggaaagctcaatcagccagctgagccagtcactgaacaaccaa

SEQ ID NO: 844831 - DNA, 120 bp, Artificial Sequence
  ENSG00000253438_43 (sequence is synthesized)
gtctggtaagaacaggggtgaagtatttaagaagcctatcgtggctggagggctaaagccttgttctcaaatcagctttataggtaataaaactgacattaaagcaaaaacaaataagag

SEQ ID NO: 844832 - DNA, 120 bp, Artificial Sequence
  ENSG00000253438_44 (sequence is synthesized)
tattgatcaatggctttaccagtctttagttcactcaaatctaggaaaggagctgacagcctattttgtcttggggcctaagcagggttctccgttccagatttaccagcaaaggtccat

SEQ ID NO: 844833 - DNA, 62 bp, Artificial Sequence
  ENSG00000253438_45 (sequence is synthesized)
tgagatggattcttgctctgtcgcccaagctggagtgcaacttcctgagtagctgggattac

SEQ ID NO: 844834 - DNA, 84 bp, Artificial Sequence
  ENSG00000253438_46 (sequence is synthesized)
gtctgctgtctatttcttaattggctcagaacttgaaggaaaaaatggtgtaatgaatattatacaatgtcaaccttattttta

SEQ ID NO: 844835 - DNA, 120 bp, Artificial Sequence
  ENSG00000253438_47 (sequence is synthesized)
tgaaaaatcccaaagaggtggacactactattgttttaattttacagatgaatttaaaaatagcagagattagattactaaagttgagatttatatagctggtaagaaagaagactgaaa

SEQ ID NO: 844836 - DNA, 120 bp, Artificial Sequence
  ENSG00000253438_48 (sequence is synthesized)
tttgaatctattattcatttgttcagtactttagtattggactaaaataccgataaatccataagtccactttggtactatacttatgcttgctggaaatatatgcataaaatagttata

SEQ ID NO: 844837 - DNA, 120 bp, Artificial Sequence
  ENSG00000253438_49 (sequence is synthesized)
gttgttatctaagtgaaatttatagcttagggagactatattaattatatattaatttaattatcataaaagtagttatgtaattacaagctgcaataatgtcttcaaagaccattctct

SEQ ID NO: 844838 - DNA, 120 bp, Artificial Sequence
  ENSG00000253438_50 (sequence is synthesized)
taatcactgtagtattactatcttgccttgactttgagattttctagtgctggaattaatattatttcatcttttattgtcttgttgaaacattccatcattcttatttggttgttttat

SEQ ID NO: 844839 - DNA, 120 bp, Artificial Sequence
  ENSG00000253438_51 (sequence is synthesized)
tatgatcaactgacatataagcagacctgaaaaacacttgcttgggaagatcatgatggagattcttggaaatctccttgctattactggtccccatcctactatagtatcatcctttaa

SEQ ID NO: 844840 - DNA, 120 bp, Artificial Sequence
  ENSG00000253438_52 (sequence is synthesized)
gagggacagaattgttcctaacatctagatcatgaagatgaattccctaaaagagaattttaattacagaaaaaaataaaaacttagaggtcattcatctgagctttttattatgttata

SEQ ID NO: 844841 - DNA, 120 bp, Artificial Sequence
  ENSG00000253438_53 (sequence is synthesized)
acacagtcagcccaatgaaggaggaggaggaaaaggaggagaagaagaaaagaaaaagaaagaaagagagaggaagaggaagatgatcagagtggaaatgtggccaggcgaggtggctca

SEQ ID NO: 844842 - DNA, 120 bp, Artificial Sequence
  ENSG00000253438_54 (sequence is synthesized)
atcccagcactttgggaggctgagggtctggagtgggacattttcagcagatcattttgttatcatacgaacgcagcctaaccacctgctactccaagtgagagtcaaaatccagcagca

SEQ ID NO: 844843 - DNA, 120 bp, Artificial Sequence
  ENSG00000253438_55 (sequence is synthesized)
agagtcaaaatccagcagcattggtctcacctgaaaagaactgaggtcgcaagacaacaaactggtcctaaataaaaagtaagaaaaatgccggggaggagccaagatggccaaatagga

SEQ ID NO: 844844 - DNA, 120 bp, Artificial Sequence
  ENSG00000253438_56 (sequence is synthesized)
ctagggagtgccagacagtgggcacagagtctcacttggttgctcagactggagtacagtggtacgatctcgactcactgaaacctctgcttcctggcttcaagcatttctcctgcctca

SEQ ID NO: 844845 - DNA, 120 bp, Artificial Sequence
  ENSG00000253438_57 (sequence is synthesized)
gagtctccacaatagtgagggctgcaaaaccaggtgacatgaaaaccaagagaatgaattacatagatttgtttaacctaaggaagaaaagattctggacacgtgagggccgattttcat

SEQ ID NO: 844846 - DNA, 120 bp, Artificial Sequence
  ENSG00000253438_58 (sequence is synthesized)
tcctcagagctctctcctttggaggcttctttgtttgggccccacttccattcttcacattcagcagttactgggagacgaccttaccatggcctgtccctccgtgttcatcccaatcgc

SEQ ID NO: 844847 - DNA, 85 bp, Artificial Sequence
  ENSG00000253438_59 (sequence is synthesized)
accttaccatggcctgtccctccgtgttcatcccaatcgcatccagatgcctctctggcctcatctcctagtgttaacttcaaca

SEQ ID NO: 844848 - DNA, 120 bp, Artificial Sequence
  ENSG00000253438_60 (sequence is synthesized)
ctacccctataaccaccagccccaacccaggctcactgaattggaatttctgaagacacagtcagcccaatgaaggaggaggaggaaaaggaggagaagaagaaaagaaaaagaaagaaa

SEQ ID NO: 844849 - DNA, 120 bp, Artificial Sequence
  ENSG00000253438_61 (sequence is synthesized)
agactctccatgcctgaaacatacagagtcatcaactatgaaaccatggaaataatatcagacaaaaagcagattagagcaattttctttttcgagttcaaaatgggttataaagcagcg

SEQ ID NO: 844850 - DNA, 120 bp, Artificial Sequence
  ENSG00000253438_62 (sequence is synthesized)
aacggtaacatccctacccttagtacaaaagatccagccacctcttgggatgcacacgtttctcttcaactgcgtgatgtgaactgcgtcacatgatcaccatctacccctataaccacc

SEQ ID NO: 844851 - DNA, 120 bp, Artificial Sequence
  ENSG00000253438_63 (sequence is synthesized)
agccccaacccaggctcactgaattggaatttctgaaggattcactgaagctgtaaaaccaagatgaaggcaaggttaagattcttctgtaagctaccttctagcaaagatgctgttcag

SEQ ID NO: 844852 - DNA, 120 bp, Artificial Sequence
  ENSG00000253438_64 (sequence is synthesized)
acagcctccacttttaattattatactaacattttgtcaactgtcaaatgcttggaaatcatttaatatcttcccatttctatgcaacacagttattgatattcatgaagtgaattcctt

SEQ ID NO: 844853 - DNA, 120 bp, Artificial Sequence
  ENSG00000253438_65 (sequence is synthesized)
cagcagtgtctagactaaatgtcaatagggtctgctgagggaaatacttttcacagagggagggtattaataatggaatttagaaattatttttaatttgctttaataaaggattagatg

SEQ ID NO: 844854 - DNA, 120 bp, Artificial Sequence
  ENSG00000253438_66 (sequence is synthesized)
catccccagaggaacaagcgaggatctcagagcgcgacctggacaggctctcacaaaagtcaccgcgtttgtgtaggtaactaaggcctaccgaaaccagtcagccctaagtgcacacag

SEQ ID NO: 844855 - DNA, 120 bp, Artificial Sequence
  ENSG00000253438_67 (sequence is synthesized)
gagaaccatggagttggaggaaaagtgtcttgccttagacgacgtttgagaatttgtcagaacagggcctggagggaataaaaaggaggtgagaagtctctgtagagatcatcaacatgg

SEQ ID NO: 844856 - DNA, 120 bp, Artificial Sequence
  ENSG00000253438_68 (sequence is synthesized)
taagccaagtaaactcacttattagaagaatgacatcatcaggactgtttctgagaaagcctacttctgctccttaccatatgtagaaatataatttcatattaaagaccaagaattcag

SEQ ID NO: 844857 - DNA, 120 bp, Artificial Sequence
  ENSG00000253438_69 (sequence is synthesized)
acatcatcctggtgcatacatcaggattgcaacgataaatgctttggaaatgtcattggaggaaggtaatgtttgacataggaaagagaagacttgtgggaacatggctgctgtttctaa

SEQ ID NO: 844858 - DNA, 120 bp, Artificial Sequence
  ENSG00000253438_70 (sequence is synthesized)
ggctggtctcgaactcctgacctgaggtaatccgctggcctcggcctcctaaagggctagtattacaggcatgagccaccgtgcccgacccagaaatgtattcttttgtagttctggagg

SEQ ID NO: 844859 - DNA, 120 bp, Artificial Sequence
  ENSG00000253438_71 (sequence is synthesized)
atggagttggaggaaaagtccaaggtagcctgctggatggtgagagacacttgcctcagtttcttggtcatcctagcctacaatcagctgttttcagaaacagagttgcctagctgacct

SEQ ID NO: 844860 - DNA, 120 bp, Artificial Sequence
  ENSG00000253438_72 (sequence is synthesized)
ctaagatccagccacctcttgggatgcacacgtttctcttcaactgcgtgatgtgaactgcgtcacatgacacagtcagcccaatgaaggaggaggaggaaaaggaggagaagaagaaaa

SEQ ID NO: 844861 - DNA, 120 bp, Artificial Sequence
  ENSG00000253438_73 (sequence is synthesized)
acaccgaataactcgttacaaaaagagctagggtcccagactgcgccaaagcttcaggagactgctcctcgtctgtgcacagatgagtggccaactctggagcccaggttgttgcttcct

SEQ ID NO: 844862 - DNA, 85 bp, Artificial Sequence
  ENSG00000253438_74 (sequence is synthesized)
gagtggatccagaggagccaagagaagacgtccagcatggtgacctgggctcaagtcaaggtccttatttctctgacggagtctc

SEQ ID NO: 844863 - DNA, 79 bp, Artificial Sequence
  ENSG00000253438_75 (sequence is synthesized)
aaaaatacatcatttctaacttcaaggaactgatcttccagttgaagaaacctttcatgctttttaattagtgcaatca

SEQ ID NO: 844864 - DNA, 120 bp, Artificial Sequence
  ENSG00000253438_76 (sequence is synthesized)
ggatcgtagggctgcggctggggcggcggcggcccgtccccaccgtcgggcaagccgccgccatctggcccctgaggcggcggctgcggctccacgtcctcatcgtcattggagaaaatg

SEQ ID NO: 844865 - DNA, 120 bp, Artificial Sequence
  ENSG00000253438_77 (sequence is synthesized)
tataccactacatccctatatgttaaagattatcattctttttttttttttttacatataaggaaagcaagactcagggagtatcctgccctgttcacaggggcagagctggatttgagc

SEQ ID NO: 844866 - DNA, 120 bp, Artificial Sequence
  ENSG00000253438_78 (sequence is synthesized)
ccaggtcttagaagacagaggccgtggccttttccctatgcctttctgcctcctggacctgtggagcagagatgttcactcatgcctgggccattctgtgcaccagtgcccctctcttca

SEQ ID NO: 844867 - DNA, 120 bp, Artificial Sequence
  ENSG00000253438_79 (sequence is synthesized)
gggaagatattcaatcagagtgtgtagccccagtaattctggcattgggtgcaaggttgcacaagatgacttttaagaccccatccaaacgtcagctcctattcttccaattcaaacagg

SEQ ID NO: 844868 - DNA, 120 bp, Artificial Sequence
  ENSG00000253438_80 (sequence is synthesized)
agtaaatgaacagatcgcagtttaagagcttcatggtgtctttatattcttcctgccgctctgtgccaatcagcatgtctgttctttcaggactgcatgataaccttcttgaaagacatc

SEQ ID NO: 844869 - DNA, 120 bp, Artificial Sequence
  ENSG00000253438_81 (sequence is synthesized)
tcatattccactccaactccaaaaattttagtagctcccatttgcctatggaataaacaaaataatatggaatgaatgaagaaacaaacaaacaataaagacacattttccttttcaaaa

SEQ ID NO: 844870 - DNA, 120 bp, Artificial Sequence
  ENSG00000253438_82 (sequence is synthesized)
cataaatgaactaccttgacatgccctgacccaggctctttatttggaaacccaggctaggacaggaatgaagagaagccagaccttctgactcgaagatccagccacctcttgggatgc

SEQ ID NO: 844871 - DNA, 120 bp, Artificial Sequence
  ENSG00000253438_83 (sequence is synthesized)
agcaagaatcttcatgggaacagaataaacacaaaggatgtctacccttcctccctccacccacttggattcttgtttctagtttgcacctggacataaggccattttgtacttccacac

SEQ ID NO: 844872 - DNA, 120 bp, Artificial Sequence
  ENSG00000253438_84 (sequence is synthesized)
atagagcaaaactgttctacacacctaaaattatagtgtgtaccttgtgcaacaatgcatctaaaacacaatttgcataaggtgagacttgcataacttggggttgagatttaagactct

SEQ ID NO: 844873 - DNA, 120 bp, Artificial Sequence
  ENSG00000253438_85 (sequence is synthesized)
aagtttaggactcttaagcctaggactttttatttcatattttaccatttcttaattcaagtatgataagcatgtcaaattcatgttcattcaataaatgattcacgagctactaactta

SEQ ID NO: 844874 - DNA, 120 bp, Artificial Sequence
  ENSG00000253438_86 (sequence is synthesized)
cactacaattgttttttaaatatttatgtgttgtttggagagaaagaggcattttaaatctaaagacagtagtagatcatccatcctgaattgttagagaatgagacacctcatattcgt

SEQ ID NO: 844875 - DNA, 120 bp, Artificial Sequence
  ENSG00000253438_87 (sequence is synthesized)
gtatttttcagaagaccgaagcttactttaacccttaaagaatgagctttaaaatcctatccatttttggggggaaatatttctgcaagaagtctcttactttcttaagcagagtatttc

SEQ ID NO: 844876 - DNA, 120 bp, Artificial Sequence
  ENSG00000253438_88 (sequence is synthesized)
aaactgttttatcatgaattgacaatctataattgtataaatttatggggtacaacatgatgttataatttatgagtgtgatgtggaataactatatcaagctaattaatattttcatta

SEQ ID NO: 844877 - DNA, 120 bp, Artificial Sequence
  ENSG00000253438_89 (sequence is synthesized)
cctcaaatacttaacattttttgtagtgagaacatttgaaatgcactcttagcaaatttgaaatgtacaattctctattattaactatgttcaacacacggtccaatagaactcaaaaaa

SEQ ID NO: 844878 - DNA, 120 bp, Artificial Sequence
  ENSG00000253438_90 (sequence is synthesized)
ggacatcatagggacatggtgcatcctgtccctatgatgcaccatgcctggcctgcgggccttcttaatatgcagggcaatggccagtgctgctgtccccctgcacgcagacttgtcaca

SEQ ID NO: 844879 - DNA, 120 bp, Artificial Sequence
  ENSG00000253438_91 (sequence is synthesized)
gtggcactgtggggctctgctggactcatcagtggctccctcacccacagccttcacaactctgactggaattcttcgcagagccagggcacctaaaggcaaaaggtcattctctctggg

SEQ ID NO: 844880 - DNA, 120 bp, Artificial Sequence
  ENSG00000253438_92 (sequence is synthesized)
tgaatccagctgacatgttgtgaggacactcaagcagctttatggaaaagcccacatggtgagcaactgaggcctcctaccaacagccaacaagaaaccggggcctttgccaacagccaa

SEQ ID NO: 844881 - DNA, 120 bp, Artificial Sequence
  ENSG00000253438_93 (sequence is synthesized)
tcagagcgcgacctggacaggctctcacaaaagtcaccgcgtttgtgtaggtaactaaggcctaccgaaaccagtcagccctaagtgcacacaggagaaccatggagttggaggaaaagg

SEQ ID NO: 844882 - DNA, 120 bp, Artificial Sequence
  ENSG00000253438_94 (sequence is synthesized)
atgatctgcaagtatcctgcaaatatctcacccagttattgctgggattccccaggaacattacatgggaacatatcgccatataggctcaatgggtgcagcaagaaataaaagatgaga

SEQ ID NO: 844883 - DNA, 120 bp, Artificial Sequence
  ENSG00000253438_95 (sequence is synthesized)
tcattaaacagcttcttcttttgccctggttcctcatgttttctagcagcaaaattactctgtccccttggtgccttggaatgctcccagcctaagctcagcccacatccagacaggcca

SEQ ID NO: 844884 - DNA, 120 bp, Artificial Sequence
  ENSG00000253438_96 (sequence is synthesized)
atgctttggtagcaagctgaccacacaaactcttgtaaaccgtgataaagttcctagatattttggctattttagctttttattattgaagaaatacattaattttcttttttaaatcca

SEQ ID NO: 844885 - DNA, 120 bp, Artificial Sequence
  ENSG00000253438_97 (sequence is synthesized)
tgggcaatggcgggcgcccctcccccagattttttaaggctgaataatccagccacctcttgggatgcacacgtttctcttcaactgcgtgatgtgaactgcgtcacatggtcaaattat

SEQ ID NO: 844886 - DNA, 120 bp, Artificial Sequence
  ENSG00000253438_98 (sequence is synthesized)
aatccagggaagaactttgaagaacctacaaggatgccagtgagacacaatgccaatctttaaacaccagccagacccagatgtgtgcagtaaagttatagcagtactgggtcccataca

SEQ ID NO: 844887 - DNA, 85 bp, Artificial Sequence
  ENSG00000253438_99 (sequence is synthesized)
cagccctaagtgcacacaggagaaccatggagttggaggaaaagagtatacaggaagcatggtgccagcatgtgccactgttgag

SEQ ID NO: 844888 - DNA, 120 bp, Artificial Sequence
  ENSG00000253438_100 (sequence is synthesized)
aaagagaggaaggaggtgccactcacttttaaacaaccagatctcgcatgaactcaggacttaggtatgtctttatcagcagacattagtccatataaaaacagactaatacagtaaatt

SEQ ID NO: 844889 - DNA, 120 bp, Artificial Sequence
  ENSG00000253438_101 (sequence is synthesized)
gaggccccagagagattccaaaggcctgaggacttggcacaaaatgacaacactaatttcctgaatgcttgtgtcagctttttggtgacaagaaaggatgagtaagacactattatggtt

SEQ ID NO: 844890 - DNA, 120 bp, Artificial Sequence
  ENSG00000253438_102 (sequence is synthesized)
taaagtacagcgagagaatagtaaatttacgaaggcagaagtgaaaagtagaaagcgaagatgatataggaatttaccagctagacagaagagacagggaaagaaactggcgttgatcat

SEQ ID NO: 844891 - DNA, 120 bp, Artificial Sequence
  ENSG00000253438_103 (sequence is synthesized)
aacgccatcatgaaggaggtttgagatactgctttttcctctctgtgaagtcctgagtccatggaaaggccgaggggagaaacatcggcagcaacatggcagctctattagtgatggaaa

SEQ ID NO: 844892 - DNA, 120 bp, Artificial Sequence
  ENSG00000253438_104 (sequence is synthesized)
ctggattgggaaatgcgatatcacatctgtcacctagaggttttggcaacaatatttcggcctagaattcagcccagcacattcagtgtactgtgcttacccagcctctggcagagtggg

SEQ ID NO: 844893 - DNA, 120 bp, Artificial Sequence
  ENSG00000253438_105 (sequence is synthesized)
tgacctgggctcaagtcaaggtccttatttctctgaggccataatggttaagtaatttcccaatgtcacttcacactcaagtggaagagcaaggtggccaacccaaagcccacgtttctt

SEQ ID NO: 844894 - DNA, 120 bp, Artificial Sequence
  ENSG00000253438_106 (sequence is synthesized)
ggagccctgcaatggaaaagaaaggagagagagaaactccatgtgtggaagcttgatctcctttgaaaagagctcagcttaaaggatgatatcatggggactgtcaacaggaatcagaga

SEQ ID NO: 844895 - DNA, 120 bp, Artificial Sequence
  ENSG00000253438_107 (sequence is synthesized)
tgcatatccaagggcagaatctaatttcaattccaggacgtttcatgaaacagaatgcaaagcaacaattatctgctaaatggaaaattaaaggcataaataaagtcaaagctcaaacca

SEQ ID NO: 844896 - DNA, 120 bp, Artificial Sequence
  ENSG00000253438_108 (sequence is synthesized)
ctcaaggcttagactcgtgcttcctggaatgtccttcattcctctcaggctggtacattccaagtctcccttcagcacacagcctacatgtgaagaacatgatcgcagccctccagcaag

SEQ ID NO: 844897 - DNA, 120 bp, Artificial Sequence
  ENSG00000253438_109 (sequence is synthesized)
gccgggtgaaaagaaccactgccttagaaccctgcagatgcaactttggtggctttaaatgttggttctaactggacggctcaagccagcacggatatctccatcaggaatttcccatcc

SEQ ID NO: 844898 - DNA, 120 bp, Artificial Sequence
  ENSG00000253438_110 (sequence is synthesized)
cattccatagcacagaacacaagtagatggctcccatgaagaatctagcatcatggtatggcagaagcagaatggactcaggaatcatggtgcctacactggaatttcagatcggccact

SEQ ID NO: 844899 - DNA, 120 bp, Artificial Sequence
  ENSG00000253438_111 (sequence is synthesized)
gacacaatggacacattattcaacatttccaaatcttggcattcttatccacaaagtgaagataataattgtcaattcacaggtgcaaaagatttgtcaagtaactctccaaagtaaaag

SEQ ID NO: 844900 - DNA, 120 bp, Artificial Sequence
  ENSG00000253438_112 (sequence is synthesized)
agagggctggagtttagactcatgactgttctgctctaacccaagtgattctggatcccagactccccaaatgacaagttattccagaaatactcagaaaaaggagggtgccgtatgtcg

SEQ ID NO: 844901 - DNA, 120 bp, Artificial Sequence
  ENSG00000253438_113 (sequence is synthesized)
cacatggaaaaatagaaaaagtaacagaatccagccaaaggattcccagaaattgaggctcttctgttcttggcatttgcatctttggatgtgtgttttttacattgctctatgcaaaag

SEQ ID NO: 844902 - DNA, 120 bp, Artificial Sequence
  ENSG00000253438_114 (sequence is synthesized)
agcagatcgcaatggatacttcctgcagtcagtcaagcttctgaaagtagagaatcagggaggagctaagaaaagcagcggtcaagataaactaagccccttatccccagcccacaaata

SEQ ID NO: 844903 - DNA, 120 bp, Artificial Sequence
  ENSG00000253438_115 (sequence is synthesized)
ctcttttccaaagggcccaggaatcccagatggggcccagacagtggcaaaagagggaggaagagagggagaaagggagcagcggctgctactgcaaacagttccccttcgcagctctgc

SEQ ID NO: 844904 - DNA, 120 bp, Artificial Sequence
  ENSG00000253438_116 (sequence is synthesized)
gctcagctcgcccatcagtgtgccactgcctctccgtcctcctcctcggagctgggcgcaggggggcgcccgggaggcggcgtagtccgcgccacgttgctgtcgccctcctccggctcc

SEQ ID NO: 844905 - DNA, 120 bp, Artificial Sequence
  ENSG00000253438_117 (sequence is synthesized)
gccgggtgcaggtgcgtggcgagctcctgcagcacggccgcgcgcccgatctggtcgttgcgtcgcttctccatgatcaggtcctctagactctggaactcgagcgtgtggctgcgctgc

SEQ ID NO: 844906 - DNA, 120 bp, Artificial Sequence
  ENSG00000253438_118 (sequence is synthesized)
gccgacagctgaatctgcagccggtagggctgcttgccgatgcgcagctcgccgccgatcttgaactcgcgcttgccgtagcggcaccaggcggcgaaactctccgagttgcgccagctc

SEQ ID NO: 844907 - DNA, 120 bp, Artificial Sequence
  ENSG00000253438_119 (sequence is synthesized)
agctcgcgctccttggcacccacgtgcgccagcgcgttgcgcaccacggcgctggagcttagcggcttgtagcggtacagatcgttgaccacgcggccgcgacggccctggctggcgtca

SEQ ID NO: 844908 - DNA, 120 bp, Artificial Sequence
  ENSG00000253438_120 (sequence is synthesized)
gcgggtactgagcctgcgacacgaactccaccagatcgcccggcttgcacttgttgagcaggttctcgggcgtgtaggtactcagcgccgccgagcccggcgcgaagctcttctggtaga

SEQ ID NO: 844909 - DNA, 120 bp, Artificial Sequence
  ENSG00000253438_121 (sequence is synthesized)
tgcattcgtcccggtagaacacggagcattccacctcgtgcagccgcggatcgtagggctgcggctggggcggcggctgcggctccacgtcctcatcgtcattggagaaaatgtaggaga

SEQ ID NO: 844910 - DNA, 120 bp, Artificial Sequence
  ENSG00000253438_122 (sequence is synthesized)
ccccaatgcggggcccgtcgtcccggtccacgccagtcgggtcggccgtgggaacttccttgtaacttaggtgggtcaatttctccacctggttgcccatcacgctgcggacacacgttc

SEQ ID NO: 844911 - DNA, 120 bp, Artificial Sequence
  ENSG00000253438_123 (sequence is synthesized)
acaccgccgcaaggggagaaagcgaaaccaactccagggtcatttgcacaggtccccggacaggggctgaggctacctgttgggagaggaaggcaagaaagccatgcaggagcccctccg

SEQ ID NO: 844912 - DNA, 120 bp, Artificial Sequence
  ENSG00000253438_124 (sequence is synthesized)
tgaaaagggcgttttgttccgaaaaagaatcggtgggggctcagcacctggagccattttagggggaagtctcgggtgtagcgagctttccctcgtttctccacctgtaaggtcacggtc

SEQ ID NO: 844913 - DNA, 120 bp, Artificial Sequence
  ENSG00000253438_125 (sequence is synthesized)
acaggagactgggcaactcctgttctccctgtccccagcccttcgcctggccctggcaaaagcccattgcatcagcagcttctactgcttccgcctgcgccctacctgccaagcttgggc

SEQ ID NO: 844914 - DNA, 120 bp, Artificial Sequence
  ENSG00000253430_0 (sequence is synthesized)
aaaaggctctgaaatgtaaatctgtcctcctctttcttccaaacaaaaaatcccatcgcagagacagggtgggttatttgggggggccctcagagaaacttgaatttcacaaccgggtca

SEQ ID NO: 844915 - DNA, 120 bp, Artificial Sequence
  ENSG00000253430_1 (sequence is synthesized)
gaattgtaacttggagatagcacatgggaaaactattatttttctccattatttatttatttattgtgtgtgtagaggggggtggggggtagagacagggtgtcaccgtgtttgccaggc

SEQ ID NO: 844916 - DNA, 120 bp, Artificial Sequence
  ENSG00000253430_2 (sequence is synthesized)
caacatagcaagactctgtctctacaagaaaaaaaaaaaaaagccaggtatggtggggcacacctgtagtcctagctactctggaggctaagatgggaggatcacctgagcccaggagtt

SEQ ID NO: 844917 - DNA, 79 bp, Artificial Sequence
  ENSG00000253430_3 (sequence is synthesized)
tatggtggggcacacctgtagtcctagctactctggaggctaagatgggaggatcacctgagcccaggagttgcaagtg

SEQ ID NO: 844918 - DNA, 120 bp, Artificial Sequence
  ENSG00000253433_0 (sequence is synthesized)
gctcctccacaattactgcagagtcagaagtggaatttccgcctgatgttttatgtcaaaatcagtatgaaagactgcagcatgctgagtgagctttccgttctcgctgagatgcaatgc

SEQ ID NO: 844919 - DNA, 120 bp, Artificial Sequence
  ENSG00000253433_1 (sequence is synthesized)
agggtccaccctctgcaggccacaattttgcctggaggcaaagcattcagtctttccattggcctgacaatttgagccaagctttgaggccaacagacaaaatgcactagcaactggaga

SEQ ID NO: 844920 - DNA, 120 bp, Artificial Sequence
  ENSG00000253433_2 (sequence is synthesized)
cctgctccattgacatcaggcttattagccatgtttctggatttggtccatttcatcataaagagaacatggagcagggctgcagctgatcttcaaagggcatgaacacaagccagagag

SEQ ID NO: 844921 - DNA, 120 bp, Artificial Sequence
  ENSG00000253433_3 (sequence is synthesized)
aagccgttattgttgtaagccctgaagatttgggggatattattgcaacacaactcagcccaagctgactaatacaacaagtttctatgtatacatggaaatgtatgtaatcttagcctc

SEQ ID NO: 844922 - DNA, 120 bp, Artificial Sequence
  ENSG00000253432_0 (sequence is synthesized)
tttttggacattcaaaatgcaactgccacatatttccaagtgatttaatagactttcaatggtgctacagatccctgcatgatttacctggagaagacagttggagaacttccagttcct

SEQ ID NO: 844923 - DNA, 120 bp, Artificial Sequence
  ENSG00000253432_1 (sequence is synthesized)
tcagattcacaccttcagacaagagggtggcaaactctatattgagtaggagcacataagctcccaactcagagcttgagatctagacttctgcagtacttcccaattgcagcatcctgg

SEQ ID NO: 844924 - DNA, 120 bp, Artificial Sequence
  ENSG00000253432_2 (sequence is synthesized)
tgcccacctagcctcgaatgcattcttgagctccctctgctggagcagctggtgccttttgggtcatcaacaaggatattgacaaccaccttagaaacgaaagacgagggaacaggtcaa

SEQ ID NO: 844925 - DNA, 120 bp, Artificial Sequence
  ENSG00000253432_3 (sequence is synthesized)
cagctcacatcttattgcaataagcagagcggctccttcctgggtgtagtcctgacattcctgcgagccctcaggggccgatcctgaagacacgctggcacctctacactcctttaagag

SEQ ID NO: 844926 - DNA, 120 bp, Artificial Sequence
  ENSG00000278090_0 (sequence is synthesized)
acaaatgaaagagaaatagtaaattctcctggggtggcgaatcagtttccctgtgatgctcattttaaccagatggcacttgcttagcagtttggaggagaagacctgttcccctgcagc

SEQ ID NO: 844927 - DNA, 120 bp, Artificial Sequence
  ENSG00000278090_1 (sequence is synthesized)
cttccatgattagacctcaactcatgagaactcttgccttgctcacaagtgggagtaaatgctcatagctctagaaatctcccaggaaccagacatcacggaaactagaaaggctaaggg

SEQ ID NO: 844928 - DNA, 120 bp, Artificial Sequence
  ENSG00000278090_2 (sequence is synthesized)
agtccaatcttcctctaaattggccaacagtagagtggtggaaagagaacaagctgcaaaccagacagacccaagcttgaatctcacctctgccaagctaccagggacctaccccgaact

SEQ ID NO: 844929 - DNA, 120 bp, Artificial Sequence
  ENSG00000278090_3 (sequence is synthesized)
ttcatgaacccctggtagctgaatagcagcttgtctaagcgaggtgcagggattttgtcaaagtcggcctcggtgttaaaggcagggccacctaccatgaacttctctctgtgactttat

SEQ ID NO: 844930 - DNA, 120 bp, Artificial Sequence
  ENSG00000278090_4 (sequence is synthesized)
gtgcacagctggactcggagaggggacaaaaccagagaaattgtatttctgttctgaagtttccatacagatgccttaggccaaagttagtacagccaatatttgcctgtttctttggat

SEQ ID NO: 844931 - DNA, 120 bp, Artificial Sequence
  ENSG00000278090_5 (sequence is synthesized)
tgtgtgtccatgctggagaaaagccttgttactgtgcccagtgtggtaaacgaaattatatgtacgcagtgagaagaaaaatgaaataagaagcactgatgaatgtacccacgggtgtga

SEQ ID NO: 844932 - DNA, 120 bp, Artificial Sequence
  ENSG00000278090_6 (sequence is synthesized)
ccttgggggccagtgtgtggtttttatgaaatgaacgcatgaatacgaggaccctaattattgctttcaacggacaaagtatggtgaatatatagagaacgttgctgtacaacactggct

SEQ ID NO: 844933 - DNA, 120 bp, Artificial Sequence
  ENSG00000278090_7 (sequence is synthesized)
gtgtctcaaagcggctttagaagtaaatatagaaattctttggtacatggtattgcatagaaaagtcattaagaaaaaagcaagacaatttgttaagaccttgttaagtggagctggggg

SEQ ID NO: 844934 - DNA, 120 bp, Artificial Sequence
  ENSG00000278090_8 (sequence is synthesized)
atgattaattttgtttgtttgtttttgttgttccctggtagagctcaacaaactacagaccacgggccaaatctgacccaccgctgcttttgtaaataaaactttattggaaaaaagcca

SEQ ID NO: 844935 - DNA, 120 bp, Artificial Sequence
  ENSG00000278090_9 (sequence is synthesized)
gggagagggaggaggacgccaggggcacagggacagcctccggggcggggcgcggcgccagcctagcccgaggatggaggctgaggccgcctgttgagtcacagtttccctgtgatgctc

SEQ ID NO: 844936 - DNA, 120 bp, Artificial Sequence
  ENSG00000278090_10 (sequence is synthesized)
gtttggaggagaagacctgttcccctgcaggtatgggcctttgggatcattaccctctccagatctggcagctccatcaggtggtggctctttctccaaacgtccttgacagctttagtg

SEQ ID NO: 844937 - DNA, 68 bp, Artificial Sequence
  ENSG00000278090_11 (sequence is synthesized)
agttcatggctcactgcaaccttgacgtcccaggttcaagcgattctctcacttttgtctcccaagta

SEQ ID NO: 844938 - DNA, 69 bp, Artificial Sequence
  ENSG00000278090_12 (sequence is synthesized)
agtgcaatggcatgttcatggctcactgcaaccttgacgtcccaggttcaagcgattctctcacttttg

SEQ ID NO: 844939 - DNA, 86 bp, Artificial Sequence
  ENSG00000278090_13 (sequence is synthesized)
ttggcctcccaaattcccccagaagctaaaggatggtgcaggttctgtttttaaatgtacctgttaagtatgtattagctcaaaca

SEQ ID NO: 844940 - DNA, 120 bp, Artificial Sequence
  ENSG00000278090_14 (sequence is synthesized)
gtttttaaatgtacctgttaagtatgtattagctcaaacagagtttacctgagatgtgcatctggggtccaccctctttggcactgtccctcattttcctcctccaacattctcccaatc

SEQ ID NO: 844941 - DNA, 120 bp, Artificial Sequence
  ENSG00000278090_15 (sequence is synthesized)
tctctctgttaaccccaacaacctgccacccctccctaacaaaggattcccagctcaaggccaattccaattggatcgagtttttcttctgcagaaattgtggggaggtggcttcagagg

SEQ ID NO: 844942 - DNA, 120 bp, Artificial Sequence
  ENSG00000278090_16 (sequence is synthesized)
ctcacaagcagaaccccacccagacacataaacttttctttggctggtaccaactcctctattgcagggtatggtccaagtaggttatacaagtctctacctcttctagctgaagccaac

SEQ ID NO: 844943 - DNA, 120 bp, Artificial Sequence
  ENSG00000278090_17 (sequence is synthesized)
ctcccaggaaaaggatgagaggagaaagccatcctgcctggtgtgtggataataccaccaccagagtctcctgtaattttgattcgatggcatgcagctgcgtgacctaaggcacgtatc

SEQ ID NO: 844944 - DNA, 120 bp, Artificial Sequence
  ENSG00000278090_18 (sequence is synthesized)
tccattcacagggtgtggtcagtactctgtgaatatcaggtgttctgtctgccctgtctcctgtcttcctggagcctgcccttacccagtgagtccctggagggaacattctggcatctg

SEQ ID NO: 844945 - DNA, 120 bp, Artificial Sequence
  ENSG00000278090_19 (sequence is synthesized)
gctgtgagctgtcacagacatgggtttctttcggttcccagaatgatgggatgccagccgctggctgcccccaagaaacttgggagcaggacaggcttggctgtcccagaggaagagcct

SEQ ID NO: 844946 - DNA, 120 bp, Artificial Sequence
  ENSG00000278090_20 (sequence is synthesized)
ggcattgggccaggaggctcaggagggaagatgagctcattctgcccagctcggttctcccgtatgcagaccaggtcatcacagggacctgcctccacatttgcatcccccacggcatat

SEQ ID NO: 844947 - DNA, 120 bp, Artificial Sequence
  ENSG00000278090_21 (sequence is synthesized)
gtgagcgacgtgcacgctgcttccgaagaaagagacatccccctactgttttctcacagtgggatgattcaactttttctttctcacaatcccagataatcatatcttcccaggttttgt

SEQ ID NO: 844948 - DNA, 120 bp, Artificial Sequence
  ENSG00000278090_22 (sequence is synthesized)
catctttgaggactactcactatctagttatgagtcaaacaaaacccaatttaactgataactaaccagccatcacgtatccctgaagataaacctggtttatcctttttataccctctg

SEQ ID NO: 844949 - DNA, 120 bp, Artificial Sequence
  ENSG00000278090_23 (sequence is synthesized)
gcagagcaaaggaacaaggagtttgggagagaaaaaaaaacacaacactagaaacagcactgacacaggtcgttaaatacagatgtgaccagccttgattacaagtgttgtcatcctctt

SEQ ID NO: 844950 - DNA, 120 bp, Artificial Sequence
  ENSG00000253434_0 (sequence is synthesized)
gtaacaatttactgttgatggacacagcaaggtgagaattttgagattcaaacagcggataatacaagccaaagttttctttctgtggaaaagttgatgcgccttttaagaagtgaacaa

SEQ ID NO: 844951 - DNA, 120 bp, Artificial Sequence
  ENSG00000253434_1 (sequence is synthesized)
ccaagttatttgcctggaaaagtctcctgaaatactgaagttatgctaaagaaggagaagagaaaggaagctgcagtccctgtataactcctaaatttttaatttggagttcctcttctt

SEQ ID NO: 844952 - DNA, 120 bp, Artificial Sequence
  ENSG00000253434_2 (sequence is synthesized)
cggtgcaacaatctttctgcatgcacagatccatgtggcactcatctcatcattctgagggaagaaagatgcatagggaatgttgcatgtggttatttctatttctctcaagtgcacatt

SEQ ID NO: 844953 - DNA, 120 bp, Artificial Sequence
  ENSG00000253434_3 (sequence is synthesized)
atccatcaagaagatttaaatcattttgaaatattaatataatgatcaaaaattaacttttatacatgttattaggcagaacccacagaaaacaataaagcacgagagaaaagaggatgg

SEQ ID NO: 844954 - DNA, 120 bp, Artificial Sequence
  ENSG00000253434_4 (sequence is synthesized)
cagtttacccaggaaacataggttgtgcaaagctttgcaatgatactctcaattcagagcaatgaagaacagaatgctgtcttcccataatgatggcattcaattatcactagacttaca

SEQ ID NO: 844955 - DNA, 120 bp, Artificial Sequence
  ENSG00000253434_5 (sequence is synthesized)
agactacagaaaatttctcaagaaccagtaaggatcagacagagccaatgacaatactgaagaagcttgccagtggagaatgaaagctcagttacacaaattacgttgttgaaccagtgc

SEQ ID NO: 844956 - DNA, 120 bp, Artificial Sequence
  ENSG00000253434_6 (sequence is synthesized)
cttcataatctgtccctacttagttgcaccataaccataaatattgtaagaggcaaaagagtggtaaaaagctcattaacactgagattattcttgttaattcatctgaatgagacctta

SEQ ID NO: 844957 - DNA, 120 bp, Artificial Sequence
  ENSG00000253434_7 (sequence is synthesized)
acgtacaaaataacttgaattacagaaaatgttgaaaagttgtatttcttgcacatctaagattgagagggagatatatgtgtgaattgtcacgaaaggccatcttcaagatatcacaat

SEQ ID NO: 844958 - DNA, 120 bp, Artificial Sequence
  ENSG00000253434_8 (sequence is synthesized)
caatctgtagattaaggtcagccaatataatattccaacctgaacctttgaaaactgaacaggagtgagtataataatctctagaaaagcatcagttaagattctagcttggccatctcc

SEQ ID NO: 844959 - DNA, 120 bp, Artificial Sequence
  ENSG00000253434_9 (sequence is synthesized)
atcatctgtgtcctttatttctaataaccttcaagttttctatatatgacattatctttccagtctcctcggaaaaattgctcttcacttcaattagtttgaatcagtttattttgcttt

SEQ ID NO: 844960 - DNA, 120 bp, Artificial Sequence
  ENSG00000253434_10 (sequence is synthesized)
ccaccaagagctgaaatttttctaaacctgcacactcacttatgaagtccctagagattacacgttacttgtgttccttagtcttcattccttgttcttatcctgtttactcttctatgc

SEQ ID NO: 844961 - DNA, 120 bp, Artificial Sequence
  ENSG00000253434_11 (sequence is synthesized)
atcaattctgtgagaggcaaaaccaatttttatgtgtgtaaaagggaaaaaaacatatgtgcataactaatgacttctgaaatttattatgacaagaaccctcccactcagaagaattat

SEQ ID NO: 844962 - DNA, 120 bp, Artificial Sequence
  ENSG00000253434_12 (sequence is synthesized)
gaaggcttgttgtaaaaaataagaaaataagtctttgataatgacagacaacaattaggttgcttggacttcagaattttattctaaataaaccttctaaactgaacttactaccccaaa

SEQ ID NO: 844963 - DNA, 120 bp, Artificial Sequence
  ENSG00000253434_13 (sequence is synthesized)
tctctcttagggaaaaccagcaccaaagttctagagtctggacgtctgagatcagggtgccagcactgtcgaggtcacagactgcagacctccttgtatcttcaaatggaggaaagagga

SEQ ID NO: 844964 - DNA, 120 bp, Artificial Sequence
  ENSG00000253434_14 (sequence is synthesized)
caagagagctcctgtggtcccttttatcaagatgaatgcacaaggaaaatgttgtacatttgcacattggagtacacttcagccataaaaagaatgagatgctgtcatttgcaacaacag

SEQ ID NO: 844965 - DNA, 120 bp, Artificial Sequence
  ENSG00000253434_15 (sequence is synthesized)
ttgaagcctagtcaagaagagggctcagagaagcttgactaaagtttcatgaagagagtctctgtcagtggtgggtctttgattctcaaggaagctgtcagaagcttcatctaacttctc

SEQ ID NO: 844966 - DNA, 120 bp, Artificial Sequence
  ENSG00000253434_16 (sequence is synthesized)
ttccactctactttcttctggggaagaagtgacccaacaatttgatctaatatttgcctgataatattgaacatccttgcatccattaaagtttactgttctaagacttactttaaccaa

SEQ ID NO: 844967 - DNA, 120 bp, Artificial Sequence
  ENSG00000253434_17 (sequence is synthesized)
gaagactgacttcctcctgctgccaaaggtttgcagtgcttatttaagaaattatacctgctttgtctactagaggcagtcagctgaatcatcgagttcttgcagaagccttgagcttta

SEQ ID NO: 844968 - DNA, 120 bp, Artificial Sequence
  ENSG00000253434_18 (sequence is synthesized)
gcacctaagggccctgagacagttgtattcaacaaccttgttgcatgaaagaaggggagttctgagggacatggacattgcagactttttcaccaaccaggaaaacttttcaggcatcac

SEQ ID NO: 844969 - DNA, 120 bp, Artificial Sequence
  ENSG00000253434_19 (sequence is synthesized)
ggcttccactgcttaacaaatgttacatagaattcttcaccgatgtgaggaacatcagtttgcaaaagaaactctgcactttcagggataaaaagactgagactccaaatggtgctccta

SEQ ID NO: 844970 - DNA, 120 bp, Artificial Sequence
  ENSG00000253434_20 (sequence is synthesized)
gtattggtgaagcttagggagagagcccattgtgtttctatctaactgctctcaggaaaaggtagaaaatgtctcagattccacaagaaagatagaatgtgtgataagatgacaatcagg

SEQ ID NO: 844971 - DNA, 120 bp, Artificial Sequence
  ENSG00000253434_21 (sequence is synthesized)
taacttttatacatgttattaggtaggttattgtaataactattactataattaatataggcgagtttgttttgccaaaactcttaaaatgagatctagaattagaaatgacttttttcc

SEQ ID NO: 844972 - DNA, 120 bp, Artificial Sequence
  ENSG00000253434_22 (sequence is synthesized)
gcaatttcttctttcctgcctgctgaagactgacttcctcctgctgccaaagatcctctaaactaactacaagctcctccacattatcaggacaaacacaattctaactctcaaaagttc

SEQ ID NO: 844973 - DNA, 120 bp, Artificial Sequence
  ENSG00000253434_23 (sequence is synthesized)
aaggcatttgcagtgatacatcctagtgatggcagcaaccgcccgtctggagccgcggttgggaagacgtcgtctgcagcaagggaggcgtggtggggctgtgcctctgtggagctggtg

SEQ ID NO: 844974 - DNA, 120 bp, Artificial Sequence
  ENSG00000253434_24 (sequence is synthesized)
aggccgggaacaggcaggccccccgcccctatcaagtcgcggggcaagagcccctccctccagatgcaactgcaagggtgactccagacctatacgccctatggcactgtaggctcggaa

SEQ ID NO: 844975 - DNA, 120 bp, Artificial Sequence
  ENSG00000257500_0 (sequence is synthesized)
agcttgtggctgatcagctgggagtccatcctgttccttttgacttcaccctgccatgctgctccacagcagggaagcccaggcggctgtcacattggatggaagaggaggccttgtatt

SEQ ID NO: 844976 - DNA, 120 bp, Artificial Sequence
  ENSG00000257500_1 (sequence is synthesized)
ctggaagggagccatagacttccttttcgaaagaggcctgaaggccacctggacgagcctcccccagtaccagaacccctcaatgacattgccaagatacaattgttcagcttctgcttc

SEQ ID NO: 844977 - DNA, 120 bp, Artificial Sequence
  ENSG00000257500_2 (sequence is synthesized)
tggatgcatctttgcaagccaggagaagaaggggctgcaacagcccgagcccctaggaatgcccaggaagctgaggtgagctcaacttgctttgaggatgaagttggtgcatctgcctca

SEQ ID NO: 844978 - DNA, 120 bp, Artificial Sequence
  ENSG00000257500_3 (sequence is synthesized)
cctgcactcctcgccttccagcagcttgcggtaggtggcgatctccacgtccagggccagcttgatgttcatcagctcctggtactcacgcaggagccgagccatgtcctgcttggcctt

SEQ ID NO: 844979 - DNA, 120 bp, Artificial Sequence
  ENSG00000257500_4 (sequence is synthesized)
ctgcagggcctcctcaaggtccaccagcttggcccgtgcatccttgagagccagttctccccgctgctctgcatcagcaatggccgtttgcaagctggaacactgtaaggacaggaggaa

SEQ ID NO: 844980 - DNA, 120 bp, Artificial Sequence
  ENSG00000257504_0 (sequence is synthesized)
gggaaggctgcctaagccagagagcttcacagggagccttgatgtctgagtaagaattaaccaggtgaagcagaaggggaaataggctctaggaaaagagagctttgagcgcaaaggcag

SEQ ID NO: 844981 - DNA, 120 bp, Artificial Sequence; identical to SEQ ID NO: 835471
  ENSG00000257504_1 (sequence is synthesized)

SEQ ID NO: 844982 - DNA, 120 bp, Artificial Sequence; identical to SEQ ID NO: 834522
  ENSG00000257504_2 (sequence is synthesized)

SEQ ID NO: 844983 - DNA, 120 bp, Artificial Sequence; identical to SEQ ID NO: 834523
  ENSG00000257504_3 (sequence is synthesized)

SEQ ID NO: 844984 - DNA, 120 bp, Artificial Sequence
  ENSG00000257504_4 (sequence is synthesized)
aactgcacctactcccataactggcatacctatcagattttggtggctgcaccaaaacaccaggaagaaaaggatggggcacggctgcacacttatgtgatacttggaatgtcttatgta

SEQ ID NO: 844985 - DNA, 120 bp, Artificial Sequence; identical to SEQ ID NO: 834525
  ENSG00000257504_5 (sequence is synthesized)

SEQ ID NO: 844986 - DNA, 120 bp, Artificial Sequence; identical to SEQ ID NO: 834526
  ENSG00000257504_6 (sequence is synthesized)

SEQ ID NO: 844987 - DNA, 120 bp, Artificial Sequence; identical to SEQ ID NO: 834527
  ENSG00000257504_7 (sequence is synthesized)

SEQ ID NO: 844988 - DNA, 120 bp, Artificial Sequence; identical to SEQ ID NO: 834528
  ENSG00000257504_8 (sequence is synthesized)

SEQ ID NO: 844989 - DNA, 120 bp, Artificial Sequence
  ENSG00000257504_9 (sequence is synthesized)
aatttgctagccaatgtcattcttaatggtgaaaagctaggaatactgctcgtaaagccagggctagaaataatgcctgcagtcacaactactacttaacattgttctgaggtcctagcc

SEQ ID NO: 844990 - DNA, 120 bp, Artificial Sequence; identical to SEQ ID NO: 834530
  ENSG00000257504_10 (sequence is synthesized)

SEQ ID NO: 844991 - DNA, 120 bp, Artificial Sequence
  ENSG00000257504_11 (sequence is synthesized)
agcagcttttttaaaaagctaaagtgtactatagttcagtaaggtgtccactgataaaaattatataaaaaggccaggcacagtggctcaagccttaatcccagcactttgggaggctga

SEQ ID NO: 844992 - DNA, 120 bp, Artificial Sequence
  ENSG00000257507_0 (sequence is synthesized)
attaatgccattatctcagaaatagagttgttatcgttggagtagaatccttataaaaggatgagttcagctctgttttgtctctctcaccctctctttgcccttctgccatgggatgct

SEQ ID NO: 844993 - DNA, 120 bp, Artificial Sequence
  ENSG00000257507_1 (sequence is synthesized)
ccagcctccagaagtgtgagccaataaatctctgagggttctgttctatgtcatttcctttgaagtcagtgggaactctgtgcaggacggcaacatgaacaccggcctctatacatgaag

SEQ ID NO: 844994 - DNA, 120 bp, Artificial Sequence
  ENSG00000257507_2 (sequence is synthesized)
gccatcaagtggttaacatatagacagtatttaaatccttgggactggatgagattaccaagggaggaaatgtagatgaaggagaagagaaaggatggagttctggagcactacaaattt

SEQ ID NO: 844995 - DNA, 120 bp, Artificial Sequence
  ENSG00000274893_0 (sequence is synthesized)
tattttattaccaacatcgttggcatccctgagtatgagagttcagaagaaacttagaggctattgtctgattcaatccttgcagcttacaaaaagaaatgtggggagcagtcactgtgt

SEQ ID NO: 844996 - DNA, 120 bp, Artificial Sequence
  ENSG00000274893_1 (sequence is synthesized)
gactagcctgaggtcactcaggaagttagaggcagaactgcagccagggtcacctctctttactgctactagtgtgctccttctactgcaccctgatcataaaacatctcccaacccagg

SEQ ID NO: 844997 - DNA, 120 bp, Artificial Sequence
  ENSG00000274893_2 (sequence is synthesized)
aacaaggtctaccgcataggtgggcacagcagcgtgatcactctctcagtcgtctgtactcctcctttgctttgaccaaagacacaggaagggaccttttgccccacataaaacacctct

SEQ ID NO: 844998 - DNA, 120 bp, Artificial Sequence
  ENSG00000274893_3 (sequence is synthesized)
cagaggcttggcaacaacaacagataatagagagcattgacctaagaccaacatttcaaccatggtgtcaaaacaatattttatttcagcaaagaaaaactatgtcacaagtggattatt

SEQ ID NO: 844999 - DNA, 120 bp, Artificial Sequence
  ENSG00000274893_4 (sequence is synthesized)
attactaataatcagactagtggtacttgcgaatgacttggtttcatactcacacttggacaactatgcacactgagtataactgaccttatgagaacatcattctcactaagattatga

SEQ ID NO: 845000 - DNA, 120 bp, Artificial Sequence
  ENSG00000274893_5 (sequence is synthesized)
tgtgctttctcacgtgggaactgtacataatattgcgtgtacacttgggaggatgtcctgcctgtgatgttgtctttcaggggaagaagaatggttgagaactgagggtatattaaacat

SEQ ID NO: 845001 - DNA, 120 bp, Artificial Sequence
  ENSG00000274893_6 (sequence is synthesized)
ttactcctccagatttttcaagatttctgttaagccagatcagaagaaagccatctatttggattgcatcactctaacctggaaataccaatattttctaagcatggcaagtgtttccaa

SEQ ID NO: 845002 - DNA, 120 bp, Artificial Sequence
  ENSG00000274893_7 (sequence is synthesized)
gcattcagaagtggagagtgtaggaaatccactgcagaatgaggtctgctcgtcatcctctcagtctcaactgctctccctccttcatctctctctgtttcattggtgagtatagaagat

SEQ ID NO: 845003 - DNA, 120 bp, Artificial Sequence
  ENSG00000274893_8 (sequence is synthesized)
caggcatttttatatgaaatgaaaattgatggaactaaggtgttgatttgaatatccaaccgaccttttattgagtgtctattacaagttaaattgtgttgtagagaacagctcaggaaa

SEQ ID NO: 845004 - DNA, 120 bp, Artificial Sequence
  ENSG00000274893_9 (sequence is synthesized)
tgaagctctttcaaaatgagaatgtaaaatttcaaaaaaaacatcattttcacaagtcattcttgagacagaaaagtggaaatagaagttcatatatggttgtttcactagctctaatct

SEQ ID NO: 845005 - DNA, 120 bp, Artificial Sequence
  ENSG00000274893_10 (sequence is synthesized)
tatgtacagtttttagtcagttgacagccatataattcttagttttatatactgatagtcattagaaattacaaattttaaaaaatattcatgtctcattctacgaatcaatgtaaaaat

SEQ ID NO: 845006 - DNA, 120 bp, Artificial Sequence
  ENSG00000274893_11 (sequence is synthesized)
ttcattcacttggttatatttcttcattttacctggccttgactacttctttcctgcccagcattaaatttaattaatgtctaatttgtttacttggtttagttattttggccatgttca

SEQ ID NO: 845007 - DNA, 120 bp, Artificial Sequence
  ENSG00000274893_12 (sequence is synthesized)
gtacacttgttatgaagcaggcatgtaggaatgttgacaagtttatggtcctcactcttccaaatccctaatggcggcaccccaacagacacataccacaatgtaaatacatacacatac

SEQ ID NO: 845008 - DNA, 120 bp, Artificial Sequence
  ENSG00000274893_13 (sequence is synthesized)
acacaatccacacccacccatactcacccacgtacacacagacacacacacacactccagtggatcaacacataaaacactccacaggcaggcatcgtacagcagggatctcttagtgca

SEQ ID NO: 845009 - DNA, 120 bp, Artificial Sequence
  ENSG00000274893_14 (sequence is synthesized)
ctacacacttctgtaaattatcaggactcttcaattgaggtgagtctacagagatttcaaaagctatttgagtgttaagctatctaactagtggttggacactatttaaataatgcatta

SEQ ID NO: 845010 - DNA, 120 bp, Artificial Sequence
  ENSG00000274893_15 (sequence is synthesized)
aacacaactcttgaggctctgaagaatttctgtgctttccaattcaccaggagttacaaggtcctgaaaaccacaactgtgttacatcctttaatagataaagcaaagctgattttaatg

SEQ ID NO: 845011 - DNA, 120 bp, Artificial Sequence
  ENSG00000274893_16 (sequence is synthesized)
tgaatatactttatagttatttctattcctgttaatttttgtttgcttgtaatacacatttttatgtaactgggagtaaggaacatcttaggaaaaagaaaacaaaaaataaaatttcgc

SEQ ID NO: 845012 - DNA, 120 bp, Artificial Sequence
  ENSG00000274893_17 (sequence is synthesized)
tgtttacactgtgccttggtccagtaaccctgcactgcacatatacactttaaattggtgccttggggaaccacttcggtatttcttttttttttttcttttatgttgtaaacctttctt

SEQ ID NO: 845013 - DNA, 120 bp, Artificial Sequence
  ENSG00000274895_0 (sequence is synthesized)
ttagtatgtccgagtctatcccggcaggaaacttttggcacgaatttcaaacagtgaaaaggagaaaaaaaattaggtcggtcaggttaggtgtcggcgataagaaaagagattgcggga

SEQ ID NO: 845014 - DNA, 120 bp, Artificial Sequence
  ENSG00000274895_1 (sequence is synthesized)
gcatccccagccttcttctttccccttttgccgcccccacacactccccccacgcgtctatcacggaagcaacacagaggagcgcacacgcaccactcacacctccaactattgactgtt

SEQ ID NO: 845015 - DNA, 120 bp, Artificial Sequence
  ENSG00000274895_2 (sequence is synthesized)
gtatcaggtgttctaaccgggatgtgacagttgaggctgggagcagaaataatcaacatgcccattagatacaggacggaataatgcttctattggttgggtcccttcgaggtaagcggg

SEQ ID NO: 845016 - DNA, 120 bp, Artificial Sequence
  ENSG00000274895_3 (sequence is synthesized)
tgtattgagcggggaaacttgggatctgagaatggatcaaagctactttctttcttatttttcgtcctactagttttctttaagaatcttggtttgtacatataagttagcgccagccca

SEQ ID NO: 845017 - DNA, 120 bp, Artificial Sequence
  ENSG00000274895_4 (sequence is synthesized)
caaataaactggtaggagtaagggctatatacctttccacaccttaaaaccatctgctcagtttgacatttaaaagggcggagagcagagaaggaggaggggggagtagggggaagaaag

SEQ ID NO: 845018 - DNA, 120 bp, Artificial Sequence
  ENSG00000274895_5 (sequence is synthesized)
gagtcagggacagagaaaaagattcaaacgcgaaaaaaatggcttgcactttagcccacaagtttgtgtcaattgcacatagcgcttgaatgcacgttttgcacacaccacgcccgggaa

SEQ ID NO: 845019 - DNA, 120 bp, Artificial Sequence
  ENSG00000274895_6 (sequence is synthesized)
ctggcggcgggaaaagttccctgagaaccccagtaagtcctgtgtcacgccgtgggcaaaagcaggcctgagtcgaagtcggggtaacccgcttgccgaacaaggaagctctcccacccc

SEQ ID NO: 845020 - DNA, 120 bp, Artificial Sequence
  ENSG00000274895_7 (sequence is synthesized)
cagcctcggcggcagaggctcccggctcgcgacgctctgccgcggcggttcgcagcccgcattagggcgcaggagcggcgacttgaaataggagcgcgcgccacgctaggcgagcgagat

SEQ ID NO: 845021 - DNA, 120 bp, Artificial Sequence
  ENSG00000274895_8 (sequence is synthesized)
cggttcgcagcccagctccgtgagctgcctcggcgcagccctgtcccgtgtcctgtcctctactgtcggggaggcgtacaggccaggctcctggcaacctctcttgctagagctgcggca

SEQ ID NO: 845022 - DNA, 120 bp, Artificial Sequence
  ENSG00000274895_9 (sequence is synthesized)
ttctcctgggtctcgggctgccctggacaagacttgaggcccgagccccctatctcgggcgactcccgctttgttttctgataggggagaagcctggagacaaggagtcgcctagatatt

SEQ ID NO: 845023 - DNA, 120 bp, Artificial Sequence
  ENSG00000274895_10 (sequence is synthesized)
cggtcttgtaacacactctatccgtgcaggttgcatttacttatttatctgaagggtgatctgtgtgttcttagacaaactcgcagttatcacccatgcatctggttctgggttaaatac

SEQ ID NO: 845024 - DNA, 120 bp, Artificial Sequence
  ENSG00000274895_11 (sequence is synthesized)
acttcgccttgacatttgctcggtgtatgctcacgcctcctgttctttcttaaagctgttaggtgggggcaggagggaagacagtgtgtataagtaatttaaaaccttacaaacaactgt

SEQ ID NO: 845025 - DNA, 120 bp, Artificial Sequence
  ENSG00000274895_12 (sequence is synthesized)
tatcagatcctaaacaaaccaattctgagaattacaaccagattcagttgagaggcaaaagtggacgtggattttggaaaagggtgcctaaggacttccaggtcagccacccaccgctac

SEQ ID NO: 845026 - DNA, 120 bp, Artificial Sequence
  ENSG00000274895_13 (sequence is synthesized)
caccaccaccaccgccaccactaccaccatcactatcagcaccctgaagaagggaagagaggaaaaccaaccccagggtgcaggcctgcctgctgcaagctttctagaggcaaaactgac

SEQ ID NO: 845027 - DNA, 120 bp, Artificial Sequence
  ENSG00000274895_14 (sequence is synthesized)
tgacggcctctcactctcatctcctgtgctcagtgtgacgccaagcccaacctggatttgttctgaatgggggggaagtgaaatgccacaagatcagtagcaagtagcagctgcagcgtt

SEQ ID NO: 845028 - DNA, 120 bp, Artificial Sequence
  ENSG00000274895_15 (sequence is synthesized)
ttctctcctgggaaccccactgcttagaagcctcctgagtgatgtttgtttaaccaacagctttcaaagtaaacagaagccaatcactccaaagaagttgaaatataacccttacaagaa

SEQ ID NO: 845029 - DNA, 120 bp, Artificial Sequence
  ENSG00000274895_16 (sequence is synthesized)
tttggatccaggggtgctggcagaaagaaagtaatttttaaaatgataaagaacccactcccaaataagagtctgccacattgctttaaggagcgcagaattgtcatgaaaatataattt

SEQ ID NO: 845030 - DNA, 120 bp, Artificial Sequence
  ENSG00000274895_17 (sequence is synthesized)
catcgaaagggctaattacaataagttgacctcgaagaaaatcactcttcgcccacaaagacacacccgcggggatgaggaggttgtcagtgattgaagggacacactactacttgattt

SEQ ID NO: 845031 - DNA, 120 bp, Artificial Sequence
  ENSG00000274895_18 (sequence is synthesized)
tatggaagtgggcgaaaacaatcaaagggaagtacattccctgccctggagtagtgaagtgtaggctgggagctcttcgccgccaaccctggctttgcctcaggcaccgaactttccaat

SEQ ID NO: 845032 - DNA, 120 bp, Artificial Sequence
  ENSG00000274895_19 (sequence is synthesized)
accaagatattaacagatggtggtgagcacatggagggctgctacttacataatctagccactccgcccggctgcccagagcccggcgaggaaccggccaggccgcgcgcgcgccttccg

SEQ ID NO: 845033 - DNA, 120 bp, Artificial Sequence
  ENSG00000274895_20 (sequence is synthesized)
aggggtgctccctgacataacttgcctttctccaaccccacccatcgttttgagggttagcatttggagaggccgtgatttaaaaaaaccaaacaaaaacaaaaacacccaaaacattga

SEQ ID NO: 845034 - DNA, 120 bp, Artificial Sequence
  ENSG00000274898_0 (sequence is synthesized)
ttaggtgcaatatcattaagttgaatcatgcgccattcctctctacacctccaaaaaaaaagagagaaagtagttttccattcaaagatgtcttagaacactcagacccatgtataagac

SEQ ID NO: 845035 - DNA, 120 bp, Artificial Sequence
  ENSG00000274898_1 (sequence is synthesized)
actgaaaagcagtggtgcccagggagctctccgttcttcccgttttctcaagaaattgagctaggaagccatgtataaagttacgtcgaagttcagtgtgaggccaggagtggtacaggc

SEQ ID NO: 845036 - DNA, 120 bp, Artificial Sequence
  ENSG00000274898_2 (sequence is synthesized)
aattggagaccagcctgcgcaatatgtccagactcttgtctctacaaaaaaatagaagagtaataattttaaaaaatcagacgagcttggtgtaatcccggctactactcaggaggctga

SEQ ID NO: 845037 - DNA, 120 bp, Artificial Sequence
  ENSG00000274898_3 (sequence is synthesized)
atcgagaggatggctggagcccaggagtaggaggttacagtgacctatgatgtcaccactgcacttcagtctgggtgagagagtgagactgtttctataataaaatgaattcaatgtggg

SEQ ID NO: 845038 - DNA, 120 bp, Artificial Sequence
  ENSG00000273329_0 (sequence is synthesized)
gatgaggaggtcggcgcggctgtgctgcgggcaggcagcggagagggctcgcggcgagggctccagcttaccccgccgccgcgtcgcgtgcacggagcgcttcagaggtttggagggggc

SEQ ID NO: 845039 - DNA, 120 bp, Artificial Sequence
  ENSG00000273329_1 (sequence is synthesized)
cggaacctcaaaagcaactggatgagcacaacgcggacgccccggagaagcggcgcaagcgggcccaaaatggttgctgatcagacgagtggcatctctcgcccccctaccgcgggaatt

SEQ ID NO: 845040 - DNA, 120 bp, Artificial Sequence
  ENSG00000273329_2 (sequence is synthesized)
gggacctccagactgtgcctgggggatcggcaagtggttcccctctggttttttcggcgctgccttcccggtggtatcctcactctctctctttgaaatgacctctgctttcctatctct

SEQ ID NO: 845041 - DNA, 120 bp, Artificial Sequence
  ENSG00000273329_3 (sequence is synthesized)
aactcttcccagatatttgaaagcaagtttttgtacaaagcaacatatgaatgtattcagccattcgatcgttcggcgaacatttctaggtgtctcgtgctgtgccagatattgttctga

SEQ ID NO: 845042 - DNA, 120 bp, Artificial Sequence
  ENSG00000273329_4 (sequence is synthesized)
gtgcgctgaagatgcacctgttagcaagacaaagtcctggctcccacggagcttattcgaagcaataggggcccccaagcaggtgcctgagaagtagggaggggtggacagtgggaaaac

SEQ ID NO: 845043 - DNA, 120 bp, Artificial Sequence
  ENSG00000273329_5 (sequence is synthesized)
agtagggaggggtggacagtgggaaaacaacctaacggtggagacacacgaggggtctttttttacttttagaaacgggggtgggtggtcaccctatgttgcctaggctggtctcgaact

SEQ ID NO: 845044 - DNA, 120 bp, Artificial Sequence
  ENSG00000273329_6 (sequence is synthesized)
gcctcccaaagtgctggtattacaggacaccatgcccggcagaggggtcgtttttgttgtttttttagtgtcgtcaggagactccctccatcagaattactcaggctgattgttttgagt

SEQ ID NO: 845045 - DNA, 120 bp, Artificial Sequence
  ENSG00000273329_7 (sequence is synthesized)
cctgggacccagttggtatccagaatcttggcttgtttgcctaggaacctgcattttcacatccccatctccacacccctggtgattcttatgcatataataatgtgaaaagcattgcat

SEQ ID NO: 845046 - DNA, 120 bp, Artificial Sequence
  ENSG00000273329_8 (sequence is synthesized)
tgaagaattgctaaagggtgtcagaaaacggattaacaaaatcaggaagctttaattttcaagattctattaacctcaaaattcaacatatccaaaaattgaatgtctttttctccagtg

SEQ ID NO: 845047 - DNA, 120 bp, Artificial Sequence
  ENSG00000273329_9 (sequence is synthesized)
ttttctaggagagtgccaacactagccacccaagtgctcaagccagaaacctggaaatgatccattactctttcctctgtctctggagtccccatgttaaattagatgtgtttgtttgtg

SEQ ID NO: 845048 - DNA, 120 bp, Artificial Sequence
  ENSG00000273329_10 (sequence is synthesized)
tgtttgtgagacagattctcactctattacctaggctggagggcagtggtgcaatcattgttcactgcagcctcgacctctctgggctcaaggatcctcccacctcagcctccccagtag

SEQ ID NO: 845049 - DNA, 78 bp, Artificial Sequence
  ENSG00000273329_11 (sequence is synthesized)
tgtatttttagtagagatgaggtttcatcttgttggcccgggctggtctcgaactcctaggctcaagtgatctgcctg

SEQ ID NO: 845050 - DNA, 120 bp, Artificial Sequence
  ENSG00000273329_12 (sequence is synthesized)
acagccgtgagccactgcacccagccccaattagatttttaaaactgttgttccctgtcagttcttactctggttcaggctactgtcatctctcctagagacactgcggtagactcctct

SEQ ID NO: 845051 - DNA, 120 bp, Artificial Sequence
  ENSG00000273329_13 (sequence is synthesized)
tgcggtagactcctcttggtctccctgccaccgaaattgccctctccaaatccactacagcttgaatggtctttcaagaaagaaaatcatgttttttccctgtttaagactcttaaaaag

SEQ ID NO: 845052 - DNA, 120 bp, Artificial Sequence
  ENSG00000273329_14 (sequence is synthesized)
atctgattaacacgtaggataaagtctaaaattctttgaggtggctacagggccattggtgatctcatccctgttgccatctctgacctcatctgccacagatatttctcaggctacact

SEQ ID NO: 845053 - DNA, 120 bp, Artificial Sequence
  ENSG00000273329_15 (sequence is synthesized)
caaaactgggaagctctcaggtcatttaagcctggaaattgtgccacctcacaactgttgcaagggctgttccctttgcccataacttcatttctctctacaccatctatgcacttactt

SEQ ID NO: 845054 - DNA, 120 bp, Artificial Sequence
  ENSG00000273329_16 (sequence is synthesized)
gaatcctcacctgaataattcttaccattctttcagatcccaacattaataccatcgcctccaggcagcattttttcatctcccaagattgggtgcattagaccctttgtcatcacaccc

SEQ ID NO: 845055 - DNA, 120 bp, Artificial Sequence
  ENSG00000273329_17 (sequence is synthesized)
agtactccccacgtttattgagcgctcacgatgcgtcaggccctagtggaagcctttatgcacattatcttctttctcatttaattatcaagtagagcccacaaggtaggtactaccttt

SEQ ID NO: 845056 - DNA, 120 bp, Artificial Sequence
  ENSG00000273329_18 (sequence is synthesized)
ggtactaccttttttttaacttttgagacagggtctcactgtatctcccagactggaatacagtggcgcaaacacagctcactgcagtctcatcctgggctcaagcaatcctcccatctc

SEQ ID NO: 845057 - DNA, 120 bp, Artificial Sequence
  ENSG00000273329_19 (sequence is synthesized)
ggctggtctccaactcctgggctcaagccgttctaccttagcctcctaaagtgcagggattacaggtgtgcaactgtgcccggcctgggtagttactaatattatcccattttacagatg

SEQ ID NO: 845058 - DNA, 120 bp, Artificial Sequence
  ENSG00000273329_20 (sequence is synthesized)
gtagttactaatattatcccattttacagatgaagaaacaaggacatataggggttacttgcccaaacccagacaataagctagatctgaaagtcatcagcctgacctcagagttgtact

SEQ ID NO: 845059 - DNA, 120 bp, Artificial Sequence
  ENSG00000273329_21 (sequence is synthesized)
tttaaccattatcagggtctcaggccagtacccactgatgaaacacataagtaacttagtgggtcattaccaacatttcattaaagaaatagaaaatggcagagaacatcaaacttagta

SEQ ID NO: 845060 - DNA, 120 bp, Artificial Sequence
  ENSG00000273329_22 (sequence is synthesized)
aggctcttgtttcgtgaaacttgtcagattctctaatatgataaatactaaatcttacaaacattgaaaatacaaaattaaacaaaatattaccaaggttaacacaaaagtatgaatact

SEQ ID NO: 845061 - DNA, 120 bp, Artificial Sequence
  ENSG00000273329_23 (sequence is synthesized)
gcagatctgatttattttactatcctcatctttaatgcagaaccttcttaggattaaatgacatttaccattctgagcaaactgaggttactgccccaaacggactgggcttacctttgc

SEQ ID NO: 845062 - DNA, 120 bp, Artificial Sequence
  ENSG00000273329_24 (sequence is synthesized)
aggagaacaggggaggctgtgttttggctggagatttttggctaagagtcaagacacagagattcttctgctaccactgtgaacacatcaagtccctttcacatagatgctgtttccaca

SEQ ID NO: 845063 - DNA, 120 bp, Artificial Sequence
  ENSG00000273329_25 (sequence is synthesized)
agggtctccccacacccttccctacagattagattcccgtgatgccttatttaattcttgttggatctgttgatttggttatgaagtaggtgaaattctggtaacctcacccaggttcct

SEQ ID NO: 845064 - DNA, 120 bp, Artificial Sequence
  ENSG00000273329_26 (sequence is synthesized)
tcccctcttgattagatccagccagtctgttcgctggatgattaaatttggcattcatttttctgtgctttccctatctgctactatcctaaagtcattctaatgaccaaaaaaggtgcc

SEQ ID NO: 845065 - DNA, 120 bp, Artificial Sequence
  ENSG00000273329_27 (sequence is synthesized)
taatgaccaaaaaaggtgccttgagccagactgtagagggttctaatggcctccttagaaattgtgtttttttgttttttttttgagatgaggtttcgctcttgttgcccaggttggagt

SEQ ID NO: 845066 - DNA, 60 bp, Artificial Sequence
  ENSG00000273329_28 (sequence is synthesized)
ccaaggaactggttcttagtaggcaatagacagttgacaattttgagctaagcactaagg

SEQ ID NO: 845067 - DNA, 120 bp, Artificial Sequence
  ENSG00000273329_29 (sequence is synthesized)
aggcaatagacagttgacaattttgagctaagcactaaggtcataggagtgtagattcaccagggagtgagttgggcttctggtctctagagggcgctcaaggcttctccctccccaccc

SEQ ID NO: 845068 - DNA, 120 bp, Artificial Sequence
  ENSG00000273329_30 (sequence is synthesized)
tcttccttcccccaaggtggaggtaggatggtgaagaaatttcatctccccaccaccaaacacacacaaaggaagaaaatcttactaaaattggagaatatggaataacattttcttggg

SEQ ID NO: 845069 - DNA, 120 bp, Artificial Sequence
  ENSG00000273329_31 (sequence is synthesized)
atggagcccttaaaagataacacgttcaacagaaagtgctgcgtctttcccgttcttcaacatactctgagtggtaacaagggctgcccttgcctttctcagaggcagcccagccagctt

SEQ ID NO: 845070 - DNA, 120 bp, Artificial Sequence
  ENSG00000273329_32 (sequence is synthesized)
gttctctttccctctcccacaaggtagccaggccctaaggctatggcccacagaaaaagtcttagcaaggccccgggcttggggcaaagaggctgtggatttgtctttctctctactttt

SEQ ID NO: 845071 - DNA, 120 bp, Artificial Sequence
  ENSG00000273329_33 (sequence is synthesized)
tctggttagtgtgcctctatcccactcggaagaaaagttccaagactcaaatttgggcattgatgtggggaggatagacagagatgaccagaatccagcctatctttcctgacttctgca

SEQ ID NO: 845072 - DNA, 120 bp, Artificial Sequence
  ENSG00000273329_34 (sequence is synthesized)
ttgtggttcatacccagctaataataaagtgttcctttccctggtgtgtcattgcacatgtactccccacactcctgatgagtagagatggctggccaagacaggattcagacattccca

SEQ ID NO: 845073 - DNA, 120 bp, Artificial Sequence
  ENSG00000273329_35 (sequence is synthesized)
catccccaaccaaacatcctctccataccatcttattaatcagtctttgaacaatttcctaaactccctaacaggttggagatggctggaagaaatgaaaagaagaacgccaacaaaggc

SEQ ID NO: 845074 - DNA, 120 bp, Artificial Sequence
  ENSG00000273329_36 (sequence is synthesized)
gataaagaaaaattcaacactgcttgataactgatgagatagtgaaggagtaggagggcaaaagtcagaagtaattccaggtgttcaagaactaaatgctgaagagatgttagtgtcgtt

SEQ ID NO: 845075 - DNA, 120 bp, Artificial Sequence
  ENSG00000273329_37 (sequence is synthesized)
gacggtcttctaatgggaagtgaatttcaatagaaagaggatgtgtttggtttcagacagaccgagtgactggtgacaacaggaaagccacgtgtttggagcagattactcggtacagtc

SEQ ID NO: 845076 - DNA, 120 bp, Artificial Sequence
  ENSG00000273329_38 (sequence is synthesized)
agcagctggaatggaagtgaagaaggcccagcagagcatcagacctgagtgcaaactatggtggtgttggtggaatagagggaagggagagatttgagagacattgggaagaaaggtttt

SEQ ID NO: 845077 - DNA, 120 bp, Artificial Sequence
  ENSG00000273329_39 (sequence is synthesized)
tggagtgcagtggcataatcttggcttacagcaaactccacctcccgggttcaagcaattatcatgcctcagccccctaagtagctggaattacaggcaagtgccaccacattcagctaa

SEQ ID NO: 845078 - DNA, 120 bp, Artificial Sequence
  ENSG00000273329_40 (sequence is synthesized)
attacaggtgtgagtcaccatgcccagccaccagaagtttaatcaaggctcagagactgattccagtttgagttttctaataactgtctaatacttagctaatagctttggacagttgct

SEQ ID NO: 845079 - DNA, 120 bp, Artificial Sequence
  ENSG00000273329_41 (sequence is synthesized)
aatagctttggacagttgctctttttaaaatgagatcattcaatcattgcattcatctttgggtatgactcactagtcaacagagtcccccttctgtagaaactgcctcattcacagaga

SEQ ID NO: 845080 - DNA, 120 bp, Artificial Sequence
  ENSG00000273329_42 (sequence is synthesized)
tgacctccaccagtcatgcctatatttgagaccctgtctctctttatcccccattgctgcgtgattcaagggtggtcacctgacccaggcagtgccaagtttattctctgtcttgggaat

SEQ ID NO: 845081 - DNA, 120 bp, Artificial Sequence
  ENSG00000273329_43 (sequence is synthesized)
ttagaatgtttgtttggctaagagacacagaaactggaagctggagctgatgatggagctgatcacgctaatgatggagctatagagataagatgcatgaacaccaccgaggtccccaag

SEQ ID NO: 845082 - DNA, 120 bp, Artificial Sequence
  ENSG00000273329_44 (sequence is synthesized)
attgccatattcctgcagtgccttctggccacagatagttggtccagaagcaggttcctgactcaacctgggccaattagagcctttcacggagattttgaaatcaaagttgagatctct

SEQ ID NO: 845083 - DNA, 120 bp, Artificial Sequence
  ENSG00000273329_45 (sequence is synthesized)
ctttctctctatgccctttggtgtatgtgtacttgagctacaagttacccaactttggaagctgtagacagaggcaattttccactaaatgaagtgagaaacagaaagtccatcattagt

SEQ ID NO: 845084 - DNA, 120 bp, Artificial Sequence
  ENSG00000273329_46 (sequence is synthesized)
gagagaggagcaaggcagatgcacacagagaagcagatagaggggaagcgggcgggagtggggcgggagttcctggagtccccacagtgctctagtttctgattctcttcctaagaccca

SEQ ID NO: 845085 - DNA, 120 bp, Artificial Sequence
  ENSG00000273329_47 (sequence is synthesized)
caggattcctgcctttgggtttcttaagttcctgaatagctcctgattgcctttgtcttttttacgaaagtcctttgagcatggtttcaggtgagcagacagtcctaacctaaagagctg

SEQ ID NO: 845086 - DNA, 120 bp, Artificial Sequence
  ENSG00000273329_48 (sequence is synthesized)
taacaaatacacgtgggctgtgtgtgagattcggggagaggcaccagggatccagtgtgggtcaggcgtggtgccgccctcaaggaacttagtggggagaaaatgaagtctgtacttcaa

SEQ ID NO: 845087 - DNA, 120 bp, Artificial Sequence
  ENSG00000273329_49 (sequence is synthesized)
taactacagtgcaggctaggaagagaacacccttagagatgtgcaaatcaagctctttgggagtttagaggaggcctaggactgctaaggaaaggctgggactaggaagaggtaagcaag

SEQ ID NO: 845088 - DNA, 120 bp, Artificial Sequence
  ENSG00000273329_50 (sequence is synthesized)
tcactgaggaggcaaaatttaagaagccacccactctcagggtgtgtgaatgcagcgttggcacttgcatgaccctgagaatgagcaaccccttaaatgtatcttaggcaccttgccaga

SEQ ID NO: 845089 - DNA, 120 bp, Artificial Sequence
  ENSG00000273329_51 (sequence is synthesized)
ctcacttttagcttgctggactaattgtggggatcagtaggccttcagaggaaagttagtgtctgagctgaactgaaggatggggtggttttggacttggtggcaatgtcatctacctca

SEQ ID NO: 845090 - DNA, 120 bp, Artificial Sequence
  ENSG00000273329_52 (sequence is synthesized)
aggtaaagtaacaatatggaaaacgctcccgtgaaaattcacaaggtctgttctaggatcatcaggctcttcggtgtgacttaagagttcagagcatgaaggaggagggggcagtaagaa

SEQ ID NO: 845091 - DNA, 120 bp, Artificial Sequence
  ENSG00000273329_53 (sequence is synthesized)
aaatggagagaacgtagcatcagattctgcaggcaaggagaaaattgctaagctgggaaataacataatcagagcggtacttaagatgaatctaacggaatagcatgaaataaaggaaag

SEQ ID NO: 845092 - DNA, 120 bp, Artificial Sequence
  ENSG00000273329_54 (sequence is synthesized)
gctaaggagaggacaaacaggaggctattgtggcaatccaggcgtgaaagtctaaactaatcagcactgggaatagagatgccataggaaaaataatacatcattaatataacttggcaa

SEQ ID NO: 845093 - DNA, 120 bp, Artificial Sequence
  ENSG00000273329_55 (sequence is synthesized)
ttgagtagatgttggagacaagagagaaatcagaaacactgctaaacactatgcagctataacaaagaatgagagagcattcagtaagatcacatccaagatatgtacatgaaaaacaca

SEQ ID NO: 845094 - DNA, 120 bp, Artificial Sequence
  ENSG00000273329_56 (sequence is synthesized)
agggatagaactgtgtatatggcaagctatcacttgcattttttattttttaaatggtatttatttatttcttgttttttcctttttttaagactaaaaaatcaattataaaatcctcaa

SEQ ID NO: 845095 - DNA, 120 bp, Artificial Sequence
  ENSG00000273328_0 (sequence is synthesized)
ggatacagtacgggatcctttctggaatggaggtcttatgagctgctattgaacacggcagagcctgttggtgacctgcacacaggagccctccagtcagtactgattgaattactcaag

SEQ ID NO: 845096 - DNA, 120 bp, Artificial Sequence
  ENSG00000273328_1 (sequence is synthesized)
gctgcctctctgcaaagttgaggcggtggagaactactgaggacttctgagcagagaggttggtggaagaggaagcaccaaaaatccatctcatcacctagagagcattgtactggcaga

SEQ ID NO: 845097 - DNA, 120 bp, Artificial Sequence
  ENSG00000273328_2 (sequence is synthesized)
actgtctaaagtgactattttggaactctgggatcaatttgaatacttgcagcttccaaaggaaagatgggcaatcacatctccataccacaggacacaccccttggatgcatcctcaag

SEQ ID NO: 845098 - DNA, 120 bp, Artificial Sequence
  ENSG00000273328_3 (sequence is synthesized)
aactgggaaaagtttgacccacaagctctaaaaaggaaaaggctaattttttttgtcacacagcctggttctgatatggacttggggaccagcaatcttggccagaaaatggaagtatta

SEQ ID NO: 845099 - DNA, 120 bp, Artificial Sequence
  ENSG00000273328_4 (sequence is synthesized)
attttaatactatccatcaactagattcgttttgctgccagcagggaaaatggacagaaatcccttatgcacaggctttcatggccgtaagagacaaccctgacctttgttgggcttgta

SEQ ID NO: 845100 - DNA, 120 bp, Artificial Sequence
  ENSG00000273328_5 (sequence is synthesized)
aaatggacccagtgatgatagcagccatcaccaggcaacctcctccagtagatttgggagaccctttatcagatttgcacagggctcaagccccagaggaaccaaaggtggaatttagtt

SEQ ID NO: 845101 - DNA, 120 bp, Artificial Sequence
  ENSG00000273328_6 (sequence is synthesized)
caaacattgcctcttttattcccattatatccaagtctcccagtcccatagccttcccctccctacccagggccaccctctggataccacccccttaagttatccccacttcaggaggtt

SEQ ID NO: 845102 - DNA, 120 bp, Artificial Sequence
  ENSG00000273328_7 (sequence is synthesized)
agcagccctattgggtcaactagagtccagactccattcactatgtaagacctgagccagattaaaatggagctatggaagtttatggaaaaccctgactaatgcattgaagggttccat

SEQ ID NO: 845103 - DNA, 120 bp, Artificial Sequence
  ENSG00000273328_8 (sequence is synthesized)
taactaggcttaacatttgaacttacttgggaggacttcacagtcacactaggccaaactctaagggagaacatgactccattatggaggcagcccagcaatttgcaagtgcaatgcaca

SEQ ID NO: 845104 - DNA, 120 bp, Artificial Sequence
  ENSG00000273328_9 (sequence is synthesized)
tgactgaccctggtggctaccttgtgagggccactgcccttccccaggttggcccccaactgggaatacaatacccaggggggtatatgggcagtgaaccacatccccataatggggatg

SEQ ID NO: 845105 - DNA, 120 bp, Artificial Sequence
  ENSG00000273328_10 (sequence is synthesized)
aaggatagcagaggaaagcctgtaaactacaataaattggccttaatagatcaagactctcttgaaaatcccactactttcttagagaggctacattaggcccaagtgaaacatactaac

SEQ ID NO: 845106 - DNA, 120 bp, Artificial Sequence
  ENSG00000273328_11 (sequence is synthesized)
cttgacccagacaccccagaaggatgccttcttttgtatccccatagacccatcttcccaattgctatttgcctttgaatgggaaaatgaaaaaggaaggagccaacagctcacctggac

SEQ ID NO: 845107 - DNA, 120 bp, Artificial Sequence
  ENSG00000273328_12 (sequence is synthesized)
tgtgcttctgcaaggttttagagatagtccccatttggttgggcaagccttggctaaagattttcaagacctgactcttgagggggcagatgtgtcctacagtatgtgaatgacctgcta

SEQ ID NO: 845108 - DNA, 120 bp, Artificial Sequence
  ENSG00000273328_13 (sequence is synthesized)
atctcctcccccacaagacaactgggaatccaacatctagtccagacactacattttcttgcagacagagggtacaaagcatccaaggccaaggcacagcttctcagacaagaggtccaa

SEQ ID NO: 845109 - DNA, 120 bp, Artificial Sequence
  ENSG00000273328_14 (sequence is synthesized)
tacgtggggataatcctgatccctcgagaacataagttctccccagaacggatacaggccatccttaaaatacctatcccagccacccaaaatcagcatcaggcctttctagggatcaca

SEQ ID NO: 845110 - DNA, 120 bp, Artificial Sequence
  ENSG00000273328_15 (sequence is synthesized)
ttgcagactttagactgggttatggtgggattgttaagtccttatattagactctaaaagaagggactgatagggactcacttctctgggaaaaagatcaggagcaagcctttaggcagc

SEQ ID NO: 845111 - DNA, 120 bp, Artificial Sequence
  ENSG00000273328_16 (sequence is synthesized)
taaagactgctctctcataagccccagcccttgggctacccatactaagcaaactgttttagcttttcatcaccaaaagccaaggtgtagccttaggagtcctaactcaaactgttgggt

SEQ ID NO: 845112 - DNA, 120 bp, Artificial Sequence
  ENSG00000273328_17 (sequence is synthesized)
caatcaaatgtcctgtaggttactttttaaagaacctagacccagtagcacacaggtggccacactgcctcaaggtagtggctgcacaagccctcctactggaggaggtcctcaaaatca

SEQ ID NO: 845113 - DNA, 120 bp, Artificial Sequence
  ENSG00000273328_18 (sequence is synthesized)
ccatgatacaatcaatccagctcctgatgtccaacaaataagccccttactggacataaaagtgccacaatggctcactgacaacagattgctaaagtatcaagtgttgttagaaatccc

SEQ ID NO: 845114 - DNA, 120 bp, Artificial Sequence
  ENSG00000273328_19 (sequence is synthesized)
acaggtaacagttgagtggtgctccaccctcatcccagcctccttactgccattaccaggagaggatgactcaacacattcatgttgtgagatacttaaccaaatttatgccagatggga

SEQ ID NO: 845115 - DNA, 120 bp, Artificial Sequence
  ENSG00000273328_20 (sequence is synthesized)
agacttaaaggatcagcccttggacaatctggtcaaaatatggttttcagatgggagcagttttgttcagaatgaaactatatatgcagggtacacagaggctaaagctctatccttggg

SEQ ID NO: 845116 - DNA, 120 bp, Artificial Sequence
  ENSG00000273328_21 (sequence is synthesized)
gacctcaggacaactagcaaaactcatcttttaaccacaggcctaacactaggggaagggaaaagaataaccatttatacagattccaaatatgcctttttggtgcttcatgcccaagcc

SEQ ID NO: 845117 - DNA, 120 bp, Artificial Sequence
  ENSG00000273328_22 (sequence is synthesized)
actatctggaaggaaagggagtacccagcaacttgggatactcctactaagtaggggccccaaatcttagagctactagaggccattcacttgacccaggaggtggcagtagagagggtt

SEQ ID NO: 845118 - DNA, 120 bp, Artificial Sequence
  ENSG00000273328_23 (sequence is synthesized)
ctggaaatggcaggcactcattgggtaatggtcaagctatcataaaactgtccctctgaaatgagaagtggccatgactgggaccaagacagagaggagttctgcaacagatagaaaaca

SEQ ID NO: 845119 - DNA, 90 bp, Artificial Sequence
  ENSG00000273328_24 (sequence is synthesized)
ggaccaagacagagaggagttctgcaacagatagaaaacatctggagccagcaaatcacaattccctgatcagggtttggggtggagtct

SEQ ID NO: 845120 - DNA, 77 bp, Artificial Sequence
  ENSG00000273328_25 (sequence is synthesized)
cgtgagccaccgtgcccagcccctgatctggtcttaagcatggggcaaaagtagggggggaaatggtggtgtttgac

SEQ ID NO: 845121 - DNA, 120 bp, Artificial Sequence
  ENSG00000273328_26 (sequence is synthesized)
gcatggggcaaaagtagggggggaaatggtggtgtttgactggtatatgaccttcctctggaggtgatcaaccagtaagggaaaatcgctccaagtgagcatgcacacaacctcagtaaa

SEQ ID NO: 845122 - DNA, 120 bp, Artificial Sequence
  ENSG00000273328_27 (sequence is synthesized)
cacactgtgcatgtggcttctcccaagtactagcaggccactgcacatgtcacaactgagcaacagcccaccccaatggagggatcaagggaggagaagaaaaaccccggaaccaaaagc

SEQ ID NO: 845123 - DNA, 120 bp, Artificial Sequence
  ENSG00000273328_28 (sequence is synthesized)
cagtttataaaaatcctgagccaaaggctgaggggggcacttgatctctcaagttccctacttggccctcttccaagtgtgatttgcttcttttaataaacctttgcctctgctttaaaa

SEQ ID NO: 845124 - DNA, 120 bp, Artificial Sequence
  ENSG00000273328_29 (sequence is synthesized)
tcaaaccacacaaactccagcctgtgggagagggatccttcatcctggacgcacctgccctctgcccagccactataaaaaccagagccacgtgccccttcttttgcttgagtgtgggcc

SEQ ID NO: 845125 - DNA, 120 bp, Artificial Sequence
  ENSG00000273321_0 (sequence is synthesized)
atgaccccttctaggaagccttggaaagtctgccctgcctattgcccctttttgaggacttcattatgcaacctacaattcttggctcagctgaaggagcaagagcagggcctcctaaat

SEQ ID NO: 845126 - DNA, 120 bp, Artificial Sequence
  ENSG00000273321_1 (sequence is synthesized)
ggcacctttctattaggcttaccaaaggcctggtatatgtgctttgcccaacaggaaatctctatactgagtagcattgaaccatctagatttctctcttgggtaggtttaaccgtgacg

SEQ ID NO: 845127 - DNA, 120 bp, Artificial Sequence
  ENSG00000273321_2 (sequence is synthesized)
gggacagcctaaaggagaatacagaaaagatgaccaggagcggcagaagcaagagcagagagagaatgattgagaccccagagtgcggaaacactagggtagggagcaaaggatggcgcc

SEQ ID NO: 845128 - DNA, 120 bp, Artificial Sequence
  ENSG00000273321_3 (sequence is synthesized)
ccctgctgagaggtccagaatggtgggctgcagttaaatcttcaacaaccttctgcagcagcgtgatgtctctgcttttatgtctctgtattgttgcaataaattcttactctttatctg

SEQ ID NO: 845129 - DNA, 120 bp, Artificial Sequence
  ENSG00000273320_0 (sequence is synthesized)
ggctagggggcgaggagcctcctactgcccatcttcccgtccaccacgcgcagttactcacctttgtctccggcctggattaaggatccagcctttcgcctccatccctcttgtccctcc

SEQ ID NO: 845130 - DNA, 120 bp, Artificial Sequence
  ENSG00000273320_1 (sequence is synthesized)
tgatcctcctgaccctgtctttaagatcccaggagctgcggtgaggagtgaggctgaggggcccctttcatctgatgcagcgactccgctttcctccggcggctctgtctatggctgagc

SEQ ID NO: 845131 - DNA, 120 bp, Artificial Sequence
  ENSG00000273320_2 (sequence is synthesized)
tctttgatcctttgagagatggtttgacttttcccgagcaaagagcctgcgttgaaaagcgggggtggaattcagtcctcacagataatgaggggacaagacctaattgaaccgagtatt

SEQ ID NO: 845132 - DNA, 120 bp, Artificial Sequence
  ENSG00000273320_3 (sequence is synthesized)
aggaaaaggcaacgggccaagcctttgacagggtgcgacactgacttttatcatcgttatagtctttaaatcctgggaaacgagttggcaaccccaaaataaagaagtgtaatgacgtct

SEQ ID NO: 845133 - DNA, 120 bp, Artificial Sequence
  ENSG00000273320_4 (sequence is synthesized)
gatgacttcacccaaatacagaccattccaagaaagacttgcgcagttctcatgcgtggttgcgtttttgcataaaactaagattccctttgtccgcatgtttaatagcttaaaaataaa

SEQ ID NO: 845134 - DNA, 120 bp, Artificial Sequence
  ENSG00000273320_5 (sequence is synthesized)
ttgaggtttttatcggataaaagtagccaggaaaaagtgatacagtgaaaacgattacaggatatttatagacttgtctttcaagttattagaagtctcattctatctgggggcagtgat

SEQ ID NO: 845135 - DNA, 120 bp, Artificial Sequence
  ENSG00000273320_6 (sequence is synthesized)
ggtggtggtggtagtggaacttgtgaattgagattcatagtggaacttgtgaattgagattcatctcgaaactggaggcatggctgagacttctaataaagacaacctcagtcaacacta

SEQ ID NO: 845136 - DNA, 120 bp, Artificial Sequence
  ENSG00000273325_0 (sequence is synthesized)
tcagctcagattcacggggaggagatacaacattcacctttcgatgaaagtggcaagataatatcacaacagtgcatgtggtaagggaaatattgtggtaattgtctttggaaacacaaa

SEQ ID NO: 845137 - DNA, 120 bp, Artificial Sequence
  ENSG00000273325_1 (sequence is synthesized)
cccaggagggttttcttccaggttgactaagttgtctgtgggtaacattttgttatatttgtgtattggttgcaactatcaattggctgcagatacaagactttggcaaaaatcaaaaaa

SEQ ID NO: 845138 - DNA, 120 bp, Artificial Sequence
  ENSG00000273325_2 (sequence is synthesized)
aaaatcaaaaaagcattttgtgagaatcagttgaatatatacattttataaaacagtatcatatattttatgattatttgtaaactttgtgccacaaatcttttagtgttaataaatttt

SEQ ID NO: 845139 - DNA, 120 bp, Artificial Sequence
  ENSG00000231194_0 (sequence is synthesized)
agttgtctcccaggtggatggaaagaggacattttgctttgcaagggtctctcttcaaaaggttcaaatttcgtgcagcttctggaaattctccatcttgatcatcgtaccgtggagctg

SEQ ID NO: 845140 - DNA, 120 bp, Artificial Sequence
  ENSG00000231194_1 (sequence is synthesized)
ttcccctagcagctgtcagctcaacgctgcagggaaatcactccagtccctgcacagtattcaaaggtgtcttttgagcaaaaacagtgctatttctctataataaaaattgatggtgta

SEQ ID NO: 845141 - DNA, 120 bp, Artificial Sequence
  ENSG00000230248_0 (sequence is synthesized)
ggcaagaacaggaaagagccaggcccctgcttgcatgccatctcagcaaaataagcctggtggtaacttttaattttcattttttttaaatagagatggggtctcgctatattgcccagg

SEQ ID NO: 845142 - DNA, 120 bp, Artificial Sequence
  ENSG00000230248_1 (sequence is synthesized)
tcttgaactcctggcctcaagcagtccttcccccttggcctcccagactgctgagatgacagtcacgggccactgtgccaggcccctcatgccatgagactgcgtctctcagacctccaa

SEQ ID NO: 845143 - DNA, 120 bp, Artificial Sequence
  ENSG00000230248_2 (sequence is synthesized)
tcagctgctgtactctgaaattcatgactactgcatttgctcagagactacactttccatgggctgctcccagccaacagccaagcacatcagggatactaaggcaggctcattcctttg

SEQ ID NO: 845144 - DNA, 120 bp, Artificial Sequence
  ENSG00000230248_3 (sequence is synthesized)
atagatgatattggatacaatgtctgaaagagtcaaaggcaagaatggtatgcaacatgtgcaattctagtctcaagtcaggtggttagcttctgaaaaaacataggcacagaatttttg

SEQ ID NO: 845145 - DNA, 120 bp, Artificial Sequence
  ENSG00000230248_4 (sequence is synthesized)
ttgagataggggagcacctgatatcatgcacagtgtgtgatttcagccatgtaaggccatgttacatattagtgtaaacctggatcagggcagaaataaaaaggttctcagccacaggaa

SEQ ID NO: 845146 - DNA, 120 bp, Artificial Sequence
  ENSG00000258744_0 (sequence is synthesized)
gaaaaccaaccaaaccaaacccaaaccaacaaaacccttcacctaaaacccgaagctacccagacctcagaattttggatgtctattaagttggcggtccccagcagttctttatagaag

SEQ ID NO: 845147 - DNA, 120 bp, Artificial Sequence
  ENSG00000258744_1 (sequence is synthesized)
tgtgaaaacagactaatacaatcctgaagcatttcatcaaagaattgtaacaggagatgaaatatggcttcaccagtatgatcctgaagaaaaagcacaatcaaagcaatgtctatcaag

SEQ ID NO: 845148 - DNA, 120 bp, Artificial Sequence
  ENSG00000258744_2 (sequence is synthesized)
cggaggaagtcaaagcaaagcagaccagtcaagagcaaaggttggagtggctctggtgacaactcactctgttctcatggtcacaaatccctgctcactgctgccactgctgctgccacc

SEQ ID NO: 845149 - DNA, 120 bp, Artificial Sequence
  ENSG00000258744_3 (sequence is synthesized)
acagaccaagagctccacttgcacagtgctgctggctaagaagaagttgctgtacctgagcactggaccacatggactcacagagactcccaaccaagtaaaggggtgatatggcttgtg

SEQ ID NO: 845150 - DNA, 120 bp, Artificial Sequence
  ENSG00000258744_4 (sequence is synthesized)
gatgtcaaccatattctcttcttgatcacctcgctgctggaacaatgggccatggtcagagtagagtggtcatggaggttgaatagatgccatgaatgggtccaagaacatggacactct

SEQ ID NO: 845151 - DNA, 120 bp, Artificial Sequence
  ENSG00000258744_5 (sequence is synthesized)
ctttcaccaaaatcaattcgggtcttgccactgttaatcacctaacttgccaacagcagagactatcgctgagtctttgagatggcactgctcttggagagatcaggcagccatccagtg

SEQ ID NO: 845152 - DNA, 120 bp, Artificial Sequence
  ENSG00000258744_6 (sequence is synthesized)
agaggttgacccctctgctttggaggggatggacattcatccttatcaccattgatacttgctctagacatgagttttccttctctgcctgaaattcctctgccactaccaccatatgag

SEQ ID NO: 845153 - DNA, 120 bp, Artificial Sequence
  ENSG00000258744_7 (sequence is synthesized)
ggcttacagatttcccaatccatcaacctgcttctcacacacattagctcagagtaaaggactcattttatggcaaagaatgtaaaatgatgggctcattggtcttattatataccatgc

SEQ ID NO: 845154 - DNA, 120 bp, Artificial Sequence
  ENSG00000258744_8 (sequence is synthesized)
cacccagaagcagtcaacctagtggaatgatgagctggcctgttgaaagctcagctaaggtgccagctcagagatgacaccctgtagggttggaagttggagcactgctttccaggatgt

SEQ ID NO: 845155 - DNA, 120 bp, Artificial Sequence
  ENSG00000258744_9 (sequence is synthesized)
gatacatatgctgaatcaataccaatctatggttcagtgtccccacataactagaatatatgagtccaggaaccaagggatagaagtagaattgatcccttcagttatcactcccaggga

SEQ ID NO: 845156 - DNA, 120 bp, Artificial Sequence
  ENSG00000258744_10 (sequence is synthesized)
cttacttgtggaatttgtatcttactgttcctgcaaacttaaattctgccagtttagaggtctaagtttccaggaagtaaatgctttctccagtggaggtgggaaaggctccagtgaact

SEQ ID NO: 845157 - DNA, 120 bp, Artificial Sequence
  ENSG00000258744_11 (sequence is synthesized)
ccttatggctagaataattggccttgattaccatgagaagctagggttgctgcaatgcaatgggagaagataagagtatgactgcaacccacgggatttgctggaagtatcccccatact

SEQ ID NO: 845158 - DNA, 120 bp, Artificial Sequence
  ENSG00000258744_12 (sequence is synthesized)
tttgtgctcactgatgattgtaaatgggcagttacaacaacccaaacctaacaaatgcaaagcatctaacaactcagtcccctcggggtagaggtctgggtcactccatcagactacagc

SEQ ID NO: 845159 - DNA, 120 bp, Artificial Sequence
  ENSG00000258744_13 (sequence is synthesized)
acagacttactgaactgctagatggttgttgggggacacctagagtgggtggtggaagtgagatgcaaaatatcaattaggactctgggatcagctgtggcagtggagattttcaggaga

SEQ ID NO: 845160 - DNA, 120 bp, Artificial Sequence
  ENSG00000258744_14 (sequence is synthesized)
ttgcaattggccattgacaccaattgccaggaaagactgctcactaacctgagggaacctgtagggcttagcttctctggtagcttcctgaatgggctgagtgacgcgacctggaaatgg

SEQ ID NO: 845161 - DNA, 120 bp, Artificial Sequence
  ENSG00000258744_15 (sequence is synthesized)
aaggatgctttgttcccatgcagaaaaccctgagcaatggaattctgaagatggttatatgtgcttatccactggtggagccatgagtagtgctgcgtcctcaatagttagaatacatgg

SEQ ID NO: 845162 - DNA, 120 bp, Artificial Sequence
  ENSG00000258744_16 (sequence is synthesized)
atggggcttggagccagcataaagacaaaatcagaatagctattaatcccatcctgtagacataacccccataattattttgatgtaattacttccaattttttcctgtgcatatataaa

SEQ ID NO: 845163 - DNA, 120 bp, Artificial Sequence
  ENSG00000258744_17 (sequence is synthesized)
atatatagctacaaaagtgagattctactataggaagattttcatattgctttgtaaaagcattacattatattgaatatattgaattttcttgaatttttccatactaaatgtttttaa

SEQ ID NO: 845164 - DNA, 120 bp, Artificial Sequence
  ENSG00000258744_18 (sequence is synthesized)
cacaaattttcatgaattcagaatattcagtcatacaagtttatcatagaagcttttctccatgtctgggattccagatttttgttattgaaaatgctgagattcaaactatcacaagga

SEQ ID NO: 845165 - DNA, 120 bp, Artificial Sequence
  ENSG00000258744_19 (sequence is synthesized)
agtatgataaaaaaaaaagataaccaagaaaagaatgttgaatttatagacagcaattgtcctttttgtagaaaaatattgagctcctgtatttcaggttaaaatgcatgtcaatttttc

SEQ ID NO: 845166 - DNA, 120 bp, Artificial Sequence
  ENSG00000258744_20 (sequence is synthesized)
accacaggaactgcatggtcacgttttcttctctcactctgaattggctgtttctgatcagaagttcccctagaatcacccagtgtttttctagaaaggaacttgagccctgaactccca

SEQ ID NO: 845167 - DNA, 120 bp, Artificial Sequence
  ENSG00000258744_21 (sequence is synthesized)
agtgctggcttctcagatgtaccctcaactatggtgacttttctggagttgggggcaggaaatggagggaccatgtttttctttcccaattagggcagcttgtgaaaggcccactgaacg

SEQ ID NO: 845168 - DNA, 120 bp, Artificial Sequence
  ENSG00000258744_22 (sequence is synthesized)
ttcagtgcaaagacttttatggctatgttccatagtcagaaatgcatattgcagagtcccagtgcatgcacatatgtatgtgtgagtatgtaagcacaaattaaaggtttcaggaaacaa

SEQ ID NO: 845169 - DNA, 83 bp, Artificial Sequence
  ENSG00000243347_0 (sequence is synthesized)
ccgagccctcagtgggaacttgttccggtgctattccagtttgtggaagcttcgttcttttgctctttgcaagctttatgagc

SEQ ID NO: 845170 - DNA, 89 bp, Artificial Sequence
  ENSG00000243347_1 (sequence is synthesized)
ccagcggcaacatcaaaacgaacaaactctggacaggccacctttaagaaccgtaacactcaggcgaggttttgcagtctcattcttgg

SEQ ID NO: 845171 - DNA, 84 bp, Artificial Sequence
  ENSG00000243347_2 (sequence is synthesized)
gagtgcagagttgatgtgagaagaagctaatatggtatgaaatgcacccatctcggtttttgacctatagtattaaatgcaccc

SEQ ID NO: 845172 - DNA, 120 bp, Artificial Sequence
  ENSG00000243347_3 (sequence is synthesized)
cacccatctcggtttttgacctatagtattaaatgcacccatctcagtttttgacatatggcaccaggattacaaagcttaacaagtcatgatttagattcagaagttacaaagagtgga

SEQ ID NO: 845173 - DNA, 120 bp, Artificial Sequence
  ENSG00000243347_4 (sequence is synthesized)
tatggaggatatgcctctggttacatattttggtgccatgtgagcatgtcctactccggtggatttttttttttcatctctgagcttgacctgagattgaccatctgacctgagctataa

SEQ ID NO: 845174 - DNA, 120 bp, Artificial Sequence
  ENSG00000243347_5 (sequence is synthesized)
ttttgacataaattttgactaaaaggtcattatgtgccagcaaaggacattagataattgaaggaagacatccctatatgacagtgtatttacttgggtactgatgggaaaaagtggagt

SEQ ID NO: 845175 - DNA, 120 bp, Artificial Sequence
  ENSG00000243347_6 (sequence is synthesized)
gttcagttgaagaaacatcaaataatcaacttggaaacatggattctgtaaatggcagcaagtggagtacattacagagttcaaactcctgaggataaaataccaaagaaagagactttg

SEQ ID NO: 845176 - DNA, 120 bp, Artificial Sequence
  ENSG00000243347_7 (sequence is synthesized)
gtaaaagagagtaagcctccaagtctctctaggtacacagagtagacccatatacatcactgagtttggacacggttcttagtttatatttgcctttataaatgtaatagtgggttataa

SEQ ID NO: 845177 - DNA, 120 bp, Artificial Sequence
  ENSG00000243347_8 (sequence is synthesized)
agtacgtaaccttttgagaatggcttccttcactcaacgtgatgcttttgagattcatccaagttgttatgggcatcagttgccagctctttttaatggaaagtaaatctacttgcaaag

SEQ ID NO: 845178 - DNA, 83 bp, Artificial Sequence
  ENSG00000243345_0 (sequence is synthesized)
ccccactagattagctagacacagagtactgattggtgcatttacaaacctctagctagacacagagtgctgattggtggatt

SEQ ID NO: 845179 - DNA, 120 bp, Artificial Sequence
  ENSG00000243345_1 (sequence is synthesized)
cattcacaatcctccaggtagacagaaaagttctccaagtccctacccgtcccagaagcccagccggcttcacctctcactggcactcgcctgtggcgcctagcccgggcactccggcag

SEQ ID NO: 845180 - DNA, 120 bp, Artificial Sequence
  ENSG00000243345_2 (sequence is synthesized)
cccagttggagctcctcccgcaatcaagcccagcagctgctggccagccacgcccagtgtggggccgccaagcccccgcccacccggaactcttgaaggcctgtgagcgccaccagaagc

SEQ ID NO: 845181 - DNA, 120 bp, Artificial Sequence
  ENSG00000243345_3 (sequence is synthesized)
cagagggagtcggctccagcctcggccagccccagagaggggcccccacagtgcagtggcggccagagcggatgccgaggcccaggagaggccgagagtgagcgagggctgctagcacgt

SEQ ID NO: 845182 - DNA, 120 bp, Artificial Sequence
  ENSG00000243345_4 (sequence is synthesized)
tgtcacctctcactaacaccagaagaggtggagatggtccatatttacaacatttgttgcagacaatgagacaaatttagtccatactccacaaattgccagaagtaatgttatttgacc

SEQ ID NO: 845183 - DNA, 120 bp, Artificial Sequence
  ENSG00000243345_5 (sequence is synthesized)
caacaggagggagaaagcggaatttgtgtggagagtaagatgctgatgtttggatgtgcagagaagagtttccatatagcaggaaaagccctttttcctttctctccagcttgtaaggaa

SEQ ID NO: 845184 - DNA, 120 bp, Artificial Sequence
  ENSG00000285374_0 (sequence is synthesized)
caggttgtgttggctccaggttttcggcattgtgcctgcactgaataaaagcaaacagctccagcttctcgggactgctgtctggccactggagccaggcagtcacctagctgctcttac

SEQ ID NO: 845185 - DNA, 120 bp, Artificial Sequence
  ENSG00000285374_1 (sequence is synthesized)
catacctgtgtctgagtactcatttcacccatcggccaaggtctgtgggacagacacagcacagaaggaaccagagtaccagatcttgttttcctggaaaaggtctttttttctcagtca

SEQ ID NO: 845186 - DNA, 120 bp, Artificial Sequence
  ENSG00000285374_2 (sequence is synthesized)
gtcaactgagaaaactgtgacttaccactcttggtgcatgcatgaaagaccctagaatgacttctggtagcctgggactccttgggaaaacagaaaaggtgccacaaatcccattttggg

SEQ ID NO: 845187 - DNA, 120 bp, Artificial Sequence
  ENSG00000285374_3 (sequence is synthesized)
aaaaatctgttttcctcatggaacacctggaattaaagagtcaaggaaattttcttaaaagcctttaagaactaagtaaactatactcctgtaaacaatgtttggagcatgtttgtttct

SEQ ID NO: 845188 - DNA, 120 bp, Artificial Sequence
  ENSG00000285374_4 (sequence is synthesized)
tgcaacaaaacacaattggaaaaactgattgttttaccaaggctttgacttcaaggctttgacttgcagagccaatgaaagccctttgggaaaactggctgcataccttgtctacacagt

SEQ ID NO: 845189 - DNA, 120 bp, Artificial Sequence
  ENSG00000285374_5 (sequence is synthesized)
ctctgtacagtgttcctgacctgtggtgcgtaaagaatgtcactttctaacaggcccggaaaccccatgctcctggaacctcaagaagaaagaagtttatccaactcacaggtatttgag

SEQ ID NO: 845190 - DNA, 120 bp, Artificial Sequence
  ENSG00000285374_6 (sequence is synthesized)
ggtacaaactcatggctgggcttggcttcaaaaagtcctatccaagattccttgtggaacagagttctatcaaaaccaatcaaaatacacagaggtaattattcttgctgtactttttgc

SEQ ID NO: 845191 - DNA, 120 bp, Artificial Sequence
  ENSG00000285374_7 (sequence is synthesized)
agataatcaggccaagtataggactaaagtttattctgcaaccagctcagtcctatcataagttgtttttcataaaaatgagaactggagagagaaattatgttccacacttactgtaca

SEQ ID NO: 845192 - DNA, 120 bp, Artificial Sequence
  ENSG00000285373_0 (sequence is synthesized)
agcaaaatgtcagggaggagagaagcatggcctctcgagacaaacccaggctgctaagaatgtaagctctggtctcactttgcgttccagccaaacacctaagtgctcctttctatgacc

SEQ ID NO: 845193 - DNA, 120 bp, Artificial Sequence
  ENSG00000285373_1 (sequence is synthesized)
cttccaacttttctcctttaaggcagggtgaatccaaatcatggtcttagccctgaaggaggcaccaaagcagtttcgttgccctgtgaaaagcttctagaggagctcatctgaatgctt

SEQ ID NO: 845194 - DNA, 120 bp, Artificial Sequence
  ENSG00000285373_2 (sequence is synthesized)
cagagccctttgctatgactctgaaggacaaaacagctctgcaacagcaaaaatgttccttgaagattatgagcctgtgattttgcagagtgtctcagattggtttgtttgaagtttctg

SEQ ID NO: 845195 - DNA, 120 bp, Artificial Sequence
  ENSG00000285373_3 (sequence is synthesized)
cgtggtccaattttggcaggaatatcaacaaagtgaagctgttttctcctcactgcatcccgtcaggacaattcttcactgattaaaatctggttacaaaacaagggacctagagagatg

SEQ ID NO: 845196 - DNA, 120 bp, Artificial Sequence
  ENSG00000285373_4 (sequence is synthesized)
gaagaaaccagccgcccttgcaattacctaaaaggaattgagtcattttaacaagacattatttctgccatccacggtcacaatcatctctttgaaaaataaatactcttggtttgttgt

SEQ ID NO: 845197 - DNA, 120 bp, Artificial Sequence
  ENSG00000285373_5 (sequence is synthesized)
agcaaatatccagcccaaaatacaccactagtggtctgttcttaaagaccaaaaaaccaggccctttttcttcctcctttcttgctgctacgcctcaactatttcattgcttgtcaatgc

SEQ ID NO: 845198 - DNA, 120 bp, Artificial Sequence
  ENSG00000235996_0 (sequence is synthesized)
tgaagagctctctactcgggccatcccgcctgctctctggatggagaacatacggacaactgtgtgttaagcagtccccttgaatccttcagcaagccaaggagtatacaggtggtcacc

SEQ ID NO: 845199 - DNA, 120 bp, Artificial Sequence
  ENSG00000235996_1 (sequence is synthesized)
ggtgccgggtctaccaccacaactttatccctggccttgggggctgatggagagtaagactccccaccaccgccaccagcagtacctccagctcgcgagtaagcagcgcacaggcgggca

SEQ ID NO: 845200 - DNA, 120 bp, Artificial Sequence
  ENSG00000235996_2 (sequence is synthesized)
caggctcgacagcgaccagagcagcagcgccaccgaggccaggaagcagagctggctcagcagaaggtccctccggcggcggcggcggcggcggcgacgcgcgcggtcctcgtcgccgga

SEQ ID NO: 845201 - DNA, 120 bp, Artificial Sequence
  ENSG00000235997_0 (sequence is synthesized)
gcctgagccagaggaagggaggaaaacaatagcaaaaaccaggacccttcggacttgccgctgaatggggattttcgtcggatgttgagtttacctggaatgccccggtgttattttggg

SEQ ID NO: 845202 - DNA, 120 bp, Artificial Sequence
  ENSG00000235997_1 (sequence is synthesized)
aaggcagacatcccacggaaacaatgaagtggaaaagaaaacagctaaagcaaaatctagagcccagtttttgccaaaccagccccacgtgggctgggcaggctctggaagcccaagtca

SEQ ID NO: 845203 - DNA, 120 bp, Artificial Sequence
  ENSG00000235997_2 (sequence is synthesized)
ggccgatgaagagcggctgaggccgtggggatctggtttaccaggagggcacatggaggatgcaagaaaaggaagagccgtattcaagtccccacttcagtgatgaggcagaaagaccct

SEQ ID NO: 845204 - DNA, 120 bp, Artificial Sequence
  ENSG00000235997_3 (sequence is synthesized)
gcgcctgaccacgtgggaacagcctgcagtgagcggtgacgccgcctggcttgagctaagtgctgggctccaccattcattggctgagtgaccttagatgagaagagaatgagccatgtg

SEQ ID NO: 845205 - DNA, 120 bp, Artificial Sequence
  ENSG00000235997_4 (sequence is synthesized)
tttcctgaaacatccagtggcctcaccggagaatctgcaagagccggtaaacccagaagcttggccgtccattcctggaagcagacattgtgtcttcgtccaccaagcccctggctctca

SEQ ID NO: 845206 - DNA, 120 bp, Artificial Sequence
  ENSG00000235997_5 (sequence is synthesized)
acactcactgtggtggcaagaacatggcaccttgaccctacacagttcttccatttttcagaagcaggtgagcacagattgctgggatggagtgagtaaaagatataaactggactgggc

SEQ ID NO: 845207 - DNA, 120 bp, Artificial Sequence
  ENSG00000235997_6 (sequence is synthesized)
ctttgggaggccgaagcgggcggatcgcttgagctcaggagttcgagattagtctaggcaacatagtgagaagctatcttaaaaaaaatttaaataaaagttataaaccaaggcttgggg

SEQ ID NO: 845208 - DNA, 120 bp, Artificial Sequence
  ENSG00000235997_7 (sequence is synthesized)
aataaaagttataaaccaaggcttggggtttctgggtgctttgccaggacctgttcttgggcagaactgaatatatactcaattctgaggagggaagaggaaggtcatggctaaaaggta

SEQ ID NO: 845209 - DNA, 120 bp, Artificial Sequence
  ENSG00000235997_8 (sequence is synthesized)
ggctctgaaatcagactcccggagctcaaatcccagcactctctgcttgccacttagacttcaggtaggggagggggatataaatgtttgagcctcagtcccctcctctgtaaaatgggg

SEQ ID NO: 845210 - DNA, 120 bp, Artificial Sequence
  ENSG00000235997_9 (sequence is synthesized)
gcagtaaatgtactgcacacagctgcaaggtgtgaatgaggcgatgcacgtaaaacacagtgcctatagtatcacattggggttttttggtgttttttgtttttgtttttgtttttttga

SEQ ID NO: 845211 - DNA, 79 bp, Artificial Sequence
  ENSG00000235997_10 (sequence is synthesized)
ccacttttcccacctctgccttcaaagtagctgggactatagccatgtgctaccacgcccagctaatttttgcattttt

SEQ ID NO: 845212 - DNA, 74 bp, Artificial Sequence
  ENSG00000235997_11 (sequence is synthesized)
accacttttcccacctctgccttcaaagtagctgggactatagccatgtgctaccacgcccagctaatttttgc

SEQ ID NO: 845213 - DNA, 120 bp, Artificial Sequence
  ENSG00000235997_12 (sequence is synthesized)
attgttttaaacacagtgtctggcacagaatagatgctcaataaacaccagctgctacaattagaggggaaatcatcataattgttggattaaaacataataaaagaccccagttgcctt

SEQ ID NO: 845214 - DNA, 120 bp, Artificial Sequence
  ENSG00000235997_13 (sequence is synthesized)
gttcaaggcagtattttcagaagcaaagttttaaaagtttaaaaagaggtcagtattttaagtcatgtcagctccacagccacggaagtgctggaaaggcaccaagcctcctctcggttt

SEQ ID NO: 845215 - DNA, 120 bp, Artificial Sequence
  ENSG00000235997_14 (sequence is synthesized)
gcagtgaaacgctcctcttccgtctgagggctatcgttccagcagagatcaacacaatggactctgggatggacattgttctccaacaggcctggccctggcccagctggggtgagcatt

SEQ ID NO: 845216 - DNA, 120 bp, Artificial Sequence
  ENSG00000235997_15 (sequence is synthesized)
tcctttgcagcattccaagaggcgacagtcccaaaagataattaaaaatcagctagcggtggtgaccaagagaaaggcactgagccctccgagtgtggagatagggcatcccgggttatt

SEQ ID NO: 845217 - DNA, 120 bp, Artificial Sequence
  ENSG00000235997_16 (sequence is synthesized)
aattaagtgtgctcacatttgcatggtgtagaggacaattatcaagctggagctgtcagctttaaatgctgtttgcatttctggatgactttttggcgaagagggtcagggaggctctct

SEQ ID NO: 845218 - DNA, 120 bp, Artificial Sequence
  ENSG00000235997_17 (sequence is synthesized)
aaagtcatttttgggagtctggaggaatagttagcaattcgcacttcacctcgttttaccctgcaactccatggaaattccagaaagtcttggttttaatggtctcttgcataggcccat

SEQ ID NO: 845219 - DNA, 120 bp, Artificial Sequence
  ENSG00000235997_18 (sequence is synthesized)
gacatgggtcatctctctcctacctccttccatgctgaacaaatggaaaggcatgtaacatagtgtggcaaggacttaggagtccagaagctcccagatgtgtgcacctgtggaatccgc

SEQ ID NO: 845220 - DNA, 120 bp, Artificial Sequence
  ENSG00000235997_19 (sequence is synthesized)
caccacaccctccacacaccagcctctgcaaccagacagagagaggagaggtaaggggtgaggatgtgattgatttccatcctcggccctccaaggaggaggctgccaaagaaaacaaag

SEQ ID NO: 845221 - DNA, 120 bp, Artificial Sequence
  ENSG00000235997_20 (sequence is synthesized)
gccactgcaggggggcagctcgtggtgacaacctgcactggggccggagggcagccagcatggcacctggatctgatcaagatgaagttttcatccccatctgcctgttaatgtcttctt

SEQ ID NO: 845222 - DNA, 120 bp, Artificial Sequence
  ENSG00000235997_21 (sequence is synthesized)
taccagttgccaccccctaataaggggtatgccgtagactggaagtcactagggacctgcccagcatcctgttctaggcattgactaatccactctcctacatcctgcctcccatccaca

SEQ ID NO: 845223 - DNA, 120 bp, Artificial Sequence
  ENSG00000235997_22 (sequence is synthesized)
tggtccaatcagaggctgccatgcttgcacaatgtgacactgtctctatggacacattaattggtcctgatgtagaacttgacccaagatcagggtcaagttgagagaagacttattttc

SEQ ID NO: 845224 - DNA, 120 bp, Artificial Sequence
  ENSG00000235997_23 (sequence is synthesized)
tttccaggtgtttcaataacatgtaaaacttggaattcgatagcagccatcttctgccatgagaattgggaagagagaaagcctatagtgataataaagtcaaattatcctaaacgctaa

SEQ ID NO: 845225 - DNA, 120 bp, Artificial Sequence
  ENSG00000235997_24 (sequence is synthesized)
acccagacctttgcctgggacggaaagctgcttcatttcaggagacacctgaagtacctgggttggttcagagactaccagaagtttttggacttcttctagtcctttaatggccaaaag

SEQ ID NO: 845226 - DNA, 120 bp, Artificial Sequence
  ENSG00000235997_25 (sequence is synthesized)
gactcaagggcctggcatgtaatggaaaaggcatcacctctctcatggaacgcagctggaaggaccaaccccttcatagttacaggaatctgagctatgaagacactagccaggcaacaa

SEQ ID NO: 845227 - DNA, 120 bp, Artificial Sequence
  ENSG00000235997_26 (sequence is synthesized)
ggccctgggctcagacacagatgaagtttctctggaagagaaatctggcctgttacagacctgggaagtgccaaggcttagctcctgagaaggattgctggtgctgacagctgggagtca

SEQ ID NO: 845228 - DNA, 120 bp, Artificial Sequence
  ENSG00000235997_27 (sequence is synthesized)
ggactccagggccacttgtatggaagctggtgcccgtggtgcaggaggatgggggctctggattctgcaccaccccccatagactggcccctcagagggctcctgtggtgtcagagccct

SEQ ID NO: 845229 - DNA, 120 bp, Artificial Sequence
  ENSG00000235997_28 (sequence is synthesized)
gaagcagccatgggcttcctgccaggaagctcagcagctccgaggagactggagagtcatgggacacagtgcgtcctccccagaacagcctccagcctgccagttcagagcacacgcttg

SEQ ID NO: 845230 - DNA, 120 bp, Artificial Sequence
  ENSG00000235997_29 (sequence is synthesized)
gaggcaggaaggctgaggtccaaccccattcctgctatgggccagctgagagctgtggacaagtcattcggcttctctgagccgcagtcttctcacctgtaaagcgggggtaataatacc

SEQ ID NO: 845231 - DNA, 120 bp, Artificial Sequence
  ENSG00000235997_30 (sequence is synthesized)
ctcctcacaaggttgttgcaaggctttgtggggaaaaatacaaagtgcacagagttgttcagtaaggcgtgggcctgcggggaaaggcggggccatgagctggccaggggaggaaaggac

SEQ ID NO: 845232 - DNA, 120 bp, Artificial Sequence
  ENSG00000235997_31 (sequence is synthesized)
aggcggggccatgagctggccaggggaggaaaggacagatggggactccagataatgaaagcatctttgcatcctcaatgatataatctgggtttgttgttgttgttgttgtttgagaca

SEQ ID NO: 845233 - DNA, 79 bp, Artificial Sequence
  ENSG00000235997_32 (sequence is synthesized)
tgcccgccaccatgcctggctaatttttctgcctcgagctcctgacctcagctgatccaccctcctcagcctcccaaag

SEQ ID NO: 845234 - DNA, 120 bp, Artificial Sequence
  ENSG00000235997_33 (sequence is synthesized)
catctggagtttttttgtttgtttgttcctcataaaggctacgaggagaggaaggggcctagaacacaggatggtggaagaggggctcatgggtggaggggaggagagcagatgagcagg

SEQ ID NO: 845235 - DNA, 120 bp, Artificial Sequence
  ENSG00000235997_34 (sequence is synthesized)
gaccctcccccttcctcggcaaccatggggtttgccacacatatatttttgatgtcccatgtatcaggtggagatgtcaacttctatgaactgaaataaactgtttccctatgtgtaaaa

SEQ ID NO: 845236 - DNA, 120 bp, Artificial Sequence
  ENSG00000235994_0 (sequence is synthesized)
gttggggagcacgagggggtggctcgaggcgggagcgaggggcaggaagaaatagcaggaagacccaggggcaggaggccggtgttcaagcgtcgaggaacgtttcatcccttctgaatc

SEQ ID NO: 845237 - DNA, 120 bp, Artificial Sequence
  ENSG00000235994_1 (sequence is synthesized)
ccaggcctcgctggaccacggacccgccaggttctcccgcaacttgcggagctcctggaccggcccttcccagaggcgcagcgctgagtcccaggagcaggacctgaaccaggaagggga

SEQ ID NO: 845238 - DNA, 120 bp, Artificial Sequence
  ENSG00000235994_2 (sequence is synthesized)
ggggcgagcacagtcctgcctcctcctccccgcacagtgctgggggaatgacccccactgccttcttctcctcccccaacactgcagggggaatgacccccactgcctcctcctcccaac

SEQ ID NO: 845239 - DNA, 120 bp, Artificial Sequence
  ENSG00000235994_3 (sequence is synthesized)
acactgcagggggaatgacccccactgtcttctcctcccaacacactgcagggggaatgacccccactgtcttctcctcccaacacactgcagggggaatgacccccactgcctcctcct

SEQ ID NO: 845240 - DNA, 120 bp, Artificial Sequence
  ENSG00000235994_4 (sequence is synthesized)
gggggaatgacccccactgtcttctcctccccccacactgcagggggaatgacccccactgtcttctcctccccacacactgcagggggaatgacccccactgcctcctcctcccaacac

SEQ ID NO: 845241 - DNA, 120 bp, Artificial Sequence
  ENSG00000235994_5 (sequence is synthesized)
actgcaggggtaatgacccccactgcctcctccttccccacacactgcagggggaatgacccccactgccttctcctcccccaacactgcagggggaatgacccccactgcctcctgctc

SEQ ID NO: 845242 - DNA, 120 bp, Artificial Sequence
  ENSG00000235994_6 (sequence is synthesized)
cccacacacacactgcagggggagtgacccccatattttaatgcagtggtttctctggtcactcacggtccagcactagcacgcagcagtcggggaaatgctgtgggtatgagacggcct

SEQ ID NO: 845243 - DNA, 120 bp, Artificial Sequence
  ENSG00000235994_7 (sequence is synthesized)
ggattttgaaggcgctgcatgaaaaagaatgtagagaatctgaatgcattttatgtatagattgcatgttgaaatgatgctgttgggatatattaggcaaaataaaatatatcacaattt

SEQ ID NO: 845244 - DNA, 120 bp, Artificial Sequence
  ENSG00000235994_8 (sequence is synthesized)
ctgccctgctctctggtcttttcagtttgcctctttttacggaactgcgtcctacagtggagctgggcacagcaactggatcccagccttcttagcccgctgttcttgggctagagcccc

SEQ ID NO: 845245 - DNA, 120 bp, Artificial Sequence
  ENSG00000235994_9 (sequence is synthesized)
atccgatgagtagggactggctggaggaagggggctgtccgtcatgctcaccaggaatttagcctcttcaactgggtgctggggtgagaaatgctggcatctgtccctcctggccctccg

SEQ ID NO: 845246 - DNA, 120 bp, Artificial Sequence
  ENSG00000235994_10 (sequence is synthesized)
acggtggctccgtgccctcaaaagaaggatgatcccttcctggtcccgcctgacccgggggagctcggcccctgctgtgctgtcagcctcgccccggccgcccgcgctgacccccgcccg

SEQ ID NO: 845247 - DNA, 120 bp, Artificial Sequence
  ENSG00000235994_11 (sequence is synthesized)
ctcctgccctcagcctccagccggagaaggactccccatcccagcagagctcagctcagcgggcacgcgcacgacgcagaaatccttgatttctcaggttaggcgacggctgaattataa

SEQ ID NO: 845248 - DNA, 120 bp, Artificial Sequence
  ENSG00000248599_0 (sequence is synthesized)
agattcaggctgtatttagtgggggagggatctggcctcatatccttcatctttatgctgctccactccagctcacagcccctccaactggatggagctcttcgaagggaggggcatttc

SEQ ID NO: 845249 - DNA, 120 bp, Artificial Sequence
  ENSG00000248599_1 (sequence is synthesized)
agaggagggtctcagggatagcccctttgtggggctgggccaccaggttggggagagtggagctgctggaactctggagggactggctgagccagctttcccagtgcacccctctgggag

SEQ ID NO: 845250 - DNA, 120 bp, Artificial Sequence
  ENSG00000248599_2 (sequence is synthesized)
ggcaggctctcggtgtaggctgcccatctcctcgctctcctctggcactgctcctatgcccccttggttagcctgggagcccatactacccagacttggggtcaataagcagaggacctg

SEQ ID NO: 845251 - DNA, 120 bp, Artificial Sequence
  ENSG00000248599_3 (sequence is synthesized)
taaggagtccttgatgggatgtacagcactgcccaaccctgcacaagataacccatgggctcctgagagcagagattgtgacttactcatctttgatgtagccaagttctaacaaaccta

SEQ ID NO: 845252 - DNA, 120 bp, Artificial Sequence
  ENSG00000248599_4 (sequence is synthesized)
aatgtgcagccatttgtaagagaggatcatggaatgaatacgggcattgagtcaagcagtctgtgttccactggcggtgtgacctggggcaggccatttcacctcactgagccttagttt

SEQ ID NO: 845253 - DNA, 120 bp, Artificial Sequence
  ENSG00000248599_5 (sequence is synthesized)
cctcacctgtaaaatgtgaaaaatatcaccttccttaccaggcttttctgaggatttaatgacatcatgttcagtgcccagtatgggtggataatacccaggagtttcctcctcttctcc

SEQ ID NO: 845254 - DNA, 120 bp, Artificial Sequence
  ENSG00000248599_6 (sequence is synthesized)
ccacacccatggacacccttaggtagtttatccttttgggacaactggatttattagaaaagggtattctggggtggaataaggcccttttcagtccccatggagcctttttggaagatg

SEQ ID NO: 845255 - DNA, 120 bp, Artificial Sequence
  ENSG00000248599_7 (sequence is synthesized)
aagttctcaaacccacaagagaattcataagacgagcacaccacccacagttaggtttccctctcaagtgctttatctccacgtggggcaaatagctctttgtctgcatatgttattgga

SEQ ID NO: 845256 - DNA, 120 bp, Artificial Sequence
  ENSG00000248599_8 (sequence is synthesized)
gcttttggagtccagccttcagaagagctctaatttttggattcatatcagtttattagagaagcctagttctaaggattagcaaatgggtaggtgctcagccagcccagaacaagcaga

SEQ ID NO: 845257 - DNA, 120 bp, Artificial Sequence
  ENSG00000248599_9 (sequence is synthesized)
gccatgacagaagtttctggaatctcacagagtcggtgtcttcatggactcagggggcctaaatccaatagcctggatttgtcactttcccttattcccttatcaaactcttcccttttg

SEQ ID NO: 845258 - DNA, 120 bp, Artificial Sequence
  ENSG00000248599_10 (sequence is synthesized)
gacatcagagaaggaaagtacttcctgtaagggggcaatttgcaaagcttcatggaagtggcatttgagtgtggccttaaaggatgtgtaggattgggaaccatagatatttagaggaag

SEQ ID NO: 845259 - DNA, 120 bp, Artificial Sequence
  ENSG00000248599_11 (sequence is synthesized)
gcattcctggcagaaggaacagcagcaaaacacagaagtggaaattagtagcagcattaatggagaataatttggggaataagatatacaaatggaataataaaaatagcattaattaaa

SEQ ID NO: 845260 - DNA, 120 bp, Artificial Sequence
  ENSG00000248599_12 (sequence is synthesized)
agcagcaacagttacagagataacccatgggctcctgagagcagagattgtgacttactcatctttgatgtagccaagttctaacaaacctaaatgtgcagattgtacttactggattta

SEQ ID NO: 845261 - DNA, 120 bp, Artificial Sequence
  ENSG00000248599_13 (sequence is synthesized)
tgtaatttgtgattcacttgattgactgaatctgattgcaggggatgactcagatccaccttcccatctccagggaagatggtgctggggtcaaaagatgccaagacctcttggggggat

SEQ ID NO: 845262 - DNA, 120 bp, Artificial Sequence
  ENSG00000248599_14 (sequence is synthesized)
agtgcacagttttctgctatccatctcactagagctggggactgtggcatcccaatcacagtgtttgactacctgagagctgtctagattgagctgaaggaattcagaaaagggcagtat

SEQ ID NO: 845263 - DNA, 120 bp, Artificial Sequence
  ENSG00000248599_15 (sequence is synthesized)
gaattcttcagcgtggaggccgactttgtggagaggaggcagggcctatgtcgatgctgctcgctctattttcagggcttggcaccattcatcctcaaaaaggctacgggtcctcactca

SEQ ID NO: 845264 - DNA, 120 bp, Artificial Sequence
  ENSG00000248599_16 (sequence is synthesized)
taaggagtccttgatgggatgtacagcactgcccaaccctgcacaaggtagggtattgctgtttgttgtgtggtgagctgcctgcttatggctgggtttgggcctccatccatttttatt

SEQ ID NO: 845265 - DNA, 120 bp, Artificial Sequence
  ENSG00000248599_17 (sequence is synthesized)
ttctttgagttggtctctgggcaaagcttctcccagcaggcggaatctggcctgggggctccagcttctctcacctgcctggcctcccaagagctagagagctccacatctcaactcatc

SEQ ID NO: 845266 - DNA, 120 bp, Artificial Sequence
  ENSG00000248599_18 (sequence is synthesized)
tataactcattagcagaaccatcagctagcagaaactaggaataataaaaatgtgccgtattttcacaagctggatgccaggcttggtggtcaggacacagactgctttcagctcccaca

SEQ ID NO: 845267 - DNA, 120 bp, Artificial Sequence
  ENSG00000248599_19 (sequence is synthesized)
tgcccctcctgctagctgctttgtgcagagtagtggctacatggctgcaggtgagagccctgcctgtgaacaggccaccaggatgctgggacatacgagttgataacccatgggctcctg

SEQ ID NO: 845268 - DNA, 120 bp, Artificial Sequence
  ENSG00000248599_20 (sequence is synthesized)
tgccattattgtaagtttcctgaggcctcctaaccatgcttcctgtacagactatggaactaggctgttctgcaaagctgccattcatagggagaactggcgatgaagtgtctgtcaaaa

SEQ ID NO: 845269 - DNA, 120 bp, Artificial Sequence
  ENSG00000248599_21 (sequence is synthesized)
actctaagaattctgtgtcctagtaccagtgtgcagagaaaactgagtagatgctggatgagctgtgcctacaattatctgcaaaatgaaagctaaaaagccaaaggcctatttgtagct

SEQ ID NO: 845270 - DNA, 120 bp, Artificial Sequence
  ENSG00000248599_22 (sequence is synthesized)
gaattaccaaacgctgagaggatctgcctggcaggatctgggttggctgtcctcgctgcccagaaacagtgcacagttttctgctatccatctcactagagctggggactgtggcatccc

SEQ ID NO: 845271 - DNA, 120 bp, Artificial Sequence
  ENSG00000248599_23 (sequence is synthesized)
ctctccttgagtgtggtctggaattactgactcactttcaatgcacagaatgtatcagaagtaatgggatattccttctgagaatagattataaaaaaagagtgtggcttccttcctggc

SEQ ID NO: 845272 - DNA, 120 bp, Artificial Sequence
  ENSG00000248597_0 (sequence is synthesized)
acacaatgaagagtaaactactctgtggaactccacgttctgttcttgcactaagtctccaacacctgcgtgtagattttcagtctgagtcagtgcactttgagcacccgatggccgtgt

SEQ ID NO: 845273 - DNA, 120 bp, Artificial Sequence
  ENSG00000248597_1 (sequence is synthesized)
gtggccagcagctgcccatctcccagcataactccagacagaattgaatgccctggagaaaaggggaaacagcacagcaggagccaagcctgcaggctgagtctaccagaaatgaatgtc

SEQ ID NO: 845274 - DNA, 120 bp, Artificial Sequence
  ENSG00000248597_2 (sequence is synthesized)
aaattggagatgcattaacaacccccgcagtacacttcgccctgcctttccctgggctctcttggactctatgtggagaagagacacgtggcttaaaaggtcacccaagacataagtggt

SEQ ID NO: 845275 - DNA, 120 bp, Artificial Sequence
  ENSG00000248597_3 (sequence is synthesized)
aatcctataaaataaaaggtgagacaatggctctgttcacacccgccatgggaatccctttaagatcagtgtccatgagccttacctcgcaactcttccaagatcataaccaaagcctgt

SEQ ID NO: 845276 - DNA, 120 bp, Artificial Sequence
  ENSG00000248597_4 (sequence is synthesized)
tacagcggcggaggataacagtcagacaggaccaagctgaaggtactctttatcaccctgacttcaagtaactgtgaagcacacctctcacctgaacctcgccaacgagacacactgtgg

SEQ ID NO: 845277 - DNA, 120 bp, Artificial Sequence
  ENSG00000248597_5 (sequence is synthesized)
atgagaaggcagtgccgcatgacagggaacgcaggggctttgggtgacgtggggccgggtgacatgggatgaggtgacgtgggctgaggccacctgcctctcagctgctgggtgcctccc

SEQ ID NO: 845278 - DNA, 120 bp, Artificial Sequence
  ENSG00000248597_6 (sequence is synthesized)
tcaccaggtggctgccttgcttgggctcagaccagactcacggttctcaagcccccatacagcttctgtttataggggttcttctatctgcgttttctgctattaaaactgagaaaaaaa

SEQ ID NO: 845279 - DNA, 120 bp, Artificial Sequence
  ENSG00000175604_0 (sequence is synthesized)
gaaggctccaatcacaaaggatgcccggttccacactcaagtctaatgccttactaagctagtacgtttggacctcagaacacccctgagacgccggtgagaatgtcctcatttcacaaa

SEQ ID NO: 845280 - DNA, 120 bp, Artificial Sequence
  ENSG00000175604_1 (sequence is synthesized)
tgaggacaggggaccagagagtctttaaggaaaaaagaaagagaaatctagttaggaagtggtggagctgaggctggaagccaggactctgataccggcccgcgcaccgccccaccccgc

SEQ ID NO: 845281 - DNA, 120 bp, Artificial Sequence
  ENSG00000175604_2 (sequence is synthesized)
atcctggctccagaactccccgctgggacgcgtctctcctgctgcacctagcacagctctatgactcacgggtgttagggcaccgtgcttagggcagtgacaggactgtcagcagcctga

SEQ ID NO: 845282 - DNA, 120 bp, Artificial Sequence
  ENSG00000175604_3 (sequence is synthesized)
gagtatggccgctaagtcaactcaggactccctaccccgagacacaggggagccctcagcactgcctgtacaagggagggcggagggaaggagcagtgaaggacggaaggaacgcactgc

SEQ ID NO: 845283 - DNA, 120 bp, Artificial Sequence
  ENSG00000175604_4 (sequence is synthesized)
tgagtgtgctctgcgtggcaagcaggcttcagagcctgctcttcgcaagaggaactttctgcctggcccaaacagtgacactgtgaggcctgctgcagagactgagctggtgccctgcag

SEQ ID NO: 845284 - DNA, 120 bp, Artificial Sequence
  ENSG00000175604_5 (sequence is synthesized)
cctcagacacccacggcaggacctgtgtggagagcacccatccttcccagtcatgcagcctagcctagagacacaagcaaagccagaacgagacagggcagtgctcataccccccaaagg

SEQ ID NO: 845285 - DNA, 120 bp, Artificial Sequence
  ENSG00000175604_6 (sequence is synthesized)
accatggccccctgcacagggtctagccatgaggacccactgcccaacaggtcctccttcaaaagcgtattgcagaggcggcagcagctccaccagcaggaatcaggttgccagcttagc

SEQ ID NO: 845286 - DNA, 120 bp, Artificial Sequence
  ENSG00000175604_7 (sequence is synthesized)
ctatcgaacacaaaacactgctgcttcccagccacgtcaaccaggaggaagagggaaagaggatacagctggatatggaagctgcagccccagaagtttggctgtgtgactctgagcact

SEQ ID NO: 845287 - DNA, 120 bp, Artificial Sequence
  ENSG00000175604_8 (sequence is synthesized)
ctgtaccttctgggttgctgtaaagcccaggataacttcagagaggcatctcgcataatgacggctgctttaccatctaatgagtactaatcattaccttaaatgtttaagaggcaggtc

SEQ ID NO: 845288 - DNA, 86 bp, Artificial Sequence
  ENSG00000175604_9 (sequence is synthesized)
tgagtactaatcattaccttaaatgtttaagaggcaggtcttgctctgttgcccaggctggggtacagtgtcatgatcactgctca

SEQ ID NO: 845289 - DNA, 85 bp, Artificial Sequence
  ENSG00000175604_10 (sequence is synthesized)
cctgcctcattctcccaagaagctgagtccacagacatgtgccaccatgaccagctaatttttatttactttattaatctgttta

SEQ ID NO: 845290 - DNA, 86 bp, Artificial Sequence
  ENSG00000175604_11 (sequence is synthesized)
cagtgctgagattacagacatgagccaccatgcccggccccgtaatcattacttaccaccaagaatgcctctcattccacactcat

SEQ ID NO: 845291 - DNA, 120 bp, Artificial Sequence
  ENSG00000175604_12 (sequence is synthesized)
cattacttaccaccaagaatgcctctcattccacactcatgaaccacatttgtctatcagttttaagtgttatgatggttaccctgcttgttattaaagcctgccaataacagagctgaa

SEQ ID NO: 845292 - DNA, 120 bp, Artificial Sequence
  ENSG00000175604_13 (sequence is synthesized)
atatcgcagccaaaggcagagacacgtgctattccagaaagacccaactgctctgcatctgtgtcagcctccattactctggttcacaatgtttctctctcacccgcatcttctatttgt

SEQ ID NO: 845293 - DNA, 120 bp, Artificial Sequence
  ENSG00000175604_14 (sequence is synthesized)
acctcctggtcccccagattgggacccatgggactatttaatccaaaattttattgaaacattgttgccgcaaattaagttttttaaaaatgacaatagttaaattaaactggtaaaaag

SEQ ID NO: 845294 - DNA, 120 bp, Artificial Sequence
  ENSG00000273812_0 (sequence is synthesized)
acagacaactactgaggacctgcaaagtaaggagactgcagggcggaggcggaacttggaggagtgacctgccgtggagtttctggtttcctccttgtggctttgtctggagggcaagcc

SEQ ID NO: 845295 - DNA, 120 bp, Artificial Sequence
  ENSG00000273812_1 (sequence is synthesized)
ccactctcagatccacatggcaacacaagcagctaaaacgcagatagaaaccccaacctgggaaaaggagtcctacagtctcacagtgccacccagcagtgccaacccagcaaaggtctt

SEQ ID NO: 845296 - DNA, 120 bp, Artificial Sequence
  ENSG00000273812_2 (sequence is synthesized)
gagaaccacactgagagaggtggggtttgggatgaacctggctgctaaagtggaaacagcaacgttccccgagggctaggacagcacccagagtccacacggtgtgctcagacgtaaaac

SEQ ID NO: 845297 - DNA, 120 bp, Artificial Sequence
  ENSG00000273812_3 (sequence is synthesized)
aaaattactcaatagacacaaaactaggaaggtgtgatcatcctcaagagaacagacaatgctcagatgccagccccaactgacacagatgcctacagcagccgcggtaactgctttgcg

SEQ ID NO: 845298 - DNA, 120 bp, Artificial Sequence
  ENSG00000273812_4 (sequence is synthesized)
agttgcacgcatacacagcacacgcacacacacctcagaaaggagcattagatgaaatgaataataaacctcacagagaggtaggaaaaaaaataaacaaatgagtatttttgaactaaa

SEQ ID NO: 845299 - DNA, 120 bp, Artificial Sequence
  ENSG00000273812_5 (sequence is synthesized)
agaatagagtatctgcaattaaaattgtactgatggactcaatagcagaatggagacaaaggaaagccagcgaacgtgaagacagataaatagaaaatatccactccgaagaacgaagat

SEQ ID NO: 845300 - DNA, 120 bp, Artificial Sequence
  ENSG00000273812_6 (sequence is synthesized)
aaaggcccagcacatacctggttccagaaagcaaggaggaggttggggcagaaagttatttgaaggaatattggctgaaacatcccaagtctggtgaaatacataaatgtaagcattcaa

SEQ ID NO: 845301 - DNA, 120 bp, Artificial Sequence
  ENSG00000273812_7 (sequence is synthesized)
gaagctcagtgaaccccaaagaagataaacagaaaggaaaatagacccagacatagcatcatcaaattgctgaaaactgaagaaaacatctggaaagcagctagagaaaaacaacacatt

SEQ ID NO: 845302 - DNA, 120 bp, Artificial Sequence
  ENSG00000273812_8 (sequence is synthesized)
tcgtacacaaaagcagtgactccagtgactacagaattcttgccagaaaccacggcagccaggagacagcagaacgatgtctttaatgcatgaaaggaaaggtttctccttgcaaggtgt

SEQ ID NO: 845303 - DNA, 120 bp, Artificial Sequence
  ENSG00000273812_9 (sequence is synthesized)
ttgttcatttcttccaagttgtggaatatatgggcagaagattggacaccatccccctcgactcttttttcccatctgtagggtctgcggtgatgtcctttttagcctccatgtttgtaa

SEQ ID NO: 845304 - DNA, 120 bp, Artificial Sequence
  ENSG00000273812_10 (sequence is synthesized)
tgagggtctctttgttttggggtcagtctggccagcagcttatcaattgtattgatcttttcaaagaatcagcttgggtttcatttattttctctattttctgtttttgttttttgttca

SEQ ID NO: 845305 - DNA, 120 bp, Artificial Sequence
  ENSG00000273812_11 (sequence is synthesized)
gctgatttccaccctgatctttattaccttctactttccgcatgcgttttgtaatttatttttcccttactagtttctccaggtgaaagctcctatcatagttggcaagggttttctgta

SEQ ID NO: 845306 - DNA, 120 bp, Artificial Sequence
  ENSG00000273812_12 (sequence is synthesized)
aagggctagagagtaaatatgtttggttttgtgagccacgtggtgtctgttgcaaccactcaactgctgttgtagcgtgaaagcagcaacagaaaacacataaaataccaagttgttctc

SEQ ID NO: 845307 - DNA, 120 bp, Artificial Sequence
  ENSG00000273812_13 (sequence is synthesized)
acctcccgggctaatggcgcttgctgcctggcacacagcaggtgactacactgcatggcttataaatgtggcctctgccaggaaatcctgggaaagagccagggaggtgacgttttatcc

SEQ ID NO: 845308 - DNA, 120 bp, Artificial Sequence
  ENSG00000273812_14 (sequence is synthesized)
gtgggctgtagcttgctggctcttggcttagagtgatttgtgatctcttccttttttatcgtttcagcaattactgctgtaaaatctatcctaaacaccagtcaatctgcatcccacaaa

SEQ ID NO: 845309 - DNA, 120 bp, Artificial Sequence
  ENSG00000273812_15 (sequence is synthesized)
ggaaaaggagtcctacagcaacttttcagaagcttcagaagaaggacgccggagaatgcccgcccgggactccgaggtgccctgtgctcatggattggtcctcctggctccatgagtgtg

SEQ ID NO: 845310 - DNA, 120 bp, Artificial Sequence
  ENSG00000273812_16 (sequence is synthesized)
caaaagctgcagtgctgagcaggtggctaatggccctggctgggtgattttggacaagtcacctttgcctctctggcctccattgtccctctgtcaaacaggccccacgacagcaagcgt

SEQ ID NO: 845311 - DNA, 120 bp, Artificial Sequence
  ENSG00000273812_17 (sequence is synthesized)
tggttattgtgtctatggtcaacatcccacctgcctttctgggcagagacgtttgggagcagtggctgtatccctgagcacgtcgtaagggcactttcctgcatgccctggctggaggga

SEQ ID NO: 845312 - DNA, 120 bp, Artificial Sequence
  ENSG00000273812_18 (sequence is synthesized)
cctgttgctgggaaaactccccagagtgtgaaccggcggcggctccaccatctgggtgccgtgggcatggtgcatggcgggaaggaggccggcaccacagaagggtggcagctgtccccg

SEQ ID NO: 845313 - DNA, 120 bp, Artificial Sequence
  ENSG00000273816_0 (sequence is synthesized)
ccttcaaaacagctgggtgcagaaattatagcttcctagtgatgatcggccccactttgcgtggcaacacaatatgttcctaatgactgaattgtttatttaataaagaaatcacaacca

SEQ ID NO: 845314 - DNA, 120 bp, Artificial Sequence
  ENSG00000237738_0 (sequence is synthesized)
ccactgctctccaggctggcgacagggcaagactccgtctcaacaacaacaaaaaaagaagtgttgagtaaccagtgagctgacaagcccaccacgtggaggactcgggctgtgagaagc

SEQ ID NO: 845315 - DNA, 120 bp, Artificial Sequence
  ENSG00000237738_1 (sequence is synthesized)
ctgttacctgcattgctctgaacaaaaccgacccagagcagtttcagtgatggtgataatctcaagcaatgccattaccaaatcttaatgccctgatcctggccacctttgaggaggtaa

SEQ ID NO: 845316 - DNA, 120 bp, Artificial Sequence
  ENSG00000237734_0 (sequence is synthesized)
gacgggcccaggattcagcttggagggggctctcagtgtttgtggttctttcatcataagttggtcactgtatttcctaaaggaatgacctcccttcttcaagaggtaatcacacatgcc

SEQ ID NO: 845317 - DNA, 120 bp, Artificial Sequence
  ENSG00000237734_1 (sequence is synthesized)
ctgctgaactggacagaaagcggtagccaaatatcctgtcgtcaagcctccttcaagataactctgtaaggaaaaaggaggacagacatttaatgacttgtgcaaggccaaacaccaaat

SEQ ID NO: 845318 - DNA, 120 bp, Artificial Sequence
  ENSG00000237734_2 (sequence is synthesized)
atacggaggtgcagagattctccataactcaatcgttccaagtcatgtggcaggcctaagatgagacactacgattatgagttttacagaagtggcaaagagaaaaaaaaaaaaagatca

SEQ ID NO: 845319 - DNA, 120 bp, Artificial Sequence
  ENSG00000237734_3 (sequence is synthesized)
tcaagattgctatattaacagccccttttaatataaggcttttcatctattgaaccacagcatagagttaatacatagaaaacaactctcaaataaatgcaaatcaataggctctccact

SEQ ID NO: 845320 - DNA, 120 bp, Artificial Sequence
  ENSG00000237734_4 (sequence is synthesized)
gattattatataaagcaacacattacaggggaataaaccaataatgcctctatattttgaagtgttcactaattctgagtaattacctcctccaatggctctaatgagtgcaaatctgtg

SEQ ID NO: 845321 - DNA, 120 bp, Artificial Sequence
  ENSG00000237737_0 (sequence is synthesized)
tggcaacctcaaaaggaaggacacagagatgatgcttcagtggctgcagcaggaaaagttatttcaagcttcctttacattttcaagtccttactcccacccaagccaacaccagcattc

SEQ ID NO: 845322 - DNA, 120 bp, Artificial Sequence
  ENSG00000237737_1 (sequence is synthesized)
ccacctctcagcagataaccttgctgaaaaagaaaactggccctattagggcccaccccttcccctctcctctgaggacttgatttagcaatcgtcttttctcttgtgtcttcattgcac

SEQ ID NO: 845323 - DNA, 120 bp, Artificial Sequence
  ENSG00000237737_2 (sequence is synthesized)
cctgtctactggatcttacatggcatcagaaaacccataaacaagacttccattctaggaaaaacaagtccctgctacctcttccacaagctgccaccattctgtattcttcctttctct

SEQ ID NO: 845324 - DNA, 120 bp, Artificial Sequence
  ENSG00000237737_3 (sequence is synthesized)
gctgaactactcaaactcttcgcctctcggtaccttaagtatacctgagtagccagtggtcaacatgggtttgctgctctcctcactgcaataaatgacggaaacctgtagctcagtatg

SEQ ID NO: 845325 - DNA, 120 bp, Artificial Sequence
  ENSG00000237737_4 (sequence is synthesized)
gattcaggggcgcctcagacgctcgcaggaacggaggggagacccttgcagttctggaggaactctaaggcgcagtcactctgatcccaggagaacaatgctaggctgaagagctgagtc

SEQ ID NO: 845326 - DNA, 120 bp, Artificial Sequence
  ENSG00000237737_5 (sequence is synthesized)
cagccctgactgaaaactgcgcaccgaccgcagccgggattacatcaatcaggcacaaagctggacacctgggacaggataagcgcacgcgcactgtgcctgggaagccgattaggacca

SEQ ID NO: 845327 - DNA, 120 bp, Artificial Sequence
  ENSG00000237737_6 (sequence is synthesized)
taagaaatcggcgtgtcgtggcgagcgccctctttcggcggaggggagaaagcgcagaagggctggaggacttatttgcaagtgttaaactgctaattaaaacaatagcgataaaccata

SEQ ID NO: 845328 - DNA, 120 bp, Artificial Sequence
  ENSG00000237737_7 (sequence is synthesized)
tctcctccattagcctgggggagaaaattaaatgttgctgctactcagtgttacctgtcatatggggatacaggcattctcatgcgcttatgatgggaatgtaaaatacaaatttacata

SEQ ID NO: 845329 - DNA, 120 bp, Artificial Sequence
  ENSG00000237737_8 (sequence is synthesized)
cacgcacaatcatggctcattgcggccttgacttctcaggctcaggccatcctcccacctctcagcctccgtagtagctgggtctgcaggcgcgcaccaccatgcccttttaattttcgt

SEQ ID NO: 845330 - DNA, 120 bp, Artificial Sequence
  ENSG00000237737_9 (sequence is synthesized)
tttttgttttttgtttttttgtaaagacggggtttcacaatgttgcccaggctggtctcgaacccctgggctcaagcgatccaatcgcttcggcctcccaaagggctggaattacagaca

SEQ ID NO: 845331 - DNA, 120 bp, Artificial Sequence
  ENSG00000237737_10 (sequence is synthesized)
tgagccaccgcacccgcctgggttcaaattctaactgcaatttactagccgtgtgaaatctagagttacttatttaccctctctgtgcctctgttttcttatttgttaaagtgagaatgt

SEQ ID NO: 845332 - DNA, 120 bp, Artificial Sequence
  ENSG00000237737_11 (sequence is synthesized)
aaatgatggtacctatctcattatgttgttagaaggattaagttaatccatgtaaagagctggaaatataactattgtaatgttatatttatttcagttaatctcagatttaaaacaaac

SEQ ID NO: 845333 - DNA, 120 bp, Artificial Sequence
  ENSG00000237737_12 (sequence is synthesized)
tgaaaaattcataaagttgctgtaaggggcagtaagcagtagaagggatgcattgagtatcccctttattactccccccttttccctatttcaccttctaaatatttataattattattt

SEQ ID NO: 845334 - DNA, 120 bp, Artificial Sequence
  ENSG00000237737_13 (sequence is synthesized)
tgaatagataatacgtttacatggctcaaaaatcagaacactattttagaatatacacagagaaacctcccttcaaccctggttcccatcgactccatcccccttgcctgctacagataa

SEQ ID NO: 845335 - DNA, 120 bp, Artificial Sequence
  ENSG00000237737_14 (sequence is synthesized)
tgcttattagtgtcttcttgtttatcttttcagtgttttgtgcaaatataaactcatatgaatatatagtcttactcctcccatttcttatgccaaatgtagcatgccagatacaattgg

SEQ ID NO: 845336 - DNA, 120 bp, Artificial Sequence
  ENSG00000237737_15 (sequence is synthesized)
cataagttctgttcacttaatctattctgaaaatctttctaaatcaataaattagagatcttcctcatttttcagctgcttagtactctattgcatggatacacataatttattaaccag

SEQ ID NO: 845337 - DNA, 120 bp, Artificial Sequence
  ENSG00000237737_16 (sequence is synthesized)
tttcttctagttacatactttatttccagtcttttagtattacaatcttgcaatgaatcactttgaacataatgacattccaatgtgagcaggcatatctctaggatacatcttggtcaa

SEQ ID NO: 845338 - DNA, 120 bp, Artificial Sequence
  ENSG00000237737_17 (sequence is synthesized)
tttcacaacttcagcaaaagccaaagcagccaacaaagccacagccctatcggctgtactgggctctgccttttgggcagctcgccggccactccccaaaagcagagcattccatccttt

SEQ ID NO: 845339 - DNA, 120 bp, Artificial Sequence
  ENSG00000237737_18 (sequence is synthesized)
ccgacaagcgcccacccctgccagtccccgccccgcacaccgggctcggtccccagcccaccgccggcaacctcacgaacacgtagggggccggcggagcagacggttggcagagtcgcg

SEQ ID NO: 845340 - DNA, 120 bp, Artificial Sequence
  ENSG00000237737_19 (sequence is synthesized)
cctccgtacctgcactgtgaggggctccgcgcccagctccgaccccaccgacgaccgacgcccaagaccctgcggggccggccccgccctccccgccctcgtgggctgcccgactcgccg

SEQ ID NO: 845341 - DNA, 120 bp, Artificial Sequence
  ENSG00000237737_20 (sequence is synthesized)
tctgtctaaagacaagggatgcgcaagatgacctcaaggatcatcttgccagctaaggcggaccccaggagtaggatcacacacacaagtcatatccagactcccatgctgtgagtcctt

SEQ ID NO: 845342 - DNA, 120 bp, Artificial Sequence
  ENSG00000237737_21 (sequence is synthesized)
tcttcacttcccatctacttctcgatccattgctatctggctccatccctaccactccactgaagctgctcacactttaaaagagccctggtgaccccaatgtcctacacaacctcaagg

SEQ ID NO: 845343 - DNA, 120 bp, Artificial Sequence
  ENSG00000237737_22 (sequence is synthesized)
tgcatttcccaagctcatcctaacttgatctccctgtagcaactgagattgtcaatccttttcctggaattttctcctttcctagcttcctgggcaacattctctcctacccttgcacgt

SEQ ID NO: 845344 - DNA, 120 bp, Artificial Sequence
  ENSG00000237737_23 (sequence is synthesized)
gacctcaaccattcccacaacttcaactaccactcatacttactgcccctagacagaaactcttctgaacttcagactcatatctcactgtctgctaactgccacagagccctcaagttc

SEQ ID NO: 845345 - DNA, 120 bp, Artificial Sequence
  ENSG00000237737_24 (sequence is synthesized)
aatatgacccaaaacacacttggtatctcccccaccaaaaacaaacaaacaaaaaaaagttcttcttctatattctctctttgctattggcaccaccatccactcaaaatagaaaactga

SEQ ID NO: 845346 - DNA, 120 bp, Artificial Sequence
  ENSG00000237737_25 (sequence is synthesized)
gtcatccgcaacaactccctctcttgttctcaacaaccaatttagtcattatgtctggttaattctgtttctccagtctctctcagattcatcctgtcctctctatccccactgacctaa

SEQ ID NO: 845347 - DNA, 120 bp, Artificial Sequence
  ENSG00000237737_26 (sequence is synthesized)
tccttagctcagccctaaaccatgtctatgatattacaagagtctcccgatgtccctgaaccaggttctcccccttcaatttccacatttagcttcccaaaatacaatcatgtcatcttc

SEQ ID NO: 845348 - DNA, 120 bp, Artificial Sequence
  ENSG00000237737_27 (sequence is synthesized)
ctgcctaaaagtctccagtggcttctctgcccacaaaatgaaatctttttagcactgcactacaggccattaacaacctggccttgaccaagcacagtggctacacctgtaatcctagca

SEQ ID NO: 845349 - DNA, 73 bp, Artificial Sequence
  ENSG00000237737_28 (sequence is synthesized)
gccttgaccaagcacagtggctacacctgtaatcctagcactctgagagcacaacatggtgaaagcctgtctc

SEQ ID NO: 845350 - DNA, 120 bp, Artificial Sequence
  ENSG00000237737_29 (sequence is synthesized)
atgcctatagtaccagttactcaggaggctaagtagtcccacctgtagtagctatagtcccaactactcaggaggttgcagtgagccaaaatctcaccaccacactccagcctggttgac

SEQ ID NO: 845351 - DNA, 120 bp, Artificial Sequence
  ENSG00000237737_30 (sequence is synthesized)
catatacatatttttaattgtcgtaaagcatacataacatgaaatttaccattttaaccatgtttaagttcagtggcactcagaacattcacattgttgtgcaatcatcaccactatcca

SEQ ID NO: 845352 - DNA, 120 bp, Artificial Sequence
  ENSG00000237737_31 (sequence is synthesized)
tctccagaactttttcacctttctgtaccaaaaacaaacatgtaagcaaacaaaaccctctgtgatgatctgacaaaaaaactaaagtgtatgatagaatgtgtgtaggttatatataaa

SEQ ID NO: 845353 - DNA, 120 bp, Artificial Sequence
  ENSG00000188242_0 (sequence is synthesized)
ggatttgcgtgaaaccagcccaaggttccgggcccccccaaccgagccccgcgcccggggactgactcggggaccgactcagggacctcccgagcgccaggactcagggcccgacctgca

SEQ ID NO: 845354 - DNA, 120 bp, Artificial Sequence
  ENSG00000188242_1 (sequence is synthesized)
gcggctgcaggcccagcgcccgcaagcggcctgggccgagcgccgtttccaggccctcgccaggtctttgaactgcagaaagatttttcaacactgcttttataaatctttgttccggcc

SEQ ID NO: 845355 - DNA, 120 bp, Artificial Sequence
  ENSG00000188242_2 (sequence is synthesized)
aaccagaggggagaccgtggagagctcaagaccccgtttttccacgtttaaccagcgagatgatgggacggaggtgacgcggctgcagccatggaggtggccccttggggaagtggcagg

SEQ ID NO: 845356 - DNA, 120 bp, Artificial Sequence
  ENSG00000188242_3 (sequence is synthesized)
tgccctgagacaggggccgcaaaggctggcctggggcctggagccagcatggtggaggggggacgtgcgtgggtccccttccctggacctggtactggggactccctgtaatcacgtcct

SEQ ID NO: 845357 - DNA, 120 bp, Artificial Sequence
  ENSG00000188242_4 (sequence is synthesized)
cggaaggtgtctggtccaagctgcacttgggccctcccgagtccaccatgagcacagaggaaacttcctaaactcgccccactgaggccactccacagcccaaatcttccccaccacaca

SEQ ID NO: 845358 - DNA, 120 bp, Artificial Sequence
  ENSG00000188242_5 (sequence is synthesized)
cagcgcccgcaagcggcctgggccgagcgccgtttccaggccctcgccaggtctttgaactgcaggttccgtcctgcccgcgcccggtctcagggtggcggccccggacacggcccgtcc

SEQ ID NO: 845359 - DNA, 120 bp, Artificial Sequence
  ENSG00000188242_6 (sequence is synthesized)
ccacagacgaggtctccggcctgagctgtcgcacctggcgcggaggtcgcccggggtgccctggctgggtgagaggtggcctggcgggcggagcttgccaagaatcacggccagtcctta

SEQ ID NO: 845360 - DNA, 120 bp, Artificial Sequence
  ENSG00000188242_7 (sequence is synthesized)
cgcccccctaccaggctcaggccctccaaggagaacctgctgagacccctgagcctgtcctagaccccggacccctgacccttcccaccccttccagcgtcccagggcgaggccttggac

SEQ ID NO: 845361 - DNA, 120 bp, Artificial Sequence
  ENSG00000188242_8 (sequence is synthesized)
agagctcctggtcctctgcagggagaccatccagcccaagctctgggaggcacagtccattgagtgggcggaggccgcgggtgctgagccggggagggtgctcggagtccatccatccct

SEQ ID NO: 845362 - DNA, 120 bp, Artificial Sequence
  ENSG00000188242_9 (sequence is synthesized)
ggcgctcgttccagcggcctcgcgcgcgccgccgccccgcgctgctgaagctggcgtcgctgccgccctcgtgccacgcaccgccgcacgcgctggagcaggaggagacgccgctgtgac

SEQ ID NO: 845363 - DNA, 120 bp, Artificial Sequence
  ENSG00000188242_10 (sequence is synthesized)
attgcacattgagtccccattgagtccctggtgggaaaagtccacaatttcccattgatagctttttactgttgtgaaaaagggaagcgtcagccacacaaaagcctgcatgaccgctgc

SEQ ID NO: 845364 - DNA, 120 bp, Artificial Sequence
  ENSG00000188242_11 (sequence is synthesized)
ttcggagaagctctcgaccctaactgcagtcactgttacttggatcagatcaagcgcagtgactttttgggattcagtggttattctccacacttcgtagccatttcaaccaactctgag

SEQ ID NO: 845365 - DNA, 120 bp, Artificial Sequence
  ENSG00000188242_12 (sequence is synthesized)
cacaaaatgcagccatcctctatgcagcaagccctgcccagtcagtgaccctactggacagatccaaggccagccctggttccctgctgcagccaccgtcctgacgttcatcggagcagg

SEQ ID NO: 845366 - DNA, 120 bp, Artificial Sequence
  ENSG00000188242_13 (sequence is synthesized)
ttccgggtggccagaggagcaaagctgccttccaagtgcctgtctgtgcctgggagaacagagcaggagcgtcgtgcggtccaccgcgcaatgcatggcgattccaggcgctgaacaact

SEQ ID NO: 845367 - DNA, 120 bp, Artificial Sequence
  ENSG00000188242_14 (sequence is synthesized)
cccctggacccttgggcctgcatctgactcccagctgcagagtcagaagctgagtccaggcaactgcttggccactcccgatcgctcctccctggacacccggttaccaaagtcagcaaa

SEQ ID NO: 845368 - DNA, 120 bp, Artificial Sequence
  ENSG00000188242_15 (sequence is synthesized)
gaagatgcggtaatcgccgcctgatctccacatggtgaacacaacactcccaccaacacctccttgactggtcggtcttcagcaccgggggtgggcaggcaggtgttctgtgttgacgag

SEQ ID NO: 845369 - DNA, 120 bp, Artificial Sequence
  ENSG00000188242_16 (sequence is synthesized)
aattgcacaggctaaacacaaacacggaaccagagtgagaacacctcactcacggcagcccaggctgctccctaccaggtgacggagcgcgccggggctgtgggtgccaggggctgagtg

SEQ ID NO: 845370 - DNA, 120 bp, Artificial Sequence
  ENSG00000188242_17 (sequence is synthesized)
ctagggactcgtcatgagtggggatccccacgttcctgtcactgctgtcaaacagaaggtaaacagtcttatgaatgtatttccttaggaaaacttgtaaaaacttttattaggatatct

SEQ ID NO: 845371 - DNA, 120 bp, Artificial Sequence
  ENSG00000188242_18 (sequence is synthesized)
atttaatactgaactttggcctactttgtgatagactataaacaaattgaggaaatcactatttctcacttctgtattttctcaaaaataattttgttacagagttcaatatactgtgta

SEQ ID NO: 845372 - DNA, 120 bp, Artificial Sequence
  ENSG00000188242_19 (sequence is synthesized)
ccattgatcttctattgtgaaagcaaagaatttcatcaaaatattttaaattatgagtgaaaattgtgtatgttaattttgcagctataatattaatcaaatttcgtgtaattctaatca

SEQ ID NO: 845373 - DNA, 120 bp, Artificial Sequence
  ENSG00000188242_20 (sequence is synthesized)
caaaatgacgtgccttaagtgcccctccagctgtgggttggcagtgtccagacagggagggcccatcaccgaaatcctgaacgattactagaccaattctattaaaaacatttcaaggca

SEQ ID NO: 845374 - DNA, 120 bp, Artificial Sequence
  ENSG00000233293_0 (sequence is synthesized)
cggcccacactcagacctttgtcaccatctcaaggacctttttttccctcttcctcctttcacgatggagccagaccctgcacgcagacacggactgaggacttcatgtattccagattc

SEQ ID NO: 845375 - DNA, 120 bp, Artificial Sequence
  ENSG00000233293_1 (sequence is synthesized)
cagagaggggaagtaacttacccaagactgcacagcagtaagcggcagaacctggacccagcccctggctccagacccccactgctctgctgacctgcaggggcctcgaatcaacataaa

SEQ ID NO: 845376 - DNA, 120 bp, Artificial Sequence
  ENSG00000233293_2 (sequence is synthesized)
gcctttcacccctagcctgctcctgtctcaacctcaacctccagagaacatccatcctccatggagcctcccagcctgagccctctgagctgcctcccttcttctctcccctcagcccag

SEQ ID NO: 845377 - DNA, 120 bp, Artificial Sequence
  ENSG00000233290_0 (sequence is synthesized)
agaggatgcggctataaaacgccatcttggaagcgagactgggctctcagcagacaccaaaccttcatctgggacttcccagcctccagaactttccagaaacctatggagaaagcacat

SEQ ID NO: 845378 - DNA, 120 bp, Artificial Sequence
  ENSG00000233290_1 (sequence is synthesized)
ggagataattagttctacttccagagagggtaaacatatcacaaatgtacagataaagatgaaacatccaattgcagatatgaatgacctaattcaatggatgagtctggaagaggacca

SEQ ID NO: 845379 - DNA, 120 bp, Artificial Sequence
  ENSG00000233290_2 (sequence is synthesized)
agttcatgggaaagatcaaaaattcagttttgaagatgttgatgagaagatgagacaaaaccatgtatagatgcggatgagctaattaaatatatgagtctggagctgaaaggaaatgcc

SEQ ID NO: 845380 - DNA, 120 bp, Artificial Sequence
  ENSG00000233290_3 (sequence is synthesized)
agtatacagatgtacttgaatccatctatgtaaatgcaatcaccctgggaggaaatttagagtgagaacaggactgcgtggaaagacattaaagaagttaaagaaagaagaactaacaaa

SEQ ID NO: 845381 - DNA, 120 bp, Artificial Sequence
  ENSG00000233290_4 (sequence is synthesized)
ggcaggagagaagaagaggacggagaggaagtttccaagattgaagaaggagggagagagggctatggaagtcacaggttggaggtggtgcccagagcctggaataaacatttaccctag

SEQ ID NO: 845382 - DNA, 120 bp, Artificial Sequence
  ENSG00000233290_5 (sequence is synthesized)
tgttcatcagagagtgaatgaggcctgggaatccaagacttgccaaagattattctgcctggaacaggtcaaaatacagcaaaggatatgaagggacactacaagatgggaaaatgggtg

SEQ ID NO: 845383 - DNA, 120 bp, Artificial Sequence
  ENSG00000233290_6 (sequence is synthesized)
cctcattgttaactgatgtggacagatgatgggtaaccacataatcttctctacgtcatttttgatactaccaaaaattctgggttcttggcatcatagcaaaactcagatgtagagaga

SEQ ID NO: 845384 - DNA, 120 bp, Artificial Sequence
  ENSG00000233290_7 (sequence is synthesized)
ctccagaggatgcggctataaaacgccatcttggaagcgagactgggctctcagcagacaccaaaccttcatctgggacttcccagcctccagaactaggacaaagatcctgcaaaatcc

SEQ ID NO: 845385 - DNA, 120 bp, Artificial Sequence
  ENSG00000233290_8 (sequence is synthesized)
tattggtaagagaaagcatgttttaacatggccagacctggatactgctccaacaaatttttattgagtgtcaactctctactaggcactgtgttggaactagggatattatgttccaga

SEQ ID NO: 845386 - DNA, 120 bp, Artificial Sequence
  ENSG00000233290_9 (sequence is synthesized)
tgcgtgctgtgatgagaaattccgaagcacacattagaagcaatgacggttatcagcctagcagaggccgatgggcttcctcggatcctgccatggcaccaaaggaatgcgagaaaatga

SEQ ID NO: 845387 - DNA, 120 bp, Artificial Sequence
  ENSG00000233290_10 (sequence is synthesized)
ttggctggggagctcttccacattgtcaggaacgctggaaaaaggctgaaagagaatgatgagaaaaaacctggagaatggcaaatgcttcactgaagcaatctgctacattcctccttg

SEQ ID NO: 845388 - DNA, 120 bp, Artificial Sequence
  ENSG00000233290_11 (sequence is synthesized)
cagagtgggatgcctggcctgagatgagagaagtaataggactgagaggaagtgaaagaaatagaacccaaggagagcaggacagaaagaaaagatttatagcatggattgtagccactc

SEQ ID NO: 845389 - DNA, 120 bp, Artificial Sequence
  ENSG00000233290_12 (sequence is synthesized)
taatatttgggctcctcctgaacttaatccaacttccacgttactgaaaatttattatttcccttatggatttgtagaaaacagatagcaaatgaataaggaaaatggaaagagacccaa

SEQ ID NO: 845390 - DNA, 120 bp, Artificial Sequence
  ENSG00000233290_13 (sequence is synthesized)
aaaagagacaaaaaatggagaggactgtgagtccaattcctgtttctcctgcttttgtcagaccaagtaaaacacttaaaatcgtcagtggatattggctgaaccttgccattttgaaag

SEQ ID NO: 845391 - DNA, 120 bp, Artificial Sequence
  ENSG00000233290_14 (sequence is synthesized)
tggctattcaaaccttttagagacggagctggtcattgcctcagttattggccaaggtatgacatgaactaatagcacttcagggacaatggcctttcaatgaccatcaggcatcagtgc

SEQ ID NO: 845392 - DNA, 120 bp, Artificial Sequence
  ENSG00000233290_15 (sequence is synthesized)
ttctaaattggccaattttgagtgtcaggaggccagaagacataccatcacataagaaaaacactttaatccagtcattataaagtaggagcaaaacagagtggctgtggtgtttatagc

SEQ ID NO: 845393 - DNA, 120 bp, Artificial Sequence
  ENSG00000233290_16 (sequence is synthesized)
tatagctgtaatctcagtctaggtccattcagtcaagaagattgtttccagtctactagaaaacacttccaataagcctgaattacaaccccaatatcattttagttttttagattaaca

SEQ ID NO: 845394 - DNA, 120 bp, Artificial Sequence
  ENSG00000233290_17 (sequence is synthesized)
tgtgaaataaagagtttttcttagtcacagttacttttactgccaaaaacccaatgaatatctttccctctggaaccaaatacactgtttaattttaatctcttagctgactgacacagg

SEQ ID NO: 845395 - DNA, 120 bp, Artificial Sequence
  ENSG00000233290_18 (sequence is synthesized)
aacaaaactggttttgcattttcccttttcatttacttttctgcaattgatcactggccttaaaaagttgagaagatatatttcagttgccattttctgtactggttttcattcattagt

SEQ ID NO: 845396 - DNA, 120 bp, Artificial Sequence
  ENSG00000233290_19 (sequence is synthesized)
gatgtattatgcatgcaaatgtaattgcagaggaggagttaagcagaatgacagcttaaagaggcatattttttttgactctgtcactcccagaaaacagcataaagagatctgggacaa

SEQ ID NO: 845397 - DNA, 120 bp, Artificial Sequence
  ENSG00000233290_20 (sequence is synthesized)
ctagatgtcgtgatgaaaacattagaacgccaggatatcaaattaaacaatagaactgtcccactgaacccccatcatctctcacatgcaatgagagccagtaacatagaagaaagctat

SEQ ID NO: 845398 - DNA, 120 bp, Artificial Sequence
  ENSG00000233290_21 (sequence is synthesized)
atgaagttgagacaattatttgtcctaaaatctgcctttaattttaacactgtgaaaaataaaatgaaaattgtgacttcagcacaacacttttgggtgagaaatgtataattctccttt

SEQ ID NO: 845399 - DNA, 120 bp, Artificial Sequence
  ENSG00000233290_22 (sequence is synthesized)
gtcacactatataattagttgtttacagaccactaggtttgtgaaaattcatattagcaaaaatagtaacctgcaagctaactgaataaattctaatggcactaatgacagtcttcaaaa

SEQ ID NO: 845400 - DNA, 120 bp, Artificial Sequence
  ENSG00000233290_23 (sequence is synthesized)
ttaagggattttactttgatcctatacccaaagaagaaaagtacaatgttatgggaagtaacttacccttgtcttacaaatcaagtattgtccaacccaacatatccattaaaagatgac

SEQ ID NO: 845401 - DNA, 120 bp, Artificial Sequence
  ENSG00000233290_24 (sequence is synthesized)
aaagaaaatttgtttcttaaaatatggtgctagaaaaataatctggaaataatttgtttcaactgctaccaggaaatctaaaatatggtctcaaatggaattactttgcatataatagat

SEQ ID NO: 845402 - DNA, 120 bp, Artificial Sequence
  ENSG00000233290_25 (sequence is synthesized)
ttcagacaataaatgttaaccccagaaataaattcatttgactcagtgtttacacagtaaaaagtgaagtaggaccttctctaaatagcacttgagctagagctggtaaaccttgtaaac

SEQ ID NO: 845403 - DNA, 120 bp, Artificial Sequence
  ENSG00000233290_26 (sequence is synthesized)
cagtcctttctccttttcagacacaccattatatgtgctcattatttctggagacccagaaaagtttggaagacactcacagaaagggatttatatgtgtggaggaatctcctatacctc

SEQ ID NO: 845404 - DNA, 120 bp, Artificial Sequence
  ENSG00000233290_27 (sequence is synthesized)
tctaacccaaagagactgaaattaggaaacaggcctaattgagaacaaatattagctacataggcttggcccactatcctgaaagtttatttctattcagtcataatttagatacttagg

SEQ ID NO: 845405 - DNA, 120 bp, Artificial Sequence
  ENSG00000233290_28 (sequence is synthesized)
gaaattccaagaggaaaaaaaaaaaaaacatgctctctcaacatatagcagaagatggcaatgagaacagcagcttaggatggatgggaaagcagaaacccaggcccagaactgcggctt

SEQ ID NO: 845406 - DNA, 120 bp, Artificial Sequence
  ENSG00000233290_29 (sequence is synthesized)
ctcagaattctgagaagctgagattaagcctggagactttgttccttcctctgtttctttcattctttaaaaatgtgttactaatttatattttcagaccagaaggcaaccttattttct

SEQ ID NO: 845407 - DNA, 120 bp, Artificial Sequence
  ENSG00000233290_30 (sequence is synthesized)
ttaccagtcttgaatccagactggcacagcactgttatatttgggaaaatacaaatggctgtggaattcttggggaagatgtagacaagccttgacgttgtacaattccttttcactatg

SEQ ID NO: 845408 - DNA, 120 bp, Artificial Sequence
  ENSG00000233290_31 (sequence is synthesized)
cacatccctgcttagcctgggcagagcctctgtacatgaggacgaacatgaatacaagatgaacaccaactgatgtactgacctacagacatctcaacattacagccgctgttatgtctg

SEQ ID NO: 845409 - DNA, 120 bp, Artificial Sequence
  ENSG00000233290_32 (sequence is synthesized)
tgaaagagttcacgtgggcttccacttctttactacatgaactcccaaatacccactttcaactatttattcttatcctcatttatagaataaagctgacccaaaacaccaccactaagg

SEQ ID NO: 845410 - DNA, 120 bp, Artificial Sequence
  ENSG00000233290_33 (sequence is synthesized)
gagaatgactttgcaactagtggcaagattaaataatgttggaactttgtagcccaagttagcactgaagaaaagatagttcagacaataaacgtatcagtgccatgtgacccttgtcag

SEQ ID NO: 845411 - DNA, 120 bp, Artificial Sequence
  ENSG00000233290_34 (sequence is synthesized)
catattaaggaagtaatgcaataataataaattgcactggattgggatggactatggtcacaaatggaaattgtgccttcagcccaatactgtcgggggaaaaatgtataaatctccttt

SEQ ID NO: 845412 - DNA, 120 bp, Artificial Sequence
  ENSG00000233290_35 (sequence is synthesized)
atcacactgtataattagttatttcagaccaaataagtagaaaaataagtagtctcttgaatgattcgacatctgaagtgtcagacatcgctttgtatgacaataaaactctgccagcta

SEQ ID NO: 845413 - DNA, 120 bp, Artificial Sequence
  ENSG00000233290_36 (sequence is synthesized)
aggtgtcaagggaaggacccggtgggaggtaattgaatcatggaggcgggtatttcctgtgttgttctcgtgatagcaaataagtttcagaagatctgagggttttataaaggggagttc

SEQ ID NO: 845414 - DNA, 120 bp, Artificial Sequence
  ENSG00000233290_37 (sequence is synthesized)
ccctgcacacactaccttgcctgccactacgtaagacgtgactttgcttcttttttgccttcagccatgattgtgaagctccccagccacgtgaaactctccagatgggaccatctagtt

SEQ ID NO: 845415 - DNA, 120 bp, Artificial Sequence
  ENSG00000233290_38 (sequence is synthesized)
aggacggagaggtaggagagaaaccagtaatgtgcgatggcatagaaattaagaaatattttaaaaaatcaacctcagaaatgaataacagcccaaaagaggtctgggagagaaggaagc

SEQ ID NO: 845416 - DNA, 120 bp, Artificial Sequence
  ENSG00000233290_39 (sequence is synthesized)
tgtattgttggtacagaagccaacataggagaaaagacttttagccctccctctcctcctgggagacacagttgaaggaagagcagcctgtgattcagagggaaggacactgagtcagat

SEQ ID NO: 845417 - DNA, 120 bp, Artificial Sequence
  ENSG00000233290_40 (sequence is synthesized)
cctgcaggaccaacagcattaagtgctacaaagagagaccctgctgagggggcccctcctctcctccccaagatcctgccaggaagggactgccttttgtcacaatttggctgactggtc

SEQ ID NO: 845418 - DNA, 120 bp, Artificial Sequence
  ENSG00000233290_41 (sequence is synthesized)
aattgagggtgaatcctcaaaccagcaggctttaaggagcaccttagggttcagagcagacctttttctttttctgccagtgtgtagcagatctccttctgcagccttggctatgatctc

SEQ ID NO: 845419 - DNA, 120 bp, Artificial Sequence
  ENSG00000233290_42 (sequence is synthesized)
cgctcctctctctctctgccttggctatctgcctgctctcctgctgtcctcatctgtaggagctgcacagctcagcaagaaactgttcttagtgtgcccatcaaagcactggaagaaaaa

SEQ ID NO: 845420 - DNA, 120 bp, Artificial Sequence
  ENSG00000233290_43 (sequence is synthesized)
ctcctgtcacagtgccaaatgcactcgtttaaggaattctgattttacaaaaggaactcccccaacccccaaactaaaagttaaagatgaagaagcatcatgtcttaaaatagacagttt

SEQ ID NO: 845421 - DNA, 120 bp, Artificial Sequence
  ENSG00000233290_44 (sequence is synthesized)
tgtgttttctcactgcagtcaaaaacagaactctggcaaaacagcatggaatgggaagtggacgtggctttctgcataaaacacataccctgcaacatagcaaattactctgcctgatcc

SEQ ID NO: 845422 - DNA, 120 bp, Artificial Sequence
  ENSG00000233290_45 (sequence is synthesized)
ttcacccattatccttggaccaagcttatgctttctgtaaagtgagtcttcatcttgagaatccttattcactagacagatttgatttgctttgcttcactttcaaatacatcaggacag

SEQ ID NO: 845423 - DNA, 120 bp, Artificial Sequence
  ENSG00000233290_46 (sequence is synthesized)
gtctgaatttgtaataggtatcttgtctcttttacttaggaccattactctttacattccttttgaaagtctttttgctactctcaatagatcagagatagaaaaattttcttagagaaa

SEQ ID NO: 845424 - DNA, 120 bp, Artificial Sequence
  ENSG00000233290_47 (sequence is synthesized)
tctaagaaaataagttcgcttcaaaaatctctaaaatgccttccaatatgaagatgaccagatgaccagaactgtccaaatttttggacaatgttattgtttcctccaccacctgctctt

SEQ ID NO: 845425 - DNA, 120 bp, Artificial Sequence
  ENSG00000233290_48 (sequence is synthesized)
tcctttctcctgtaaagaagagagcctttaaagaagtaaaaatattataccaatgcccctcattgagggtccataatcatatcaatttgtaaagcacctgcatttattaacctctaattg

SEQ ID NO: 845426 - DNA, 120 bp, Artificial Sequence
  ENSG00000233290_49 (sequence is synthesized)
aagatggtgtcctctgtatttttcactgtgcccaatgcaaaaactcatgtgactaattatgttcataattaaaaatatttttctcttttgttgaactgatgagattctttgaattagaaa

SEQ ID NO: 845427 - DNA, 120 bp, Artificial Sequence
  ENSG00000233290_50 (sequence is synthesized)
ctaaaacccatctaattctttgtgcttatatttgtttgacttccaagaagtttgtttataatcttcatgtttaattatagtgttatatttgttttcagttttctgatgtaattgttttaa

SEQ ID NO: 845428 - DNA, 120 bp, Artificial Sequence
  ENSG00000233290_51 (sequence is synthesized)
agaagacaacaaaagtccatgaagaacagggcacttctcagcaaccctcaaggaagcaattgaactaaagcttgaaaaccatggggtcactgagagaaggagcctgaagagagaaaagga

SEQ ID NO: 845429 - DNA, 120 bp, Artificial Sequence
  ENSG00000233290_52 (sequence is synthesized)
cttgttcatactttgttcctaacaattccttcccttagagtggtttttcccagggttcttattatagagattgcttgtgccctcaaaacttcatatgttgaaatcctaactcccaatgtg

SEQ ID NO: 845430 - DNA, 120 bp, Artificial Sequence
  ENSG00000233290_53 (sequence is synthesized)
ttgatattatgaagtagggcatttgagaggtaatcaggtcacgagggtggcaccctaaagggaaattagtacccttataagaacagatatgagagagattatttttctcccagccatgtg

SEQ ID NO: 845431 - DNA, 120 bp, Artificial Sequence
  ENSG00000233290_54 (sequence is synthesized)
agaatacaacaagaagattaccatctgcaatccaaaaagagtgtccttatcagacaccagatctgccaggggctttgatcttggacttcgcagcctctagaaccgtgagaaataaatgtt

SEQ ID NO: 845432 - DNA, 120 bp, Artificial Sequence
  ENSG00000233290_55 (sequence is synthesized)
tgttgttttaagcactcagtctctggtattctgttataacagtccaaagtagctaggacagtacttttctgttcctcaagtaaacagtcccacattgacccacccaacagtctttccaat

SEQ ID NO: 845433 - DNA, 120 bp, Artificial Sequence
  ENSG00000233290_56 (sequence is synthesized)
ttgcagagaaagtattaaaatcaaagcagtaagtaatttgaagccacttatgacatatgctaaaatacttgaaataactatttttaaaattttaatgctcttgattatagtaatgacata

SEQ ID NO: 845434 - DNA, 120 bp, Artificial Sequence
  ENSG00000233290_57 (sequence is synthesized)
tgccacttatgaaaaatatgagcttcaaaagaaaagtaaatttcaagtcaaatcctaaaattaataaagtcaacattagagggaggggctttattatatgtaaaatgtgagcatggaaac

SEQ ID NO: 845435 - DNA, 120 bp, Artificial Sequence
  ENSG00000259954_0 (sequence is synthesized)
atcacttctgctcacaactgcccagtcccagccagtcacatggccccatctggctacagagggtcaggatgtacaatcctgccatgtgcccagcatatggtgaacagcataatgacttcc

SEQ ID NO: 845436 - DNA, 120 bp, Artificial Sequence
  ENSG00000259954_1 (sequence is synthesized)
atactcatgtatctaaacggtccaggagaaacgtggtttcaggcatggctggatccgggatctcaagagctattaccatctctcagctctgctttcttgtgtgtttcttgctgcccctcc

SEQ ID NO: 845437 - DNA, 120 bp, Artificial Sequence
  ENSG00000259954_2 (sequence is synthesized)
cagtaccctccttacagcttagtaatcccagcagaaagagagcatggaccagctagggtacgttccagcagagcaaggtgaaaaagagctgaaagtggcatcagaagcccagagttctgg

SEQ ID NO: 845438 - DNA, 120 bp, Artificial Sequence
  ENSG00000259954_3 (sequence is synthesized)
ttccagctccgaccactcattcagtgtgtgacctcaggcaggtcaccagcctgagctgtgccttcatttcatctgtcagacggatgactctgcccctcagagcttgcagacggcaaggtg

SEQ ID NO: 845439 - DNA, 120 bp, Artificial Sequence
  ENSG00000259954_4 (sequence is synthesized)
ataaggaacaatatggacttcttgcagctcctggaggcagacgctggagggctgggctccgcctcagtcacaggcaatgccctgatcccacaaagccccggagatgctgtggaccaactt

SEQ ID NO: 845440 - DNA, 120 bp, Artificial Sequence
  ENSG00000259954_5 (sequence is synthesized)
gcaacacaagaccctaggagggaggacggctgttgtcatctgttgaccacaaacacgtttactgtgcacacttgtgcacatgggtgagctccgtgagtccagacatgcacagggcaggtg

SEQ ID NO: 845441 - DNA, 120 bp, Artificial Sequence
  ENSG00000259954_6 (sequence is synthesized)
aatgcatggagtaccatgggcattatcccaggcccacaggcacgtgcaatcacacacacacgtggacatgccactgcgcacctaagacacacacacacacacacatgcatatgcacacac

SEQ ID NO: 845442 - DNA, 120 bp, Artificial Sequence
  ENSG00000259954_7 (sequence is synthesized)
acacatatgcacacacacacacagacactgtaaacatcaggctcaaaggcccatccaggagaccaaaggctgcaggtgtcttcacatcacagcccaggtgaccttgtctctggctcaggg

SEQ ID NO: 845443 - DNA, 120 bp, Artificial Sequence
  ENSG00000259954_8 (sequence is synthesized)
cccagtggcctggccagctctggacatccagtcagcctcattagctggcctggggtccagggctcgaaagtggcggaggaatgaccacccactggcggaggtagctccgggggggtcctt

SEQ ID NO: 845444 - DNA, 120 bp, Artificial Sequence
  ENSG00000259954_9 (sequence is synthesized)
cgtccccggggctggtgaagtcacactccacagggctgctgcagtcagagcccacaaagccactgtcaaacgtgtccatatccaggccggccaggggtgagcccgcctcactctctgaga

SEQ ID NO: 845445 - DNA, 120 bp, Artificial Sequence
  ENSG00000259954_10 (sequence is synthesized)
ggccctcctagcccagggctgccagctgagacacagccacaggacaggactgtggtccctgcatccaagagtgggtcctctaggcctgggctgggctccaggccagcatccaggtccagg

SEQ ID NO: 845446 - DNA, 120 bp, Artificial Sequence
  ENSG00000259954_11 (sequence is synthesized)
gctgggtagccgtcatcctcacagctgcagggccaggtgcatggcccctctgcatctagcacagtcactgtgtcaatggacaccaggccgtatggccgatccctctcctcactgtaagct

SEQ ID NO: 845447 - DNA, 120 bp, Artificial Sequence
  ENSG00000259954_12 (sequence is synthesized)
gagccccccgagttctgggctgtcggccagaagctgggcttgggcacaccgtcagactccaccagctctgctggttcttgtagctccgtgagctgcagcctcttggccgggctccgtggt

SEQ ID NO: 845448 - DNA, 120 bp, Artificial Sequence
  ENSG00000259954_13 (sequence is synthesized)
gggtggcagctgtacacctccagggtggagggcacctctgggctccagggtcccagctccaggctggagccagtgaagggtgcacccacccatttctgtgagagagaaaaagagagagtc

SEQ ID NO: 845449 - DNA, 120 bp, Artificial Sequence
  ENSG00000259954_14 (sequence is synthesized)
agagagaaaaagagagagtcatagcacaggatgagggtaaggtgagggtttatttttcttttacttttattcttttgagacagtctggctctgctgcccaggctggaatgcagtggtgcc

SEQ ID NO: 845450 - DNA, 64 bp, Artificial Sequence
  ENSG00000259954_15 (sequence is synthesized)
aaggtgagggtttaaacagacagaaagacagacacagacacagagacaagacaaagagacatca

SEQ ID NO: 845451 - DNA, 120 bp, Artificial Sequence
  ENSG00000259954_16 (sequence is synthesized)
aagacagacacagacacagagacaagacaaagagacatcaagagagacagacagagacatgaagatagacaaagacaccgagagacagagagagagagaggaatcaggaccacaatgtgc

SEQ ID NO: 845452 - DNA, 120 bp, Artificial Sequence
  ENSG00000259954_17 (sequence is synthesized)
tcccaccctagtggatccccctcctactctgggcctcagtttccctacttgtagaagggagttgctacccttagtagtgtgaccagtcagacaactggtggccccatagtccaggcaggg

SEQ ID NO: 845453 - DNA, 120 bp, Artificial Sequence
  ENSG00000259954_18 (sequence is synthesized)
accaagattcctgagtcaaggagacatgggggcaggagggcctgaggtctgaggtacccctgagccatctcctgctttcccgcctccttgatgcttcttgaaacctagcactctcctggt

SEQ ID NO: 845454 - DNA, 120 bp, Artificial Sequence
  ENSG00000259954_19 (sequence is synthesized)
ttatgtgtccccaccagacagacacttggcccccggacataagtcttgtctcttctgtccatggctgtagccccagtgcctagcacaaagtaggtgctcaataaatgtttattaacgaaa

SEQ ID NO: 845455 - DNA, 120 bp, Artificial Sequence
  ENSG00000259952_0 (sequence is synthesized)
aagcgctgctggcacaccgggcactggtagggcttctcgtccgagtgcgacagcttgtgtcggttcaggtggtagacgtcgcggaaggccttgccacacatctcgcaggcatggttcttc

SEQ ID NO: 845456 - DNA, 120 bp, Artificial Sequence
  ENSG00000259952_1 (sequence is synthesized)
gcatggttcttccggatgcgcttccccgaggcggtcgtggtcaccacgccaccggcggccactgcggcagcgccgccgccggcacccgcctctccccctcccccgccggctccgctcagc

SEQ ID NO: 845457 - DNA, 120 bp, Artificial Sequence
  ENSG00000259952_2 (sequence is synthesized)
ccgtgtggatggcttcgtgcctccggagattgtagccgttcttgaactccttggcgcacagagcgcagatgtagggccccttgctctttgtcttcttctccaaggcagacgcgaccgggg

SEQ ID NO: 845458 - DNA, 120 bp, Artificial Sequence
  ENSG00000259952_3 (sequence is synthesized)
gcagacgcgaccggggccacggcgaccgtcgaggttggggctacgacggcggtggccgccgccgcggcgatagtggcggcggaggcgggggggaggaaaagagggcgccttgcgggccgc

SEQ ID NO: 845459 - DNA, 120 bp, Artificial Sequence
  ENSG00000259953_0 (sequence is synthesized)
cacatctagatccatactttttgggctcaactcagggttaccaaaatagagtcaaactcaactcaggattacctaaatggagtcaaattttgtgtgtggttttgtaacatgattctttca

SEQ ID NO: 845460 - DNA, 120 bp, Artificial Sequence
  ENSG00000259953_1 (sequence is synthesized)
gtcatcatttccaggccacatttttcatgtcactcatgactgcattataagtttgtaccataattcatttaaccaatactctgttgtgcatttagaatattttcagatgtttattgtcct

SEQ ID NO: 845461 - DNA, 120 bp, Artificial Sequence
  ENSG00000259953_2 (sequence is synthesized)
tataaaagtcagtatgaaggtatgcaattatcacttaggccacattcctggaagtaaaattgttggaatggaaactatgtacattttacagtgcagattgctggaagagttttatgcaaa

SEQ ID NO: 845462 - DNA, 120 bp, Artificial Sequence
  ENSG00000259953_3 (sequence is synthesized)
aacttatacaaaaatttacactcttaccagcagaaagcctcagcgccactgagtgctgttgtattgttaatcttgattaatctggtatgtgaagaaggatgtttcaatgttttgtctgtg

SEQ ID NO: 845463 - DNA, 120 bp, Artificial Sequence
  ENSG00000259953_4 (sequence is synthesized)
tctctctgattattttgcttgttgattggccagttgttaattctgtctttgtgagttgtctttttctcagtacttggcctatttgtctttgatttgaaaaagctctttatgttgtagtca

SEQ ID NO: 845464 - DNA, 120 bp, Artificial Sequence
  ENSG00000259953_5 (sequence is synthesized)
ttttaattcctgtcatatgttttgtaaacaatttttcgagttcataatttttcaatcttgtttgtattatattttgccacacaaaaattttaaatttgtatagtcaaatttatcagtctt

SEQ ID NO: 845465 - DNA, 120 bp, Artificial Sequence
  ENSG00000259953_6 (sequence is synthesized)
tttccttatgttggaccttctaatctcaaggtactaaatataatctagcatttttttaaacattaaaaatttttaatccatctataatttattttaggatagggagtgaggcaggggaag

SEQ ID NO: 845466 - DNA, 120 bp, Artificial Sequence
  ENSG00000259953_7 (sequence is synthesized)
aggggaaggtatctttttaaataaaaatcgttgctaaatggttggctagttgtcctattaatagtcattgagaccaggagcggtggttcacccctgtaatcccagcactgtgggaggctg

SEQ ID NO: 845467 - DNA, 120 bp, Artificial Sequence
  ENSG00000259953_8 (sequence is synthesized)
ggagttcgagactagcctgggcaacatggcgacacacaatctttacaaaaaataagaattaacagaggccaggctagtctcgagctcgtgacctcacgtgatcctcccgtctccgcctcc

SEQ ID NO: 845468 - DNA, 120 bp, Artificial Sequence
  ENSG00000259953_9 (sequence is synthesized)
tcccgtctccgcctcccaaagtgctggaattactggcatgagccaccgaggctggcctgagtattctagtttataacttacaaggtcattcatatgtatatgttgttgtgcttgtctagc

SEQ ID NO: 845469 - DNA, 120 bp, Artificial Sequence
  ENSG00000259953_10 (sequence is synthesized)
tattttatattttgttattctgaactcttggcctctatctcagctccagcccctgaaagtgcaggagtgcttttgctctgccagtcggccttttttgggaaatcatatcaagatggcttt

SEQ ID NO: 845470 - DNA, 120 bp, Artificial Sequence
  ENSG00000259953_11 (sequence is synthesized)
tccagcacaattacttcctagagtgtctgcttgatgcatggaaactcatagatttttggcatgccaaacagagggttttcctgccgtcactgctggctccagccacagacttcagttttc

SEQ ID NO: 845471 - DNA, 120 bp, Artificial Sequence
  ENSG00000259953_12 (sequence is synthesized)
ttacctgttagagcctttgtcctctgactggtggaaatggagcttgcttctttttgttttgcctgccactagtctggcagcctccacctcttgacccttgggtttcttatccttggaatc

SEQ ID NO: 845472 - DNA, 120 bp, Artificial Sequence
  ENSG00000259953_13 (sequence is synthesized)
agatacgaggccctgtgtcttctgttgctgtagaggacacaagtcatattctctgagtggagatctctctgaagctcctctttccaggcttgtactgagggacctctggaccctctacca

SEQ ID NO: 845473 - DNA, 120 bp, Artificial Sequence
  ENSG00000259953_14 (sequence is synthesized)
cgtggtgtcaaagctgccaagagctgtcatatgctgggtctgtaaattgactttctcacctctgaccagatgcattcacttgagcggcacagagatttgggggagtgaaagggcactgtt

SEQ ID NO: 845474 - DNA, 120 bp, Artificial Sequence
  ENSG00000259953_15 (sequence is synthesized)
tctttgggtccgtgggcttgtgtcccatcccctagccttggggttagcaggattcagaatttatgagtgtggtctgcaaaagtctacctctaccagatgggggagaacctagtgtgtgga

SEQ ID NO: 845475 - DNA, 120 bp, Artificial Sequence
  ENSG00000259953_16 (sequence is synthesized)
cctgaagggttagctctgtgctttagtccctgggagtggccatcttgagtcttggtgggcttggcaagtaaggagacattgaccagattcaaagcttccagaggtggtgagaactccagg

SEQ ID NO: 845476 - DNA, 120 bp, Artificial Sequence
  ENSG00000259953_17 (sequence is synthesized)
gccgagtaatggagagtacaaaggtccttcttggcccccatgacccttccaagccaagaacttggcagtagctgtgagaagcagagatagggagaggaggtgaggggcacctatagctct

SEQ ID NO: 845477 - DNA, 120 bp, Artificial Sequence
  ENSG00000259953_18 (sequence is synthesized)
aaaggggactcagttccaaggatcagagggaacttgggttgttttgggataatgactgtggcttgggatgtcacggagatgaacaccagaattggtgtgcaacagatgagctccagtacc

SEQ ID NO: 845478 - DNA, 120 bp, Artificial Sequence
  ENSG00000259953_19 (sequence is synthesized)
cctgatagtttgcatgggttttgctctgctgatgatggtcagggacagcagtgaggccctctacaatgccgccttctgcctaaacacaggcagtgcccacaaaaggggagctgtcattat

SEQ ID NO: 845479 - DNA, 120 bp, Artificial Sequence
  ENSG00000259953_20 (sequence is synthesized)
ggagcctaggaatggatagtcagagagcagcggctgggcagtgcaactcctgcattggacaaggtcctggctagagaatgtcaatgtccacactgcatgtagccctatcgaggagatgat

SEQ ID NO: 845480 - DNA, 120 bp, Artificial Sequence
  ENSG00000259953_21 (sequence is synthesized)
gtagggggctgtcagccttggagactctagcctaagtaccccaccaccactctggctggcttccaagggcacaaatcagctttctgaatctgacttggcttcctgtgatctgcattcatg

SEQ ID NO: 845481 - DNA, 120 bp, Artificial Sequence
  ENSG00000259953_22 (sequence is synthesized)
aacattcttactagagttctcatggaaaatgaatacacaactatttggtctgaatgtgtctgagtttggtgtctccaaaacaattctctggattagatggagaatgaagaaacttcacaa

SEQ ID NO: 845482 - DNA, 120 bp, Artificial Sequence
  ENSG00000259953_23 (sequence is synthesized)
aggcaaaaggacaggtccccatctcgacccccagagaccacttctcagagtctctatctgttcgtctctggtgttagccacgttcctttactttccctcatttctgtggccactcctgtg

SEQ ID NO: 845483 - DNA, 120 bp, Artificial Sequence
  ENSG00000259953_24 (sequence is synthesized)
gcttcctctctttcaacctgcaggctgctgctgccctgcctcagacccttgtaggcttctgtagagatgctactcagatgggggtggagctagatgcagagctgaaacccacctaggaga

SEQ ID NO: 845484 - DNA, 120 bp, Artificial Sequence
  ENSG00000259953_25 (sequence is synthesized)
tctagcttggagagcttgtgaatcttaggagagctaggcatagaatgactaaagtttgtcaccgcatgagataaaataaatgaaaagccacttctggagggaatgaggcagtctgccttt

SEQ ID NO: 845485 - DNA, 120 bp, Artificial Sequence
  ENSG00000259953_26 (sequence is synthesized)
attggagagatacatattgttgaacagctctgggcagttgattgtgtgcctgggagagctaaccatgtttactctacacttgacctgtgatggtctgtattgattgtatcacacgcttag

SEQ ID NO: 845486 - DNA, 120 bp, Artificial Sequence
  ENSG00000259953_27 (sequence is synthesized)
ctttctaaggctaaccaggtcatcgtcctcagtccctgcctgcaactaggttgccaactggcccttgatttcccacccaacttgttcagtttgccctcaatcctggggcctcactaattt

SEQ ID NO: 845487 - DNA, 120 bp, Artificial Sequence
  ENSG00000259953_28 (sequence is synthesized)
cccaaaaagatatggttggtaccacctgtagtttgctgttgcatgttaacctgacttttgggaaactcaaataaacacttttcaaacgcattgaccatttttactctatgacttctgctt

SEQ ID NO: 845488 - DNA, 120 bp, Artificial Sequence
  ENSG00000259953_29 (sequence is synthesized)
tgcatgatcgctagcttggtcacccatcatgctgctttctggtgagctgaaaggaaaataaatggtctaaattgagcaacaagaaagtaaacttttaagcaggtactttccaagtgaaat

SEQ ID NO: 845489 - DNA, 120 bp, Artificial Sequence
  ENSG00000259953_30 (sequence is synthesized)
gagaaccggagattgggtccaaaagagaggatgcccagccagactgaactttcaagtgttttccaactggaaagctccaatgtcctctgatctcagtgaatttccaatctaatttcaagg

SEQ ID NO: 845490 - DNA, 120 bp, Artificial Sequence
  ENSG00000259953_31 (sequence is synthesized)
aagtccctcaggagccccattgcaagggtggttatagaaccatttacaactgctttaataaaactaatgcttataaagaaagaaaacttgttttttagtcatccataacacaaaaaagtg

SEQ ID NO: 845491 - DNA, 120 bp, Artificial Sequence
  ENSG00000259953_32 (sequence is synthesized)
aggtttgatgcacagtaaaaggaatcattatttaagttagtctgagttatattgtattttggaaatgctccacattcaatatttatgccacatactctaaaaccaaagtatgtagattaa

SEQ ID NO: 845492 - DNA, 120 bp, Artificial Sequence
  ENSG00000259953_33 (sequence is synthesized)
aaaaaaactatttccagaaataagcttgctgaatcaccacaggcttaatttatttattttaactaccagtttcctgaatgtttttgtctaattggcctatctgcagttgcccttggtcca

SEQ ID NO: 845493 - DNA, 120 bp, Artificial Sequence
  ENSG00000259953_34 (sequence is synthesized)
cccttgagcccactctttaagcctgtctgtcacttagagaagtacaagtacttcctgctgagaataaagccttgatcgcaatttcagtgaattatcagggaagtgtgagaataagtagga

SEQ ID NO: 845494 - DNA, 120 bp, Artificial Sequence
  ENSG00000259953_35 (sequence is synthesized)
ataaatgtctaaacatttgggaaaaacttgtttgcaataaatgtggttaacagagagtgaataggcttactacataaaattgttactcatcaattaaaaaaactgtacaatcctcctccg

SEQ ID NO: 845495 - DNA, 120 bp, Artificial Sequence
  ENSG00000259953_36 (sequence is synthesized)
ggggaaaatgatcagatattttaagtctgctgatatttttctctggatgtcagacctgtatactttgtcctgcattattggagtataattggcaaataaaagttttatgtatttaaggca

SEQ ID NO: 845496 - DNA, 120 bp, Artificial Sequence
  ENSG00000259953_37 (sequence is synthesized)
actgtggttagtgtagggctcggcctctgatgagtgaggatctttcctcaaagcccacctttgtccaaagaaagaatctgagcctccccttgacttattttattttttgccagttttgta

SEQ ID NO: 845497 - DNA, 120 bp, Artificial Sequence
  ENSG00000259953_38 (sequence is synthesized)
aatgctgtatgcttccatactacccccttccctaatttccacctctagaattaactgccagagatacagttgtccacatggaatgtagtataattgtgatagaaaggaagaaatccccct

SEQ ID NO: 845498 - DNA, 120 bp, Artificial Sequence
  ENSG00000259953_39 (sequence is synthesized)
tgcttagtattaaaagtttctggttaaaataactgactaaatattaagtaaaacatcaccttctgggtacaatgcagaaaagtaaaagcagttcatataagattactaaactttgggagg

SEQ ID NO: 845499 - DNA, 120 bp, Artificial Sequence
  ENSG00000259953_40 (sequence is synthesized)
actaaactttgggaggtcttcaagaccagccctggcaacatagcgagaccccatgtctgcaaaaaaagttttaaaaattagccgggcatggtggcgtgcacttgtagtcccagctactca

SEQ ID NO: 845500 - DNA, 120 bp, Artificial Sequence
  ENSG00000259953_41 (sequence is synthesized)
ggatcgcttgagcccaggagtctgaggttgcagtgagccgtggtgacaccactgcactcccgcctgggtgacagagtgagatccaaaaaaatttactgaaataacaaaaacgtggacttt

SEQ ID NO: 845501 - DNA, 120 bp, Artificial Sequence
  ENSG00000259953_42 (sequence is synthesized)
gggatttcctctaactgctgcaaattataacacagaattgctcagtgttaatacttgaattgtggggccaagtcttctggctgccctagttctcttttctggcatttgaaagcccttgag

SEQ ID NO: 845502 - DNA, 120 bp, Artificial Sequence
  ENSG00000259953_43 (sequence is synthesized)
ctagctatggagctaatctttggacaggctttttggttcccaggaatgtcatgcctttgaatttccaatctatatatatacagtgtgtgtgtatgtatacctgtcttttcactgtaaggc

SEQ ID NO: 845503 - DNA, 120 bp, Artificial Sequence
  ENSG00000259953_44 (sequence is synthesized)
acctccacccatcccttatagaaggagccacaaacaatcaagcaaatggatggaggttaattaaggggaagaggaaatagtctgttctctgactcgagacctgaaattgcagtggggcac

SEQ ID NO: 845504 - DNA, 120 bp, Artificial Sequence
  ENSG00000259953_45 (sequence is synthesized)
gtaagagaaagtgaagcaacaaatgaggaacatgagaacactggagtagaaagctgggtgggcatcagacagctgaccaaaattttcactatcaaaatggcagaagttacctttgggaat

SEQ ID NO: 845505 - DNA, 120 bp, Artificial Sequence
  ENSG00000259953_46 (sequence is synthesized)
tcggagtgtttatgagctgcaaaagaacatcaattagtcttattactttacagttttctctgtctatgtagggtaaaaacattatatatccatataaaatatatatcattaaaacttagc

SEQ ID NO: 845506 - DNA, 120 bp, Artificial Sequence
  ENSG00000259953_47 (sequence is synthesized)
ctgttggacatttctttttttatttttaattgtaacttttgtgggtacatggtgtacatattcatggaatgcatgagatgttttgatacaggtgtgcaatgtgtgataatcacaacatgg

SEQ ID NO: 845507 - DNA, 88 bp, Artificial Sequence
  ENSG00000259953_48 (sequence is synthesized)
ttttgatacaggtgtgcaatgtgtgataatcacaacatggagaatggggtatctatcccctcaagcatttatactttgtattatttaa

SEQ ID NO: 845508 - DNA, 120 bp, Artificial Sequence
  ENSG00000259953_49 (sequence is synthesized)
gctatcaaatactaggtcttattcagtctttctaaatttttggtacccattaaccattcccacccctctgcccttccaccactctttccagccagttggacatttcttttataaactgaa

SEQ ID NO: 845509 - DNA, 120 bp, Artificial Sequence
  ENSG00000259953_50 (sequence is synthesized)
gtatgtggcgaatgacttttaaccatttccgaaaatcaaacacgatgtaaaaatattacacttgtggactcagaataccaaaaatatgtgtttccagccctgatggcaatcttcaaagag

SEQ ID NO: 845510 - DNA, 120 bp, Artificial Sequence
  ENSG00000259953_51 (sequence is synthesized)
ggattgcagcatacctggagtagccacagcaccgttgtcagcactgagcccacacaagtgactgttgacacagggaccgtattctgtgtatatctatgttctgagaatattttgttgttg

SEQ ID NO: 845511 - DNA, 120 bp, Artificial Sequence
  ENSG00000259953_52 (sequence is synthesized)
tggtggtggttggaaaagcttttatatgacagtttatggctcacagtggtgtctggctggtggccttcaatgcaatgactcataagaacctctccttcagtcacccttgaagacccaaca

SEQ ID NO: 845512 - DNA, 120 bp, Artificial Sequence
  ENSG00000259953_53 (sequence is synthesized)
aagctggggaaaggaggggaatttcccgataccattgacaatgaagatggacaagctaacggcagaacctcagaaggatctgacttcagatatgcacgcagcgtaccctggcttcatttc

SEQ ID NO: 845513 - DNA, 120 bp, Artificial Sequence
  ENSG00000259953_54 (sequence is synthesized)
acaaaaacagtacccttttgcaaagggaggaagtgactttctcatgacccgaaccagaaaataggcagccacgggactctatgcactgattccaccttggggagcaggcagaacatgtcc

SEQ ID NO: 845514 - DNA, 120 bp, Artificial Sequence
  ENSG00000259953_55 (sequence is synthesized)
cctttgtgaccacgttcactggcatctttctggatccagatagagtgcaaaacttagaaacagctgagtggtacgcagagggggtacaggtacagatcataccgtgcaggcaggtatgac

SEQ ID NO: 845515 - DNA, 120 bp, Artificial Sequence
  ENSG00000259953_56 (sequence is synthesized)
tactgatctatttctgtgccaataccacctactgtaactttaaaataggtttttgtttataccaagtaagaataagttaccattatttttccattaatttttttttttttttttgagaca

SEQ ID NO: 845516 - DNA, 83 bp, Artificial Sequence
  ENSG00000259953_57 (sequence is synthesized)
tgcttcaagctattctcccacctcatcctcccgagtaactgggactacagatgcgtgccaccacacctgactaatctttatat

SEQ ID NO: 845517 - DNA, 120 bp, Artificial Sequence
  ENSG00000259959_0 (sequence is synthesized)
tgaatgaatggtatatgaagttgtttgttgttttttcatctttttggctagctcagagtgtaacttatttacccaaagtcacacaactattccttcacttattcagtcaacagatgtgtt

SEQ ID NO: 845518 - DNA, 120 bp, Artificial Sequence
  ENSG00000259959_1 (sequence is synthesized)
tcctatatgtcaggaactttctgtgttctggagataatggtgatctttcctcctatattgttgctaaggcacagacaagcacaggcaggtaatagacataaaaaaacgtgattttatgtg

SEQ ID NO: 845519 - DNA, 120 bp, Artificial Sequence
  ENSG00000259959_2 (sequence is synthesized)
tggtaagtggtattcaagaaaataagaggaatggtatagaatgtggtggaagtaggggatacaaggacactggctaatttagaatgggaaaatccctctgagatgaggatattagagccg

SEQ ID NO: 845520 - DNA, 120 bp, Artificial Sequence
  ENSG00000259959_3 (sequence is synthesized)
tgacctgaatgacctccatttgaagatcagcgaaaaatctatacgagagaaagcagtaagtacaaagtccccagtttgggaaatgcttggcacacctgaggagcagaaagaagggctggt

SEQ ID NO: 845521 - DNA, 120 bp, Artificial Sequence
  ENSG00000259959_4 (sequence is synthesized)
gtggctggagcctaatgaaatttaaattgagaggaggatgtgtctaggccagtttatgtcatgcttgatagaccagggtaagaaatttgagttgtatttgagttgcaatggacagcattg

SEQ ID NO: 845522 - DNA, 120 bp, Artificial Sequence
  ENSG00000259959_5 (sequence is synthesized)
gaaggctttaaacaaggaagagacttttttttaaagaccgctggctacgatatagagaaaagactataatgatgcagagacaagttaagttttatctaagtagttatactgatttgttct

SEQ ID NO: 845523 - DNA, 120 bp, Artificial Sequence
  ENSG00000259959_6 (sequence is synthesized)
gagggaaataaagtaatgcatattgtccttttaggttcaatctgagcgaattagagaaggaatggaaaaagttaccaaatagccactaacaatggcctaagattgtgaatgtggtggtct

SEQ ID NO: 845524 - DNA, 120 bp, Artificial Sequence
  ENSG00000259959_7 (sequence is synthesized)
tgttttcctccttacttgtggcattaacaaagtgtatgagcttcctatttgaaatctgtggaatatgtatattgaaatctttagatttttttggtttaaatgcttttcagaattgacaaa

SEQ ID NO: 845525 - DNA, 120 bp, Artificial Sequence
  ENSG00000259959_8 (sequence is synthesized)
ctgtttttcagttaatttcacatctaaattaaatgaaaacaatctcaaataagtacaattgctactgaaattgtcaaaggaattttgctgaggcaaagcagtgaaaacatttcccttcta

SEQ ID NO: 845526 - DNA, 120 bp, Artificial Sequence
  ENSG00000259959_9 (sequence is synthesized)
taaagaagttatgatgcttgaacttaatggctatgaaggttaaaaattttaaatacagattaatctctgtgctagtgtttagagagagatgacatataagaattttttggctcttcatgt

SEQ ID NO: 845527 - DNA, 120 bp, Artificial Sequence
  ENSG00000259959_10 (sequence is synthesized)
tattttaaatgctcatgagtaataccagaaacaggctttatttggaaatagatatactatttaagacaaaatttgaagagatttattttaaagtgttccatttctctttgagaaatattt

SEQ ID NO: 845528 - DNA, 120 bp, Artificial Sequence
  ENSG00000259959_11 (sequence is synthesized)
tttttctttgcctagatacctggcacagtgatgaacttaatagaagattctgtcctcactatgcatatggtctgtgttgtgggttcttccacataagcaaacaggtgaagattaagccag

SEQ ID NO: 845529 - DNA, 120 bp, Artificial Sequence
  ENSG00000259959_12 (sequence is synthesized)
gccacccatgtgggggatctagcccactgccaagggtgactttttagggtgcttgggcctcatccatccttttataatcaagattattaaaacaatgggagatgctgtatgctgatctcc

SEQ ID NO: 845530 - DNA, 120 bp, Artificial Sequence
  ENSG00000259959_13 (sequence is synthesized)
agaagaacaaagaattagttgggtgttaaaccaagaacactaaaaatgcagcagtagccaaaattgctgtgaccaggtataggacagtaaaaggaaggctgtaaaaagaacctctgagga

SEQ ID NO: 845531 - DNA, 120 bp, Artificial Sequence
  ENSG00000259959_14 (sequence is synthesized)
cccaggtgactctagctgttaatgtctgtctgtccttggatattgggaactgaagcagatgtctaagctgtagagctagagttgacatgagatagctctgtctcttcttgggtctgtgga

SEQ ID NO: 845532 - DNA, 120 bp, Artificial Sequence
  ENSG00000259959_15 (sequence is synthesized)
agttgcagtctttatcgagtggcagtgattagaccactctaagacccaaggcttatgaggctggggagcttccagggtgaggaagaagcaaagtactagctactacctcctagaaaagat

SEQ ID NO: 845533 - DNA, 120 bp, Artificial Sequence
  ENSG00000259959_16 (sequence is synthesized)
gcgagaatttgggagtggtgggaggaactgagagaccctgtgatttccagcaacttaaagagacaagcaagaccaggtgtccacctgggaagccatttttacatattttagaatcttggc

SEQ ID NO: 845534 - DNA, 120 bp, Artificial Sequence
  ENSG00000259959_17 (sequence is synthesized)
tctattgcttactaagcttctcttcttgctaagtttccaattagtaatttaagtcgtgctgtgaaggattgtatgcagtttgaaactccacagtccagattcatttgagttaacacctct

SEQ ID NO: 845535 - DNA, 120 bp, Artificial Sequence
  ENSG00000259959_18 (sequence is synthesized)
gtatcccatatatgtattctcttaatacatcacctaatatttccaaagcccccccccccagtcactgtcatctggtcatcctctatcttctcacaatactttttcctcatagcactaaat

SEQ ID NO: 845536 - DNA, 120 bp, Artificial Sequence
  ENSG00000259959_19 (sequence is synthesized)
agtacctgtcctcatattaagtgtctgtttattatctgcctccttccctggaatgtaagcttcatgagggcaggagtgcagttttgtttattactgtaacctcagagtagagaagcctgg

SEQ ID NO: 845537 - DNA, 120 bp, Artificial Sequence
  ENSG00000259959_20 (sequence is synthesized)
ccacatagtagatgctagtattcgtttcctagggctgctgtaacagataccatacatgagttacttaaaacaacagaaatttattctttcacagtttaggtggccagaagtcccaaacca

SEQ ID NO: 845538 - DNA, 120 bp, Artificial Sequence
  ENSG00000259959_21 (sequence is synthesized)
agatataacaaattatatctgcaaagcctttatttccacagaaccacattctgaggttctgggtggacattaatttggcagggagtagtggggggacactaacctactacagtgctcagt

SEQ ID NO: 845539 - DNA, 120 bp, Artificial Sequence
  ENSG00000259959_22 (sequence is synthesized)
aaatatttattgggtgaatgaaaattcagagtgtattctaagctgtaaaccccttggatgttttcatcacagtcttctcttaataactgctacagaacataaggattagtttgtggtccc

SEQ ID NO: 845540 - DNA, 120 bp, Artificial Sequence
  ENSG00000259959_23 (sequence is synthesized)
agattttttaggctccaattctgcttctaccactttctacttgtgagctcttaggcaagctatttaactttgtaagcctcagtttcttctgtaaaatggtgacaataagaaataacagta

SEQ ID NO: 845541 - DNA, 120 bp, Artificial Sequence
  ENSG00000259959_24 (sequence is synthesized)
agtgcccaataagttttaactattattatgtgtctatagctattttaaagcactttctatatgtaatcctcataacaaccgtattaggtgagcctattacacttctcattttatgacaaa

SEQ ID NO: 845542 - DNA, 120 bp, Artificial Sequence
  ENSG00000259959_25 (sequence is synthesized)
ggaaactagatttgtttcaagaatgaaaaacctagaaaattatatgtcactttatgaagtgcctggcacatagtacatagaatagcttagctacaataatatagatatgtgactttacct

SEQ ID NO: 845543 - DNA, 120 bp, Artificial Sequence
  ENSG00000259959_26 (sequence is synthesized)
cataactttaagacatctcaaattgattcacaaatcagaaaaaaaatctgaggcatcagatgtgaggtgaggtgaggtgaggcatctcagtttttgcacatatggttactgttattgagg

SEQ ID NO: 845544 - DNA, 120 bp, Artificial Sequence
  ENSG00000259959_27 (sequence is synthesized)
gagctccatgtcattgagggagctccacgtcattgagggaggactgggtgggatgctggccaaaggtaggggcatatttaggcagtgaaattgcagttatgggacccctctatagcacta

SEQ ID NO: 845545 - DNA, 120 bp, Artificial Sequence
  ENSG00000259959_28 (sequence is synthesized)
gatgtgtgagaggactaaaaataaaattcctttgaaatttcttacagggtcatatattacctccttcccaatgactactgtggtatattagagtaggggattgatgtcccagaaatatta

SEQ ID NO: 845546 - DNA, 120 bp, Artificial Sequence
  ENSG00000259959_29 (sequence is synthesized)
tgtacatcaaacagaagatctacacaaattgttttatcagatactgaatatatcaatgggctagagtgtattatagtacatatgggtatgttgttttcccccttttgactaaataaactc

SEQ ID NO: 845547 - DNA, 120 bp, Artificial Sequence
  ENSG00000259959_30 (sequence is synthesized)
tcccctctctgcaacaggtaaatttccagtttacctttttcttgctgtttttaattttttttattttgaaggctttgtatctttatatctcagctgaaaatattacattctaactcccca

SEQ ID NO: 845548 - DNA, 120 bp, Artificial Sequence
  ENSG00000259959_31 (sequence is synthesized)
aagctattctcacattatttgcaagtattttttcatagtttacatgtttgtgtatttgtttaatacattccacaagactgaaagtcttggtgagggcaggaactctgtctaggttgttca

SEQ ID NO: 845549 - DNA, 120 bp, Artificial Sequence
  ENSG00000259959_32 (sequence is synthesized)
tctggcagccagcaaacccaaaataagtattagttgaatgaatagctaaatagatgagccatggggtagcatatctgttttagctactgcttgcctgttatcatcctgggatgctgcttg

SEQ ID NO: 845550 - DNA, 120 bp, Artificial Sequence
  ENSG00000259959_33 (sequence is synthesized)
cttctccgtgatctcttcttgttcttaaattgtcttcagttgtagtactaagtactaatttgatctgtaatgtgatatgtggctgaagtttgctctgtaaaatcaccgtttcctgaggta

SEQ ID NO: 845551 - DNA, 120 bp, Artificial Sequence
  ENSG00000259959_34 (sequence is synthesized)
tattcaatatctttaatttttccataaatctcttcaaggtttgtgtgtgttttcttttaaattatctaactagttggatgtatgcttgaagtgctagacaataaaagtttcaataggcta

SEQ ID NO: 845552 - DNA, 120 bp, Artificial Sequence
  ENSG00000214039_0 (sequence is synthesized)
agtcctgcatgcagaccgcagccactgactgttcccgagtcaccaggccactcttctctcctgcctcatcgtcttattcagggtccacgtcattctgccacctatttgaggacaccaggc

SEQ ID NO: 845553 - DNA, 120 bp, Artificial Sequence
  ENSG00000214039_1 (sequence is synthesized)
cttggctgtttctgcttcttgtacctcctgagtcaggtggcggtgggggagggcagacgccacacacacctgggtccactggccgcacggctcctggaaatgctagtgtgactttcctaa

SEQ ID NO: 845554 - DNA, 120 bp, Artificial Sequence
  ENSG00000214039_2 (sequence is synthesized)
gggttctttcaaaggacacttttagacctgccttttgtcccaaggattctagttgcttcatctttagtaccacagactggtggctaaacaacgaacatttactctgccaggacaacctcg

SEQ ID NO: 845555 - DNA, 120 bp, Artificial Sequence
  ENSG00000214039_3 (sequence is synthesized)
ctgccctcgtggttcccagcacccgcccggacctccacaccaggctactgtttccccaaacgagtgagtgtcctactcccttccggcagccctgaccttctcctgcctcggattctttca

SEQ ID NO: 845556 - DNA, 120 bp, Artificial Sequence
  ENSG00000214039_4 (sequence is synthesized)
ttctcttctcggctcctaaattcaagctccccttataaagctcagcccagattcccatgataacgtgctctgcgattatttgccgattccatcaacattttttgagtacctgttgtgtgc

SEQ ID NO: 845557 - DNA, 120 bp, Artificial Sequence
  ENSG00000214039_5 (sequence is synthesized)
ctgacacctacggcactcagagctggaagtggatccagctgtgagcagaacacagaccctcggggatcccccagcctgctggtagagacgacccccatccagggagatgcgggagcaccg

SEQ ID NO: 845558 - DNA, 120 bp, Artificial Sequence
  ENSG00000214039_6 (sequence is synthesized)
aggagaagccccaaccctggggttcatggatggcttcctggaagaggaagcaaggtgaagtcagaggctaaaaatgcacacatttgcaggtgttgagcaagtagtgtggacgcgtgagcg

SEQ ID NO: 845559 - DNA, 120 bp, Artificial Sequence
  ENSG00000214039_7 (sequence is synthesized)
atgaggcacaatagagcatgaaggcgcgggcggtggcaaagggaacttcgccatctggggaggcatcctctgcccagctttgatcactccctgggatgtgaataggagtttatcttgcca

SEQ ID NO: 845560 - DNA, 120 bp, Artificial Sequence
  ENSG00000214039_8 (sequence is synthesized)
gatatatgatcttccaaggtcacaggattttgcgaatttgtatcagatttctcagtttttaaatgttgccaacttgtaactttttaaaatagtcagtggaccatacaagacacaactgta

SEQ ID NO: 845561 - DNA, 120 bp, Artificial Sequence
  ENSG00000214039_9 (sequence is synthesized)
ggccaggtgtgttctgcaggcccttgttgcaacatcttgtctaagtggaattcagccaggcgctgtcatacgcagagcacctgccgagccatgtgacgtgctgctctctgccagccctga

SEQ ID NO: 845562 - DNA, 120 bp, Artificial Sequence
  ENSG00000214039_10 (sequence is synthesized)
tcgccttcctttccagcaggacttgcgcttcacactggaccttgaggccccatggagatctgccattttgggcaggttctgctcacagtgccagtaacttcacctaggagaagagcgaca

SEQ ID NO: 845563 - DNA, 120 bp, Artificial Sequence
  ENSG00000214039_11 (sequence is synthesized)
acttcaaggccgcatgacccatctgattgtcatcacacaggtccccgcaggagaatttccatggcgtttctcactctttgtttgcaaagaatttctttttttatcgttttctttttcttt

SEQ ID NO: 845564 - DNA, 83 bp, Artificial Sequence
  ENSG00000214039_12 (sequence is synthesized)
cctcccgagtagctgggattacgggcacacaccacaacgctcagctaatttttgtatttttagaaatcttctgagctcgtgat

SEQ ID NO: 845565 - DNA, 90 bp, Artificial Sequence
  ENSG00000214039_13 (sequence is synthesized)
aatttcttagaattaatatctgcacttggccccacatcctctgagtgataacttagaactgtcactttaattgttgagagaggatattca

SEQ ID NO: 845566 - DNA, 120 bp, Artificial Sequence
  ENSG00000214039_14 (sequence is synthesized)
acttagaactgtcactttaattgttgagagaggatattcagagaatagtgggtgattttacaagcaaggatatgtttggggagcatgttcccggtgcattctcagggtctcgtgcattct

SEQ ID NO: 845567 - DNA, 120 bp, Artificial Sequence
  ENSG00000214039_15 (sequence is synthesized)
tttagacattgaagacatcctgatctccagtggaagcagagccccagtcatacacttatccaccggggacgagttccaagacccccagggaatgcctgaaagctcgggtagtgcttacct

SEQ ID NO: 845568 - DNA, 120 bp, Artificial Sequence
  ENSG00000214039_16 (sequence is synthesized)
ctatggatgttgtgcacaaatttatttttccctctttacaacttcatagattgaaggttcgttcttaccaaagatcttagcaaccttagcttatcattccttttatttcctgattaagtg

SEQ ID NO: 845569 - DNA, 120 bp, Artificial Sequence
  ENSG00000214039_17 (sequence is synthesized)
gagaactttcaccttttcactaaaaaaaaaaagtgctttacggctgcctttgccacgtgcacatggtcttttgggaccatccttaagtcaaataagggtgacctggatgcaagcactgtg

SEQ ID NO: 845570 - DNA, 120 bp, Artificial Sequence
  ENSG00000214039_18 (sequence is synthesized)
gctgctgagccgctggtgggcgcggagtgtcgtgtctgcagcgtgaacatgccgggcaaaggaataatgcatgtcagggatagggtggagaaggactgtgccaggcttcatcacactact

SEQ ID NO: 845571 - DNA, 120 bp, Artificial Sequence
  ENSG00000214039_19 (sequence is synthesized)
cagaatggcacacagtttagaacttataaatgatttatttctggagtgatccactgcatattttcagacggtggttgatcgtgggtaactgaaagcaaaacctgactgaaaggggctgct

SEQ ID NO: 845572 - DNA, 120 bp, Artificial Sequence
  ENSG00000214039_20 (sequence is synthesized)
gtgttcatgtcagcaacgctgatgccctcgaggccagaagagtaaccaccaatctggtacctgagcacctggctgtaagtccaccctccatttctggccagggccgaggaattctctctt

SEQ ID NO: 845573 - DNA, 120 bp, Artificial Sequence
  ENSG00000214039_21 (sequence is synthesized)
tttctctttattttcctcttgatttgagaaggtcaactctgagcatgctctaaacacaaatcagcatctctacacttcttcggcaccaggtgttgctactgtctttctgattagaaaaaa

SEQ ID NO: 845574 - DNA, 120 bp, Artificial Sequence
  ENSG00000214039_22 (sequence is synthesized)
agaaatatccaggaattctggaagacagtgattgatttgcagctatgctgcaatggagctaagaatcattagcacaacccgtgctggtgttcgacaagatgcccaatcaattcatccgat

SEQ ID NO: 845575 - DNA, 120 bp, Artificial Sequence
  ENSG00000214039_23 (sequence is synthesized)
gacaggtgcgctgtgtctgcgaagcgcgaagccacggagtgaggtgctgaccaggctccaccaggagcaaggaacaagactccccaggggctcctggtccacagaaggcagggacgccca

SEQ ID NO: 845576 - DNA, 120 bp, Artificial Sequence
  ENSG00000214039_24 (sequence is synthesized)
caaacataccatgagtaaatagttccaatgtgaagaagactgaaaatgccacagaagtgtgagcccactgttttgaaattctttctgctgaagggattgagaagaactcttccataaagg

SEQ ID NO: 845577 - DNA, 120 bp, Artificial Sequence
  ENSG00000214039_25 (sequence is synthesized)
agcatgaccgagccatgagttataatatatacatgcatatagaaagaggatgtgaatacagttgcagaagggcgtcaaagccaaaaacacacagggaatgacttgaggaagctgaggacc

SEQ ID NO: 845578 - DNA, 120 bp, Artificial Sequence
  ENSG00000214039_26 (sequence is synthesized)
aagagcagtgctagccatgccagtgactgtggtcgctgagaactggatgatggatgtttgagtgaccgtcaggaggatcagcatgggaccaggaggatcagcatgggaccaggaggatca

SEQ ID NO: 845579 - DNA, 120 bp, Artificial Sequence
  ENSG00000214039_27 (sequence is synthesized)
gcatgggaccaggaggatcagcatgggaccaggaaacagcaggcgagtgaatgtgaactccactctcaacagggagatgacgtgggtctcggaaacctacagatctgagtgcttgctgtc

SEQ ID NO: 845580 - DNA, 120 bp, Artificial Sequence
  ENSG00000214039_28 (sequence is synthesized)
aggtcatggcagggctctgactgcactgtggagggaacatctgtgtttttgtcctcctggaacctagtgcccctttcctggaggcagcatcctatttgacctgtgtgggtccaaccccac

SEQ ID NO: 845581 - DNA, 120 bp, Artificial Sequence
  ENSG00000214039_29 (sequence is synthesized)
ctctctcctgtagcagtggcatgggacccggggctgggccattcgcagcattgccacaggcagcaatggtgattgatctaggagttgatcattgatcctaactgggtgctcaggccaagg

SEQ ID NO: 845582 - DNA, 120 bp, Artificial Sequence
  ENSG00000214039_30 (sequence is synthesized)
ggattgattcttggtattttttaatctcttttttccactggaattatagctaatatgatgaagcctagatatactgcgtatctggcttttagacagggcaaacctgcctagaaatgaaaa

SEQ ID NO: 845583 - DNA, 120 bp, Artificial Sequence
  ENSG00000214039_31 (sequence is synthesized)
tgaagtcaccacctgtgaaagcagaaacaagagcttgagagagactgagtcctggtgagaatttctgaaccccttgatccagcgatgcctgaagccagaactacttgtaaacttttcagt

SEQ ID NO: 845584 - DNA, 120 bp, Artificial Sequence
  ENSG00000214039_32 (sequence is synthesized)
catgcaatcctgtcacttctgtttgttcttaagtgcattttgtatggtttctgccgctgaccacggaaacgtccttcactaacagggaagcagagttaccccatttgagagcctcagaag

SEQ ID NO: 845585 - DNA, 120 bp, Artificial Sequence
  ENSG00000214039_33 (sequence is synthesized)
gaagatggcattcatgcaaaggaagcatgcgtttgctctcacttcctgagagaaagcctgaaaatgaagccaatctcattttctttcagagatgagtctcttgatcagagaatgcctcag

SEQ ID NO: 845586 - DNA, 120 bp, Artificial Sequence
  ENSG00000214039_34 (sequence is synthesized)
ttccctgtatctaaattttagcaagtgagagaatgcctcagtcccctgtatctgaattttagcaagcgagagaatgcatttaggacaagcaacagcgatggctcccgtgtgttcttggct

SEQ ID NO: 845587 - DNA, 120 bp, Artificial Sequence
  ENSG00000214039_35 (sequence is synthesized)
gctctgtttctaaatgaagattcacctggaggcagcctttgctgcagggacacccagatctcaccttgttcttgttcttttcaatcattttagcaaaggctcagcctactgatccgattt

SEQ ID NO: 845588 - DNA, 120 bp, Artificial Sequence
  ENSG00000214039_36 (sequence is synthesized)
agagatgagccatgaaagcagatatttagataatattttcccaactgcctggagcattaggttagaactagtgagataaaaatataatgaaaataatagaaagctttgaccctcagattt

SEQ ID NO: 845589 - DNA, 120 bp, Artificial Sequence
  ENSG00000214039_37 (sequence is synthesized)
agccctgcgcttccccaggtgaaccgggcaggagcctgttgggaaggcagcgacccacatctgtgtgcacctttgtggatttcaggttccggacgcaggcgaccaagccagagccagcgc

SEQ ID NO: 845590 - DNA, 120 bp, Artificial Sequence
  ENSG00000214039_38 (sequence is synthesized)
gggcagagaggttgatgtctaaacccacacctcttaggagtgtgatatggctgcaaagtccatccaagagccccttagacagctcccaggtctgccagaaaaaagcaattcatctttcct

SEQ ID NO: 845591 - DNA, 120 bp, Artificial Sequence
  ENSG00000214039_39 (sequence is synthesized)
atacaggagtttaaggtcattttgaagtggatgaattgggaaacattatttttgtgaattgaatatattgtaggaaatcttgtatgctctaatctgctagttaatatactaatcaagaaa

SEQ ID NO: 845592 - DNA, 120 bp, Artificial Sequence
  ENSG00000214039_40 (sequence is synthesized)
aggtaataaaaccacatagctaaaaagaaacatattgatttcagcgacttctgctaaagccagattatgtgaagattaaatctaaaatgtcagcaaaataatactgaatcgatctttcat

SEQ ID NO: 845593 - DNA, 120 bp, Artificial Sequence
  ENSG00000214039_41 (sequence is synthesized)
catctgtgtggcctgttttattgactcatttctttattgttattataccaatgaagcatggaaatgctgtcatggaaaaatccaaatggcttattgtgttgccaagcattttattagagt

SEQ ID NO: 845594 - DNA, 120 bp, Artificial Sequence
  ENSG00000249647_0 (sequence is synthesized)
cagccctcttgcctgagcaatctgacgcagaggcacatgaggaatcagcacggaaccatcgacccacagggttaatcccaatgtcaatacctgctagatgtcagggatcccctgggctgc

SEQ ID NO: 845595 - DNA, 120 bp, Artificial Sequence
  ENSG00000249647_1 (sequence is synthesized)
tggcgagccatttgaaatgacccatctcctgccaccttggcctgctcctctgggccacctctctccacctgcacttgcttaccggaagacggcaaggccaccggtgcacttcgcagtgcc

SEQ ID NO: 845596 - DNA, 120 bp, Artificial Sequence
  ENSG00000249647_2 (sequence is synthesized)
gcgcctcatgctattagctcaaataaggaaaatcatgccgggaagattgaattttctgcagacttgtttaacctggtgatttctgagcacttggcgctggcagccacgggggagtgggct

SEQ ID NO: 845597 - DNA, 120 bp, Artificial Sequence
  ENSG00000249647_3 (sequence is synthesized)
gccagccggcactttatcagccacttctcaggactattcctaagcttattaaatcagcatgagtcactcccttgccttcctcacaagcatgaatcacgaatcatcaaaacccaagcaaaa

SEQ ID NO: 845598 - DNA, 120 bp, Artificial Sequence
  ENSG00000249647_4 (sequence is synthesized)
tgcacttgcttaccgctggagggctggggtctgccgtcacctgcctctcaagaaacctgtgcctccagcagccaccgggatccactgggactgtgaccctcctgccaagaagacccagga

SEQ ID NO: 845599 - DNA, 120 bp, Artificial Sequence
  ENSG00000249647_5 (sequence is synthesized)
aaagcctgctggccactgtcgatgagaggcaggctcccacctgcagggtgttcactttgtggctccttccaataagtcaagcaagatggaaacattcgagcgatgcaaggcagcgctact

SEQ ID NO: 845600 - DNA, 120 bp, Artificial Sequence
  ENSG00000249647_6 (sequence is synthesized)
tggggaaagagacactggtatgccacatcagcgaggaccaccaggaaagacgattcctttccaaattccaagcctcaacaaaagcgaccacagcagtccagactcctgtctctaatccct

SEQ ID NO: 845601 - DNA, 120 bp, Artificial Sequence
  ENSG00000249647_7 (sequence is synthesized)
acttccccatgtggacaaagagtggggctcttttggcctgagctcatggggtttcacatcagcccagcaggacagaatgcatccctcctgacagccaggcacaggctggggaccagagag

SEQ ID NO: 845602 - DNA, 120 bp, Artificial Sequence
  ENSG00000249647_8 (sequence is synthesized)
acccagctggctccacagggcagggctgacacagagccaggggagggttgtggcggcccacactgcatgtctctacaaggtgaaggaactccttgtgttggctgctgagctgagaggtca

SEQ ID NO: 845603 - DNA, 120 bp, Artificial Sequence
  ENSG00000249647_9 (sequence is synthesized)
cagctctgcctcacagcaccctggccaagttttccatgaaatcatccaaagccaacaggagttccgggaaccatccatctggagctgcagcttcctccctggctgtggggatcttcagat

SEQ ID NO: 845604 - DNA, 120 bp, Artificial Sequence
  ENSG00000249647_10 (sequence is synthesized)
cccttgggcctgggataagtccactctccacacatgtaggggaaacatgccagagggccagcccttgttcccagacacggccctggcccctagcaagcctgctcagacacagggggatgg

SEQ ID NO: 845605 - DNA, 120 bp, Artificial Sequence
  ENSG00000249647_11 (sequence is synthesized)
acagcagacctacctagctggctaatgtctccctagtagccaattaattgcagcattcactgagggactaggcagtcatgcagaggccaagctctaaagggcacccaccccagcctgtcc

SEQ ID NO: 845606 - DNA, 120 bp, Artificial Sequence
  ENSG00000249647_12 (sequence is synthesized)
cccaacaacccagacacacagacccacagctacatccctgtgcaaatgccataatcccagcttggctgcacgaacatgcgcacctctcccatccatggcagcgggcccaaagggcaggca

SEQ ID NO: 845607 - DNA, 120 bp, Artificial Sequence
  ENSG00000249647_13 (sequence is synthesized)
acaggcagaaagcagctggacactaggggtaagctgaggaagaccagccctcggccccttcctctctacacagagtggtggggagacaaggaggagcgagggatactgacccgggcctga

SEQ ID NO: 845608 - DNA, 120 bp, Artificial Sequence
  ENSG00000249647_14 (sequence is synthesized)
ggaacacctgacccagcagcacagaacagagatgagaaatgggccccatttccatcccccaaatccttcaagatgaccactgaagctgcaaaaaatcaattttctgcagcttcttcggaa

SEQ ID NO: 845609 - DNA, 120 bp, Artificial Sequence
  ENSG00000249647_15 (sequence is synthesized)
gccaggatttattttctgtgtgtgcagagctattggctcagctgtttcccatcagcttcctgcatgcttccaggcagagcacagcccactgcctccctctccttcttcctcccgcaatgc

SEQ ID NO: 845610 - DNA, 120 bp, Artificial Sequence
  ENSG00000249647_16 (sequence is synthesized)
tcaaacccacacccaaggtagacccctaggaaaagcagagggtcttgacttgggaaaatcaagccacgtgtcaggagttcacccctggatatcaccacctcatgtttccagagtccccag

SEQ ID NO: 845611 - DNA, 120 bp, Artificial Sequence
  ENSG00000249647_17 (sequence is synthesized)
tcacttgcaaaggacctcacacatgccccggctaggagacaaggctaaagcctgtggagtcagaggacgagagagagagagagagagagagagaaggggcaggacagaagagccgctgga

SEQ ID NO: 845612 - DNA, 120 bp, Artificial Sequence
  ENSG00000249647_18 (sequence is synthesized)
ccccagattcacagggcacaaatgcattctctaggtggtaacatcagagccaccacttctcagtgtcagtccatatttactgagtgccgactgcccgggaccctgtgccagagctgcgcc

SEQ ID NO: 845613 - DNA, 120 bp, Artificial Sequence
  ENSG00000249647_19 (sequence is synthesized)
ccaaccccatccatcccgagcttcatgataataacattattctttccaactttgggctgatcagggtttataagggctcccacttcactttttaccaaaagaaaatatctttcctttgca

SEQ ID NO: 845614 - DNA, 120 bp, Artificial Sequence
  ENSG00000249641_0 (sequence is synthesized)
cctgggaagggagacttccagaggtgggcggactgcgactgctccttggagcagtacacctgactgtcccagccattggagagagcccagtgctggtagccttcgacggggatgagggcg

SEQ ID NO: 845615 - DNA, 120 bp, Artificial Sequence
  ENSG00000249641_1 (sequence is synthesized)
tcgtgacgcggctccgggtgcccgctgatcccgggcaccaccgacacgtccaggttttaaatgctgagtgctcgtgtgcagccagcgcacagaccatggccacagagcagcgcctcgctc

SEQ ID NO: 845616 - DNA, 120 bp, Artificial Sequence
  ENSG00000249641_2 (sequence is synthesized)
agccagacctactgcacccctcaagtggagagcaaatggacaggtctgcagaaaccccttcgggccacctccctcctctttgtggggagaaggtggtgtttgacggttgagagcacccgg

SEQ ID NO: 845617 - DNA, 120 bp, Artificial Sequence
  ENSG00000249641_3 (sequence is synthesized)
acatcggagcactatgcggccaaaatttagtggcgagaagaaagaaagggaaccatagtcctcttcctcaagaagaccagccgaagttgtaggcccctaaagcgacttggaggagtggga

SEQ ID NO: 845618 - DNA, 120 bp, Artificial Sequence
  ENSG00000249641_4 (sequence is synthesized)
aggctggaggggaaagtttgggctaagggcgctaaaggcggctggggaagtccgcttgctctgaacaattccctcttcttttgcttggttccccaagacctttcgcgcctgcaaacgcag

SEQ ID NO: 845619 - DNA, 120 bp, Artificial Sequence
  ENSG00000249641_5 (sequence is synthesized)
ttaattaactttaagcctggggtggtttcttccccctcccccgaaaaaaaaatgtggatctcgctgagacacaagtaaaatcaaattaaacactccaggagaatatgcaccactagaaac

SEQ ID NO: 845620 - DNA, 120 bp, Artificial Sequence
  ENSG00000249641_6 (sequence is synthesized)
gtagtaattacatctccaaggcgatctcgccctagaaagcctttccagggcctggcgctgaaaccctcggctgcggtgctcacccgggcgcgccccgccggccttcggggatgaggcagt

SEQ ID NO: 845621 - DNA, 120 bp, Artificial Sequence
  ENSG00000249641_7 (sequence is synthesized)
gaggtttgactgtggatgaagtttagagaaaatccagctgctggtatgcggagaaagacggagcatttaattatacgaaaggaaaatggaaaacggctcctcagcctcgtcgggaagccc

SEQ ID NO: 845622 - DNA, 120 bp, Artificial Sequence
  ENSG00000249641_8 (sequence is synthesized)
cggctctgctctcggctgctttttcaaagggacttctacaaccgcggagcggcagaagccactctgccctcagctacagctcatgaaccaagctctcggctaagttcaactctgaaatgt

SEQ ID NO: 845623 - DNA, 120 bp, Artificial Sequence
  ENSG00000249641_9 (sequence is synthesized)
tttcttttaaatgatccaacacagaaaggagatatttaatatgctttttcacgggaagcgtctgtgtatgtgcgtgtgcgcgtgcgcttgcgtgcctgtgagtttagggatgggtgcagg

SEQ ID NO: 845624 - DNA, 120 bp, Artificial Sequence
  ENSG00000249641_10 (sequence is synthesized)
ctgcctgcaccgtttcagcacacggccttgtggacacagcccaaatgagttcctaaagatacccagctctctgcctaaatcctctgtatgcaaataaaggtctctgcttgtctgtctgta

SEQ ID NO: 845625 - DNA, 120 bp, Artificial Sequence
  ENSG00000249642_0 (sequence is synthesized)
tcccacccaaaccaaagggccggtctcactcccaccgtgcaccccccaacagcccccagtccgtttccaggcggagagggatacaggcctgaaaacctgccccaggctacccgcctccca

SEQ ID NO: 845626 - DNA, 120 bp, Artificial Sequence
  ENSG00000249642_1 (sequence is synthesized)
gctgcgagagaaaaaggcttggttcttcccccgcctgtggagtcagcaccccggattcgtgccctgccctagttctggccaggaggattctcacccagttcaaactgttacaacgctcag

SEQ ID NO: 845627 - DNA, 120 bp, Artificial Sequence
  ENSG00000249642_2 (sequence is synthesized)
ttctccctgtggagttttaccccctcctctcccgatggatccctgtggtgccagcaggaatgggctgctcggggacccagcgagctccgcgggcctttccgctgcttcctctacccctgt

SEQ ID NO: 845628 - DNA, 120 bp, Artificial Sequence
  ENSG00000249642_3 (sequence is synthesized)
ctctacccctgtacctcactgggctccccagacggactcagctccaggtgtctgtgaactcaagagaagcctttcattctagacatagtagttattttctaaatcatctttaaacttatt

SEQ ID NO: 845629 - DNA, 120 bp, Artificial Sequence
  ENSG00000249642_4 (sequence is synthesized)
tgctggaatattgtgggggtaaagtgcaaacttccccttcaccatctgaaggtttgctaaaaatcaacaggcagaaggcgaattaacaggagaaatggcatgccaatttgtttgatcaca

SEQ ID NO: 845630 - DNA, 120 bp, Artificial Sequence
  ENSG00000249642_5 (sequence is synthesized)
gacacatgagaaattgtccatttttatgcaacaccagaccaggcgatgctctaagacaggtacaacaaagtatggacatgcgtgtagaaatacgagtcaactaaagggtgtgatctactg

SEQ ID NO: 845631 - DNA, 120 bp, Artificial Sequence
  ENSG00000249642_6 (sequence is synthesized)
ctaataggctgagtggggacacccagactcttcctggcccctgtgagcagcttcctttccttctggtgtggggcaggaacttctctggaatggggatcttctgacccacagtcaaacaag

SEQ ID NO: 845632 - DNA, 120 bp, Artificial Sequence
  ENSG00000249642_7 (sequence is synthesized)
aattggacagaagtcacatcagggagaccagagactagagtattgcatcatagaggaaagacactgatgacaagacctcaggggagcagtggaactggaggcctgggagcttgggacgtg

SEQ ID NO: 845633 - DNA, 120 bp, Artificial Sequence
  ENSG00000249642_8 (sequence is synthesized)
ttctccgggtgaagttggctggccagctgatgacctacaccagtgccattcactcctcatgtgtcccccgggaattcatagtgtgtgtcatcaggtaaaagcaacactactttcagatgt

SEQ ID NO: 845634 - DNA, 120 bp, Artificial Sequence
  ENSG00000249642_9 (sequence is synthesized)
tttctgatctctttgagatctggacaacactactgtgtacatatggccagcaacaaattacactcaatgaatattttagagagcagcaaagtaatcaattaaaatgtgggtaaacaaaaa

SEQ ID NO: 845635 - DNA, 120 bp, Artificial Sequence
  ENSG00000249642_10 (sequence is synthesized)
acacgtgaaaacgccccggactgcggctgcgccgcttacccgcacacagacggttggcagaggaagaaagccttgtcacactaaaggagagacagcggatgttctgaacagtcctgtcgt

SEQ ID NO: 845636 - DNA, 120 bp, Artificial Sequence
  ENSG00000249642_11 (sequence is synthesized)
gaaacgttagacaacgtggacgaaacaggcacattcctaagcatcacacattactgaaactcagtcaagaagaaatagaaaatctgaatacatccatggcaagcacagaaactgaactag

SEQ ID NO: 845637 - DNA, 120 bp, Artificial Sequence
  ENSG00000249642_12 (sequence is synthesized)
gggattcgaaatcttcccacaaagaaaagcctaggcccaactggcctctatgatacagcaagaaggtgccatctatgaaggagaagacaagccctcaccagacaccaaatctgctgatgc

SEQ ID NO: 845638 - DNA, 120 bp, Artificial Sequence
  ENSG00000249642_13 (sequence is synthesized)
atcttggacttcccagcctccagaactgctcacacccctttattaactgaagctgacttaacccgaactatctgaagctgactcaacccgaactatccgagatcacacgtaaatgttttc

SEQ ID NO: 845639 - DNA, 120 bp, Artificial Sequence
  ENSG00000249642_14 (sequence is synthesized)
tttccttctgatctcaacttttctccttatcgtggggcatggaaaggaggagatcgcagcagggaagtttttgttcttgttcacatgctaacaatggtaagcttcttaaaagtgaatcac

SEQ ID NO: 845640 - DNA, 120 bp, Artificial Sequence
  ENSG00000249642_15 (sequence is synthesized)
agtagcatcacagagtttggacaggtgatgtaactaggagctacgaaaattgagtgccataaaagaatcatctttaaatactgaagtgcttctgtatgcttgaattatacagcatttcct

SEQ ID NO: 845641 - DNA, 120 bp, Artificial Sequence
  ENSG00000249642_16 (sequence is synthesized)
acacaatctcatttaacacttttaaagtcatagtagttgaaccgagtatatcgcacccctgttacggctttttcttgattataggacaaaatgaaaagaacttttatgatctggctccaa

SEQ ID NO: 845642 - DNA, 120 bp, Artificial Sequence
  ENSG00000249642_17 (sequence is synthesized)
ttatactttcaaggttcaagtcttcccatccggtaagatttttcttctttacaaaatgccccaactgaggcactcatgtactaggcacaggagactacctgtttgaaatatcccttgctt

SEQ ID NO: 845643 - DNA, 120 bp, Artificial Sequence
  ENSG00000249642_18 (sequence is synthesized)
ctgctggaaatgctgttcccacactgaactcatgtgccaactctcagctcaaaagtgcatgtttgtctctaccagtggactaaggaccagctcctaggatgggagcagtttcttactcat

SEQ ID NO: 845644 - DNA, 120 bp, Artificial Sequence
  ENSG00000249642_19 (sequence is synthesized)
gtttataaagtgctatgcagaaaatagcagggctatgggaaagaaagagaccaggttagaaaagtcatttgaatcggatctgcatgaaaaaaggcactttagataagacctgatagcaaa

SEQ ID NO: 845645 - DNA, 120 bp, Artificial Sequence
  ENSG00000249642_20 (sequence is synthesized)
gggctgtaagaggagaaaagggcaaatcaaaggtaccgacagaacatattaagcatggcctaggctgagcaaagccaaatttaaacataattttgtatgttgaagcacattattttccaa

SEQ ID NO: 845646 - DNA, 120 bp, Artificial Sequence
  ENSG00000249642_21 (sequence is synthesized)
tatgttaatgtgtagccattctcacatacataataaagctaatggattatttattcaattgtatgttttgttataggagcctctgtcattaaaaagaaaatttattttcgtatctgggaa

SEQ ID NO: 845647 - DNA, 120 bp, Artificial Sequence
  ENSG00000249642_22 (sequence is synthesized)
aagttgccaaggcaaaaaacacacacctggccatgcatctttagtttgttattgtttttaggtttatttgaaacttacaaagtgaaaaaaatcaatgacttctcagaaaaaggaaaaaaa

SEQ ID NO: 845648 - DNA, 120 bp, Artificial Sequence
  ENSG00000249642_23 (sequence is synthesized)
tgatggaatagagagagaggctgaggagtagttctacctgcctgtttttccatggtgacagtggaatattaatcacagatggatgagacttaacattgctcagactatcattagctgttt

SEQ ID NO: 845649 - DNA, 120 bp, Artificial Sequence
  ENSG00000249642_24 (sequence is synthesized)
tcatcaatcactgtccagttattgctaatcctctaccattctcatcctgtggggggtggaaaatgacagactgcgtgtatcaagcaaggttcccaggtacaagcaacaagaaaaaaaaaa

SEQ ID NO: 845650 - DNA, 120 bp, Artificial Sequence
  ENSG00000249642_25 (sequence is synthesized)
tcctttatgccccacctcaggaggaggagctgctgctacagggaggaatatgctggcaatctacctttggaaagtccttgaccaattgtttcggtaaatggacaagtgtagcggccccag

SEQ ID NO: 845651 - DNA, 120 bp, Artificial Sequence
  ENSG00000249642_26 (sequence is synthesized)
tgtctgaggactatcgatttacagcaatggattggtcaaggaaggataaagaaacttggaaagaactatcatgatacctgccctgagaagccaaaatttggtttaactttgtgttgttta

SEQ ID NO: 845652 - DNA, 120 bp, Artificial Sequence
  ENSG00000249642_27 (sequence is synthesized)
ctgtttggttctataaaagctaagtttataaaatattgtatgacaggtgaatttaaatgttactaaccatcttggatgtcctgctcttctgctgtacagcaataaagtctctctaaatgc

SEQ ID NO: 845653 - DNA, 120 bp, Artificial Sequence
  ENSG00000249642_28 (sequence is synthesized)
agtcaataagaatttgaggaccttcttcttgcacccacagtaaattcatttctgccaacaaactgaatgagattgtcccctagagcctccagaaaggaacacagcttactgtcatgttta

SEQ ID NO: 845654 - DNA, 120 bp, Artificial Sequence
  ENSG00000249642_29 (sequence is synthesized)
ttttagtttggtgaaacccaacccagactttccatctatggacctataattaaaatagtttgggggcattcttagtccacaaatttagtccaaatttaataacaaatttgtgttacttta

SEQ ID NO: 845655 - DNA, 120 bp, Artificial Sequence
  ENSG00000249642_30 (sequence is synthesized)
actcactcaggtgcagctttcaaagacagctatgagggggaattctctcagtgtgcagggcttcacgcactacacttggtcatcaaattcatgttgaaagagatgcagcctcagcctcag

SEQ ID NO: 845656 - DNA, 120 bp, Artificial Sequence
  ENSG00000249642_31 (sequence is synthesized)
tttggaatatacacagacgggtaggtgctgaagggcacagacagatcatcagaggcctagtgggagagaaattaggagatcatagacaaggatatctggagtagtgttgtgtagatgaca

SEQ ID NO: 845657 - DNA, 120 bp, Artificial Sequence
  ENSG00000249642_32 (sequence is synthesized)
ctatgggagaagacacaatgtgggaagatctttcagttgcaggttaacacctaccagaaatcatctattttggaagaggcactagacagccaagtagatggactgactcagccacttgat

SEQ ID NO: 845658 - DNA, 120 bp, Artificial Sequence
  ENSG00000249642_33 (sequence is synthesized)
gccagccagtttctgtcattggccattccagtgctgctgaaatgaacacatgaaaagagtagctttagtgtcagagatgttaggttatgctcgggcccaacagcatgggctcccattcat

SEQ ID NO: 845659 - DNA, 120 bp, Artificial Sequence
  ENSG00000249642_34 (sequence is synthesized)
caaagctggtctagctccaggtgctgccgaacagcaaacttgccagtaacaaagatgacatcttcatccccaatattgcatcatttcttcaggagatcatcccatcactaagcggcaagt

SEQ ID NO: 845660 - DNA, 120 bp, Artificial Sequence
  ENSG00000249642_35 (sequence is synthesized)
tcaccacagtctacttctttcatcttgccagggtcagtggttcatttttgacagtaacaaattctgaacatgaatttgctttttctgtccccatggtttcaggcaacactgttatctgaa

SEQ ID NO: 845661 - DNA, 120 bp, Artificial Sequence
  ENSG00000249642_36 (sequence is synthesized)
tgcttgcagagtgtcagatccaacaacagcaatttcacttataattatgtcaggcagagggacaaaccttaaaaccaagcaggtccatcagtgggtccataatgacaggatctgctggtc

SEQ ID NO: 845662 - DNA, 120 bp, Artificial Sequence
  ENSG00000249642_37 (sequence is synthesized)
cctgttgaaacacaacggaggtgtaggcccagacatgcttccctgtgagaatgagacagcactctccaggacatagcatctatcctgaatcaatgagcattcgcgggctctgggttcccg

SEQ ID NO: 845663 - DNA, 120 bp, Artificial Sequence
  ENSG00000249642_38 (sequence is synthesized)
ataaacagaatacatagatgagaaaccaaagtctagaagcaagagtggcctctgttaccaacattcccagtgacccactggagaatttgtgcttcttgttcctgcaactctggggtctgt

SEQ ID NO: 845664 - DNA, 120 bp, Artificial Sequence
  ENSG00000249642_39 (sequence is synthesized)
gggtttaaagatcttggttcccaaaggaagaacatttctgccatgaacacatcatcatttcccttgaatctaagctgtggtagcttcctggacacattaaatttctcatggcaaaggaca

SEQ ID NO: 845665 - DNA, 120 bp, Artificial Sequence
  ENSG00000249642_40 (sequence is synthesized)
aattagtaaattttgctctgccgaaaaatcatatatattgacaataaattttgtcaaatttattaataaccagtctgaaactctataaagatgaatcctcaaaatatggatataaaagaa

SEQ ID NO: 845666 - DNA, 120 bp, Artificial Sequence
  ENSG00000249642_41 (sequence is synthesized)
gattcgaaatcttcccacaaagaaaagcctaggcccaactggcctctatgtttcagactttggacaacatgtagcccaggacagtgatccctgagaaaaggaagacaaatgaggtgacac

SEQ ID NO: 845667 - DNA, 120 bp, Artificial Sequence
  ENSG00000249642_42 (sequence is synthesized)
tgtgaggagtggggacaaaacagtctagtggctttgctgagtggagaaggcaagtactggagtccaggcaaagtattggtgaaggtggagccctggagaaaaagaactctagagatctgt

SEQ ID NO: 845668 - DNA, 120 bp, Artificial Sequence
  ENSG00000249642_43 (sequence is synthesized)
aagaggctctccttgaaacttctactgagcacagttctgcacatgcatgtatagaatttactcaagatgaagaaagaaccaacgaaaaaaagcatagtataatgctgagaactcataaaa

SEQ ID NO: 845669 - DNA, 120 bp, Artificial Sequence
  ENSG00000249642_44 (sequence is synthesized)
tcgagtaggaaatcttgcctattgaaagagcattgagacagagtcctcagaaggaattttctcagtggtgggaacaaattagctataaacccaagtttgctctgatattgctataacaaa

SEQ ID NO: 845670 - DNA, 120 bp, Artificial Sequence
  ENSG00000249642_45 (sequence is synthesized)
gcttaaaagcaactctcaaaaggctcaaactgagtacaaaacatctaattgtaacccagggtacttcccaacagtattcaagggaataaaatattttgtgtatattttgtattacaggaa

SEQ ID NO: 845671 - DNA, 120 bp, Artificial Sequence
  ENSG00000249642_46 (sequence is synthesized)
ccactaacactattttagaaagctataaatgataagcaaatagagataaaatagaatgataaaatataatcaatccagaatatgggaagaaaaagaaaaagggagcaaaaaaaaatgaaa

SEQ ID NO: 845672 - DNA, 120 bp, Artificial Sequence
  ENSG00000249642_47 (sequence is synthesized)
ctaggcccaactggcctctatgcatcccacttgatgaaaattcctgttataataaattagccccttgaggttcctggaaaagcatgaagacttgatatcacctccttcctcccactctcc

SEQ ID NO: 845673 - DNA, 120 bp, Artificial Sequence
  ENSG00000249642_48 (sequence is synthesized)
atgtatacaaacactccaattgatactttctcttatattattatttaaactattttctttctgactctgcgttctatcttctgtcttgactttattcacccaagatgaccaaaaagacaa

SEQ ID NO: 845674 - DNA, 120 bp, Artificial Sequence
  ENSG00000266830_0 (sequence is synthesized)
ccatccccatttcacccccagggagctggacagacagggtagggagtcgaactcacctgggggcagcagcatgggaagaccccactctgagaaggccagcgtgtcctctttgtctctttc

SEQ ID NO: 845675 - DNA, 120 bp, Artificial Sequence
  ENSG00000266830_1 (sequence is synthesized)
tccatacctggaagcactgtgcccaggtgccagcccaccggtttcatatccgcctgtaggcaccctcttgcccagggcacatgggcccaggcctggtcagcacagatgctctgtttcccc

SEQ ID NO: 845676 - DNA, 120 bp, Artificial Sequence
  ENSG00000266830_2 (sequence is synthesized)
aagagtggcctggaaggggctgggactggggctggagatggggcttgggctggggatagggtgtggccaggaatgtggagtgggcccagggtcccaggggctgggatctctctccttgtc

SEQ ID NO: 845677 - DNA, 120 bp, Artificial Sequence
  ENSG00000266830_3 (sequence is synthesized)
catggcacatgcctaggcttggtcagcatgttgatgtatctacggagctcagctgtgtactgggccatctgctccggtgtggtattgtcccctgggtacaatggctccaacggggctccc

SEQ ID NO: 845678 - DNA, 120 bp, Artificial Sequence
  ENSG00000266830_4 (sequence is synthesized)
cgggcacccagcagtggctacagcaacagagccacacaggtggacaggagcaggagggagaggcagcggcatgcggcagccatctgaggagctagcagaggggaggtggaggtggaggtg

SEQ ID NO: 845679 - DNA, 120 bp, Artificial Sequence
  ENSG00000266830_5 (sequence is synthesized)
gaagagcccatgctgaagattttcctatgccccggaagcagggcccatctacccagccgtttagcccatcatccatttctccaagcctggggacgagagggcagagaaaagggccactcc

SEQ ID NO: 845680 - DNA, 120 bp, Artificial Sequence
  ENSG00000266830_6 (sequence is synthesized)
gacatgagtcctggagacacatgtctcatgacatccaggtcctcatggctctgaggcagcagtagctagtgggaaataagggcacaccaggtcacccacagggtgtgggacatggaatga

SEQ ID NO: 845681 - DNA, 120 bp, Artificial Sequence
  ENSG00000266830_7 (sequence is synthesized)
actggggaagcaaaggacagaaatccatggtcttgtgggtctggccctccacccaacagtagagacagatatgggttctggagaagacatcctgcacagaccggcacagccactcacaca

SEQ ID NO: 845682 - DNA, 120 bp, Artificial Sequence
  ENSG00000266830_8 (sequence is synthesized)
gggacacattccagttcacagccatgcacacgagtgtgcacacacacttgcagtcatctgatggctctcctagtgtgacaggtgtgtccagatgcagagcaatacccaagcaggacctta

SEQ ID NO: 845683 - DNA, 120 bp, Artificial Sequence
  ENSG00000266830_9 (sequence is synthesized)
gggctttgaaggcccctggccctgcaaagcacgaactccttccctccatcccagaccccagcctgggggagttctccagatccccaagcaggctgagcccacttacccagagtccagagt

SEQ ID NO: 845684 - DNA, 120 bp, Artificial Sequence
  ENSG00000266830_10 (sequence is synthesized)
aaacggtcactggaccaagcaaggacgtgtccctgccctcagctgggccgctttttcagtcctcagtcccctagagtccccgtctcctgtcagcctctcccactccgcagcccttactcc

SEQ ID NO: 845685 - DNA, 120 bp, Artificial Sequence
  ENSG00000266830_11 (sequence is synthesized)
ctcctcccactgtctccctggtactcgcaacgccactactgggccagagatgggagggggacgggagtgctgggggtgccagactagcagcatagtcaataaaactggatcacagcaaaa

SEQ ID NO: 845686 - DNA, 120 bp, Artificial Sequence
  ENSG00000229805_0 (sequence is synthesized)
aatacaggagaccttgcaaagcagtgtttgatagatcccatttggtggggtagaaatatcactcttagctaagaaccacaaaccattttcagaattcataaatggaaaagttctttcaag

SEQ ID NO: 845687 - DNA, 120 bp, Artificial Sequence
  ENSG00000229805_1 (sequence is synthesized)
aacaatatgaagaatattcctaatccagtggctccacatgcaaactttgcctcctgaccacccaaggcatcattttagtcaactacatctccttctggagcctaactttagaaaatgctt

SEQ ID NO: 845688 - DNA, 120 bp, Artificial Sequence
  ENSG00000229805_2 (sequence is synthesized)
tttccagtaaaagctcctatttgacaaaggcgaaactccttggccccacctggtggttgctgaatccagcaaattcaccttttgcatttaagaccctatcagaagctgtactttgtcctt

SEQ ID NO: 845689 - DNA, 120 bp, Artificial Sequence
  ENSG00000229805_3 (sequence is synthesized)
tgacatctatggagttatagacattgaatctccttcgatgatgaagtgaggtctcattccaagtgcttaagataatgaaacctgtatgaggacagatgatgcaacatcagcaatttttgc

SEQ ID NO: 845690 - DNA, 120 bp, Artificial Sequence
  ENSG00000229805_4 (sequence is synthesized)
agtgctatgaatttcaggtggcgtcttaattcgaagtaggttacaagataaaatacgtgaaaaagatactccaaatttaaaacaggactttcatgcaataagcataaatgcttcctctct

SEQ ID NO: 845691 - DNA, 120 bp, Artificial Sequence
  ENSG00000224832_0 (sequence is synthesized)
cctgaggctctcactagaagcagatgctggtgctatgcctcttgtatggcctgaataactggtcacagatataaagagtttgccttgagtctcagatgaaactttgaatattggacattt

SEQ ID NO: 845692 - DNA, 120 bp, Artificial Sequence
  ENSG00000224832_1 (sequence is synthesized)
gagttgatgctggaacaagttaagagttttgaagactatgggatagaatgactatattcaacactgaaagaacgaagacaatggctcttccagaggaagaaagattatcctgtcctggct

SEQ ID NO: 845693 - DNA, 120 bp, Artificial Sequence
  ENSG00000224832_2 (sequence is synthesized)
atcttgtctattaccaacattccaggatgaagaaatatggtgatacactcaggccactggaatggcctccagtacagcagtgaataccagtggaatgcaacttcttttgctttagaagac

SEQ ID NO: 845694 - DNA, 120 bp, Artificial Sequence
  ENSG00000224832_3 (sequence is synthesized)
aagctcttagcaatgtcaagtttccaggtagccctctgcttttgatcactaggtttttcttttccatctctgtatttccttggtagaagggacagtatgaacaaagctggaattcaatct

SEQ ID NO: 845695 - DNA, 120 bp, Artificial Sequence
  ENSG00000224832_4 (sequence is synthesized)
attactaaccataaaataattgtcaggaaaacccaaccttcctattgacagttttaccaaagcatcaaaaataaatttgtttccaataaagtgcttgatccttatgcatacatgcagggc

SEQ ID NO: 845696 - DNA, 120 bp, Artificial Sequence
  ENSG00000224832_5 (sequence is synthesized)
aactactgaatctccaatcagtgaccatgaataatacttttgttttttggccttgaacctattgcatatgttctagccacttcctcttcctggggaaacattgattttcttatgaaaaac

SEQ ID NO: 845697 - DNA, 120 bp, Artificial Sequence
  ENSG00000224832_6 (sequence is synthesized)
agctctccaatcaggaaatggtatgtgccttattaagaaatactttgatctgaatgtttgtgacccctctaaatttatgggttggaatcctaacccccaaggtgatgtattagaagatgg

SEQ ID NO: 845698 - DNA, 120 bp, Artificial Sequence
  ENSG00000224832_7 (sequence is synthesized)
agatttgggggacatgatttggtaatgaggatgtaaccctcatgaatagaattagtatccttataaatgaggaaccagagaactaccttgtccctttcactatatgaggacacagctaga

SEQ ID NO: 845699 - DNA, 120 bp, Artificial Sequence
  ENSG00000224832_8 (sequence is synthesized)
ggacaccttctatgaatccggaaatggatcctcaacgagacacttcatcagcagatgccttatcttggacttcccagcctccagaattataacaaataaatttctgttgtttataagcta

SEQ ID NO: 845700 - DNA, 120 bp, Artificial Sequence
  ENSG00000224832_9 (sequence is synthesized)
ggccatttctcatggaaaatcaggaaaagagaatgaaacattaattttcatgttgagttattacagacatcagcagtatggaccaagcacccatgagataacgagtcctgaactgggcac

SEQ ID NO: 845701 - DNA, 120 bp, Artificial Sequence
  ENSG00000224832_10 (sequence is synthesized)
ttataatttccactaagatgggaaacatttcctaggggttatttctctttgacagcagagaagtatccaagttattctagataataaagcaaagttttcctcaagtcctgtattatatga

SEQ ID NO: 845702 - DNA, 120 bp, Artificial Sequence
  ENSG00000224832_11 (sequence is synthesized)
gactgctgtttctgaaaattatagtcccacagcaacctacgaagtttagagatcaatatttgatttttctatcttgctaaatattcttcaaatcaagtattagttgtccctgtcactcag

SEQ ID NO: 845703 - DNA, 120 bp, Artificial Sequence
  ENSG00000224832_12 (sequence is synthesized)
catgaagaaaaactgtgttaaagaggacctggagaagtaaactgactactgacttaccagactccagaactataacaagtaaatttctgttgtttataagctacccagattatcgggttt

SEQ ID NO: 845704 - DNA, 120 bp, Artificial Sequence
  ENSG00000224832_13 (sequence is synthesized)
tgttttagcagcccaggtggactaaggcaagggttctttttgctttttccatatatttgtgtttgtgtatatgtatatgtgagatagaaaaaaagaatttgttatgattcatcacagagt

SEQ ID NO: 845705 - DNA, 120 bp, Artificial Sequence
  ENSG00000224832_14 (sequence is synthesized)
aactcttcctagaggacacctgttctggcaggtgagaaactgatagcgatgtgctgcactgagaagataaatgtaaccagcatactcagtagcatcttcatatacttcttttggaggaag

SEQ ID NO: 845706 - DNA, 120 bp, Artificial Sequence
  ENSG00000269984_0 (sequence is synthesized)
cacagtgagactctgtctcagaaaaaaaaaagaaaaaagtacgaatgtaaacgtaccaataggtgctcatactttacaaccaggcagaggacatgcaaaataaaggtaactgtagaagct

SEQ ID NO: 845707 - DNA, 120 bp, Artificial Sequence
  ENSG00000269984_1 (sequence is synthesized)
tagggaacactgtatgtgtaattccaatgaacatgttcagaagtcaacagagtctagaagtatgtaatgagaagtgttggcaatatctgaaaattggcctgaattgtaattacattttct

SEQ ID NO: 845708 - DNA, 120 bp, Artificial Sequence
  ENSG00000269984_2 (sequence is synthesized)
ctttatcagttttaatgtctttgtctctgttaaatacttggtaagctagaatcaacatacttatttggagggaaaatggtataaggagttgatgcattagggcttaaacagccattaaat

SEQ ID NO: 845709 - DNA, 120 bp, Artificial Sequence
  ENSG00000269984_3 (sequence is synthesized)
acttggttacaattacaaataaattttcaacagtttaacactgttaaatactttgatgaatagaaaaatataccaaattctggtcacaagtagtgtgtgctaagtactctctataaaaat

SEQ ID NO: 845710 - DNA, 120 bp, Artificial Sequence
  ENSG00000269984_4 (sequence is synthesized)
acactatattagtcacagtataaaaataatatctccccacacacccgtctcacctgtatgagttcttacatgcgttttcagctggttacattgggtaaatgcctttccacataagtggca

SEQ ID NO: 845711 - DNA, 120 bp, Artificial Sequence
  ENSG00000269984_5 (sequence is synthesized)
gacgtaaggtttgactcctttatgtattctcatgtgccttctcaaactgctggcttctgaaaacactttcccacatgtgttacacattggcttggccttggaatacctctgatccagctc

SEQ ID NO: 845712 - DNA, 120 bp, Artificial Sequence
  ENSG00000269984_6 (sequence is synthesized)
ttccccggagttctccgcctcataaggactcttgacgctggctatattagacatagagtgttctttcagagcacagtttggctgtgattttccacgtttccgtttcactgtaacagtgtg

SEQ ID NO: 845713 - DNA, 120 bp, Artificial Sequence
  ENSG00000269984_7 (sequence is synthesized)
cacaatatcttgtgctggaaaagtattttccacaactgatgtcaactcgagttctgaattatcatttatttgtgcaacttgttctactacaggtgtgggcagtttatttgcatctaggaa

SEQ ID NO: 845714 - DNA, 120 bp, Artificial Sequence
  ENSG00000269984_8 (sequence is synthesized)
taattcaacagatgcattctctaagatgtcactgggatattgcactgttttattctgccctgttttcggggagttgaaagccttcttcttctttttcgtttgagatgactttttcgctaa

SEQ ID NO: 845715 - DNA, 120 bp, Artificial Sequence
  ENSG00000269984_9 (sequence is synthesized)
cgcgccttgtttaggatttgcctgaatcaaatctgtagatacttctgatttctctcgattattataatctcgcagagtaagaagacaagtctgttgattcaattcaatgtttccagtaat

SEQ ID NO: 845716 - DNA, 120 bp, Artificial Sequence
  ENSG00000269984_10 (sequence is synthesized)
actagatatctctgtagaagaaggattagcaataaaagcaaaatcttccatctttattttgcatttagtgaccacctcttccactttgagatagtcagcagcctgatgaatttctttaac

SEQ ID NO: 845717 - DNA, 120 bp, Artificial Sequence
  ENSG00000269984_11 (sequence is synthesized)
ctacatgacaatattctgatcaaagaaaaactttcgaaacagagctgcatatatacttcaatgtattttaaagacctaatgaagcagaatgctgaaaaagacataactaagagaaaaata

SEQ ID NO: 845718 - DNA, 120 bp, Artificial Sequence
  ENSG00000269984_12 (sequence is synthesized)
gatttataaattcattcagaataatgtttaggtaaaaaatctccaattttacagaacttcaagagatgaaagataatggctattcacagctgacagtgaaccactgcagaaaaattaaat

SEQ ID NO: 845719 - DNA, 120 bp, Artificial Sequence
  ENSG00000269984_13 (sequence is synthesized)
gttaaattttctggctttttttttaaaaccctagaacacaaaaatagctgatggtaactcactacctcctccattcatcctgaggcttcttcagatagcaaccaacttttctggattggc

SEQ ID NO: 845720 - DNA, 120 bp, Artificial Sequence
  ENSG00000269984_14 (sequence is synthesized)
aagagggaaagtctaatgacacttgtttcctactattttctcctgctcccctgtgagggactttaattatgtttcccaaactttgctgtgcatgtgaatcacccgggaatcttgttaaat

SEQ ID NO: 845721 - DNA, 120 bp, Artificial Sequence
  ENSG00000269984_15 (sequence is synthesized)
gtagattcaaattcagtaggtctgtgatggggcctgagattctgcattttttttctgttttgagatggggtattcttctgttgcccaagcaggagtgcactggtataatgataactcacc

SEQ ID NO: 845722 - DNA, 120 bp, Artificial Sequence
  ENSG00000269984_16 (sequence is synthesized)
gcagccttcaactcctgggctcctgcgtcagcttcccaagtaagtgggactacaagcatgtgctaccatgcctggctattttttttgtagaggcagggtcttgctatgctgcccaggctg

SEQ ID NO: 845723 - DNA, 85 bp, Artificial Sequence
  ENSG00000269984_17 (sequence is synthesized)
agcacagcctgcatttcttaatacacttcctggtgatgccaatgttgcttagaggaatccacttagaggaacaaggttttagaat

SEQ ID NO: 845724 - DNA, 120 bp, Artificial Sequence
  ENSG00000269984_18 (sequence is synthesized)
tgcttagaggaatccacttagaggaacaaggttttagaatgttaaactctctctagcaaccctcccaccttttttggtgatactcaacccaaattagctggagtgttcgtgatgtgagag

SEQ ID NO: 845725 - DNA, 120 bp, Artificial Sequence
  ENSG00000269984_19 (sequence is synthesized)
ttacaaagaaagacttaagccaccttgttcaatattctagtcaaatgtttactaagcatctaccatgtgtggtactaagatattaataagtaaatagtctctgcccttcagaagttcaca

SEQ ID NO: 845726 - DNA, 120 bp, Artificial Sequence
  ENSG00000269984_20 (sequence is synthesized)
atgtggtgaaaggttgtttgattaatctagcactggctctggcattactggctgacttaattagggtaagtcagcatctttggggggttcaactttcttagctgtaaaattagagttgag

SEQ ID NO: 845727 - DNA, 120 bp, Artificial Sequence
  ENSG00000269984_21 (sequence is synthesized)
ttggtgttaacactaaaaacatgactgttataagtatttgaggatggaaacacacacacacacacacacaccccttaccctcaaataatcttcctacttgatttttttccctaaatatgg

SEQ ID NO: 845728 - DNA, 120 bp, Artificial Sequence
  ENSG00000269984_22 (sequence is synthesized)
tttatctttgggaagatgatctctttccctctctgttgtaagtataagccagaaaagggttttaatcatagctgacaatgtaaatatagtgctggtgatactattttaaaggactaaaat

SEQ ID NO: 845729 - DNA, 120 bp, Artificial Sequence
  ENSG00000269984_23 (sequence is synthesized)
ttgaaataaaataaaaaataactagtgtcatgaacctctaagatctctaaaagtatgctacagtatctacaaatctctacccatgttctcatcatcttctaattaaacttgctttgcctc

SEQ ID NO: 845730 - DNA, 120 bp, Artificial Sequence
  ENSG00000233128_0 (sequence is synthesized)
gttgaacagctgctctgcaagctcccaccctgtggagtgtactttgatcttcaataaatctttgctttcattgcttcattctttcattgctttgctgtgcattctgtccaattctttgtt

SEQ ID NO: 845731 - DNA, 120 bp, Artificial Sequence
  ENSG00000233128_1 (sequence is synthesized)
caaaatgccaagaacctggacaatttgcagtcaagaccctccaccgggatatgaacttccaattatatcattggacttgactactccatttctttccacatttaaaaatcaatcagggag

SEQ ID NO: 845732 - DNA, 120 bp, Artificial Sequence
  ENSG00000233128_2 (sequence is synthesized)
aaggcactctctcaccaagtgagtggttggagcaagacagtgtctcgagattgaaacagaacacgatggagctggaagttatagttctgagatcatcaggaatcagagtcaaatcattaa

SEQ ID NO: 845733 - DNA, 120 bp, Artificial Sequence
  ENSG00000233128_3 (sequence is synthesized)
ctagtgattatatgccacacaagaaatcctctctgggttagaaatcttaaaataagaggctgttatatacatttgtcgagataaaattattgattagtatttataagactttgatttcat

SEQ ID NO: 845734 - DNA, 120 bp, Artificial Sequence
  ENSG00000233128_4 (sequence is synthesized)
tatggatgaataaggcaaaggagttactgaatgtctggacttcagcgaattaagacactgagactttctcgctattgaagctaccttgaaacaataaacactaaatacctagttggtttg

SEQ ID NO: 845735 - DNA, 120 bp, Artificial Sequence
  ENSG00000233128_5 (sequence is synthesized)
ccaaaagcataaaatgttacttttcgtatttgattttctttcccaaatctataatataatccagaatttgtacacatatttttttcctgataattaaacgtgtagacaatgggaatataa

SEQ ID NO: 845736 - DNA, 120 bp, Artificial Sequence
  ENSG00000233124_0 (sequence is synthesized)
aggattcccagtggcagaaggcaacagacaggtccattgtgagtacattgagctcaatatggctaatccaagataatcttcagatctcaagattcctaactgcagctgcaaagtcccttt

SEQ ID NO: 845737 - DNA, 120 bp, Artificial Sequence
  ENSG00000233124_1 (sequence is synthesized)
ttccatgtaaggtaacatattctcaggttccaggaattgggatgtggacatctttgggagagtgattattcagcctcctggaggaatgtaaaggcattctggaaaaacctgattctcatt

SEQ ID NO: 845738 - DNA, 120 bp, Artificial Sequence
  ENSG00000233124_2 (sequence is synthesized)
ccaagcctccactctgtgctaaacactcttctgtgcaaaataggaagcaccaaagaagaaaactctgccttcactgagctctggaagaggtggaagagatgggagacttacagttacatg

SEQ ID NO: 845739 - DNA, 120 bp, Artificial Sequence
  ENSG00000233124_3 (sequence is synthesized)
ctgaccttttcagtcatttggaggcctcatgttctaggctcttaactgatggtgatgaagccaccaacaggtgtgaaaggtgtcctcttatttacacactattcctttgaatagtgtgat

SEQ ID NO: 845740 - DNA, 120 bp, Artificial Sequence
  ENSG00000233124_4 (sequence is synthesized)
taagttttcattcttacagttctatgctacgaccaatttgataaaagattctcatttaaccatgctgtcttcatatatgtaagcttccttgatatctaaagagtgtgagctcctgagcca

SEQ ID NO: 845741 - DNA, 120 bp, Artificial Sequence
  ENSG00000233124_5 (sequence is synthesized)
agtccagtggaaaatttgcagtctcttctaggattagatgaagacccaagaattcatcttgctacagtgcgacaagacttgtcacagatagcttggatttatgggtgctcttccacagca

SEQ ID NO: 845742 - DNA, 120 bp, Artificial Sequence
  ENSG00000233124_6 (sequence is synthesized)
gaaatcgtttcaccttttcaggtgacctttacagaatcataaaatcaatcagttttatttgacatccaaatcagaatgctgccctaaatagattgctagcactttacctggagaacaaaa

SEQ ID NO: 845743 - DNA, 120 bp, Artificial Sequence
  ENSG00000233124_7 (sequence is synthesized)
tagaggaaataggaatgtgcccagggctaggtggaagacagccccggaacaagagtgctactatttaaagtccacacacaggactcagtgaacagagctccttaagcactctgtggctgg

SEQ ID NO: 845744 - DNA, 120 bp, Artificial Sequence
  ENSG00000233124_8 (sequence is synthesized)
ggtcaccctggttacctctgctccactgcccgtgatcctggtggataccacaaaaacaagctcttcaccctcatcttgaaatggactaatgaaaataaagtggcagacctgtattagtcc

SEQ ID NO: 845745 - DNA, 77 bp, Artificial Sequence
  ENSG00000233124_9 (sequence is synthesized)
atggactaatgaaaataaagtggcagacctgtattagtccgttttcactctgctgataaagacatatccaggactgg

SEQ ID NO: 845746 - DNA, 120 bp, Artificial Sequence
  ENSG00000233124_10 (sequence is synthesized)
ggcacatcttacatagcagcaggcaaagagagaatgagagccgagcaaaaagagtttccccttattaaaccatcaatctcatgtgacttattcgctaccatgagaagagactggggaaac

SEQ ID NO: 845747 - DNA, 60 bp, Artificial Sequence
  ENSG00000233124_11 (sequence is synthesized)
ccagaatgaattttacataggtccatcctcctttctatcctgtttgacttgctgactgca

SEQ ID NO: 845748 - DNA, 120 bp, Artificial Sequence
  ENSG00000233124_12 (sequence is synthesized)
gtccatcctcctttctatcctgtttgacttgctgactgcaggaatctaggtagacttggttgggaaaaggggcataattctaaatgtattccctgtaggcagatggcatatatttggctt

SEQ ID NO: 845749 - DNA, 120 bp, Artificial Sequence
  ENSG00000233124_13 (sequence is synthesized)
ggtttcaactctaaatgatttatgtaatgaggatatcaagaaaagtgtatgaagtatgacagtgtgtgttgtatattgtatgtacacatgaatatatttaggtagcttcaaaaaaatttt

SEQ ID NO: 845750 - DNA, 120 bp, Artificial Sequence
  ENSG00000233124_14 (sequence is synthesized)
tttacagctctaatgattttgcaaaactgtcttcaaaggaatttaataagctgagaaaccaatataatatagtagttgccagcaaagattctggcactgtcagctttcaaattccagttc

SEQ ID NO: 845751 - DNA, 120 bp, Artificial Sequence
  ENSG00000233124_15 (sequence is synthesized)
tataacttacaaatggtgtggcttttggcaagatccctaacgactctatgcctctatagttatgtttccttaacaataatagcacttgccttatatatgagaattacatgagataacgta

SEQ ID NO: 845752 - DNA, 120 bp, Artificial Sequence
  ENSG00000233124_16 (sequence is synthesized)
taagctccaataatttctggcttataggaagtgttatatatgaactactattacacttaagtgggcatagttgaactctggagaaagagctagggttgaagtggggagacagtcctgtgc

SEQ ID NO: 845753 - DNA, 120 bp, Artificial Sequence
  ENSG00000233124_17 (sequence is synthesized)
aaactgtgagatcagaccaacctacatttgaattccagtacttccactgtacaactttgggtgagttacttactcagtataaaactgcctttgcaaaaattatgtcagtgagaaaattat

SEQ ID NO: 845754 - DNA, 120 bp, Artificial Sequence
  ENSG00000233124_18 (sequence is synthesized)
atgtttatagtttaaatgataataagccttctcaaaaacttaaccacctatgtaaagctaataagagaccaccaggctagggagaggagaggagcctgaattctgctaaactgtagacat

SEQ ID NO: 845755 - DNA, 120 bp, Artificial Sequence
  ENSG00000233124_19 (sequence is synthesized)
gaacaattgccagccattattccagaggtcctgcagataacatcactattgtagaacctgagattggccttttgagaatttttttctcagattttttgcatgtctgatacccatggctcc

SEQ ID NO: 845756 - DNA, 120 bp, Artificial Sequence
  ENSG00000233124_20 (sequence is synthesized)
acctggatccaccaaccagtggcttctgtgcccccacccagaagcaactgagtgcaagagaacagcttcagctcctatgatttcacctccaacccaaccaatcagcagcaagcacccact

SEQ ID NO: 845757 - DNA, 120 bp, Artificial Sequence
  ENSG00000233124_21 (sequence is synthesized)
gcctagccacccccaaacttcctttgtaaaatccctaacctacgagctttccatgatattgatttgagtaataagtctatatccctgcgtggtgtggctggattcatgtcaattaaactc

SEQ ID NO: 845758 - DNA, 120 bp, Artificial Sequence
  ENSG00000233124_22 (sequence is synthesized)
tctctacagcaatgctgtcatctttgtttgtgcaactggcagggaaactaattgggcagttacaagtatgggatacttatgttccataattattactaagagttttaaatgagatagcac

SEQ ID NO: 845759 - DNA, 120 bp, Artificial Sequence
  ENSG00000233124_23 (sequence is synthesized)
atgtgaagcacttagcaaaatgactggttcacagttaataataaatgggagtggtaattatcagtatcattcacacatatacacatgctttacatataatcacaagcttacatataattc

SEQ ID NO: 845760 - DNA, 120 bp, Artificial Sequence
  ENSG00000233124_24 (sequence is synthesized)
ttgtctttcagcatgtagaatttaagatgaactcaggcaagtaaggaaattgacattctagtcacaaaaaactgaaaggggtcaatgtaaccctatgaagtgcagtgtcagaatgaccag

SEQ ID NO: 845761 - DNA, 120 bp, Artificial Sequence
  ENSG00000233124_25 (sequence is synthesized)
aattaccactgttaagatgataataatttcagtcatgcagtaaggtgatggttgtttggatgaagtcacaatgtaagtaaaggatgacgagatccttttttattagcaactggatctttt

SEQ ID NO: 845762 - DNA, 120 bp, Artificial Sequence
  ENSG00000233124_26 (sequence is synthesized)
tcccaaaatgcactaaattgaagccatcacatttggattaaagtcaagaaatcaagtgcagcattgtgagttccatgacgaagggccacatcaagcattgtggcagcattgtagggaaat

SEQ ID NO: 845763 - DNA, 120 bp, Artificial Sequence
  ENSG00000233124_27 (sequence is synthesized)
aacctcccaggaaaccacctcatcatcagttaaataaaatgatggagctccttttaagcatacatattagacaaggtttggaaagattggcacagtcataaatggaagggcaggctgcaa

SEQ ID NO: 845764 - DNA, 120 bp, Artificial Sequence
  ENSG00000233124_28 (sequence is synthesized)
gagtagtgtatacttttcaacttgaccttctcacccatacaaccataagccctgggaaggaggaagatcttcaaatgcgaaagactattatgtggtcatttctgaattcatgatgccatt

SEQ ID NO: 845765 - DNA, 120 bp, Artificial Sequence
  ENSG00000233124_29 (sequence is synthesized)
tagaaacacaaaacgctttcagaataaaacatttggcttcagccagcttgagttttctcagaaaactatgagatcagagaaatcttgcttttgtgaaatttccaaccaatctgcctctgg

SEQ ID NO: 845766 - DNA, 120 bp, Artificial Sequence
  ENSG00000233124_30 (sequence is synthesized)
ttggggacacatggaggaagtattcgaaaactgatagatagaaattaaaccatccatttttcaagcccttcttgtcaccactctatgtctggtgtccagcagagtgtctgaaacactatt

SEQ ID NO: 845767 - DNA, 120 bp, Artificial Sequence
  ENSG00000233124_31 (sequence is synthesized)
gcattatttggtttttcaatccactcttggaggatctgaatgtaagaaaatggaaccacctgagttgattagccccttcgtttcatttgacaaagtagtgtccagtaagaactacaagaa

SEQ ID NO: 845768 - DNA, 120 bp, Artificial Sequence
  ENSG00000233124_32 (sequence is synthesized)
cagagtaatcaagtaagagttaccccagattatggagtattcagcaatctgacttggatacatcaataagaagttattggtccctaaaatggctgttgacagggaggctgtgtagagggc

SEQ ID NO: 845769 - DNA, 120 bp, Artificial Sequence
  ENSG00000233124_33 (sequence is synthesized)
atctctgagcacaccctgtacatttctgaaagaaatccagaaatgagaagccatgcgacaaaggggggagtagacgacctttgcccacaaaggacacagctgcaggtctaggctccagca

SEQ ID NO: 845770 - DNA, 120 bp, Artificial Sequence
  ENSG00000233124_34 (sequence is synthesized)
ctttctgtctttggtgatttgggacaccttctgtaacctgtctaaatttcagatacctcctatgtaacatggtgagaatagtaaaaggtccccaagaggcttctgagagatcagatgaga

SEQ ID NO: 845771 - DNA, 120 bp, Artificial Sequence
  ENSG00000233124_35 (sequence is synthesized)
caaggcatgagaaagcactttgtaaattgctgaagtgccacagaaatgttattaaatttactgtttctgtaaaacatgacttggcagtccttgaaaaaacactgcaccatattctgttct

SEQ ID NO: 845772 - DNA, 120 bp, Artificial Sequence
  ENSG00000233124_36 (sequence is synthesized)
acatgtcagcaggtcaggaagcaagcaagcctggaatttaagtccagggaagcagggagaaagcactttgctaaggaatcagcccagaagacagtccagacaggaacctaggttaaggaa

SEQ ID NO: 845773 - DNA, 120 bp, Artificial Sequence
  ENSG00000233124_37 (sequence is synthesized)
gtgcaatgggaagaccacccccgactctgatgccacccaggaaatgagtttgctgtggcctaacagttgttttctgagtatattttcatgtcaaatagcaaaagtagaacttttggagga

SEQ ID NO: 845774 - DNA, 120 bp, Artificial Sequence
  ENSG00000233123_0 (sequence is synthesized)
cagaaatgacagcatcactcgcatggagactcctccatctctgtcttccctgttgtgacagtctcagagcctacgttctttcaatggctgggctacaagatggtgacaggctgcccaacc

SEQ ID NO: 845775 - DNA, 120 bp, Artificial Sequence
  ENSG00000233123_1 (sequence is synthesized)
tgacacagcaagaaggcggccatctgcaaaccagaaagagagccctcaccaggaaccggatctgctggcaccttgatcttggacttcctatcctttagagctgtgagaaatgtcgccccc

SEQ ID NO: 845776 - DNA, 120 bp, Artificial Sequence
  ENSG00000233123_2 (sequence is synthesized)
tcaccgccaaccgcctgtgtgaccttgaggaagctatgtaacctctctggggctcagctgactcaccccaaaatgagagaggtggctgtgacgttaaaggaggtgacatgtttcactgtt

SEQ ID NO: 845777 - DNA, 120 bp, Artificial Sequence
  ENSG00000233123_3 (sequence is synthesized)
tagcactggatctgtcctcaccatattaaggaccaactcacacccagccccttgggggagaccttctccctcagctctgtctcagaccttctctgggacccacagtatctgctaccctgg

SEQ ID NO: 845778 - DNA, 120 bp, Artificial Sequence
  ENSG00000233123_4 (sequence is synthesized)
caatgaaggtgcttgacacccagtttgaatattgtgtcactgcaaagctgactgctgttgaaggatagccagtgagaggtcatggcaagccatcagaagaagcagaagtcatgagcatgc

SEQ ID NO: 845779 - DNA, 120 bp, Artificial Sequence
  ENSG00000233123_5 (sequence is synthesized)
tgaagctatgaggccaagacaaaatgtcacattgccacaagaagagggacaaacaggcaacaggcagagcccatgggaatcagtaatctcctgctgacactgaggccttgggactaactc

SEQ ID NO: 845780 - DNA, 120 bp, Artificial Sequence
  ENSG00000233123_6 (sequence is synthesized)
agatccagtactactctcttgggacctgttctgactccagctcctgtccttggggtccactgagatccctgtagccttgtaataagcccacattatcatatttcccctgccggctccacc

SEQ ID NO: 845781 - DNA, 120 bp, Artificial Sequence
  ENSG00000233123_7 (sequence is synthesized)
cactgggcctttgcacgtgctcgtgcctccccaacttgccctgccttctccttcacccagacaactcctactaaatctctcagactcctcagctgtgtcccttcctaggggaggactctc

SEQ ID NO: 845782 - DNA, 120 bp, Artificial Sequence
  ENSG00000233123_8 (sequence is synthesized)
ttccctccagtgagcccggtggtcctccctgggatcccctgctccttgtcttccctgccgtccttactgccatccttgttctctactcagaaggaggcagaggctggcctgcccccaatc

SEQ ID NO: 845783 - DNA, 120 bp, Artificial Sequence
  ENSG00000233123_9 (sequence is synthesized)
ccctgtagactgaccagatgaattgacctgggctgggcagggcaggcgtgtttgaccagttgtctgggcaccccatggctcagtcaagttgacacataaagttcaccgccccagggcccc

SEQ ID NO: 845784 - DNA, 120 bp, Artificial Sequence
  ENSG00000233123_10 (sequence is synthesized)
ttcgttgtatttgtgtatgaataaaacacagcatccactccaggtatctgagggtcctggaggcaggttttgtgatccctttttacagatgaggatgcggaggtccagttgtcactcacc

SEQ ID NO: 845785 - DNA, 120 bp, Artificial Sequence
  ENSG00000233123_11 (sequence is synthesized)
cagatcacactctcatctgctgatgggaggagtatttgatgggatgtgtgagcccggccgtctcccttgggacacatcagctcattaaatttgccagcccctgcctgaaaaagtatttaa

SEQ ID NO: 845786 - DNA, 120 bp, Artificial Sequence
  ENSG00000233123_12 (sequence is synthesized)
tttgccttttacaatgcacccattgcaagttaattaactggcaattgaaagttataggtggcattagaatttattaataacattgggaataaatctccctggaattcaattaactgaaaa

SEQ ID NO: 845787 - DNA, 120 bp, Artificial Sequence
  ENSG00000233123_13 (sequence is synthesized)
ggtctcactgcacctgttccctaattaagatgcaccttttggttttgtcttttgaaaaaaacaaaatgctccctttatcgccacgaggcaaaagaaaaattaaggccaagatcctttcat

SEQ ID NO: 845788 - DNA, 120 bp, Artificial Sequence
  ENSG00000233123_14 (sequence is synthesized)
gcccaatatgggcctgcccggtggttggagcatgggggatcatgggcagcaagtgagaaagtgcacagtgatttgctgctgttacatcctgagaaactggagggctgtcatcaaagtcct

SEQ ID NO: 845789 - DNA, 120 bp, Artificial Sequence
  ENSG00000233123_15 (sequence is synthesized)
cgaatagctggagagtgggtgtgggatggttacgtttgaaaatgcagctctgatataaaagaaagcaaagactgcactgttttcccagcaagagcctagctggagactctaagcctaaga

SEQ ID NO: 845790 - DNA, 120 bp, Artificial Sequence
  ENSG00000233123_16 (sequence is synthesized)
tagaagcttctgccatcaacaggccacaaaacccatacttcctgctctatgaggcttctgaccttggttccctagaatcctccctccttatcaagtatctgtgtctaggcctaggggaga

SEQ ID NO: 845791 - DNA, 120 bp, Artificial Sequence
  ENSG00000233123_17 (sequence is synthesized)
ccagaccgaggtctgtccttgtctgcctacaaggacaaggcattctactgctgtagaccacttgtttatgtgcccctaaaatttgtatgttaaagcctgaatccccattgtgatgacatt

SEQ ID NO: 845792 - DNA, 120 bp, Artificial Sequence
  ENSG00000233123_18 (sequence is synthesized)
tggaggtggggccatcgaaaggtgattaggtttatatgagttcatgagggtggggccctcataatggtattaatgtccttataagaagagacacaacagagcttgcttcctctctctctc

SEQ ID NO: 845793 - DNA, 120 bp, Artificial Sequence
  ENSG00000238279_0 (sequence is synthesized)
ccccacccagtggggacagaagacaacttaattccacaaagttggacccccaagggaagtggggaggtgagagggaaagaaggatgtggtctccatctaaagtcaagatctcttccccag

SEQ ID NO: 845794 - DNA, 120 bp, Artificial Sequence
  ENSG00000238279_1 (sequence is synthesized)
aagctagaggtaaacttgcccagctcggactaggcctagagaggctgaatgatgtggcatcacccggaaacagcgtttaccctccttatcctcttcccttctgcctgaaaacactaatcc

SEQ ID NO: 845795 - DNA, 120 bp, Artificial Sequence
  ENSG00000238279_2 (sequence is synthesized)
ccaggctgggatcccgtggaagtgccgggcaatcctctctgcaagtggctctgtgctccctcatcaccaaggacccatgtcactttggcattgcttctcctcagctacttctcagttact

SEQ ID NO: 845796 - DNA, 120 bp, Artificial Sequence
  ENSG00000238279_3 (sequence is synthesized)
ggtcctcatttggagagatggatatccggctggaagcatcccctacccgctgggagagtgggtctacagctcagggtctacatgtggaccagggcctcagaatgtgggtaaatgtgagtc

SEQ ID NO: 845797 - DNA, 120 bp, Artificial Sequence
  ENSG00000203739_0 (sequence is synthesized)
cctctcttggtcatgtgaggatacaacaagaaggcagcaaactacaacccaggaagcaggtcctcgccagacaggatttaccagtgctttgatcttggacttccagtctccagaaatttt

SEQ ID NO: 845798 - DNA, 120 bp, Artificial Sequence
  ENSG00000203739_1 (sequence is synthesized)
accaggctgttactcaaaattcactctccagccctgctttggagcagttgggaacttcagcattttgatccacctttttggagccacctcatgtgaaagatggatgagaccttcgtcagc

SEQ ID NO: 845799 - DNA, 120 bp, Artificial Sequence
  ENSG00000203739_2 (sequence is synthesized)
aaacctgtctacgtaggagctggtatgaggatcacacaatgcaagcaaataaaatgagaaaagatgattcaacaagaggcttcactgatttactgtttaactgctttgaccaaagtgctt

SEQ ID NO: 845800 - DNA, 120 bp, Artificial Sequence
  ENSG00000203739_3 (sequence is synthesized)
ggttcttatatgaataagaaaggggatgagttatccaccagaatgaaagttatattctggtttgaagcttctgctgtcagataatatagttttctatagtgtggaagaacagcatcatct

SEQ ID NO: 845801 - DNA, 120 bp, Artificial Sequence
  ENSG00000203739_4 (sequence is synthesized)
tcaagcaaggtggaattaagcatggacagaactgtgtttctcacccaggaggaggtatgaaagttttcaagacgcctacaagtggaaaatgcactcctcccagccaaatcaagcttcgcc

SEQ ID NO: 845802 - DNA, 120 bp, Artificial Sequence
  ENSG00000203739_5 (sequence is synthesized)
ctctgctgctggtggaactttcacatatggcactgttatgccactcagcaggacccgaccctggtatttacatattggatgtcaccccaaaagcccctgaccagggggtttccgggatgt

SEQ ID NO: 845803 - DNA, 120 bp, Artificial Sequence
  ENSG00000203739_6 (sequence is synthesized)
aataagaatgccactctgggctttggaaggtgcaccgtatgcacacccatactatagggcaggggttagcatttcagacccctgttcctcccttgacaagcaagtgcttttctccaggga

SEQ ID NO: 845804 - DNA, 120 bp, Artificial Sequence
  ENSG00000203739_7 (sequence is synthesized)
agacgttcaggttcattcatagatccattggtgccgtgggcagctcagtaacaatagctctgctgcctaccagctgctggtggaggtgttgagaatacctaatgaggaagtcagggcccc

SEQ ID NO: 845805 - DNA, 120 bp, Artificial Sequence
  ENSG00000203739_8 (sequence is synthesized)
tgcgtgcttcagcagagctggatgcctggcatggcaatcaatggacacaaacctttggataatttccgtccttggcggtgtgttctatagcataggtatgaagtgggtgctctgggagct

SEQ ID NO: 845806 - DNA, 120 bp, Artificial Sequence
  ENSG00000203739_9 (sequence is synthesized)
gggtgctctgggagctcagaagaggggctcttctcttaacttatgggtggccagggaaggcttcctggagctcaaatgactgagtggagtcttcaacattaaaaaaaaaaaaaagaaaaa

SEQ ID NO: 845807 - DNA, 120 bp, Artificial Sequence
  ENSG00000203739_10 (sequence is synthesized)
cacccccagttaaaaaggtaatacacctcattgaaataatttaaactttacagaaatgtgttcctttaaagttcagagagtaaagaggaagtaataaagctgaaatagtagaatttctaa

SEQ ID NO: 845808 - DNA, 120 bp, Artificial Sequence
  ENSG00000203739_11 (sequence is synthesized)
accctcagatgatacgttggccttcctgtaacctatagccagcagctgtgtcctccgactttggctttagacacccatcctccccagggagcaaattccagaacggagggtgggagggcg

SEQ ID NO: 845809 - DNA, 120 bp, Artificial Sequence
  ENSG00000203739_12 (sequence is synthesized)
gtgcgaccctgggcactagtccggggaagtgatcgtcaatgccgccccgcccctgcgccctcggcctgaccacgctacctgcacagtttactaagacgagttaaatggacaacaaaccct

SEQ ID NO: 845810 - DNA, 120 bp, Artificial Sequence
  ENSG00000203739_13 (sequence is synthesized)
aaaaaaaaacaaaaacaaaaacgaaaaaccaaaaaccgaaaaccaaacaaacaaaaaaacccgagtggattagatttctcagggacattttcattttaaaggcaacaaagaagttttaga

SEQ ID NO: 845811 - DNA, 120 bp, Artificial Sequence
  ENSG00000203739_14 (sequence is synthesized)
attctacagactggatcatttataaagacaagaaatttattgcttatagttctggaggctgggaagtccaagcacatggtgctggcatttggtgaaggccttcttgctgcatcctcacgt

SEQ ID NO: 845812 - DNA, 120 bp, Artificial Sequence
  ENSG00000203739_15 (sequence is synthesized)
ggcagagggcatcacatggcaagtgggcaagagcaggcttgtccgcttgggttactctaactcttcttataaagccaccagccccaccgtgggggccacacactcatggccttatttaat

SEQ ID NO: 845813 - DNA, 120 bp, Artificial Sequence
  ENSG00000203739_16 (sequence is synthesized)
cttaattacctctcaaaggccctacctccaaatgtcatcgatatgtgaatttgggaattaagtttccagcacatgaaatttgggggtcacattcaaaccatagcaatgcttaaccttaga

SEQ ID NO: 845814 - DNA, 120 bp, Artificial Sequence
  ENSG00000203739_17 (sequence is synthesized)
atactgcctggcatctgcccaggcttccacagccactacctctgggacatgttgggatctctgtttacatgtaaggctcgccatgaccattacacatctgtgagtcagtgtagggtcctg

SEQ ID NO: 845815 - DNA, 120 bp, Artificial Sequence
  ENSG00000203739_18 (sequence is synthesized)
cctggtggaagcccggtcttggagtccctccattatgtttgctaccctggctctccaccttcaatttctggcttctcattttggactatgatgattttcttgttgttaattttttttttt

SEQ ID NO: 845816 - DNA, 120 bp, Artificial Sequence
  ENSG00000203739_19 (sequence is synthesized)
acagaactgtgtttctcacccaggaggagggtaggtttttttttcttttttacttcttaaaacttattttaatattattcttccctcccccaccccattgggaaaaggctaaaacaatct

SEQ ID NO: 845817 - DNA, 120 bp, Artificial Sequence
  ENSG00000203739_20 (sequence is synthesized)
ggatgggtttaattagaaattaatacatactgtcattgtataaagtaaatcaacattgtggcaacaagggactattcttggaaaaagtgaaacccatattaacaaaatatgtcatggaag

SEQ ID NO: 845818 - DNA, 120 bp, Artificial Sequence
  ENSG00000203739_21 (sequence is synthesized)
atccccacatagtgatttcactggctgcctgaaagacagacagtgtaaaggtcgatgttctgcatgttctctggggcttgtccatgcaacggaagaaggtctttcccagactcagccaag

SEQ ID NO: 845819 - DNA, 120 bp, Artificial Sequence
  ENSG00000203739_22 (sequence is synthesized)
cctagttagctccaaccaggccctagaccaaaagcaagggaagagcacatcctttcaatagaataagggtagaaagggattctctgaatgtagtaactatgaagctatgccaaaggtagg

SEQ ID NO: 845820 - DNA, 120 bp, Artificial Sequence
  ENSG00000203739_23 (sequence is synthesized)
cagaaaatgggcttgggagccagacactccagggttcagtagttcctacccacagtctttgtgtgcttgctaaatggtgtacatttcttgttaaccacgttattaaaacttgatcagcat

SEQ ID NO: 845821 - DNA, 120 bp, Artificial Sequence
  ENSG00000203739_24 (sequence is synthesized)
agggcgtacgcgctttagggatggaaggaagaggaacgcggcaggaaggcgagccccaaggtggagaatcgcctgggcgcgcaggctgcggcggcttcgcacagccgccctgggcgctgc

SEQ ID NO: 845822 - DNA, 120 bp, Artificial Sequence
  ENSG00000203739_25 (sequence is synthesized)
acgggtccgcgcgcaccctgctgcgcacccactcgcggccagctccctacagaggagtggagtgactgctcgactaccacccctcttttagtgtgagcgtctggagtcctgaccgcccca

SEQ ID NO: 845823 - DNA, 120 bp, Artificial Sequence
  ENSG00000203739_26 (sequence is synthesized)
gccagcccagctacgatgaactgtctaagaggatgtggcaagacccagaagtatgggtgaccttatgtcagaggaagtggctttcttattgcagcaaaaattcccgtaccaatgtcagtg

SEQ ID NO: 845824 - DNA, 120 bp, Artificial Sequence
  ENSG00000203739_27 (sequence is synthesized)
gggctggggccgggacgcggcgcgagctggactaccgcggtcgctgttggtggcgccgccgggcctgcgactaggtggcatccttcagacactataggccgtctctgcacacgtgatgcg

SEQ ID NO: 845825 - DNA, 120 bp, Artificial Sequence
  ENSG00000203739_28 (sequence is synthesized)
agatgctgcagttagctgggggtccactctacaccctggttgcctcagtttttcctgtacttggaggtatcagcagtgaatgctatgaaacagcaaagatggcagcctgccccttcccct

SEQ ID NO: 845826 - DNA, 120 bp, Artificial Sequence
  ENSG00000203739_29 (sequence is synthesized)
ggaagctccatcccagggcggtactgtcctgttgccagcatgagcacacagtatgtagggggtggctggagaccccagttgggacatctcacctagtcaggaggaacgggatcagggatc

SEQ ID NO: 845827 - DNA, 120 bp, Artificial Sequence
  ENSG00000203739_30 (sequence is synthesized)
cacttaaagaagcagttgggctgtttttgatagagcagttgtgctgtgttggggatcccatcagccccttgttggtttgggctctccgaggcccacaggctgaactggctgaggtgccca

SEQ ID NO: 845828 - DNA, 120 bp, Artificial Sequence
  ENSG00000203739_31 (sequence is synthesized)
acagccaagttggtggcccgccttcccctctgggcactctgtcccagggaaaaattagaagtctgttggccacagaacatgggcgggggtggctggataccccagctggcatgatctacc

SEQ ID NO: 845829 - DNA, 120 bp, Artificial Sequence
  ENSG00000203739_32 (sequence is synthesized)
cgtcaaggaaaagtggatcagggtcccacttaaagaagccatctggccatgcctcaatagaacagccttgttgtgctgggaaactgcttctgcccttgttggcttggactctctaaagcc

SEQ ID NO: 845830 - DNA, 120 bp, Artificial Sequence
  ENSG00000203739_33 (sequence is synthesized)
cactggttggaatggctgagtcattcaaacagccagcttggtggccctcctttcctcccctcctcccctcccctcctccttccctcctcgcctcccctcgggcatgctattccagaaaga

SEQ ID NO: 845831 - DNA, 120 bp, Artificial Sequence
  ENSG00000203739_34 (sequence is synthesized)
gatcaggatccgtttgtggaatacaggcagagatggctggaggccccggttgggaggtccctcccagtgaagaggaatggattggggccccacttaaagaagcaacctggccacgttcag

SEQ ID NO: 845832 - DNA, 120 bp, Artificial Sequence
  ENSG00000203739_35 (sequence is synthesized)
tgttctgggaagacccttccttgtttgaaccatatggattctccgaagcccatagactgaaatggctgagtcaaccaaacagtagagatggcagcccacccctcccactggggactctgt

SEQ ID NO: 845833 - DNA, 120 bp, Artificial Sequence
  ENSG00000203739_36 (sequence is synthesized)
gtgcctaagtgaggctggaaaggaaagcgttggaaaacatgctaaacccagagggcaccaaggccgcgtcatgacagtaagagccgtcaagtactgtgtcctttccctcagttctcaatc

SEQ ID NO: 845834 - DNA, 120 bp, Artificial Sequence
  ENSG00000203739_37 (sequence is synthesized)
tctcacagcttgaggcttgagaattagcagctggctacgagaggtggaggagagaaaatggtgaagtccatgccttcctccttggtaccgagtttccaaacctgaagtgaaggagtctga

SEQ ID NO: 845835 - DNA, 120 bp, Artificial Sequence
  ENSG00000238270_0 (sequence is synthesized)
ggcttagagaaatattagaggaactatgagaggaaaggtcagggaagctaactctaaacagcaagtaattcagcaaaaatttcaggaaagcaaccagagatctcagccagaagctcccag

SEQ ID NO: 845836 - DNA, 120 bp, Artificial Sequence
  ENSG00000238270_1 (sequence is synthesized)
attgtctttgtgtgcaacagccaagcagctcacaccagtgttttttgctggcaaagcctaacatagaaacatacagagagaaggttttgggaaatgcggaggagaccttggaaagctgcg

SEQ ID NO: 845837 - DNA, 120 bp, Artificial Sequence
  ENSG00000238270_2 (sequence is synthesized)
gtaatgatgtcaagttgacaatagccaaacatcacaagaagaaatcaaattttgtgaatgaagcaataatacagtgaagttgttcaacatttcacagctattaaacagcacagtaatttt

SEQ ID NO: 845838 - DNA, 120 bp, Artificial Sequence
  ENSG00000224788_0 (sequence is synthesized)
agttactggtgaggtaaaaaagtgtcagtctgggtggaaaaggaaacaaaaaataagggaaaacagtatgagatatgatgcacattacaactagcaagggtgaggacggtgtagcttcgt

SEQ ID NO: 845839 - DNA, 120 bp, Artificial Sequence
  ENSG00000224788_1 (sequence is synthesized)
ctccttcctctctcagacgtatcgtagagaagatggatctttccttccgccatctctgctaattgatgatgtttgagctcttccttggggaagacatcagcagttcattcactgcagttg

SEQ ID NO: 845840 - DNA, 120 bp, Artificial Sequence
  ENSG00000224788_2 (sequence is synthesized)
ctcatgattccttatagtgaaataaacagtgaggaagtgacataactggcattgatgatggaaaaaatcaaaaggaagattgttttcctacagcatcaattttatattttcctaaaaaat

SEQ ID NO: 845841 - DNA, 120 bp, Artificial Sequence
  ENSG00000224788_3 (sequence is synthesized)
actgtgaaaggttaatggctacttatccataaatattgtcttatataatgtatttttcattactggtagaagaaggaaatcatagaaacaaaagaaagtaaatttttagattttaatagg

SEQ ID NO: 845842 - DNA, 120 bp, Artificial Sequence
  ENSG00000232656_0 (sequence is synthesized)
atggcttttcctggccaatctgataccaagatgcagtggccagaagtacctgcacttccactcctgtcaagtctctgcatggctatggtgaggaagagctctgcactgggcaaggaagtt

SEQ ID NO: 845843 - DNA, 120 bp, Artificial Sequence
  ENSG00000232656_1 (sequence is synthesized)
ggccgtcgagaaggaaatggtgatgctggtggcccctttccggcagtcaagttccctatcaaggacattcagttctcggaaagtggtgaaggcacatgcttccatggtgcccgcctctct

SEQ ID NO: 845844 - DNA, 120 bp, Artificial Sequence
  ENSG00000232656_2 (sequence is synthesized)
aagaagccgagtaacaggcatgaagtgaagagaaatcgctgtaacaggaagacagcaaagcagatgctaatgaccacactatttaacgaactggaaccaacgagaaaatacggtattact

SEQ ID NO: 845845 - DNA, 120 bp, Artificial Sequence
  ENSG00000232656_3 (sequence is synthesized)
gaagactgcacttccttgaacagagtgctcttctcagcaaatcggaaatgcctacacaaatcgctttacaagaaagactgtttcaaagcagcacctttctcaatgttctcgttcaggtga

SEQ ID NO: 845846 - DNA, 120 bp, Artificial Sequence
  ENSG00000232656_4 (sequence is synthesized)
acatgagatgctctcttcagtccggggcttggttgaacggactcaccaggaaacgtgactttcgtgtccgacctctgctgtatcaggattcgattcttggtgttaaacaagacaacgctg

SEQ ID NO: 845847 - DNA, 120 bp, Artificial Sequence
  ENSG00000232656_5 (sequence is synthesized)
atcaaggacattcagttctcggaaagtggtgaaggcacatgcttccctgcatggtgcccgcctctctccactctctagaaatattagaggctaggctgctgctgtatgtcagggctagtc

SEQ ID NO: 845848 - DNA, 120 bp, Artificial Sequence
  ENSG00000232656_6 (sequence is synthesized)
gtggttagtgtttatttcaggcatcattacaaaatgtctgatctgttctagaacactaatattaaaggaaaagagaaagaaaggccatcatatatttttctgaatgtcatataaacacag

SEQ ID NO: 845849 - DNA, 120 bp, Artificial Sequence
  ENSG00000232656_7 (sequence is synthesized)
tcctacaggtttcacagctggccttttatcacagtcatgctcctgaaggccaagctcaacgttccgctctaaattcttgacctctgagatcctctgcagcacttgatactcaatcctttt

SEQ ID NO: 845850 - DNA, 120 bp, Artificial Sequence
  ENSG00000232656_8 (sequence is synthesized)
tccagtgtacttttcttctctggtttttggccccaacctaacttttcatcctgcttttctacaccagcttctgtaatctctagaatgtgctcccattgccatcctgaattgtttttccca

SEQ ID NO: 845851 - DNA, 120 bp, Artificial Sequence
  ENSG00000232656_9 (sequence is synthesized)
ctgcctgtctctgcatagttgctcaagattgccacaggccaatcttggttgaaatccattttttcaaggcacaactcgtgccagacattcaataacctttctaccaatgtcacagtaaga

SEQ ID NO: 845852 - DNA, 120 bp, Artificial Sequence
  ENSG00000232656_10 (sequence is synthesized)
cttaatccagtttttctcaacccaagctcctgggttatcagaaaaattatttgtatgagttttgtcaatttcccccaggacagtacttagctgatatcattctagataaacaggagaaga

SEQ ID NO: 845853 - DNA, 120 bp, Artificial Sequence
  ENSG00000232656_11 (sequence is synthesized)
cttaattcgttatattcaatagatgctttaaggcagtgcttggcaagttttttctgtgaagggccagagagtatgaactctgcctctgtaacactaaaatagtcacaggcaataggtgaa

SEQ ID NO: 845854 - DNA, 120 bp, Artificial Sequence
  ENSG00000232656_12 (sequence is synthesized)
ctgggcagtatgtaaactgagtgtgggtgcatgccaatatttatggacactgaattacatttaattttcatgtgtcacaaaatattttgattcttctccatccgtttaaatatgagaaaa

SEQ ID NO: 845855 - DNA, 120 bp, Artificial Sequence
  ENSG00000232656_13 (sequence is synthesized)
acactcagctcacaggacgtaacaacaggcagcaggccagatttggcctataggccatagttggcccattcctaccttagtgcatcaaacattaattttctgaacccccatttatccctc

SEQ ID NO: 845856 - DNA, 120 bp, Artificial Sequence
  ENSG00000232656_14 (sequence is synthesized)
ccatgtgattacaacgtaaagcacttattagggtactttcagtattctgactcacacttttacatatctgtatccagcagcgtctaagctttctaatctttgtatccttcagggcacctt

SEQ ID NO: 845857 - DNA, 120 bp, Artificial Sequence
  ENSG00000232656_15 (sequence is synthesized)
tacatagtctgaccttgaagttttttattcccttttttcttctcctttatttctgaatgaataataatttttgttttctgatttttctacccaatatattttgaagatcccatgtgctct

SEQ ID NO: 845858 - DNA, 120 bp, Artificial Sequence
  ENSG00000232656_16 (sequence is synthesized)
ttttccagcgctcttgggaggtgggctgtgccactgcctggcccacctggcccacctggcccaccattacctgaagggaagcatgaacagcctttgacgtgggagtggcgactgctgaga

SEQ ID NO: 845859 - DNA, 120 bp, Artificial Sequence
  ENSG00000232656_17 (sequence is synthesized)
cgactgctgagagggaactgtctgtacacaagcaatgtagccttatgggacctgtgagtatatgcttaagttttttttgtgttttttttttttggttgagatggagtctcgctctgtcac

SEQ ID NO: 845860 - DNA, 63 bp, Artificial Sequence
  ENSG00000232656_18 (sequence is synthesized)
cactgcaagctccgtctcctggattctgcgccctgctaatttttgtatttttactagagatgg

SEQ ID NO: 845861 - DNA, 120 bp, Artificial Sequence
  ENSG00000232656_19 (sequence is synthesized)
gcccggccaatgcttaagtttttattcataatttactcaaagtcactgagctctgacttcatgctggtgattcagatttgagtcctgggaagatcatctgagatgacgtttaagccaagg

SEQ ID NO: 845862 - DNA, 120 bp, Artificial Sequence
  ENSG00000232656_20 (sequence is synthesized)
gtttaaatgagtcatattcagccaggtgcagactaaggcagtgcaggttccaggcagaagggaaagcacgtggacacgctgagatgcaggcaaggcctcacagccagagctggcttgtca

SEQ ID NO: 845863 - DNA, 120 bp, Artificial Sequence
  ENSG00000232656_21 (sequence is synthesized)
tgtgttccttttaatctgcgtcagggcatgtgattgagcagcacgtgaccaaccccactgcggcatctgtcccccgtggggtgggggtggggacagagttcttttcctacagcataagtg

SEQ ID NO: 845864 - DNA, 120 bp, Artificial Sequence
  ENSG00000232656_22 (sequence is synthesized)
tgtcatgtcaaccaacgccgtgtcagctgcctgcaggggcccacgggcatggggacccgacgtacaccgtgggagctgacctttctttcttctctcaggagtggagccccaacccacgca

SEQ ID NO: 845865 - DNA, 120 bp, Artificial Sequence
  ENSG00000232656_23 (sequence is synthesized)
cggactcaccaggaaacgtgactttcgtgtccgacctctgctgtatcaggattcgattcttggtgttaaacaagacaacgctgaaggctcggtgcagcagccctgcaaagctttgtgtct

SEQ ID NO: 845866 - DNA, 120 bp, Artificial Sequence
  ENSG00000232656_24 (sequence is synthesized)
ctggcctgtctcccaccgggtggatgcccagcgagctctggatgctgtgtatgacaaagacatgggggttgtttggagtctgtgatgtgctattgtcctccacataatggttttctgcaa

SEQ ID NO: 845867 - DNA, 120 bp, Artificial Sequence
  ENSG00000232656_25 (sequence is synthesized)
gaaactagagaagtttttccagcgctcttgggaggtgggctgtgccactgcctggcccacctggcccacctggcccaccattacctgaagggaagcatgaacagcctttgacgtgggagt

SEQ ID NO: 845868 - DNA, 120 bp, Artificial Sequence
  ENSG00000235601_0 (sequence is synthesized)
agaaaaccggcggcttgatcggcttttaggtagccccggaaaggtcgggaggaggaggggcaaaggccgcgctcctcagctgggaaggaggtggtctcaagcagcctccagtcccgggct

SEQ ID NO: 845869 - DNA, 120 bp, Artificial Sequence
  ENSG00000235601_1 (sequence is synthesized)
caacaccgccaacccggcaagggtgaggcagcgttcagggatgcaaggggcagagcggtagcggcacctgtgcacccctcccacctctgcctcagtttaccatgtacggcctcatttctc

SEQ ID NO: 845870 - DNA, 120 bp, Artificial Sequence
  ENSG00000235601_2 (sequence is synthesized)
tccgggctgccctgagagaaaaatgttctccagccgagatttgcttgaattggaaattcaagtgatccatggacacatcctccttgacagcccccagaagactgtaggctggttacatcc

SEQ ID NO: 845871 - DNA, 120 bp, Artificial Sequence
  ENSG00000235601_3 (sequence is synthesized)
ccctagttagaaaaggaaaaggattcgaggagaagggaaggatgcagctttgccttttcccagctttggggcatcaagaaactgttactgggcggagttggggccagggggccagtgggt

SEQ ID NO: 845872 - DNA, 120 bp, Artificial Sequence
  ENSG00000235601_4 (sequence is synthesized)
gctctgagagtgtaaagaccaaactctggtgggacctggctccattgcggagcctcaaaagctccaacatggtggaggaagttggcagtaccttctctagatctttctttccatccttag

SEQ ID NO: 845873 - DNA, 120 bp, Artificial Sequence
  ENSG00000235601_5 (sequence is synthesized)
aagagtataagcccaagccgtggagtgaacaaccccaaagctaccctacgctgaactcctctctttggtcctgccactactggtgaaaccactgaccctttctgggcctgtttccttacc

SEQ ID NO: 845874 - DNA, 120 bp, Artificial Sequence
  ENSG00000235601_6 (sequence is synthesized)
tgaggagatgctgacctttggctccagagagactgtgagaactcagtgagggggtcctgcactccgagggtcctgcaccctgggagcccttaggtctgtttggagagaaaacagttcctc

SEQ ID NO: 845875 - DNA, 120 bp, Artificial Sequence
  ENSG00000235601_7 (sequence is synthesized)
caggcaagaggggagaagtgtccccaggaggttgggggaggagcatctgccctcctccttctcaggaatcacagggcctacctcctagccccatccaccattgccagtcagcgcctgatg

SEQ ID NO: 845876 - DNA, 120 bp, Artificial Sequence
  ENSG00000235601_8 (sequence is synthesized)
cactgggggtgtcctgggccacccggacttcctctgtgagctccatgtggggcctcagtctttacctcagatgggaaactgaggcccagcaagaggcagccctggtgcagggactccagt

SEQ ID NO: 845877 - DNA, 120 bp, Artificial Sequence
  ENSG00000235601_9 (sequence is synthesized)
gagtagggctggtttactattgcttcttgtacagagccatatcaagctcctttttccggcttcctccctcacctcccccatcttagcagggcccctgccccttcctcaccccctggcttc

SEQ ID NO: 845878 - DNA, 120 bp, Artificial Sequence
  ENSG00000235601_10 (sequence is synthesized)
tgcatctccctaagggcatagcctagtggtggtttctcccctgagtaggcccagctagcctctgtcccatcccctgttatttgggccctaacagaagctacccaaatttgaaccatctct

SEQ ID NO: 845879 - DNA, 120 bp, Artificial Sequence
  ENSG00000235601_11 (sequence is synthesized)
gccccatgctcaagacctgagggtctcacatcctcaaaatgggtccccagattccagatccaaggatttggggatcacactgttcatcagctgtcactaaacttattttactatgagcca

SEQ ID NO: 845880 - DNA, 120 bp, Artificial Sequence
  ENSG00000235601_12 (sequence is synthesized)
gcaagacccccagagacgagagtcggagggatcaaacgacacagatgggaaactgaggcccagcaagaggcagccctggtgcagggactccacgcctcccagacgggattgtgaaatggc

SEQ ID NO: 845881 - DNA, 120 bp, Artificial Sequence
  ENSG00000235601_13 (sequence is synthesized)
tcgagcaggctcagcggccagcagccagcggcagggggatcgtgcatcgcttggagggcgctgggctctcctccatccgcctcagccgtgggcagtttgtttccgctcccacttgcagcg

SEQ ID NO: 845882 - DNA, 120 bp, Artificial Sequence
  ENSG00000232650_0 (sequence is synthesized)
ggcaaagaagaggaccttgggtttactgttcacgagatgacctcataaaggtgttcagtgatgaagaggagtggctgaagagagcttcagcaagcaaccactaggataatgttaaagatc

SEQ ID NO: 845883 - DNA, 120 bp, Artificial Sequence
  ENSG00000232650_1 (sequence is synthesized)
agtggtaagaagacaaggagcaaagatttttatcttactttgtgattttcataattaaaaaagaaagaaaggaaagagacgaggtcttgccacattgctcaggctggtcttgaactcctg

SEQ ID NO: 845884 - DNA, 120 bp, Artificial Sequence
  ENSG00000232650_2 (sequence is synthesized)
cctgaggtggcaggattacagcataagccaccatgcctggcctcagtcacactttggaaaagaagactatggatctacatgttcattttgtggtcgaattataaccaacacgccactcta

SEQ ID NO: 845885 - DNA, 120 bp, Artificial Sequence
  ENSG00000232650_3 (sequence is synthesized)
ctgctcccggctttcatgtggatcaaggctggaggatgacaagctcctgactgatagatacatggagacttcgctggtgatttattggctttctgcacctgacgagaaccactaggccta

SEQ ID NO: 845886 - DNA, 120 bp, Artificial Sequence
  ENSG00000232650_4 (sequence is synthesized)
tctgaggagggaaatatatgggctttcctgactccaagtggcagccccggggcgagcatgtgatgtcaagctgggcagaggaaagcggagctgtgcaccggcctgtgtactgtaagccgg

SEQ ID NO: 845887 - DNA, 120 bp, Artificial Sequence
  ENSG00000232650_5 (sequence is synthesized)
cccgggtcgtaaaagtgtcagcacgcgatatatttcttgcaggggatcctctctggctcttgccagcgcctctcccccgtggctggcagccgccctagccgggcctgcaaacagcggatg

SEQ ID NO: 845888 - DNA, 120 bp, Artificial Sequence
  ENSG00000232650_6 (sequence is synthesized)
ccccaggtcgctatccctccgccctgccccggagcgccgggccctcacgttctcgctccagcctggggtctctcacgtggcatctggccctggggacggtgcagcggaggagttaattgc

SEQ ID NO: 845889 - DNA, 120 bp, Artificial Sequence
  ENSG00000232650_7 (sequence is synthesized)
tgtcactcctgacttcagcgaaagaggtcgatcgtggggtgagatattgaagctggggattgacctgtggaccaagagtttgatggggcaactcaatagcaaactcaatgttcccagaga

SEQ ID NO: 845890 - DNA, 120 bp, Artificial Sequence
  ENSG00000232650_8 (sequence is synthesized)
tttattcagaaaattaagtgccattcgtgtgccaggcactgcgccccctacccgcaggcctcaccttggccaccggcctgagttgttctcatttctcctccctctacctccaggcttctt

SEQ ID NO: 845891 - DNA, 120 bp, Artificial Sequence
  ENSG00000232650_9 (sequence is synthesized)
cctcggggttagcaggggcctggagtggatgtttagtctaccggtcagactccaggtcttatatcttgaaactgtaagtccctgaattcacagacaattcagagtaaggatggaggcaaa

SEQ ID NO: 845892 - DNA, 120 bp, Artificial Sequence
  ENSG00000232650_10 (sequence is synthesized)
gaagaggaccttgggtttactgttcacgagatgacctcataaaggtgttcagtgatgaagaggagtggctgaagagatggctgtctagagtcaacacaaacctaccccaaagtttgacct

SEQ ID NO: 845893 - DNA, 120 bp, Artificial Sequence
  ENSG00000232650_11 (sequence is synthesized)
ttgccttaagtcagtaactgaggagggccacggtcctgagttcagtccagaccccaggaagattcagagcctgcagttgtcctctggtttctaaagtatgttattgggctaaagatttca

SEQ ID NO: 845894 - DNA, 120 bp, Artificial Sequence
  ENSG00000232650_12 (sequence is synthesized)
agacatttatccttctttgctttctatcgcagccattaaatgttttagatattttctgccagaaggcaggaatcatgaagataacaaatattaaagacaaaaccaaataacttttaatga

SEQ ID NO: 845895 - DNA, 120 bp, Artificial Sequence
  ENSG00000238276_0 (sequence is synthesized)
tgtgcatatgccgtgggaaacgcttttggaacaagttggattgctccgaatttcagtgcctatcgggcagccagtgaacatttgtccatctttaaggcattaaactgagaagaaccactg

SEQ ID NO: 845896 - DNA, 120 bp, Artificial Sequence
  ENSG00000238276_1 (sequence is synthesized)
aggaaagcatgccacagtctttcccaaaatccctgtgtcttaaggaacaaccaagaagttaactggtcagggaaaagatttcttttggaacacagaagccatcgctgtgtgcggaaatcc

SEQ ID NO: 845897 - DNA, 120 bp, Artificial Sequence
  ENSG00000238276_2 (sequence is synthesized)
tggcagagaatgatgggagttgtgatccatacctccgtgtgcataatggttgtacctgctccaggaaggcgctggatcctcccaactccatggcctgttccagccaccgtgtcaacatgc

SEQ ID NO: 845898 - DNA, 120 bp, Artificial Sequence
  ENSG00000238276_3 (sequence is synthesized)
cttggtccatagctctggaaggcacacaccaagcaggaccagtgaacagaagatgagaagggaagagattaggacacaaacaacagacagaaggtgaccacaggaggacacagtgagaag

SEQ ID NO: 845899 - DNA, 120 bp, Artificial Sequence
  ENSG00000238276_4 (sequence is synthesized)
ctggccatctgcaagccaaggagagagacctcaggagaaaccaaacctgccagcaccttaatcttagacttctagccctcagaacggtgaggaaataaatctctgttgttcatgccaccc

SEQ ID NO: 845900 - DNA, 120 bp, Artificial Sequence
  ENSG00000238276_5 (sequence is synthesized)
gaccagtgaacagaagatgagaagggtacattttgacaccaaactgcctgggttggaaacccagctctgtgacctaggaccagtcacttaacttctgtgcctcggtttccccatctgtcg

SEQ ID NO: 845901 - DNA, 120 bp, Artificial Sequence
  ENSG00000238276_6 (sequence is synthesized)
actggggatgatgagagtatctctcactgggttgttgtgaggaatggatgaggaagtacaaatgccgtgcctaaagcagcgcctggtgcacactgatatgataagttttattattatcat

SEQ ID NO: 845902 - DNA, 120 bp, Artificial Sequence
  ENSG00000238276_7 (sequence is synthesized)
catccaattatcatgatttctggcaagtgggcacttccgttcagaaatctcggtgaggagacagggccatccaccgtataagaatgcaggctcagcgtttggccacttccattgagaatc

SEQ ID NO: 845903 - DNA, 120 bp, Artificial Sequence
  ENSG00000238276_8 (sequence is synthesized)
aacggtgacttatttgcaagtccccatcccctcaattgtctcccatcgaaatgggctcacggcttggtctgtgtgtccgtgggccccatgcttagcctagaaatgatgcacgaaatagca

SEQ ID NO: 845904 - DNA, 120 bp, Artificial Sequence
  ENSG00000238276_9 (sequence is synthesized)
cctcttaggctcacatcaattgctaattaaaatggcattaccccttaatgggttgcaaagtagcactctcatttccccactgtgcatttccgcaggctggacccgggcatcgacccacct

SEQ ID NO: 845905 - DNA, 120 bp, Artificial Sequence
  ENSG00000238276_10 (sequence is synthesized)
ggggtgactgaggctctcgggagagggaagctgggcgtaggacaataagttaggcaacttcagaatctgcattgtttctgacaaataacaatggaataaagccagaaacgtgcttgtacc

SEQ ID NO: 845906 - DNA, 120 bp, Artificial Sequence
  ENSG00000238276_11 (sequence is synthesized)
catcagtcacaggtgctgataatagttcacctaattacttcattattttttgccactccatgcagcagtttgtatttacaatcctgtatatggttctattactaccacttattgtgacga

SEQ ID NO: 845907 - DNA, 120 bp, Artificial Sequence
  ENSG00000238276_12 (sequence is synthesized)
ttccagcaattccgaggagtctcggagggcctggacaagtagaatcttgtttttcttgatttcccccggggggtgggaggtaggaggaggtagagagaggaggggttcagaggaaaagca

SEQ ID NO: 845908 - DNA, 120 bp, Artificial Sequence
  ENSG00000238276_13 (sequence is synthesized)
tccagccagcatcaacccacaattgctcatctcggatgagtgataaatgatgggtgatttttgaaacgctagaattttcaaacaaaacaaacatatcctatcctattagttaccaggcca

SEQ ID NO: 845909 - DNA, 120 bp, Artificial Sequence
  ENSG00000238276_14 (sequence is synthesized)
tcaggaccctggcttggcgtcattacattggaagccgggctggaaaccatccccagggaatcgtcctaatgaacacgggccacaaattaacaaagttgggtgggaaaaacattgtgaatt

SEQ ID NO: 845910 - DNA, 120 bp, Artificial Sequence
  ENSG00000238276_15 (sequence is synthesized)
ttagtcactgaagcatcagtaaatctgctagaagtcagggctgattgcttttagcttgttaagatgttgattgtttacaaattacatttccctttaaaaagcaggcacctctcagcggct

SEQ ID NO: 845911 - DNA, 120 bp, Artificial Sequence
  ENSG00000238276_16 (sequence is synthesized)
ccttgccaccggtcccttgctgggtgcttcccaccggggacaaaggctgcctgctgttcgctgatctaattgcactctgcagcccccttgctgcactctgccccttctctcccttctcct

SEQ ID NO: 845912 - DNA, 120 bp, Artificial Sequence
  ENSG00000238276_17 (sequence is synthesized)
acattttgaaatctttcttaaactgagtcctcctacgagcagtgttgtcagacgggcactggactgtgcacacgctgtgttctcatgatttgcagctacctggaggagtgaaagctgagt

SEQ ID NO: 845913 - DNA, 120 bp, Artificial Sequence
  ENSG00000238276_18 (sequence is synthesized)
gcaaaattgccttgtgagagctgctttccagtttaaatcacttcccagtttaaattcattcattcattcatttattcaattcattcaatgaattcattaaattcattccttcattcattc

SEQ ID NO: 845914 - DNA, 120 bp, Artificial Sequence
  ENSG00000238276_19 (sequence is synthesized)
attcattcgacttgtaacttgaatgaatgaataaaccagcacccgtctggttgtccatgccaggcagctgctggagctgcagagacagatttcagagagtcaggggctcacaagcgcagg

SEQ ID NO: 845915 - DNA, 120 bp, Artificial Sequence
  ENSG00000238276_20 (sequence is synthesized)
cctggcttgcaggcacatcactccaatctctgccttcatcgtcacatggtgctatgggctgaactgcgtcctagtccccaattcatgtgttgaagtcctaaaccctaatacctcagaatg

SEQ ID NO: 845916 - DNA, 120 bp, Artificial Sequence
  ENSG00000238276_21 (sequence is synthesized)
tggctgcatttggagacagggcctttaaagaggtaattaatttataacggggttgttagggtgaaccctaatccaatatgattggtatccttgtaggaagagattaggacacaaacaaca

SEQ ID NO: 845917 - DNA, 80 bp, Artificial Sequence
  ENSG00000238276_22 (sequence is synthesized)
tctcttcttataagacccaccctgggaggctaaggagggcagatctcttgagatgaggagtttgaaaccagcctggccaa

SEQ ID NO: 845918 - DNA, 120 bp, Artificial Sequence
  ENSG00000238276_23 (sequence is synthesized)
atgacctggccatgacttctacaacccggaggacttgcctggcattaccgaaaagcacaggggaaagattctgtggcaggtgccgcatttcatccagctcactccgtgctagttcctaag

SEQ ID NO: 845919 - DNA, 120 bp, Artificial Sequence
  ENSG00000238276_24 (sequence is synthesized)
acatcttaattcttacacatatgcataatcgtgatattttgccatgaataacaatatatttcacaattatcaaccattttaatttttagctttctaacctcggactactataataaaaag

SEQ ID NO: 845920 - DNA, 120 bp, Artificial Sequence
  ENSG00000238276_25 (sequence is synthesized)
aaataataaatccaaaagtagtagtggaaaaaataagtatctccaggtttgttcctgtaaagttaattagttcaaaacagagtgaggactctaagagtttggggtttttttgtgtgtgtg

SEQ ID NO: 845921 - DNA, 120 bp, Artificial Sequence
  ENSG00000238276_26 (sequence is synthesized)
tgttaagtatcagcattaagtatcttcaagacaattcaaagtaagatgataagtcactaggttgtaaatttcacaaaaaatcattaaatacactgtgtcggactacagcggaacagtggg

SEQ ID NO: 845922 - DNA, 120 bp, Artificial Sequence
  ENSG00000238276_27 (sequence is synthesized)
aagaacattcagtatttgagagtaaacaactcaaattaagttgtttaggaatctcacagacaggaaaatttttcctctctggttttccatggtagcatgtttacagtacttgaaaaatgt

SEQ ID NO: 845923 - DNA, 120 bp, Artificial Sequence
  ENSG00000238276_28 (sequence is synthesized)
gcttattagttccaaaatagaaaatcctataacatcatttcctcttcatgttaaggttaacttccattataaatatatgctttcagtataaaatgctcgacctcaaaagataccagcttt

SEQ ID NO: 845924 - DNA, 120 bp, Artificial Sequence
  ENSG00000238276_29 (sequence is synthesized)
tgcgttttgaactataatcgtgatccataaatggtgatagagcttcagctacatctcaaacatttatgttccactctctttatcaaagagcgatttattttcagagaaacatttatcaat

SEQ ID NO: 845925 - DNA, 120 bp, Artificial Sequence
  ENSG00000238276_30 (sequence is synthesized)
ttaaggtgtctgaaatattcattttttaaaaagggctataaacaagtagcaagatgaataatctggttttctgtgggttaagttacatatcaaaaaatcctaaaatttttcatcattttg

SEQ ID NO: 845926 - DNA, 120 bp, Artificial Sequence
  ENSG00000238276_31 (sequence is synthesized)
atgcactattcttaatttttaaaaactcattgtctgaaagcaagacagatattttaatgctaatatgtaaaaataaaccggatttacggtcttgggtctctgtcgttgcctatatatcta

SEQ ID NO: 845927 - DNA, 120 bp, Artificial Sequence
  ENSG00000238276_32 (sequence is synthesized)
gatgtctacaaaaatattccagattttctgcttttcttaatctcaaatgttcaaaatgactacattttctagaatatttacctattagctgatgttattgttaaaaagaaaatcagacta

SEQ ID NO: 845928 - DNA, 120 bp, Artificial Sequence
  ENSG00000238276_33 (sequence is synthesized)
attttggcagtattgtgccttactacaaatcctgtctttactgtgagagtggagaaaaataaaatttgcagaattccagtctctagccattggcattttccgggctttcttgttttctat

SEQ ID NO: 845929 - DNA, 120 bp, Artificial Sequence
  ENSG00000238276_34 (sequence is synthesized)
atattgagtcccctgtgcgtatgggaagctcagctgaggactaatgcaaactattttcccacaagccaacatgtcgtcactacaaatatacctaaaaataaaaataaataacatgtaaaa

SEQ ID NO: 845930 - DNA, 120 bp, Artificial Sequence
  ENSG00000238276_35 (sequence is synthesized)
ctcattctcctctcccccagcccctggagacctttcatctgctttctgtctctatagatttgcctgtactagacatttcatatgactggaagcatataatatgtggtcttttgtgtttga

SEQ ID NO: 845931 - DNA, 120 bp, Artificial Sequence
  ENSG00000238276_36 (sequence is synthesized)
cttgttttacttagtctaatgttttcaaggttcgccatgttgtaacatgtacactttacacaattttaagcctaatattctttaagccatatattcaaaataaacagcttacaaaaatga

SEQ ID NO: 845932 - DNA, 120 bp, Artificial Sequence
  ENSG00000238277_0 (sequence is synthesized)
gcaaacagataatccactggtgagtttgtaccactcaagagtcacccttaggctatgccaattttctacgcatgaactccttgcccaccccttcctctggatcccatgtggctgcctggt

SEQ ID NO: 845933 - DNA, 120 bp, Artificial Sequence
  ENSG00000238277_1 (sequence is synthesized)
ctaccatcatggcagaatgcgagtctctacagaactgaacacccatcatggggaggctgctgtgatgactcaggaaatgcttcctccttcataatattgaacccagcttcatgatgttta

SEQ ID NO: 845934 - DNA, 120 bp, Artificial Sequence
  ENSG00000238277_2 (sequence is synthesized)
acagcatgaagtgtctcagacagataaccaacatgaagaatgccacataacaaaggcaccaaataacaaaataatctgtttttccactcagatgccttctaatgttgctcacacttttat

SEQ ID NO: 845935 - DNA, 120 bp, Artificial Sequence
  ENSG00000238277_3 (sequence is synthesized)
gagagcacaacaacgtccatcataaataatgcaaaggcttggcatgccctgagctctctgtcaccagccaggactgaattgcagagtaaaaatatttcatttggggtgctctgtacacag

SEQ ID NO: 845936 - DNA, 120 bp, Artificial Sequence
  ENSG00000238277_4 (sequence is synthesized)
ccatatatttgtcaaggtcttataactcttaggactccgtgaatataatcagtcctgcatcctctcactgactgaggatatcaaagtgtatgtgaaaaggcaggtctgacaatgccctta

SEQ ID NO: 845937 - DNA, 120 bp, Artificial Sequence
  ENSG00000223784_0 (sequence is synthesized)
ggcggaagaggccacactagcgagaaagtgattatgagaaacatgcagaaaacaagagcacatcctcatagtcacatagaaaatgaggtgaggggaagaaatcttcatgaaaccgtctca

SEQ ID NO: 845938 - DNA, 120 bp, Artificial Sequence
  ENSG00000223784_1 (sequence is synthesized)
aggtatatttaaacgtggctccctgcaggccacccattctttgtcccagttaattcatatacgagagaggttttacttcagagagattgccaatggaaaaaatgtgaacgaaacacccgc

SEQ ID NO: 845939 - DNA, 120 bp, Artificial Sequence
  ENSG00000223784_2 (sequence is synthesized)
atggatggcccacggtgaggcgtctctgatcgctatcaaacagggaggggcagaaatccttgcactaaaaagtgtgggctgctttaccacaaataagatcagggactgggcatgaggcag

SEQ ID NO: 845940 - DNA, 120 bp, Artificial Sequence
  ENSG00000223784_3 (sequence is synthesized)
tattggtcacagccccgttggtgctggagagaggttcgctggccttgggagcttcactcatgaccggtgagctgtgtgcccagagacgacgccgaggtcctcatgtcttatttccgcagc

SEQ ID NO: 845941 - DNA, 120 bp, Artificial Sequence
  ENSG00000223784_4 (sequence is synthesized)
atccagttattcagagggcgtgtgtgcagaatgagaaggaggtggcgcaccggctacaaggctagaccgggggctcgcatatctccacttgcagctgccactgccattagaagaacttgc

SEQ ID NO: 845942 - DNA, 120 bp, Artificial Sequence
  ENSG00000223784_5 (sequence is synthesized)
cggtccagtacaccttttaaataatgtcctctacgtgccggtgtggaagtagcccggatgcaattgaatgaacaacagacggtgctttccaggacggcgctgtgctttccaggatggtgc

SEQ ID NO: 845943 - DNA, 120 bp, Artificial Sequence
  ENSG00000223784_6 (sequence is synthesized)
tgtgctttcattcatttgggtagctcctctgtgagcctcccagcgccgactgcagagcccccactctccagcctgcaagaccccgaaattcaagccacacaaagaaaggaggagggggcc

SEQ ID NO: 845944 - DNA, 120 bp, Artificial Sequence
  ENSG00000223784_7 (sequence is synthesized)
gttggcatttactgaaccttataaaactgtcagcaaaacagcccttaggcttggactccctgctagccgggttttacggtgctgaagtcagcatcttgattcagctgcataaataatctc

SEQ ID NO: 845945 - DNA, 120 bp, Artificial Sequence
  ENSG00000223784_8 (sequence is synthesized)
ctgcagtcctgcaaggcctggggtaggagagggtatggggaccagggcactctgtaagggctgggataggaaccccagggaataagacagaccaactgcgggacttcagactccactgca

SEQ ID NO: 845946 - DNA, 120 bp, Artificial Sequence
  ENSG00000223784_9 (sequence is synthesized)
gccgggatcgggttgttgttaatttcttaagcaatttctaaattctgtattgactctctcatgcatgtaactgatccttagatattgtcagccaaatgactaaaggatttagaaatctga

SEQ ID NO: 845947 - DNA, 120 bp, Artificial Sequence
  ENSG00000223784_10 (sequence is synthesized)
acagaggagtcatgttacccattggctctgattcttcaccctacctgcccacaccctttgcccagtgactttgcagttcctcccctgtgggggaagtgaatttcctccctccgtctcctt

SEQ ID NO: 845948 - DNA, 120 bp, Artificial Sequence
  ENSG00000223784_11 (sequence is synthesized)
tgactggcacactctctctgcctctttctttctcaacattttatttctaactatagtttcttctgttttttttagttaccctaagcagatcagacatctcactttcaaaaaatacctttc

SEQ ID NO: 845949 - DNA, 120 bp, Artificial Sequence
  ENSG00000223784_12 (sequence is synthesized)
aaaacatacctttaaaaaatgacttgcaaaaaaatacctcacctcctcttattttggcagtagtgagagtagtagccccaatgccaaccagcatctcgtccctgcctctacaccgtgccc

SEQ ID NO: 845950 - DNA, 120 bp, Artificial Sequence
  ENSG00000223784_13 (sequence is synthesized)
aaagttccatcccacacatgagctgtggggtctgggccaggaggagccattgctctcgcttatgaagaagatagagctggatcagtgaatggtaccagaggcacacacctcagaccccgc

SEQ ID NO: 845951 - DNA, 120 bp, Artificial Sequence
  ENSG00000223784_14 (sequence is synthesized)
tccagttcaggttctgttgctcagatctatcattttctatttattctgtgcgacggccccaagtttagcaatctaaagcttgcatagccgggctcggtggctcaacgcctgtaatcccag

SEQ ID NO: 845952 - DNA, 65 bp, Artificial Sequence
  ENSG00000223784_15 (sequence is synthesized)
gagtttgagaccagcctggccaacggtacttgtaatctcagctacttgggaggctggagaatcac

SEQ ID NO: 845953 - DNA, 120 bp, Artificial Sequence
  ENSG00000223784_16 (sequence is synthesized)
ccggtcatggtggtgggtacttgtaatctcagctacttgggaggctggagaatcacttgaacccagaggcggaggttgcagtgaccggcgattacgccattgcactccagcctgggtgac

SEQ ID NO: 845954 - DNA, 120 bp, Artificial Sequence
  ENSG00000223784_17 (sequence is synthesized)
aataaataaataaataaataaataaagccagccagcttgcataaagaaagtcacagttataactacataaagtaacaggtcagcatgcaggggtccaagatgcattcttgttgccgatag

SEQ ID NO: 845955 - DNA, 120 bp, Artificial Sequence
  ENSG00000223784_18 (sequence is synthesized)
gtccaagatgcattcttgttgccgatagagttggttcacacagctgcatggagggtgcccaggaggggacggtggctgcacctcaatccagctcccttcaatggcactgagccttaggaa

SEQ ID NO: 845956 - DNA, 120 bp, Artificial Sequence
  ENSG00000223784_19 (sequence is synthesized)
tgcagtgtggaacatgtaagaagtttctgcaggtggagacatgttgtctctggaattaattcagacgaatgctctgtgacttatttgttccgactgggccttgccatggcctctgggcct

SEQ ID NO: 845957 - DNA, 120 bp, Artificial Sequence
  ENSG00000223784_20 (sequence is synthesized)
ttggtctccaatgtttacttaacttcctgccttaagctcatggcagccttgaccctacgtgggacatgatttctaatgttttctccctatcctttcaagggtaatcgggataaaaggaga

SEQ ID NO: 845958 - DNA, 120 bp, Artificial Sequence
  ENSG00000223784_21 (sequence is synthesized)
acacctgtgccatttagacccagtaatctcggggcgggagtggttacttggggcagtggcgggggccagtcagacaccaggaaggaaggacaagaaaaaaaaaacctgtgacacatgcat

SEQ ID NO: 845959 - DNA, 120 bp, Artificial Sequence
  ENSG00000223784_22 (sequence is synthesized)
agaaattactcagggatccttcaaagcaacacagaaatacatataaagtaatcctctttaaaaagaatcgtaaccctggttctaaactgaagacttattctgaaatattctgatgtcata

SEQ ID NO: 845960 - DNA, 120 bp, Artificial Sequence
  ENSG00000223784_23 (sequence is synthesized)
gtctcaaaaactgaaactcttgtaattggaaaatgtaattatctagagcttttgtggcttctgtacatatctctctgttgctaaacagagaataatataattaataaatggtaaaaggaa

SEQ ID NO: 845961 - DNA, 120 bp, Artificial Sequence
  ENSG00000223784_24 (sequence is synthesized)
ccacctccagctgcactcagctccagaagctggcccagccggtccagtacacgtgagaataaattgttgttgcttttacccattaggttttggggtgatttgtgatgttgcattgttgca

SEQ ID NO: 845962 - DNA, 120 bp, Artificial Sequence
  ENSG00000223784_25 (sequence is synthesized)
gcaataacaaataaatataaacagtgtttgagctgtgggctccaatggacttttgtcacttattagctctggccattatttcaactttctaaatcacaatatctgtcacaaagacagcaa

SEQ ID NO: 845963 - DNA, 120 bp, Artificial Sequence
  ENSG00000223784_26 (sequence is synthesized)
aataaaaatacctaaagtaatattttagaaggtgcatgcatttctgtgtgctaattaaatgagataatgctggtaagggcgttctgcagcacctggcgccagttgtattacattagccct

SEQ ID NO: 845964 - DNA, 120 bp, Artificial Sequence
  ENSG00000223784_27 (sequence is synthesized)
tgtgtggtggccctgtgcctgggaagggattctgcaggcagaggcctctgcatcgggtgctgaccacagccctgtgcccaccagctggttccgtagttttcagattttacaggttaaacg

SEQ ID NO: 845965 - DNA, 120 bp, Artificial Sequence
  ENSG00000223784_28 (sequence is synthesized)
tgctgaaagcagcacgggcatacttgttcagctgaattagcttccacatgctgaacatgcccagcctgagagaatgatctgggctgtgtgtgtgtgcatggtcacgtgtgcacagcaatg

SEQ ID NO: 845966 - DNA, 120 bp, Artificial Sequence
  ENSG00000223784_29 (sequence is synthesized)
tgagtgtttattcttactggaatgtgagcaaagatggggaatatttctgcttcttgaaaattctgcataaaaccttcatctgtgtttctgttattgcataaagttgggcactccatttct

SEQ ID NO: 845967 - DNA, 120 bp, Artificial Sequence
  ENSG00000223784_30 (sequence is synthesized)
tggattcaggatttgatgcttgaactgaaccttcttttaagagaagtaatacatcctcaaagtaagaacaacaacaaaaaacttagacgaagaaaaagcaaagagaagaaaataaaaatc

SEQ ID NO: 845968 - DNA, 120 bp, Artificial Sequence
  ENSG00000223784_31 (sequence is synthesized)
accacccagagacagcgctgttaatggtttgggtccttcattcattcaacaaatacttggcaattaccatgcagtaaatatggtgctcattgctgggaagtagagattgacaagatacaa

SEQ ID NO: 845969 - DNA, 120 bp, Artificial Sequence
  ENSG00000223784_32 (sequence is synthesized)
tccatgacctcaagggttgcataggatcatgagcaaagcagattcttcaagggaccagttcacagcaaacacccttcaggcaggtattatcaagctccgtctgtgaaggcgaggcggaag

SEQ ID NO: 845970 - DNA, 120 bp, Artificial Sequence
  ENSG00000223786_0 (sequence is synthesized)
gtctgtgggaattatttcctcccattggtattagattatatttttccaagtcaactcttcctggctgcccttcaaggttctaaagattttctactgttgtagtgtaactagtaagaggca

SEQ ID NO: 845971 - DNA, 120 bp, Artificial Sequence
  ENSG00000223786_1 (sequence is synthesized)
aaaccatgagaatcagagagaacttcccttcatgatgctatgcaatccccaggagaagcacgttgaaagctgaaaagaagactgactgagatgtgttggcgggcttctcaagatccctat

SEQ ID NO: 845972 - DNA, 120 bp, Artificial Sequence
  ENSG00000223786_2 (sequence is synthesized)
tccagcttcagcatcatcttaagttcaagtgaaaaggaaaagagaatctctttttcttcaaacaatttcaaactaaaatcttgagtctgacttttcctggccagaattaagcttgtactt

SEQ ID NO: 845973 - DNA, 120 bp, Artificial Sequence
  ENSG00000223786_3 (sequence is synthesized)
atccctgaaaaatcatcaatgctacagtgatgaatttaccaattgaggcagaatttaggtcacatgacgctccaaagcctcttcaaaaccgcatgactcagagtgaggcagaagtatttg

SEQ ID NO: 845974 - DNA, 120 bp, Artificial Sequence
  ENSG00000223786_4 (sequence is synthesized)
ggatatttgcaacaggagaagggtaaatgaatggagagtgccaaaacaacttatgtcaattatacaattataaatacaaccaaaataaagtatggaaatcagtattttcacctatcttaa

SEQ ID NO: 845975 - DNA, 120 bp, Artificial Sequence
  ENSG00000223783_0 (sequence is synthesized)
aaaagccggtcaaaggagaacaagaagggggcatcctgggaggctgctcccaggaaaaagcctggtgggagggcaggggccttggacacggggacccagctccccacctccccacctcag

SEQ ID NO: 845976 - DNA, 120 bp, Artificial Sequence
  ENSG00000223783_1 (sequence is synthesized)
agaggcctgggaaatcattcctggcagtagcctggccttgcccgtcggacagtattagggagggtgagggaaaacacttcgtggtcaggtcagtttggaaaacttcctgtaaggtggtgt

SEQ ID NO: 845977 - DNA, 120 bp, Artificial Sequence
  ENSG00000223783_2 (sequence is synthesized)
ctgtgaaggggcagccccgtcaccagacacaatccttgcaaagggacagcctccatcagcctccatggaagactgacagacccacacaggggagaataaatcaacctgcaaatgaagcat

SEQ ID NO: 845978 - DNA, 120 bp, Artificial Sequence
  ENSG00000223783_3 (sequence is synthesized)
tcagccagcttgggagttctgctttccattttaaattaatacaccggccttctggtttgtacatcggttgtcctcccgtgggtctggctggtaggcattggtttctgaggggctggctgt

SEQ ID NO: 845979 - DNA, 120 bp, Artificial Sequence
  ENSG00000223783_4 (sequence is synthesized)
ttttgcttcttccctgcagaccaagttggaggtgcgtcctccttttgccagacctcctcttgtgcctcttgctgtatgcagagcgtcgtgatgacagctcgtcaagctttccaatttgag

SEQ ID NO: 845980 - DNA, 120 bp, Artificial Sequence
  ENSG00000223783_5 (sequence is synthesized)
tcaatcctgggctgccgggatgggccaaagtgaccttcgatggagcatctcccaaccctagaattacagggatttatgaaatgtggacctttcctgaatgttaaatttgctgagggccaa

SEQ ID NO: 845981 - DNA, 120 bp, Artificial Sequence
  ENSG00000223783_6 (sequence is synthesized)
gggactgtgacagcatcacggcaggacgggtgctctgtaatcgttacgcaccaggtgtcttgggagcagaggaggtggctccccacaaggtcacgttgtgctgatgtgatgggtgagaac

SEQ ID NO: 845982 - DNA, 120 bp, Artificial Sequence
  ENSG00000261286_0 (sequence is synthesized)
atcagaaggcctgggcagacttggccagccacctggagcactgtgcccttaaactcagggcattcactggtgacccacactgacactgctttttggaggacaaggcagagttgaccatcc

SEQ ID NO: 845983 - DNA, 120 bp, Artificial Sequence
  ENSG00000261286_1 (sequence is synthesized)
cagtcttgcctggaggtcataggaccgttgtcactgcagcctcaggtctgatgcataatcccatgaccctccagatctgagccatgacccactctgggccctgccggcggggaggcggtg

SEQ ID NO: 845984 - DNA, 120 bp, Artificial Sequence
  ENSG00000261286_2 (sequence is synthesized)
ggcccatgggggctgcctcactggcctccctcgtcctctattccgggttggggttggctctcagcacactggggaaaagggtggggtcgatgacttgtccctggctccctccccttgccc

SEQ ID NO: 845985 - DNA, 120 bp, Artificial Sequence
  ENSG00000261286_3 (sequence is synthesized)
catgcctgccataaccgcagcttcagagaaaggtgccacactcgcttggctgacaatgtcggggagtcccctgggctccacaccagggcgtgtgcccttggaaaaccacggtgactgaat

SEQ ID NO: 845986 - DNA, 120 bp, Artificial Sequence
  ENSG00000261286_4 (sequence is synthesized)
catgtccctttcagccaaaactggaagacagcccagctccctgccttcaggtgaccagatctctaagtcacattactggccccagggtcaagtccaggctccccagctggggtacctccc

SEQ ID NO: 845987 - DNA, 120 bp, Artificial Sequence
  ENSG00000261286_5 (sequence is synthesized)
aggctgagtacaggccttgctccctccttcctccctgcacgtgctctgagcctccagcccgacgcctgggatgccggtgccccttgggccccagaccctactactcttgagtgacaggcc

SEQ ID NO: 845988 - DNA, 120 bp, Artificial Sequence
  ENSG00000261286_6 (sequence is synthesized)
tcttcctaggggtttctgtgcatccgtcacatcacccacgttagagtcccttcctgtgaggacagaagggccctgaagacagagccggcccctggtgagctctgctttcccgcactgacc

SEQ ID NO: 845989 - DNA, 120 bp, Artificial Sequence
  ENSG00000261286_7 (sequence is synthesized)
cctcctgggctgcagctccccacctggcagctgccgccccccatggccctggtcgaggtcacctgtcgttcccgtccccaccactcaccaagcgctcccaggttctccgtctggaagacc

SEQ ID NO: 845990 - DNA, 120 bp, Artificial Sequence
  ENSG00000261286_8 (sequence is synthesized)
ctctgcagcggggggatgtaaatgaccgccagctgccccaggatggaccccaggacggagtagaggaacatgtggttcctgagaaagccgatctcaaatatcagcttggtctgcagggag

SEQ ID NO: 845991 - DNA, 120 bp, Artificial Sequence
  ENSG00000261286_9 (sequence is synthesized)
aaggtcacacgggggattgtgtgctgtccacaccccaggtacaggcaggggagctctgactgcccacgctgagccagagccgctcaatgctgcgggcagggtcggggcgctgctgtcgag

SEQ ID NO: 845992 - DNA, 120 bp, Artificial Sequence
  ENSG00000261286_10 (sequence is synthesized)
aacacacagcagctctgcagcgaggagggtcagcccgggtctcacctgagagcggcaggtcaaggcgttgaagagatcgaaaaacacaaaacaagtgaacgtcatcgtcgtggtgcgggg

SEQ ID NO: 845993 - DNA, 120 bp, Artificial Sequence
  ENSG00000261286_11 (sequence is synthesized)
agtgcttgctctgtcttcaggcatctggaaggtgagcacaaagatgtgagctgtggcaggagggcagggactgcagtccccagcgtctgcaccgcaccagggcttggagaacaggccggg

SEQ ID NO: 845994 - DNA, 120 bp, Artificial Sequence
  ENSG00000261286_12 (sequence is synthesized)
ggtggctgcctgaaggcgtctttgtcaacgggctctacccccaagctgctccgaacaagacacagacactttgaaatgaaccaggaatgaaataaaggacccttgaaacagctgtgcctg

SEQ ID NO: 845995 - DNA, 120 bp, Artificial Sequence
  ENSG00000261286_13 (sequence is synthesized)
agcctcccaggccaagttggcacagggggcagggccaggcatttgctgaacgcccccaggcatcgcacctgccctcctcggcaccttccagaagccccagagcctgggtccatgggcagc

SEQ ID NO: 845996 - DNA, 120 bp, Artificial Sequence
  ENSG00000261286_14 (sequence is synthesized)
tgtgcccctccatctgtcccgcagacagtgaaggaagaccaccccgtaaggccaaccacacacagttccatacacccagatgatctccatcaccccgaggggaccccccccaacgttgcg

SEQ ID NO: 845997 - DNA, 120 bp, Artificial Sequence
  ENSG00000261286_15 (sequence is synthesized)
cctggagaaacaggctccaggctccgccctccgcagagcccctcatcagctgagagagaccagcctccagccaactccacacagcagggttgaggctagacccgcagcaggcggtatggt

SEQ ID NO: 845998 - DNA, 120 bp, Artificial Sequence
  ENSG00000261286_16 (sequence is synthesized)
gggagtggccgggtgaggccctgccgctcagacacagctgaggccagcttcctggtcccacttctgctcccagggagggctggcaggagaggtaaccctcacacttggctttggggacac

SEQ ID NO: 845999 - DNA, 120 bp, Artificial Sequence
  ENSG00000261286_17 (sequence is synthesized)
aaatgaggactctctttcccttggcagctatcactggtgataacagcagcactgagctccagcggaagcactggctctgtgctcatacggttacgcacacgtggccagatgggtcccctg

SEQ ID NO: 846000 - DNA, 120 bp, Artificial Sequence
  ENSG00000261286_18 (sequence is synthesized)
actccaaagcgcattccttcccccacaccacttggccagcttgttgaaggggatattaagtggcggagcgggtggactcctgagcacctactgagtggcaagccctttatctctagacat

SEQ ID NO: 846001 - DNA, 120 bp, Artificial Sequence
  ENSG00000261286_19 (sequence is synthesized)
cagggatgaaacacaaactccgcctccatgaaactgatgttctaaaggggagacagatcacaatcagatccataaggaaaagtgtgtctgtgtgtatcttcctctctagggaaaaataca

SEQ ID NO: 846002 - DNA, 120 bp, Artificial Sequence
  ENSG00000261286_20 (sequence is synthesized)
gcagggtgaggggattgagtgggagtgcaatcagggaagacttcctgaaggcagtgactggtgactggaatgaagcatgagaatgagccatgcaggttgcccagagagagcatccaggca

SEQ ID NO: 846003 - DNA, 120 bp, Artificial Sequence
  ENSG00000261286_21 (sequence is synthesized)
gagggagcagaaagttccatcctcacccagctctgccggcccaggtactttctcctctgccttctactcccagtctcactgcagtgcaacacacttcagttttctgggaactcctgatgg

SEQ ID NO: 846004 - DNA, 120 bp, Artificial Sequence
  ENSG00000261286_22 (sequence is synthesized)
aaagtggctgtatttgttcatccctatagccttggggcacagccagcagcccctggaggaagccccgcaggtgggtaaagagacacagggctcccagccggccctgcctcacctctgcgc

SEQ ID NO: 846005 - DNA, 120 bp, Artificial Sequence
  ENSG00000261286_23 (sequence is synthesized)
cggtggcccatccatgatgatgttgatccataggatctgcatggcgttgagggggctgggcaggttgaacacggtggacagagtgatgagactcagggcggagatgctcctgcggggcac

SEQ ID NO: 846006 - DNA, 120 bp, Artificial Sequence
  ENSG00000261285_0 (sequence is synthesized)
cagctagaataaagcaggcagaagaaagtggaaagagaaggcttgctgagtcttctggtcttcatctttttcctgtgctggatgcttcatgccctcaaacatcagactcaaagttcttca

SEQ ID NO: 846007 - DNA, 120 bp, Artificial Sequence
  ENSG00000261285_1 (sequence is synthesized)
tgccaggggctctcgggcctttggccagagaccgaaggctgcactagaaccctaacatatgagtcatgaaccaaaagatgcaagtggcttttagaagctggaaaggacaagaaaatggat

SEQ ID NO: 846008 - DNA, 120 bp, Artificial Sequence
  ENSG00000261285_2 (sequence is synthesized)
atttcttacttctgactgccagaactgtaaaagaatcaagagctaaatggacttcaaagcaacctccaacctttctcccaatagggagagagaaagacaaattcccttctactttgtgcc

SEQ ID NO: 846009 - DNA, 120 bp, Artificial Sequence
  ENSG00000261285_3 (sequence is synthesized)
attgtgagacatcatggtacagctgggctttaaaacagattctgttttgttcaaagcttgttgttaaatattcagaaggaaaagagacatggcctcattcagaaaagaatgtcagcattt

SEQ ID NO: 846010 - DNA, 120 bp, Artificial Sequence
  ENSG00000261285_4 (sequence is synthesized)
atgcttgagaaaactctgtacttatggaaatgtcccatgttgcactatccaatatgatagtcactaggcacatgggctgttgaacaatagaaatatggctaatgtaattgagaaactgaa

SEQ ID NO: 846011 - DNA, 120 bp, Artificial Sequence
  ENSG00000261285_5 (sequence is synthesized)
aatgtaatttacatgtacatttaagatgaaatagccagacatggctactattataatggacaacacatttttacaaattatgagttgactttattataccagcctctatctcatacttcc

SEQ ID NO: 846012 - DNA, 120 bp, Artificial Sequence
  ENSG00000261285_6 (sequence is synthesized)
ttattatcttcaaaacacaatcgatcaggaacaaaaacgtaatctcaagcttctagaaatttggcacactcaccaaagaactgaatactcctttgcagtcagaccatgtgttccagacaa

SEQ ID NO: 846013 - DNA, 120 bp, Artificial Sequence
  ENSG00000261285_7 (sequence is synthesized)
cataactagaaagatgtgagaaggcacttcatgtgggagataagccttgttttacttaatccactgagatgtcagagttaattgttacagcagcagcctgttgtataggctgactaacac

SEQ ID NO: 846014 - DNA, 120 bp, Artificial Sequence
  ENSG00000261285_8 (sequence is synthesized)
ccagaactgtaaaagaatcaagggttctcagctgaccgtgctgcactgtttatcagaggtttcgggacattaggccaaggaagaactattactacagcaaagataaggggaaaggaataa

SEQ ID NO: 846015 - DNA, 120 bp, Artificial Sequence
  ENSG00000261285_9 (sequence is synthesized)
aacctcacaagaattccctgtcgacctaaatgccattcctctttcgaggccagacccagactatagctgggtgtgacactgtcgatgttttaataatatcaggaaaacacgttaacctct

SEQ ID NO: 846016 - DNA, 120 bp, Artificial Sequence
  ENSG00000261285_10 (sequence is synthesized)
aactattttgataactcacaaagctaaaaaatgttccatgtttagcaaaaacgccagagaactttttgaaattcatggtaccccaaaggctgacagcaagaatatactttcgggtacata

SEQ ID NO: 846017 - DNA, 120 bp, Artificial Sequence
  ENSG00000261285_11 (sequence is synthesized)
agaaagaaaaatgtatttggtatgactggctgttaatatgtcatgaagataaatcataagtcttattcttgggaatcttaataaaagaagccactttgagacatggaaatataaaaataa

SEQ ID NO: 846018 - DNA, 120 bp, Artificial Sequence
  ENSG00000261285_12 (sequence is synthesized)
gatatcacatggaactcttctctcccactctgtcacttgactgccttcttgcctgatgagtattatgcacactggctgagtcacgaagtcatgaagtcaagggcattgcatttagagcca

SEQ ID NO: 846019 - DNA, 120 bp, Artificial Sequence
  ENSG00000261285_13 (sequence is synthesized)
gcaagatctactctctacacatcgacatcctgctctcttccagggagagtaacctacatgaaccataccagtggttcccatccaggacagttcccactcacctccccatggacatttgga

SEQ ID NO: 846020 - DNA, 120 bp, Artificial Sequence
  ENSG00000261285_14 (sequence is synthesized)
aatatctagagacatttttgcatatcacaaaatgcaaaaaaaaaaaaaatgtaccctgcaaagccacaagagcagagcagaccaaggctttgggagcctaccccttgcatcaatgtggcc

SEQ ID NO: 846021 - DNA, 120 bp, Artificial Sequence
  ENSG00000261285_15 (sequence is synthesized)
tggatgtgagacatggagtcaaaggttttcagtgtctgatgggtaggggctagggatgctgttaaacatgctgcaatgcataggatagttctctacaataaagaattattcaatcttaaa

SEQ ID NO: 846022 - DNA, 120 bp, Artificial Sequence
  ENSG00000261288_0 (sequence is synthesized)
gctgctcagccaatgctgtggtcttgatgggactgcattcgctttacatgattgaagctgctggcgtggaagctgtgccatgtcatgtaaagcatgcagtgggaaagcagtggggtgggg

SEQ ID NO: 846023 - DNA, 120 bp, Artificial Sequence
  ENSG00000261288_1 (sequence is synthesized)
gcgtctttgtattacatcatctgttgttgccgtttcaaaaatccagaggcctttctacacttcagttggatgttgatttcaaaatgaccgatgtttctttctgactcatgaaggctgctg

SEQ ID NO: 846024 - DNA, 120 bp, Artificial Sequence
  ENSG00000261288_2 (sequence is synthesized)
aggccaaggatggcggatcactcgagccctggagtttgagaccagcctgggcagcatgatgagaccccatctctacaaaaattagctggacacggtggtgcacacctgtggtcccactac

SEQ ID NO: 846025 - DNA, 120 bp, Artificial Sequence
  ENSG00000261288_3 (sequence is synthesized)
tcaggaggctgagtaattgggtccatagcgtaggtaagtcacctcctttaagagactttgataagcaaaatagtgaatatattctttttatttatttacttattattttttatttttgag

SEQ ID NO: 846026 - DNA, 120 bp, Artificial Sequence
  ENSG00000228739_0 (sequence is synthesized)
agaagaccggaacttagcctttctggctctcaagctgtccctggtgtgggaacgggatgcaaagtacaaatggaaaggatagatcatgaaggaaaaaatggacacgcttttactgagaag

SEQ ID NO: 846027 - DNA, 120 bp, Artificial Sequence
  ENSG00000228739_1 (sequence is synthesized)
gaagagatcctggatgagatgcacgtgagatggtcactgccaggaccaagatgctgctaatgtatactggaatagccccatggtttacctgtgattggcatccatcctgactggtctgtg

SEQ ID NO: 846028 - DNA, 120 bp, Artificial Sequence
  ENSG00000228739_2 (sequence is synthesized)
tacattttaaatatcatctctgtcaacttccagtgaaaacgttagggagtcaagatatgtcctcaaccagtgagagcaatccctgctttgaaagcacttttgcaccaatgaaatataaat

SEQ ID NO: 846029 - DNA, 120 bp, Artificial Sequence
  ENSG00000228739_3 (sequence is synthesized)
atataaacaaataaattccaaaaatgtaaagccattatttcaaatgattttaaatggccaaactgaatgttttggcagcttggtgactttatggaaaaaaataaattgctgatgaattgg

SEQ ID NO: 846030 - DNA, 120 bp, Artificial Sequence
  ENSG00000262950_0 (sequence is synthesized)
gtcctcagggtggggaggggctgagccatcacccagcaccaggttccggtgaggaccatagcaactcctgtccgcactttgcatacttacattagtttcctgaagaattctcccattgtg

SEQ ID NO: 846031 - DNA, 120 bp, Artificial Sequence
  ENSG00000262950_1 (sequence is synthesized)
ccttgcccgacatctgagagcagtgagtggtctgcctggcattgaaaaggaaaaagtttctggaagacccacctggggctagaagccttgaagttgctgccctgttctctagccacttgg

SEQ ID NO: 846032 - DNA, 120 bp, Artificial Sequence
  ENSG00000262950_2 (sequence is synthesized)
gaggacaagtgtcatcgcaatccctaagggaggacagaagtcattcacggcactctacagaagccagaagatgtgcttataggcggtgttgggtgttgtcttgagcccacagtgggccta

SEQ ID NO: 846033 - DNA, 120 bp, Artificial Sequence
  ENSG00000262950_3 (sequence is synthesized)
agctgtactggggatgttcgatgaaagcagagagagaaataaaagatcatgcaggaacttccatgaggataggaagacaagaaaggtcaacacacagcacggccaacaagcaagacagtc

SEQ ID NO: 846034 - DNA, 120 bp, Artificial Sequence
  ENSG00000262950_4 (sequence is synthesized)
taagaatgaacatggtgacttaaaagatgacatgggggctgcagggagggagaaacaaacggggagggaagcacaagtcttgtgagtgtctttttggagagacaggactgagatgggtct

SEQ ID NO: 846035 - DNA, 120 bp, Artificial Sequence
  ENSG00000262950_5 (sequence is synthesized)
ccaagataaatttagttttggatcaggacaggaaaagagagaaaggccctgatctgagggtaaggacgagatgcacaaagagcagcacattctgtaacatgtcagtagtgagtagagctt

SEQ ID NO: 846036 - DNA, 120 bp, Artificial Sequence
  ENSG00000262950_6 (sequence is synthesized)
cgccaacagtgattgagcatataggtgatggggtttgcatgtttgttaatttatctgttgtttttcttttttatctttccactatgaatatgtagtacttgtgcatttaaaaaatgttat

SEQ ID NO: 846037 - DNA, 120 bp, Artificial Sequence
  ENSG00000262950_7 (sequence is synthesized)
aaatctgcaagttaacaaatctaatgcatttcccttcaatctcatcatcccaagactagacctttttcggacagtggcttgaagacagacaggctctcctaagagatggaagcccagggt

SEQ ID NO: 846038 - DNA, 120 bp, Artificial Sequence
  ENSG00000262950_8 (sequence is synthesized)
gttcagcccccactgtctaaggccccccaactccaggagccccatatgttcctaccagaccataggcttaactggatgtaggccaggggtgggggaatgtgctctgcttggcattgtaag

SEQ ID NO: 846039 - DNA, 120 bp, Artificial Sequence
  ENSG00000262950_9 (sequence is synthesized)
gtgccaggcgcacctgagcagctggacaggtgtgacagatgccctggattgcatggagctggctgtgcctgtgcacacacacccgtctgcaccccgtcctcccctccctacacctccctg

SEQ ID NO: 846040 - DNA, 120 bp, Artificial Sequence
  ENSG00000262950_10 (sequence is synthesized)
tcttcccggctagctcaggtgtggtgcatctgtggcccattggcagctctcttgcccgcagtgcacagggagctgtcaggttaaaagctggcttgctcgatttgatcccacatgcgagct

SEQ ID NO: 846041 - DNA, 120 bp, Artificial Sequence
  ENSG00000262950_11 (sequence is synthesized)
gttttatttccctctctctcccttacacggcttcggtgtgcttttataaatatttcactagccttgctaaagtctatttcatctctctcttaaatttattaaatataaatgcagcaacaa

SEQ ID NO: 846042 - DNA, 120 bp, Artificial Sequence
  ENSG00000262950_12 (sequence is synthesized)
atttcttggtccgctggtccctcaatgacacaatcaatgagtaaagggggatacctttactcatcacctcagacctgagcacgccctgggccccatttgggcagagctttgctctttgct

SEQ ID NO: 846043 - DNA, 120 bp, Artificial Sequence
  ENSG00000262950_13 (sequence is synthesized)
tttcttttaaagtaaagggcccatctgctgcagctagtgacctggccaaaaaagacacagactgctgtgaaatgattgagggcagtgactcccctcccaccccaggagccagagccgaca

SEQ ID NO: 846044 - DNA, 120 bp, Artificial Sequence
  ENSG00000262950_14 (sequence is synthesized)
gagccaagagcaaggcaggaattcaggtccccaaaagcaagccagaagcaccacctccaagcgccctgccacttcctttgttctttgttaattgcaaaataaacacaaccctgcccaccg

SEQ ID NO: 846045 - DNA, 120 bp, Artificial Sequence
  ENSG00000223436_0 (sequence is synthesized)
gtgcagagctgtgcgtgcctgccgaggctgggcagcagacttcagactggagcttggggactcctccagagaaacagtaagatgagttacaagccgtgaacctgtctcagtaggactgtc

SEQ ID NO: 846046 - DNA, 120 bp, Artificial Sequence
  ENSG00000223436_1 (sequence is synthesized)
tagttacagggagctccatattaagagaaattggaagaaacctgtaatccaatcatgaagccggggatggtggggacatcattagagatgccacggtccagaggaaggacacatcggctg

SEQ ID NO: 846047 - DNA, 120 bp, Artificial Sequence
  ENSG00000223436_2 (sequence is synthesized)
atgaagaccaacagagaatgagaaggacagagcagcaaagggcacctgcagggatggaacagccaccaggagccagatgctttaactgaactgacttgagttgaaccctcacaacagacc

SEQ ID NO: 846048 - DNA, 120 bp, Artificial Sequence
  ENSG00000223436_3 (sequence is synthesized)
cgccatgcaggtacttattagataagagagccgaggaccaggaaggccaaatagctggcccaggttcccccaggtgccagcggtaggactgcaattctgctcgtcgaagccctctctctt

SEQ ID NO: 846049 - DNA, 120 bp, Artificial Sequence
  ENSG00000223432_0 (sequence is synthesized)
aggccttgggttacactctgatgatgccaggataatcagaccagcctctgggagaccctccccaccaggcaacagctgtccctcatcctcccagctctgttcccatctggcctggggaag

SEQ ID NO: 846050 - DNA, 120 bp, Artificial Sequence
  ENSG00000223432_1 (sequence is synthesized)
atgacggctgaggccctcactctccactgaactctgcttgcggctggggactgctctgtgtctgcacgtgttcgcatttattaaatgtggaggtgcaaaacaaaacaaaacaaaacaaaa

SEQ ID NO: 846051 - DNA, 120 bp, Artificial Sequence
  ENSG00000223430_0 (sequence is synthesized)
ggttctgtcctcacttggggagggaatcgtacaatggggacctggatcttagtttccatcttaaaattctgctttgccacaaagtacaaagtaaagatgagagaaaaatgttgcaaaggc

SEQ ID NO: 846052 - DNA, 120 bp, Artificial Sequence
  ENSG00000223430_1 (sequence is synthesized)
tggagactactattaagcagatccctctaaaagatctgaatgggaacacttgatcctatgtcctttagctggctcatggcaggattttacaaatagaattgttcaatctctctgttcaga

SEQ ID NO: 846053 - DNA, 120 bp, Artificial Sequence
  ENSG00000223430_2 (sequence is synthesized)
ttactctccactctaccatgctgcttgctccttttggtctccctttcgtttggcctgtaatgtggatgtgttctttgtttaatgagatgagcattataataaagtcctagggcatttgaa

SEQ ID NO: 846054 - DNA, 120 bp, Artificial Sequence
  ENSG00000236958_0 (sequence is synthesized)
gctctaggggaagccagctggcatgggaagtagtgcagtggagaaatgcacatggccagagactaagaccaatcatttgaatgagtttggaagcatcctacccaccactgccaccagtca

SEQ ID NO: 846055 - DNA, 120 bp, Artificial Sequence
  ENSG00000260886_0 (sequence is synthesized)
atgcgcactgactagcgcagccccctaaacatgcatccgcgcctgcgcagccgcgggtcgcccagggttgggatgttggtgtcggctgggggctgctgtgaggcgcttggtagcacccag

SEQ ID NO: 846056 - DNA, 120 bp, Artificial Sequence
  ENSG00000260886_1 (sequence is synthesized)
tcctgatactctccagttacccggtaggcggggctcggacacaaagaaaagagatctttgggggcttggatggaggaacaggaaaagaggagccaggcttttttggaaaattggcggcag

SEQ ID NO: 846057 - DNA, 120 bp, Artificial Sequence
  ENSG00000260886_2 (sequence is synthesized)
cggtggcatacgggaaactgaaatctttatctaatctcatcctttgtatattcgtcttggatttgctgaagaaaattaaaaggccaggcctaccactcctatggcacagtattgatgaga

SEQ ID NO: 846058 - DNA, 120 bp, Artificial Sequence
  ENSG00000260886_3 (sequence is synthesized)
tccaccccaggcttggaacttagggaatgactggtttttgtcatttcacacaacagctgaaggattctgtccccacctcgtcctctgtgaagtctgctggacgtacctgccagaatcttc

SEQ ID NO: 846059 - DNA, 120 bp, Artificial Sequence
  ENSG00000260886_4 (sequence is synthesized)
tgaagatgacgtttgctgaacactgacccacaggggtttgatggattattgacaatgagacaagctgtcttttcatcaattagatattccagttgtttcaggtcaatttcccaagatttc

SEQ ID NO: 846060 - DNA, 120 bp, Artificial Sequence
  ENSG00000260886_5 (sequence is synthesized)
tctggctggagagaaagaaaggatgagactaagatgattctgaaacatttagggggaatcctcacttatctcaagggtccaatgtaagcaataaagtctgtctctggcttcaaccaccac

SEQ ID NO: 846061 - DNA, 120 bp, Artificial Sequence
  ENSG00000260886_6 (sequence is synthesized)
agaagaaactgggtggctgaaggacaggaatgagaaagaaggacagttgcgtttgtttgtatcgtttgaaattgtccagtgtgtatgtgttcttttcaaatgtttgaagaaccattggct

SEQ ID NO: 846062 - DNA, 120 bp, Artificial Sequence
  ENSG00000260886_7 (sequence is synthesized)
gtcaagcctccagtggggttgaatacagtagtccccccttatccacagggagcacactccaagacctccagtggatgcctgaaattatggatgtctgaaaccatgggtagtactgagccc

SEQ ID NO: 846063 - DNA, 120 bp, Artificial Sequence
  ENSG00000260886_8 (sequence is synthesized)
ggttgggatgttggtgtcggctgggggctgctgtgaggcgcttggtagcacccagtcctgatactctccagttacccggtaggcggggctcggacacaaagaaaaggtgaattcgcagct

SEQ ID NO: 846064 - DNA, 81 bp, Artificial Sequence
  ENSG00000260886_9 (sequence is synthesized)
agctaggattacaggcgcgcgtaggtttcaccaagttggtcaagatggtctcaaacttctgacctcgtgatccgcccgcct

SEQ ID NO: 846065 - DNA, 78 bp, Artificial Sequence
  ENSG00000260886_10 (sequence is synthesized)
cgatctttacacgcattcttcgtgttatctgaagacactctgacgccaccacccaaagcaactggcagttgactcttg

SEQ ID NO: 846066 - DNA, 120 bp, Artificial Sequence
  ENSG00000260886_11 (sequence is synthesized)
tctgacgccaccacccaaagcaactggcagttgactcttggcaattttaagcttgtgtggaaagcagccgccgcccggtagctcctttttatctagagacactcaggatgtgggggacac

SEQ ID NO: 846067 - DNA, 120 bp, Artificial Sequence
  ENSG00000260887_0 (sequence is synthesized)
agacagacatcactctttagaatccctgcaactttgagcaagttcgtgaatctcactaaggctcagtttcctccataaaattaatcaatatcagggcctctgcattggacaactccagag

SEQ ID NO: 846068 - DNA, 120 bp, Artificial Sequence
  ENSG00000260887_1 (sequence is synthesized)
ggcaccattggggttataccttgtgtttgcctaaccttcattgcagtgggcaggtgcatgctttctacaatgtcctaaggtctaaaggggtagagttctgtgtgtggcattttaggcctg

SEQ ID NO: 846069 - DNA, 120 bp, Artificial Sequence
  ENSG00000260887_2 (sequence is synthesized)
gaaaggatgagagtctacaaaaccagagaaatactgcagagctcctaaagtccttggaatgtcctaagtgccattggtaagaagcacacatgacaacctggactttccatcaacatttga

SEQ ID NO: 846070 - DNA, 120 bp, Artificial Sequence
  ENSG00000260887_3 (sequence is synthesized)
tcccagaccaccacccatgatcccaggctggaggaagcagcaggctagcggaattcaggaccaatgagccaggaaagaggacccaatgcagagctcacatcccaccctccttcccccatg

SEQ ID NO: 846071 - DNA, 120 bp, Artificial Sequence
  ENSG00000260887_4 (sequence is synthesized)
acaaagcactggcaaaccctgccaaagaagaagcttggctgcaaagcagtctggaactggacccgggatagattcaccaggagctcaccaccacagggaatgctgcactttgactggaca

SEQ ID NO: 846072 - DNA, 120 bp, Artificial Sequence
  ENSG00000260887_5 (sequence is synthesized)
gaatgcatcctccatgcccacagagcatgtgcccaggatgaatctcactgtatcccagttcctcatgcttggccccaaacctctttttcacagtaataaagaaaacacactttacaaaaa

SEQ ID NO: 846073 - DNA, 120 bp, Artificial Sequence
  ENSG00000260887_6 (sequence is synthesized)
gagtggatcaagcgtccacccatggaaccagagatgaagtcagccccttctaaactacattgaactggactaagtgtgatcctctaaaagaaaattgcaataccccatccaaaagaagag

SEQ ID NO: 846074 - DNA, 120 bp, Artificial Sequence
  ENSG00000260887_7 (sequence is synthesized)
gaaaggatgagagtctacaaaaccagagaaatactgcagccattggtaagaagcacacatgacaacctggactttccatcaacatttgaagcgggagcagtcttgtgggatcaagctctt

SEQ ID NO: 846075 - DNA, 120 bp, Artificial Sequence
  ENSG00000260887_8 (sequence is synthesized)
aaacacactttacaaaaaggcagttcatctatgaacatattggctaggataacacatcttagagctaaatgtgtcactgtaaatggactcattttatatctccacatactgtagatgttt

SEQ ID NO: 846076 - DNA, 120 bp, Artificial Sequence
  ENSG00000260887_9 (sequence is synthesized)
aaaaaaaggtacatgcacagaaactatgggaactgaactggagtatgagccaattaccctagactttgctgtaatctgacttttgtgtagcacattttctttagcatttttcttaatggg

SEQ ID NO: 846077 - DNA, 120 bp, Artificial Sequence
  ENSG00000260887_10 (sequence is synthesized)
ggatggggagtggaggcaaaggagacaaactgacagcagagcattttatttagacaaaagaaatatattcagcctgtcttaaattatttgtcattataatgacgttttctaatttaaaag

SEQ ID NO: 846078 - DNA, 120 bp, Artificial Sequence
  ENSG00000260887_11 (sequence is synthesized)
gcctgcctcactatacacttctagcaagccactgcaaggctgcattgcagctaagaggaagccctccttgaaggctgcacagcaaggagtgttggcagagtagctgggtttccactggga

SEQ ID NO: 846079 - DNA, 120 bp, Artificial Sequence
  ENSG00000260887_12 (sequence is synthesized)
tggatatgcactgctgctgccagagcatcataatttgcaagcatttatcgagtacccttcatctaattttcatcctgcggaaactagaaattgctacacttgcacacaataaacttctgg

SEQ ID NO: 846080 - DNA, 120 bp, Artificial Sequence
  ENSG00000260887_13 (sequence is synthesized)
cagttagccttctaaactgggacactaccatttgggagggaaaagacctttctggtggttaaagatggggcttccagttactgcatttgttttaatacagtctattccatagagccatcg

SEQ ID NO: 846081 - DNA, 120 bp, Artificial Sequence
  ENSG00000260887_14 (sequence is synthesized)
atggagactcattatataacctttcgtggaaagcttctgacttctttctcaatgcacagtgcttcacgtgacttttgagttatagctgactgccctagctcacattttagtgccagaaga

SEQ ID NO: 846082 - DNA, 120 bp, Artificial Sequence
  ENSG00000260887_15 (sequence is synthesized)
gctggttgccaggggagccaaccatgtgattagaaggttggaactttcaccacccaccaccctgacctccagggaagggaaagtggctggaagttgacttaatttgcaatgggcaatgat

SEQ ID NO: 846083 - DNA, 120 bp, Artificial Sequence
  ENSG00000260887_16 (sequence is synthesized)
ttcatcaatcacgtctatgtaatgaagcctccacaagaaaaaaatcttaacagaagaccttcagagagcttccaggttgctgaccacatggaggtcatgcccagagagggtgtgaaagct

SEQ ID NO: 846084 - DNA, 120 bp, Artificial Sequence
  ENSG00000260887_17 (sequence is synthesized)
tggctgtttctaagttgcatcctttatattaaagcaataatgttgtaaatgaactttctctgagttctgtgacccattctagcaaatggtcaaacccaggagggaatggtatgaacctct

SEQ ID NO: 846085 - DNA, 120 bp, Artificial Sequence
  ENSG00000260884_0 (sequence is synthesized)
aaaaggcctgagaatatacagcagaccctggctggtcacgccactacacgccatcagaacacaggagccatactggccgccctgctcagcctcagcctctgcattcagccacctggtcct

SEQ ID NO: 846086 - DNA, 120 bp, Artificial Sequence
  ENSG00000260884_1 (sequence is synthesized)
gtgggtcctaccacgtggacgctctctgacacctgcccttctgcattcctgctgcccctgcctatgtgcaaacattcatctcttttctgttttattgctacagttgcccaacagctcttt

SEQ ID NO: 846087 - DNA, 120 bp, Artificial Sequence
  ENSG00000260884_2 (sequence is synthesized)
ttctactccattgccagagttacatggctggagaaagaacctcaaatgtagagtggcatgaatctcactcctcagttcatgactgccatcatcatcatcaccatcatcaaacgtgtcctt

SEQ ID NO: 846088 - DNA, 120 bp, Artificial Sequence
  ENSG00000260884_3 (sequence is synthesized)
tgattttttttacctgatttcctctatcattctaaccacccttccttcccacacacataagctatagccacttcaatgtgtttaataaatgtccttagatatggatggatccgcgaagaa

SEQ ID NO: 846089 - DNA, 120 bp, Artificial Sequence
  ENSG00000236953_0 (sequence is synthesized)
gcatttatcatcctgttcctgtataacaggagtttgtttttctagaggcatcttatctttagtgtcagctagaggagcatctgtttcctcacttgtgggcttgtcctcagcagttaggtc

SEQ ID NO: 846090 - DNA, 120 bp, Artificial Sequence
  ENSG00000236953_1 (sequence is synthesized)
gggtggaggtcacgtcgggccgagtgcgctgcagtcagaagaggagctgtgtcccgcatacggtgattgtaagccaggtccatgccaccaagagctggagctgtggagtagtacttggtc

SEQ ID NO: 846091 - DNA, 120 bp, Artificial Sequence
  ENSG00000236953_2 (sequence is synthesized)
cccagaaaagccctcagtctgaggtccacatttcttcttaatgtgggcagaaataattgctgatgcttgtggtggttgagaatcctcagctgcagttcctttaacagttgctgtgggaag

SEQ ID NO: 846092 - DNA, 120 bp, Artificial Sequence
  ENSG00000260880_0 (sequence is synthesized)
acacatgctcttgctctctcgcgctctgggagagcgcttatatgggcttcatgaggctaagtaataaacactttgtcttcaccctgctatttatgggttgcttggggcatcctgtgctct

SEQ ID NO: 846093 - DNA, 120 bp, Artificial Sequence
  ENSG00000260880_1 (sequence is synthesized)
ccactgcccttacctgaacagacggctcatgcagacccggagtttaatagggacaacagtaaatctgagaggctgtgtgtgtcccacgcgctcctgttttcccagccacccatgctagtt

SEQ ID NO: 846094 - DNA, 120 bp, Artificial Sequence
  ENSG00000260880_2 (sequence is synthesized)
gcagagaaaagccaacctgtatcccttcgtttatgctctgtgtgcccttcctggagagatcccttcattcttcagcaatggatcaaagaactctgaaaacaagaacaaccccgacagctg

SEQ ID NO: 846095 - DNA, 120 bp, Artificial Sequence
  ENSG00000260880_3 (sequence is synthesized)
caaaccacgagccctcacctccagcagaggttttcgggaaactctggacgaccacgcgcatgcagagcttggcagagccagcgtgggcacacgtggcaaagccatttatgcctgggaatt

SEQ ID NO: 846096 - DNA, 120 bp, Artificial Sequence
  ENSG00000260880_4 (sequence is synthesized)
gtgctggttgtgaattctgcaccagcaacctccaccccctacattggacttgataaaacaagctgcttctcaggtatgctaaagaacaaattaagaaacagaatcacctgggatgagtga

SEQ ID NO: 846097 - DNA, 120 bp, Artificial Sequence
  ENSG00000260880_5 (sequence is synthesized)
aattccctttcaatcatgtcagccggagcagaggttgtcatgaaatttgatgttagggatttatttcctaatatacagtctaaaagggaaaacagtgtaagagctgaaatgtgaattgga

SEQ ID NO: 846098 - DNA, 120 bp, Artificial Sequence
  ENSG00000260880_6 (sequence is synthesized)
catgtctatagagtgtgaattggattcaagacaaaatattgtgaatggttaatagggtcagtctaagtacacttcctgaaataatctcttggatatgcaaatattctgagagctacactg

SEQ ID NO: 846099 - DNA, 120 bp, Artificial Sequence
  ENSG00000260880_7 (sequence is synthesized)
tcaaatagctattgtatcctcttatctatgtgttcacagaacggctacatgttataacaaatgaaaaatgtgaatttaaaaaataatgccaccctaaaataatactttactttgaatagc

SEQ ID NO: 846100 - DNA, 120 bp, Artificial Sequence
  ENSG00000260880_8 (sequence is synthesized)
attctcactgcaaacaggaaaaggaaagagaaaaagcaagctctgtctccacacaaggtttgctgggctggctatgaactgttccaagatcccttcattcttcagcaatggatcaaagaa

SEQ ID NO: 846101 - DNA, 120 bp, Artificial Sequence
  ENSG00000260880_9 (sequence is synthesized)
ctggcgttgacttccaggttcactcaaaggccacgtgccaccctttgcacatcgtgtttgggttgcaaaggggaaagatgcatattgaaagccagaagtgtgcccaggccaacagacgtc

SEQ ID NO: 846102 - DNA, 120 bp, Artificial Sequence
  ENSG00000260880_10 (sequence is synthesized)
actttggtccgtttgagggcccctttcgctcagctcttttgggggttccagggctctcagagcttccaggtcctgtaagaagagatggagtcatagctgcgccctgtccactctcgggct

SEQ ID NO: 846103 - DNA, 120 bp, Artificial Sequence
  ENSG00000260880_11 (sequence is synthesized)
gtcacacaagcctggagcccagccatttctcggccttgtcttcatcttgggctaaccggtcgtctcctgcaaacagacagcacggagaaggatgagtgaactcggcctctccccacagaa

SEQ ID NO: 846104 - DNA, 120 bp, Artificial Sequence
  ENSG00000260880_12 (sequence is synthesized)
tacagttcgccattacagcgctgattaaatacaggacattatctcaccataatgccctcctggcggcgttcccaggaaaattctaactaatcataaaaatagaaagaaaaacgcaaccta

SEQ ID NO: 846105 - DNA, 120 bp, Artificial Sequence
  ENSG00000260880_13 (sequence is synthesized)
gaagcgaggcgggaaaagaaaatgaattttagggcttagaaaaacaagctactaatagtactaagtagagctggggcggtggtgcagacagcttagctctagcagggatgtagccggcat

SEQ ID NO: 846106 - DNA, 120 bp, Artificial Sequence
  ENSG00000260880_14 (sequence is synthesized)
ggcacgggtgagtcctggccctgctcctggctgaaaacttaagagtttagaactggagcacctggcagggcaaaggcaggatggggtgagggaaagttgtggggttgagtgtggaccccc

SEQ ID NO: 846107 - DNA, 120 bp, Artificial Sequence
  ENSG00000260880_15 (sequence is synthesized)
ccaaccccctacaaatgcacacacaagctaggcgctcaatagctttcttatagcccaggtaggcaaatcctcttccaatatacctttgaaaataatgcctgatctttctccagcagcatt

SEQ ID NO: 846108 - DNA, 120 bp, Artificial Sequence
  ENSG00000260880_16 (sequence is synthesized)
ctttttggaaacacaggcatagtttaggtatttttctccctggaaggttctttcctggaagttcacccaattaattcctactcacacattttagagatctgaacagtaagaagccttctc

SEQ ID NO: 846109 - DNA, 120 bp, Artificial Sequence
  ENSG00000260880_17 (sequence is synthesized)
taagaacccctaccctgactccagtccaggggctggtcctgtaaaccttctcttcataacagccatgtgactgtaattaatgcaataactgcatagttgattgtttaacatggttgtctg

SEQ ID NO: 846110 - DNA, 120 bp, Artificial Sequence
  ENSG00000260880_18 (sequence is synthesized)
tcccctcccttagattaaaaatgtgtttgtcttattcctgactttgtaagtactaggtacaaagtagctgcccaatacatgcctgtgttggatgagtgctgacgggtcacggtgggcgcc

SEQ ID NO: 846111 - DNA, 120 bp, Artificial Sequence
  ENSG00000260880_19 (sequence is synthesized)
aagtttaagacagcctggtgaggcccagagcctcaccagtcccccagaaaacggagtattgtttccatccaaaccttgcactgaaaggagcctgtcagcaggaagtgacctcgtgagaca

SEQ ID NO: 846112 - DNA, 120 bp, Artificial Sequence
  ENSG00000260880_20 (sequence is synthesized)
actgtggggagagcaaagggccggggagagaaaggcctcattctcactgcaaacaggaaaaggaaagagaaaaagcaagctctgtctccacacaaggtttgctgggctggctatgaactg

SEQ ID NO: 846113 - DNA, 120 bp, Artificial Sequence
  ENSG00000236950_0 (sequence is synthesized)
acactcccaacatgtaggtggcctcatcagaaggtaaaaactgaagaaaaaaatcattcaaactcccatatactagatctttctcatttaatcttgaggtttccatgttgagaggagtga

SEQ ID NO: 846114 - DNA, 120 bp, Artificial Sequence
  ENSG00000236950_1 (sequence is synthesized)
aaggagatttctgtacccattagccaagattgtctgaaacaaatcccaggaagatgttttgaaagaagaatacataagccttatgactcagttctcagtagcttcttcagtatctttctt

SEQ ID NO: 846115 - DNA, 120 bp, Artificial Sequence
  ENSG00000236950_2 (sequence is synthesized)
actccgaaattgccagagtggtttcccactgacagacttcatcgctgtactgcacatctcttcactacaaatggggagatgagacagagacaaaaagagaaatggatttactgtgctggg

SEQ ID NO: 846116 - DNA, 120 bp, Artificial Sequence
  ENSG00000236950_3 (sequence is synthesized)
gaagttaagcacacactgggttggaatttcatttccactgaattagaagctctggctcagcacggatgacacagtgatgctcctttaataacacaaaataaataaaacatggaaaaggtt

SEQ ID NO: 846117 - DNA, 120 bp, Artificial Sequence
  ENSG00000269560_0 (sequence is synthesized)
gattttctgcctgttggatctcttaattactgctggaggggtgctgcagtctccaactatacaaaggaatattttctttcaaccaacttgatctgtctacgtctgatggcctggaatcct

SEQ ID NO: 846118 - DNA, 120 bp, Artificial Sequence
  ENSG00000269560_1 (sequence is synthesized)
tcaggaaagtgtggtcagctggattttgtcagaacgtggatttctacgggccttctggcctctcatgtttgatgaagggaacagaagaaaatggtttcacttcttcagtgtatatttatt

SEQ ID NO: 846119 - DNA, 120 bp, Artificial Sequence
  ENSG00000269564_0 (sequence is synthesized)
tagggcatcacgaaccatcctgcttcaagggagcctgcgggtctgactgcagcttcagctatgacctggagttcccgggcttctctgcggggcaccagtctgtatgctccattttagata

SEQ ID NO: 846120 - DNA, 120 bp, Artificial Sequence
  ENSG00000269564_1 (sequence is synthesized)
caggatacggggttcacctgcagatgaacagggcaggaaaagcttgatggggtgtcgggggaatctggttggccttaaagggaatttggggtcctgttcctgaatttggtaggcagcatg

SEQ ID NO: 846121 - DNA, 120 bp, Artificial Sequence
  ENSG00000269564_2 (sequence is synthesized)
catgtaaggcttgaagtgggtttggccagagcatgggctggagtgcttccaccctgctacacggacaatgccacagtctcacttttcctaacttttttttttaataaaatgtgaacaaca

SEQ ID NO: 846122 - DNA, 120 bp, Artificial Sequence
  ENSG00000266397_0 (sequence is synthesized)
ctccttcaggacacccatgattacgtgtgcccaccagatgctaagggattacaaagaacgaaaggaggttacaacttagctagacagaagaaaggaagagtatacaacacagcgcagtct

SEQ ID NO: 846123 - DNA, 120 bp, Artificial Sequence
  ENSG00000266397_1 (sequence is synthesized)
aggtgaacagagctgaagaagggtggtgtagtagttcctgttcctttcctgcctcacttcctggcctcaagtgatctacctgcctgggcctcccaaagtgcaggattacagctgatgact

SEQ ID NO: 846124 - DNA, 120 bp, Artificial Sequence
  ENSG00000266397_2 (sequence is synthesized)
acacctaaagtttcctcctatggccacctgtggatcaccctgaccttcaaagctggtagccaaagttctgcttccacccccaccatctgcaaggtggcacttttcagtcttgatggataa

SEQ ID NO: 846125 - DNA, 120 bp, Artificial Sequence
  ENSG00000266397_3 (sequence is synthesized)
atgttaaaaatcacaaccaacaattcttaatcatccctatgattttcaaaggaaaacgctactgtattgtcaaactttttctctacaggctaaaataaaaataaatgactactgaaaaaa

SEQ ID NO: 846126 - DNA, 81 bp, Artificial Sequence
  ENSG00000234551_0 (sequence is synthesized)
agttctgtagctgtcagggccggggtgtaccggggcagcccatggtggtagataaaaacagctgttctggagtcagagtga

SEQ ID NO: 846127 - DNA, 120 bp, Artificial Sequence
  ENSG00000234551_1 (sequence is synthesized)
atggtggtagataaaaacagctgttctggagtcagagtgacttctgtgctggttcttattccgttagttacttgccgcgtgctgtcaaagtctttgtaaaagtgacgtgaagagattttc

SEQ ID NO: 846128 - DNA, 120 bp, Artificial Sequence
  ENSG00000234551_2 (sequence is synthesized)
atgttggaaagatgactaactgcatcgtagaattaatgtgaaagggtggcccaaggaagcaagtttcttcacagctattgcaataaacagggtctactggagaccttggctttttatttc

SEQ ID NO: 846129 - DNA, 120 bp, Artificial Sequence
  ENSG00000234551_3 (sequence is synthesized)
cctgacacaacttcacactgctggagcaatgcttggattgctctggaaacactggcaaatctcaagatgcagttcaggcttctccatgatgagtgtgagtccctaggctgtctctcaaac

SEQ ID NO: 846130 - DNA, 120 bp, Artificial Sequence
  ENSG00000234551_4 (sequence is synthesized)
ctaattcattcattgattcactcatctttcccacaggcatgtgctgtgcgtttactgtactgcatgacactgtggaggttataaagaaataaaatatttggggcttactctctatgaaat

SEQ ID NO: 846131 - DNA, 120 bp, Artificial Sequence
  ENSG00000234551_5 (sequence is synthesized)
aaaattctaattctttctaccatatattcttatgtgagatcccagcctgctctacctggtgcctgctctacctgttacctggactagggcatttctgtatcagattaaatttaaaggtgt

SEQ ID NO: 846132 - DNA, 120 bp, Artificial Sequence
  ENSG00000234551_6 (sequence is synthesized)
ttcaatagttaataatgatcaaacgttataaatattgggaaactataatggatgaggtgaaaaagaaaaggccactaagtagaaaattagataaaatagacatatataaaattaagtcat

SEQ ID NO: 846133 - DNA, 120 bp, Artificial Sequence
  ENSG00000234551_7 (sequence is synthesized)
gtgttatgggctaaactgtgtcccccacaaaattcatgttggggtcagtacctcagaatgtgtctgtatttggagacagggcctttatagaaataattaaattaaaatgaggtcactagg

SEQ ID NO: 846134 - DNA, 120 bp, Artificial Sequence
  ENSG00000234551_8 (sequence is synthesized)
gtcagctctaatccaacaagatgggcatcctgataggaagagggaatttggatacagagggaagattatataaagacacggggagaggatgaccatctacaagaccaagagagaggcctg

SEQ ID NO: 846135 - DNA, 120 bp, Artificial Sequence
  ENSG00000234551_9 (sequence is synthesized)
tccgtaagaaaccaaccctcaaggagagaggcctttctgtaagaaaccaaccctgccagcacccagcttttggagctctagtctccagaaatgtgaaataaatttcttttgtttaagcca

SEQ ID NO: 846136 - DNA, 120 bp, Artificial Sequence
  ENSG00000234551_10 (sequence is synthesized)
agttacttgccgcgtgctgtcaagtaagttacaacacccctctgatgctcttccgtaaaatgaagctaaccgtgtattatggagaggattaccacctcaccatagactgtccttgcagaa

SEQ ID NO: 846137 - DNA, 120 bp, Artificial Sequence
  ENSG00000234553_0 (sequence is synthesized)
atgtctgcaacatggatgcaatgatataaccttattttatgtatcatccattcacctgttgatcaaagactgtattcaagatggcaggcacggtgaagtcaatgataactctagtttatt

SEQ ID NO: 846138 - DNA, 120 bp, Artificial Sequence
  ENSG00000234553_1 (sequence is synthesized)
gagaaactactcggcatcatacattatcttaattaatcctctttacaatcccagaaagtgttccttatcctttatcttcaagtaccctaaggtgcaaagcacagaaggaggggtggttta

SEQ ID NO: 846139 - DNA, 120 bp, Artificial Sequence
  ENSG00000228035_0 (sequence is synthesized)
gttccgttcaggcctgtgcgagaaagactcccaggcccctgggttctccatagcccacacttccactcggctccgcttctcttgcccagctgtctctcctccaaggagcggacagggcgg

SEQ ID NO: 846140 - DNA, 120 bp, Artificial Sequence
  ENSG00000228035_1 (sequence is synthesized)
acacgagacccgggtgcccttttgtcctctattccagctctgggcggatcctcctcccatgatgtggatgatgctgaggagaaagtggaagacgggtctgaagaagcaaggactggcaag

SEQ ID NO: 846141 - DNA, 120 bp, Artificial Sequence
  ENSG00000228035_2 (sequence is synthesized)
tctgatcccccactctgattctcattgctgaatgtctgggtcttccttgtgtacctgctggggtgggagactgctcgcagcatacctggcctatgacatgcctagctctctggggtggat

SEQ ID NO: 846142 - DNA, 120 bp, Artificial Sequence
  ENSG00000228035_3 (sequence is synthesized)
cttggacaggaagactgcttctgccagagtaaagaatatgacggagctcctcatccgatggagcctctgggaagaggcgaagagccagctggaagcctggtgggcctccgctgccagcag

SEQ ID NO: 846143 - DNA, 120 bp, Artificial Sequence
  ENSG00000228035_4 (sequence is synthesized)
gacagatgcatcaagtcaggtttatgggagaagtcttcccagaccactatgtccaaacttctgtccatcctgctataacctctccagttagatggatgaaaaccagaccagtcagccatg

SEQ ID NO: 846144 - DNA, 120 bp, Artificial Sequence
  ENSG00000228035_5 (sequence is synthesized)
gaccagagctgcaaagataagaacccaaagaagaaacaaatggtgtagcattaagtatttctttccacttgagcagaaaaatcggagactaagggaactggaggagtgtggcctttgaat

SEQ ID NO: 846145 - DNA, 120 bp, Artificial Sequence
  ENSG00000228035_6 (sequence is synthesized)
gagacttgaggtggtgagacagcaagtgaacgtggggatacttgctcagagctttgctagaatacctcatggtttactggacctaggaccttcttgatatagaaatgaccataaaaagaa

SEQ ID NO: 846146 - DNA, 120 bp, Artificial Sequence
  ENSG00000228035_7 (sequence is synthesized)
agcagacagattcccatgaagaaaaagtgacctctcctctgaattccatgcttggaaaagtacttatttaaaggaaggaaaaaagtctccaaagcaaaacctggcttgtttagataactt

SEQ ID NO: 846147 - DNA, 120 bp, Artificial Sequence
  ENSG00000228035_8 (sequence is synthesized)
ggtctaggaacatggcggaagctgaacccaagaacatgcctgcacagtgcaacttctgggtgggagtcagttgtcttttctgagttccctggacctgagagtgtgacactgagaccaggg

SEQ ID NO: 846148 - DNA, 120 bp, Artificial Sequence
  ENSG00000228035_9 (sequence is synthesized)
gtgtggagaaatctatctcatatttatgacatgtggtgggatctttactgagcatttcaacccatcctgtagtaaagagtgctgaatcatggtgggtcacccttctagactagagacagc

SEQ ID NO: 846149 - DNA, 120 bp, Artificial Sequence
  ENSG00000228035_10 (sequence is synthesized)
acgttcacaggacaggacgatcaggagcagagagttgctctaagatatgagcaccagatggggaaatttaacagagtggactgtagagtcacttggaaggaaaaatggaagaggatttta

SEQ ID NO: 846150 - DNA, 120 bp, Artificial Sequence
  ENSG00000228035_11 (sequence is synthesized)
tattacagctgctgtcaatggttctaaccttgtagaaatctataggtaaaaatattgtgaaattacatatgccctttgttttcacttagtttttaatttcgcttactctaattactagct

SEQ ID NO: 846151 - DNA, 120 bp, Artificial Sequence
  ENSG00000228035_12 (sequence is synthesized)
tttcgcttactctaattactagcttttcaatataggtttaaaaagcagttatcagatttttattaattaagatagaagaaatcttttctcatagactatttagttttttattttgaaatt

SEQ ID NO: 846152 - DNA, 120 bp, Artificial Sequence
  ENSG00000228035_13 (sequence is synthesized)
caaaaatagtacagagagttcctgtatatccttcaactagctttccctagtgttactgtcatacttaacaataatacattgatcataaataagaaatgaacattggtacgacactatggg

SEQ ID NO: 846153 - DNA, 120 bp, Artificial Sequence
  ENSG00000228035_14 (sequence is synthesized)
cctaactacagacgttattccactagtatcctttttctggctcaggatccaattcaggatctcaaattgcctttagttatcacgactccctagtctcttccaatctgtaattgtcccaaa

SEQ ID NO: 846154 - DNA, 120 bp, Artificial Sequence
  ENSG00000228035_15 (sequence is synthesized)
tttttcttgacaacttcaacatatgtttttaaaactttttattttgagataactttaaattcacatgcagttgcaggaaataatacagagagatccctatattcctcacctagtttcccc

SEQ ID NO: 846155 - DNA, 120 bp, Artificial Sequence
  ENSG00000228035_16 (sequence is synthesized)
cattggtaacatctcaataactatggcataatatcacaacttggaaattcacattgatgaggtacatggatcttcttcagatttcaccagtttcacatggacctgtgtgtatcagtgtgt

SEQ ID NO: 846156 - DNA, 120 bp, Artificial Sequence
  ENSG00000228035_17 (sequence is synthesized)
gtgtgtgtgtgtgtgtgtgtctgtttgtatcagttctgtgcagttttatcacatgtgtagattcatatggccactaccagagaacagttctatcacaaggacccccagtgctacccttct

SEQ ID NO: 846157 - DNA, 120 bp, Artificial Sequence
  ENSG00000228035_18 (sequence is synthesized)
atagctatttccgtttatccccagctcccaatccctggcagccattaatttgttctctatctctatagttttgtcatttcaagaatatcatataaatagagttatacagtatgtaatctc

SEQ ID NO: 846158 - DNA, 120 bp, Artificial Sequence
  ENSG00000228035_19 (sequence is synthesized)
ttgagattggctttttttcactcagcctaattttcttgagatccatccatgttgttgcattggtcaataattcattcatgtttcttgctaagtcgtactccatggtttgatggaccagtt

SEQ ID NO: 846159 - DNA, 120 bp, Artificial Sequence
  ENSG00000228035_20 (sequence is synthesized)
tgtttaggcattcaattgtcgaaggacatttgcacaacctcagttcttttgaagtcagtttttgtagaatgtcttttgatttgagttggtctgatgttttcacatatttagatcatggca

SEQ ID NO: 846160 - DNA, 120 bp, Artificial Sequence
  ENSG00000234556_0 (sequence is synthesized)
gaggagacgcacagcatgccgggaatgagcaggcccctgttcttcggaacaaaccatctggagaaagagctggaatggagcccatcagtggtgcttcactgcttcaggaagatgcatggc

SEQ ID NO: 846161 - DNA, 120 bp, Artificial Sequence
  ENSG00000234556_1 (sequence is synthesized)
tcagcaggacacacagggctcagcaggtcacagccataggtaagcaaccaaagcaccctagaccccaccacctctttgaataaaattacccagtcatgccaggcttctcacctttcccag

SEQ ID NO: 846162 - DNA, 120 bp, Artificial Sequence
  ENSG00000234556_2 (sequence is synthesized)
cacacacacacacacacacacatgcacgtgtacacacatatatacaaacacattcagacacatacgcatgcacatacacaacacacacatgcacgctacacatacacatacatacacaca

SEQ ID NO: 846163 - DNA, 120 bp, Artificial Sequence
  ENSG00000234556_3 (sequence is synthesized)
tacagatacacacatacacacacgcacatacacacacactacacatacgcacacacacacacatatatgcatgcgtgcatccctctttctgtggcatccctgactttttggagattgagt

SEQ ID NO: 846164 - DNA, 120 bp, Artificial Sequence
  ENSG00000234556_4 (sequence is synthesized)
catttaattatttgtttaaatggctttgtaaatgttctaatgtccagaatatttgctagacaataacaacgttttccatggtttattaagtaaataattgtcctaatagaaatataaatt

SEQ ID NO: 846165 - DNA, 120 bp, Artificial Sequence
  ENSG00000234556_5 (sequence is synthesized)
gttacagaagtgcataaaatgaaattatttttccaaatggagttaaataagagtatattgaaggaattatatatattaaccttgtcttcaaaaatgagtagattctcacgggcaaagacg

SEQ ID NO: 846166 - DNA, 120 bp, Artificial Sequence
  ENSG00000236120_0 (sequence is synthesized)
agactgatttgagtaataataaaactactgtctcccacacagccggctctgcatgaattgctctttattgcaattcccctgtcttgagaaatcgcttctgtctaggcagcgggcaaggtg

SEQ ID NO: 846167 - DNA, 120 bp, Artificial Sequence
  ENSG00000236120_1 (sequence is synthesized)
ggtgagcccattgggcagttacaaggagacacggagacacagagacacaaagacagacacacaaaaaagagactgtcatgtgaaaagacagacacacagagagaacatcgtaagaagaca

SEQ ID NO: 846168 - DNA, 120 bp, Artificial Sequence
  ENSG00000236120_2 (sequence is synthesized)
gaggaggagattggagagaagcaactgtaagccaaggaacaccaaagactgcaggaaaccccaaaaactaggaacagggcatggaacagattctacccatattctcaggaagagtccctg

SEQ ID NO: 846169 - DNA, 120 bp, Artificial Sequence
  ENSG00000236120_3 (sequence is synthesized)
tgctatggacagccctatggaaaaagcaacctggagaagaattttagcctcccaagcatcaccatagttgtcctttggaagaagatcatccagctcaagttcagtctcaaatgactgcac

SEQ ID NO: 846170 - DNA, 120 bp, Artificial Sequence
  ENSG00000236120_4 (sequence is synthesized)
ccccagctgacaactggactgcaccagaatcaatcacctgaactgctcaccaagtcccaacctaaagaagacatgagaaggtcacttgagggtcatgaaaaaatttgcagaaggaatgaa

SEQ ID NO: 846171 - DNA, 120 bp, Artificial Sequence
  ENSG00000236120_5 (sequence is synthesized)
tgccttgaaggacgttgcgaccagctgctgatacccaggaatctggttgctcaagatgttacctgagaataaagaaacgcagacttttccccctcacttccctgaaactgcctctccttt

SEQ ID NO: 846172 - DNA, 120 bp, Artificial Sequence
  ENSG00000236120_6 (sequence is synthesized)
actccttagctacctaaaaactcactgcttcctctttttgttaagatggatttgagacatcttgctctcccaacttcttgctttgaccaaattgaataaatcttgtttgatctccaagca

SEQ ID NO: 846173 - DNA, 120 bp, Artificial Sequence
  ENSG00000236120_7 (sequence is synthesized)
ggaattcaagcttctggattccagatcttcctggaggctggaagcccaagatcaaggtgtcgacaaggctcgtgcttcctgaggcctctctccctggcttgtagaacccatcttctccct

SEQ ID NO: 846174 - DNA, 120 bp, Artificial Sequence
  ENSG00000236120_8 (sequence is synthesized)
ccaacacctggaattcaagcttctggattccagatctaaaaaacctgggcttagataatgattacgccaaaccactggattcaagaaaaagctcgtcatgcccaactattgcatgacagt

SEQ ID NO: 846175 - DNA, 120 bp, Artificial Sequence
  ENSG00000236120_9 (sequence is synthesized)
aaagatattttaggagaataaaatatttggagagcattggagtaaggactgtcattcctggaatggaagcatttaattaaaatgaccataagcctgaagtgactggggcatgggaatatc

SEQ ID NO: 846176 - DNA, 120 bp, Artificial Sequence
  ENSG00000236120_10 (sequence is synthesized)
cttgatgagaagatagtgaagcatgtaacaccctgggatagatggtgctgatggaacattttgaggagacccaagttgttggtggaggtgatgggagactcaggacaacagaaagtatgg

SEQ ID NO: 846177 - DNA, 89 bp, Artificial Sequence
  ENSG00000236120_11 (sequence is synthesized)
ggtggaggtgatgggagactcaggacaacagaaagtatgggattttcaatgctgcagaaatggggcatcaccttgaactgtagctccca

SEQ ID NO: 846178 - DNA, 68 bp, Artificial Sequence
  ENSG00000236120_12 (sequence is synthesized)
acacaaattctgtcttgcctgctgccatgtaagacgtgactttgctccttattcaccttctgctgcga

SEQ ID NO: 846179 - DNA, 120 bp, Artificial Sequence
  ENSG00000236120_13 (sequence is synthesized)
gctgccatgtaagacgtgactttgctccttattcaccttctgctgcgattgtgatgccacccccagccatgagtgagccaaactcactgttactgtgagtcaattaaacctctttccttt

SEQ ID NO: 846180 - DNA, 120 bp, Artificial Sequence
  ENSG00000236120_14 (sequence is synthesized)
caacacctggaattcaagcttctggattccagatctgtgagtgcttctcaaaatttaacatgcatatgaatcatctagggattttgttaaaatacaagtcctgcctggattgttcagggg

SEQ ID NO: 846181 - DNA, 120 bp, Artificial Sequence
  ENSG00000236120_15 (sequence is synthesized)
tgaggtgcacggaatctgcatttctaatgaactctgaggttgagctgatgtagctgcaaggattcgatctgcagatctacagtgtccaatatggtagccactagccacgtgtggttaatt

SEQ ID NO: 846182 - DNA, 120 bp, Artificial Sequence
  ENSG00000281113_0 (sequence is synthesized)
ggtggtttctgagcccccctcttagagtctgagccaccctattagtgtctgagccaccctattagtgtctgaggaccctggtggtgtctgagcacaggaaggaaagcagaccacatggaa

SEQ ID NO: 846183 - DNA, 120 bp, Artificial Sequence
  ENSG00000281113_1 (sequence is synthesized)
gcagatgaaggaaaaagcagaccacgtgggagccggatgaagggaaggtttctatgaaattgaaacagcctatctgccagtggagaaagttatttcatccttttttgcctgcagtgagaa

SEQ ID NO: 846184 - DNA, 120 bp, Artificial Sequence
  ENSG00000281113_2 (sequence is synthesized)
gaagtcctcgccacttcccatctgagcctgctcttcagtggacccaagtgtcgagtgcatcctgcacatctcaggcccccaggagggagggtcctgtctgggttcacacggcatcccctc

SEQ ID NO: 846185 - DNA, 120 bp, Artificial Sequence
  ENSG00000281113_3 (sequence is synthesized)
actgtgtctcccacaggaatacctggctgtcctgtgggttcctggagctccgccgcagggagcgctgcttgttggatgagtctctggatggagatgaggctcttgagaggcggcggttgt

SEQ ID NO: 846186 - DNA, 120 bp, Artificial Sequence
  ENSG00000286343_0 (sequence is synthesized)
tgtgggtgttggggatgcgggagaagtaggtgttttttaaagagaaaattgcaaaacctcttgggcaggattcgacctactagcctcttctgctgcataataagggaggcagcttgtgtt

SEQ ID NO: 846187 - DNA, 120 bp, Artificial Sequence
  ENSG00000286343_1 (sequence is synthesized)
ggcaggagcttacaacaccaaagaagtacaccactagagagacccaacccttcacattactctgcatattacagagaaaggagggcagagaccatgcagtctactgggtaacaatgggtg

SEQ ID NO: 846188 - DNA, 120 bp, Artificial Sequence
  ENSG00000286343_2 (sequence is synthesized)
aggaggaggaaatgaggatttagagcattcaggatgtgcttttcttcaccccacaccaacttagaaggttttcaaaataaagtaaatgtggttccacaatgtaattgtttttttctctcg

SEQ ID NO: 846189 - DNA, 120 bp, Artificial Sequence
  ENSG00000286343_3 (sequence is synthesized)
ctagattttagttttcccaagtcatccaatttttctgtatggtgaagccagagcccaaaaattcttggatatccttataaggtaaatagtagggtgcaggtcttcttgtgaattctgaat

SEQ ID NO: 846190 - DNA, 120 bp, Artificial Sequence
  ENSG00000286344_0 (sequence is synthesized)
ggtcattaagttcaagatggggaggggttggggtgagggctggcctgtctgaggaggggcatttgcagtgctggagcaagccatggaggacaggaattgctccagtcagaggaacagcaa

SEQ ID NO: 846191 - DNA, 120 bp, Artificial Sequence
  ENSG00000286344_1 (sequence is synthesized)
ggacaaggggcccaagacggcatgtactagaggctccacgcatagaaaaagccagccatccccagcgctgtaactgagtggccagtggtgggagtctttgtaatagttaattttatgcat

SEQ ID NO: 846192 - DNA, 120 bp, Artificial Sequence
  ENSG00000286344_2 (sequence is synthesized)
caacttgactggatcacagtgtgcccagatatttgatcaaacattattctgagtgtttccgtgacaatgtttttggatacaatcaacatttatttaattggttgaagacctgaatagaac

SEQ ID NO: 846193 - DNA, 120 bp, Artificial Sequence
  ENSG00000286344_3 (sequence is synthesized)
aaagagttcaattctctcaagtaagagaattcctcctgtctgactacttcagaattgggacattggctttttcctgcctctacactacaactacaccatcaagccttcagacatggaaag

SEQ ID NO: 846194 - DNA, 120 bp, Artificial Sequence
  ENSG00000286344_4 (sequence is synthesized)
gaaccacactattggctctcctcggtcttcagcttgccaactcaatgcagatctttgcatttgtcagccttataaccatgtgagctaattccctaaaataaatgtcctcatttaaatgta

SEQ ID NO: 846195 - DNA, 120 bp, Artificial Sequence
  ENSG00000228784_0 (sequence is synthesized)
atctccttgattgcacggtcaaccccgctcctgtctgtcaggctcaggaaccacttacaagctatggcaggtgatgttccagcatcccacagggaggattatgctggtgagccacatggc

SEQ ID NO: 846196 - DNA, 120 bp, Artificial Sequence
  ENSG00000228784_1 (sequence is synthesized)
caagcaggactatggcttcaacagctctggggcctgcatgttcctgcattagccctactccagcaatgaggctgaagttaccagagtgacatcatggtatctggtgcaagctatagcatc

SEQ ID NO: 846197 - DNA, 120 bp, Artificial Sequence
  ENSG00000228784_2 (sequence is synthesized)
cacctattcttggagcacacgtggtcagacactgattggcatgtgaccaagttgatggtggtcaaaacagaactcctttcatgcccacaagcttcagtattactatgttccctgccactt

SEQ ID NO: 846198 - DNA, 120 bp, Artificial Sequence
  ENSG00000228784_3 (sequence is synthesized)
ccgttgaagttttgcaggattgggatgatcctttggtgtgaacgaagccccaaagaggaccacgtggagagtgcctgactgttcctgtgatgtcttctagtacatgaacaggaatgaaac

SEQ ID NO: 846199 - DNA, 120 bp, Artificial Sequence
  ENSG00000228784_4 (sequence is synthesized)
gagcgtgggtccagatgggaaaccattctcctaccctgcagaaatggtatatagtttcaaggatgtgggacttccccaggccattggcacctgtgacagtgagaacctatacttggccac

SEQ ID NO: 846200 - DNA, 120 bp, Artificial Sequence
  ENSG00000228784_5 (sequence is synthesized)
cccagtaactgacctgctctcctgttggagctctacatgggacaccagctcccatgcatttatcccttttcagacctcactggtgtatctgtaccacctgacccaatcctgcctacactt

SEQ ID NO: 846201 - DNA, 120 bp, Artificial Sequence
  ENSG00000228784_6 (sequence is synthesized)
ggaccctgacgggcattgtggtggccagtactatccagaggagagagaaggagtgactccaggacttatatgcccacaagccaaaagaagatcaagatctgagtgggaactgtggaaagc

SEQ ID NO: 846202 - DNA, 120 bp, Artificial Sequence
  ENSG00000228784_7 (sequence is synthesized)
atgtcatgcgagcccctgccgcccttgaaactctgcgttcctcctcctcaaagaacagtgcctgaaggtcctggctgtggccctggctggccatcttgcttcctggtcacggtggtggcc

SEQ ID NO: 846203 - DNA, 120 bp, Artificial Sequence
  ENSG00000228784_8 (sequence is synthesized)
tcctgcctaggctcttctttctgctcctgtcgccatggccccggcctcggcgctcaagcgaccctctcgctccgcccagacccctggatgcccagctgccgcacctcccgtggccccacg

SEQ ID NO: 846204 - DNA, 120 bp, Artificial Sequence
  ENSG00000228784_9 (sequence is synthesized)
ctgtggctacgtgttgtctgaagacgcctggggaaaccttcagggcctctgtactggcctgtcatgtggtcaaccagtgtgaacatcgaggtgtctgggttcatggaagctggtgaagaa

SEQ ID NO: 846205 - DNA, 120 bp, Artificial Sequence
  ENSG00000228784_10 (sequence is synthesized)
cactggctctgtccaaacaacagctgtggaagcccctcccatgggaggggggtcccactggggctacacagaagtaactcctcacaagtggcttgtctgcatcctgggattggaaaccca

SEQ ID NO: 846206 - DNA, 120 bp, Artificial Sequence
  ENSG00000228784_11 (sequence is synthesized)
gtatagaagcagctgttggcagactcatgaagtaatacagagaatgggtggctgctcatacaatcagcagtaagacttcacttaaatcatgccaggaatgacatgaacaggactcaacgt

SEQ ID NO: 846207 - DNA, 120 bp, Artificial Sequence
  ENSG00000228784_12 (sequence is synthesized)
cagtggtatcaagaccttggtataaatcagacatggccttcttcccagcaaggtcattaggtacccaatgtagagatagcagggaaaggatataaaaacaggaaagttccaggtgagtca

SEQ ID NO: 846208 - DNA, 120 bp, Artificial Sequence
  ENSG00000228784_13 (sequence is synthesized)
tcttttgccccttgactaggcctgcctataggtttgacagctccaggaagtaagaaaacaggtatattgtcttccttcctatagctctgctaggtgtcatcctcttaaggtcactaggat

SEQ ID NO: 846209 - DNA, 120 bp, Artificial Sequence
  ENSG00000228784_14 (sequence is synthesized)
tctagtgttgaaggcttgctgccacacagatggcactgttctatcctcaaagcattttcagggtgccatctaatgggtctgaatcctggttccattgcaaactttaagcaaggaactcag

SEQ ID NO: 846210 - DNA, 120 bp, Artificial Sequence
  ENSG00000228784_15 (sequence is synthesized)
cattatccaatccccattttctccaactactggccccctctaaggaggctgaagagtgaaagcatgttgaacaccaagatgctctccaaagatggagtccttctcttctgagccccacag

SEQ ID NO: 846211 - DNA, 120 bp, Artificial Sequence
  ENSG00000228784_16 (sequence is synthesized)
ctctgcaagatgggtaaaactcaaggtggcattaggctctgagaggagctccatcacacagctggcatagtatggagctggaccagagcccaaatcccctatctccccactgtcctaacc

SEQ ID NO: 846212 - DNA, 120 bp, Artificial Sequence
  ENSG00000228784_17 (sequence is synthesized)
aaaagcttacacttcagaacccaaggccgtgaacacagacctcacacagctgtaacctgagaaactgccattgctgatctagtgccagaaccacttccccatccctggctttcctgctga

SEQ ID NO: 846213 - DNA, 120 bp, Artificial Sequence
  ENSG00000228784_18 (sequence is synthesized)
acttccccatccctggctttcctgctgacttcccacgagataagacttttctttaaaaagggggccttctcagccacacgcagtggatcacactgtaatctcagcactttgggaggccga

SEQ ID NO: 846214 - DNA, 75 bp, Artificial Sequence
  ENSG00000228784_19 (sequence is synthesized)
catggtggcatgtacctgtaatcacagctacccaggaggcacaagaattgcttgaacccaagatgcagaggttgc

SEQ ID NO: 846215 - DNA, 120 bp, Artificial Sequence
  ENSG00000228784_20 (sequence is synthesized)
gaggcacaagaattgcttgaacccaagatgcagaggttgcagtgagcctgtttgtacccctgcactccagcctgggtgacacagtgaaaccctgtctcaaaaaaaaaaaaaggagccttt

SEQ ID NO: 846216 - DNA, 120 bp, Artificial Sequence
  ENSG00000228784_21 (sequence is synthesized)
gcttcatcccacctcccaaccctgtcttcaggcccactgctgatcccagtctagaaccacagcaccgcccccatcctgcatgaagaaggccttgtgcatctgccttggtgagatctttcc

SEQ ID NO: 846217 - DNA, 120 bp, Artificial Sequence
  ENSG00000228784_22 (sequence is synthesized)
aggctgactggtctgtactccctggggagatgatcgagaccagctcacactgctgtgtgtcacatccataccttctatgggaaaactaacccccctcgcctcctatgtgaagtctcaggc

SEQ ID NO: 846218 - DNA, 120 bp, Artificial Sequence
  ENSG00000228784_23 (sequence is synthesized)
ttcacagcccatttcaaatgctgtttctcctataaccacatagcctgccaaccactggatctcctttctggttcctccctctccccccaactttttccttttgaactctcataatcagag

SEQ ID NO: 846219 - DNA, 120 bp, Artificial Sequence
  ENSG00000228784_24 (sequence is synthesized)
ccataaccattttctgccttgcactagttacttgtccttgactgtctttattttcccttctgagctgactttcttgaaggcagggcccccaacctgatcaccatgcctcagatagtatcc

SEQ ID NO: 846220 - DNA, 120 bp, Artificial Sequence
  ENSG00000228784_25 (sequence is synthesized)
cttgtgaaaagccctggggtcaggagccaagtcctacctcaaggagcagcataaaggcttagcccagcctcgtccaaggactgccaggtaaaatagagaacagactttgatcaaaatatg

SEQ ID NO: 846221 - DNA, 120 bp, Artificial Sequence
  ENSG00000228784_26 (sequence is synthesized)
gttggaaacaggatggttgtgagaactatggttgtgttcctagtgtgtttccctagtgggactgtggccatctcttccatgatggccacagacccttccattgacatgtgcaaggccaca

SEQ ID NO: 846222 - DNA, 120 bp, Artificial Sequence
  ENSG00000228784_27 (sequence is synthesized)
ctgaaggattgcacctgcaagccaacagagtctagcagcaaccaaaccttcttctgacttgacgtcaccagccgtggtacctcagtgaggctgcaaaaaagagaataacctgctagaggt

SEQ ID NO: 846223 - DNA, 120 bp, Artificial Sequence
  ENSG00000228784_28 (sequence is synthesized)
agacttttaccctgtctcccagggtgagaaggtccaatacccctcattggtcaagaagctggtgaagtttgtggcacccagattcaaagaggtgtatctgtaccacctgacccaatcctg

SEQ ID NO: 846224 - DNA, 120 bp, Artificial Sequence
  ENSG00000228784_29 (sequence is synthesized)
tctgttggaagtgttctatctcactgatcttgcctctcctaaagcaagggacaactcctggcactccgctgcagaggcccttgaagcctgttggaattttagtgaaatgagatgcctggc

SEQ ID NO: 846225 - DNA, 120 bp, Artificial Sequence
  ENSG00000228784_30 (sequence is synthesized)
ttaagccatgttgcctggcttctcaagtaccagcggacatattactagcaaggaagaaggctagcagcaagaatggttattgcatcctagaggcatttagtggaggagaaaactgccctg

SEQ ID NO: 846226 - DNA, 120 bp, Artificial Sequence
  ENSG00000228784_31 (sequence is synthesized)
gtaccgccatagccctaagtgctgcccagagttctgagctctcgatgagcacttggaacacgtctgcctgcagcctccctacacttttttatgacttgtcctacttgtcaagcccagctt

SEQ ID NO: 846227 - DNA, 120 bp, Artificial Sequence
  ENSG00000228784_32 (sequence is synthesized)
gtcccacttctccacatgagtcttccagtgacatctttgtgaccatctccaccccctgggtaaatgctccacgctgggagtccacaaaacacagtctgacttagagattctctggcatga

SEQ ID NO: 846228 - DNA, 120 bp, Artificial Sequence
  ENSG00000228784_33 (sequence is synthesized)
ctctcttccccactgtgtacactgactgccttagatgtaggcctcttgtttggggcccttcctggccagaccctgaagcagcctctgaggagggtggtaagaatggttccctagagccca

SEQ ID NO: 846229 - DNA, 120 bp, Artificial Sequence
  ENSG00000228784_34 (sequence is synthesized)
ggagatggcatggtggtatggcagtcccagggcctcagagagagcagacagacactggagatccaggcaagagtagctcaagatgagtcgttcattgagtttcaccatggggagatggcc

SEQ ID NO: 846230 - DNA, 120 bp, Artificial Sequence
  ENSG00000228784_35 (sequence is synthesized)
attgtgaatcagccatagtcaacactctttgaggtagaactgatgagctttgcagatgcctcagcagaattactcctggacaagtgttgggtgtcagagtcaccagaatttgatggcagc

SEQ ID NO: 846231 - DNA, 120 bp, Artificial Sequence
  ENSG00000228784_36 (sequence is synthesized)
agactaagcagtgttgctagaaacaaatcattgcataactaaatcatgatccaccatgcacatagcccaccaaccaatggagaagaccagcagaacagatagtaggctatctcttccagc

SEQ ID NO: 846232 - DNA, 120 bp, Artificial Sequence
  ENSG00000228784_37 (sequence is synthesized)
ctcaagccccaatgctgtcattcctaagttgagacgttgaagtctctttgcctccctggtacagagtctgtttgccttgtcttgtccatgaaccagagttccttcaagtcctttcttgct

SEQ ID NO: 846233 - DNA, 120 bp, Artificial Sequence
  ENSG00000228784_38 (sequence is synthesized)
ctgcagttctacaaaccagtgagcctgctcttgcctccatgcttgtcctaggctgatgctgctctgctactactcagttaaagaaacattggcccaagaggacaggcacaaggacaggtg

SEQ ID NO: 846234 - DNA, 120 bp, Artificial Sequence
  ENSG00000228784_39 (sequence is synthesized)
ctagcagctgagagggcagaaccagaaccccagtcctaccagatatagcccaagattctgtaagaatatcttacatgctaaagcaagatccccaaagtgaggacctgatatggttaggct

SEQ ID NO: 846235 - DNA, 120 bp, Artificial Sequence
  ENSG00000228784_40 (sequence is synthesized)
ccccacccaaaatctcatcttgaattatccccacaatccccacttgtcaagggcaggaccaagggtggaggtatgggggcagtttccccggagctgttctcatgatagtgactctcacga

SEQ ID NO: 846236 - DNA, 90 bp, Artificial Sequence
  ENSG00000228784_41 (sequence is synthesized)
gggcagtttccccggagctgttctcatgatagtgactctcacgagatctgatggttttataagtgtctgacatgtcccctgcttgaggtg

SEQ ID NO: 846237 - DNA, 120 bp, Artificial Sequence
  ENSG00000228784_42 (sequence is synthesized)
tttctgctcctgtcgccatggccccggcctcggcgctcaagcgaccctctcgctccgcccaggcttcgtggagagcagctgccccgccggcatcttccggatgaggctctctagacaaca

SEQ ID NO: 846238 - DNA, 120 bp, Artificial Sequence
  ENSG00000228784_43 (sequence is synthesized)
tgggtggagacacagccaaaccgtatcacccatgttctccatatgctctaaaatcttgggttatgtagtttgaaggtgactatattatatatgaaaagggaatcatgtatgagaaggaac

SEQ ID NO: 846239 - DNA, 120 bp, Artificial Sequence
  ENSG00000228784_44 (sequence is synthesized)
ccttgctatgaagggctggcccacaattacaagatatccagactacaggtgagatggccactgtatgaatggaagtcagctgtgcccctgagcttcatctcactgttgtccccacccctg

SEQ ID NO: 846240 - DNA, 120 bp, Artificial Sequence
  ENSG00000228784_45 (sequence is synthesized)
tcctcaggaaattccagctgactagggaagagaatgccagtgtatagtttgcagcaggaggaactcaaaacatcagtgacagtgccccaaaatgcttcagtttccatgttctctttttca

SEQ ID NO: 846241 - DNA, 68 bp, Artificial Sequence
  ENSG00000228786_0 (sequence is synthesized)
ctgcccccatgcagcagctcccagcggccctgcagccaccaccagcatctgtttcacctgcagttgaa

SEQ ID NO: 846242 - DNA, 86 bp, Artificial Sequence
  ENSG00000228786_1 (sequence is synthesized)
cagtccagcctctgggacccatgcagcagctcccagcggccctgcagccaccaccagcatctgtttcacctgcagttgaagatcca

SEQ ID NO: 846243 - DNA, 71 bp, Artificial Sequence
  ENSG00000228786_2 (sequence is synthesized)
cacaaggctgaggctcctcccactggaccgtgactctcaggcagaggcagtggtggggcagccagggcagc

SEQ ID NO: 846244 - DNA, 120 bp, Artificial Sequence
  ENSG00000239608_0 (sequence is synthesized)
acgctgtggttttcgaggggaaaagtgagagtggctggtcctgcctccgctgccgcttggccctgagatccccactgcccacgggataggccccagtccacccagccggggcccccccct

SEQ ID NO: 846245 - DNA, 120 bp, Artificial Sequence
  ENSG00000239608_1 (sequence is synthesized)
tcccctcgtctcgctctccttggcagttcggacttcgggtcagtcccacactcgcgcccggctgtccctgctgcgctcctgtcactggcattgggaagccctccggccccctctctgcac

SEQ ID NO: 846246 - DNA, 120 bp, Artificial Sequence
  ENSG00000239608_2 (sequence is synthesized)
agattaatgtaataatcacaggccttgctggaaaaaataggaggaaaattaaaataatcccaccttcctacctatccagaaccatctccctcactttggagcacagaccagcgaactggg

SEQ ID NO: 846247 - DNA, 120 bp, Artificial Sequence
  ENSG00000239608_3 (sequence is synthesized)
ccatctctctgggtaccacctcagctaggatatttgaggggcaggaaccaggggtctgtggcctaggaagagcaagaccacggtcccctcctcacctggctgatctggatattggtacct

SEQ ID NO: 846248 - DNA, 120 bp, Artificial Sequence
  ENSG00000286346_0 (sequence is synthesized)
gtgtgcagagagggagggacagagagaaagtccagctggaggagctgcattttcagaaagcagagggctgctcctggagctggaggcaaatagcctagagatgcctcccttgccctgtgg

SEQ ID NO: 846249 - DNA, 120 bp, Artificial Sequence
  ENSG00000286346_1 (sequence is synthesized)
ttgcttccagcgcagctaccgacagtcagcctcgtgagagggaggtcagcagtgtctgaggcctcggtggtgaagcttactgggagtctgccattctagactcttcacttgaaggcagcc

SEQ ID NO: 846250 - DNA, 120 bp, Artificial Sequence
  ENSG00000286346_2 (sequence is synthesized)
tgctttggcatcgtgagactgtgatgaatgtcttctgtataaccgtgatgatgttgatgacaagggcggtgatggtgacgagctcccatttcttgagaacttactctgtgctgacagttt

SEQ ID NO: 846251 - DNA, 120 bp, Artificial Sequence
  ENSG00000286346_3 (sequence is synthesized)
tacatgtaggaacccagataattcttacatgctcctatgaggttgctactattatatacatagttacataaattatacacacatacacacacatatatatatacacacattatatatatt

SEQ ID NO: 846252 - DNA, 120 bp, Artificial Sequence
  ENSG00000286346_4 (sequence is synthesized)
tataaggaaattgaggtagtggagatactcagttacttgcccaaagtcacacagctagaatggaggaacgcatgatactatatgcatagtgtccacatgtggaaagctccagtgaccaag

SEQ ID NO: 846253 - DNA, 120 bp, Artificial Sequence
  ENSG00000286346_5 (sequence is synthesized)
gtcgtcttcaccatcatgtgcactcctccagcctggcagccttgagcacctgggcaatgagatgcattctcatggggacaccaggatgcatgaaccgtgcagccttcctgtgggccctgg

SEQ ID NO: 846254 - DNA, 120 bp, Artificial Sequence
  ENSG00000286346_6 (sequence is synthesized)
acagcagcacatcctctctggctggagcccaggctcacagtctccctacctgggagaaaaaggactttgaccaacatttggattttgtcccgaggctggctggatgaaagagaaaaaagg

SEQ ID NO: 846255 - DNA, 120 bp, Artificial Sequence
  ENSG00000286346_7 (sequence is synthesized)
caattggttggtggaaagccaagcagatgagcaccagttagttggagagccaggtgagaagccaagtccgccgggcctagggaagctgggccctctttagcgcatgatgccatttgtctg

SEQ ID NO: 846256 - DNA, 120 bp, Artificial Sequence
  ENSG00000286346_8 (sequence is synthesized)
ggagagccaacagccattcatcgagcatttatttgaatggcagctgtcttgtgaccccgatgggagagacctggagaagttaccctcatcttgaacattctgaatgtggcagagcatcag

SEQ ID NO: 846257 - DNA, 120 bp, Artificial Sequence
  ENSG00000286346_9 (sequence is synthesized)
aaacaaaacaaagaacagcctcatcctgtgaggacgtgaagtcaacagagccacctgtctttggattttccatgctgtgagattgtaaaattcctggttgtttgagcgagttgagttgta

SEQ ID NO: 846258 - DNA, 120 bp, Artificial Sequence
  ENSG00000286346_10 (sequence is synthesized)
ctgcccgtgattgtattttgtcttgttggttttgtcgtttgcaatggacgccccaccctggaacaaagtgggtgtgaactgagggagggcgaatctctgctgcacccttctctaaaggct

SEQ ID NO: 846259 - DNA, 120 bp, Artificial Sequence
  ENSG00000286346_11 (sequence is synthesized)
ggcaagcagctccacttccacataccagagttcaagaggtccagctgctcaaattagagcttgagaatcatcgcaggggatcgcctggattccactggggggcaaaaagacaacaagatc

SEQ ID NO: 846260 - DNA, 120 bp, Artificial Sequence
  ENSG00000286346_12 (sequence is synthesized)
tgtgaattctgaaggtgcatgtctttgctttcttgaaagggggataacaagtatgttttctcttgggaagactctagaactgcctgtactcccagaccacagagaacattcccagaagaa

SEQ ID NO: 846261 - DNA, 120 bp, Artificial Sequence
  ENSG00000286346_13 (sequence is synthesized)
agcctgtaggattttctttgtggtttgactcctccttccaaacccgcccttagtttcaccttctcccctgtcctagcccaaaacctggagcatgcagcccaggcaaatctcctaggatgt

SEQ ID NO: 846262 - DNA, 120 bp, Artificial Sequence
  ENSG00000286346_14 (sequence is synthesized)
atgcaggctgaatctctcatctggtgctttgttgcaagtcccacaggaccctgtcttaaaatcttggtgctgccatgttgtgggtgagactgggcagccacgggaaagtgaagcccaggt

SEQ ID NO: 846263 - DNA, 120 bp, Artificial Sequence
  ENSG00000286346_15 (sequence is synthesized)
tgcttccccagagagaactgtggtccaacaggaatgttttggacatcctcctccagtggaggggactttcctggggatcatgcattactctgagagtgaaaaagaactggaatagaactc

SEQ ID NO: 846264 - DNA, 120 bp, Artificial Sequence
  ENSG00000286346_16 (sequence is synthesized)
agaggtcattaagtccagctctctcatactcagatgagaaagtcaaggacaaaagagggaggcatgttcccaagatccagggctaccccactaacacttgccagactaagctgttactat

SEQ ID NO: 846265 - DNA, 120 bp, Artificial Sequence
  ENSG00000228789_0 (sequence is synthesized)
atgccccgctacgtcccccttctgctgctcctgcttctcctgaggtgttcagaacggggtggaggagttaattttggtgagaaggatgcaaaagtccccgggacctggagagatggagtc

SEQ ID NO: 846266 - DNA, 120 bp, Artificial Sequence
  ENSG00000228789_1 (sequence is synthesized)
agggtccctggagaaggagcctcttgggactcagacagggccagtcccgagcgaaggtacggaatagtaggactaagccaaagcatttccactaagcacccagagaccagccctaaagac

SEQ ID NO: 846267 - DNA, 120 bp, Artificial Sequence
  ENSG00000228789_2 (sequence is synthesized)
tcaagaataagagaaaatgatgtaactgcagatggaaggaccactgaggaccacatcactgcagacccagggaccaccgaggactctgtcactgcagacccagggaccactgaggacaat

SEQ ID NO: 846268 - DNA, 120 bp, Artificial Sequence
  ENSG00000228789_3 (sequence is synthesized)
cagacccagcgaccaccaaggactatgtgtctgcagacccagggaccaccaaggattctgtcactgcagacccagggaccactcactgagaactttgtcactgcagacccagggaccacc

SEQ ID NO: 846269 - DNA, 120 bp, Artificial Sequence
  ENSG00000228789_4 (sequence is synthesized)
aaggactccatcactgcagacccaaggaccacagaggactccgtcactgcagacccagggaccaccaaacactccatcactgtagacccagggaccactgaggactctgtcactgcagac

SEQ ID NO: 846270 - DNA, 120 bp, Artificial Sequence
  ENSG00000228789_5 (sequence is synthesized)
ccagggaccaccaaacactccatcactgcagacccagggaccaccgaggactccgtcactgcagacccagggaccacagaagatgaaaccactaaacatggtgacactcaccttctgtga

SEQ ID NO: 846271 - DNA, 85 bp, Artificial Sequence
  ENSG00000228789_6 (sequence is synthesized)
tctccctcctcttctgccctgcccggccactcctttgagtgacagggggtaattgagaagctgctcctccctccaggaaggaaga

SEQ ID NO: 846272 - DNA, 120 bp, Artificial Sequence
  ENSG00000228789_7 (sequence is synthesized)
ggggtaattgagaagctgctcctccctccaggaaggaagacccggagctctggcttccctcggcaaagcacatataaacccacagccactgcgggtggaaggagaagggcagggtggaaa

SEQ ID NO: 846273 - DNA, 120 bp, Artificial Sequence
  ENSG00000228789_8 (sequence is synthesized)
acttcagtcacagcagtgaaacccaccaggctcctgacacccatgggaattatcctcatatccctggctgcaaccacagtcactgttgtgctctttgttggattgggcttcattgtgaaa

SEQ ID NO: 846274 - DNA, 120 bp, Artificial Sequence
  ENSG00000228789_9 (sequence is synthesized)
gagtgtttcctgcctccattaaatccatccaccagggttatttatcatccccatgtcatggactacagtacaccataaagaggaccccagcagtgactacagttggttctagaaaaagga

SEQ ID NO: 846275 - DNA, 120 bp, Artificial Sequence
  ENSG00000228789_10 (sequence is synthesized)
gacccctcatccgcctctgcaagactatacagcatgatgtgtatcctcaggcctccactcctccgccctagtctggagccctgggaccaccacatgaggaaggcagctggcccctggaat

SEQ ID NO: 846276 - DNA, 120 bp, Artificial Sequence
  ENSG00000228789_11 (sequence is synthesized)
aagcatgtggaggacactcagaaggatgcccatctgctctgagtgtctcctaattctgcctgaccttggttacttcctctggacaatcgcctttacctatctaccaggttttgaggaatt

SEQ ID NO: 846277 - DNA, 120 bp, Artificial Sequence
  ENSG00000228789_12 (sequence is synthesized)
acacacagctcaggtataagagatattcggtaagtctgatcaaatcaataaagcaaattttatctgtttttgtctgggacatatctctacattcattcatttaaccaaaaaaaaaaaaaa

SEQ ID NO: 846278 - DNA, 120 bp, Artificial Sequence
  ENSG00000228789_13 (sequence is synthesized)
aggcctccccagccatgtggaactatggagcacctggccagctgtctcattttaaatcatataccaagcatgacctgagtgtaatctctaacatgaatcacagcttctgcctcattggtt

SEQ ID NO: 846279 - DNA, 120 bp, Artificial Sequence
  ENSG00000228789_14 (sequence is synthesized)
cattggtttgccagaaccgcaggcacaaatggatgagaggagacacctatgaacatggagccagaataccccaattgctgaaacaccagttcagagaggagtgagcttgagaaagagtca

SEQ ID NO: 846280 - DNA, 120 bp, Artificial Sequence
  ENSG00000228789_15 (sequence is synthesized)
ggtttagtgtcccacggaaagagaccagacctggaaaagacagagtcaaagctgggtgagcaggccttcgaagggcgtggctcagcaaagataatccatattgtagtgcaagaggattct

SEQ ID NO: 846281 - DNA, 120 bp, Artificial Sequence
  ENSG00000228789_16 (sequence is synthesized)
ggggagaggtgtcatttggatgtgaggatagttatgaaaatactgagcagagcagatgaggataggccatcaacaattcacattaaatgagattactttttagtaggactaagccaaagc

SEQ ID NO: 846282 - DNA, 85 bp, Artificial Sequence
  ENSG00000288330_0 (sequence is synthesized)
agcagaagccaggttttctaacatgaaggacccagggtctagccaaggaattgggaatagggcttcagccaacagagttaatctc

SEQ ID NO: 846283 - DNA, 120 bp, Artificial Sequence
  ENSG00000288330_1 (sequence is synthesized)
aggaattgggaatagggcttcagccaacagagttaatctctccgtggaagctgggagtcagaaaaggcaatctgaatgcaaggacaaatgaggaaatagtagagaatatcagacacagac

SEQ ID NO: 846284 - DNA, 120 bp, Artificial Sequence
  ENSG00000288330_2 (sequence is synthesized)
tatagaatgtctcagaagtaaaaactagaatgacaggtcaagatggttagtctggagccaagaactaggaaaaacctaaaggtattatttaccaaaatatgataggtacttctcatactt

SEQ ID NO: 846285 - DNA, 120 bp, Artificial Sequence
  ENSG00000288330_3 (sequence is synthesized)
cgataaatgatttaagataaatgtgttgacatttaagaagtactatatatgcaattcatactgcatattttaaaatgtaaaattaccagtgacttcatgaatattaccaatgagaaaaac

SEQ ID NO: 846286 - DNA, 120 bp, Artificial Sequence
  ENSG00000288330_4 (sequence is synthesized)
agtaaggctggtagggtggcagatcttataaattataggcatgaattccaataagtctttcattgaatcaaccactataactacttggtataaattatttaaattattaatgagaattat

SEQ ID NO: 846287 - DNA, 120 bp, Artificial Sequence
  ENSG00000288330_5 (sequence is synthesized)
acattattttaaattaaaggttaaaatgttacctctaattactaataattgtttagtgtatggaatttgtataaatatagaaagtatagattggtatttagttatgttcccttcctctct

SEQ ID NO: 846288 - DNA, 120 bp, Artificial Sequence
  ENSG00000288330_6 (sequence is synthesized)
ggaatgcatactatattagtgattaatttttttaacagctaaatattgaaatgatgaatattattggtgactgtgaacaaaactgccaaatatttgtgtctgttgagtttattaataaat

SEQ ID NO: 846289 - DNA, 120 bp, Artificial Sequence
  ENSG00000288330_7 (sequence is synthesized)
ctatagcacctagaactgagacactcaataaatattttctgaatgaataaatataatgagataggtttataaaacccagatcaaaacacaatgacaatagaacctattttttgcatttta

SEQ ID NO: 846290 - DNA, 120 bp, Artificial Sequence
  ENSG00000288330_8 (sequence is synthesized)
tttcagctttaaatgaaataaaattaacaaatttgataaaaaattaacatttaaaatttagattttcgcagcttggtaatgaaagttaactttttttttttttaatttaaatctggtctc

SEQ ID NO: 846291 - DNA, 120 bp, Artificial Sequence
  ENSG00000288330_9 (sequence is synthesized)
tctcatcttcaggatcagagctatccagcctgaaaaatctcttgaaggtacaagtaactgaattaaatttaatgtattgttaaagccaagtctaaaattgcaatagtcctgataaacaaa

SEQ ID NO: 846292 - DNA, 120 bp, Artificial Sequence
  ENSG00000288330_10 (sequence is synthesized)
atgtagcacaacagggggaaacattgcaagcgatatggtctggctctgtgtcggcacccaaatctcatgttgaattgtaagccccaatgttggaggagggatttggtggaaagtgattgg

SEQ ID NO: 846293 - DNA, 120 bp, Artificial Sequence
  ENSG00000288330_11 (sequence is synthesized)
atcacgtgggcggatttccgccatgttgttctcgtgataataagttctctcaaggtctggtcatttaaaagtgtgtagcacttccccctttgctctctctatcccctgctccaccatggt

SEQ ID NO: 846294 - DNA, 120 bp, Artificial Sequence
  ENSG00000288330_12 (sequence is synthesized)
aaaatgtgctttcttccccttcactttctgtcttgtttgtaagtttcctgaggcttaccagccatgcttcctgtacagaccatggaactgtgagtcaattaaacctctttttttcataaa

SEQ ID NO: 846295 - DNA, 120 bp, Artificial Sequence
  ENSG00000261759_0 (sequence is synthesized)
tttctacaagttcctttattaataaagcaaaatagaaaagaacaaggtccccaaatgacccacatgattcaaagtgcaaatttactccaacctgcaagagaaaacgaatggcaggtcttg

SEQ ID NO: 846296 - DNA, 120 bp, Artificial Sequence
  ENSG00000261759_1 (sequence is synthesized)
actgtgggggccatggaaatttggggtgattaaattgcctttgaatcatacaattgtagcagctgaaccatatctgattaactctttggtctctgttattggaacaaaaccgacgctatg

SEQ ID NO: 846297 - DNA, 120 bp, Artificial Sequence
  ENSG00000261759_2 (sequence is synthesized)
cctgcagccgccagactgcaaccaaaaacacagtttggggtcagaagacattaaaaatcacaataaaataggatgaatgttctaagtcacgcaactgaatcaaggcacctttttttttca

SEQ ID NO: 846298 - DNA, 120 bp, Artificial Sequence
  ENSG00000261759_3 (sequence is synthesized)
aaagcaaaaagttgtttaacaatattccagaatagtagatacttcaaaaaccagattacagtatatatcattttgctgcacattttagtctattttctgtatacatagtcacacattctt

SEQ ID NO: 846299 - DNA, 120 bp, Artificial Sequence
  ENSG00000261759_4 (sequence is synthesized)
aaaaaataaagttgtatctaaacaagtgatttaaaaaaaaaaaaactaacgaatgccacgatgataacactgaacttgtttccctcttgaaggacattggaaatgttaccgaggttcatt

SEQ ID NO: 846300 - DNA, 120 bp, Artificial Sequence
  ENSG00000261759_5 (sequence is synthesized)
ttccccaccactgaatcatcttcctccatgtagacagggatgagaagtcaaagtcttcatcaaggtcaaaagccacatgttacagaaaaagtgacttactccatagaggttacatgagat

SEQ ID NO: 846301 - DNA, 120 bp, Artificial Sequence
  ENSG00000261759_6 (sequence is synthesized)
gctctggaagcacttaggttaattccttcacagtgtttgctaggatgtcaattttggtggagctgctgagtcagaaaatgatagaggccggccgcggtggctcactcacacctgtaatcc

SEQ ID NO: 846302 - DNA, 67 bp, Artificial Sequence
  ENSG00000261759_7 (sequence is synthesized)
caggaggtcaaggctgcaatgagctgcaacaaaaacaaaaacctgtgttcttggtagttgaaatggt

SEQ ID NO: 846303 - DNA, 120 bp, Artificial Sequence
  ENSG00000261759_8 (sequence is synthesized)
aacaaaaacaaaaacctgtgttcttggtagttgaaatggtatgagcctaagaagcttgcaccccaaatctagccaccaatcatccctgtaaaggcacgagctaggataccactaaccccc

SEQ ID NO: 846304 - DNA, 120 bp, Artificial Sequence
  ENSG00000261758_0 (sequence is synthesized)
gtaggcttctggataagggcgctgtggacggttcttgggccgcccgcggctggcggaaggacggccacggtggcgcctgcgcgtccggctcgccgagttgccgcccgccatttttggagc

SEQ ID NO: 846305 - DNA, 120 bp, Artificial Sequence
  ENSG00000261758_1 (sequence is synthesized)
ttcttggagatctaggcaggaacccgccccgggttccttcaccgaggctcctccctaggtctcagggccggcgctttcctctgttcccgcccggctcctgctgcccccatccgcagctct

SEQ ID NO: 846306 - DNA, 120 bp, Artificial Sequence
  ENSG00000261758_2 (sequence is synthesized)
cgagacgccctgcggaaacccgagggtgaggccgcgcagatccctgctcctacttggatttagcaagggcctcagagcttagcattgtattcgcgatttacggctgacaagcgctttcac

SEQ ID NO: 846307 - DNA, 120 bp, Artificial Sequence
  ENSG00000261758_3 (sequence is synthesized)
caggcaagagtgaaaaggtttcaaaaggactattggggacttccctcgccattaatctagacgaaacaccgccggccctaggccgattggcgtcatcctgcctctgtaaagcacatcttt

SEQ ID NO: 846308 - DNA, 120 bp, Artificial Sequence
  ENSG00000261758_4 (sequence is synthesized)
ccgtggtgtcggctttgcataaggcggcagcattggctagtttgtgagaggagaatataactagactgagaagatagactcagctgtgaaagtggatttctccctccacaacctaggact

SEQ ID NO: 846309 - DNA, 120 bp, Artificial Sequence
  ENSG00000261758_5 (sequence is synthesized)
actttcagtagctctgaaatacacatgagaatcttagccttctagatgccaaaagagaaataatcagtaaggtgaaatcattaacaaactatttatgtttaacgtcgcctcttccctgat

SEQ ID NO: 846310 - DNA, 120 bp, Artificial Sequence
  ENSG00000261758_6 (sequence is synthesized)
ctccacctgcccgtccgtggccatggatccctacctttcacctgcttacaacttttcaccacaaaagtgaatccttactctcctggatcattagccccatatatgactaacttctctatc

SEQ ID NO: 846311 - DNA, 120 bp, Artificial Sequence
  ENSG00000261758_7 (sequence is synthesized)
gctatagccaactctatttcagtatggaatcgctcaactactttatagtcttaagggcctgtctccagtaggttacccctatttgtgttttctctctcaagggtttgcaagatgtgtggc

SEQ ID NO: 846312 - DNA, 120 bp, Artificial Sequence
  ENSG00000261758_8 (sequence is synthesized)
ttttcgctggaggaagtcataactgaccagattggatatgaattcgtgactggactcctacttataattttcttgcgttttcttctaatctctggctgatctcctattttccacaaagac

SEQ ID NO: 846313 - DNA, 120 bp, Artificial Sequence
  ENSG00000261758_9 (sequence is synthesized)
tgtttcaagctttccatgttgttaaagatgccagtcccagtccatactaatagataaattcatccagtttcctgggctcagagctatgggactccaattccggtttgaccttgcctccat

SEQ ID NO: 846314 - DNA, 120 bp, Artificial Sequence
  ENSG00000261758_10 (sequence is synthesized)
tataaaatatctgtgaccacctcctgttcgtgatcccaaaacttctaaccaaattaacccagaacccttctctccaaagccactccctctgcctgaaactatgccatcccttcccacctt

SEQ ID NO: 846315 - DNA, 120 bp, Artificial Sequence
  ENSG00000261758_11 (sequence is synthesized)
ctccttccaccactactttcctagcgccttataatgtaaatatgttcttatccactgtcttcttcctttctgtttctcagaagtttctgttgtcttggctgggtgcggtggctcacacct

SEQ ID NO: 846316 - DNA, 67 bp, Artificial Sequence
  ENSG00000261758_12 (sequence is synthesized)
ggctgggtgcggtggctcacacctgtaataccagcacgttgtgaggcagaggcgggcagataacatg

SEQ ID NO: 846317 - DNA, 120 bp, Artificial Sequence
  ENSG00000261758_13 (sequence is synthesized)
cttttgtcttttttttttttttaattcagtgatgttactccctccagttgctatgctatcaacgttcctttcattgacacattctcaaaagaaacagttacggttttcaccaatccccat

SEQ ID NO: 846318 - DNA, 120 bp, Artificial Sequence
  ENSG00000261758_14 (sequence is synthesized)
cccctacttgaaaccctttttccctttcttttaagacacttccccggatctacacctacctagtttgctggtcttctgatttctttgctagcacctcctctttcttcaatctgttctcta

SEQ ID NO: 846319 - DNA, 120 bp, Artificial Sequence
  ENSG00000261758_15 (sequence is synthesized)
ctacatgccttctcttaggtctcccaaaattagtctgttcttgatttttccttaactgagtttcctcgtgttcagctacttgccagaaagctgcagctcaaacacttaaaataattcatc

SEQ ID NO: 846320 - DNA, 120 bp, Artificial Sequence
  ENSG00000261758_16 (sequence is synthesized)
tctcttatttgaatttcctaatttatcctaacattgtaatttcagctagtgtagtgattaagaacatgaactgtgaaaccagactgctctggaaagctttgtaaccttagacaaatctct

SEQ ID NO: 846321 - DNA, 120 bp, Artificial Sequence
  ENSG00000261758_17 (sequence is synthesized)
ttctgtctcaatttcctcaactgcaaaatggaaatagcaacagtaccaatctcatagggttgttacgagtgttaaactatttaactatttaatatttaaactatttaatatattatagaa

SEQ ID NO: 846322 - DNA, 120 bp, Artificial Sequence
  ENSG00000261758_18 (sequence is synthesized)
atgccatcagcattattacatttattgtttttaatcttactaagaagtttttagcatttttttaactctgagggcatgggtaatcaactttctaagtttatagaaatctaaaattgtatt

SEQ ID NO: 846323 - DNA, 120 bp, Artificial Sequence
  ENSG00000261758_19 (sequence is synthesized)
ttgccctcacacttaataattgattataagtcatttttataatcaattttataaattgtttataaataattacatagcagcctaggctctaaattgtagggccagacttgattattttct

SEQ ID NO: 846324 - DNA, 120 bp, Artificial Sequence
  ENSG00000261758_20 (sequence is synthesized)
ttcaaaaaagcctaagtcccaccatacctcattcagatggcttgcttttttttctactgctgccatccttattcaaacccttctcccctcccattgccttacaccaaaactattgcacta

SEQ ID NO: 846325 - DNA, 86 bp, Artificial Sequence
  ENSG00000261758_21 (sequence is synthesized)
ttctcccctcccattgccttacaccaaaactattgcactagccttgtaaacacctctcccttcattcacctcccttttgtttgcgt

SEQ ID NO: 846326 - DNA, 120 bp, Artificial Sequence
  ENSG00000261758_22 (sequence is synthesized)
tgcaacctctgacttgggctcaagtgattctcacacctcagccttgctaggtccagaagtaggtgccattgacccaccttccctctactccccactcctgcttcacttctctttttaaaa

SEQ ID NO: 846327 - DNA, 120 bp, Artificial Sequence
  ENSG00000261758_23 (sequence is synthesized)
tgcaacattgttatacctacacaaaagcgttctgtgattcctatggcttaaaagatatcatctaaaatagttaatgacattcaaggcatgccttgatattttttcatttttttctctatt

SEQ ID NO: 846328 - DNA, 120 bp, Artificial Sequence
  ENSG00000261758_24 (sequence is synthesized)
tcattagaaattattcacactagctgacctgtctgattaatcataaatgtaagtgaagggcagatttattcatcctttacctatctggtaagataaagtaataaaggtcccataacatgt

SEQ ID NO: 846329 - DNA, 120 bp, Artificial Sequence
  ENSG00000261754_0 (sequence is synthesized)
gggactggcattcagtgaggctgggggagaagcttcctaaaagcattgcccttgaaaagcagggcatacctatctgatactgaggatgtagaatgcagtttggagatgcttcctagctac

SEQ ID NO: 846330 - DNA, 120 bp, Artificial Sequence
  ENSG00000261754_1 (sequence is synthesized)
ctaatcttccaaggcaaaccatgcactcttcatcctgatatttgtgatgcctccctgggctacatgacagagggtgcactgcaaaggatgtgaaggaaagtcaccacagggcaaaggtgg

SEQ ID NO: 846331 - DNA, 120 bp, Artificial Sequence
  ENSG00000261754_2 (sequence is synthesized)
aaacccaggggcctttccccagtgagactttctggctgttcctttggaacttccacctgctagttgcagatgtttgccactggatggggccccatgctacgtgggaactgttcaggactg

SEQ ID NO: 846332 - DNA, 120 bp, Artificial Sequence
  ENSG00000261754_3 (sequence is synthesized)
tgggtacttagttccagcagagctggctccaccagggcaccaggactgcaggcttctcaactcctggcctggagaggcagcttcagcaaccagtgcctgggaatccactagccctttctc

SEQ ID NO: 846333 - DNA, 120 bp, Artificial Sequence
  ENSG00000261754_4 (sequence is synthesized)
tgtgagtcacgtgagggcagaatctgctcaaagtcagagggctggagcaacctggattgtgccagagtgagggcccagctcactggaggtcagagtaagagagtcaaggatgggaagaaa

SEQ ID NO: 846334 - DNA, 120 bp, Artificial Sequence
  ENSG00000261754_5 (sequence is synthesized)
cagggttttgctcagtcttgcagatactgaggcactcaggaggctcaggatggcagcaacagggcatgtgctaaacttaccctagcctcttccttttaggcagccaccacagaggacatc

SEQ ID NO: 846335 - DNA, 120 bp, Artificial Sequence
  ENSG00000261754_6 (sequence is synthesized)
tgtttgcctctgtaccctaccccatctccatgctggtagatatagtctggggatacctttaaaacaaacaaacaaacaaacaaaacaggatctgtctatcacctgtccaaatcctgaagc

SEQ ID NO: 846336 - DNA, 120 bp, Artificial Sequence
  ENSG00000261754_7 (sequence is synthesized)
aaaatgagccttctttatggccaccttggaaaggcctgagtccccagcatcacctgggatacaaagtgttctgaggtgggggcagagtgccctcctgcccagatgccacactccacaata

SEQ ID NO: 846337 - DNA, 120 bp, Artificial Sequence
  ENSG00000261754_8 (sequence is synthesized)
tctcttcctggcagacaggtttctcttaacttcctttggcaaatttggtttcacttccttttgcaactttagaacctttctcaggtcagtcataaggtagtggagaagccaggatttgaa

SEQ ID NO: 846338 - DNA, 120 bp, Artificial Sequence
  ENSG00000261754_9 (sequence is synthesized)
cccattctgtctgattccagagctcatgcattaaccacctgactgtggtgcctccccatcatatgtgcatcaagtatgatcatttttgtagttctcagagtacttagcaccatgcacatc

SEQ ID NO: 846339 - DNA, 120 bp, Artificial Sequence
  ENSG00000261754_10 (sequence is synthesized)
tgtaataagtacagccactgcctactgggaggtctaaaggttcaactcataagggacccacaggccacactgggctccagtctccttaaaagatgtgggacggagatcaacaattgtcag

SEQ ID NO: 846340 - DNA, 120 bp, Artificial Sequence
  ENSG00000261754_11 (sequence is synthesized)
tccactctagtacaaaagctgtgtgtctcaaggcataattccttatgattacttcatagctctgcttttgtcttgagacaaaagaaatttccttcaattcctacttttgctgagatattg

SEQ ID NO: 846341 - DNA, 120 bp, Artificial Sequence
  ENSG00000261754_12 (sequence is synthesized)
ttttttgaaaagcaattaaatcttgtcaatcacttttcccacctctttgagatacttacatggcttttcttctttattctcttagtgtggtaaattacattgatttattttaaatatgaa

SEQ ID NO: 846342 - DNA, 120 bp, Artificial Sequence
  ENSG00000261754_13 (sequence is synthesized)
accagccttgaattccaggaacaaactccatttggacatgctagaacaaccttttatatttgtttagatttgatttcctgaagtggtgttaaaaggttttcatatctatgtctgtgaggg

SEQ ID NO: 846343 - DNA, 120 bp, Artificial Sequence
  ENSG00000261754_14 (sequence is synthesized)
atattaatctgtacatttttttattactattttctggtgttatggtaatgctagtctcatagaatgaattaggaaaagttgcctccttctgtattttctgagagtttgtgtggcactggt

SEQ ID NO: 846344 - DNA, 120 bp, Artificial Sequence
  ENSG00000261754_15 (sequence is synthesized)
aaaatattttctgtatatgtttgacataattcaccaggaaaattatttgtacctacaagttccctcctggaaagatgttgataatcacttattatcctttcattgtctgccagatctgtg

SEQ ID NO: 846345 - DNA, 120 bp, Artificial Sequence
  ENSG00000261754_16 (sequence is synthesized)
gcattgcttttttctctggtattagtaatttaaattttcccttatttcttgatcaattttggcagagatttatcaattttattaatctcttttaaaaatctgtattgagctttgttaatt

SEQ ID NO: 846346 - DNA, 120 bp, Artificial Sequence
  ENSG00000261754_17 (sequence is synthesized)
ttctctattacatactttttatttctactcttacgattgctatttctttatttctcctttggatttagcccatttttctatttgtctaattttaggatttaaaattcaatcattattttt

SEQ ID NO: 846347 - DNA, 120 bp, Artificial Sequence
  ENSG00000261754_18 (sequence is synthesized)
agatatttttatttttaaatataaacatgaaagttgcaatattaccttgggcactgttttgactgcattccacaagtttttatttgtcatgttttaatcaccattcagttcaaaatactt

SEQ ID NO: 846348 - DNA, 120 bp, Artificial Sequence
  ENSG00000261754_19 (sequence is synthesized)
tctaatgctccttgttatttcttctttgacccattggttatataaaagtacgttttgctttatttctaaatatgtgaagactttctagatatctcagttatttattactaatttaatttt

SEQ ID NO: 846349 - DNA, 120 bp, Artificial Sequence
  ENSG00000261754_20 (sequence is synthesized)
attgtagccagagaaaatacactgtatgtgttcaatctttggaaatttcttgagacttattttttgacccagtatgtttgccctcatgaacattccatattcactagaaaaagaatgtgt

SEQ ID NO: 846350 - DNA, 120 bp, Artificial Sequence
  ENSG00000261754_21 (sequence is synthesized)
gttcaaataatgttggatatagtgttatgcaaatgccactaaatcaagataaatcttttgcactcttgttttttgcctgcttgttctaacaataagtgagaaagaagtgttaatatctcc

SEQ ID NO: 846351 - DNA, 80 bp, Artificial Sequence
  ENSG00000261757_0 (sequence is synthesized)
atcattgtactttctcatgagttaaactttttatcattatgataatgctttttgccttaaagtctactttgtctaatatt

SEQ ID NO: 846352 - DNA, 120 bp, Artificial Sequence
  ENSG00000261757_1 (sequence is synthesized)
ttaatgtaattactgatatatttgaatttaaatataccgtcttcttaagtgttttcaattgtctcacatgctctctgttctctttatcctcactttttgcctgcttttggaaaatattgt

SEQ ID NO: 846353 - DNA, 120 bp, Artificial Sequence
  ENSG00000261757_2 (sequence is synthesized)
ttttgcctccattgttttggaagttacatatctttttagtagtcttttagagtttatcctatagatcacagtatgggtctctgagttagcaaaggctaataatgttaattggcactttca

SEQ ID NO: 846354 - DNA, 120 bp, Artificial Sequence
  ENSG00000261757_3 (sequence is synthesized)
ttttcttccataatagtacaaggaccttagaacgtttcaattcatttacttcctctcctgatttgtatgcacttttaatatttttaattttttaaatcttcagcactgtgttacattgtt

SEQ ID NO: 846355 - DNA, 120 bp, Artificial Sequence
  ENSG00000261757_4 (sequence is synthesized)
tcatacggtataattcatttagacttcctcaaatggaccttcgtgctggacctcatttctttctgcatctatataacctatcatccttaatcatcttccttctgcttaaagaacatcctt

SEQ ID NO: 846356 - DNA, 120 bp, Artificial Sequence
  ENSG00000261757_5 (sequence is synthesized)
aattctaatgttgacagttattttatttcagcacttgaaagacatttaaattccactaatttctagtttccattgtttctatcaagaggtaagctaacagtctattacattttttcaagt

SEQ ID NO: 846357 - DNA, 120 bp, Artificial Sequence
  ENSG00000261757_6 (sequence is synthesized)
aatgacagctgcttgtaatttttttttccctttgtctttggttttcatctgtcttattgtgatgtacctaggtgtggcttttaaaaatttctcctgcttgcagctcccagggcttctgag

SEQ ID NO: 846358 - DNA, 120 bp, Artificial Sequence
  ENSG00000261757_7 (sequence is synthesized)
atttgtggcttgttgtctttaatcaattttgggaatttttcaactattttctcttcaaatattgatgctgcaccattctctttctcttctccttctgaaattttaattctcattttatct

SEQ ID NO: 846359 - DNA, 120 bp, Artificial Sequence
  ENSG00000261757_8 (sequence is synthesized)
ccatatctcttactctctgtagcattgctatccttttgtctctccatgtttcgtcatgatgttgtcttctaacctactttccagttcatcaattttccctacagctgtgtataatttttt

SEQ ID NO: 846360 - DNA, 120 bp, Artificial Sequence
  ENSG00000261757_9 (sequence is synthesized)
gttaaaccaagtaaagagtatccactgagctctttgcttttgttagtatatattttaaattctaaattgttcactggttattttttacaactttttcatccttttttaaagttttcagtt

SEQ ID NO: 846361 - DNA, 120 bp, Artificial Sequence
  ENSG00000261757_10 (sequence is synthesized)
ctctgccaaatttgttgatactgtcttttatctccgtatgtgtagtaaacataattaatttaaagtccgtatctgataaatccattaactggagttctgtggtattgtttctattgtagt

SEQ ID NO: 846362 - DNA, 120 bp, Artificial Sequence
  ENSG00000261757_11 (sequence is synthesized)
tgtttctactggatctcatgttttcttatttctttatgggcctggttattctcttgtgtgctaaaattgtatatgaaaaattgttggttgaagtaaagtaaaacttattgtgttatattc

SEQ ID NO: 846363 - DNA, 120 bp, Artificial Sequence
  ENSG00000261751_0 (sequence is synthesized)
gatgtaccttttctggtgggactgccaaacccttaggacgtcatcctcgaactgggatcgggtagggaacaacctaagggagaggatggtgaacctgcctgagagtgaagacacagagga

SEQ ID NO: 846364 - DNA, 120 bp, Artificial Sequence
  ENSG00000261751_1 (sequence is synthesized)
cagcgcaggcaaggagcaggttcctgatatgattgtctgaggccctgggtcctggtgctggaaggcagccgcaccctggcattttcagatactagaaccagcgaccccctttcatactga

SEQ ID NO: 846365 - DNA, 120 bp, Artificial Sequence
  ENSG00000261751_2 (sequence is synthesized)
atcctgtttgactgggtgtttatcacttgactgacatcctctaagaattgtgcagtgggccgtgtgcagccagccacctccttccggaaagacaaactctcaactctgtcagaaaatggg

SEQ ID NO: 846366 - DNA, 120 bp, Artificial Sequence
  ENSG00000261751_3 (sequence is synthesized)
ctgtgtctgtgcctctctctctttcctagaacctgaggacctccctcctgactccccacacctggggctgacctgcacgccctccgagccacattacctgcgcagccttgcctggcgatc

SEQ ID NO: 846367 - DNA, 120 bp, Artificial Sequence
  ENSG00000261751_4 (sequence is synthesized)
gtgctgagcagcacctacctggtcactgaagggaggctggcctggcaatggaccgcaagattcaaggtggagaatgtccctcgtttccatcctgtttctgtgacttgtatatgacagtat

SEQ ID NO: 846368 - DNA, 120 bp, Artificial Sequence
  ENSG00000261751_5 (sequence is synthesized)
ttagggaaggtgaaaggcatacctttgtggctcctgtcctgataaggtgggcaaccaattgccacagtcagggttggggaggggcacagggaggtggtggagccctgcaccttcacccca

SEQ ID NO: 846369 - DNA, 120 bp, Artificial Sequence
  ENSG00000261751_6 (sequence is synthesized)
ttacctgtgctggagttcctgccatcggaggcttcctgagaatttccagccaccagaagggggcagacggtgacttctgaagctgggacacaatgggtctgtgaggaggcaggcaagagg

SEQ ID NO: 846370 - DNA, 120 bp, Artificial Sequence
  ENSG00000261751_7 (sequence is synthesized)
gggtggaggcgccaggctgaaaccaccacctccaccaccttgggacaagctgggcccccatcagctgggcttggctctccggaagcttcaggtgtgggctagctcagaggatcccaggcc

SEQ ID NO: 846371 - DNA, 120 bp, Artificial Sequence
  ENSG00000261751_8 (sequence is synthesized)
gctagggggctggcagtctgccttaggagcaggggctggggctggttttgaagctgaagaacaggcacattgtctttacctggaccatacatttaactagggggttggagggggctggtg

SEQ ID NO: 846372 - DNA, 70 bp, Artificial Sequence
  ENSG00000261751_9 (sequence is synthesized)
tggaccatacatttaactagggggttggagggggctggtggagatttgaggtgggtttaagttttctgaa

SEQ ID NO: 846373 - DNA, 120 bp, Artificial Sequence
  ENSG00000261751_10 (sequence is synthesized)
gcctgggcaacacagggagactctgtctctacaacaacaaaaacgttcccctaagccaccccttggcttggccactgctcagggaagtccttccagcctcagaaacccccagagctgccg

SEQ ID NO: 846374 - DNA, 120 bp, Artificial Sequence
  ENSG00000261751_11 (sequence is synthesized)
aatcgtcccgcatggaagacagacacagatgcaagtgtctaaatgcctttgtgcatcctggttccaggtgggaggcgctgggagatgggggcctctcacttagaaactgcctcccctccc

SEQ ID NO: 846375 - DNA, 120 bp, Artificial Sequence
  ENSG00000261751_12 (sequence is synthesized)
aaacctggacacatggcccactgctacacaccaccaccaccagtgttggctgtcgcaggacgccgagggcctgtggtatgtctggagcttcctcgtggacaggcctttcagcagtgtgcc

SEQ ID NO: 846376 - DNA, 120 bp, Artificial Sequence
  ENSG00000261751_13 (sequence is synthesized)
atgatgggcccagtccctgttgaaattgagtcctttgtggatttcctaagctacaaagcaaccccagccctgggatatctcaaagagaatttttaaatgacatgagctggacatgcaacc

SEQ ID NO: 846377 - DNA, 120 bp, Artificial Sequence
  ENSG00000261751_14 (sequence is synthesized)
acaaggtgtctgcccagattaaggcgaactccagcatgggcctttgaagggcactcgatttcccagggtgaagatggatttccacaacagaattcacaaaagcctccccagcccacactc

SEQ ID NO: 846378 - DNA, 120 bp, Artificial Sequence
  ENSG00000261751_15 (sequence is synthesized)
gtccactgggacagggctcactgtccctgggggctgcggggaaggttccaggatagcaggtatttttcacatcccaccatacactgctgcccaggcagtggtaccagcaccagagtcccc

SEQ ID NO: 846379 - DNA, 120 bp, Artificial Sequence
  ENSG00000261751_16 (sequence is synthesized)
ggacctgtgtctgccctaagtgtcctgcctccatgctgtcccttctcagcacaagacccactgtgtgtctagccccccaccccactggttacatatccatggctcctgcagcctcagagc

SEQ ID NO: 846380 - DNA, 120 bp, Artificial Sequence
  ENSG00000262228_0 (sequence is synthesized)
tcagctcagacaggtggttgttgttgatgaggcataatttaggtagaatttaaatgtgttttgacggttgtgtttactcatacaaccactactcagaatacagaccattttcccaggaag

SEQ ID NO: 846381 - DNA, 120 bp, Artificial Sequence
  ENSG00000262228_1 (sequence is synthesized)
ttccctcatgcccatctccagtgagttggcaccttcatctcccagatcagctgctattctgacttctgtcactgtaggtgagttcgttcttggacttcatacaaatggagtcattcagta

SEQ ID NO: 846382 - DNA, 86 bp, Artificial Sequence
  ENSG00000262228_2 (sequence is synthesized)
agttcgttcttggacttcatacaaatggagtcattcagtattttctttccttttgtgcctggctgcttttactcaccatggacgga

SEQ ID NO: 846383 - DNA, 120 bp, Artificial Sequence
  ENSG00000262228_3 (sequence is synthesized)
atggttttgagattccaccatgtaattgcatatcacagctcttttttttttaattgctgactgatactcaattttatgaatataacaatttgctcattcattcttataatggtggacatt

SEQ ID NO: 846384 - DNA, 120 bp, Artificial Sequence
  ENSG00000262228_4 (sequence is synthesized)
tggtttatttctagattttttaatctattataaggaagactgccatgaacattctagtgtaaatcttcttgtagatagatgtttcatttctcttgagtaaatacctaggagtagaactgc

SEQ ID NO: 846385 - DNA, 120 bp, Artificial Sequence
  ENSG00000262228_5 (sequence is synthesized)
ggtctacattctcaccaacacttattttgctttttgtgggttttttagctattctagcacatgcgaaatggtttcattggtgcaatcaagcgatccttctgcctcagccaccacatagct

SEQ ID NO: 846386 - DNA, 120 bp, Artificial Sequence
  ENSG00000262228_6 (sequence is synthesized)
agggctgcagcactatgcccagctgatgttttttatgtttgtagagacagattctcactgtgttgcccaggctggcctccagtgatccttccagctcggccccacagaggtttaattttt

SEQ ID NO: 846387 - DNA, 120 bp, Artificial Sequence
  ENSG00000262228_7 (sequence is synthesized)
atttccctgatgactaatgatattgagcaccttctcatgtgcttattagccatttacttatttttgtgaattttatgttcaagtcttttgtccattctttaataatttttaatatttcat

SEQ ID NO: 846388 - DNA, 120 bp, Artificial Sequence
  ENSG00000262228_8 (sequence is synthesized)
gatgaaaattccaaatatgcacaaccgaagagagtacgacagagccttacgtgactcttaccttgactctgtactgtagtttttcatcattccttcgtcacttgcaaattcaagtatttt

SEQ ID NO: 846389 - DNA, 120 bp, Artificial Sequence
  ENSG00000262228_9 (sequence is synthesized)
tcccagccattaattgagtttttgaagatgaggaattttttattttggtgaagtccagcttatgaactttttctcttacatgtagcactttctctgtccagaccgatgttatatcctgag

SEQ ID NO: 846390 - DNA, 120 bp, Artificial Sequence
  ENSG00000262228_10 (sequence is synthesized)
aacctcttcacctaggaaacctaccacatatcagactcagcgtgtccataacttatcttacctcaaatccattcttcttccagtaatattacataaaggctacttgggagtgtagattct

SEQ ID NO: 846391 - DNA, 120 bp, Artificial Sequence
  ENSG00000262228_11 (sequence is synthesized)
gggaaacctgaatctatgttcccgggctgcagtcttcaagcttggcccagatgaactctctatttatactaaaaatatgtaaataaataaaaataaaaagaaataaatgctactatatcg

SEQ ID NO: 846392 - DNA, 120 bp, Artificial Sequence
  ENSG00000262227_0 (sequence is synthesized)
aattaaggggatgagggtcaggaagggaacctggggtcagcacacgtggagttctgggtggggcgctgggcagagggactcggcttctagggctctgagccaggccgagggacagactgc

SEQ ID NO: 846393 - DNA, 120 bp, Artificial Sequence
  ENSG00000262227_1 (sequence is synthesized)
tgggaagtccccaaaagggcagcagcactgaggggcaggattccagggtcctggaggcggaagctcggccgactgactcccagttcgagagaacggggcgggggcagcccaccagtgctg

SEQ ID NO: 846394 - DNA, 120 bp, Artificial Sequence
  ENSG00000262227_2 (sequence is synthesized)
tctggggacccagcccgacttcattgtagctgggtcctcgagaaagcgaaaggagccctccttccccattggcctctccatcgctgcatcccaagaagaaagacaactcgggctccactt

SEQ ID NO: 846395 - DNA, 120 bp, Artificial Sequence
  ENSG00000262227_3 (sequence is synthesized)
gcttgctttttaataacagagcagagagaatacaaggccaggagcggggcctggaggaaaacaggacttggggtgctcctgtgagagcgacgctgccaactccatcccccagggattgtg

SEQ ID NO: 846396 - DNA, 120 bp, Artificial Sequence
  ENSG00000262223_0 (sequence is synthesized)
agctatgcgcctcgtgcctgggagccttagggccacacggaagggtagaaatcagtttcaggtcaggagagattcctgctcccagcccaggcccagacggcaacagaagctcatggtgag

SEQ ID NO: 846397 - DNA, 120 bp, Artificial Sequence
  ENSG00000262223_1 (sequence is synthesized)
ttcaccccggtcctggtctggcacctcattgctggggaggtctcggcagtccagaggaggtagcccccaccctgggcatccatccgcccaggccccagcctccgcgggaagacccaatta

SEQ ID NO: 846398 - DNA, 120 bp, Artificial Sequence
  ENSG00000262223_2 (sequence is synthesized)
cagaagagagaagtatgtggagacccttggctgaggttgggggtcctggaagctggaggaatggcagactctggacatgctcctagagatgggaggtcaaaatgatcaacgttcagggtc

SEQ ID NO: 846399 - DNA, 120 bp, Artificial Sequence
  ENSG00000262223_3 (sequence is synthesized)
ccttcatctcagagggtctcgagtcacctcatttaaagtgtggcctgggacacctcctatccagccatacgccgcccaggactggctcaacagctccaccctccactgctgttcacccat

SEQ ID NO: 846400 - DNA, 120 bp, Artificial Sequence
  ENSG00000262223_4 (sequence is synthesized)
gacacgtcacttcccacccgccactgctggctcacctgtgacaccccaggcagctcagatgcccggcaggtcctgctggtgtgtgttagccggggtctccaaagaaccagagccagcagg

SEQ ID NO: 846401 - DNA, 120 bp, Artificial Sequence
  ENSG00000262223_5 (sequence is synthesized)
ggacacacccatctctgtatctggagaaaaagatcgatgagaaggaatctgctcctgtgatgatggaggctgacaagtcccgagagccacggttggcaccctggagacccctgagggtga

SEQ ID NO: 846402 - DNA, 120 bp, Artificial Sequence
  ENSG00000262223_6 (sequence is synthesized)
cctgggagagctggccctctgactcctgggacttcttattctatcctagtatttcctcagctgagtgcatggggccagaccacactggggagggcagtcagcgtcactcagagcaccggg

SEQ ID NO: 846403 - DNA, 120 bp, Artificial Sequence
  ENSG00000262223_7 (sequence is synthesized)
tcatctcatgcagaaacaccctcaaagaaatagcccaaattatgctgaccaaatatctgggcaccccgtgccccagacaagttgacacagaaaattaaccatcacaggttaactccatcc

SEQ ID NO: 846404 - DNA, 120 bp, Artificial Sequence
  ENSG00000262223_8 (sequence is synthesized)
aggagtggaattgctgggtcatagagaaggcataggaattcacagaaatcaccaaacggttttcaggcggttgtgccatgttaaactcccactggaaagagaggagagctgtgattgttc

SEQ ID NO: 846405 - DNA, 120 bp, Artificial Sequence
  ENSG00000262223_9 (sequence is synthesized)
cacgtcctcagcaacgtttagaataggcagtctttggccgggccgggcacagaggctcaaacctgtaaccccagcactttgggaggccatagtgggtggattacctgagatcaagagttc

SEQ ID NO: 846406 - DNA, 120 bp, Artificial Sequence
  ENSG00000262223_10 (sequence is synthesized)
ggcctcagttaactcttaaatgggtgtcagaggcactgtcttcccctagctatgcgcctcgtgcctgggagccttagggccacacggaagggtagaaatcagtttcaggtcaggagagat

SEQ ID NO: 846407 - DNA, 120 bp, Artificial Sequence
  ENSG00000262223_11 (sequence is synthesized)
gtgggcgctggtggggactgcctggtgtgtgatggggacaggaacaggcatggagatggcccacacccgagacagtgggctcctggggccacctcttctccacacggcggcagcaggtct

SEQ ID NO: 846408 - DNA, 120 bp, Artificial Sequence
  ENSG00000262223_12 (sequence is synthesized)
agttcgggcctaacagcccagccatccctgagagccagcgccgagggtgcagcagctgcctcctctccgggcccaccggacggtcgccgtcctgccaggagctcccgtgcccatcgccag

SEQ ID NO: 846409 - DNA, 120 bp, Artificial Sequence
  ENSG00000262223_13 (sequence is synthesized)
agagggaaatgctccttggtctcaggaggcagcggggcccgggactcacatggacctgggcccaagtcgaccagttccagctgggcacactgggaaggtcacccacctcccgagccctcc

SEQ ID NO: 846410 - DNA, 120 bp, Artificial Sequence
  ENSG00000262223_14 (sequence is synthesized)
atgtccaggccattgtgggaaaaccctctccaacaggggagtgaagggacaggatggagcgggagcggcgccaaagcacggggagaaccagaggccgcaggtgagaccccgccgtgggcc

SEQ ID NO: 846411 - DNA, 120 bp, Artificial Sequence
  ENSG00000262223_15 (sequence is synthesized)
atgtcccgtctcttcctctgagggcaggcgtttcacccgatcaccctcccggctctctcggccacccctgcttgggcttgctcctgtctggtgttgggtgacctgcctgctgctctcaga

SEQ ID NO: 846412 - DNA, 120 bp, Artificial Sequence
  ENSG00000262223_16 (sequence is synthesized)
ccccacacccgtttgtggcctcatggccatgagtggccccgtccccgactccactgcagtgggcacagtggtggcccccaaatgatcggtccacctggagcctgtgaacacgacaggctt

SEQ ID NO: 846413 - DNA, 120 bp, Artificial Sequence
  ENSG00000262223_17 (sequence is synthesized)
atttgggaaaagggtctttgtccagagacaaaggcccttagaagacagaggtcgggggagatttgagagggaggcgacagaggccacgtgaagatgaggcagagatgggaatgacacggc

SEQ ID NO: 846414 - DNA, 120 bp, Artificial Sequence
  ENSG00000262223_18 (sequence is synthesized)
cacgtccacgggacacctggggccaccaaatgccagaagaggcgggaagaacctcccctgcagcctgcagagagaggacagtcctgccgatagcttgattttggttccggccaccaggac

SEQ ID NO: 846415 - DNA, 120 bp, Artificial Sequence
  ENSG00000262223_19 (sequence is synthesized)
tcggagaaaatagacttctgttgtttgcagctgccccatttgtggtcttttgttgggtggccccagacataatcccagcactggcctggcccggcccatgggcagctgtccccagcctgg

SEQ ID NO: 846416 - DNA, 120 bp, Artificial Sequence
  ENSG00000262223_20 (sequence is synthesized)
cggagggtgtggctgtgatgttacccccaggatatccagtaccgcagtctccatctgagccgccatcgggctgtggggtgcctgctagcctgtggcagaaggaccaggacctgggggctg

SEQ ID NO: 846417 - DNA, 120 bp, Artificial Sequence
  ENSG00000262223_21 (sequence is synthesized)
gcagggagcaagagctgagcgaaccagctgggaggaaggactgaggccacaccggtgtccggggggattcggacgtcaccagtgtggagtctgggggtgttctgactgactttagacaga

SEQ ID NO: 846418 - DNA, 120 bp, Artificial Sequence
  ENSG00000262223_22 (sequence is synthesized)
ggacttggaactcggggagccctgggttctgcctcatcctctacatccctgtggggccacgtccactcaccgaggggttcttgccgccttgactgagggtggccgggcaccagcaccttt

SEQ ID NO: 846419 - DNA, 120 bp, Artificial Sequence
  ENSG00000262223_23 (sequence is synthesized)
gcagctttgcccagcaccttggcatggggtcgggggcggtgcagagttctgttttacagggaagggaactgaggcacagggagatgacagctcgccgctggtgctgaccatgggctcaca

SEQ ID NO: 846420 - DNA, 120 bp, Artificial Sequence
  ENSG00000262223_24 (sequence is synthesized)
ctgcctggccgcccgtgcagcccctgccctccatgacgaacgtgctcatgtttcctggctgccccccggccccactcccacctccctggctaaacaagggagatcttgatgtgagttctc

SEQ ID NO: 846421 - DNA, 120 bp, Artificial Sequence
  ENSG00000262223_25 (sequence is synthesized)
ggtggccctgatcccgatgactctgaaacatgcttggccttccccagagattcctgctcccagcccaggcccagacggcaacagaagctcatggccccagcctccgcgggaagacccaat

SEQ ID NO: 846422 - DNA, 120 bp, Artificial Sequence
  ENSG00000262223_26 (sequence is synthesized)
tacagaagagagaagtatgtggagacccttggctgaggttgggggtcctggaagctggaggggagtgaagggacaggatggagcgggagcggcgccaaagcacggggagaaccagaggcc

SEQ ID NO: 846423 - DNA, 120 bp, Artificial Sequence
  ENSG00000262223_27 (sequence is synthesized)
gagggtggccctgatcccgatgactctgaaacatgcttggccttccccagagattcctgctcccagcccaggcccagacggcaacagaagctcatggggagtgaagggacaggatggagc

SEQ ID NO: 846424 - DNA, 69 bp, Artificial Sequence
  ENSG00000262223_28 (sequence is synthesized)
aaagaaaaaataaataaagaaaagtcattctgtagttttagcctttgtgaaggcatgaagtggcatctc

SEQ ID NO: 846425 - DNA, 120 bp, Artificial Sequence
  ENSG00000262223_29 (sequence is synthesized)
gagggaggcaggaacttgtcctgtctgggacccgggcattgctgggcgccggagggacctgggacctcaaccacgctgggagctggcctgtcgtacaggcggtgcctggcagatgtggac

SEQ ID NO: 846426 - DNA, 120 bp, Artificial Sequence
  ENSG00000225498_0 (sequence is synthesized)
taaaacagggcagattattatgtagcagctatttaatagacaaataagtgtaagttgatggaaagcagtaatgttccttaatacagacacttgcacttggtagacagattcacccaagtt

SEQ ID NO: 846427 - DNA, 120 bp, Artificial Sequence
  ENSG00000225498_1 (sequence is synthesized)
tgcatattataattccagccaccacacagtgagtgagtgactctttctcacaatatcactaactctaagtctctgtctctcatcacatcctatattctcacaccacccctgagccctagg

SEQ ID NO: 846428 - DNA, 120 bp, Artificial Sequence
  ENSG00000225498_2 (sequence is synthesized)
ggacatgatgcctacccgatcctgccggctgagagaaggatggtatattttcttacattagtcaggagctggttggagaagatgaacgtagacatacatgaagtggcacgaaaacaaagg

SEQ ID NO: 846429 - DNA, 120 bp, Artificial Sequence
  ENSG00000225498_3 (sequence is synthesized)
acctcctgcacaaaacagaactgagaaaaggggaagacttgtttactcggattaggtaggatatacacgaatccatctcacaccagatattcttctgctgtagacttccaagtgtttcag

SEQ ID NO: 846430 - DNA, 120 bp, Artificial Sequence
  ENSG00000225498_4 (sequence is synthesized)
tccaccattaatcatggactctcacaattagcagagatgcagagtgacctaatccaacatcccagctgaaacgtgaacaaaccaccctcccaaggaatttgtccacccaccaaagctgtt

SEQ ID NO: 846431 - DNA, 120 bp, Artificial Sequence
  ENSG00000225498_5 (sequence is synthesized)
ttccaatgtgacttaaccttgggcacatgtccccacccccaaaggaagcaaccccttccatctttgggttaatgttggcttccttctaaaatgaattggctcaatttctctgttgagtaa

SEQ ID NO: 846432 - DNA, 120 bp, Artificial Sequence
  ENSG00000225493_0 (sequence is synthesized)
atttgccaagaaacccccgcagcagactgcgtccgcagggcagggctgagtagcaggggcagcacctctcacaggggcagggccgcttgcccagccttgaggaagggggacccagacatt

SEQ ID NO: 846433 - DNA, 120 bp, Artificial Sequence
  ENSG00000225493_1 (sequence is synthesized)
gcctttctcaatactgagcccctaaacaggatttctggtctggggtctgggactaggctatctggacagtcaaactcttcccactgcgccatcagccccactaggaaagaaagaggagaa

SEQ ID NO: 846434 - DNA, 120 bp, Artificial Sequence
  ENSG00000225493_2 (sequence is synthesized)
attagggctttgctttaaagagttcaacggtcagaatatgtcccccgcaaacggacatgctggaatcctcatccccaagtgagggcggggcctcacattaggaggtgatgaggtcacaga

SEQ ID NO: 846435 - DNA, 120 bp, Artificial Sequence
  ENSG00000225493_3 (sequence is synthesized)
ggcagaaacctcacgaacgggatcaggctcatcaaagaggcctgagagacgacacctaccagctggaaggcggttccgcaccagacaccgaagctgctgggccttcgacctcggacctcc

SEQ ID NO: 846436 - DNA, 120 bp, Artificial Sequence
  ENSG00000225493_4 (sequence is synthesized)
gtcttccagaactgtgagccacacattcctgatgctcctaagccacgccgtgtacggtattttgttacggtagcccaaatggaccaagataggagctaaaggtgcttgtgagattccacg

SEQ ID NO: 846437 - DNA, 120 bp, Artificial Sequence
  ENSG00000225493_5 (sequence is synthesized)
catcatactagaggtgtgagcactgcacctaagggtgcctcggatcatccctgagatgcaggcactgcaccaggaggtgtcttggatcattcctgaggtgtgagcacatcatcagaagac

SEQ ID NO: 846438 - DNA, 120 bp, Artificial Sequence
  ENSG00000225493_6 (sequence is synthesized)
ccttttgtccatggggtcccattctcaccttctggatacacatcactctcggggccgccattctacctgcctcatctgtgcgcggcagtctggacctagaagctctgtcccctctgctgc

SEQ ID NO: 846439 - DNA, 120 bp, Artificial Sequence
  ENSG00000225493_7 (sequence is synthesized)
ccagtggagtcgagtgcctggcacccaacacccagacagggtggccaccaacctggttgaggggactgtccccaagatgatcacagaacatcaggcagggctcctgagccagcgcccccc

SEQ ID NO: 846440 - DNA, 120 bp, Artificial Sequence
  ENSG00000225493_8 (sequence is synthesized)
agcagccaaggcgtcctctatgcccagaagtgccagggatcgggggctgcccagttccagacagggtcatcacactccgaccttcagaggggccccccgcctgccagctccagacagggc

SEQ ID NO: 846441 - DNA, 120 bp, Artificial Sequence
  ENSG00000225493_9 (sequence is synthesized)
catcacactcccgatccacagagggcccccccacgcctcccagctcctgacggaagcgcctgtccagcttcaccgacctccatgccgctgcctggggtcttgctcgaacgcaagagaaca

SEQ ID NO: 846442 - DNA, 120 bp, Artificial Sequence
  ENSG00000225493_10 (sequence is synthesized)
cgggtctcgttgagggctcctctgccccgcatctcctgctcctggacacccaggcctgccctcaccactgctgctggacaccgggcaggggtcctggccactcttctggaaggccagtct

SEQ ID NO: 846443 - DNA, 120 bp, Artificial Sequence
  ENSG00000225493_11 (sequence is synthesized)
gacgttgcaggcgcagccacttcactgtttgtccttcacggtatgccagactccctcctccctgcaagagcctctcccagggcccagtcctcccccgagaggtgctgatgagagtggagt

SEQ ID NO: 846444 - DNA, 120 bp, Artificial Sequence
  ENSG00000225493_12 (sequence is synthesized)
atggaaccatctgccagccaaccccaggtggcctctcgggggtgccctgccccacagggccatgcacggtgtggccctccccggtgctgtcacgtctgaatgtggccctgcagacttgcc

SEQ ID NO: 846445 - DNA, 120 bp, Artificial Sequence
  ENSG00000225493_13 (sequence is synthesized)
cccactgggctggagcacatcccctggaatctgatcccaggagctccgggagcagctcgcacacagctccatggatgcccctcacagtgggagagacaggaaaggccagctccgagtctc

SEQ ID NO: 846446 - DNA, 120 bp, Artificial Sequence
  ENSG00000225493_14 (sequence is synthesized)
acacctcactcttcaagctgggaaaatgatgctgttaccttgggaggtgagaccctccagatgggaacctcgacgctgggagctggtgtgttcccggaattcgggggaatatttcattcc

SEQ ID NO: 846447 - DNA, 120 bp, Artificial Sequence
  ENSG00000225493_15 (sequence is synthesized)
ctgcgtatggtgtctggactttcagatccctcctcccaggcacccaggcatcatttcacaaccccatgctcagcaagccccagagaaaactcctcaataaactacgagtgttaatacccg

SEQ ID NO: 846448 - DNA, 120 bp, Artificial Sequence
  ENSG00000229788_0 (sequence is synthesized)
ttttttttctccacggcctgaggacgtgataggatttcattcccgccccaccttgttggttggatggaatcatgcgcccaattgtggtcaagaccaagaaactgagaaacgaagcaaatc

SEQ ID NO: 846449 - DNA, 120 bp, Artificial Sequence
  ENSG00000229788_1 (sequence is synthesized)
cgtgggatgcagagggtacgctgatgacttctgctggggagagaagcccaaacacacgtcctgggcagagcccagagaccgggagtgtggctgccagtgagcacccggctgagggacaag

SEQ ID NO: 846450 - DNA, 120 bp, Artificial Sequence
  ENSG00000229788_2 (sequence is synthesized)
ctctgcctcggaagcaccggaggctttggggatctggtggtcctctggccctgaacgtggacctggtgtgacaaagggaagtttgccatctccatcctcctcaagctgcctgtgcacccc

SEQ ID NO: 846451 - DNA, 120 bp, Artificial Sequence
  ENSG00000229788_3 (sequence is synthesized)
agtagcacccaccctctctgtgctcccgtctgcaccgcatgtcctggggtccttctttgtactgcacccaatgacaggaaccagtgccctgactgtgacttgcttcccccctcagggaca

SEQ ID NO: 846452 - DNA, 120 bp, Artificial Sequence
  ENSG00000229788_4 (sequence is synthesized)
cacaagcactttcacatcgaggctacttttcaccccttctgcctcctgcagggacgctgcatgcagaggcaggaggacagaggggctggtctcaggtgtggcttctctcacacctggcgc

SEQ ID NO: 846453 - DNA, 120 bp, Artificial Sequence
  ENSG00000229782_0 (sequence is synthesized)
cgcgcgggctgctccaggggtggggactcctctatcccttggccccggacaagtcccagggcacggacgtgacccattacgaacaggcagtgaagctgtggcagggctggagctgcccca

SEQ ID NO: 846454 - DNA, 120 bp, Artificial Sequence
  ENSG00000229782_1 (sequence is synthesized)
tcatccccgagggctggagctcactccccgctagaggcttttccggaccccacgtccacaggcaggtgcatctggtgaagctttcggccacagtgagtcatggcatagccaacgggtgac

SEQ ID NO: 846455 - DNA, 120 bp, Artificial Sequence
  ENSG00000229782_2 (sequence is synthesized)
acagcacgaggcaccccccccgcccccctccactgtctcttgtgagcagagttaatccccaagctggtgtttcttggcgccttcgaggtgtattttaaattctgcaaagtgactaaaaat

SEQ ID NO: 846456 - DNA, 120 bp, Artificial Sequence
  ENSG00000229780_0 (sequence is synthesized)
cctaaaggagaaacctgaatcattacatctcctctcctcgctacaaatgcaaggcatgaatcagttttagactggagttctggatatgggtaccaatgttgctgactgcaagagcttcca

SEQ ID NO: 846457 - DNA, 120 bp, Artificial Sequence
  ENSG00000229780_1 (sequence is synthesized)
tgtgtgcactgcagcaaggaagggaaagatggagatcagagccccagtggcttgctagaatgcagcctccaacctactcccctgagcccccaggtctggaagttgtgcgcctgcctgtaa

SEQ ID NO: 846458 - DNA, 120 bp, Artificial Sequence
  ENSG00000229780_2 (sequence is synthesized)
tgctgccagtctctccaccagccagatctgagtggaagcaacagcccagggaatggctttgctaccagcccattatttttcgcctatcactgccaaagaataaaagaaaagcaaaatggc

SEQ ID NO: 846459 - DNA, 120 bp, Artificial Sequence
  ENSG00000286464_0 (sequence is synthesized)
gaggtgttaccagatctactgagagaaggacgcagtaattcacactgaaagacagtagacctgtactatctcaaaaatcggcataacaagaagagttttatttattatttttaaatgaaa

SEQ ID NO: 846460 - DNA, 120 bp, Artificial Sequence
  ENSG00000286464_1 (sequence is synthesized)
gtctaccttgtcactgctttaaaaaaatattgacaaatttaaagttgatttttatattgggagttctggtttaagatggtgtcagaattgggatccaaagtagagcttctaatgatcccc

SEQ ID NO: 846461 - DNA, 120 bp, Artificial Sequence
  ENSG00000286464_2 (sequence is synthesized)
ctaaatgggtagtcatgatgaggtatgaagacattttctataccattttctacgcctataccagccagaatcaagtccaacatggctgcttcctcctctgcttttcctgtttgcctcctg

SEQ ID NO: 846462 - DNA, 120 bp, Artificial Sequence
  ENSG00000286464_3 (sequence is synthesized)
gctattttgggatgggttggattctccagatatagtcttcatggctctgttctctgtccttatggattcagaaaggccttgaatttcataatcctcttgggtcccctgtggctacctaag

SEQ ID NO: 846463 - DNA, 120 bp, Artificial Sequence
  ENSG00000286464_4 (sequence is synthesized)
acctagaatgcctaggggaagacattagaaaggctacctgtgtcaatttcaaaattattttcagtaatttaaaattttagagtcatgttatgtaaaattaagtaatagataattataaaa

SEQ ID NO: 846464 - DNA, 120 bp, Artificial Sequence
  ENSG00000286465_0 (sequence is synthesized)
gcaaagggcatgaacttcccaaggctccacctcagtggggaggctggttggagtttctccagggaccgcctcccacctggctgtctcaattgtttttaggtacaaatagcaagttgatgc

SEQ ID NO: 846465 - DNA, 120 bp, Artificial Sequence
  ENSG00000286465_1 (sequence is synthesized)
aaagaaaaatatataaagtaaatcatggagattatatgtgatttggcaaaggtcatgaaggataccatcgctgaaactaaactttggaataaattagtcttatcaaattacaaagaccag

SEQ ID NO: 846466 - DNA, 120 bp, Artificial Sequence
  ENSG00000286465_2 (sequence is synthesized)
agccctgccaacctctgcagaatgcggtcatactgctcccccatggaatgaagtatagaacaaatctaccaatcctgagagattgctgtgactttgaattctgtggaatctacacatcaa

SEQ ID NO: 846467 - DNA, 120 bp, Artificial Sequence
  ENSG00000286465_3 (sequence is synthesized)
ttgtgtcttccaaagaacatagtatctatcttcatttattctgatcctctttaattgctttcagcagtatttgtcatgggtgagggtgagatgctgttctgtgctatgtagaatgtttag

SEQ ID NO: 846468 - DNA, 120 bp, Artificial Sequence
  ENSG00000286465_4 (sequence is synthesized)
cagcatatttgaccactagatgcccgtagcacctccccaccaagttgccacaatcaaagtgactccaggcattacaaaacatcttctgtggggcaaaattacccttgattaagaacccct

SEQ ID NO: 846469 - DNA, 120 bp, Artificial Sequence
  ENSG00000286465_5 (sequence is synthesized)
gaactagagaaatagagaaagtgtggtattaacaaaacgatagccatattaatcagtggcaatgaaaattatcaactctgtatgcaatagcaaacaaaacaagaacaataactaaaacaa

SEQ ID NO: 846470 - DNA, 120 bp, Artificial Sequence
  ENSG00000286460_0 (sequence is synthesized)
tttggcagaaatgcggataaagggggtgcagaacgggacccctgaggccggctggggcccggtcacacgcagggcggggaatcagaggggtgcgttgtgaaatgagaggtgtcttagggg

SEQ ID NO: 846471 - DNA, 120 bp, Artificial Sequence
  ENSG00000286460_1 (sequence is synthesized)
agcactggcttttctgatgcgtctgtgtgtccacaagagaccatggttccgcctccattttggagaccgggaggccgaggttccttttggcctcatcgggcagatcccagaggagactgg

SEQ ID NO: 846472 - DNA, 120 bp, Artificial Sequence
  ENSG00000286460_2 (sequence is synthesized)
actttggggtctagtgaccaggccagaaggtgctctcaggggtgggtgcgggacagtcccaggccgcaaggctgtcagaggaaggcgccccttggtggagaggccaactctgggacccac

SEQ ID NO: 846473 - DNA, 120 bp, Artificial Sequence
  ENSG00000286460_3 (sequence is synthesized)
aggggtctctccagagtcagagccatcagtgggtgagaggctggtctggaaggtggtgagctccccatcaccaggcctgtgagcaggtgaaccccttgggccctcagctcctggggttct

SEQ ID NO: 846474 - DNA, 120 bp, Artificial Sequence
  ENSG00000286460_4 (sequence is synthesized)
ccatgacccaccatttccatggccctggatgaggtgggcccatctgcctctgcggagacttggcactgcctccaagaccactcagtcccctctcctgttgccactgaggctggggcactg

SEQ ID NO: 846475 - DNA, 120 bp, Artificial Sequence
  ENSG00000286460_5 (sequence is synthesized)
aggttcaagcggctttggggctcaaggagctctatttctccctgatttgaccccactccccctcctggcctccagaccccttcctccagccctccttccactctgccactcaatgctcca

SEQ ID NO: 846476 - DNA, 120 bp, Artificial Sequence
  ENSG00000286460_6 (sequence is synthesized)
actgcaacatgggcctcccctgctctaacgccacccatggctcccttctcccaggccaaggtccagcttctcagcctggcatccatggcccggcctgagtgctcctggcgtgcacctccc

SEQ ID NO: 846477 - DNA, 120 bp, Artificial Sequence
  ENSG00000286460_7 (sequence is synthesized)
tcccaccctgaccccagccctgcgggagcacctcagagcatggcccggcccctgaccctcatctgggggtgccctcagcaggagatggagacagccctgagggcagacaaatcccagctt

SEQ ID NO: 846478 - DNA, 120 bp, Artificial Sequence
  ENSG00000286460_8 (sequence is synthesized)
ctgctctacatggctgcctgcagggaagtgccttctcaagcatcggttcccccatctgtgagtgacgtcactgttgcccgcctgtagggttgctgggaacacatgggcagggcgcccacc

SEQ ID NO: 846479 - DNA, 120 bp, Artificial Sequence
  ENSG00000286460_9 (sequence is synthesized)
tacacggggctgctgggcacccaagcactcagacggcagccctgccccttcccagtccgcctgcctgccttcgtctcctgagtgacccaccagcgtggggcagggcgtcgggccggctcc

SEQ ID NO: 846480 - DNA, 120 bp, Artificial Sequence
  ENSG00000286460_10 (sequence is synthesized)
ctgtctcctccgggcaccagctcaggccggggcaggctgactcatgcgtaggagagtgggcagggcggtaactccacgctgcggctgctatttatagctcccaggccaggctgtgggccg

SEQ ID NO: 846481 - DNA, 120 bp, Artificial Sequence
  ENSG00000286460_11 (sequence is synthesized)
cgtgagccggcgaggccaggccctgttcccctcctcgctgtccctgaggaacggggtctccacacatggcccgcggtgcccaggccacagatggcagtgagctcttccgagcacccaaac

SEQ ID NO: 846482 - DNA, 120 bp, Artificial Sequence
  ENSG00000286460_12 (sequence is synthesized)
taggacagcaggagcttctcccccatggtgggccggggagcagagggttccgcctggcctttgtgagtgggggtgggtgggcgccccagctctgcctctccatggaaaggtccgtgatcc

SEQ ID NO: 846483 - DNA, 120 bp, Artificial Sequence
  ENSG00000286460_13 (sequence is synthesized)
aaatctcaggggccagggcacttgcacactggggcactgagcaagccggggctggcactggagtttcctgggttccctgctgcctctcatacccgagtccctctttggagagtccctcgg

SEQ ID NO: 846484 - DNA, 120 bp, Artificial Sequence
  ENSG00000286460_14 (sequence is synthesized)
catcctgagaggcacagaggtgggcgaggaggactgaggccggctgcatctttgccaaagagaagaggacctgtcaacctctccagctcgcgagctgggcaggatccacaggcgtccacg

SEQ ID NO: 846485 - DNA, 120 bp, Artificial Sequence
  ENSG00000286460_15 (sequence is synthesized)
ttgagtccccagggtgaaacccaccggggcagtctgcatgggtcctgcaaacacaaagtgccagtgtagtgggtgctgggccctcagcagtctgtacaaggccactgtccctgctcccat

SEQ ID NO: 846486 - DNA, 120 bp, Artificial Sequence
  ENSG00000286460_16 (sequence is synthesized)
ctggaaactgctgctcagagaagggaagcggctcgcccacggtggcctagtgggaaagaggtcggtccggatccatcaggctctgaagccatagcccagcctgctggggatagacggcca

SEQ ID NO: 846487 - DNA, 120 bp, Artificial Sequence
  ENSG00000286460_17 (sequence is synthesized)
cccccttgtgatcctcttgccctgtccctggctatctgcagtcttgtcctggggacactcggccggtcctgccttacagatctcctttcagcagaacagcaagggacggcgttcatctgc

SEQ ID NO: 846488 - DNA, 120 bp, Artificial Sequence
  ENSG00000286460_18 (sequence is synthesized)
aatgtccagctcctcccccggccctgcagctccacgaccgctctcctcaccctgctgccctgaccagggccacgtgggcctcactgagccccggctagcctttggagaggagggcagtgg

SEQ ID NO: 846489 - DNA, 120 bp, Artificial Sequence
  ENSG00000286460_19 (sequence is synthesized)
ggtccggcctcagctctcttcagtggtctctggaccatgtgggcaaagccgaggttgcacatcctggcctcagggggcagagtcaccccaggggctcagccacacagttgcttttcaagt

SEQ ID NO: 846490 - DNA, 120 bp, Artificial Sequence
  ENSG00000286460_20 (sequence is synthesized)
ttagcatctgtcaatcaatcagtcaatcaatctaccacctatctatctatcatctatcaatcatctatctgtcatctatcaattaatctatcaatcatcatttattaatcatttacctat

SEQ ID NO: 846491 - DNA, 120 bp, Artificial Sequence
  ENSG00000286461_0 (sequence is synthesized)
acggctgtttcccctcatggttttcactgacatgctaagtgaaatccagcctcagattagagatggctcatgggccattgctggcccactgaagttgcagccaccgtcctggttatcagt

SEQ ID NO: 846492 - DNA, 120 bp, Artificial Sequence
  ENSG00000286461_1 (sequence is synthesized)
ggtcagtgaactcaggacaacaggagctgaaaccgaggctgagcccacttcccgggggccagcctgttcctggctgagatgacacctgtcagaacatcctgtgcttcccattcaacagtg

SEQ ID NO: 846493 - DNA, 120 bp, Artificial Sequence
  ENSG00000286461_2 (sequence is synthesized)
cactgggctctgtgcagaacagaaaagagaaagagagttctgcgagtgcctcttgctgtaattaccagctctggatgcctctgcctcactctgggatgcaggctacatccagcttcatga

SEQ ID NO: 846494 - DNA, 120 bp, Artificial Sequence
  ENSG00000286461_3 (sequence is synthesized)
gggatggacctcaaaactaaagtggcgtggattccactgtctgctactgctgcctggacccacgcagccgcccacatgcggcagcatccttgtcatgctcctttggacatcatcatcctc

SEQ ID NO: 846495 - DNA, 120 bp, Artificial Sequence
  ENSG00000286461_4 (sequence is synthesized)
tacccacattccagctgttacaactgtaattcagtcctacgacactcctgagggataagactggacattcagaacttgcacaaccggctggggtcctgttgttcctgagcagagcacaat

SEQ ID NO: 846496 - DNA, 120 bp, Artificial Sequence
  ENSG00000286461_5 (sequence is synthesized)
gccaaggctggaaggtagacctgaagctcaaagtcatgaccccagtgctgaatgcccctccacacctgtcactcacatggatgtttctggaaaactgctcaactctattgttttgttatt

SEQ ID NO: 846497 - DNA, 120 bp, Artificial Sequence
  ENSG00000286461_6 (sequence is synthesized)
ctagagcggtcattcataaaacacatagcagtggagcatctactatgtgcaggtcatggtgctgagcactatgtgggagacaaaattaaatcccaaacagaacctgctccagtgagctta

SEQ ID NO: 846498 - DNA, 120 bp, Artificial Sequence
  ENSG00000286461_7 (sequence is synthesized)
gaactgggcagcagcctttacagctgaggagagctacttcagagatgatgcacttgtgctttggggacaactgtgcttttatttgattcattttctgtagaaatgtagacaagcacttca

SEQ ID NO: 846499 - DNA, 120 bp, Artificial Sequence
  ENSG00000286461_8 (sequence is synthesized)
aaaattctcaaaagaggaaatggatcaagacattttgataaatgttttctaaaaagcagttcttagctaccatcaaatatgatatgctatcaaataataaggatcaggaaatagcccact

SEQ ID NO: 846500 - DNA, 120 bp, Artificial Sequence
  ENSG00000286462_0 (sequence is synthesized)
aggaactttttaggcacaaatgaggaaataacatagaaagacttggaggcttcgcccacataaggcaggagatcactccaagtaaacggacctccctgatggtggcttcccccgttccct

SEQ ID NO: 846501 - DNA, 120 bp, Artificial Sequence
  ENSG00000286462_1 (sequence is synthesized)
gtaactgcctgtgactgatgagccatcagcagggatgggagggatggagcctcggacatcatttactcacttctgcttgttaaataactcaggacctggggccgcttctcagggctgggg

SEQ ID NO: 846502 - DNA, 120 bp, Artificial Sequence
  ENSG00000286462_2 (sequence is synthesized)
ctgagtctccgtgcccaccgtggtgctgggcatatttgctgtctctggggagacagatgcgaagcagaaaggcagaaggaaaagctgtcagcccaggcgctcctgccatcccacgccggc

SEQ ID NO: 846503 - DNA, 120 bp, Artificial Sequence
  ENSG00000286462_3 (sequence is synthesized)
ctgcaggccaccgccctctgcccatcccggaaggacgtgttttcctcttaaatacctgagtcaaggggctggggtgcatctttccctccgccctcttgctgagctgcgtggctgcattga

SEQ ID NO: 846504 - DNA, 120 bp, Artificial Sequence
  ENSG00000286462_4 (sequence is synthesized)
ggggatttttctgtctctgccattaaacaaatcctggcaggctaattagctgtgggaagtttcaggtgctttcattttcaaaagaagtcaaaacaagcacatattatgcttggaacaagc

SEQ ID NO: 846505 - DNA, 120 bp, Artificial Sequence
  ENSG00000286462_5 (sequence is synthesized)
ctagctttctaatgaaaagagactgcaactggatcatcaaacaaacgtaaacaaatagatcaataaatgtgcatgcatacacgtgttcacagagcacaatttgaaggtgaaacgtgaaat

SEQ ID NO: 846506 - DNA, 120 bp, Artificial Sequence
  ENSG00000286462_6 (sequence is synthesized)
gagagcccgtacagaggtgtcagccatgagatgtgcaggggccaagggtgcagggccagggtcaggaggatgtgcagtggagccgggttaacgttactgccgcgccctaagaaacgggga

SEQ ID NO: 846507 - DNA, 120 bp, Artificial Sequence
  ENSG00000286462_7 (sequence is synthesized)
ggggaggggaggcaggtctggaaccacctaggaggcagatttggttgatttgtttcaggaatcctttctgccttgtgatttaggagttaacgtttccttctcctctttctgctcctcctt

SEQ ID NO: 846508 - DNA, 120 bp, Artificial Sequence
  ENSG00000286462_8 (sequence is synthesized)
cctccaataaagtgcctgaccttcatcagtgcacacacaggtggcactggctcagggcccatcgagggccagtgtcctgggccctgcagggcatgtctgtgggagggccactagggtcag

SEQ ID NO: 846509 - DNA, 120 bp, Artificial Sequence
  ENSG00000286462_9 (sequence is synthesized)
gggacagggccgtggggaaaatctgccccgtggatggatttgaccgcagccacgctgtccttctggggaataaaggaggagacttcccttgtccctgggacagcaggcgcttccccaggt

SEQ ID NO: 846510 - DNA, 120 bp, Artificial Sequence
  ENSG00000286462_10 (sequence is synthesized)
ggtggcccctcaagggctcctccccagcacgcttcctgccctcccactgctctgagtcaagttcctcccgctcacctgctgacttcattcctggtcccctcatcgtcatgggcggggcct

SEQ ID NO: 846511 - DNA, 120 bp, Artificial Sequence
  ENSG00000286462_11 (sequence is synthesized)
aggagcttgaccagccacaggggcctggccctctccagggtgctgaaacctgctgccgcttcctgggtggggactgcgtggctgtcccaggataagcagatgtgggaccccgtggcagaa

SEQ ID NO: 846512 - DNA, 120 bp, Artificial Sequence
  ENSG00000286462_12 (sequence is synthesized)
ctacagttgttttgatgtttccatcatgccctaaatccagccagaagcagcttgaagatacctggtgcgcaatgtcctgccgatagccggcggctgagcagacgcctgggagagagcatc

SEQ ID NO: 846513 - DNA, 120 bp, Artificial Sequence
  ENSG00000286462_13 (sequence is synthesized)
tttatcctggatgggctcagaggaccttcagagtccaacgcacacctctccagaatccattcaggcgtctgcaggctggagactgagggcagaggaaacaacgcccgtgggatcatcacc

SEQ ID NO: 846514 - DNA, 120 bp, Artificial Sequence
  ENSG00000286462_14 (sequence is synthesized)
cggctcagcaaatgctcatcaatccttctgcactcggcactgcgctgggcccctggggctttagagagggtgagatgtggtctttgaatctggagagtcatcgcgtagttgtgagccaca

SEQ ID NO: 846515 - DNA, 120 bp, Artificial Sequence
  ENSG00000286462_15 (sequence is synthesized)
ctacagctcctcagcagaggaacagtgaggacgcaacatcaaacagaagaatcttgaagacgaggcaagggcattgaggtgctgccaccgcctccggccggctcttgccgcagctgataa

SEQ ID NO: 846516 - DNA, 120 bp, Artificial Sequence
  ENSG00000286462_16 (sequence is synthesized)
acgtgcagtattggcgttgtcgggaactggctttctggggcctctgtcacttcccgtctctgcagagcttgtgattgagcctgttcacaggacaccttcgtgctggacacagcttcctgt

SEQ ID NO: 846517 - DNA, 120 bp, Artificial Sequence
  ENSG00000286462_17 (sequence is synthesized)
cgtgatccagaaactcactgaatttaatctaagattgctaacaagagtttcctggggctttggaggggaccatcaggagtggtgctgctcccggagaaataagaaaactgtgtcagtcag

SEQ ID NO: 846518 - DNA, 120 bp, Artificial Sequence
  ENSG00000286462_18 (sequence is synthesized)
ggctcagcttcagcttgaagtggcagaaatgcagctcacactggtgtaggtcagggaagtccacatgaagcggggagagcaaggtgtgactgggtctctgtgaggctggaatagggagcg

SEQ ID NO: 846519 - DNA, 120 bp, Artificial Sequence
  ENSG00000286462_19 (sequence is synthesized)
ggagctcagcatggtgctcttgcgtctttctctgtgcaaactttgcttcctccactcacactggctgagcctcacactgaccactgtggaccccattcctctggcataacagctacgtgg

SEQ ID NO: 846520 - DNA, 120 bp, Artificial Sequence
  ENSG00000286462_20 (sequence is synthesized)
gtaacagactccagcattccctccatgacgcctgttcactgtccttgtagatttcgaaagggctagaagagaagaatgtgaatgttccccgcataaaggaaaggtaaatatttggggtgg

SEQ ID NO: 846521 - DNA, 120 bp, Artificial Sequence
  ENSG00000286462_21 (sequence is synthesized)
caggtatcacaagtgtcttgatttggggtggcaggtatcacaagcgtcacaagtgatcttgatttgatcactacacattatatgcctgcaccccgaatatgtacatctattatgtatcaa

SEQ ID NO: 846522 - DNA, 120 bp, Artificial Sequence
  ENSG00000286463_0 (sequence is synthesized)
agaaccaatttgagtcactgcatgtgtctgtggtctctgcatggacacctcagagctaggaatcacttctcgtgttacgacaaggagtggcgaagagacagtggatcaacagatgcttca

SEQ ID NO: 846523 - DNA, 120 bp, Artificial Sequence
  ENSG00000286463_1 (sequence is synthesized)
atgccagatccccaaaaggggctgatttcgcgtgatagggaaatgaagaggagaggaggacgacagggagagaaaggaggaaaaactgcgaaggaagaacaagccggagctccgtctgcc

SEQ ID NO: 846524 - DNA, 120 bp, Artificial Sequence
  ENSG00000286463_2 (sequence is synthesized)
tttcagaaatgacatctctgcggaattcaatgcggcctattctcaagcatcggagaaactcttttcttgcctcctccttcaccccaccccaaccagattagaaaaaaaaaattaatggtg

SEQ ID NO: 846525 - DNA, 120 bp, Artificial Sequence
  ENSG00000286463_3 (sequence is synthesized)
acacaggcaatgctcgccaagagggggtggggcagcacacagagctagccaggaagtgagagccgttcggctctgctgagcagaagaaaacagcaggaatgtgccagtgcaagggcagca

SEQ ID NO: 846526 - DNA, 120 bp, Artificial Sequence
  ENSG00000286463_4 (sequence is synthesized)
acatttaggggggcaaccacaacccctacccagatcctggactcacttctccacagcctgcgccttttgaaaaaaaatgctcgcctcccccccgcctcccccgcccagggttctggagca

SEQ ID NO: 846527 - DNA, 120 bp, Artificial Sequence
  ENSG00000286463_5 (sequence is synthesized)
actactgttcttccaggctgtgggctgcttgaacccttggtcatctgtaaaatgggtctactctacagacctggcacacccattctcactgtcagctttcttcatggaaccttcaaaata

SEQ ID NO: 846528 - DNA, 120 bp, Artificial Sequence
  ENSG00000286468_0 (sequence is synthesized)
agcaacagctcaaatcagatttcttctcttgactgtacataaaggttagacaagatatcaaggcatgaaactcccaagtattgcgtcattgacaactgaaattgcctaagtgtgagatca

SEQ ID NO: 846529 - DNA, 120 bp, Artificial Sequence
  ENSG00000286468_1 (sequence is synthesized)
tacttctgcccgaaaacttgcaagaatatctttggcatggatgtcagtgggatgaccagataaaatggagccaatgagatcagaaaatgatcaaaatttggcaaaatgggaagcaagacg

SEQ ID NO: 846530 - DNA, 120 bp, Artificial Sequence
  ENSG00000286468_2 (sequence is synthesized)
caatttgcaaacagggaaatcaaacagtgccacatcaaaataagagggaaggaaatccagcagctaagcaggccacacagttcccagatagaggtaaacttcttttctggccgaagccct

SEQ ID NO: 846531 - DNA, 120 bp, Artificial Sequence
  ENSG00000286468_3 (sequence is synthesized)
ggttacgggaaacagtgtcttctgaaacgaccaggtgtggggaaagcgtcagcatgactagacatacctggctcacctgttgaacaagccccagtgaaccagattcaggaatatcagcag

SEQ ID NO: 846532 - DNA, 120 bp, Artificial Sequence
  ENSG00000286468_4 (sequence is synthesized)
ggagaggagcttctggggaaaatcccaacatgcagggcataagctgctttctgtctcctacagttttgtgcaaagtacaatgcgtgaataacagagagtaggaaggacaatgaaaacagc

SEQ ID NO: 846533 - DNA, 120 bp, Artificial Sequence
  ENSG00000286468_5 (sequence is synthesized)
acgagagatgaagcgactgaatgtcatcggaattgtgcccatttctccaagcttttgggctgatgtggtactgtttcttaatgcatcatttatttgtctaatatatcattcaaatattta

SEQ ID NO: 846534 - DNA, 120 bp, Artificial Sequence
  ENSG00000286468_6 (sequence is synthesized)
tcgagggccaactatgttcaaggctgcggggatatgacaagcaaggatgttgttttcatgaaacttacattctaggatagacagatagacaatgatgagatagacaatggcagacagaca

SEQ ID NO: 846535 - DNA, 120 bp, Artificial Sequence
  ENSG00000286468_7 (sequence is synthesized)
atgatgagataaacatatatatgagttgttaagtagtggtaagacctatgaagacaaaagaaactagttaagaggcaaaaagtgctacagggatacaagttttcataagaaagtcagata

SEQ ID NO: 846536 - DNA, 120 bp, Artificial Sequence
  ENSG00000286468_8 (sequence is synthesized)
agtcccctctgaacaagcaacgtttggatagaggcctaaaagaagggagtgagtgagccagacagctaggagaagacatcccagagagagggaactatcagtgtgaaatccctaagactg

SEQ ID NO: 846537 - DNA, 120 bp, Artificial Sequence
  ENSG00000286468_9 (sequence is synthesized)
atgtcagacagcgcttaaacactcaggacattatcattataagaatttctaccttattctctgaataagatgagaagccactggggacttttaagaaaagaaatcactggcttctgtgca

SEQ ID NO: 846538 - DNA, 120 bp, Artificial Sequence
  ENSG00000286468_10 (sequence is synthesized)
gaaaagaaacaagagtgaaaacaggaggaaaaaaaaaagtcactaggaggctagtgcaataatccaagtgagaaatggaccagaatggtagcagtggagatggtgaggagtgttggacat

SEQ ID NO: 846539 - DNA, 120 bp, Artificial Sequence
  ENSG00000286468_11 (sequence is synthesized)
tgggtacacaacaaaggcagtagtgaagaatgatgtcaagatgtgtcggcttatatgactgcaagaatggagttatttactgagatggggacaggcaggttagaagatatttcatttgta

SEQ ID NO: 846540 - DNA, 120 bp, Artificial Sequence
  ENSG00000286468_12 (sequence is synthesized)
ttatgttttaggtgtccactagatataaactaggtgttacatatcatcaccccgacatgctgtgactccttactctgtgcaaatttctgtgcaaaagctttctgacttcataggatgtct

SEQ ID NO: 846541 - DNA, 120 bp, Artificial Sequence
  ENSG00000286468_13 (sequence is synthesized)
gaatttgattaatattcatctttcacactggagtgcagttgcatgagagcagtggctatttcgatctctctctgtgtattcctagcaccaagcacagtgcctgacgaagtacacactcag

SEQ ID NO: 846542 - DNA, 120 bp, Artificial Sequence
  ENSG00000286468_14 (sequence is synthesized)
tgactagtgaatggatgactgaatgaaagagtgaagaagtgagacttcccaacaactccatacagaactggaccaactgcttccacagctcatcttggtcaagtctgattcccataggtg

SEQ ID NO: 846543 - DNA, 120 bp, Artificial Sequence
  ENSG00000286468_15 (sequence is synthesized)
gcatgaccgatggagatgcccctggcatcaatgcctcctctttccctttggtccaggtcacaccttcaattcaaggttcctaaatgctgatattattttactgttacaaaatttaggaga

SEQ ID NO: 846544 - DNA, 120 bp, Artificial Sequence
  ENSG00000286468_16 (sequence is synthesized)
atatgaaaaaaatacattttcttcataatattatagattaatttcctcaattttatgccactatggtggcctgatcttaaattttccatacaggtctacttgaaaatttactctagggtt

SEQ ID NO: 846545 - DNA, 120 bp, Artificial Sequence
  ENSG00000286468_17 (sequence is synthesized)
cttttgtgatctcactcaacctgccagaccatcctagctctacagtttgcacccccaacatcatactctgaaaccctctcatccttgcgctagctttatttgtagtcagagtagtttgtg

SEQ ID NO: 846546 - DNA, 120 bp, Artificial Sequence
  ENSG00000286468_18 (sequence is synthesized)
gtctatatttcagcgcaaggaaaactctactatccattttctaaggcacaagttgatcttatgcttaagagtccagcacaaagacgaatttctctgcattgactttcccttttcatgagc

SEQ ID NO: 846547 - DNA, 120 bp, Artificial Sequence
  ENSG00000184385_0 (sequence is synthesized)
agttctgggcaaagaaaaccctgctgctgagtgctctgaggctcgttttgtgggtttttttctgttgtgcttcctgcggtctccacagaagcagcttccctggagaacagcaagctcgtc

SEQ ID NO: 846548 - DNA, 120 bp, Artificial Sequence
  ENSG00000184385_1 (sequence is synthesized)
agctgccacaacagctatgccaccaccctagcatggcctgggggctgccttgccatcagaacactgctggtgccaacccacacctcttcctggggtgctactcaacctccagcctacagg

SEQ ID NO: 846549 - DNA, 120 bp, Artificial Sequence
  ENSG00000184385_2 (sequence is synthesized)
ggctggagtatgggggccagcgtggagatgcccatgggaaacccggggtcctgcacggtgagcttgagcctcacgaccacacttcccgcctggagagacacgatctgcattctcagcttc

SEQ ID NO: 846550 - DNA, 120 bp, Artificial Sequence
  ENSG00000184385_3 (sequence is synthesized)
ccacttcggtacaagtcagacaccactggtgggaaggagctctcgacctagccaagaagaggcaacagcagacatccatcaacgtcttcacgaccattaagcagggttccaggtgtgacc

SEQ ID NO: 846551 - DNA, 120 bp, Artificial Sequence
  ENSG00000184385_4 (sequence is synthesized)
gatggatggtgcttggagccatttctctcctctacaatcaagaggaggcacctgacgaccgacctctcagagcacgcagagaagtccgttcacagcaccttagctgggctttccctggga

SEQ ID NO: 846552 - DNA, 120 bp, Artificial Sequence
  ENSG00000184385_5 (sequence is synthesized)
cggccgggcctggcctggtgtgtgctggggactcacagtgaccactgcaatcaagctcccagttgtggagcatcagatggacaatcccctctgagtgtcctgaaaactggtgcgaaggtc

SEQ ID NO: 846553 - DNA, 120 bp, Artificial Sequence
  ENSG00000184385_6 (sequence is synthesized)
atttgtgtgagcgtgtgagaaagactgattgattgatagatggagaggccccaccaaggaacaatgcctatggctatttggagctgtcccccctcttactaggctgtatcccacacaaaa

SEQ ID NO: 846554 - DNA, 120 bp, Artificial Sequence
  ENSG00000184385_7 (sequence is synthesized)
cacgcacacagagccaggtgcttagggctacccatgcccaagcaagggagataccagcctggttccctgcctttgtgccaacccatacttgcacacacaagtgagttaacatttcaaaag

SEQ ID NO: 846555 - DNA, 120 bp, Artificial Sequence
  ENSG00000184385_8 (sequence is synthesized)
gtagacgcactaactgcccttttgttccagaatatctttccaaggatgtttgcatagtgaacagccttgggagggagagatattggctccctccagagcaaagggcaggtttgttactgt

SEQ ID NO: 846556 - DNA, 120 bp, Artificial Sequence
  ENSG00000184385_9 (sequence is synthesized)
ctgatgtaacagataatgtctccttctggagccagtgcttgcacccattataaaagattcaggttccctagagttggggttcctcagctcaggtgcagacccactttgtgtgcttcatgc

SEQ ID NO: 846557 - DNA, 120 bp, Artificial Sequence
  ENSG00000184385_10 (sequence is synthesized)
ccctggtcccctctgcatcacctctgcgggactcgggtgcaggaaggggaaccggcacagcagcacacgcatgctgcctgctgtgctggagtaatacagtcttccgtctctggcccagga

SEQ ID NO: 846558 - DNA, 120 bp, Artificial Sequence
  ENSG00000184385_11 (sequence is synthesized)
gtctcgtgtcttctgccagcatccatgaaactgtggcagactcacttgttagtttgcagggagggtaaaacctcagactttatgtgattcttggcagtttaggaagtcacttctccctcc

SEQ ID NO: 846559 - DNA, 120 bp, Artificial Sequence
  ENSG00000184385_12 (sequence is synthesized)
aatgcaccatctgtggatagatggtgcttcccactggcttgcttctccctggctgtctgctgatgtctccctttagtcacgagggaggaatggatgccatgattgttggtaaatgcttca

SEQ ID NO: 846560 - DNA, 120 bp, Artificial Sequence
  ENSG00000184385_13 (sequence is synthesized)
ctaatgaagctaccccatagctggaagccagggccctcagacagaaggttccacagaaaatccaacagtaggagtaagtggtgtacaccatttgaataaaggcacatatcttaaagatgg

SEQ ID NO: 846561 - DNA, 120 bp, Artificial Sequence
  ENSG00000184385_14 (sequence is synthesized)
attggcccagtatctggattaagtaccccataaaagcagggggaaagcttttgactaatcactgtgcgatttgggtttggcctcccctgaagctgcagtaacatgtatttttgccacaat

SEQ ID NO: 846562 - DNA, 120 bp, Artificial Sequence
  ENSG00000184385_15 (sequence is synthesized)
cccagaggaagagctgggcaggaattaacggcttgtgtttgatgtcctcactcagaacacccaagaaaagatttctgtctgcattgtggctttacctcgtgaagcagttgtctagaaaag

SEQ ID NO: 846563 - DNA, 120 bp, Artificial Sequence
  ENSG00000184385_16 (sequence is synthesized)
tcctggtactccacactgctgcggttgagtaacttctccgtcaggttgtggtttacaatctttattgtgacttcaaatacctgggcatctgagacagacagtgaaacaaattagcctgtg

SEQ ID NO: 846564 - DNA, 120 bp, Artificial Sequence
  ENSG00000214955_0 (sequence is synthesized)
agctgctctagaatgtagcaatggtgggctcctttgggggccatctagaagcaccctgcccctgggcacctgcctcctcactggaggagaccagaggccacgtcccagccctgtgcttcc

SEQ ID NO: 846565 - DNA, 120 bp, Artificial Sequence
  ENSG00000214955_1 (sequence is synthesized)
agctctggaactgcccttgacttcactggacaggcctgagcaagtcgtgtaaccttcagggactcagctatgcccactccaggctctgtgaaaccaagacaacctcacgtgctcagttcc

SEQ ID NO: 846566 - DNA, 120 bp, Artificial Sequence
  ENSG00000214955_2 (sequence is synthesized)
tcagctctgcaggagccaggctgctctgggttgcaagtggatggcaagcttccttgtgacttctcatcctggcaattttctggagtgtttgtgactggactttaacatttccaaaatgtg

SEQ ID NO: 846567 - DNA, 120 bp, Artificial Sequence
  ENSG00000214955_3 (sequence is synthesized)
acagcagagaccaaattcatcattgaatcctcaacatctagcacaatatgcctggcataaggtgaagagaagaagagtatgaactaccacgaaactcatttccctccgtccttcaatcaa

SEQ ID NO: 846568 - DNA, 120 bp, Artificial Sequence
  ENSG00000214955_4 (sequence is synthesized)
atacaatgaccttcagctactctcaccattctctactgaaaacatcccaactatctggaaagaactcacctaaagttccccaacatcaaataaaccacgttccaaaagattcagagccag

SEQ ID NO: 846569 - DNA, 120 bp, Artificial Sequence
  ENSG00000214955_5 (sequence is synthesized)
aataaaccacgttccaaaagattcagagccagagagaaacaaaacgccctttgttgatgaagcatttactcatacatacatacaagtgtgtatatatatatacacatatatatgtgtgtg

SEQ ID NO: 846570 - DNA, 120 bp, Artificial Sequence
  ENSG00000244345_0 (sequence is synthesized)
taatcctggatttagggtgggccctaaatccaatgactggtgtcttcatatgggaaaggacggagacatgacacccagagacacagcggcggggccatgtaaagatggaggcagagattg

SEQ ID NO: 846571 - DNA, 120 bp, Artificial Sequence
  ENSG00000244345_1 (sequence is synthesized)
gagtaatgtggccacaagccaagaaatgccaaggattgctgaagccaccggaagctgggggaggcaggggatggaggctgctttctcagagcctccagaaggaaccaacccagccaatac

SEQ ID NO: 846572 - DNA, 120 bp, Artificial Sequence
  ENSG00000244345_2 (sequence is synthesized)
cttcattttggacttcaggcctccagaactgtgagaaaacaaacttctgttgtttgaagccacccagtttgtggtgacttgctatggcagccctaggaatctatttcatcctaagagaga

SEQ ID NO: 846573 - DNA, 120 bp, Artificial Sequence
  ENSG00000244345_3 (sequence is synthesized)
agggcaagggaagaaagcaaaagtgaaagcaggaaggaagaggagagagaaaatcgaagcagaggcacagagagaggtgcagtaccaagtgctgtacaggcattgtcttcgcggatgcac

SEQ ID NO: 846574 - DNA, 120 bp, Artificial Sequence
  ENSG00000244345_4 (sequence is synthesized)
ctgctgcgacctcacattaaaaggagaaacggacgctgatcagggaggaaaagaccctgcccgaggaccctggaagatgaataaaatggggtcaggagaagcagccccctctccaaagcc

SEQ ID NO: 846575 - DNA, 120 bp, Artificial Sequence
  ENSG00000244345_5 (sequence is synthesized)
atgcagcttctaagtcacaacagccaccccaggcttcaggctccaagaccagcactcttgctcctgctccacagccaccaaggtgcatcagtgttccatcaccacttgggtgattcgcgg

SEQ ID NO: 846576 - DNA, 120 bp, Artificial Sequence
  ENSG00000244345_6 (sequence is synthesized)
gctgtcttgcatgtataatacctgagtccgaatgctgcctccccacacttactgctcccgaattctccttactttggccctgtctctcatgagccaacagtgtctgaaataccaccgtgg

SEQ ID NO: 846577 - DNA, 120 bp, Artificial Sequence
  ENSG00000244342_0 (sequence is synthesized)
accagcttctgcaaagcccagccaggagctcaagtgttctgttcccccagctgtcaatcagagtagggagggcatgaaggagacataggagatagattcatgaagaatacttgttacttt

SEQ ID NO: 846578 - DNA, 120 bp, Artificial Sequence
  ENSG00000244342_1 (sequence is synthesized)
tatatgtgatctgcaactttaagaattttttttcctgatactaccaaaatgaattcatcaaaagatagcctaatgatgaggcttttctgccactttgctgttattagactccagggagta

SEQ ID NO: 846579 - DNA, 120 bp, Artificial Sequence
  ENSG00000244342_2 (sequence is synthesized)
aatgtctcttattatcataaaaagggaaattatgagctttttctccaagagctataagacaatcttatcttcattttcattcttccaggtggttatgttgaagatgtaaatattctccct

SEQ ID NO: 846580 - DNA, 120 bp, Artificial Sequence
  ENSG00000244342_3 (sequence is synthesized)
gtggatacaggaagataaaagcatcagaaacactgcatgggaaaatcattcagactgcagcttcctggttttagacatccccactggcaattgggacatctattttggagatgtaattga

SEQ ID NO: 846581 - DNA, 120 bp, Artificial Sequence
  ENSG00000244342_4 (sequence is synthesized)
aaagactgaagaatgtactgaggaccttctggctgatagaagctgacaaagaagccaagattggtgaagatttctgcaatacctgagtttctaatcacaacaacaaaaatggtatttatt

SEQ ID NO: 846582 - DNA, 120 bp, Artificial Sequence
  ENSG00000244342_5 (sequence is synthesized)
tcctattgacccaaacagtggcaacgttttagtcaaggtgatttagaggaggttagaaagagaggtggatgcttgggccatattaaaggcagaaaatgggttattctcccattatctttt

SEQ ID NO: 846583 - DNA, 120 bp, Artificial Sequence
  ENSG00000244342_6 (sequence is synthesized)
gtctttgcctgctgccatccacgtgatatgtgacttgctgctccttgccttctgccataattgtgaggcctcctcagccacacggaaatgcttataggcataagagacttgccttgtctc

SEQ ID NO: 846584 - DNA, 120 bp, Artificial Sequence
  ENSG00000244342_7 (sequence is synthesized)
ggactgtggacttttgagttaatgctgatattaggactctgcttaccctttgtgaataagcccagtgaatctgctgagtgatgagagagagagtgggccagtcacttcattgctccagga

SEQ ID NO: 846585 - DNA, 120 bp, Artificial Sequence
  ENSG00000244342_8 (sequence is synthesized)
attgctccaggattttctgttgaatgacacttcataaaaaagactttgattgctgagttacaaagacaattgtatcttcttgtaaagcatacagtcttggtggtcctaccccatgaactg

SEQ ID NO: 846586 - DNA, 120 bp, Artificial Sequence
  ENSG00000244342_9 (sequence is synthesized)
ctggaagacccttgaaaagagcattcattcaagaaatgaagcatgagataggatggaaggagggaagaaagacaagcatatggcatatcaggtctcttccagtgctaaaggctgcctatg

SEQ ID NO: 846587 - DNA, 120 bp, Artificial Sequence
  ENSG00000244342_10 (sequence is synthesized)
atactcatctgacctgatttctcctgcacagtgttgcaactgacgagtagcagacttgcccttgcctgcatttggggggatggctgagactttccttacagaaagccctactttcagcat

SEQ ID NO: 846588 - DNA, 120 bp, Artificial Sequence
  ENSG00000244342_11 (sequence is synthesized)
attaggtcctgcacagttcaatattaaatggagtttctaccctagcatgaaaggaggaagagagaaaatcggatccaagagaaattcggctccaacattccccaaatattagagtggtta

SEQ ID NO: 846589 - DNA, 120 bp, Artificial Sequence
  ENSG00000244342_12 (sequence is synthesized)
gagaaacactgaagcagaacttgtaatatcttcaaaacaagtgaaggccaggaatcagaaatgcttctgaaggtcagctgcctctccagccatctatgaagagctatggttctgaatcct

SEQ ID NO: 846590 - DNA, 120 bp, Artificial Sequence
  ENSG00000244342_13 (sequence is synthesized)
ggctaatatcagaatcatcctgggagcttttgaaaatcctgatgctcaagtcacactccatactcagacaagaagctgagtctcagagagagaaaatgactcatccaagcaaggtttgag

SEQ ID NO: 846591 - DNA, 120 bp, Artificial Sequence
  ENSG00000244342_14 (sequence is synthesized)
ccagtttattggctcagggtgtagagagttgccttgtcactggcgaagtcagatgcagccagtaccagagctctgcactagctgtgaacactaaggaagaatagctgagtgaggaagcag

SEQ ID NO: 846592 - DNA, 120 bp, Artificial Sequence
  ENSG00000244342_15 (sequence is synthesized)
agtgccaggcagcacatccttcttcaggtgtttcctgccctgggccagatcccaggcactgcagcaatatctctgcatgatctagggctcctggaaatagcccattaagggcaaaactcg

SEQ ID NO: 846593 - DNA, 120 bp, Artificial Sequence
  ENSG00000244342_16 (sequence is synthesized)
ctgcccagaaaacattagaacattaaaagagcagggtctcatctgattgtcttggtttcctgaggctcattcagtctgtgtccactggtttcagtctgagttctctgcactttgaggatg

SEQ ID NO: 846594 - DNA, 120 bp, Artificial Sequence
  ENSG00000244342_17 (sequence is synthesized)
cagacagtgaagttctcccatggttatagggggagagatcataggaatgctatggaaagaggcctgaagtcagagccagctagtggttattatttattaattgcctgtgaggtgccaggc

SEQ ID NO: 846595 - DNA, 120 bp, Artificial Sequence
  ENSG00000244342_18 (sequence is synthesized)
gcacatattagaccatatgtgattgcagtgagccacccggatccccttcaagctgctgctgcagctgatggaagtcctattggcagacagccttctctcatcagccccttcaggacttgc

SEQ ID NO: 846596 - DNA, 120 bp, Artificial Sequence
  ENSG00000244342_19 (sequence is synthesized)
ctcagttgcagagagctgccttccccaagatcacacccttccctggggactcacaaccaatggctgatccagaagaatccataaagcccgtatcatttcagcccaatttaggacagcttt

SEQ ID NO: 846597 - DNA, 120 bp, Artificial Sequence
  ENSG00000244342_20 (sequence is synthesized)
gttgagccattagacctacatgcagcccaacctctccttctacccacttcttctttcttccctttccttccacggtgtctgttccaagcacttgccttaataaacatgtaacaggttaaa

SEQ ID NO: 846598 - DNA, 120 bp, Artificial Sequence
  ENSG00000244342_21 (sequence is synthesized)
attaggtgatgctgatgctgttggctcccagacaccactttgggtaacaagctcctacatcagaggtcaacgaactacggactctgcttaccctttgtgaataagcccagtgaatctgct

SEQ ID NO: 846599 - DNA, 120 bp, Artificial Sequence
  ENSG00000244349_0 (sequence is synthesized)
tctgtgtccttgaaggttaaagctgtcaaaaagtggtctccctcaagttcggccatcttgctctcagagatctagaactggactcagtcaaaattttgggccaaggagaccgacgcgctg

SEQ ID NO: 846600 - DNA, 120 bp, Artificial Sequence
  ENSG00000244349_1 (sequence is synthesized)
aatgattcgaatcttgaggtttcaaactgaaccgtcttgtgccttttgcccggcgggcatttctgcggggaccgcgggtcaccttctgaatttttaccttcataaacagcaaggactgcg

SEQ ID NO: 846601 - DNA, 120 bp, Artificial Sequence
  ENSG00000254219_0 (sequence is synthesized)
gttgagacggctgggagagaagaagggcacatgcttcgtccttttagttcacaggtctctggatcaacagatgctgtacccaaggagctggacctgtggaattatcccccaggaattttg

SEQ ID NO: 846602 - DNA, 120 bp, Artificial Sequence
  ENSG00000254219_1 (sequence is synthesized)
tttgactgcacctggattggatttagtgtaagaagagtaactgtcatgagcctcaaatgagttctgcagtagagaaaccatataatgaagtaaagaaaaaaacaaacaacaacaaaaaaa

SEQ ID NO: 846603 - DNA, 120 bp, Artificial Sequence
  ENSG00000254219_2 (sequence is synthesized)
ttttctggaagaaagaatgtatctttagaaagcagagtgaggatccttcctaatgtaatttgaaacatagtttcgtatgtctaacttctgctttgcctcatgctcactgaaatctacagc

SEQ ID NO: 846604 - DNA, 120 bp, Artificial Sequence
  ENSG00000254219_3 (sequence is synthesized)
tagcctcattttccacttgtttttgactctctcaggcatcttgaggattgagatcatgtcgtagttatcttttagacttagtaaatgagtaataaatgtttcttttgagtgactcaaaaa

SEQ ID NO: 846605 - DNA, 79 bp, Artificial Sequence
  ENSG00000260575_0 (sequence is synthesized)
ctcctggggtgcagagaatttgtgacagcctagagaacagaggaaatggttttgaaaaggcaaatgcgtgagagtgcat

SEQ ID NO: 846606 - DNA, 120 bp, Artificial Sequence
  ENSG00000260575_1 (sequence is synthesized)
cagctcaggaaagacaaggtcactgttcttgctcccatgacggtagcacttgttagagcaactgagtgacgtgcataattctctccaaagtaaaagtcctttttgttttttgcaatttta

SEQ ID NO: 846607 - DNA, 120 bp, Artificial Sequence
  ENSG00000260572_0 (sequence is synthesized)
ggcttgcaaagcggtagggagacgatcgggccgctggccgctgtctcggcgttcagcaatagaggccttcccggatctcccgagaggcggggagcgagcctgggtccagcagccttctcc

SEQ ID NO: 846608 - DNA, 120 bp, Artificial Sequence
  ENSG00000260572_1 (sequence is synthesized)
ctcccgagaacagcagaaaggggggactcgacagaatgacctctgtttccccaaggaagtgcactctgacgataacctcgggagggacgagaagggccgctctttcggagagcggccgcc

SEQ ID NO: 846609 - DNA, 120 bp, Artificial Sequence
  ENSG00000260572_2 (sequence is synthesized)
gcccctggagtaggggactcagtggccacgaaggccttccctgctcgcgacctttccacgggaaggcacgaagcttccgatgggggccccggggcgctcctgacttttctacggcgcgag

SEQ ID NO: 846610 - DNA, 120 bp, Artificial Sequence
  ENSG00000260572_3 (sequence is synthesized)
ggctctgactctgcggttcaggtttgaaagtcctttggaagctcgcaagtggtggtctcccaccacctcctcggtcatcgcaggaagaaggcgcagtgagggcgggagtctggatgagcg

SEQ ID NO: 846611 - DNA, 120 bp, Artificial Sequence
  ENSG00000260572_4 (sequence is synthesized)
gagagtagccaccgcggagaagagtgcgggcttgcaggagccgacgaagataactcgaaatgtgggcaggcaggtgttggtgggtcttgaaagtgggaaagcacgagaaaagaacaatgt

SEQ ID NO: 846612 - DNA, 120 bp, Artificial Sequence
  ENSG00000260572_5 (sequence is synthesized)
tcgcgtccgcttagaatacggaaacaagtgagctttaaaggaaaatactcattctcattacccctgtccaggaagaagagtgctgatctgctgcttccagtccgctgggctggagagcag

SEQ ID NO: 846613 - DNA, 120 bp, Artificial Sequence
  ENSG00000260572_6 (sequence is synthesized)
aaagaggctacttgatcccagccaagccagtgtctgtcccccagcaagcacttctgccttggtgtgatccccattccttttctaaaaatacaaaataataagaagtcctggaaggaaata

SEQ ID NO: 846614 - DNA, 120 bp, Artificial Sequence
  ENSG00000260572_7 (sequence is synthesized)
gtagtagattatatgcagctttcattttctgctttagacttttgtctattttccacaacttttctaaagtttctacaaaggccatatatttccaccataagcagaaaaaatgaaaacgta

SEQ ID NO: 846615 - DNA, 120 bp, Artificial Sequence
  ENSG00000260572_8 (sequence is synthesized)
agcatttaaatggcacatacaatataatctcaatagtataaacatgcatacaaaagacaggaaggagatatgaagaactgctaacagtatgttatttttcacaactaggatatagtctcc

SEQ ID NO: 846616 - DNA, 120 bp, Artificial Sequence
  ENSG00000260572_9 (sequence is synthesized)
tgtcctgctttacctttcaggtattttcatctgataaatagagaaacagtttaaaataaattcagtcatcctgttcaatagccaagaggttccaaaatgagataatgaatttaaaagcct

SEQ ID NO: 846617 - DNA, 120 bp, Artificial Sequence
  ENSG00000260572_10 (sequence is synthesized)
tcgggaactataaagaaaagtaatgcattagtattattttgaagataagtttacaatatttcttactgtaaattatcaaatcacttttgggtgcattgtcagtctttctgtacatggatt

SEQ ID NO: 846618 - DNA, 120 bp, Artificial Sequence
  ENSG00000260572_11 (sequence is synthesized)
cgtttcactgtggcaaaggcaacttgcagataagctgataaagattccagaactacaaatcaaactaggccctggagtagcagtaaaattccaaacccaaaggcccatccagtctgtcca

SEQ ID NO: 846619 - DNA, 120 bp, Artificial Sequence
  ENSG00000260572_12 (sequence is synthesized)
ctacattcctatattgatgagagcagaacagacactcatgagagacatgacttctgcttcccccataactaagaagagagattaccatactgatgatctccctggaggtttcatagcaag

SEQ ID NO: 846620 - DNA, 120 bp, Artificial Sequence
  ENSG00000260572_13 (sequence is synthesized)
gtttgacttgatgaattaattaataaagctaaatatcctgaagatttggtggaaatatgctttgacatttacatctaagtgttcatccgtgaaaatcaataaaatattttttcatgcaga

SEQ ID NO: 846621 - DNA, 120 bp, Artificial Sequence
  ENSG00000260573_0 (sequence is synthesized)
aagcagcacagaagagcaaaccccttgagagatgtcggccgactcccaggcctccagaacttagcttgatggactttgacagacagggatttgtttcttcgtgttgtttagctcaaacca

SEQ ID NO: 846622 - DNA, 120 bp, Artificial Sequence
  ENSG00000260573_1 (sequence is synthesized)
gagctaaacctcctcatcgtctcaaatgacctgaaatggtttcccaagcaacctgggcagaccctggggagtccagaaggcattcaggggccctggacctctggggctgaagatctgcct

SEQ ID NO: 846623 - DNA, 120 bp, Artificial Sequence
  ENSG00000260573_2 (sequence is synthesized)
gccgctgtcctggaggtcacaggttccagaagggcagcagatgcctgaagccgcagggctgcgggaaacatacctcacttgcctgtggtccagtttggatagtcccagcacagctttaca

SEQ ID NO: 846624 - DNA, 120 bp, Artificial Sequence
  ENSG00000260573_3 (sequence is synthesized)
ggaataggccccaaaccgaacttccaaggaggaaggatctgatcggctcagcttggatgaggaagcggagggagagtggactggaaggaacttgacccaggatgctgagcaaaatttgcc

SEQ ID NO: 846625 - DNA, 120 bp, Artificial Sequence
  ENSG00000260573_4 (sequence is synthesized)
attcagctacaagaagtgcagttggcagacagccttcaacttcagcatcttcagagtctgccttgactttcaagctgaggccatggacttctcaggagctcctagccaatggctgagaac

SEQ ID NO: 846626 - DNA, 120 bp, Artificial Sequence
  ENSG00000260573_5 (sequence is synthesized)
aacaaacaccctcacaaacacacccggaatagtgtttagtcaaatgtctaagcactccatgggccagtcaagttgacacacaaaacttgccaccccagcttcctacagaagccaactccc

SEQ ID NO: 846627 - DNA, 120 bp, Artificial Sequence
  ENSG00000260573_6 (sequence is synthesized)
tcaagaagagatgaagattcggctctatgttggtggcgtggcgttgtgtacctagaacaatggattacagctgggaaactgagttccaaaggcaggaagagacttgcctggggaggctgc

SEQ ID NO: 846628 - DNA, 120 bp, Artificial Sequence
  ENSG00000260573_7 (sequence is synthesized)
tctggtcctcaggccctggtcttcgtgtgggtccccaggctggattcccagaagcagactcttagtgaaggaaatgtataggggatgagaaagtggggcagggaagggaagcagatccgg

SEQ ID NO: 846629 - DNA, 120 bp, Artificial Sequence
  ENSG00000260573_8 (sequence is synthesized)
caaggatccgatatcaagcaaactcccacagagggcatggctggccaatgggatgcttctctctccaaaggagcagggagagctggagataccctccttgcaaacagcagcttgaggatc

SEQ ID NO: 846630 - DNA, 120 bp, Artificial Sequence
  ENSG00000260573_9 (sequence is synthesized)
cagcgcctggtgcacaggtctgcaaatcgcctggggtgactctgatgaacttgattagtattggctgaacttgggccagggtacgggatgggttcaagcctgttctgtatgtttgtaatt

SEQ ID NO: 846631 - DNA, 120 bp, Artificial Sequence
  ENSG00000260573_10 (sequence is synthesized)
tggggactcaggttgaaagggtagtgtccatctggagcaaactcatggtgaagagctggagtgcaagagataggagtggaaatgtgcaatgcctcttcagaccttggcttggaactggca

SEQ ID NO: 846632 - DNA, 120 bp, Artificial Sequence
  ENSG00000260573_11 (sequence is synthesized)
cagcatcacttctacccatattcaactgagcagaacgcatgacacagtcaagtccaacatcagtggtgtggggtagtcctgtctgctcacagtgaatcgtgatacagggagacaaggaag

SEQ ID NO: 846633 - DNA, 72 bp, Artificial Sequence
  ENSG00000260573_12 (sequence is synthesized)
ttttcacaacctgatatcctgattccaaccctctgagtggaatttttttttttaagtgtgatcatagctcac

SEQ ID NO: 846634 - DNA, 90 bp, Artificial Sequence
  ENSG00000260573_13 (sequence is synthesized)
actacaggcatgcgccaccatgcccagcttatttttatttgtattttgtgtagagctgtagtcttgcatctcaagtgatccacccgcctt

SEQ ID NO: 846635 - DNA, 120 bp, Artificial Sequence
  ENSG00000260573_14 (sequence is synthesized)
tcaagtgatccacccgccttggcctctcaggcatgagcccccgttctcagctggaatatctgtattttgaagaagctgccctggtgattctgatgtgcattctcacgggctccctggcta

SEQ ID NO: 846636 - DNA, 120 bp, Artificial Sequence
  ENSG00000260573_15 (sequence is synthesized)
agctggctttccttcagatctggggcttctggtctcgaggtcacctgtgtttccgggccaaagatggttgttaacttgttcctcggattgttcagtttctcattcctgtgctttgaccaa

SEQ ID NO: 846637 - DNA, 120 bp, Artificial Sequence
  ENSG00000260573_16 (sequence is synthesized)
gaggccaagtccatccatttaaagtcatctccaaagaccgggcttggttccggacatggcgggactggctcaggcaggaggctgactcagccgtgagaaacattaatgcctgcccatggt

SEQ ID NO: 846638 - DNA, 120 bp, Artificial Sequence
  ENSG00000260573_17 (sequence is synthesized)
cattctcttccttcggaatgccaggctcctggggattagatgctggacgtggtggctcatgcccataatcccaatgctttgggaggctgagggttggtttgaacaaagaagtgctttgag

SEQ ID NO: 846639 - DNA, 120 bp, Artificial Sequence
  ENSG00000260573_18 (sequence is synthesized)
agttcagatgtggagccaggaaccctgcctgccatgggatgcagggagagggggtggcgagcagcccacagcgaccccaagaagctgctccaacccctgggactatggagctctacagct

SEQ ID NO: 846640 - DNA, 120 bp, Artificial Sequence
  ENSG00000260573_19 (sequence is synthesized)
gtagagaccaccaggaagtggactgcaggcccctggcctctccattcagattctgcaaagagatcctgatgggttgggccaatgggtcaggcatccagtcagctctggctaaggggtgaa

SEQ ID NO: 846641 - DNA, 120 bp, Artificial Sequence
  ENSG00000260573_20 (sequence is synthesized)
ggagtcaggtgttaccaacgtggtggcaggggccaccttgaagctgtgttctgtgccatggaagaaggaagaggaggaggaagctaagctggaagggaagtctaggctcctggagtcagt

SEQ ID NO: 846642 - DNA, 120 bp, Artificial Sequence
  ENSG00000260573_21 (sequence is synthesized)
agttggaatctcagatgggaagaaaccttaaaagtcatctggtccagtattttccaaagcatgttccatgaacttgttttccagaaatggtttcctggtctggtgagtgggagttcgatg

SEQ ID NO: 846643 - DNA, 120 bp, Artificial Sequence
  ENSG00000260573_22 (sequence is synthesized)
agagtggcagttgtctattttgttcaccgatgtatcttaggtgactaaaacaatggttgtcacatggctggcccttcatatttgtttccagatggaagactctctttctagtggtggaac

SEQ ID NO: 846644 - DNA, 120 bp, Artificial Sequence
  ENSG00000260573_23 (sequence is synthesized)
attagttttgcactgtgttgggacaacctgatgtagtgaaaacaagcctgggcaatgaaatcaacagattggagttcagttcctaattgggtcatggatgaactttgtgaccttgggcaa

SEQ ID NO: 846645 - DNA, 120 bp, Artificial Sequence
  ENSG00000260573_24 (sequence is synthesized)
gatttaatccttacaacaacactttgtggaggatttagattttagaggtcctaattcagtctggactctggtttcatacaatagaatctggcagtggtaaacttaaccatatggggaatg

SEQ ID NO: 846646 - DNA, 120 bp, Artificial Sequence
  ENSG00000260573_25 (sequence is synthesized)
gatcagaagagtatgaagtaacccagcaaaaggctggcatcttgcaaaggtggatggagccaagactcttctgagatttcataagtggctttgctgcctgaaacaaagaatagccaaatg

SEQ ID NO: 846647 - DNA, 120 bp, Artificial Sequence
  ENSG00000260573_26 (sequence is synthesized)
ggatgagcagttttccagcaatgatttgtccaagtaaaatcatggtaccatccaacattgcgagacatctgcagggtgagagctacagcaacgcctctgacaaatggaatgctgaacttg

SEQ ID NO: 846648 - DNA, 120 bp, Artificial Sequence
  ENSG00000260573_27 (sequence is synthesized)
agacatgatttatgcaactatttctcacctctttattccacattccaatcttaggataacatttaaaatcttaatgttgttttcaggaatagccaataaaataaatcggctctgcttttg

SEQ ID NO: 846649 - DNA, 120 bp, Artificial Sequence
  ENSG00000260573_28 (sequence is synthesized)
aggagagccagcagggcaagaactatcactcctctcccaccctcagactcacttgccggtgaccaagtctggctcacaacatcagacatttctttcctttaggaggatttagattttaga

SEQ ID NO: 846650 - DNA, 120 bp, Artificial Sequence
  ENSG00000260573_29 (sequence is synthesized)
ggtcagcctctatgctggtttcccaggttcacaagaaggataacttttgatggaagaaggaatacagatggaaaggcctaaggctgaagccatgtgactttcccctcatgtttcctggtc

SEQ ID NO: 846651 - DNA, 120 bp, Artificial Sequence
  ENSG00000260573_30 (sequence is synthesized)
cagaagaggagctgagggtgcaggaggtttaccgccctgtggaagggcaggacgaaggcagccccaggcagagcgagaatgaggaagcggagggagagtggactggaaggaacttgaccc

SEQ ID NO: 846652 - DNA, 120 bp, Artificial Sequence
  ENSG00000260573_31 (sequence is synthesized)
aggatgctgagtaagcagagctgtgaatatttgagttcaagcagttgggctcccaaagccggtgatgttaaccctaagcaccttgtcatcattataatagtaatacttcatttctagcta

SEQ ID NO: 846653 - DNA, 120 bp, Artificial Sequence
  ENSG00000260573_32 (sequence is synthesized)
ttcccaggtaactgccataccggttaagatgtactaccacaattattaaagaacagggtctgtattgccttccatctgcagcaaaccaaactagaaatgcaggctgccatccacatggcc

SEQ ID NO: 846654 - DNA, 120 bp, Artificial Sequence
  ENSG00000260573_33 (sequence is synthesized)
aatgctgagatggggactgggggatgacaggtgggtaagcaaaagtgctacatgctttctcactgaacttaacaacttgtttcttcattaagcgtgcccatagtggctataagcttttga

SEQ ID NO: 846655 - DNA, 120 bp, Artificial Sequence
  ENSG00000260573_34 (sequence is synthesized)
ttagatttcagagttccaaaagaattaattctatcaatttttgccagtttagtggttgcttctacggaggaaccaattcttagagttccttactcttccatttctgtggtatcattctat

SEQ ID NO: 846656 - DNA, 120 bp, Artificial Sequence
  ENSG00000260573_35 (sequence is synthesized)
tccatgaactcatcaaccatgtgaaaaattaccaactcatggccaatcttatttcatcgataccaccaaccatcgtcaaagacttactaagtgttgtgctcagagtgcctcatgcattat

SEQ ID NO: 846657 - DNA, 120 bp, Artificial Sequence
  ENSG00000260573_36 (sequence is synthesized)
cttattttcacattacttctacgagatggatattaatatccccattttacagatgagaaaatgaaaactgagggatttagtaattttcccaaggtcacacacaacttcctgggatcagat

SEQ ID NO: 846658 - DNA, 120 bp, Artificial Sequence
  ENSG00000260573_37 (sequence is synthesized)
tctgaacttgtacctatctgggatctgaatcatggcttaagctgattctccaatcactttttctcagaagctcatttgatgctgacagcaacctgaatgtggtggacatgactaatgttc

SEQ ID NO: 846659 - DNA, 120 bp, Artificial Sequence
  ENSG00000260573_38 (sequence is synthesized)
attcaaatttgcttcttattttccaagtggagatggaattatgattcctcaactccttgaaattagacagggttctgtggcaagttctggccaaggcaatgtaggcagaattgacttgta

SEQ ID NO: 846660 - DNA, 120 bp, Artificial Sequence
  ENSG00000260573_39 (sequence is synthesized)
tcagtactgggctgaagcatttcattgctggtgcttcacttccaaccctctctttgcctgctgcagagaactctttaacctcatcttgagatgctagttataggtgatgggttggggttg

SEQ ID NO: 846661 - DNA, 120 bp, Artificial Sequence
  ENSG00000260573_40 (sequence is synthesized)
gggctggggagcctctatcaccttgggtaccttaaagatgattactacaggagagcacagccttttgctgatgattgtacatgcagtatgtataagaaataaacctttgttgtggcaaac

SEQ ID NO: 846662 - DNA, 120 bp, Artificial Sequence
  ENSG00000260570_0 (sequence is synthesized)
tttaatatttttatgtaataaaaagtaaaagtccttgtccagccatcctcgtggggcatctgtctgtctctcacacaggtcactcaagttaatgggaaagaaagaacagggggcccaagt

SEQ ID NO: 846663 - DNA, 120 bp, Artificial Sequence
  ENSG00000260570_1 (sequence is synthesized)
atgagaggatgggagggcaagactgggtggggacgggcaggggcagagcaggaaccccccacccctgctggaccctggccctgccctctgtgaggcagagggatatacttcccctccctg

SEQ ID NO: 846664 - DNA, 120 bp, Artificial Sequence
  ENSG00000254211_0 (sequence is synthesized)
ggaaaacatgaagaacggggaaagtagctgccgcatgccaatgtgaaactccgaggagtctagccattctgatctggccttccaggtcattaggaggctctgccatcgtgtgaggaggga

SEQ ID NO: 846665 - DNA, 120 bp, Artificial Sequence
  ENSG00000254211_1 (sequence is synthesized)
aagcctgctgtctggagagcacactggtctccagcgtggggagagagagcactttcgggctttgctgaggagggtcttcagaaaaaagagtactgccaacaagaaggcccaatcaagatc

SEQ ID NO: 846666 - DNA, 120 bp, Artificial Sequence
  ENSG00000254211_2 (sequence is synthesized)
ctcccacaacaagagcagattgtgagcgtggcaagctctatgctgagcactggaaggacaaagagagattgggcacagacttctcactgatccaggtgatgaagagctcacatctgagag

SEQ ID NO: 846667 - DNA, 120 bp, Artificial Sequence
  ENSG00000254211_3 (sequence is synthesized)
atggatgacccaccagaatgtcatgggatccagctacagccaaggaagcacagagcaccgtgggagcgatttattgtgcttggggatggggaaggggacatgggaggagccatattgaga

SEQ ID NO: 846668 - DNA, 120 bp, Artificial Sequence
  ENSG00000254211_4 (sequence is synthesized)
aagtagcatgggtacttggcttcacagagtgtggcagctttcatcaggaagtgatggtgggggaacagcgtctctggcggagggaagcagcaggtgcagaggtgcagaggtgtgaggagt

SEQ ID NO: 846669 - DNA, 120 bp, Artificial Sequence
  ENSG00000254211_5 (sequence is synthesized)
ctgtcacattctgggaagggagtatggttgggtgacaatgcaagacagagaaagcaaggagggaaggaggggcctagcctgaggaataaagaataataaaagcaggaaaacaattgctga

SEQ ID NO: 846670 - DNA, 120 bp, Artificial Sequence
  ENSG00000254211_6 (sequence is synthesized)
ttgtgagggcctgggcaccccagccaacaggctggaaatgcaggaagccatctggagccatgtgctgagtcacagggcccagagaaaaacaagaacatcgtgacgtcagagcaggggtgg

SEQ ID NO: 846671 - DNA, 120 bp, Artificial Sequence
  ENSG00000254211_7 (sequence is synthesized)
ggagaaatctccctcgagatctccgtgggcaccggaaatagaaactgctccctttgaagcatctattagaagatccaagtctctaacagatcaccatgagatttcaattcagttcctatt

SEQ ID NO: 846672 - DNA, 120 bp, Artificial Sequence
  ENSG00000254211_8 (sequence is synthesized)
aagcaccaactgaacgcatgtgagaatgtcagggaatcagttggtgaagaggcaaccgttttaatttaattttatttatttgaacagagtaagcctctgttcaatcctgactcatcttct

SEQ ID NO: 846673 - DNA, 120 bp, Artificial Sequence
  ENSG00000254211_9 (sequence is synthesized)
ttcttctcttactacccatttgcccttgagcagttcacttaaactttctgaccccatttcctcttcagtaataataattcttgtctcattgagatagtgtgagggcttaaagggaattac

SEQ ID NO: 846674 - DNA, 120 bp, Artificial Sequence
  ENSG00000254211_10 (sequence is synthesized)
atttttcaaaagcatcttgcacagatctggcacagtcagtggtaggtcttcttagcataaggatataaaaagatctttctgtaaggttggtgtggggattaaattggatgacatatcttt

SEQ ID NO: 846675 - DNA, 120 bp, Artificial Sequence
  ENSG00000254211_11 (sequence is synthesized)
actttcaagcaagctctggactgagctcttactaaggtttcagctaaggagagagatttctttcctcctctctagacactggggtaactggttctggtcccccagtgttctggttagtag

SEQ ID NO: 846676 - DNA, 120 bp, Artificial Sequence
  ENSG00000254211_12 (sequence is synthesized)
aactaaatacgtacacgcacaatgaatgtttacacaacatccgctcattccattccacaaatatttcttttaacattgtacacattactggctcagcctttgtagaggtctagaaaaaca

SEQ ID NO: 846677 - DNA, 120 bp, Artificial Sequence
  ENSG00000254211_13 (sequence is synthesized)
aacaaaattaggatgaatatccccattttgttgctgttttttgtttttgtttttgttttttaagacggagtttcactctgtcaccgaggctgaagtgcagtggtgccatctcggctcact

SEQ ID NO: 846678 - DNA, 74 bp, Artificial Sequence
  ENSG00000254211_14 (sequence is synthesized)
agcctcccaaatagctgggaccacaggggcacaccatctcgggccaaagctaatcacgaactcctgagcttagg

SEQ ID NO: 846679 - DNA, 69 bp, Artificial Sequence
  ENSG00000254211_15 (sequence is synthesized)
tcccggcctgctgctgattttttaataatcattctgtgggaggcactatgctaagtattttgcatgcat

SEQ ID NO: 846680 - DNA, 120 bp, Artificial Sequence
  ENSG00000254211_16 (sequence is synthesized)
cattctgtgggaggcactatgctaagtattttgcatgcatcgaattcttggagcaatcttttcaaattcgtgctatagtaacccccattttatagatggagcaactgaggctcagtagag

SEQ ID NO: 846681 - DNA, 120 bp, Artificial Sequence
  ENSG00000254211_17 (sequence is synthesized)
ttgactgtgctgcccaaatgcacagaactagtgggtggcagagttgaggctcaatcccagccctgattatctcaaaggttctgactgtcacactatgcgtgagctcccagagagagaaaa

SEQ ID NO: 846682 - DNA, 120 bp, Artificial Sequence
  ENSG00000254211_18 (sequence is synthesized)
acactcagttgaaaatttagagttactcatgcacaaaggtatataaacaacacaaagtggttagatgggcaaatgctgacggagaggctggtaatcagagttatgggcagttctgggctg

SEQ ID NO: 846683 - DNA, 120 bp, Artificial Sequence
  ENSG00000254211_19 (sequence is synthesized)
ggagatctccctgagagctgtactatgaaaaggggctttctagaaggtgaaagtttaggtggggagtaaagctagaccttgaaaaatgatgtggaacaggtaacaaagcaaaggcacgtt

SEQ ID NO: 846684 - DNA, 120 bp, Artificial Sequence
  ENSG00000254211_20 (sequence is synthesized)
gaggaaggttgagctggcacagtctggctggctggtattagcttcttgaatgataagctcttcagcctggctggggtgacttctaacttcggaacatcactgcttaggggattcctgtgt

SEQ ID NO: 846685 - DNA, 120 bp, Artificial Sequence
  ENSG00000254211_21 (sequence is synthesized)
atcacacattgggcctgagcagcagagctaggagttgttcctgttattggaaagggaggaagtttctgcagagtaagtgggcatgatctgtcttgctggagggcctcaacctttactctc

SEQ ID NO: 846686 - DNA, 120 bp, Artificial Sequence
  ENSG00000254211_22 (sequence is synthesized)
ctgggtaagaggagacaatgatatttccatggtcttcagagcattctgctgagaagcccacaagctaagggccattacagcaaactcagagatgatacaacctttctgcagaccatggta

SEQ ID NO: 846687 - DNA, 120 bp, Artificial Sequence
  ENSG00000254211_23 (sequence is synthesized)
atatatatgaagaggattaaaacgatgtaaccctttgttccctcaattttactgctaggaattaatccaagggaagtggtcatggagagatgagaaaatgtgtgtatggacaaagatggt

SEQ ID NO: 846688 - DNA, 120 bp, Artificial Sequence
  ENSG00000254211_24 (sequence is synthesized)
cactgtagaatgtagtattaacttacaaacacaagaatcagaaatgtcccacctagtcagtaatgggggcttagttaaaaattatgatccaggccgggtgcagtggctcatggctgtaat

SEQ ID NO: 846689 - DNA, 120 bp, Artificial Sequence
  ENSG00000254211_25 (sequence is synthesized)
aaaaaaaaaaagaaaagaaaagaaattttgatccacccatacaagggaatgctacacttccattcaaagtcaaggtggtcacaccatagcagggaaaaatcagttataaaaacattaaat

SEQ ID NO: 846690 - DNA, 120 bp, Artificial Sequence
  ENSG00000254211_26 (sequence is synthesized)
atagtatgatcctagctcacaagtacattaatccaattcattcacttattaactatgtaatgaagatgtgctgtatgccaagcaccattctgggtactgggaatatggacaggaacaagc

SEQ ID NO: 846691 - DNA, 120 bp, Artificial Sequence
  ENSG00000254211_27 (sequence is synthesized)
tcagggtgggaagttgtttagggaaagacaggtaatacatatatggacttaagaatacacaagataatttctgagcatggcacacaatgccatgaagaaaggcatgcaagatggactagt

SEQ ID NO: 846692 - DNA, 120 bp, Artificial Sequence
  ENSG00000254211_28 (sequence is synthesized)
ttagtgtgcgtgaagatggagggactatccaaggaggtgacatttcggccatgacttgcacgctgaaaaaaaaaaaatccagtcatgatttccagagtcatgaaatccagagcatttcag

SEQ ID NO: 846693 - DNA, 120 bp, Artificial Sequence
  ENSG00000254211_29 (sequence is synthesized)
gcaaagaggcgaaggccttgaggggaaatgccattggtgtattaggagggaaaaagaaagagaaataatgtgtgagtagagagagaagaggtaggagaggcaagcagggccagatcacac

SEQ ID NO: 846694 - DNA, 120 bp, Artificial Sequence
  ENSG00000254211_30 (sequence is synthesized)
agactgaaagtcaaggtgaagtgttgataaggagtgtggatttccttccaagtgctgtagaaagctaccgggttctatgtaggcaatcatcatacagttgaccttcaaacaacacaggtt

SEQ ID NO: 846695 - DNA, 120 bp, Artificial Sequence
  ENSG00000254211_31 (sequence is synthesized)
tgaactgcacaggtccacttacaggtgacttttcttccacctctgccacccctgagagagcaggaccaaccactccttttcctcctcctcagcctactcgagttgatgatgacaagggtg

SEQ ID NO: 846696 - DNA, 120 bp, Artificial Sequence
  ENSG00000254211_32 (sequence is synthesized)
aagacctttatgctgagtcacttctgcgtagtgaacgtaaatatactttctcttccttatgattttctcaataacattttctttactctagcttcctttattgtaagaatacagtataca

SEQ ID NO: 846697 - DNA, 120 bp, Artificial Sequence
  ENSG00000254211_33 (sequence is synthesized)
atacatataacatacaaaatatgttaattgactgtttatgttctcagcaaggcttgcagtcaacagtaggctatctgtagtgttttggggagtcaaaagttgtatgcagattttcaactc

SEQ ID NO: 846698 - DNA, 120 bp, Artificial Sequence
  ENSG00000254211_34 (sequence is synthesized)
tgaggggggtcaacaccccaacttccatatcgttcagggttcaactctctttatgtatccggaaggaaatacaccaacaggttagtagagattattaacaagtagtggggtaataaaccg

SEQ ID NO: 846699 - DNA, 120 bp, Artificial Sequence
  ENSG00000254211_35 (sequence is synthesized)
agcttgagaatcctggcatagccaggccatgtggagtagcgggcacgctgtgagggacaagagattacagcgagctcagaagcagagcaaggaaaacatgaagaacggggaaagtagctg

SEQ ID NO: 846700 - DNA, 120 bp, Artificial Sequence
  ENSG00000254211_36 (sequence is synthesized)
ccgcatgccaatgtgaaactccgaggagtctagccattctgatctggccttccaggtcattaggaggctctgccatcgtgtgaggaggtatgctatattttatctagcagtttgttagct

SEQ ID NO: 846701 - DNA, 120 bp, Artificial Sequence
  ENSG00000254211_37 (sequence is synthesized)
gtctccagcgtggggagagagagcactttcgggctttgctgaggagggtcttcagaaaaaagagtaagttggcatctcctcgcacaggtgcttggcttgccagacctaggggcattctca

SEQ ID NO: 846702 - DNA, 120 bp, Artificial Sequence
  ENSG00000254211_38 (sequence is synthesized)
catcaccttttcagctgaggaaactgaaagtcccaaggtcacgcagctgggaatatatgaccaaacggccttcaccttcccctaaatgatgtttcaaatgacaaaataaggggacaagga

SEQ ID NO: 846703 - DNA, 120 bp, Artificial Sequence
  ENSG00000254211_39 (sequence is synthesized)
gtgctcaggaaggatcttctgcatgcaggagcctcctctctcgaagggtgttctccaatcatgagcttatttgctgtttacatgcccgaggaggactgaccttagcagctatgatgacct

SEQ ID NO: 846704 - DNA, 120 bp, Artificial Sequence
  ENSG00000254211_40 (sequence is synthesized)
catttatcactgtggataagcacttggccagggtctcagccagcaccccaggcccagcctcctggtttactcatttctgggggtggtggcatctgcccactgtcctgaactttcctctgc

SEQ ID NO: 846705 - DNA, 120 bp, Artificial Sequence
  ENSG00000254211_41 (sequence is synthesized)
ttgggtagggacagggagccccagcagcacttgttccaggatgacccagcaaattgcaaggtggcatttggccttttcctcagcaattgccagactttgtcccagggtgaggaggaagcc

SEQ ID NO: 846706 - DNA, 120 bp, Artificial Sequence
  ENSG00000254211_42 (sequence is synthesized)
cacatgtgcggcagcctcaccactgagtcatgcttgtgaggcctgctggagaccaaagacaggggctacaagctcaaaaccgcctggttagtgctgactctattgatttcctggccttcc

SEQ ID NO: 846707 - DNA, 120 bp, Artificial Sequence
  ENSG00000254211_43 (sequence is synthesized)
acttccaaaccttccttggatggctaaactccttctggaagacacacctgttttttatatttgcctggtatacctcacttctttgagtgacagcaccccagagatccccttctccactct

SEQ ID NO: 846708 - DNA, 80 bp, Artificial Sequence
  ENSG00000254211_44 (sequence is synthesized)
agcctctggagtagctgagagtacaagcacatgccggtatgcctggctaatttttgtaaatttttttttttttggagaga

SEQ ID NO: 846709 - DNA, 120 bp, Artificial Sequence
  ENSG00000254211_45 (sequence is synthesized)
ggcattacaggcatgagccaccgcgcccaaccttcatgtattattcttgaatctaaaaggaaaaaagaatatgtatttttgtagtgattgctggagccctctttcctaggttggctgtgg

SEQ ID NO: 846710 - DNA, 120 bp, Artificial Sequence
  ENSG00000254211_46 (sequence is synthesized)
ggagccctctttcctaggttggctgtggtcagtttgcagcacagtcctaatgttaatggagtctagccattctgatctggccttccaggtcattaggaggctctgccatcgtgtgaggag

SEQ ID NO: 846711 - DNA, 120 bp, Artificial Sequence
  ENSG00000254215_0 (sequence is synthesized)
gtcctgtgtgaagtttactgatggagtcagagggagaaagattgtacagcccagcggttcactcagccactcctgcaaagactctggatcaccttcactgattgcagcataagcttggtc

SEQ ID NO: 846712 - DNA, 120 bp, Artificial Sequence
  ENSG00000254215_1 (sequence is synthesized)
tgggcagcaacagggagaaattcaagaggaagttcttacatgcacccttacgtgcacggtctcactgagatctttacttcctttatcacgtttgttctgtaaatcacaacgaatggtgca

SEQ ID NO: 846713 - DNA, 120 bp, Artificial Sequence
  ENSG00000260578_0 (sequence is synthesized)
atattatttaaaaataaaatcgaacaaatacctatgcatacatttgaggacagacttaagtgaaggacaatagccctcaaaaataagcttctagttgtgattctgtcttctctttataac

SEQ ID NO: 846714 - DNA, 120 bp, Artificial Sequence
  ENSG00000260578_1 (sequence is synthesized)
atgactagcatttatttttttcagcagaataatcacactatgaattatttcctattgaaaaatctccttttcctaaaacttcatttgaacaccattgtttctacatacttctctttgttt

SEQ ID NO: 846715 - DNA, 120 bp, Artificial Sequence
  ENSG00000260578_2 (sequence is synthesized)
tcatgcaactcttctttagaggcaatgtggactttagatctctgggaaagggcataccggaggattttactggcctttgtgacagataagtgttgtcagaatatttggtggctgtgtgtc

SEQ ID NO: 846716 - DNA, 120 bp, Artificial Sequence
  ENSG00000260578_3 (sequence is synthesized)
aggggcttgggcctctctgttatgcaattgtgtcactctgaggctctctacttgagggaatgtttgtttccatttttaatcaacctgggacaaggcgaatcctgcctctcaaagggttgt

SEQ ID NO: 846717 - DNA, 120 bp, Artificial Sequence
  ENSG00000260578_4 (sequence is synthesized)
agaaaatacttccttggtctgttgggccatggagtacctctgaagatgtctgcacattccttaagcagctggctctgaggaaggtctcagctttaagacactgaggctggtttccttttc

SEQ ID NO: 846718 - DNA, 120 bp, Artificial Sequence
  ENSG00000260578_5 (sequence is synthesized)
ttttcccacaaaccttcagtataatcttgttaaagttctgtccagggtaccgttgtgctttgaggaacgaagggggacctgcctgtgttccaaaggtggagtagtcgtgtgctctgcctg

SEQ ID NO: 846719 - DNA, 120 bp, Artificial Sequence
  ENSG00000260578_6 (sequence is synthesized)
aagatgaagcaggggtgtctcagtggtcagcatgcgacagacagtgtccctagcacagcggcaatccctaaagtggtcagcagcggatgcagcactgaggcagtcaggtgaagatgcagg

SEQ ID NO: 846720 - DNA, 120 bp, Artificial Sequence
  ENSG00000260578_7 (sequence is synthesized)
ctaggaagggggtgagggatgagtaaggagaacacatgaaaccactgtcaggaatttgaggaatttactgggagtaatttagggcacttttgccaccatatccaaatacagccaataata

SEQ ID NO: 846721 - DNA, 120 bp, Artificial Sequence
  ENSG00000260578_8 (sequence is synthesized)
tggatattaaaatggagtgcaatattactgtcattttcattttagaaatgtggaaatggaggcatcaggcacattacttggagttgcctactacatactccaaatttctttaaaacctca

SEQ ID NO: 846722 - DNA, 120 bp, Artificial Sequence
  ENSG00000260578_9 (sequence is synthesized)
ttgtaagatgaagtaaatgtcatacactattccataatatagacagctgcattttaatagtaagctattatgattaatatcaacatggtcatgaaacaatttctcctcaaacatttttag

SEQ ID NO: 846723 - DNA, 120 bp, Artificial Sequence
  ENSG00000260578_10 (sequence is synthesized)
ttaaacttgagaagctgaaaaaggaaggctgcttcttgtgtggctttctatgctgcctgcttccctttcaaacatagattcaaactgctgcctacctacttggaaagtgtttagtgtagt

SEQ ID NO: 846724 - DNA, 120 bp, Artificial Sequence
  ENSG00000260578_11 (sequence is synthesized)
tttttttgtttcttcaaagaaaagggaaggcaaaaggaaaagagaaaagggaaagaaatccagagaaaagaatggggggaacttagcttctcaggggtaaagacagacagacttcaatcc

SEQ ID NO: 846725 - DNA, 120 bp, Artificial Sequence
  ENSG00000260578_12 (sequence is synthesized)
caacatcagggagagtaggggaaaccaacttggcccagagctgtcactctcgctctcctcttgcttgaacagctgccaatacccagagtcagcctgtcctgttgcccactgagcttcagg

SEQ ID NO: 846726 - DNA, 120 bp, Artificial Sequence
  ENSG00000260578_13 (sequence is synthesized)
ccgctttgaatcccatggctcttcttgattgtaccactgaaggtccaggacacaaaaagccctcaggtcatttgatttaggatttgaacaatggagagatgatcatgatcagaagaaaaa

SEQ ID NO: 846727 - DNA, 120 bp, Artificial Sequence
  ENSG00000260578_14 (sequence is synthesized)
ttctttatacttcacaaaggcagaaataaaaatccagtttgaaattgacttttgagcctggagaataatgggaaacttcacccatgttaacttgtcttttgcaaacaaagtgtctttctg

SEQ ID NO: 846728 - DNA, 120 bp, Artificial Sequence
  ENSG00000260578_15 (sequence is synthesized)
tgttagaattttcaagagcctaattctgctaatcataatgtatttgcacatgcaattaaaatttccaaatttttcttttttaaggaactactccaaaaagctttccttttctttgagagt

SEQ ID NO: 846729 - DNA, 120 bp, Artificial Sequence
  ENSG00000260578_16 (sequence is synthesized)
acaccactgagttttgtaaagtaccagacttttgcttgagttccataaaatgttgtctgagcttctacacagcatgacagatgatcaaaaccactttttccctggattttgtgtctgttc

SEQ ID NO: 846730 - DNA, 120 bp, Artificial Sequence
  ENSG00000260578_17 (sequence is synthesized)
agttagttatcactcctagcttactgccgtctacaaatcttaaaaacatgccctttatctctcttcctcctggttattaattaaaattttaacaagacagggctaagagccaacccacta

SEQ ID NO: 846731 - DNA, 120 bp, Artificial Sequence
  ENSG00000260578_18 (sequence is synthesized)
tagggctttattaaagactactgtactttgcagtttgatgtttattaacattctttgggcacctagctacaatataactcaattttctgtgaaaaactattaatcatcctattttttcct

SEQ ID NO: 846732 - DNA, 120 bp, Artificial Sequence
  ENSG00000260578_19 (sequence is synthesized)
tgtctttaatatgagataaattttataccactgtttctcaaaccatctgttgtgagggacagttttgctttttaatttccaattgtcagagaccaatacttttgtaaaatataattaaaa

SEQ ID NO: 846733 - DNA, 120 bp, Artificial Sequence
  ENSG00000260578_20 (sequence is synthesized)
ataaacttattagaaaaatgaaataaaagagaaatgaaataagaataattttattattagatttaacagatcaaatattatttcaatactcagatcaaatgtgcaataagacagggttgc

SEQ ID NO: 846734 - DNA, 120 bp, Artificial Sequence
  ENSG00000260578_21 (sequence is synthesized)
agacagggttgcaaaaaatgcacactttttttattaaaatcatttatataagtaatttatataaaaataatattacagttgcaactttctgttgtttctcaactatgaccaaacagaggt

SEQ ID NO: 846735 - DNA, 120 bp, Artificial Sequence
  ENSG00000260578_22 (sequence is synthesized)
tacaagtaaagtagcaatcccaatactaaactgctatatgtgcattttgaatcaatcatgtgtatgtcaatgaagtttttaatgtgacagatttgcattttggttgttaatttatataat

SEQ ID NO: 846736 - DNA, 120 bp, Artificial Sequence
  ENSG00000260578_23 (sequence is synthesized)
ctaggttggataaatgacaatgccaatcataggggataatgttgatcctaaatgttagtgtgttgatttcataacactcaatggagaagccagtctcagagaggcatggtgctagactgg

SEQ ID NO: 846737 - DNA, 120 bp, Artificial Sequence
  ENSG00000260578_24 (sequence is synthesized)
aagacaagaatttgaaataattacagtaagctgatggaattcacttttatctatttttataaagcaagtgattttgtatttttaaaatttatcttcaattcttcatcaatagctactttt

SEQ ID NO: 846738 - DNA, 120 bp, Artificial Sequence
  ENSG00000260578_25 (sequence is synthesized)
aattcttcatcaatagctacttttaatcattaaccttataaatttaattctatttcaattatattttaatagaaagaatggatttcatgttttttctggtgtggatctttgataagaaaa

SEQ ID NO: 846739 - DNA, 120 bp, Artificial Sequence
  ENSG00000260579_0 (sequence is synthesized)
tgtgccctgttttgcagatgtgccttccccacgcctccatgggggcctttggcccagttctcattggcagtgtcacttcctgatactcattttccagaagcctcccaggtgattagccat

SEQ ID NO: 846740 - DNA, 120 bp, Artificial Sequence
  ENSG00000260579_1 (sequence is synthesized)
tctgccaatgattgctgatgacaacacaagtgtcagacactgtgttagcaatgacaaggacatggtctctgccttctaccccactgtgcctctgtatctgccatgagaagggcatgcctg

SEQ ID NO: 846741 - DNA, 120 bp, Artificial Sequence
  ENSG00000260579_2 (sequence is synthesized)
ggagctgctggtccaagaacaaggagtcagagaacagccctgaaatcaacccacagcctgatgcagagtggccccaacccacagacctgtgagcaagaaaaataaatgtttgttgctgta

SEQ ID NO: 846742 - DNA, 120 bp, Artificial Sequence
  ENSG00000258747_0 (sequence is synthesized)
agtgagaatctactttttgaaacaagttgaaaaaaagcatttgtctacaaaagaacatcagatactgcactttttacaaattgaatgtttgtggcaagcctgcatcgagaaagtccattg

SEQ ID NO: 846743 - DNA, 120 bp, Artificial Sequence
  ENSG00000258747_1 (sequence is synthesized)
gaaaagtaaagatgtttctggaaggcaccaggagtcctgtctgcactgagcaccatgaagttcacctgcattgagttctttccctttgtacaacacttactcccagaccaaaaaataact

SEQ ID NO: 846744 - DNA, 120 bp, Artificial Sequence
  ENSG00000258747_2 (sequence is synthesized)
ccttctctccaatctgtgttccaggcaaaccaatagactccagttgtctcccgaaatgcttaaagtgcttttccaatatccactatgtttgggcaacatattaaaaatatacaacaaaaa

SEQ ID NO: 846745 - DNA, 79 bp, Artificial Sequence
  ENSG00000258747_3 (sequence is synthesized)
attaggcaaattgatagccctacaatggcctctaagtgttcacgtgaaaagaagaatcacagacctctcatttgaaatt

SEQ ID NO: 846746 - DNA, 120 bp, Artificial Sequence
  ENSG00000258747_4 (sequence is synthesized)
caggagcataccaggaagactgaaagaaataacagatcctttgaaagaagcagcaggccactgcaaatgctgcaagataggcaaaaaacggagttcacaaagtgtgaaaggggaatacct

SEQ ID NO: 846747 - DNA, 120 bp, Artificial Sequence
  ENSG00000258747_5 (sequence is synthesized)
gcctctaaacacatccccactggggaacctgaaaatccagattacgggagaaggatttaaccttacctggagctgcaatggatttagtgtgaaatacaaaagtagaagcagcagtggaaa

SEQ ID NO: 846748 - DNA, 120 bp, Artificial Sequence
  ENSG00000258747_6 (sequence is synthesized)
ttttcaatgttattatttaaatatatttcataatgctatggctgccatagatagtgattccattaatggatctgaaattgaaggagtctggaagaagctgattccaaccctcatagatca

SEQ ID NO: 846749 - DNA, 89 bp, Artificial Sequence
  ENSG00000258747_7 (sequence is synthesized)
aaggagtctggaagaagctgattccaaccctcatagatcactttgagggcttcaagatttcagtggagagaaatttaaattttatgtag

SEQ ID NO: 846750 - DNA, 120 bp, Artificial Sequence
  ENSG00000258745_0 (sequence is synthesized)
gacatcaaacatggaggatgggttgatcttcactttgtactccgtctccaggaactgagaaaacttcagcttattctcctgttaagacagtgcatggtgccagagctcttttggcctaga

SEQ ID NO: 846751 - DNA, 120 bp, Artificial Sequence
  ENSG00000258745_1 (sequence is synthesized)
ttcttttttttgagacggagtctcactcttttgcccaggaggggacccacacctggaaggctcacctgcttcaccttggcgagttcccggaggaagacatcatcacccaggaagctgtgg

SEQ ID NO: 846752 - DNA, 120 bp, Artificial Sequence
  ENSG00000258745_2 (sequence is synthesized)
ttctccaattttctttcaattcaaaggaaaagatgacttcaatttggggatggtaatcaagtccaaatgggcagtttctgtcagtatttctctctgtcacctaccacagtgtagttcacg

SEQ ID NO: 846753 - DNA, 120 bp, Artificial Sequence
  ENSG00000258745_3 (sequence is synthesized)
tatcacacagaacatgggatagtttgactcaaagaagagtctataaagtctatgtgagaagaacacttttgctagtatcttaaatgtagtttcagcagtttttaaaaattatttttattt

SEQ ID NO: 846754 - DNA, 120 bp, Artificial Sequence
  ENSG00000258742_0 (sequence is synthesized)
gcgtgctgtcatttttatcattctgcaaaccgagttgctgggggcccgaaagccttgtgtttagaagaagcgtgctttccaggttaccctgatgggcaggacccactcccatcactaaga

SEQ ID NO: 846755 - DNA, 120 bp, Artificial Sequence
  ENSG00000258742_1 (sequence is synthesized)
cctggacccatgattcatgactcaaccagtccacccagaagctgactcagagcataaggagcattttccacacccctaggatttcatctccaaccaatcagcattccccattctctagcc

SEQ ID NO: 846756 - DNA, 120 bp, Artificial Sequence
  ENSG00000258742_2 (sequence is synthesized)
cctgtccaccaaactattctttaaaaaccttagctctaagctttatttatttatttaagtaatacactcctgtcttccacttagctggttctgtatttattaaactctttctctactgcc

SEQ ID NO: 846757 - DNA, 120 bp, Artificial Sequence
  ENSG00000258742_3 (sequence is synthesized)
agcctccacccgccaccccaggaacctcgtgcttctaggtaatgaatctcccaccacagctccactggatggaaccgccccagcttcctccagcccaaactgctgcacccaccacccaga

SEQ ID NO: 846758 - DNA, 120 bp, Artificial Sequence
  ENSG00000258742_4 (sequence is synthesized)
gaaatggaagtcaaggactcagcagtccaaggcagcccttctgaagcaacttcaggggctcagcaaatatttgttgagaacctcctctgtgcctggctggatcagggtggggctgtagag

SEQ ID NO: 846759 - DNA, 120 bp, Artificial Sequence
  ENSG00000258742_5 (sequence is synthesized)
accgctatctcagtaaattagctctatctgtgcagttggcaagaagaactggtcaggtggttaaaacactacagataggcattgttaaacaaaacaatggactaagcccctgcactaggc

SEQ ID NO: 846760 - DNA, 120 bp, Artificial Sequence
  ENSG00000258742_6 (sequence is synthesized)
tccaacagaacagacaaaatcaaaatggagtcactcatgctaaatgtcatataatcaaactgaaactctaaggaagctgataaatcctaaaacagacctttttttttcctgaaaacagga

SEQ ID NO: 846761 - DNA, 120 bp, Artificial Sequence
  ENSG00000258742_7 (sequence is synthesized)
aatttcagtctaccagagtcaacctagtaagaaagttgcctcttctttgacctttatgagaaagtaacctgaagtaacctgacattaatgaatcagcttctcttctactattctgtttcc

SEQ ID NO: 846762 - DNA, 120 bp, Artificial Sequence
  ENSG00000258742_8 (sequence is synthesized)
ttactcccaccttacaaagctcactgctctgcttgccctagtgagagaactcattctattgtgtagagtagagtcagccatgattcatgaattatgaataaaagacaattagatctataa

SEQ ID NO: 846763 - DNA, 120 bp, Artificial Sequence
  ENSG00000258742_9 (sequence is synthesized)
tctctgaaagggtaagtgtttgataaaatccccttccctgtccccacagcctgggactcctggcaccctggggaagggctgtgccttcagggctcgccttagaccaggagaagccatgga

SEQ ID NO: 846764 - DNA, 120 bp, Artificial Sequence
  ENSG00000258742_10 (sequence is synthesized)
aagattttcaggagaggaggagtggaggtaaatctacagttcagcacttctccctccacacagtggaaggattgacaggcgattgattggcaggggaggtgccctagtttctatcaggaa

SEQ ID NO: 846765 - DNA, 120 bp, Artificial Sequence
  ENSG00000258742_11 (sequence is synthesized)
aagaaaccctatgacctgcatgagctctaggcattgtgtgggaaagagcagagagagccaagaagctcccagggggagtggacagcacccagtgaaaggagagacactgagggaggggac

SEQ ID NO: 846766 - DNA, 120 bp, Artificial Sequence
  ENSG00000258742_12 (sequence is synthesized)
aaggatgctcctgcagccccaggggaaggaagccagttatcagagccaggttccaatcctgcctcagctactacatccctccctgccctaaagcttaacaatcataatcacacaaaagtc

SEQ ID NO: 846767 - DNA, 120 bp, Artificial Sequence
  ENSG00000258742_13 (sequence is synthesized)
atcctcagtctcaggtgtgggctgggactttacacattttctcatttaacactgaaaccacctttgcaaagatgatgacagtgagagagtccagcatggctaactccgtcttatttctag

SEQ ID NO: 846768 - DNA, 120 bp, Artificial Sequence
  ENSG00000258742_14 (sequence is synthesized)
tagtttaactttgaagcaaggatgataatagtccctccctaaaactaacccctgaaaccacctttgtaaaactaatgaaagcctactagattagaaatgtgggaagggcctgaattctgc

SEQ ID NO: 846769 - DNA, 80 bp, Artificial Sequence
  ENSG00000258742_15 (sequence is synthesized)
gcctactagattagaaatgtgggaagggcctgaattctgctaaaatgtctgcatagttagatgataaccagtcattgctc

SEQ ID NO: 846770 - DNA, 120 bp, Artificial Sequence
  ENSG00000258740_0 (sequence is synthesized)
gctgggaatacatcatgagttacctgcccagagggtttctgcgggtgaagaatctttgctttcacctggactttgcttgcagtgaatgggaaacttcacagcagctgccctcttcactgg

SEQ ID NO: 846771 - DNA, 120 bp, Artificial Sequence
  ENSG00000258740_1 (sequence is synthesized)
aattctctaaggtgcctgttcagccctatggaaacggctgccagattcttctgttttcttcatggaaagctcccaagtttttctctccaaaatcccttagaagtgctttggccagtggaa

SEQ ID NO: 846772 - DNA, 120 bp, Artificial Sequence
  ENSG00000258740_2 (sequence is synthesized)
ctgctgtgggagctgccagtgacgggaagcccaaatcagcaagatgagccccagccgcaggcctcacattctggcagtctccacgagccaagaggtgtccatgccaagtcctcattccca

SEQ ID NO: 846773 - DNA, 120 bp, Artificial Sequence
  ENSG00000258740_3 (sequence is synthesized)
tggtgatgccttatgggctccatcatgttagccagaatataccctgggagattatacctgggagacacgtagctcaacaagtacggaacatgtcttccctgctggtattggggggacagg

SEQ ID NO: 846774 - DNA, 120 bp, Artificial Sequence
  ENSG00000258740_4 (sequence is synthesized)
atgaatatctgtctgataagctcactgagatatgttaggcttgttccctgtgaataatttatattttgagaaacctagtactttcaaattcatacaataatgagctgtgttatattagga

SEQ ID NO: 846775 - DNA, 120 bp, Artificial Sequence
  ENSG00000258748_0 (sequence is synthesized)
tgtcagcaggcctggcagatgggaactcagctccggaattaattgcttgtttgtctccggctgggaggccgcccccccgcccttccctggcgaccagttgctctgtgcctagccgggccc

SEQ ID NO: 846776 - DNA, 120 bp, Artificial Sequence
  ENSG00000258748_1 (sequence is synthesized)
gtgacgcgagtgccccctgccggccgctgcgcacacggctccgagactggggagacagcgccgcgcgtcccaggcctgaggcgcactcggaaactccgaaggtcgtgacccggcggagac

SEQ ID NO: 846777 - DNA, 120 bp, Artificial Sequence
  ENSG00000258748_2 (sequence is synthesized)
caggacacgcggctgccggcacatacgcctggagaatgaaaacgggcgtcagcccacatctggatctgggtactgaggacaacacccaaaccccaccccgcactgccggcagacagcacc

SEQ ID NO: 846778 - DNA, 120 bp, Artificial Sequence
  ENSG00000258749_0 (sequence is synthesized)
ttctctttaaacactgatgtgtagctagtaacttggataaaaaggtgccaccctacaaaatgtgctcagcatgttctgaggccaggatgggcttggccacctgggctggggcgaaaggag

SEQ ID NO: 846779 - DNA, 120 bp, Artificial Sequence
  ENSG00000258749_1 (sequence is synthesized)
acctccatctgtcacagtggaaactgaagccgagtgccagtgccgcgtccggcttcaagatcaagagtcagagcctttgaaatggaaagggggcatctgaaagggcacccccactggggg

SEQ ID NO: 846780 - DNA, 120 bp, Artificial Sequence
  ENSG00000258749_2 (sequence is synthesized)
ctttcagagctaaggctccagaaggaagggggtcgccctgctagtgacggagctgggagtcaccctgagctacagcatgcccagatttcccctgtgggaagccccatctgaccttctaca

SEQ ID NO: 846781 - DNA, 120 bp, Artificial Sequence
  ENSG00000258749_3 (sequence is synthesized)
ctgctggcttttaaaatcagctattagtttgagatgtgacagtcgccgacagggttctgtcctagaaagccatcccagtgccgtgttggctcaggggtcaccagctttgtgctgcctccg

SEQ ID NO: 846782 - DNA, 120 bp, Artificial Sequence
  ENSG00000258749_4 (sequence is synthesized)
taacagcaggagggttctcaaagcaatgttccactgatccctggatgccactgcagcattaaagacagggtcagtccccttgaggggaaaggtggcttcaaggctgttctctgggcctct

SEQ ID NO: 846783 - DNA, 120 bp, Artificial Sequence
  ENSG00000258749_5 (sequence is synthesized)
gcccactcgggcaagaatcactgggtaccatgagcagcaggtgttcacccaacttcacgtgtacacccctagtgaccgggagcgcaccacctgaccgggcgacactccttcccaaagagc

SEQ ID NO: 846784 - DNA, 120 bp, Artificial Sequence
  ENSG00000258749_6 (sequence is synthesized)
ctcctggcaacacccacggcaggagcgccacaccatcccatcaccagcacccacttacccccctggggctaagatggggggcgtgagcctttcccctgagagcaaacgggcagcaagaac

SEQ ID NO: 846785 - DNA, 120 bp, Artificial Sequence
  ENSG00000245719_0 (sequence is synthesized)
gaaatgatcctttccaggtaacagccgagcataggggactgcgggacatctccgcctcttccttggctctgggccttcgatgtaaggcgttagaggacaatctttgttggctggatttct

SEQ ID NO: 846786 - DNA, 120 bp, Artificial Sequence
  ENSG00000245719_1 (sequence is synthesized)
gttcttcccctagagatatctggttctttggaggccacttgggcaattgggttaacaatcacttacctgatacctgctcccaaaacgaatcctattgatgaaggatcttctttctgagca

SEQ ID NO: 846787 - DNA, 120 bp, Artificial Sequence
  ENSG00000245719_2 (sequence is synthesized)
gtaaacctgtgtttaattaaccttatgcaaatgagcttaattgcttatcagtggctgttgtccagaagcacctagggattccttccctcagacattttcagcacctagatgaaccgcaaa

SEQ ID NO: 846788 - DNA, 120 bp, Artificial Sequence
  ENSG00000245719_3 (sequence is synthesized)
gttggaagcctttcatctacacatgtgttgtgtgcctgtggagccctgggccctgtgttgaagattgcaaggaaaagcaaggtgtgacccctgctgtggacttactttcagtcttagggc

SEQ ID NO: 846789 - DNA, 120 bp, Artificial Sequence
  ENSG00000245719_4 (sequence is synthesized)
aacagacacttacaaccaagaataacaaagggagccgtcggaacatcctgggactccaaggctccgacccccagcgcaaaggactctagggactggcttcctggctgtaccgcgcagcgg

SEQ ID NO: 846790 - DNA, 120 bp, Artificial Sequence
  ENSG00000245719_5 (sequence is synthesized)
gactcctcgtctgcacagcttcggggaggcccagagcacgcccctactagccggctccgtccaaggcccaccaagacaacccgccacgaaacttcccggccccctcagcccagggctccc

SEQ ID NO: 846791 - DNA, 120 bp, Artificial Sequence
  ENSG00000245719_6 (sequence is synthesized)
ggtcccgagctgctggccggtggcgcggggcctgccgcccgccttctacgagccgcatggacggaggcctgcgtgttatttcatagaggccgaaacggagacccaggaaagataaaagaa

SEQ ID NO: 846792 - DNA, 120 bp, Artificial Sequence
  ENSG00000245719_7 (sequence is synthesized)
gggctcaacccgggacccccactagccagccgagggcgagaaatgaaagccaaggctgaatgattccctgtgccgtgagctctctcccactccatccacactctcctccctgcaaagagt

SEQ ID NO: 846793 - DNA, 120 bp, Artificial Sequence
  ENSG00000245719_8 (sequence is synthesized)
ggaggccttgccaaccgtgacccggacgtcggacgccccagccgaggcccggcgagtccttagcccctctcgaactaaaatggaccgaacagaaaatgcggacggggctccctcctttcg

SEQ ID NO: 846794 - DNA, 120 bp, Artificial Sequence
  ENSG00000245719_9 (sequence is synthesized)
ggtagcggcggggcagacgggaggccgtctgtgaccgagctctccaagtcccgccttcctttccaagcctgcccggcggagaccaccttactccctgagacctccgccctgccgcagcgc

SEQ ID NO: 846795 - DNA, 120 bp, Artificial Sequence
  ENSG00000245719_10 (sequence is synthesized)
tcccaggccaggccaggccggcggtgcccgcgccatctaaagggacaattctggttgaacctgggattcccggcagggcgccctgtctgtgagcgccccggaggtaacttccccggtgtg

SEQ ID NO: 846796 - DNA, 120 bp, Artificial Sequence
  ENSG00000245719_11 (sequence is synthesized)
gcaggcgtggaaatgggcatggatgaaccctcggcgccttcgagctcttgaggaaagagcccgggaccgctgcgctaaggaccgtgacgtaatgcccctcctccattccgggcccaaggg

SEQ ID NO: 846797 - DNA, 120 bp, Artificial Sequence
  ENSG00000245719_12 (sequence is synthesized)
agggtcctaaacgcggagagggagtgccctgtgggggaaaactgagtgtgtctggagggcacagtggagaggttgagtgctcgctgctgcccacttgagcaggcccgattctgaccctgg

SEQ ID NO: 846798 - DNA, 120 bp, Artificial Sequence
  ENSG00000245719_13 (sequence is synthesized)
gagccccagaacccgcggggcggctcccacccccacctgttgcacggtgttccgccgccccgctccgccggtgcactcccacctccgtagccccagaagtgacatcttttattattatta

SEQ ID NO: 846799 - DNA, 120 bp, Artificial Sequence
  ENSG00000245719_14 (sequence is synthesized)
ttattattattaaaaacgaaagtcacgggtacagggtggtctccccaaacaggctccaggtggttgccatctcgtgagtcagttgtcgcccttttaaagtgctgttacatcaagaggtta

SEQ ID NO: 846800 - DNA, 120 bp, Artificial Sequence
  ENSG00000245719_15 (sequence is synthesized)
caacaaaaaatagccaaagcaaaatccaaaggggaatgcaaaacgggactggaagtgggtccaggagaaggaagcaaaaataacttacagcataaataaattaaagtgaacctaatactg

SEQ ID NO: 846801 - DNA, 120 bp, Artificial Sequence
  ENSG00000266839_0 (sequence is synthesized)
gcccctgcctgcataaggatgatgcacagatttttgaagtggtccatattttgcgcagtcactagaagttcatttgactatttgctgactagttccaaagacagtgtgagtcaaagcaaa

SEQ ID NO: 846802 - DNA, 120 bp, Artificial Sequence
  ENSG00000266839_1 (sequence is synthesized)
aaaaatatgcagtaaggtgatcaatggagctgagtaacacgtgggatgttgtgtgcaaatatattgtcagtatgtatctcagaaatgagagaatgtcaacttgcatgtctttcatggaac

SEQ ID NO: 846803 - DNA, 120 bp, Artificial Sequence
  ENSG00000266835_0 (sequence is synthesized)
acttgcaggatctgacacatcctcttggtttcctaagtcttatgactagccaatgcctgaaataatgaactcctccaaggcaagaaatctgttttgaagcttctctgcgttcacacacag

SEQ ID NO: 846804 - DNA, 120 bp, Artificial Sequence
  ENSG00000266835_1 (sequence is synthesized)
cagcctggtttcctggaagggcattttccacattgtgcgttatggatgatcatcccaggcatcaggtgtgaagccctgcatccacatccaggggctatcaaatctctctgcaaaaggaga

SEQ ID NO: 846805 - DNA, 90 bp, Artificial Sequence
  ENSG00000266835_2 (sequence is synthesized)
gctatcaaatctctctgcaaaaggagaagctggactcaggctggaatgcagggatgcgatctcggctcaatgcaacctctgccgcttctt

SEQ ID NO: 846806 - DNA, 120 bp, Artificial Sequence
  ENSG00000266835_3 (sequence is synthesized)
accgtgcccggctgaccagtatctttcatgttactattgtaattgtttggggtcaccacgaaccgcacacatataagacaatgaacttaatcaataaacgtgtgtgttctgattgctcca

SEQ ID NO: 846807 - DNA, 73 bp, Artificial Sequence
  ENSG00000266835_4 (sequence is synthesized)
agctgcagaagaaaaaggtgaaagaggtgaggaagctgcagaagaaaacctggaagttagcagagcttgatcc

SEQ ID NO: 846808 - DNA, 120 bp, Artificial Sequence
  ENSG00000266835_5 (sequence is synthesized)
cagaagatcttgctaagggtatgcacagatgtggaaacaggaactgatgtgtccattacaccactaggacagaggccagaacaatgaagaaaccaaatacttggaagagggtagagataa

SEQ ID NO: 846809 - DNA, 120 bp, Artificial Sequence
  ENSG00000266835_6 (sequence is synthesized)
tgaatggagtccaagagccctgattgtgccataaatgtccagataattccatacctgaggattatgtggtttgtaaacttggcacttagaagaaccaataaaatcatgttatagtttcaa

SEQ ID NO: 846810 - DNA, 120 bp, Artificial Sequence
  ENSG00000251598_0 (sequence is synthesized)
atcttgccgccccacactctttgggtccgcacctttctctaatcaagcagtaacacttcattccttgaagccggtgagaccacgaactcttcgatcgagaaaaaccttccatcagaggaa

SEQ ID NO: 846811 - DNA, 120 bp, Artificial Sequence
  ENSG00000251598_1 (sequence is synthesized)
gacttctcgtttcaccattttcatgggcgtccttgtgaagagaccaccaaacaggctttggatatgggggtctcactttgttgcctaggctggagtgtaatggtgattctgacaaatgat

SEQ ID NO: 846812 - DNA, 120 bp, Artificial Sequence
  ENSG00000251598_2 (sequence is synthesized)
agtgcagtgacatgatcatagctaatggtacatcttgaatttctggagtccagagatccttccctctcagtctcctaagtagctaggactataggcgtacactaccttgccccgctttct

SEQ ID NO: 846813 - DNA, 120 bp, Artificial Sequence
  ENSG00000251598_3 (sequence is synthesized)
ttgctttggtagacagggcttcaacacattgctgtttaactacattgccagctgatctccagctcctggcctaaagcaatcttcccattttggcctgccaaagtgctgggattgcaggca

SEQ ID NO: 846814 - DNA, 120 bp, Artificial Sequence
  ENSG00000251598_4 (sequence is synthesized)
cggctcccaccgagaaggaaggaaacaacgggtgaactctgaatcttcaactgagggtctctttctgttgcccaggcttgaatgcaatggtgtgaacacagctcatttcagcagcgttga

SEQ ID NO: 846815 - DNA, 120 bp, Artificial Sequence
  ENSG00000251598_5 (sequence is synthesized)
gcacgctacaacctctacatcctgggctcaagagcttctcctgcctcagcgtcccaagtaactgggactacagtcaggtgtgaggaaatggagaagttgaattggtggctgggagtctac

SEQ ID NO: 846816 - DNA, 120 bp, Artificial Sequence
  ENSG00000251598_6 (sequence is synthesized)
acttcaactgtttgcaactcccttcagaaaacatggccctttgatgtctcttcatgtttagcttgtagtcagagtagccaatttttcatagaaacattaagtattttttatgagaaaatg

SEQ ID NO: 846817 - DNA, 120 bp, Artificial Sequence
  ENSG00000251598_7 (sequence is synthesized)
atggctcaaataaaaaataaacaatcaattcatctacataaaaactacaaaagttcaaattcatttccattttgcctgccaacatatggaaaggacagaggactgcaggacaggccatat

SEQ ID NO: 846818 - DNA, 120 bp, Artificial Sequence
  ENSG00000251598_8 (sequence is synthesized)
ctgcatatattccttaaagagttctgaagaaaaagcatcaacgggacttcactgtactagtctgctgtctcctctgccttagagaagcaaagaaaagtgctggagaaacacatgacaatg

SEQ ID NO: 846819 - DNA, 120 bp, Artificial Sequence
  ENSG00000251598_9 (sequence is synthesized)
cttctccctcaaggaagctggagaatagctggacaatagacaatgagttgcatgaatataaaaactaagagttactgttcctgtgataaagataattaaaaagtttggaaacaagaaggt

SEQ ID NO: 846820 - DNA, 120 bp, Artificial Sequence
  ENSG00000251598_10 (sequence is synthesized)
aaacaagaaggttaacttggtaaaatggatgcagcgaaatgttagaatatgaataaaagataaacaagacttcaccatgttgaccaggctggttttaaactcctgacctcaagtgatctg

SEQ ID NO: 846821 - DNA, 84 bp, Artificial Sequence
  ENSG00000251598_11 (sequence is synthesized)
tcccaaagtgatgggattacaggtcttatatttaagagttaacggtctccggaggccaggatttgtggagggtccaccagcagg

SEQ ID NO: 846822 - DNA, 120 bp, Artificial Sequence
  ENSG00000228817_0 (sequence is synthesized)
aaataaaaggatttgactttgggctgacaatttagcatttaaccactgtctccgcaccagttccacaagagcagggatttagattaattggaaaaacctcattggtttctgatggagggg

SEQ ID NO: 846823 - DNA, 120 bp, Artificial Sequence
  ENSG00000228817_1 (sequence is synthesized)
gcattcatagaaacaacctactgacaactaaggagctactgcgatgggatgggcagcctgcagcttcactcggtgggcagcctccacaggtatcgtatctgatttcagatacatatgatg

SEQ ID NO: 846824 - DNA, 120 bp, Artificial Sequence
  ENSG00000228817_2 (sequence is synthesized)
gtctcaagtgtgttttttaccaccaccactttgtaggcctgttgatgccactgctgttgaagtctatgtgaatggtgccccctggtggaaggaaaaagagaatgggacgccaggaatgtc

SEQ ID NO: 846825 - DNA, 120 bp, Artificial Sequence
  ENSG00000228817_3 (sequence is synthesized)
ccagcagctaaatggccagaagcctgtctttgtgagaaagcaagaagtctctcggtttgaactcttcggtctagagacagattcttctaccagtggtgtaaaaccctaaagaggctctgc

SEQ ID NO: 846826 - DNA, 120 bp, Artificial Sequence
  ENSG00000228817_4 (sequence is synthesized)
ataagacctaccactgctctgtgtctcatgacaccctgcccccaccactggaaggccacacttattctttgtgttcatgcttctctatgatctgcaagtttcccaagaacacctggattc

SEQ ID NO: 846827 - DNA, 120 bp, Artificial Sequence
  ENSG00000228817_5 (sequence is synthesized)
gaagctcaagtccaccgctaaatagctatgtgacctaatgtgtcagatggttataaggattacagagaaagaggtatagatagagctggtagcagtgacagacacatctttacatcatat

SEQ ID NO: 846828 - DNA, 120 bp, Artificial Sequence
  ENSG00000228817_6 (sequence is synthesized)
gatgccaagcagtatgtttatacttctctaaaatgtatttttctctatataaatagtgtttttgttaactctcaccggctccagtctcaacttttgcctctaatttttcccataatattc

SEQ ID NO: 846829 - DNA, 120 bp, Artificial Sequence
  ENSG00000228817_7 (sequence is synthesized)
actaactctagtgatagctgtctatgcgcattgtactgagactaattcagagagtgggttggatgaactttggtttgatttgtacgtaattgttaaaaactgtgtttaagaaaacagttg

SEQ ID NO: 846830 - DNA, 120 bp, Artificial Sequence
  ENSG00000228817_8 (sequence is synthesized)
acaaacactaaggaagtagcatgtggaaggccagaccttctgttgccatcagtaggggggtttctgtagtctgaggacctatgagccttttgggttacctttgacttgcacttgggcttt

SEQ ID NO: 846831 - DNA, 120 bp, Artificial Sequence
  ENSG00000223843_0 (sequence is synthesized)
tgaggcatgggcggggggtgccggccagcctgggaaggagctgggatagacacctgggctcgtccttcacacctccacggagatgtcttcaccgtctgagccgagaacacctgcccagag

SEQ ID NO: 846832 - DNA, 120 bp, Artificial Sequence
  ENSG00000223843_1 (sequence is synthesized)
tcttgctttgggaagatatatttgcatatctgaagtaccagctataatagaaaagccgccgtggaaacgtcttcttggggtgcccccgatcgcaataacagtctgggtgcaccatgacag

SEQ ID NO: 846833 - DNA, 120 bp, Artificial Sequence
  ENSG00000223843_2 (sequence is synthesized)
ctttcgctatgcacacagtcacttggaaagaatccaatccatgatcccaagctgcctttagtcatcatggctcccaactgtcttccagtctaagatggtttctccgtatttccttgcttc

SEQ ID NO: 846834 - DNA, 120 bp, Artificial Sequence
  ENSG00000223843_3 (sequence is synthesized)
ctctggccttggaagttttgaggcgtgctgggttgaatttctccacaagagctacagaaaaaaatggcagttcaattggtggcgattcattcattcattcattcttcactcattcattca

SEQ ID NO: 846835 - DNA, 120 bp, Artificial Sequence
  ENSG00000223843_4 (sequence is synthesized)
acacttgctgagacaccttctctgcttcaggccctggcttggtcctcacatcaaagaactcacggttggtggctggacatatgtggagacagacatgtgacaaactaagtgccgcaggga

SEQ ID NO: 846836 - DNA, 120 bp, Artificial Sequence
  ENSG00000223843_5 (sequence is synthesized)
gggggaccctgagtcccgctggcccacactgtcctgggtttgcatggtcacagcttatggacagagactatgggagctatgaccaaaacacagagagggaggtaagggggtgttccccgc

SEQ ID NO: 846837 - DNA, 120 bp, Artificial Sequence
  ENSG00000223843_6 (sequence is synthesized)
cgtgtcagggcagagtcaggtgtgtgaggagcaggggaaggttccctgagctcatagtgagcctggctggggctggactgtggggatggaattcagactcagccctatgaccaagtattt

SEQ ID NO: 846838 - DNA, 120 bp, Artificial Sequence
  ENSG00000223843_7 (sequence is synthesized)
cctaacggcaccagagacaggttctctagtgtctgttatgcaaggcaaattctcgctttaagtttccattccattgatgatctaaaaatatatacaacttattctggatacagggaccac

SEQ ID NO: 846839 - DNA, 120 bp, Artificial Sequence
  ENSG00000223843_8 (sequence is synthesized)
ctttaggagataacagctgtgcagcctcaggggctgagtccagctttctgatcaggctcatgtggatgctccacggggagtgttgctggtggccgagaggctggcccaccggaacctctg

SEQ ID NO: 846840 - DNA, 120 bp, Artificial Sequence
  ENSG00000223843_9 (sequence is synthesized)
aagagcaaggctcgccccacgcttggcactcatcctcatgccgcattctcctgccagttgtaaagacaacacttctctgggagtgacaactcataattgaaggaggcttatgtaagataa

SEQ ID NO: 846841 - DNA, 120 bp, Artificial Sequence
  ENSG00000223843_10 (sequence is synthesized)
gatttgagttgaagtttcatagactagactttgttttgacatcctgaaagaacagaatgtcagggagtggaatgctgtgtgagttgttgaggcaaatgaggaaggccagtggaagcagac

SEQ ID NO: 846842 - DNA, 120 bp, Artificial Sequence
  ENSG00000223843_11 (sequence is synthesized)
ctgcatgccaagccaggccaagagaggctgttgcacgttctagaagcagagatttctttgcccttgcacacagggaagcagcagcaggtcacggtgcctgtcaggacatagcgggggccc

SEQ ID NO: 846843 - DNA, 120 bp, Artificial Sequence
  ENSG00000223843_12 (sequence is synthesized)
atggaaccccaaggaactggcccatacatgcctctgatgctctgactcacagaaggccatcagcagtgaggagaaaatacagaatgacttttggaaagcaatcggcttttttttacagta

SEQ ID NO: 846844 - DNA, 120 bp, Artificial Sequence
  ENSG00000223843_13 (sequence is synthesized)
ttgaattttggatgcatgactaacatctgacaagcctatcataataactgagtggggacttaaatgagttcatggttgaaaagaaaaagccagcagtagcaataaggacagtaacacagt

SEQ ID NO: 846845 - DNA, 120 bp, Artificial Sequence
  ENSG00000223843_14 (sequence is synthesized)
gaaggtttatcactctcaaaatcaaagaattaactaaaaaaaaaagggaacgccaatatgtgtgacaaccaacatgcgtgttttggcttcagcaaaacgttacattaaatcaatgaacaa

SEQ ID NO: 846846 - DNA, 120 bp, Artificial Sequence
  ENSG00000223843_15 (sequence is synthesized)
catttgaatattactgatttcagattttttatacttaatttacaagtgttttttaataggctctaacttaaagagtttacacctggtttcatttgtgcattttaaggtcatgattatgat

SEQ ID NO: 846847 - DNA, 120 bp, Artificial Sequence
  ENSG00000223843_16 (sequence is synthesized)
aaaagtaatttatattaatattggaggctctcaaagaaaacattttcctttaaaaggagtctgtatattagtcatgtgttgggggagctaaaaagccaaggagtgacatggtcagatgta

SEQ ID NO: 846848 - DNA, 120 bp, Artificial Sequence
  ENSG00000223843_17 (sequence is synthesized)
ttttcctgtaatgtaaaatgttgaataaacaagatgtaactgggccgggtgtgttgggtcacacctgatcctagcactctgggaggctgaggtgggcagatctcttgagatcaggagttt

SEQ ID NO: 846849 - DNA, 64 bp, Artificial Sequence
  ENSG00000223843_18 (sequence is synthesized)
ggctgaggtgggcagtaccaaaaaatacaaaaacattcaggcatggtgatgcatgcctgtaatc

SEQ ID NO: 846850 - DNA, 120 bp, Artificial Sequence
  ENSG00000223843_19 (sequence is synthesized)
gaacctggaagacggaggctgcagtgagctgagatcataccactgtactccagcctgtgtgacagtaagaccctgtttcaaaaacaaacaaacaaacaaaaaaccaaaaaacaacaaaac

SEQ ID NO: 846851 - DNA, 120 bp, Artificial Sequence
  ENSG00000223843_20 (sequence is synthesized)
aacaaaaaacaaaaaaaccaagatgcaatatttactggaagtataaatcccactggtttaattttaaaagtttaccaaagtgatacatgctgaaaaacgaaacaacatcaaagagtgaat

SEQ ID NO: 846852 - DNA, 120 bp, Artificial Sequence
  ENSG00000223843_21 (sequence is synthesized)
gttgatgggaatggagccccaggagtgtccccttcatcccgccctcctccaccttttccatttccttctgcagtcagagtctgtgaacattcacactctgcccagggtggcaaccactgt

SEQ ID NO: 846853 - DNA, 120 bp, Artificial Sequence
  ENSG00000223843_22 (sequence is synthesized)
cgtgctgggaattggcagtgccaccccagccttcagcaaccatcgacattgaggtgggaccctctactagcaaaaagattacaagaagattacttgctgaaggctcagaagatcaccacc

SEQ ID NO: 846854 - DNA, 120 bp, Artificial Sequence
  ENSG00000223843_23 (sequence is synthesized)
attacttgctgaaggctcagaagatcaccaccatattttagtaataaagtatttttattaagctatgtaatttttttagacataatgctatcgcacacttaatagactacagtatagtgt

SEQ ID NO: 846855 - DNA, 120 bp, Artificial Sequence
  ENSG00000223843_24 (sequence is synthesized)
aaaattcattgactcattttattgcgatatttgctttgctacggtctggaaccaaacctgcaaagtctctgagacatgcctgtatgaagaaatgccacatacatgggcaaagactccatg

SEQ ID NO: 846856 - DNA, 75 bp, Artificial Sequence
  ENSG00000223843_25 (sequence is synthesized)
gggcaaagactctgaatgggatctaatcaaagtaaagagcttctgcatagcaaaataaactatcatcagagtgaa

SEQ ID NO: 846857 - DNA, 63 bp, Artificial Sequence
  ENSG00000223843_26 (sequence is synthesized)
aagataccctcttacgccagttagaatggtgattattaagaagtcaggaaacaacagatgctg

SEQ ID NO: 846858 - DNA, 77 bp, Artificial Sequence
  ENSG00000223843_27 (sequence is synthesized)
aaagctggaagctataattctcagcagactaacataggaacagaaaaggagacaccacatgttctcactcataagtg

SEQ ID NO: 846859 - DNA, 120 bp, Artificial Sequence
  ENSG00000223842_0 (sequence is synthesized)
aactgacaagtgagaagatgagaggggggatgaatagatgctgacataatgatattatatggagaaaaagtcattttttaaagatcacaaaaggagaagcaggttccaggatgaaccaca

SEQ ID NO: 846860 - DNA, 120 bp, Artificial Sequence
  ENSG00000223842_1 (sequence is synthesized)
aaaacagtaactcaacttctgtcctgggctctttatattaaatctcaccagaaacccattttacaggtgggaaaagcttggtccacctcagccttgggcccatgcttttatatctagtat

SEQ ID NO: 846861 - DNA, 120 bp, Artificial Sequence
  ENSG00000223842_2 (sequence is synthesized)
taacattcattctggatgtgtagaagtctctgccctctttcagacaacagttactgctatggtttgaatgtatgtgtccctccaagatcctcatgttggaatttaaaccccaaggtgatg

SEQ ID NO: 846862 - DNA, 120 bp, Artificial Sequence
  ENSG00000223842_3 (sequence is synthesized)
gtattaagaggtgaagccttttggaaagtgattaagtcatgatggctctgccctcaagaatacattagtgctcttataacagaagttgaaggaacccccctagtgccttttgccttctcc

SEQ ID NO: 846863 - DNA, 120 bp, Artificial Sequence
  ENSG00000223842_4 (sequence is synthesized)
aaaaagacaccatcttgaagaagagacaaccttcgccagacaccaaatctgctggcactgtgctcttggacttccttatcaattaatgattctatggtattttgttatagcaatgggaac

SEQ ID NO: 846864 - DNA, 120 bp, Artificial Sequence
  ENSG00000223842_5 (sequence is synthesized)
agactaagacagttaaagagcgacacacttgcattgagtgtaaaaggagggaaacttacagtccttttaagcagaaaccaagcaagttgctagacagctggctggtacaactggaagatg

SEQ ID NO: 846865 - DNA, 120 bp, Artificial Sequence
  ENSG00000223842_6 (sequence is synthesized)
aggggggtggtgtgcatgatggttactaaggaaaaaccagcaacagagggacttctcctaaagtccatcatgccgaactttgatccatttgaagatggcagtgaaacacctcagaacttt

SEQ ID NO: 846866 - DNA, 120 bp, Artificial Sequence
  ENSG00000223842_7 (sequence is synthesized)
gttttgttttctttacaactacgcatgcctgctttcaagaagctttggccctctcagggagatttccctgagacaaacaatttcccatgggaaacaaaaaatgggccttgattagtattc

SEQ ID NO: 846867 - DNA, 120 bp, Artificial Sequence
  ENSG00000223842_8 (sequence is synthesized)
agggtcttattttttagattgagtttacaaagctgaagaggttgatgccctgaagtgtgagaaactgacccctcaaaatcaaaataaattcttgcaagcagctgccacattaactcaaaa

SEQ ID NO: 846868 - DNA, 120 bp, Artificial Sequence
  ENSG00000228812_0 (sequence is synthesized)
cgcagcagccgggtgtgagggcagggctgggtattcggagaccttcagaagcctggtcacggagggcctgcccagggacccccctgcctctccccccaggccccacggcggcagagactc

SEQ ID NO: 846869 - DNA, 120 bp, Artificial Sequence
  ENSG00000228812_1 (sequence is synthesized)
acaggcaaagaactgccagggctggtaggtgcggccgaagtccatggaccgctccagcacccagaggtccggccgggcaggtacgcccgggaacagctgggtgctgttggccaggtaggc

SEQ ID NO: 846870 - DNA, 120 bp, Artificial Sequence
  ENSG00000228812_2 (sequence is synthesized)
ctgctgtggggtcccccatgaaaagaccacagacccctcatagcttcagcccttgggggcaccagctgcccagactccagacaggggccctggacagctgtcctcgagggcctggtggct

SEQ ID NO: 846871 - DNA, 120 bp, Artificial Sequence
  ENSG00000228812_3 (sequence is synthesized)
gcacagatggtcacaggaagggaagcccgcgctggaggactcccatctgtctctgacctggtcgcggctcccagggccacaccggccgccctcgccatgacccggagcgagcgcagaccc

SEQ ID NO: 846872 - DNA, 120 bp, Artificial Sequence
  ENSG00000228812_4 (sequence is synthesized)
ctggcttcgggaccgcccttccccctccacgccccgctcagctcagctgccagtgctgacctttccgctgctacatggttctgtgcagaaagaaaaaaaaaagtcttttaaagcaaaagc

SEQ ID NO: 846873 - DNA, 120 bp, Artificial Sequence
  ENSG00000257747_0 (sequence is synthesized)
gaaacctagattcaccatgagtcatcaagggacttaaagacagacgtatctggagaaaaagagaataaagctgaacatgcagcctccagccccagagaaagactgagagagaacaggaga

SEQ ID NO: 846874 - DNA, 120 bp, Artificial Sequence
  ENSG00000257747_1 (sequence is synthesized)
atagaaccttattagacaccagatgtatttccagcaactgggttccttgaaatttctctggttcataagtgcttcacagacataatgggctagtaaattaggtccttattttggaacaaa

SEQ ID NO: 846875 - DNA, 120 bp, Artificial Sequence
  ENSG00000257747_2 (sequence is synthesized)
ttgagagatatatttggaagtatgacagagatcaagctgtcagctttaattggagataaaagctaagttggagaagggcatactgctaataattcaccccagatttgtcagatttaccta

SEQ ID NO: 846876 - DNA, 120 bp, Artificial Sequence
  ENSG00000257747_3 (sequence is synthesized)
ccccatcacaagcccagtaaaaatcacagtataaaggcaaagataatgcatctctctgcagtcaggccaatttcaaagtctcctccaagatattcttatgtaactactctacttgtcacc

SEQ ID NO: 846877 - DNA, 120 bp, Artificial Sequence
  ENSG00000257747_4 (sequence is synthesized)
tggacatcaggactttggaaaacttcccaagtgtttccattgtgcaggctgtcatgagaatatcctctctcgggaagacttactagagaaagaagtagccatcaccaatctttcaagcct

SEQ ID NO: 846878 - DNA, 120 bp, Artificial Sequence
  ENSG00000257747_5 (sequence is synthesized)
gattgtccctctcagtgcttttggaggttatatttgtcacttcttaaactaaaggaaaagactcacttttcttataaagttggaagtagtaaatctgttcctttgaaactagagaaatat

SEQ ID NO: 846879 - DNA, 120 bp, Artificial Sequence
  ENSG00000257747_6 (sequence is synthesized)
gtccctgcctatgaaaacgctgttctacttttgcagaggtagctgtatcatagagtgaatgtggcaactgatatggccatcactgtgaagagctgggtacacacatcagcctcaggacac

SEQ ID NO: 846880 - DNA, 120 bp, Artificial Sequence
  ENSG00000257747_7 (sequence is synthesized)
cccctgcagtcctaacttgggaacgtaaacctcagctattgcaagtaaaccatttctgcttcattcacatgagaacatttccttcacaaaagtcacatggacaagacaaaataagaactt

SEQ ID NO: 846881 - DNA, 120 bp, Artificial Sequence
  ENSG00000257747_8 (sequence is synthesized)
acctaaggaaaaaaaaatgtctttgggtaactactgtgctaagctactttctgcagaggttaggtactatagacattaggatcaggaaaaaccaagaaacaaacaattgtgactaaattt

SEQ ID NO: 846882 - DNA, 120 bp, Artificial Sequence
  ENSG00000257747_9 (sequence is synthesized)
ttctctaggagacacggaaaggaatttgttcagctcttgagagataaatgtatggagacaaatacagaacagcaagaaagtcagaagaaccagagagacggtgtgcaacaggaggctttt

SEQ ID NO: 846883 - DNA, 120 bp, Artificial Sequence
  ENSG00000257747_10 (sequence is synthesized)
aagaagcatccaacagcaactgtctcctttctagttatttctattacttcagccttacctcctccaacttcagcacctcattataatatccttcccaatcaatcttctatggaactactt

SEQ ID NO: 846884 - DNA, 120 bp, Artificial Sequence
  ENSG00000257746_0 (sequence is synthesized)
tggaagaaggggcagaatagtatcaaaaatgcttcactcccaggaatgtggtgagcataaaattaaataatgaaaaagtcaactataaagcactaaataaatataagatggtgaatctga

SEQ ID NO: 846885 - DNA, 120 bp, Artificial Sequence
  ENSG00000257746_1 (sequence is synthesized)
ctgacagaggaagaattaaatgacttgttcaaggtcacctttgaggaatttgcaggaagtttaacttatgtatatttttcccctgtagtaccccagatggagtctcactctgtcgcccag

SEQ ID NO: 846886 - DNA, 120 bp, Artificial Sequence
  ENSG00000257746_2 (sequence is synthesized)
gcaacttccgcctcccaggttcaagagatcctcctgcctcagccccactagtagctgggattacagggaaatctattatgggatggcctggatatatcactttaaaaatcctgcttttaa

SEQ ID NO: 846887 - DNA, 90 bp, Artificial Sequence
  ENSG00000257746_3 (sequence is synthesized)
aagaaattgagctacagtgaggtcacacagccgagaatcacacagtgaagagttgggatttgagcctggaatactctgacctcagagtct

SEQ ID NO: 846888 - DNA, 120 bp, Artificial Sequence
  ENSG00000257746_4 (sequence is synthesized)
agttgggatttgagcctggaatactctgacctcagagtctggatgctagtctcttgctgcctcccctgtgttatgaggtcatgtctaaatcacctccgttactgaaaatgcttgtgaaag

SEQ ID NO: 846889 - DNA, 120 bp, Artificial Sequence
  ENSG00000257746_5 (sequence is synthesized)
acctattctgctggatagagcagtcaccttagtcaaatatgatccaaatgttgccattaggtcctacccaaccccatcaaagatcagaacctggaggtgtggtaactccctccagtccag

SEQ ID NO: 846890 - DNA, 120 bp, Artificial Sequence
  ENSG00000257746_6 (sequence is synthesized)
ccaggggcctaatgacaggaaaacaaatgaagtggatccccatcttccacccttgcctccgctaagccatcagaggacaagtttcccaccccactctctccaatttcacttgaaaaataa

SEQ ID NO: 846891 - DNA, 120 bp, Artificial Sequence
  ENSG00000257746_7 (sequence is synthesized)
aacaggcctccagctgtgaaatggattatgctctacaactatgtacctggaatagaagccatcattcttcatgaagtttgctgagaattatgtatcgcagcctggcagcttcctgttccc

SEQ ID NO: 846892 - DNA, 120 bp, Artificial Sequence
  ENSG00000257746_8 (sequence is synthesized)
tcgttagcctgcatatcccacttaacgaaagattcgccatgcactgacttgtatgtgactcacagtgtgcacagtatgcactgactgtgacctgtccccaaatgaacacagtaccagtct

SEQ ID NO: 846893 - DNA, 120 bp, Artificial Sequence
  ENSG00000257746_9 (sequence is synthesized)
acacagtcttcactgtctggtcactgctcctttacacgtggcattcactctgcttgcagaggcattttagagtggatatctaaagaaggagatttctcccaagcatgcacataggagggc

SEQ ID NO: 846894 - DNA, 120 bp, Artificial Sequence
  ENSG00000257746_10 (sequence is synthesized)
actggtctgatgctctgattgacagttcactactgcaaagaggacagatgagaaagcagctcagctctttgatgctaaggaaaaaacacagaacctcacttatctatatgtaatcacaaa

SEQ ID NO: 846895 - DNA, 120 bp, Artificial Sequence
  ENSG00000257746_11 (sequence is synthesized)
ctttagtatccatcagtaccaagccaaaatagttcctgtttggacatacattattagaaattaacaacaaaatttagtaaatggttggccagttctgaacgcagaatagccacctctgag

SEQ ID NO: 846896 - DNA, 120 bp, Artificial Sequence
  ENSG00000257746_12 (sequence is synthesized)
tgagcattttgatcaatctaactcacacatttctggttcaacaaagttattagatgagaagacccaaaacggtgtgtaaatgggacacagatttataaacagttaatttataatcatata

SEQ ID NO: 846897 - DNA, 120 bp, Artificial Sequence
  ENSG00000257746_13 (sequence is synthesized)
tggcaaattaacctgtatgtcactaatgtgccaccaatcataagacatgccatcatttaatctgtcatgaagaagtgaaaaactcaattaaacggtgacatcatgcttcctgattagaaa

SEQ ID NO: 846898 - DNA, 120 bp, Artificial Sequence
  ENSG00000257746_14 (sequence is synthesized)
taggtcagagtaaggagctgctctgagccatcagtgggagggttaagttaaagaatagaaagatgtaacctgacccaaaacttagctctcattttcaacaggcaagagctccttgcaggg

SEQ ID NO: 846899 - DNA, 120 bp, Artificial Sequence
  ENSG00000257746_15 (sequence is synthesized)
tctttttggaatggcaataacaatgtctgcccagcatccaccactttaagttggtgtttacaatagaactgacacagccctttaagcaggctcttgcgtgcagagttaactctccccttg

SEQ ID NO: 846900 - DNA, 120 bp, Artificial Sequence
  ENSG00000257746_16 (sequence is synthesized)
cacacagagcagatcgtcaggctccctccagccccaggacctttctctaaccataaaaaggcaattgtacctctaaaccccaaatccttacctatccctgctgcacccagctgtgcaagg

SEQ ID NO: 846901 - DNA, 120 bp, Artificial Sequence
  ENSG00000257746_17 (sequence is synthesized)
tgagtcctaggaggtcacatcccacatgattccacgttttctcatcagtatcctttgctagttccagatattgcaacatcactactgttcaagattagaacttaagaacttgaaaaggtc

SEQ ID NO: 846902 - DNA, 120 bp, Artificial Sequence
  ENSG00000257746_18 (sequence is synthesized)
aagaaagatgtggtgccttgtctccacatcaagtaaacagtccgtggcattggcctctgacaaatgacaacagactcacggggcagcagttgaggagctgtgcttacatgatacttacca

SEQ ID NO: 846903 - DNA, 120 bp, Artificial Sequence
  ENSG00000257746_19 (sequence is synthesized)
tcctgagaagcatggatgtatggggatacccataccctggtaacccaaccccatgggctcagacagtgttgaacactagagaatcttcatcatttgctcagctgtcaccacttccacaga

SEQ ID NO: 846904 - DNA, 120 bp, Artificial Sequence
  ENSG00000257746_20 (sequence is synthesized)
tgcaagaaatggccgatggttctagaggatgaccccagcctctcaaatagaaaagggagtgtgttagatgtcatccagccagtcgtatagaaaggtggactttaagaaactgtggttaat

SEQ ID NO: 846905 - DNA, 120 bp, Artificial Sequence
  ENSG00000257746_21 (sequence is synthesized)
gttggaaggaaacataaggcagcttttaaagctattttcatagtcttcaaagagaaataaatgaccagcgccgacggctgcagacagcaggacaggcagcctgacggagctctgtattca

SEQ ID NO: 846906 - DNA, 120 bp, Artificial Sequence
  ENSG00000257741_0 (sequence is synthesized)
ggcactccaggaagatgaaggtgggattatagaacttgctttgctgtgactaaagagaactttgtatgcagctgtagtctgggaggtctgatgttagggaaaaagaaggaggaaagcaag

SEQ ID NO: 846907 - DNA, 120 bp, Artificial Sequence
  ENSG00000257741_1 (sequence is synthesized)
attaaaaatcattcctggaaatgcaagagaaaatgtgctggagtggtgctgttagtaccagggacactggacaagaaagataagcaagccactgctgtctgattcctacatagcaggtta

SEQ ID NO: 846908 - DNA, 120 bp, Artificial Sequence
  ENSG00000257741_2 (sequence is synthesized)
aagtgttggattcataattctcacttcaggaagactgaaaaccagactttattctgctagatcccaagatatcaaggaagaggaaaagggaagagccccaggcactattaaaccacagct

SEQ ID NO: 846909 - DNA, 120 bp, Artificial Sequence
  ENSG00000257741_3 (sequence is synthesized)
tatcatccatgataatccaccagctctgggggtttagaagggaaaggatggaggtctcagtgcttgaggctaggctgacagctgagcagggctccagctcaccttaatctcactcctgtg

SEQ ID NO: 846910 - DNA, 120 bp, Artificial Sequence
  ENSG00000257741_4 (sequence is synthesized)
gatgcctgcactaggggcctgagcattctcccagatctctgcataggaggctgcccttaggcattattaaggtgtgaaagcagcaagaaagagcagaattaaactgcttttctctaatgt

SEQ ID NO: 846911 - DNA, 120 bp, Artificial Sequence
  ENSG00000257741_5 (sequence is synthesized)
atccttttacagcccagtgtattttgccctaggctagccttttcttctcctttcaccctccacatgccagtccgagacagcctttcttctcacaggaattattgtattatttcttaaatt

SEQ ID NO: 846912 - DNA, 120 bp, Artificial Sequence
  ENSG00000257741_6 (sequence is synthesized)
ctttttttcttctccatggcttttctagaggaaacctaacagtgtgggtttatcaatcattttgacaagactctgaattccactgaacagatttttgaataaaaattatgaacaaagaaa

SEQ ID NO: 846913 - DNA, 120 bp, Artificial Sequence
  ENSG00000257741_7 (sequence is synthesized)
aacaggtgttaagaggaagagaggagcaagcatatatatatggcactccaggaagatgaaggtgggattatagaagtgctgttagtaccagggacactggacaagaaagataagcaagcc

SEQ ID NO: 846914 - DNA, 120 bp, Artificial Sequence
  ENSG00000257741_8 (sequence is synthesized)
tgtgtgacattccatcgtgtacctgccagagaagaaaacaattgggcctgttactcaaattgttcaatttttaagcaggtccattgttatgattggactttattccaatataagcacttg

SEQ ID NO: 846915 - DNA, 120 bp, Artificial Sequence
  ENSG00000257741_9 (sequence is synthesized)
caaaaggatgacataaagtgagaatataatagaatgattatatgtaatgagtttactgaagaacttctacatcttggagtacaaacaatgttttggatttttttgtttgtttgttttttt

SEQ ID NO: 846916 - DNA, 120 bp, Artificial Sequence
  ENSG00000257741_10 (sequence is synthesized)
cccatcattttcggcagtgttttcttgcatttctccttgcaagccttttaaacaatatcatctacaattttctgcttgcttatgattatcaaaattaaacccaattctatttatttaaaa

SEQ ID NO: 846917 - DNA, 120 bp, Artificial Sequence
  ENSG00000257741_11 (sequence is synthesized)
taattccagcagccagtttgaagacccccacagaagagtgagatcagcagaatacacctcattcatctccctattccatgacttcactgtgcactctgggaccaatcaacaatctccaca

SEQ ID NO: 846918 - DNA, 120 bp, Artificial Sequence
  ENSG00000257741_12 (sequence is synthesized)
cttcagttcactccaaaacccttaaaaattttatcctcaaattcttcagggagatggatttgaggcttcttcccatctccttgttcagtgaccctacaattgaatctctttctctgcgcc

SEQ ID NO: 846919 - DNA, 120 bp, Artificial Sequence
  ENSG00000257741_13 (sequence is synthesized)
gacaacaggtgttaagaggaagagaggagcaagcatatatatatggcactccaggaagatgaaggtgggattatagaatgtatgcagctgtagtctgggaggtctgatgttagggaaaaa

SEQ ID NO: 846920 - DNA, 120 bp, Artificial Sequence
  ENSG00000257741_14 (sequence is synthesized)
aacaggtgttaagaggaagagaggagcaagcatatatatatggcactccaggaagatgaagcttgctttgctgtgactaaagagaacttgtaaggaagcctgtgtccatagattgtcatg

SEQ ID NO: 846921 - DNA, 120 bp, Artificial Sequence
  ENSG00000257741_15 (sequence is synthesized)
ggcactccaggaagatgaagcttgctttgctgtgactaaagagaacttgtaaggaagcctgtgtccatagattgtcatgtgtatgcagctgtagtctgggaggtctgatgttagggaaaa

SEQ ID NO: 846922 - DNA, 120 bp, Artificial Sequence
  ENSG00000257740_0 (sequence is synthesized)
cccagttttgccattaaatacagaacttcataaagttctatggcttctctgggcctcagcttcttcatcaataaaatgggcagaggtgaaccagacgacctctaaggttcctttagattc

SEQ ID NO: 846923 - DNA, 120 bp, Artificial Sequence
  ENSG00000257740_1 (sequence is synthesized)
tattccatttgaaaccctgagacaaccatacctcaagctcagagtgcttaagaattttctgccaggtgcggtggctcacaccagtaatcccagcatttggggaggccaaggcgggcggat

SEQ ID NO: 846924 - DNA, 120 bp, Artificial Sequence
  ENSG00000257748_0 (sequence is synthesized)
ctctcaaaaaaaaaaaaaaaactgttaggtatatattacggtatatatattaaggcagacctgggtcggtctcatactggaatgcctattagctgcatgaggggaaacagtaaccagaaa

SEQ ID NO: 846925 - DNA, 120 bp, Artificial Sequence
  ENSG00000257748_1 (sequence is synthesized)
catctggaccaagggatcaaaattaacatcaataagtcctagaatcaggcgtttctttaagaggccctacttcctctaattggataattctagaaaccggtatttgaatctgaggtttaa

SEQ ID NO: 846926 - DNA, 120 bp, Artificial Sequence
  ENSG00000257748_2 (sequence is synthesized)
ctaaagagaataccttctactgatgtaacagcaatggtaattggtataaaggcaaaagcatgtgcaaaggagaaatcacaacaaaggccacttattgaaataaaacctattaaaaatgta

SEQ ID NO: 846927 - DNA, 87 bp, Artificial Sequence
  ENSG00000257748_3 (sequence is synthesized)
tgttagaatgcctattagctgcatgaggggaaacagtaaccagaaagtagaggactggacaacatctggaccaagggatcaaaatta

SEQ ID NO: 846928 - DNA, 120 bp, Artificial Sequence
  ENSG00000255671_0 (sequence is synthesized)
ggaggcactgtgaggaagggatggagccggaagtaggaagtagaacaagattctacttatgggtggatgagatggccccagaaagaagagcagggaaggcaacatagaacaggaaatgga

SEQ ID NO: 846929 - DNA, 120 bp, Artificial Sequence
  ENSG00000255671_1 (sequence is synthesized)
gaatcactgaatggtaaagatacttggagggcctctctaccttcccacccaaaataccttcccaccgatccctgatgcatgaaatcacaccattaaagagtggttcctttgactgtgaaa

SEQ ID NO: 846930 - DNA, 120 bp, Artificial Sequence
  ENSG00000255670_0 (sequence is synthesized)
atgtttcacagaatgaatcctaattgaagatgaaaccctcagcaacctggaaatcttgaaaaaaagacacagggtcccaccatgttgtccaggctaacctcaaactcctggattcgagtg

SEQ ID NO: 846931 - DNA, 120 bp, Artificial Sequence
  ENSG00000255670_1 (sequence is synthesized)
tacctgactcatcttattgtttgtaatggtgaaactgagatggaactataattatgaagaatgagtctgattcttttgtggaataaggattgcttttatttatagatacgtatcaatgac

SEQ ID NO: 846932 - DNA, 120 bp, Artificial Sequence
  ENSG00000255670_2 (sequence is synthesized)
ttcttactaaattataaaaagatatttatataattcattcagtttagtttcagcatgctgtataaaacatacacaactgaatatttactctgccctataattaaacatcataatctttaa

SEQ ID NO: 846933 - DNA, 120 bp, Artificial Sequence
  ENSG00000255672_0 (sequence is synthesized)
tcatcttcaggcacttgaagtatgaggctccagccaccttccctgatcactcctctttctagtcctactgcctcttccccaccttcctccctccctcccaccacacctgcattcaagtgc

SEQ ID NO: 846934 - DNA, 120 bp, Artificial Sequence
  ENSG00000255672_1 (sequence is synthesized)
tgaagcagagccttcctgctgataagccatcaacacaggcaaaagcagcatcttccaagggtctcccgaaaatgagacgacgttaagcagtctgtgctaagctgtacaatgctgtacaag

SEQ ID NO: 846935 - DNA, 120 bp, Artificial Sequence
  ENSG00000255672_2 (sequence is synthesized)
agtctgaggattcagataagaaaacagggaacatgatggcactttaggcaggatgggaatatcgtaggtgaagacaaccctagctttgagtccctctcggcctctactggccactcccag

SEQ ID NO: 846936 - DNA, 120 bp, Artificial Sequence
  ENSG00000255672_3 (sequence is synthesized)
aagccggtgccatctaatgttatggaatgtctagcagtgcccttgcctttaaagatgtgaacatgtttccatgagagggaacctctatgactaataagacaaataaaagaataacccctt

SEQ ID NO: 846937 - DNA, 120 bp, Artificial Sequence
  ENSG00000255679_0 (sequence is synthesized)
gataccggacttggtggagaaggatggtatgaatgtgtttctaggtggctgcctggacaagggagttcagcctttgggagataaagcagaatataaagggtcacactctgtcacccagac

SEQ ID NO: 846938 - DNA, 120 bp, Artificial Sequence
  ENSG00000255679_1 (sequence is synthesized)
cctcagccttctgactttgcctcgggagagaaaaagagagtcgattccgagtacagctgggccactgggactgcattcctgcctgtgaggaggacagcctgtcaatgagccagaaggggc

SEQ ID NO: 846939 - DNA, 120 bp, Artificial Sequence
  ENSG00000255679_2 (sequence is synthesized)
taacagaggttgtacttacaggttctcaagttttgctatcataaacacccaaagtacaccacgccggcaagctgaaggctgacaggatagaaaacttgcacaagacagttaacattgtag

SEQ ID NO: 846940 - DNA, 120 bp, Artificial Sequence
  ENSG00000283235_0 (sequence is synthesized)
aactgccgctgtgttggaactgccagctagactgctcaccaaaatgggaggcagcctctgctgctgtggtgaaggtgaaggcttcttctaccgccagaattggcggtttctctcgctgga

SEQ ID NO: 846941 - DNA, 120 bp, Artificial Sequence
  ENSG00000283235_1 (sequence is synthesized)
ttcttgggacctgatccaggcagcacactcgacacactcagcgattcagctctacagtatgcactctgggatctcccatttgctaaggaaggatcttagctttgagaaaggtgtcaagcc

SEQ ID NO: 846942 - DNA, 120 bp, Artificial Sequence
  ENSG00000283235_2 (sequence is synthesized)
agtgagatctttctttgactaagatgggaattgtatttctcttggtttctatttcatttgaattaagatatgcaaaccttaccatggacattatagataagttacagaatttcttggtgg

SEQ ID NO: 846943 - DNA, 120 bp, Artificial Sequence
  ENSG00000283235_3 (sequence is synthesized)
gataatgtgagagttcatgagcaactaggagctggctccagatggcacgcatagatgccaccttcagttacaaactgtatgcagataacattttcctcaggagaaatgcttactgttaga

SEQ ID NO: 846944 - DNA, 120 bp, Artificial Sequence
  ENSG00000283235_4 (sequence is synthesized)
agctagactgctcaccaaaatgggaggcagcctctgctgctgtggtgaaggtgaagacacactcagcgattcagctctacagtatgcactctgggatctcccatttgctaaggaaggatc

SEQ ID NO: 846945 - DNA, 120 bp, Artificial Sequence
  ENSG00000283235_5 (sequence is synthesized)
ttagctttgagaaagtggcaagagatcccctcttgaggagactccgcaggaacaccagagatgatagtgacacacaacaactgaaggcagaggtacaggctgaggagaaaggtgtgtatt

SEQ ID NO: 846946 - DNA, 120 bp, Artificial Sequence
  ENSG00000283235_6 (sequence is synthesized)
gctggagagacactttggtttgagcttcctgacagaaatgagatttggacagtttggtataaaaaacactgagtccagtaaagaactgtgaccatccactcgagtccggggaggcaggat

SEQ ID NO: 846947 - DNA, 120 bp, Artificial Sequence
  ENSG00000283235_7 (sequence is synthesized)
tgtcatttaggtggaatagtgtgctgtgcatcagggtggggaggtacagaggacagagtcgtgtggagtgattgggagtgtctttgggagttgtgtgggcatttccccagaaagcatgtt

SEQ ID NO: 846948 - DNA, 120 bp, Artificial Sequence
  ENSG00000283235_8 (sequence is synthesized)
ccccagcgcccactggggatggcaaagacgacatccggtgcgccgaggctgctcacaaaatcactcacctgtggcgcccttggccgctcagtcaaggctctgaatatcctgagactgccc

SEQ ID NO: 846949 - DNA, 120 bp, Artificial Sequence
  ENSG00000283235_9 (sequence is synthesized)
cactgcttggaagccccggacaccagagagtttcctgtaggtcctccagccgagcccgatgaccccggcaggcccgggagtgatgtccccctctggatgatcccaaccccttgctgtgga

SEQ ID NO: 846950 - DNA, 120 bp, Artificial Sequence
  ENSG00000283235_10 (sequence is synthesized)
ttcagccccagccgttgttgtgtcttttggggaccttgtcagttgccttccaagtgctaattctcatgacgagataagaatggctatgactgggtgttgattgatgagtcgaacacattg

SEQ ID NO: 846951 - DNA, 120 bp, Artificial Sequence
  ENSG00000283235_11 (sequence is synthesized)
aatcctggagtttgaggttatcagaactccccacttagaaaatcatcctttatattttagaaaatcatcattgtatgttgaacatacaatgcttcttttttcttcatctccagtgcactg

SEQ ID NO: 846952 - DNA, 120 bp, Artificial Sequence
  ENSG00000283235_12 (sequence is synthesized)
gtctagagagcggcagttggaccccagagtgtggcacgtgttcctgtgttcatttgaacattctctgatgacctgtcgctgaggtcctgtgatgatgcgtatcctgtcttccaccccaac

SEQ ID NO: 846953 - DNA, 120 bp, Artificial Sequence
  ENSG00000283235_13 (sequence is synthesized)
gagaactaccctggtttgagcttcctgctggaaatgagtggcaagagatcccctcttgaggagactccgcaggaacaccagagatgatagtgacacacaacaactgaaggcagaggtaca

SEQ ID NO: 846954 - DNA, 120 bp, Artificial Sequence
  ENSG00000283235_14 (sequence is synthesized)
ggctgaggagaaaggtgtcaagcctgtggcagcagagcttcctggggagtcctcagagcaagtcattgccattgtcgaagtgtcttctaggctttattttggggccattacctcgagcac

SEQ ID NO: 846955 - DNA, 120 bp, Artificial Sequence
  ENSG00000283235_15 (sequence is synthesized)
tgtttcttgtctggtttcctaatgtcagcaactgaagaaaagacctgtatacacaggacacagcatggtctgacgctcacagtgttttcctttctctctgcagagggattcagcactttg

SEQ ID NO: 846956 - DNA, 120 bp, Artificial Sequence
  ENSG00000283235_16 (sequence is synthesized)
ggcaagtggttgcacagaggatcccgtggaagaattcatatatgaatcagatgagaatgccccaggaccatcgtagataccaacaagccctctcccggcacctgcagaaaaagtggggaa

SEQ ID NO: 846957 - DNA, 120 bp, Artificial Sequence
  ENSG00000283235_17 (sequence is synthesized)
aatccccgaagaggcagaaacattcatccggaagggccgccagccagtggatttcccgggcccctcagccctctggagtgtacgagttttggagaaacctcttcctctgtatatgctttt

SEQ ID NO: 846958 - DNA, 120 bp, Artificial Sequence
  ENSG00000283235_18 (sequence is synthesized)
gactttcctggactgatgtaaaaatactcttttctttgacctgtttatttttaagacacgatgtgattgtgtcagcttatattttattgctgaagtaaattttcaaatgttttattagtt

SEQ ID NO: 846959 - DNA, 120 bp, Artificial Sequence
  ENSG00000283235_19 (sequence is synthesized)
atcctgttgagcaaccccacagggtttaggaagggagcccggctgaggtcagaagagttggcgccaccctgcaggaagggttcccagtgacgtctgggtctgctgtggccgcccccctcc

SEQ ID NO: 846960 - DNA, 120 bp, Artificial Sequence
  ENSG00000283235_20 (sequence is synthesized)
gccccggggcttttgctgcactggggtctctggacatgcgcacttgttgtcttcctcccagataccaacaagccctctcccggcacctgcagaaaaagtggggaaaatccccgaagaggc

SEQ ID NO: 846961 - DNA, 120 bp, Artificial Sequence
  ENSG00000283235_21 (sequence is synthesized)
aagccttagaaatgctgcagttcactagcacacgcacctaaggcacagcagcaaacaggagctcaaggaacaacttgggcattagcctggtgcccatctctcctgctggaattcctgcac

SEQ ID NO: 846962 - DNA, 120 bp, Artificial Sequence
  ENSG00000283235_22 (sequence is synthesized)
agctgggatggagagggtcagcgcccccacctgctgcttccaggatgggctctcccagtgtcagagccagtgagagcctgagcagtagcagactccctggacgcgtgtgttgaagaggga

SEQ ID NO: 846963 - DNA, 120 bp, Artificial Sequence
  ENSG00000283235_23 (sequence is synthesized)
gaattaaaatatgagaatctgaccatatgtatcataggtgacttacacagtgtccttggtaaggagaatttagagtgagagtctgttccccactgaggtttgatttaagatggcagaaga

SEQ ID NO: 846964 - DNA, 120 bp, Artificial Sequence
  ENSG00000283235_24 (sequence is synthesized)
aaatgacatcatcagccactcagcagcttgattctctccttggggcaaaatcacttaattgccaagcaacatggacttacaggaaacatcctccaataaaaacttaggtttttagcatga

SEQ ID NO: 846965 - DNA, 120 bp, Artificial Sequence
  ENSG00000250243_0 (sequence is synthesized)
gagaaaaacctgaaaacgctgagaggtggagtgacaacttgcattcagctgtttcagaaacattgttgaccacctactcaatgtgaagatgacgaagatgaaagcctttatgatgatcta

SEQ ID NO: 846966 - DNA, 120 bp, Artificial Sequence
  ENSG00000250243_1 (sequence is synthesized)
aaaaaatgaatggcatgctatctggagggtacaaggaagatttaagccaaaagcataaccctgcaacaaaaatcaccatgtctagaattcaaccattaaagatttaatttttcacattaa

SEQ ID NO: 846967 - DNA, 120 bp, Artificial Sequence
  ENSG00000250243_2 (sequence is synthesized)
gcccaaccaacagtttgtctgcaacttcatgggagatcctgactcagaagcactcaattaactcatgaaaacgactccagtatgaatggtgaatgtaatttaatgtgtcatggaaatgca

SEQ ID NO: 846968 - DNA, 120 bp, Artificial Sequence
  ENSG00000250243_3 (sequence is synthesized)
gagctgtagaactgattattatgcccagtataaatggaagagctctaatctacgagtggaggtgaagcatccccagtggccaggaggacaaccttgcccagtgacctttcctagaagaag

SEQ ID NO: 846969 - DNA, 120 bp, Artificial Sequence
  ENSG00000250242_0 (sequence is synthesized)
caggatgcggtgggtgaacgtggggaagtgagccaggaaaaggaagaaagccattgaggctgcactaataatgggttactttttgagggtgactggagctcactcttattaagatccttc

SEQ ID NO: 846970 - DNA, 120 bp, Artificial Sequence
  ENSG00000250242_1 (sequence is synthesized)
taagaaactgtggaaaataatcccaacatttcccaccaagaggtgagaaagctgggtcattatcagtttcagctctggttgacagtctctgagacattaactccctggtacttccagcct

SEQ ID NO: 846971 - DNA, 120 bp, Artificial Sequence
  ENSG00000250242_2 (sequence is synthesized)
agggtgtgtcaaggggatatgggcagggcatgagtgcatctttcacagcacgtcctttgtattgcttattaacgtgcccatgttaagttcactctgtcactaattctttaaaatggcctt

SEQ ID NO: 846972 - DNA, 120 bp, Artificial Sequence
  ENSG00000250242_3 (sequence is synthesized)
aatcatacccctgatggaaggatgtaacagcagggtggttggtgggatgctgctgcagttgttcccaggctgtggggatattcatcctctccttcacagaatgttcattctggaatcccc

SEQ ID NO: 846973 - DNA, 120 bp, Artificial Sequence
  ENSG00000250241_0 (sequence is synthesized)
agtgtccatgggcgtgatagtagcctgagacgtgcttctgagagtcccgcgaatgcacgtctactgccctgatttccgcgccccaactccccgcaacgccgggtccccccggcccccgca

SEQ ID NO: 846974 - DNA, 120 bp, Artificial Sequence
  ENSG00000250241_1 (sequence is synthesized)
cttggctctttcatgaagatgggtcctgcctttgagcgcttagaaggaaaggattccagcaaaaatggctaatccttttccagctgcagtaaattgaagactggccaaagccaagcgaaa

SEQ ID NO: 846975 - DNA, 120 bp, Artificial Sequence
  ENSG00000250241_2 (sequence is synthesized)
accgctgcagttaaaatgattttagcatcacgtctgcggctgagaatggagcggcagtgtataaagggacctgtggatcaatgaaaaggagattatagtgtatctgaatattaatacggt

SEQ ID NO: 846976 - DNA, 120 bp, Artificial Sequence
  ENSG00000250241_3 (sequence is synthesized)
attgcatctgtacttccacccctcccccctttctttttcttcagatctgcagaattgaaatgaaatgttttgagctcttcaagctgactcgtcagaatcctggagccttttaaaaaatga

SEQ ID NO: 846977 - DNA, 120 bp, Artificial Sequence
  ENSG00000250241_4 (sequence is synthesized)
cgaattggaaggaaaaattactttatcaataaccaggctccaccaggattgacctagatggttgttcctggcacttgtcattctcagcaagcacagctcagagaacaaatacaaaagacc

SEQ ID NO: 846978 - DNA, 120 bp, Artificial Sequence
  ENSG00000250241_5 (sequence is synthesized)
caaagtgcattgcatcttttatggaagtgcccaatgtggaaatcatagatttcaaggaaggaacaagaaaattgatgaaacaagttcaaaagaaagaagcttggccaatttgatgtcaat

SEQ ID NO: 846979 - DNA, 120 bp, Artificial Sequence
  ENSG00000250241_6 (sequence is synthesized)
ggaaatgcgtgagatttttattcagcattcacacctgagcaatgcttttggtcatgatgtcatactaagaagaaaccacctgagatgagactgttagatgttcagagcaaacaaaaacaa

SEQ ID NO: 846980 - DNA, 120 bp, Artificial Sequence
  ENSG00000250241_7 (sequence is synthesized)
aaacagaccaacaaaaaaaacccaaaacaaaacagaagtttctgaaggacagcagaaatggctttgcaggaccacaacaaccactcccagtcatgatggagagaagtgttcaatacccac

SEQ ID NO: 846981 - DNA, 120 bp, Artificial Sequence
  ENSG00000250241_8 (sequence is synthesized)
agatcctgaacgttgagctgattatactaactagatgggacttagttttgtctaccgtggggtgagcgtatactacctgagggaacaggttctctatggtgaagatggcaacttgctgac

SEQ ID NO: 846982 - DNA, 120 bp, Artificial Sequence
  ENSG00000250241_9 (sequence is synthesized)
tcagtctcagaatgcgttaaatccacatattctggcaagtggagttctgcttctccaatatctcttccagactaagtctcgaaaggacagtaattgatccaccctgagtcatatgcccat

SEQ ID NO: 846983 - DNA, 120 bp, Artificial Sequence
  ENSG00000250241_10 (sequence is synthesized)
gtccaaagcaatgagtttgggaaatttcatgacacactcctaattttgtggtaggagacacatcagaaccacacaatgagtcagtcctatttatgaaatagaggttcatctatcagatga

SEQ ID NO: 846984 - DNA, 120 bp, Artificial Sequence
  ENSG00000250241_11 (sequence is synthesized)
aagggaaaaaagttgtaaaaacaaaacagatgttcactaatggggatctatctgaatttcacctgtaactacaaatgctcacaagtagatttacagttttcctagagtgtcatgaattta

SEQ ID NO: 846985 - DNA, 120 bp, Artificial Sequence
  ENSG00000250241_12 (sequence is synthesized)
tagacctttatcagacactaatgtaggattgagtttgacctgatacagtgttctatctctgagtgttgtcactcagttttatcataaataaaatttattttatatgatatcatatagaga

SEQ ID NO: 846986 - DNA, 120 bp, Artificial Sequence
  ENSG00000250241_13 (sequence is synthesized)
acaaatttacttatttttctcatgtaatcatgtaatcaattgttccaacataatccattgaatagatattgtggcatttccctaattatttataaaggcactgttactagatatgaatat

SEQ ID NO: 846987 - DNA, 120 bp, Artificial Sequence
  ENSG00000250241_14 (sequence is synthesized)
ttatatatgaggatatgaatcgtggctctctgatttgttcattatttgcttgtctattcctgtgccagtatcatacaattggtactaatatagtgttctgatattgacaggatgaagtgc

SEQ ID NO: 846988 - DNA, 120 bp, Artificial Sequence
  ENSG00000250241_15 (sequence is synthesized)
tccttctaatgatgtagctttaaatttgtcttggttgtgcatttctttttattcttccatagagatttgtggttcagttgtcagctttgaaaatcacttttgggatttgaatttgaattg

SEQ ID NO: 846989 - DNA, 120 bp, Artificial Sequence
  ENSG00000250241_16 (sequence is synthesized)
catgaaatttgtagactaacttgtagaaaatagacatttttatgatatgaatttacacatccttgtaaccatgggtgtgttatttattttcacttttgaatattattgtgggtatttagt

SEQ ID NO: 846990 - DNA, 120 bp, Artificial Sequence
  ENSG00000250241_17 (sequence is synthesized)
aataaaaataacaatcgacgagttacatggtggttactatgtgacagatgttgtcaaagttccatccatatatcaacttattatatattcttatgggaagagaccgttattatctccatt

SEQ ID NO: 846991 - DNA, 120 bp, Artificial Sequence
  ENSG00000250241_18 (sequence is synthesized)
acacaagtaagaaaatcgaggtacaaagagcttaagtaacatgtgctaagtcatataagagtaaagctttatttgaatccatgcagtttgtctccagagcttgaaatccattttatttta

SEQ ID NO: 846992 - DNA, 80 bp, Artificial Sequence
  ENSG00000250241_19 (sequence is synthesized)
atgcagtttgtctccagagcttgaaatccattttattttattttatttttgctttttaaaaaaaatttttttgagacgga

SEQ ID NO: 846993 - DNA, 85 bp, Artificial Sequence
  ENSG00000250241_20 (sequence is synthesized)
gaaatatttaccagtatctgatattgcctcactaagaactttgcccaactccttagtgattctaccattggcttagtattttgga

SEQ ID NO: 846994 - DNA, 120 bp, Artificial Sequence
  ENSG00000250241_21 (sequence is synthesized)
caactccttagtgattctaccattggcttagtattttggattttctagtagacaataatatcgtgtgcataaagcaaatacaattattattacaataaaatttttaaactactcatttgt

SEQ ID NO: 846995 - DNA, 120 bp, Artificial Sequence
  ENSG00000250241_22 (sequence is synthesized)
acttgctttcataaagccttagctaattccaacaaaatattgattactgtgggagagagtggtaaatcttattttgtacctaatattaaataaaatgctactaaatataagtgagatgct

SEQ ID NO: 846996 - DNA, 120 bp, Artificial Sequence
  ENSG00000250241_23 (sequence is synthesized)
tgctataagttttagtagttaaacactataaagttatttcttgtctattttcaagaattttttattattttaaatgcatgtgcaatttttttaaaaagtattgttttgcatctaatgtta

SEQ ID NO: 846997 - DNA, 120 bp, Artificial Sequence
  ENSG00000250241_24 (sequence is synthesized)
agtgtgagagcgagaacagccccgcaggtcccgaggcgctggctggggacaatgccgcggaaagttcccagtccccagccgcagatctgcagaattgaaatgaaatgttttgagctcttc

SEQ ID NO: 846998 - DNA, 120 bp, Artificial Sequence
  ENSG00000250241_25 (sequence is synthesized)
aaaatcttaggaaaacatgaccaatgtacagaaaaaaatagaagtgaatagagaaaaattagtaggctttgcaggaccacaacaaccactcccagtcatgatggagagaagtgttcaata

SEQ ID NO: 846999 - DNA, 120 bp, Artificial Sequence
  ENSG00000250241_26 (sequence is synthesized)
cttttattaagttccagtcaccgtatgtgcctgcttcccctttgccttccaccatcattataagtttcctgaggccaccactgccatgcttcctgtacagactgtgggactccatgtaag

SEQ ID NO: 847000 - DNA, 120 bp, Artificial Sequence
  ENSG00000250241_27 (sequence is synthesized)
atgttcctgcttcccctttgccttctaccatgattgtaactttcctgaggccttcccagccatgcttcttgtacaacctgcagaactgtgagtcaattaaacctgttttctttataaatt

SEQ ID NO: 847001 - DNA, 120 bp, Artificial Sequence
  ENSG00000250241_28 (sequence is synthesized)
gaagttccaccactcagaagacttttacattccatgtctcatttgccagaatttcttcttacaagctgtaaaccaatcatggttagggctttgcaggaccacaacaaccactcccagtca

SEQ ID NO: 847002 - DNA, 120 bp, Artificial Sequence
  ENSG00000250241_29 (sequence is synthesized)
aagtgcccaatgtggaaatcatagatttcaaggaaggaacaagaaaattgatgaaacaagttcaaaagaaagcatatatatttgagaaccttggcagctgctgctaatttaatggtcatg

SEQ ID NO: 847003 - DNA, 120 bp, Artificial Sequence
  ENSG00000250241_30 (sequence is synthesized)
acaagttcaaaagaaaggtacctgtgcctcatcattcctaaagaacactgatcaatgatcccagaagtatgccatgttctcttaattcatcagagactgaaagcaaaggaaaatcaagaa

SEQ ID NO: 847004 - DNA, 120 bp, Artificial Sequence
  ENSG00000250241_31 (sequence is synthesized)
ttttccttcctttttgatgattttactagggaagtgtgaacacttgaacaactcagtcagcaataaagaatgaggttaggactggatttagctggacaatcaacattgtctaatatagac

SEQ ID NO: 847005 - DNA, 120 bp, Artificial Sequence
  ENSG00000250241_32 (sequence is synthesized)
agaaaagagaaaaacagagagaagaaaagtgagttcgtttaatttgttgcttaaactgattggagttggaatcccgaccccttgtagctggaaaagtcctgattacttttcctgattgct

SEQ ID NO: 847006 - DNA, 120 bp, Artificial Sequence
  ENSG00000250241_33 (sequence is synthesized)
tgcaaaatagtggttctttatttcttattttggttatagtttatttacataatgtgacttgatatctgagggataattttagtttttaagcccagttgggatgctgtagaatcagtggag

SEQ ID NO: 847007 - DNA, 120 bp, Artificial Sequence
  ENSG00000250241_34 (sequence is synthesized)
aatgagcatgtgatattttaaggaatgatgtcatatctttacctgagccagtttgaaagtgcactgggactaagatgagacactttctttgctatattagtattcaggaatgctagtggc

SEQ ID NO: 847008 - DNA, 120 bp, Artificial Sequence
  ENSG00000250241_35 (sequence is synthesized)
gcaagacactaaatggaaagtaaccttctcttgggagctacacctaggtagacctagtcatgtgaaccagtgatgatagcaacagatgaagattctggatggggaaagtaaggcttgaaa

SEQ ID NO: 847009 - DNA, 120 bp, Artificial Sequence
  ENSG00000250241_36 (sequence is synthesized)
attttggatatgtctgttattaaaatgtaagcctcttttgacattggagtagcaagagggggtaagtagaattgttagccttttaaaatattcctcattaagaggattttttaaaaaccc

SEQ ID NO: 847010 - DNA, 120 bp, Artificial Sequence
  ENSG00000250241_37 (sequence is synthesized)
aatttttggtgttaaaatccaagacactctggaaggtggcttatttcagttggaaagatagtaagctggttttcagggcccaagtagacagtatattttggaatcctgaggtctgttatt

SEQ ID NO: 847011 - DNA, 120 bp, Artificial Sequence
  ENSG00000250241_38 (sequence is synthesized)
tctaacatgcatggatagcattgacaaattctcttctgactgaaaatctaagttgctgatgtttttgatggttatttatttcttatcgcaattcacattggaattttcctaaaggttttt

SEQ ID NO: 847012 - DNA, 120 bp, Artificial Sequence
  ENSG00000250241_39 (sequence is synthesized)
cagaaaggcaaagaatgagtaaatatttaacctagaacacatgatttgtttattttaaaagtctattgatctttatcgttattctttttaacaatgtgtcagaactaggctatgttgaga

SEQ ID NO: 847013 - DNA, 120 bp, Artificial Sequence
  ENSG00000250241_40 (sequence is synthesized)
tgggaaaattcatttataattttaaaacaattgcttctctaagtaaaaatgtttctcttttttctctttaaaattagtagtttgggtttagctggcattctcatgacttacataatattt

SEQ ID NO: 847014 - DNA, 120 bp, Artificial Sequence
  ENSG00000250241_41 (sequence is synthesized)
atatgtttaaaataagggtatgcttgggagcatgagatctgattcttaggttggggactgtaacagtaactcctatttatgtctctgttttaaaatcagatctattgtatacaaagaaga

SEQ ID NO: 847015 - DNA, 120 bp, Artificial Sequence
  ENSG00000250241_42 (sequence is synthesized)
aagaatttttataggtaatagcagaaatgttaatagatcttaaagttttaattttaaaaattaattaaaaagataaatgccatgatatttaaggacctctatttaatatggtgcttttgt

SEQ ID NO: 847016 - DNA, 120 bp, Artificial Sequence
  ENSG00000250241_43 (sequence is synthesized)
aattgttgatgttcacactgtccttgcagaattttattgcattcaggaacatttgtgaattttcttttatctaagaagaatgtgttatatttcagtgaattataggtggcagtatacaca

SEQ ID NO: 847017 - DNA, 120 bp, Artificial Sequence
  ENSG00000250241_44 (sequence is synthesized)
gctaaattccatgtgttactgcaggtagacagaagatttttcaattgtttaacaattttatatttaagcttattgtcattctagccccgtttcttaaccacctcctgtttttggtcttaa

SEQ ID NO: 847018 - DNA, 120 bp, Artificial Sequence
  ENSG00000250241_45 (sequence is synthesized)
tataagaacaccagatagccttcctttgataagagaatgctggtgagaagtattttgaatctcaagtttattctgaatgttagttaagatgcatttaaaaaattttgctaaataaagata

SEQ ID NO: 847019 - DNA, 120 bp, Artificial Sequence
  ENSG00000250241_46 (sequence is synthesized)
cattagaaagagtataaaactcattgaccgcttgatttaatattaaaatgagaatttaaaactaaatgaactcttaaaattacatatcaagccaatgacagagaattttttattctgtct

SEQ ID NO: 847020 - DNA, 120 bp, Artificial Sequence
  ENSG00000250241_47 (sequence is synthesized)
ctttcattttctgttttaaaagttacaagcaaatatgctttgactgctaagttgtgaaaatacaatacttttctgatttattatcctgaagtatgatacctatctatgagaaagttaagt

SEQ ID NO: 847021 - DNA, 120 bp, Artificial Sequence
  ENSG00000250241_48 (sequence is synthesized)
acaaaattgctgttctttatgcctgatatacaccctgaaagtattatattcacgagaatgatgagaaaattatatatggtatcaagaaagagaataaaccttaaattgatgatcgatagc

SEQ ID NO: 847022 - DNA, 120 bp, Artificial Sequence
  ENSG00000250241_49 (sequence is synthesized)
aaacactataaagttatttattttctattttcaagagtttatattattataaatgcatgtacaattaaaaaagtcttatttgctcttcttttctaatgttaaaacatttgtgctttcctg

SEQ ID NO: 847023 - DNA, 120 bp, Artificial Sequence
  ENSG00000250241_50 (sequence is synthesized)
cctgagatgaatgctgtgctctcatgaaagattgcagagtcaaaaagtagcctctggagttaagactttctggttttagagcctcctatggccacttactaattatgggtcttaggagag

SEQ ID NO: 847024 - DNA, 120 bp, Artificial Sequence
  ENSG00000250241_51 (sequence is synthesized)
ttactgaaccttcataatgggtaccaatcctagatcctgtcaaaagggatccttctcttggcgatgactttggaagatcctttgcatgacaataaaaaaaaaagtattattagatctaat

SEQ ID NO: 847025 - DNA, 120 bp, Artificial Sequence
  ENSG00000250241_52 (sequence is synthesized)
ttattagataacacttgggtgtctctaagtgttatggtggtaaacgttcaacaggctctcaaaaatgcatatatgtatatgtttatatagatacatatacactcaaatgtgtatatatgt

SEQ ID NO: 847026 - DNA, 120 bp, Artificial Sequence
  ENSG00000250241_53 (sequence is synthesized)
attgcttttcatagaatgctttcattgacttttgctgaactcctgtatatggagccagcttacaagtgtattcactaacaagtgtagtcctggcatgaatgttggttgatattttcattt

SEQ ID NO: 847027 - DNA, 120 bp, Artificial Sequence
  ENSG00000250241_54 (sequence is synthesized)
acattaataagacagtgaaataacacagacatgtatttgaacttcacttgttcatcagtgatgtgagcaacttctttgccgaattagataataggtttagaataatggaataatattttc

SEQ ID NO: 847028 - DNA, 120 bp, Artificial Sequence
  ENSG00000250241_55 (sequence is synthesized)
tcatttttttttctactagcaaggtaatagctacagacaagacacatttttaggcttaatgcacgttattaacattttctctatgactttttaaagtctagacaacaaaacagtaaatga

SEQ ID NO: 847029 - DNA, 120 bp, Artificial Sequence
  ENSG00000250241_56 (sequence is synthesized)
aaccctgatctatagtattcgccctgtttttttatgtaaattctcccaacatggctaatttcaagcttctagtgtgggaggacatgcacagtgcacaccattatatggtagccccatctc

SEQ ID NO: 847030 - DNA, 120 bp, Artificial Sequence
  ENSG00000250241_57 (sequence is synthesized)
acaggtgagatgagataaataatctcaagagcatataaaacagcaaactgtattaaagtaattaggaattgatgaattttgaatattcctttacttttaatataatttattcaaatataa

SEQ ID NO: 847031 - DNA, 120 bp, Artificial Sequence
  ENSG00000250241_58 (sequence is synthesized)
ataaagttcaatttctagtagtatctatattaaaaattggcttgcaaaatttttgaaaatttaacagttcttgggagcctgtgtgaacacactccaacacgtacatccctggcacatctg

SEQ ID NO: 847032 - DNA, 120 bp, Artificial Sequence
  ENSG00000250241_59 (sequence is synthesized)
ctggcggaatacagctcccactgctgccatatgacaacccattgcactagacagatactttgctacacctttcagattccagaaaaacattcttcacatctcttggcctatgttttaaac

SEQ ID NO: 847033 - DNA, 120 bp, Artificial Sequence
  ENSG00000250241_60 (sequence is synthesized)
caaaaaggtgaccacattcattatgaaatgtatagattgggctgctccctttgttggatatggactttgctcttgagcacaaggaggatctgagaagcagaagtgcaaaggaaaaataga

SEQ ID NO: 847034 - DNA, 120 bp, Artificial Sequence
  ENSG00000250241_61 (sequence is synthesized)
agacacattaattaacttgacaaatctttccttcagaaaggaccagagcaataggttttgcacaatggcatatcaagttaaatagtacagaccttctttcttttggggctgcaattcatg

SEQ ID NO: 847035 - DNA, 120 bp, Artificial Sequence
  ENSG00000250241_62 (sequence is synthesized)
gtttagagttacacattcactaatgttacacaaagcaaaaaaagaaacattttgcaactctcaacagttgaaattatcttgaaattgtgtatgtgtcctctacacaaaacatgaaagaca

SEQ ID NO: 847036 - DNA, 120 bp, Artificial Sequence
  ENSG00000250241_63 (sequence is synthesized)
acatgaaagacaggtaaaatcattgacaatgaaatgaccattgaacatttaaattgcaaataacattgtcttataaaatacacattaatatttaattaaaatttaaaaataaatgcataa

SEQ ID NO: 847037 - DNA, 120 bp, Artificial Sequence
  ENSG00000250241_64 (sequence is synthesized)
tgaaataatatgatttcaaatacggatatttattaattgtaacttgtattttatctttaagttgtttggtataaatgtttactgaactatgatatacttcgagaaaaagtacaccaaatt

SEQ ID NO: 847038 - DNA, 120 bp, Artificial Sequence
  ENSG00000250241_65 (sequence is synthesized)
taaatgttagtctcgaattttcacacgagaaaagcacgtttgtggaaccaccaccggatgcagaaacagaacttcaccagcattccagaagtgttccacattacgctgacccttttggag

SEQ ID NO: 847039 - DNA, 120 bp, Artificial Sequence
  ENSG00000250241_66 (sequence is synthesized)
tcactgtcaattccaaagagtaatctttatgctgacttcttacatcagaggttactattgctgctgttgcttcttttctatgtatgaaactctacagccatctttttgtgtgtcttgatt

SEQ ID NO: 847040 - DNA, 120 bp, Artificial Sequence
  ENSG00000250241_67 (sequence is synthesized)
ctttctctcagcattgtttgtgagatatattcatgttgtagcacaaagatttaatagttcattttccttgccatatagcagtccattgcttgaatatgccactatttcttaattgtttta

SEQ ID NO: 847041 - DNA, 120 bp, Artificial Sequence
  ENSG00000250241_68 (sequence is synthesized)
caaatttatgataaatattaatactatgaatatatgttgtatatcttttgacaaataagtttttaaatttctgtagatatatatgtagaatggtaataatggaatcgcagtgcatgtgtg

SEQ ID NO: 847042 - DNA, 120 bp, Artificial Sequence
  ENSG00000250241_69 (sequence is synthesized)
taatggaatcgcagtgcatgtgtgggttaacctatggaactacagcctaactattttataaatagtactagtttgcacttccatcagcagcatatgagaggtcaaatttctctatacact

SEQ ID NO: 847043 - DNA, 120 bp, Artificial Sequence
  ENSG00000250241_70 (sequence is synthesized)
atacacctgctaacacttgaaatttgtttcgtttttcattttaatattatggtggatatacagtggtattgcaacctgttttactttgcatctctttaataactatgactaacgaatttc

SEQ ID NO: 847044 - DNA, 120 bp, Artificial Sequence
  ENSG00000250241_71 (sequence is synthesized)
agcatttttcatatatataaatttgtcacttggattttttttgaagagtctgtgtttttcccttttgttttctactttttcatattgatttttaagagtttgtctttatttcatttatgt

SEQ ID NO: 847045 - DNA, 120 bp, Artificial Sequence
  ENSG00000250241_72 (sequence is synthesized)
gctggatataacaaatatatatccaacaaaaataaatatttgacataaatattgaagatgtattgattttaatatgcaaatattaaatatttttgccttttttttttttggagacagggt

SEQ ID NO: 847046 - DNA, 120 bp, Artificial Sequence
  ENSG00000250241_73 (sequence is synthesized)
gggtcttgctctcttgcctaggctggattgcagtgatgcaatcatggctcactgtagactccacctcctaggctcaagtgatggtctctcctcagcctctcaagtggccaggccacaggt

SEQ ID NO: 847047 - DNA, 120 bp, Artificial Sequence
  ENSG00000250241_74 (sequence is synthesized)
caagtggccaggccacaggtgtgatccaccactcctggctaattttttaagtttttgtagagatggaggtctcattatgtcgcccaggctgttcttgaactcctggactcaagcgatcct

SEQ ID NO: 847048 - DNA, 120 bp, Artificial Sequence
  ENSG00000250241_75 (sequence is synthesized)
gttgtgagccaccatgcccagacttttttccattctcaatagtgtattttgaccaaataaattttaatgtaacccaaggtaccatttttttatattattattatttttctttcataagaa

SEQ ID NO: 847049 - DNA, 120 bp, Artificial Sequence
  ENSG00000250241_76 (sequence is synthesized)
atccttgataaccaagatcagaagtatagttgcctatactttctaataaaatccttgttgctttccttctatatttagatctatagaccatctgcagttgacttttgtttatgatatgag

SEQ ID NO: 847050 - DNA, 120 bp, Artificial Sequence
  ENSG00000250241_77 (sequence is synthesized)
gtgttaagattcatttttaatgtgactgcctagttgattcagcaccatttttagaattatcttccttacctaatgtattgcgccgttgctttattattatatgaccttgcatggtatctg

SEQ ID NO: 847051 - DNA, 120 bp, Artificial Sequence
  ENSG00000250241_78 (sequence is synthesized)
tttctagaccctatttaaacacttttaaaatattttttaggcttgtcaataaaacagtttgtaaattgtagtagttaataataagtcttgatacctggtaatgtaggttctccagctttc

SEQ ID NO: 847052 - DNA, 120 bp, Artificial Sequence
  ENSG00000250241_79 (sequence is synthesized)
tcctctgagattgtctttgttactcttggctctttacattcctatatatactttggaaacagtttgccaacttctatgtagacacacaagtacccacacaggcaccaacttggatcctga

SEQ ID NO: 847053 - DNA, 120 bp, Artificial Sequence
  ENSG00000250241_80 (sequence is synthesized)
ttaggatggcataaaagctatacatgaatttggggaaatttatattattaaaatacacttccaattcatgaatgtgctatattcttctagttaacattttgactgatacctatcattaat

SEQ ID NO: 847054 - DNA, 120 bp, Artificial Sequence
  ENSG00000250241_81 (sequence is synthesized)
taatctcatgaagttttcagtgtactggtttgcacatttacttttagatatttgatttttatgctattaaaattgtattatatttaaaatttttattttttttataattgcatgtgttct

SEQ ID NO: 847055 - DNA, 120 bp, Artificial Sequence
  ENSG00000250241_82 (sequence is synthesized)
aaaggcactattggttgtaatatgttggatttgcatcctgaaacctagctaaactcacttatttttttttttcttttgagactggtttcactatgttacctgtgctggtctcaaactcat

SEQ ID NO: 847056 - DNA, 83 bp, Artificial Sequence
  ENSG00000250241_83 (sequence is synthesized)
acctgacttattaattttaatattttgaaaatacttttagaggttctgcaataatagtcatgtcacctgtaaataatgaaagt

SEQ ID NO: 847057 - DNA, 120 bp, Artificial Sequence
  ENSG00000250241_84 (sequence is synthesized)
taatagtcatgtcacctgtaaataatgaaagttttcatacatattttaaaaatttccaacttccttaactgccattgtttaaaccttttcttgtctggttgcagttgtctaccacctctt

SEQ ID NO: 847058 - DNA, 120 bp, Artificial Sequence
  ENSG00000250241_85 (sequence is synthesized)
gtgtagtgctgaacaaattttggttagtgagaatctttgtattcctcctaatctcaggattaagtcttttaaaaattcattattaagaataagatttactttccaaaagttttcttttta

SEQ ID NO: 847059 - DNA, 120 bp, Artificial Sequence
  ENSG00000250241_86 (sequence is synthesized)
ataaataatgatttttgaataatatcaaatcatttaaaaatcgattgggataatattttcattgtttatgtaccaaaatctgtaactttcaaatgctaaacacacttagcatggatggaa

SEQ ID NO: 847060 - DNA, 120 bp, Artificial Sequence
  ENSG00000250241_87 (sequence is synthesized)
tagaacccacttggttgtgatgttatttttctctttcattgtttgattcaatttacagatattttctttagagtattaccatttgtgctaatgagagaggtggttctgtaatttttcttt

SEQ ID NO: 847061 - DNA, 120 bp, Artificial Sequence
  ENSG00000250241_88 (sequence is synthesized)
cttataatgcccttttcaggtttttgtttgcaatttgcgacatgttggaaatacttatttctttcgttgtcttctagaagagtttatataaaattgatgctatttccttcttcaatattt

SEQ ID NO: 847062 - DNA, 120 bp, Artificial Sequence
  ENSG00000250241_89 (sequence is synthesized)
ggatttgactagtggagctttttgtgcatgaagttttatttgtagaaagtgttagaaatggattcagtttctttaaacatgctagatctagtattctagtttttttctaagttgtgtttt

SEQ ID NO: 847063 - DNA, 120 bp, Artificial Sequence
  ENSG00000250241_90 (sequence is synthesized)
ccaaggcgtactaccatttcatttatattttcaaatttattaaagtttacaatattcttaggttatctcttaatctttacaggatctataatgttctcttcatttaaattgatattggtc

SEQ ID NO: 847064 - DNA, 120 bp, Artificial Sequence
  ENSG00000250240_0 (sequence is synthesized)
ggggccttctatcttcctaagagtgttctctgacagggctgttccctgcccagtgaaacaaaggaccaaagattttctcaaaaatgtttaaaaatttgacccatgtaacgcggacactcc

SEQ ID NO: 847065 - DNA, 120 bp, Artificial Sequence
  ENSG00000250240_1 (sequence is synthesized)
acactcacggaagtgggcagaagggggagggggaaaaaaaaggaaagaaaagcttcttcagcctcagcgcggagcagctgctcttccttacccagacgggacagtcgtggaccaccagct

SEQ ID NO: 847066 - DNA, 120 bp, Artificial Sequence
  ENSG00000250240_2 (sequence is synthesized)
tgacattcccaaacgcactggcctgatactcggtgaacaccggacgcgcgaccgtgctggccgcgttcagcaacaagctgctctcgtccccggagaccagagggcttctccccaggttca

SEQ ID NO: 847067 - DNA, 120 bp, Artificial Sequence
  ENSG00000250240_3 (sequence is synthesized)
atatggttcaaagaaatcttataactctctgaacaggacgtgtattcgtcaacactacttggagggccggtacttccaaggaagtcacctttgcagtcgatctatgtgcactgttctcag

SEQ ID NO: 847068 - DNA, 120 bp, Artificial Sequence
  ENSG00000250240_4 (sequence is synthesized)
agccagctcgcacccatgaagaacaacacaacttaccggtcataggagcagaaagtgtcaaccttgcagcaggatttggacactctgggagccaaactggatgtggaagctccaaaggtt

SEQ ID NO: 847069 - DNA, 120 bp, Artificial Sequence
  ENSG00000250240_5 (sequence is synthesized)
tacaaagtcctcttggagaagcagattcctgtgggaacctggttaaatctcccaagctagcagtgtttttactacaataagacagtgattaattgtgtcccactgggcactgtcctgata

SEQ ID NO: 847070 - DNA, 83 bp, Artificial Sequence
  ENSG00000250240_6 (sequence is synthesized)
cataatttataaagggaagaggtttaatggactcacaatcatggcagaaggtgaaggagcaaaggcatgtcttacatggtggc

SEQ ID NO: 847071 - DNA, 120 bp, Artificial Sequence
  ENSG00000250240_7 (sequence is synthesized)
gatcttcattctataactcgtgctccttgtcctaaattatgtactagaaaaaattgtaatcctcttactataactgtccatgaccctaattcaactcaataatattatggcatgtcatgg

SEQ ID NO: 847072 - DNA, 120 bp, Artificial Sequence
  ENSG00000250240_8 (sequence is synthesized)
gaattaagatttcatatcccaggatttaatgttggcactatgttcaccatccaaaaaaaaaatcctggtctcatggagcccatgcaagccaatccggcctttgactgctctaggtgaccc

SEQ ID NO: 847073 - DNA, 120 bp, Artificial Sequence
  ENSG00000250240_9 (sequence is synthesized)
tgttcctccaccattcttagtcataaaagatacactccaaaagttcgagaaaatctagataggcaccaacaggaacgagaaaataacatcccctggtatcaaaacatgttcaactggaac

SEQ ID NO: 847074 - DNA, 120 bp, Artificial Sequence
  ENSG00000250240_10 (sequence is synthesized)
aacatcccctggtatcaaaacatgttcaactggaacccctggctaactactttaatcagagttagctggacctctcctcatcatactattaactttaatttttgggccttgtatattaaa

SEQ ID NO: 847075 - DNA, 83 bp, Artificial Sequence
  ENSG00000250240_11 (sequence is synthesized)
ttataactgaggaatcaacgatttgattccccaaaaacacaagtggggaatgtaatgcccaacctggtttttactaactctgt

SEQ ID NO: 847076 - DNA, 77 bp, Artificial Sequence
  ENSG00000250240_12 (sequence is synthesized)
taactgaggaatcaacgatttgattccccaaaaacacaagtggggaatgtaatgcccaacctggtttttactaactt

SEQ ID NO: 847077 - DNA, 75 bp, Artificial Sequence
  ENSG00000250240_13 (sequence is synthesized)
tgataagatactgtggcaagctatatcagcagttcccaggaattcatctgattgataacgcccaaagccccggtt

SEQ ID NO: 847078 - DNA, 60 bp, Artificial Sequence
  ENSG00000250240_14 (sequence is synthesized)
tttatccttttaactttttgactactttacttctgtaaaattgttttaactaggcccccc

SEQ ID NO: 847079 - DNA, 75 bp, Artificial Sequence
  ENSG00000257294_0 (sequence is synthesized)
ggattttgttatctatttgggatccccagagattccatatgaatggatgaagttttgctctgtccccaagctgga

SEQ ID NO: 847080 - DNA, 78 bp, Artificial Sequence
  ENSG00000257294_1 (sequence is synthesized)
acttaatgatcattctttaacagccctttcttgatttgtgtgtttgtatgtgtgtgtgtgtgtgcgtgggtgtgaatg

SEQ ID NO: 847081 - DNA, 120 bp, Artificial Sequence
  ENSG00000257294_2 (sequence is synthesized)
tgtgtttgtatgtgtgtgtgtgtgtgcgtgggtgtgaatgtaatgcatgtagtggaggtgtttcttatatattatttttccttttccttttttcttatgtctattactactccattttat

SEQ ID NO: 847082 - DNA, 120 bp, Artificial Sequence
  ENSG00000257294_3 (sequence is synthesized)
ttatctcaaatttaatgtttgtaaggttcttgtcactaaccaatctatctttatagtttctctgtcagcagtttttttttataacagagttatttacttttttattcatgcttcttttca

SEQ ID NO: 847083 - DNA, 120 bp, Artificial Sequence
  ENSG00000257294_4 (sequence is synthesized)
ttcatcatcttttggtgtgtttctctctgtagtggatatcatgtttgctcatcgtttgaaatgtcttgttatatataacatttgtaagaaacatgttgaaattttatgctcacattttca

SEQ ID NO: 847084 - DNA, 120 bp, Artificial Sequence
  ENSG00000257294_5 (sequence is synthesized)
agctgcatttcaagctctttctcttggtctgtaataatcaatttataaggttatttcattcacaaactaaacttaaaaaattctgatatggcatgcttgttcatttgtatgtctggattc

SEQ ID NO: 847085 - DNA, 120 bp, Artificial Sequence
  ENSG00000257294_6 (sequence is synthesized)
atgcttgttcatttgtatgtctggattctggtcatacttactctttatttttatttgtacacataaattatacttcatgaatatatattttcattcattaagaataaataaaacattaat

SEQ ID NO: 847086 - DNA, 120 bp, Artificial Sequence
  ENSG00000250244_0 (sequence is synthesized)
cttcaggatgcctctgtccctctgtgagaagcagggttccacttcattatctccataatcaaacctggggctgcataagaagagcacaaccactctccaagtgatttaacaggatgcttt

SEQ ID NO: 847087 - DNA, 120 bp, Artificial Sequence
  ENSG00000250244_1 (sequence is synthesized)
cagatgagcaaagcaaggcttaaagagctaaggagactgtgggaatgaaggtttcgaagtggtctgaatggagaaagaagcggtgggagagctgagtcatcatgcagcacacggcaaggt

SEQ ID NO: 847088 - DNA, 120 bp, Artificial Sequence
  ENSG00000250244_2 (sequence is synthesized)
agcagaaaaccctggagaacaacagcagcctgccccagagtcagccgtgagcgctgatttagtttcaggaaaacaataacactttgtcccattaaattaatgttgttaatttgaagttta

SEQ ID NO: 847089 - DNA, 90 bp, Artificial Sequence
  ENSG00000257298_0 (sequence is synthesized)
taggctcctcaatctataatctgcttttattacccaagttttaaaagtcgtcttttcctcttctatgggcaaatatatattcccataaaa

SEQ ID NO: 847090 - DNA, 120 bp, Artificial Sequence
  ENSG00000257298_1 (sequence is synthesized)
tcttttcctcttctatgggcaaatatatattcccataaaaataagccaaaaaatgtttattaaaaatgcaaaacttattttaggtttgttagctgacttgttttaattgactagcttgct

SEQ ID NO: 847091 - DNA, 120 bp, Artificial Sequence
  ENSG00000257298_2 (sequence is synthesized)
aatgaggggctacttcactcgtttggattacccacacttctttagtgtctttctcctctagtgctcttttaagtagcagggttgtgtttcaaaagttttagcatttgagagaaactcaat

SEQ ID NO: 847092 - DNA, 120 bp, Artificial Sequence
  ENSG00000257298_3 (sequence is synthesized)
aaatagaatgagttttaaggtggtttgtgctgctcccaactcatgctcatatctgccgtgcttatacctctgactgtgagcatgattggtccacagataaaagttttactgcacacaaag

SEQ ID NO: 847093 - DNA, 120 bp, Artificial Sequence
  ENSG00000257298_4 (sequence is synthesized)
tatgaagaggaggggacatcagggagggtttggaacaaaaggaggaaaggggagaatccaggatttaaagagtggatttaaaaggtgagcaaggtgaaaaagataaaacatgaaaatttt

SEQ ID NO: 847094 - DNA, 120 bp, Artificial Sequence
  ENSG00000257298_5 (sequence is synthesized)
aaaggaggcagagatttatgagaagagtaaggtttattgaaaaggaacaaaaggtaaagaaagcagaaagagaaagcaagtccaggaagaatgggcggggtcatggtgattgaatctgta

SEQ ID NO: 847095 - DNA, 120 bp, Artificial Sequence
  ENSG00000257298_6 (sequence is synthesized)
catgtgctccgcatggctgtgttctggccttgaaggttggctgatgctgccatcagcactttctttgtcagtatctggagtctcacaaagtagcaaaccccacagggttactttcctctc

SEQ ID NO: 847096 - DNA, 120 bp, Artificial Sequence
  ENSG00000257298_7 (sequence is synthesized)
tgacagcaatgctgcctagatgtgagtgctcaggttgtggttggggatcaagaacggctagcaaatctaacttggtgatggattctgtgtaacccaggacctggggaaatacaggaacta

SEQ ID NO: 847097 - DNA, 120 bp, Artificial Sequence
  ENSG00000257298_8 (sequence is synthesized)
aaatctgttcttgtgactatttgaattctcaatgcagtcttgcatccctcgttcaactgcttggccagacttccttgtactgggtggggatccctccccactcaagttccacggggtgag

SEQ ID NO: 847098 - DNA, 120 bp, Artificial Sequence
  ENSG00000257298_9 (sequence is synthesized)
cggatgagtggtgtgtgaaagggcacacctcacttaggtctcctttggcaccagggagaggaaacagaggtaaagctgtctctgtctctgcctcagacccatgcctactcctttggcact

SEQ ID NO: 847099 - DNA, 120 bp, Artificial Sequence
  ENSG00000257298_10 (sequence is synthesized)
ggtcactcagcagtagaatagtagtatagtagtagacggccctatctgcatagtcacacacctcgggttttgagcattgtgtaatgaccagagtaaactggcctggctgtttgcctctgg

SEQ ID NO: 847100 - DNA, 120 bp, Artificial Sequence
  ENSG00000257298_11 (sequence is synthesized)
tccacagctcagatgatcatggtgtacagagcctggtggaacccagttacatctccactgttatttaagggcaatttatttgctcttcctcagagttcccctttacagtctgcaggcaaa

SEQ ID NO: 847101 - DNA, 120 bp, Artificial Sequence
  ENSG00000257298_12 (sequence is synthesized)
tatacagatactttagtaaatgtttataggaagacctgctggcagaactggtctcatggctgcagactatgaacagaagttgtttctccactttgggaaattacatacagctaagaataa

SEQ ID NO: 847102 - DNA, 120 bp, Artificial Sequence
  ENSG00000257298_13 (sequence is synthesized)
acttgttcactcagaatagatttttggatcccacacatcctggaaaaaactgtttcttagtgcctgtctgttattgaaaagaggacatctaaggtagagattcaattcatttcaaatttt

SEQ ID NO: 847103 - DNA, 120 bp, Artificial Sequence
  ENSG00000257298_14 (sequence is synthesized)
agcttaataaagtaaaaagaaatgatagaggtctttaaggattctgtacactttgaacactggccacagagcttacttggtaagacttggtaccaatgaagttacaggttcattctcaaa

SEQ ID NO: 847104 - DNA, 120 bp, Artificial Sequence
  ENSG00000257298_15 (sequence is synthesized)
ccctgtgagaagtatcaggcctttctacttcaagagactcagagatctcttaggctttatgtcctcccatttgaaagaaatcatcccctaaacgttcccagaggagaggatagggaagga

SEQ ID NO: 847105 - DNA, 120 bp, Artificial Sequence
  ENSG00000257298_16 (sequence is synthesized)
agaggcaaggagatgtgactggccctagggaacaactgtctgccctcactgtgtacgggacaaccaagtcccaggcctcctcacagcgttttgctgatgaatgttgagagagaacatggc

SEQ ID NO: 847106 - DNA, 120 bp, Artificial Sequence
  ENSG00000257298_17 (sequence is synthesized)
actctacgtgagagggcagcacacactgcactgcccctctcggtaccctgccagctgttcctccccctgaagacacagtgggaggttttatgctggcttgcaaagctgtcaaaattatgc

SEQ ID NO: 847107 - DNA, 120 bp, Artificial Sequence
  ENSG00000257298_18 (sequence is synthesized)
tagaagagtgtctagaatcttttctcactcactcactattactgccttttcagaggactgtcctttcttctctgtgtagagcactctatttaagatatgaatattccccaaaatgctttc

SEQ ID NO: 847108 - DNA, 120 bp, Artificial Sequence
  ENSG00000257298_19 (sequence is synthesized)
atagagtttcacagaaaattagaggaagggttaaggctgcacagggctggcccaaccatttgctgtgtggtgaagaatttcagtttcattacctagatattttacacaaattggaaggaa

SEQ ID NO: 847109 - DNA, 120 bp, Artificial Sequence
  ENSG00000257298_20 (sequence is synthesized)
tgaaaggcattttgtggtattctgaggaatagaggcttgacgtcaatacagaattttcatcttctttcactatgtctaaaggctagttaacatcaatgtctgttgtcagctgctcccccc

SEQ ID NO: 847110 - DNA, 120 bp, Artificial Sequence
  ENSG00000257298_21 (sequence is synthesized)
tacctcccacacacaccacaactggggcctttattagagtaaaaaatatatgagacaagagggtaaaagaatgtaaatgaagccatgcaaatttgttagaaaaacagctttaagtagatg

SEQ ID NO: 847111 - DNA, 120 bp, Artificial Sequence
  ENSG00000257298_22 (sequence is synthesized)
gtaatcaacagagggtctgtaatatccctcaaacgggaaagacagtatttatgaacatcaattatttatagattacctcattcactctagaatatcctgaagatattatctacacatttt

SEQ ID NO: 847112 - DNA, 120 bp, Artificial Sequence
  ENSG00000257298_23 (sequence is synthesized)
tatttgaaacaaagggaagaccatagtttgttcaaattgctgtcgtgggattaatttcatttgggttagcatctgctctcctccccaaagagtttcccttggctgtggaaatttaacatt

SEQ ID NO: 847113 - DNA, 120 bp, Artificial Sequence
  ENSG00000257298_24 (sequence is synthesized)
ccaggacaatttagaaaatgctctcttggtttgtgagtcaggagttctgagtttgtgcagtgagcaggtctatgcagacctacccacaaaggctgagggagctgaaaagccaaagaaaga

SEQ ID NO: 847114 - DNA, 120 bp, Artificial Sequence
  ENSG00000257298_25 (sequence is synthesized)
cagtttctcagaaagaaacatttaataagagcttatgaacagaagtgatgtctaggaggccatgagacagtggatccctgcaccagccctccagaaaatatcctttatatagcaaggttt

SEQ ID NO: 847115 - DNA, 120 bp, Artificial Sequence
  ENSG00000257298_26 (sequence is synthesized)
atagcaaggttttaggataaaacatgtgcagctagtcacgcttgactttcttgcaaaacttatcactggagcgattggataagcatctttatgaggggttgtctatgctctgggcactac

SEQ ID NO: 847116 - DNA, 120 bp, Artificial Sequence
  ENSG00000257298_27 (sequence is synthesized)
ccctttatgagggataatctatgctacaggcattgtttaaagactttgctgcagaacaaaccaccttggtatgcaggagtcaaaccaccagttagcatggtggtttcactccaagatggc

SEQ ID NO: 847117 - DNA, 120 bp, Artificial Sequence
  ENSG00000257298_28 (sequence is synthesized)
atcactcctgccatgcaacaggctgttttcctacagttttaattctatttctgttattgactatgtgaactttgataagacctggtgtttaactttctacttggtaggggcaaaatggtg

SEQ ID NO: 847118 - DNA, 120 bp, Artificial Sequence
  ENSG00000257298_29 (sequence is synthesized)
ggagaaggggaatgaaaaaaaaaatctcttactaactgaaaaaatatactgtgaagataaaaaatgtctaacattgtcgtattggcagtgttttaaacatggctgtgccaagtctgagca

SEQ ID NO: 847119 - DNA, 120 bp, Artificial Sequence
  ENSG00000257298_30 (sequence is synthesized)
tgccatgaaggcatgggcaggatgtatgccaggcctgtgataatggtagagatttttaggcactgactatgcttcctgttgtctgaatagacatgggggcaattacagaaaagtggctga

SEQ ID NO: 847120 - DNA, 120 bp, Artificial Sequence
  ENSG00000257298_31 (sequence is synthesized)
gagcccaggacatagaaaataaaggggaggcacagccgcagccgctgtgagttggcattttaccatgtcgggaccctcttgtctttatgaaactagaaggggcccttaggcagctgctgc

SEQ ID NO: 847121 - DNA, 120 bp, Artificial Sequence
  ENSG00000257298_32 (sequence is synthesized)
tgcataaaccttaaataatattgaaaagggttgatgtgagaaatgaataggaataatgggactctgataggtctggctagttagaagctcaaggttagtcaattatgtgagctagcaatc

SEQ ID NO: 847122 - DNA, 120 bp, Artificial Sequence
  ENSG00000257298_33 (sequence is synthesized)
tattaacttgatgttaaggaggaagacagactttttgctccatgtgggtgaaggctctattaaagagagagccgatgtgggtcaggtgtgggaggtagtaagccactaaagaattgttaa

SEQ ID NO: 847123 - DNA, 120 bp, Artificial Sequence
  ENSG00000257298_34 (sequence is synthesized)
tgagacactccttgtgtgggtgaaggctcataaaagctcgctctcctgagctgggatatgttccagcctcaggtagatacgagtgaggctgattttgccatgattagcagagttacttaa

SEQ ID NO: 847124 - DNA, 120 bp, Artificial Sequence
  ENSG00000256166_0 (sequence is synthesized)
tgaaggacattacccatcctgataggatgtgatcttcaagataaaacccagctgcaccctcaagagaccattccactgctctatcagctggcagcgtgtgtgatgcagtatggggtagaa

SEQ ID NO: 847125 - DNA, 120 bp, Artificial Sequence
  ENSG00000256166_1 (sequence is synthesized)
ccaggagatctcatggtcgtgtgcccactaccagacagcgttcgctataaacccaagcagcttcctagcccagtagtcctggatctgccacttgctaactagaaggtgtcatctgcagaa

SEQ ID NO: 847126 - DNA, 120 bp, Artificial Sequence
  ENSG00000256166_2 (sequence is synthesized)
ctgactgtaagaaaccttcagataaggtcctcagagatcctgtgtgggaaccagaaggtattctgtgaaaaacgacaataagaataaccataataacaataatggctgcatttaaaaggc

SEQ ID NO: 847127 - DNA, 120 bp, Artificial Sequence
  ENSG00000256166_3 (sequence is synthesized)
tcttgctatatttcaggcactggtttttgtacctacatggattattttgttcaatatttatcacaaccatatgagaaggatgttattatccacaataaataaatgaaatctgtaaactgt

SEQ ID NO: 847128 - DNA, 120 bp, Artificial Sequence
  ENSG00000255580_0 (sequence is synthesized)
gtccactgatcattgcatcagttcaactaggaagtctgaagaatgccttcattcactaatgggaaaagcatgatgatttcaagctgacctacagaactttgtgcatcacctacaacattg

SEQ ID NO: 847129 - DNA, 120 bp, Artificial Sequence
  ENSG00000255580_1 (sequence is synthesized)
gcaagggtggctgagaagaaagctctccaatacttgaaattattttcaagtcacttgcaaataatctgcttactgggaggaaggaaacagcagaacgcttctgagaggtctggtgtgttc

SEQ ID NO: 847130 - DNA, 120 bp, Artificial Sequence
  ENSG00000255580_2 (sequence is synthesized)
caatcacctatagagagaaaccacaggactaaaaataaatgaataaataaaaatgcccaggagttacagcaagtatgcatctttttgttaaattttctttcatgatgacacaaaacaagg

SEQ ID NO: 847131 - DNA, 120 bp, Artificial Sequence
  ENSG00000255580_3 (sequence is synthesized)
tctagaaataagctgataataatcgccaaagctcagtagtcattcaaaatgggcaacagtaataattcatatacctaggcctatctttaagttccattattcaagaaggaaactagtatt

SEQ ID NO: 847132 - DNA, 120 bp, Artificial Sequence
  ENSG00000255580_4 (sequence is synthesized)
ctcactttatttttttctgaatgaatctagaaaatactttatagataagaatatgtccactcttgcaaaagataccagtggcaagcttcagtgtgaaagagacaagtatccatgtgtcag

SEQ ID NO: 847133 - DNA, 120 bp, Artificial Sequence
  ENSG00000255580_5 (sequence is synthesized)
atgacagagttgccactgatttattagcaaattgaacttttgctttaagagaaaaaaacttctcaaaatctgtatctgataaattaacccagtccttcatgaacaccatttcaaaaagac

SEQ ID NO: 847134 - DNA, 120 bp, Artificial Sequence
  ENSG00000253538_0 (sequence is synthesized)
tgagaagaacagagttaaagaatatagtcccatgggaaaagaagcccatcattgactgataaaccaaggagattctatttgctttacagaaggagctactgaaaggctagctgtggttta

SEQ ID NO: 847135 - DNA, 120 bp, Artificial Sequence
  ENSG00000253538_1 (sequence is synthesized)
agcagcacttgaatgctgaccttgaaataaaaagcactgtgctctgtgtggaattcaagtagagatatttccatataacctgatgttacttatatattttgtctattttaaccagcgaga

SEQ ID NO: 847136 - DNA, 120 bp, Artificial Sequence
  ENSG00000253538_2 (sequence is synthesized)
aagaatgagagagaaagcattaataagagctatgtagaagaggtggcatagagcctgaaaggacttggaaggatgattctaattgcaaacagttcaaataaagatattttggcaaatctg

SEQ ID NO: 847137 - DNA, 120 bp, Artificial Sequence
  ENSG00000253539_0 (sequence is synthesized)
aacattccatgcatctgacactcagtgggcttggccatgtcctgggcattattctgacctttaaataacaagctcttcaatattctggaaataatttaaaagcacggaaataataagtgc

SEQ ID NO: 847138 - DNA, 120 bp, Artificial Sequence
  ENSG00000253539_1 (sequence is synthesized)
cacagtataatagcaaacatccaatacaacctcaaccatattcatgtccatcttcattctctccctcctatctcaaggaggaaactattgtggtacattgcaaatggccacaaattctct

SEQ ID NO: 847139 - DNA, 120 bp, Artificial Sequence
  ENSG00000253539_2 (sequence is synthesized)
aaccttgtggcttgctctgcgcaacagaatgtagcggaagtgatgctgggtgaattctgagcccaggttcaataggccttggagtctctgctctcattctcctgggacagtgttaccagg

SEQ ID NO: 847140 - DNA, 120 bp, Artificial Sequence
  ENSG00000253539_3 (sequence is synthesized)
tgaagaagcttggctagcttgttggtgagatcacgtggatgagaaccaagacacctggcaaacagcctgctgaccactaaatatgtgggtgaggccattgtagaccacccagccctgaat

SEQ ID NO: 847141 - DNA, 120 bp, Artificial Sequence
  ENSG00000253539_4 (sequence is synthesized)
gacctccagctgacttcagcctcctaagtgagaccaggtgagacccacagaagaaccttttgagtgcacctagatgtctgaccaacagactcacgagctaataaatggtttttaagtcaa

SEQ ID NO: 847142 - DNA, 120 bp, Artificial Sequence
  ENSG00000253530_0 (sequence is synthesized)
ctctctcctggcacttcttgtgcaggtccgccagtcaaatccagcagactgcaaaaatactagactttctccactgaagagtcaggtaatgccagaagagtattatggcacagcaatact

SEQ ID NO: 847143 - DNA, 120 bp, Artificial Sequence
  ENSG00000253530_1 (sequence is synthesized)
cctcagagcaaacgttggcttttcagctaacttagaagttccctggaaaatgcttcttaagccttagagaagagagacagtctttttcatataacatagccaaaccaagggcgtgacact

SEQ ID NO: 847144 - DNA, 120 bp, Artificial Sequence
  ENSG00000253530_2 (sequence is synthesized)
gagtgatcagcatatcttgggagcacagtagacacaggttaaggagatcccctgcctgcagtgtcccaatcaaatcataggaacactgtgagactctggggtgagcttgcatttgcagac

SEQ ID NO: 847145 - DNA, 120 bp, Artificial Sequence
  ENSG00000253530_3 (sequence is synthesized)
aggaactgaagggctggagaggttacactcacccaggtgcagttgcccagcatgtgaaagaggagacattctaaaccctgcacttaaaaaataaataaataaataaagttacagactgtc

SEQ ID NO: 847146 - DNA, 120 bp, Artificial Sequence
  ENSG00000253530_4 (sequence is synthesized)
ttcacctagcccatggccaagtcagggtctctgaagaacccccacgaaaagtgccaactggaagagccaacatttggatcttaccatttggaaggctttcaacagtcaagagagcatcac

SEQ ID NO: 847147 - DNA, 120 bp, Artificial Sequence
  ENSG00000253532_0 (sequence is synthesized)
agcctcagcctcccgagtggctgggtgggactacaggtgcacgacactgagtgtggctgataaattttgttttgttttgtttttggttgaggtgggggtctcactttgttgcagtaggct

SEQ ID NO: 847148 - DNA, 88 bp, Artificial Sequence
  ENSG00000253532_1 (sequence is synthesized)
cctcccaaagtgctgggattacaggtttaagtcaccgatcctggcccctatgaattttacacccggacagttcatgttgctcaggctg

SEQ ID NO: 847149 - DNA, 120 bp, Artificial Sequence
  ENSG00000253532_2 (sequence is synthesized)
gctcctggcccctatgaaatttttaaaaagtaatttttttttctaaatttcatgatgcctcttttgtttatattgctataattatattaaaggactttgatggagtttgtctttacaaag

SEQ ID NO: 847150 - DNA, 120 bp, Artificial Sequence
  ENSG00000253532_3 (sequence is synthesized)
gtggcataaattaaagagtagttggaatctaaatctttggtctgccagtttgtaaccaaataaaatttcttggctataattttttcagctgtacaacaggaaaggtataacatatcttac

SEQ ID NO: 847151 - DNA, 120 bp, Artificial Sequence
  ENSG00000253535_0 (sequence is synthesized)
aaaggtgccacagaggagacaaatattttccctgagccctctctcccaatatattggaaaaaatacaagggatacactactgttatgggaccctgtcttagtcaagtggaattagaaggg

SEQ ID NO: 847152 - DNA, 120 bp, Artificial Sequence
  ENSG00000253535_1 (sequence is synthesized)
agctcttgacctgcccagtgatgcaagatcaacaagacaatcagtaagaaacgtacaaacattaagaagagcctattcagaaaagacagtcttccagttaccttataaaggcaaggaaga

SEQ ID NO: 847153 - DNA, 120 bp, Artificial Sequence
  ENSG00000253535_2 (sequence is synthesized)
atgcaatcatttacatcttcaccccgcaaacacctgtcacatccttttaaatatttgtttttccttttcctaggatgaaatcccataagtcaattttttctcgggattgtgaagttcact

SEQ ID NO: 847154 - DNA, 120 bp, Artificial Sequence
  ENSG00000253535_3 (sequence is synthesized)
gcacacaaccagccttattttacatctctttcttttatttcaaccatctggggactgggcagaagtcatggtcagaggggcacatatgtattgctttgatgatgggggcagagaacaaac

SEQ ID NO: 847155 - DNA, 120 bp, Artificial Sequence
  ENSG00000253535_4 (sequence is synthesized)
gaacaagtggggagaaatcttaacatcatgcacaagggcaacgggtcccagtaacatctttaacgttatgggccttagtcagggctgctttgtccccactctacacagaagagcctaaaa

SEQ ID NO: 847156 - DNA, 120 bp, Artificial Sequence
  ENSG00000253535_5 (sequence is synthesized)
agaatactacaagataaagtgaagaagagattgcagaactaacaacagcgctggggccacagagacggggtttcactacgttgcccaggttggtctggaactccaggactcactcaatct

SEQ ID NO: 847157 - DNA, 86 bp, Artificial Sequence
  ENSG00000253535_6 (sequence is synthesized)
tgggattacaggcgtgagccaccgtgcctactcgaatgaggtttttggcattgtgctcgggctgctctttggacaccagagccagg

SEQ ID NO: 847158 - DNA, 120 bp, Artificial Sequence
  ENSG00000253535_7 (sequence is synthesized)
tacctgtgtctgaatggtcatttcatccatctgccagcgtctgcaggacagagccagcaggtggtgccctgtgtgaggaatgctgcaacagattgtgacaaaaccctcgagaatgaaagt

SEQ ID NO: 847159 - DNA, 120 bp, Artificial Sequence
  ENSG00000253535_8 (sequence is synthesized)
agaaagaataagggcgtcctctgagacccatagggcaacatggaaacttgacagcagctgcctgcagaatgcacataaggtttttggcattgtgcttgcactgaataaaagcaagcagct

SEQ ID NO: 847160 - DNA, 120 bp, Artificial Sequence
  ENSG00000230002_0 (sequence is synthesized)
tgggcaattggttgtcttagcaccatttgtatatatgctgccaaagtgagcactatcctagcatcatttgtttaaaattacatagttttctcagtgatctgtgtttccctatttttaaaa

SEQ ID NO: 847161 - DNA, 120 bp, Artificial Sequence
  ENSG00000230002_1 (sequence is synthesized)
attattttcttgcgttcatatttccagatccctcagcaagcaagttgccttcctttgggtagactctggtttgtctgtgtttttcttaaaataaggtgtcctgaattagatgaaacacaa

SEQ ID NO: 847162 - DNA, 120 bp, Artificial Sequence
  ENSG00000230002_2 (sequence is synthesized)
tttcacttctgatctgaccagcatgaagtatattcagtaattctctttctgtcaatgtactgtgagatctttaatggtcacagcataattgggcattaaaaaaaaccatgtactgctttc

SEQ ID NO: 847163 - DNA, 120 bp, Artificial Sequence
  ENSG00000230002_3 (sequence is synthesized)
aaaacttaaagctgtaggaaaaaagcaaagcaaaacaaaccaaacaaaaaccatgaactgctgccaagattcctattctcatttcttgtatctatataatacttttttaaaaatcttctt

SEQ ID NO: 847164 - DNA, 72 bp, Artificial Sequence
  ENSG00000230002_4 (sequence is synthesized)
taatacttttttaaaaatcttcttatttttgagacagagtctcactttatacatcccaggagaattgcttga

SEQ ID NO: 847165 - DNA, 83 bp, Artificial Sequence
  ENSG00000230002_5 (sequence is synthesized)
gtctaaaacttttgaataagattactctcacacctattttgagtacttcactatactgtcattcaaccatcttgtgtttcacc

SEQ ID NO: 847166 - DNA, 120 bp, Artificial Sequence
  ENSG00000230002_6 (sequence is synthesized)
tacttcactatactgtcattcaaccatcttgtgtttcaccatcttatgattgacttttttcagtctattaactgagtagttgcgaaatagtgtttgtctagatatgccttgtccttaggg

SEQ ID NO: 847167 - DNA, 120 bp, Artificial Sequence
  ENSG00000230002_7 (sequence is synthesized)
aacccatattggccacactgtgtacggttttggaccttttatttttttaacttaaatatattaggatttccctttaaaacttctctaaaagcataatttcacaggtatgtaatatcccat

SEQ ID NO: 847168 - DNA, 120 bp, Artificial Sequence
  ENSG00000230002_8 (sequence is synthesized)
catattgaatgcctgatatgcgccatcctcatctatagcctgaggacacaccactgaacaaaatagacaaacatttcttcatcatgagcttacattaaggaagagtatatgaataacaac

SEQ ID NO: 847169 - DNA, 120 bp, Artificial Sequence
  ENSG00000230002_9 (sequence is synthesized)
caaacaagtaaaataaatgtcagatggtgggataagagccagggagacaaagcagaatggtcaacacagaacctgagaaagaggtattgaattaaatatctgagtaaggtgagaaagtaa

SEQ ID NO: 847170 - DNA, 120 bp, Artificial Sequence
  ENSG00000230002_10 (sequence is synthesized)
ggcagttaacagtgacaagagcattccagacagaaatagcatgcacacagttgctgaggtaaagtgtgtgaaaggaaagggagtgttaaaggaaagggaggaggccagtgtgtttggaga

SEQ ID NO: 847171 - DNA, 120 bp, Artificial Sequence
  ENSG00000230002_11 (sequence is synthesized)
gtgagagtgaaagggagaagactagattgtggaaggcagtggttcttgacgggtagtaaatgcctcccaaagagatattttggaaaattatgtgatttttcttgggtcatcactgtaatt

SEQ ID NO: 847172 - DNA, 120 bp, Artificial Sequence
  ENSG00000230002_12 (sequence is synthesized)
ggggattgtttctggaatgcagtagataggtgtcaggtatgttactatttctataatgtacaagacagttccacacaatgaagagttgtcccttgtcacatacagcttttgaatgtccct

SEQ ID NO: 847173 - DNA, 120 bp, Artificial Sequence
  ENSG00000230002_13 (sequence is synthesized)
gtagatattaatgttgatgaaaaacctgttataaattacttcagtgtttgtcatgttttaaatgattttttttttagtatagggtgtttcttctgttttttctttctttcatgactgaca

SEQ ID NO: 847174 - DNA, 120 bp, Artificial Sequence
  ENSG00000230002_14 (sequence is synthesized)
tttttgaagagtacaacctagttactttgcagatttccctcaaattgaatttatctggtgttttatcatgatttgattcagatttgatttttatgtaggaaagccacagaagtgatgtgc

SEQ ID NO: 847175 - DNA, 120 bp, Artificial Sequence
  ENSG00000230002_15 (sequence is synthesized)
ttttcatgcttgtcaggaggcacattatgttgatttgtctcaatacttgtaatgttaactcataccacttagttaaggtggtatctgctggtttgtgtgttttacatattaattaataag

SEQ ID NO: 847176 - DNA, 120 bp, Artificial Sequence
  ENSG00000230002_16 (sequence is synthesized)
ttaataaatattagggagagattctttgagactgtaaatatctctagtttaggatctagtgtttatacttgcctgaataatttattaataaaatagctttaatttggttattgaaaaaaa

SEQ ID NO: 847177 - DNA, 120 bp, Artificial Sequence
  ENSG00000230001_0 (sequence is synthesized)
acattcttgtggctctcttgaaattctcagggtgacttttaaaatgatatattaggaaaatgctttaaaattataaaaccaccttaataatttttctcccaaagaatgaaaatggcaaat

SEQ ID NO: 847178 - DNA, 120 bp, Artificial Sequence
  ENSG00000230001_1 (sequence is synthesized)
tagaaattgtgtgtttcaaggaggatggcaaagggaaaagatcattttggaatgttgaaagtgttcctctgtaccttgaaaaatcgggagagagagagagagagactgcaaggttttgat

SEQ ID NO: 847179 - DNA, 120 bp, Artificial Sequence
  ENSG00000230001_2 (sequence is synthesized)
cattggcccaatggttacataacagttatctgctgggacatttcccatacatcatacctctgaaatgtgtctataggcatttgaagcccatgcctcccaacgttgcattgtctccttagt

SEQ ID NO: 847180 - DNA, 120 bp, Artificial Sequence
  ENSG00000230001_3 (sequence is synthesized)
taaattcaaggactactttgtgataattgctaattcctgagtggtaacttctagtgtattagttcaaactgaaagatcttacagatctttttgcataacattggtcaaagcatcataaac

SEQ ID NO: 847181 - DNA, 120 bp, Artificial Sequence
  ENSG00000230001_4 (sequence is synthesized)
aagttttaaaggaagaaaaaagacttcagtggtgaaaggaaaaaataatgacaaagctgtttcctgtgagggtacatgtgcatatttctgagtgctaacatacaggtacataaagcaggg

SEQ ID NO: 847182 - DNA, 120 bp, Artificial Sequence
  ENSG00000230000_0 (sequence is synthesized)
tggacctccagccacggccgggccagactcgtggacacaggcgcagtgtcacgtacagaccacggggagacatggcactaggggacaaatggacgtgacaccacaatgcacagggcaggc

SEQ ID NO: 847183 - DNA, 120 bp, Artificial Sequence
  ENSG00000230000_1 (sequence is synthesized)
cacagagctcgagggacgtgggcaggggccttttggcatttctgcgctggaatcatgtgagacaagggtggtggccgctctggaggtgcctggggggttccctcattacccctctgggct

SEQ ID NO: 847184 - DNA, 120 bp, Artificial Sequence
  ENSG00000230000_2 (sequence is synthesized)
tagtccatcctccacactgttgtgcagcttctccacctcctggtagaggataaatactgttacccttatccctggtcacatccagggagacgcggtccagcggcccaggcgggggacagt

SEQ ID NO: 847185 - DNA, 120 bp, Artificial Sequence
  ENSG00000230000_3 (sequence is synthesized)
gccgttctagaggtccttgagcccctccttcctcaggatctgcagccataggccggtgtgttccgcgtttgtgctgctccaggccccgcatccggtctcgatcccatccagaggagcgtt

SEQ ID NO: 847186 - DNA, 120 bp, Artificial Sequence
  ENSG00000230000_4 (sequence is synthesized)
tcccaagacactggctgcgcccacaatggctccgaagaccccagcgaccagcgggtccatgggcttgctggggttgtcccctcggtaccagctgtgcagggaggtcaggaggagaagcag

SEQ ID NO: 847187 - DNA, 120 bp, Artificial Sequence
  ENSG00000230000_5 (sequence is synthesized)
acggcctggttccagccctgctttagcgtgggtgccatgaggccccggtgagtccccttgttctcgcacaatctctctaacctggtgggagactcctctgcactggaggtctgggaaggt

SEQ ID NO: 847188 - DNA, 120 bp, Artificial Sequence
  ENSG00000230000_6 (sequence is synthesized)
ctggccgtggatgaacttcaccttgatggtgtccatggaacatacgaccaccatggcctcggccacgccagcgccctggccgcaccgcagccagcgctgccgtcaggccgtccctgggca

SEQ ID NO: 847189 - DNA, 120 bp, Artificial Sequence
  ENSG00000230000_7 (sequence is synthesized)
tcccgcgtctggctgctgtggaactggaacattcagaacccaacgccgccctggagacaagagccgcagagcagggagccgaggccgcggtgccggcccgggacgccatgaccgcgacag

SEQ ID NO: 847190 - DNA, 120 bp, Artificial Sequence
  ENSG00000230000_8 (sequence is synthesized)
tgcgcacgcgggatccatgcgcggtgcccggctggtgccagcgctcgtccggctgcagctacgacctcccgcgctccgtggggagcggacgcccatttcaatgccgccggccaggccgcc

SEQ ID NO: 847191 - DNA, 120 bp, Artificial Sequence
  ENSG00000230000_9 (sequence is synthesized)
ggtgtcgccttccccggagcctccgctgggccttcccggacgcggcgcggcgtggccacggcgggcgggaggcgggcgcccgctgtgatctgaagtcccagcctcctaaactccgcactg

SEQ ID NO: 847192 - DNA, 120 bp, Artificial Sequence
  ENSG00000230000_10 (sequence is synthesized)
ggaccttaatttggttttaacacaaatgaagatctcactaaagataaaaagggatgtcttggcttctaatttttgttaaaagcaatagcatatgttgtataggatagtgcattggggtaa

SEQ ID NO: 847193 - DNA, 120 bp, Artificial Sequence
  ENSG00000230000_11 (sequence is synthesized)
atcttttttttattatttttattttttcatcagcccactgacattgaaaggggataggttttaggttattgacgagcagttttctctcagataactgccttagtataggggtttgtggtc

SEQ ID NO: 847194 - DNA, 120 bp, Artificial Sequence
  ENSG00000230000_12 (sequence is synthesized)
atgttgatgagagggtaggctggggttaaaagtcgttatggcagtaacaaccttctgaggaccaggaaattcaaatccctctcatgatactttgctaatatctcccgagtttgctgtgcc

SEQ ID NO: 847195 - DNA, 120 bp, Artificial Sequence
  ENSG00000230000_13 (sequence is synthesized)
ttccctttgtgcctcttcccacacgtggtttcttgcacttggcccagctatattccactgttttgactccatgcttcttagcctggtggcagtggtgagggagtgaggagatctctaatg

SEQ ID NO: 847196 - DNA, 120 bp, Artificial Sequence
  ENSG00000230000_14 (sequence is synthesized)
ttctgaggaagcctcagacttagcactgtgaactggggtgtggggttactgaccgttgaagagtttcctgcccatcctgtacatgcaatgccaggacaagagcacattcctgtccctcct

SEQ ID NO: 847197 - DNA, 120 bp, Artificial Sequence
  ENSG00000230000_15 (sequence is synthesized)
tgtccatggtaggggaaacgtgctccttctccatgctcttaactcccagttgaagtgggccttgaacagtgccctgtaaattaatggtttcttttctttatgggagatgcatctgtgcag

SEQ ID NO: 847198 - DNA, 120 bp, Artificial Sequence
  ENSG00000230000_16 (sequence is synthesized)
aaatgcgggtgttggccttgttccttcaccctcagttccatgagcttttccccagtgccctttggctcaggtttggatgctctttctctgcagattaggcctcatgttatataggagaga

SEQ ID NO: 847199 - DNA, 120 bp, Artificial Sequence
  ENSG00000230000_17 (sequence is synthesized)
tgtgagggctgtgtctccagagttgcagtagtggatgggatagtggtccctccccatcagcactgtgggacgtttaaagtattgctgtgtgtttcaagtggaggaggtcatattacaact

SEQ ID NO: 847200 - DNA, 120 bp, Artificial Sequence
  ENSG00000230000_18 (sequence is synthesized)
gacatttgtccttgactactggacatatcacaccagccctgattgcagttatacttgaagccagatctacccttaacgtatattcattttactattcaataaatattaacttatcatgaa

SEQ ID NO: 847201 - DNA, 120 bp, Artificial Sequence; identical to SEQ ID NO: 832045
  ENSG00000230000_19 (sequence is synthesized)

SEQ ID NO: 847202 - DNA, 120 bp, Artificial Sequence; identical to SEQ ID NO: 832046
  ENSG00000230000_20 (sequence is synthesized)

SEQ ID NO: 847203 - DNA, 120 bp, Artificial Sequence; identical to SEQ ID NO: 832047
  ENSG00000230000_21 (sequence is synthesized)

SEQ ID NO: 847204 - DNA, 120 bp, Artificial Sequence; identical to SEQ ID NO: 832048
  ENSG00000230000_22 (sequence is synthesized)

SEQ ID NO: 847205 - DNA, 120 bp, Artificial Sequence
  ENSG00000230005_0 (sequence is synthesized)
ttcattgcatagagaaaacaatcctgcagacaagcgttttcccttctcataaccccacctaaccttatagcgttctacagaactgagtagtaacacgtacgcgtactaacttattgtgcg

SEQ ID NO: 847206 - DNA, 120 bp, Artificial Sequence
  ENSG00000230005_1 (sequence is synthesized)
tatgtagttttacatagctgcaagcaatgaaggtgtcctatcatgttttcacatctacatttatcagtacagtttggaaagtcttggatgatagatttgaacgaatcctcatggaacatg

SEQ ID NO: 847207 - DNA, 120 bp, Artificial Sequence
  ENSG00000230005_2 (sequence is synthesized)
cagcccaactgtctcatcgtacagataatgtaaggttaagaaaacaagagggccttgtgcaagatccaggcacgagtgcaggactctgccagggccagagccaggccggggatgcctcac

SEQ ID NO: 847208 - DNA, 120 bp, Artificial Sequence
  ENSG00000230005_3 (sequence is synthesized)
caaggttctgacagcagagaaaggtccaagggtagggtggcatttctcccacttctctcacagaatttcactgtaacgtgactttacttatacaaacaggacagccagccagtgtaatcc

SEQ ID NO: 847209 - DNA, 120 bp, Artificial Sequence
  ENSG00000230005_4 (sequence is synthesized)
ccccagacatcaaaaagtgtgggctttccatggcacagctagaggctgtggggtcctcctcattctggcagcacgttcatgagtcctgctatgtgccaaattatctgctgggcaccacct

SEQ ID NO: 847210 - DNA, 120 bp, Artificial Sequence
  ENSG00000230005_5 (sequence is synthesized)
accctgatccgtccctggttcctgcagctcatgcagttacactcttaagagccaggtctttcatgtaactgctgcactggacaccatgcccccaacacaagtctagacaagacacactga

SEQ ID NO: 847211 - DNA, 120 bp, Artificial Sequence
  ENSG00000230005_6 (sequence is synthesized)
aaagccacacctgcattggaagagcttgcatcaaatgggaccttaattgtatgaggacacagccatctgagaacgcacaatatgtcgtcacacgcagaccacagggtgtgcaaccactgc

SEQ ID NO: 847212 - DNA, 120 bp, Artificial Sequence
  ENSG00000230005_7 (sequence is synthesized)
ggctgcctggctaggtccccagtccacagaatacccatgtggccacagatggagccccacccaccttctcccacacctgtcctccttctggggcatggcactcagcacatggagggtgcc

SEQ ID NO: 847213 - DNA, 120 bp, Artificial Sequence
  ENSG00000230005_8 (sequence is synthesized)
gcctgctcatctggctggaagtcatgagaggggaagggccccatttcattaattaccctccttggcaacaacctgtcactgagtgaatgggatggatgtttggggctttcagatgtctgt

SEQ ID NO: 847214 - DNA, 120 bp, Artificial Sequence
  ENSG00000230005_9 (sequence is synthesized)
gcagctgggcccctggggcatggctgaggtggcagccttgactgaatgccctgtgactggacagatttggtcccagccaggctaatcaatgagaaatcccgctggaagcctagacaggat

SEQ ID NO: 847215 - DNA, 120 bp, Artificial Sequence
  ENSG00000230005_10 (sequence is synthesized)
gagactgggtggatgtggatgggatgcacctctcctcacatccctgagtgtccgtggcagctttggcccagactgttttccagaatgcctgcgtggcgagcagcctggggctgcgactgg

SEQ ID NO: 847216 - DNA, 120 bp, Artificial Sequence
  ENSG00000230005_11 (sequence is synthesized)
tttctccctcttggccagagagaggatgtgagccgggtactaaggatgccgtctcctctgggggcagagcaacacagcaccaaccacagcacgccaccgtggcaggcttgtaagtgacag

SEQ ID NO: 847217 - DNA, 120 bp, Artificial Sequence
  ENSG00000230005_12 (sequence is synthesized)
agatgacataaggctgatggcaggacgcacagagaggacacgtgataccacgccacttcacaccagggacctcggcgtctgcaggaggtcctgggaccaaaccacaggtactgaaggtcg

SEQ ID NO: 847218 - DNA, 120 bp, Artificial Sequence
  ENSG00000230005_13 (sequence is synthesized)
gctgtacctgagattaggagaagctgaaaaggaagctgctatattaagtaagagaattctatcatcaacacacaataagatacgagacttacaaataataaaaatgtcagggttcgaggg

SEQ ID NO: 847219 - DNA, 120 bp, Artificial Sequence
  ENSG00000251487_0 (sequence is synthesized)
cagtatgatgagtataactgaagcacatattgctggatgctacagagaaaatcacatggagaataacactaatggacatgtaaacacacatcgataaatacaatacaattagccctccag

SEQ ID NO: 847220 - DNA, 120 bp, Artificial Sequence
  ENSG00000251487_1 (sequence is synthesized)
aactaaacagcctccaaaaagcctgctggattggctctgtccattcctcatactatgacaaagaactgtggagcgtcaatagggaaaagaaaagggcatgggggcactgcaggaaactct

SEQ ID NO: 847221 - DNA, 120 bp, Artificial Sequence
  ENSG00000251487_2 (sequence is synthesized)
gcaaggactctgcatttcatctggagaacaatggactggaagagtacataatctatccccttcacatcaacacacaagcactgatatttctctgatatttgctgctacaacctccccaga

SEQ ID NO: 847222 - DNA, 120 bp, Artificial Sequence
  ENSG00000251487_3 (sequence is synthesized)
tgaccttgcttcctgaagtgcaaattgcgcaaatgtaatctttgcaaaattcctcatattcctcaaacatttgctcaaacttcatcatttttgaagactctgatcaccctacaaatgcta

SEQ ID NO: 847223 - DNA, 120 bp, Artificial Sequence
  ENSG00000251487_4 (sequence is synthesized)
caaatatccataaccttttaatgtattatataaattatttattattgtagaaaatgaaaattagctggacagcaaatatctacccagtcaaaaaagatttagataaattcagctggaaag

SEQ ID NO: 847224 - DNA, 120 bp, Artificial Sequence
  ENSG00000251487_5 (sequence is synthesized)
ttaacaggaaacacatttcttccaaggtttgtggccactgaaaagtggtaagataactgccttctttgattgactacctctttctttctttcctccttttttctttcctttcctttctcc

SEQ ID NO: 847225 - DNA, 81 bp, Artificial Sequence
  ENSG00000251487_6 (sequence is synthesized)
ttctctttctttctctatcataaattgtgctttttgaaattatgccggtaagaacaacatatcccactcttgcttggataa

SEQ ID NO: 847226 - DNA, 120 bp, Artificial Sequence
  ENSG00000251487_7 (sequence is synthesized)
atgccggtaagaacaacatatcccactcttgcttggataatctgtcattttgaaagagagaagcaacctttatacacaatctaaactcaaaacttcagttgggagtttctgaataaaata

SEQ ID NO: 847227 - DNA, 120 bp, Artificial Sequence
  ENSG00000254980_0 (sequence is synthesized)
caaacttcatctctggctcatacttcttctttgagtttctagcccatatattcacaggcctatctgacagttcacctgcttttctcaaaagcatctcaaactagtttctcctggaaaggg

SEQ ID NO: 847228 - DNA, 120 bp, Artificial Sequence
  ENSG00000254980_1 (sequence is synthesized)
ctctggtacctgcaggccagttacggtgaggcagatatgactgacaggaggccgctattctactcaccagaccctctgctcctcctgggccgcgccaccggcagacgctgactgctgtct

SEQ ID NO: 847229 - DNA, 120 bp, Artificial Sequence
  ENSG00000254980_2 (sequence is synthesized)
ctgcgcagcaccagctgagattcgctagggggatacatcgacgccgagatccagaactgcttagccaagttggcatcttgttccgaggagccagcaaataccagtaatcccggggggcac

SEQ ID NO: 847230 - DNA, 120 bp, Artificial Sequence
  ENSG00000254980_3 (sequence is synthesized)
atttcctgggactcttttcggccgctaggttcttcgctgggtcccgtttccatggcaactgaggacgcttctgcaagcgtcctctcccctccccccgccccgcccctgccccgcccctcc

SEQ ID NO: 847231 - DNA, 120 bp, Artificial Sequence
  ENSG00000254980_4 (sequence is synthesized)
cgtgggggccgtcggaagcccacccctgcggtgatcaggttttaggaccagtccaaatcttggatatgggagagtcaaaacgtcaactttgggttgtgtcctgtcggagtcagtggggga

SEQ ID NO: 847232 - DNA, 120 bp, Artificial Sequence
  ENSG00000254980_5 (sequence is synthesized)
gtagtttagcttcttatatcctcagtgggctgccacatcctctcccctccccccagaaagatagctaaataaactttaaattcctcagccccattgccccaatccccacttccaaaccag

SEQ ID NO: 847233 - DNA, 120 bp, Artificial Sequence
  ENSG00000254980_6 (sequence is synthesized)
attgccagggacagcacctgctaggtggaagttctgagaacgttgcgctggagaattcacgcctgaaagcctagcccttgggagctagaggcctgaactgggcggatacgtgcccatgtg

SEQ ID NO: 847234 - DNA, 120 bp, Artificial Sequence
  ENSG00000254980_7 (sequence is synthesized)
tacagtttctgtgattttaaaattctgaatcctttaaatcttaggaaacaagctggatttaaagtgtaagtgcatttactaatcactcccactaaaagttgcatagactccaacagttgt

SEQ ID NO: 847235 - DNA, 120 bp, Artificial Sequence
  ENSG00000254980_8 (sequence is synthesized)
aaatgattacttaaaagaagggatacatcttaatgagtgaacagagtctcttcatggaaaaaagaagtatgaaaaattttgttaatgtatttcttataaaagtattaacaagtctgtgtg

SEQ ID NO: 847236 - DNA, 120 bp, Artificial Sequence
  ENSG00000285179_0 (sequence is synthesized)
ctgtgtgaaattagaccttctgaatccaacttttcccagccacctttttttttttaagcataatctgcatacctgattcttcctagatgtgggacgagaacttgggagccaccaaatggc

SEQ ID NO: 847237 - DNA, 120 bp, Artificial Sequence
  ENSG00000285179_1 (sequence is synthesized)
agaactaaaacagctgtaacacaaacaggtctgaaacatgaccatgcttgcctcattgccagcaatgcgaaagagagaagagagaaggagcgaagaactgtggcccttcagagagcccaa

SEQ ID NO: 847238 - DNA, 120 bp, Artificial Sequence
  ENSG00000285179_2 (sequence is synthesized)
acccaggagctccccaaggcaggcctatgacaccctctttggggctctgcagttcctggcattgccaggcttctggacaccaccaggttcccagtgctcacagtggaaacacagtgctca

SEQ ID NO: 847239 - DNA, 120 bp, Artificial Sequence
  ENSG00000285179_3 (sequence is synthesized)
caggcagtcagcgcctatgctggtgctgccacagccagtacacctggctatgcacagtggccagaccctgtgctcactcagacaccccttgccactccacgcctcgcttatccttcacag

SEQ ID NO: 847240 - DNA, 120 bp, Artificial Sequence
  ENSG00000285179_4 (sequence is synthesized)
acgtgggatccaggccagtagcatgagccaagcacagcctgatgggctgagtgggcagaatgagcccagcagcccaagcaaaactcaggcaaaggtgccactggacacaggggattctgg

SEQ ID NO: 847241 - DNA, 120 bp, Artificial Sequence
  ENSG00000285179_5 (sequence is synthesized)
ctggagaaggaataccctaaggatcccgtgacaataatattttatgttctttcttagagtctcttagaaaatattatcttgtattcaggcactattttacaatgttttaaaagttccaat

SEQ ID NO: 847242 - DNA, 120 bp, Artificial Sequence
  ENSG00000254983_0 (sequence is synthesized)
tgtgtaaaatatgcatcagattctgaagacttagtatgaatgaaataatgtaaaacatctcattaataattcttggctcagtgcagtggctcatgccaaatgatgttgcataacttttca

SEQ ID NO: 847243 - DNA, 120 bp, Artificial Sequence
  ENSG00000254983_1 (sequence is synthesized)
tcagaagtctctgttgaagtcttttgcccatacttttattgtattattagcccttttgtcattgatttgtaatctgtatagattctggatataagtcctttgttagatataagaactttg

SEQ ID NO: 847244 - DNA, 61 bp, Artificial Sequence
  ENSG00000254983_2 (sequence is synthesized)
gattctggatataagtcctttgttagatataagaactttgagaggctagtcttgaactctt

SEQ ID NO: 847245 - DNA, 120 bp, Artificial Sequence
  ENSG00000254985_0 (sequence is synthesized)
tgatattttaaggagattcatttttgaatgctgagatgtgcagctatatattcttaagagaaaactattacgtgtatcaaaactgtttttttttcttttttttctgagacggagttttac

SEQ ID NO: 847246 - DNA, 120 bp, Artificial Sequence
  ENSG00000254985_1 (sequence is synthesized)
ttttttcttttttttctgagacggagttttactcttattgcccaggctggagcacaatggcgcgatctaggctcaccgcaacctccacctcttgggttcaaccgattctcctgcctcagc

SEQ ID NO: 847247 - DNA, 120 bp, Artificial Sequence
  ENSG00000254985_2 (sequence is synthesized)
aaggacaattggaaatactcttgctcgtagtgaatagattactggtaataagtgagacaagatgttaaattattttttatattttctattgtacctgatgaaagcacagatatttatgat

SEQ ID NO: 847248 - DNA, 120 bp, Artificial Sequence
  ENSG00000254985_3 (sequence is synthesized)
gttactcataatgatttctttgtaactttgatgagaattttaatatgactggagataaaagaacttacttccctgtatcgttatctagggacttttttgtattaaaaaaattaaaagtgg

SEQ ID NO: 847249 - DNA, 120 bp, Artificial Sequence
  ENSG00000254987_0 (sequence is synthesized)
agcataatgttgtttgactgatacatgaaatctccatatgattttgaggtggtgaaagttctattcctgatggccccaaattcctgccctatcacctgttcttcctctacgccacacttg

SEQ ID NO: 847250 - DNA, 120 bp, Artificial Sequence
  ENSG00000254987_1 (sequence is synthesized)
cgccttgaagaatgaaatgtagcaattgccttggcccttatatgggggctggaaaatgaaaaccactgaaggctgaaacaggccagggaaggaaaggaaccaaaagcaggatgcgctgca

SEQ ID NO: 847251 - DNA, 120 bp, Artificial Sequence
  ENSG00000254987_2 (sequence is synthesized)
ccaggagcaggggcttgaaagatttacaacactttacactacttcaacagctattttagtccttagattttattgccccaaccatggtctccttgggaacagactgaatctggatccaga

SEQ ID NO: 847252 - DNA, 120 bp, Artificial Sequence
  ENSG00000254987_3 (sequence is synthesized)
agtggctgctgagggagaaggtagacaaggtagaccaagagcaactaagttacgaaagcatttcaaggatggagtgatcaactggaccaaatgacactgagagattaagaaaagatgtaa

SEQ ID NO: 847253 - DNA, 120 bp, Artificial Sequence
  ENSG00000254988_0 (sequence is synthesized)
cccaccatttggcaagtcctaagttcttgtcctgcatccaggaagaatgaggtatgcggacaactggagggtgaacaaggtggaaaggagctttattgagtgacagaacagctcttggga

SEQ ID NO: 847254 - DNA, 120 bp, Artificial Sequence
  ENSG00000254988_1 (sequence is synthesized)
gacccaaagtgggtggctcctatctgcaggcaggtcatcccagtgaatgtccagctctcagtggagaggagacccagagtgggcagctcctattcgcagagtcatgtggaagcaccagga

SEQ ID NO: 847255 - DNA, 120 bp, Artificial Sequence
  ENSG00000254988_2 (sequence is synthesized)
acatttcaaagcattgagttaaggataatgaagtttataaaatctagtggcaagatatagctgactcttgacacagacagaggaaaggccatgtgagacacagcaagaaagtgaccatct

SEQ ID NO: 847256 - DNA, 120 bp, Artificial Sequence
  ENSG00000254988_3 (sequence is synthesized)
gcaagccaggaaggagacgttttttggttttggttcctcaccaggaaccaaattaaatgccaccttgatcttggacttccaagcctccagaactgtgagaaataaatgtatgttgcttaa

SEQ ID NO: 847257 - DNA, 120 bp, Artificial Sequence
  ENSG00000254989_0 (sequence is synthesized)
tttcttcagctggctgctggcaacacagatgttcaaactgtcacgaacatttatcaagctgtgtgaagcctgctccccttcaccttctgccaagattggaagctctctgagggcctcaca

SEQ ID NO: 847258 - DNA, 120 bp, Artificial Sequence
  ENSG00000254989_1 (sequence is synthesized)
tacagcctgcagaactgtgaggcaaataagcctcttcttggtataaattacctgcctcaggcattcctttatagcaaagcaaatggacgaagacagaggactctggttgagagctccgat

SEQ ID NO: 847259 - DNA, 120 bp, Artificial Sequence
  ENSG00000254989_2 (sequence is synthesized)
tctccatcttcacacttctcagggaagaggcaagagctgccctgtccaatggggtaactgctacctacatgttgctatttacattcaaaataactaaaattaaatacagtttaaactcta

SEQ ID NO: 847260 - DNA, 120 bp, Artificial Sequence
  ENSG00000285177_0 (sequence is synthesized)
cgagaatgtcagcgacagtattggaggccagaggagtggtcagcccacccaagccccgcctctgggcgggggcccaagcgatttccgagtgctgaaacctgggatgacagagcagcccag

SEQ ID NO: 847261 - DNA, 120 bp, Artificial Sequence
  ENSG00000285177_1 (sequence is synthesized)
accctgactcatcaacctggggatccacgaaccaactcagtgcaagaggacagcttctacttcttatgatttcacctctgacccaaccagtcagcactccccattccctggccccgtacc

SEQ ID NO: 847262 - DNA, 120 bp, Artificial Sequence
  ENSG00000285177_2 (sequence is synthesized)
tgtcaaactatctgaaaaaccccctaacctctgagcctttggtgagatggatttgagtaacaactctgtctcccacgtggcatggccagcctcgcgtcaattaaactttctttactgcaa

SEQ ID NO: 847263 - DNA, 120 bp, Artificial Sequence
  ENSG00000243636_0 (sequence is synthesized)
cggtgtcagccttttctttccttgctttaactcagacctactgaaccacctctctgttgaaataccacgaaggagaagaaataagcatctaaggtgataaacatctgtctcttatcagga

SEQ ID NO: 847264 - DNA, 120 bp, Artificial Sequence
  ENSG00000243636_1 (sequence is synthesized)
taagacactgaaaatgttattattatggaagtatcttcattatgaaagactcttcacatcaacacgatggtgattactcgtttgcagttaccctcccagtattgcccatggacactacaa

SEQ ID NO: 847265 - DNA, 120 bp, Artificial Sequence
  ENSG00000243636_2 (sequence is synthesized)
ggaagttattttaataactccttatcctgaggctacatatgaatgtgatgaaggatatgttttggctggatttgctacaatctactgcaagtcttttcactggcaacttgcacctcctca

SEQ ID NO: 847266 - DNA, 120 bp, Artificial Sequence
  ENSG00000243636_3 (sequence is synthesized)
ctatggtgtggttggtctcaaaagtatcacttgctcagagaagagaacctggtacccagaagtgcccaggtgtgagtgggaggcacctgaaggttgtgagcaagtgctcacaggcagaaa

SEQ ID NO: 847267 - DNA, 120 bp, Artificial Sequence
  ENSG00000243636_4 (sequence is synthesized)
actcatgcagtgtctcccaagcccagaggatgtgaaagtggccctggaggtgtataagctgtctctggagataaaacaacttgaaaaagagagagacaaattgatgaacacccatcagaa

SEQ ID NO: 847268 - DNA, 120 bp, Artificial Sequence
  ENSG00000243636_5 (sequence is synthesized)
attttctgaaaaagaggaaatgaaggacttatttttcccttcaaatcaacatacagaatcttcactcatccaccctactcttccttgagcaccatcactctcataagggtctgggctagg

SEQ ID NO: 847269 - DNA, 120 bp, Artificial Sequence
  ENSG00000243636_6 (sequence is synthesized)
agaactttcttattactgccagagaaaaatgtgtaattattggtaatctagccttttgtagctcaaatgtccagtttcctggacttgaagtgctggttaattaaataattatttaccaaa

SEQ ID NO: 847270 - DNA, 120 bp, Artificial Sequence
  ENSG00000225953_0 (sequence is synthesized)
acttgaaacattctgagtgtgcctgcagtagggtctcagaggagttgctctgaaagctgttgagagcagccacctttgctgtcactgagagcttggcagggtcagctctggtgggccgtt

SEQ ID NO: 847271 - DNA, 120 bp, Artificial Sequence
  ENSG00000225953_1 (sequence is synthesized)
tgcacccaggctctgatggcaccaggatggcttcctgcaacccggaacctgatcctggcccccggcagagcataagggcccgaggccagggacctagaggccggaccaagttcgcgcgag

SEQ ID NO: 847272 - DNA, 120 bp, Artificial Sequence
  ENSG00000225953_2 (sequence is synthesized)
gtgttcacagcctaggcgccccgggcttggcttcgtactctgcaacaagccaagctcccttgccacgagtatatcagcaacttcagaaataaacaccagcgaaaccccttcccacattag

SEQ ID NO: 847273 - DNA, 120 bp, Artificial Sequence
  ENSG00000225953_3 (sequence is synthesized)
cttgttgctgtgctactgacactgggcttagtcgatgttcacacctattacatttttccggaaagtgggaggagcagggggtagagaaagctgtgtgtattgagggaaggggagatgtgt

SEQ ID NO: 847274 - DNA, 120 bp, Artificial Sequence
  ENSG00000225953_4 (sequence is synthesized)
gcaacaccttccagaaaaatggggaggtagtttagaaagtttttctctgtaacagcacagcttctgagaaggcagagagaagaaagcagacaggaaacgaatcccttcctcctctcccct

SEQ ID NO: 847275 - DNA, 120 bp, Artificial Sequence
  ENSG00000225953_5 (sequence is synthesized)
ttacccccttccttcactccctagaccaagctggtcacccggctgggaatcaagattgtgtggctgggaagacaccagtctctgtgctcgggttcagcccagtcgggcaagaaagtctgg

SEQ ID NO: 847276 - DNA, 120 bp, Artificial Sequence
  ENSG00000225953_6 (sequence is synthesized)
gcagctggagaaggtcgtcacagtctcccgtggaatcttgttgcctgagagccccataacggaaagggctaagacgactcttccacacacaggtcgcagcccctgccgcggaggatcccc

SEQ ID NO: 847277 - DNA, 120 bp, Artificial Sequence
  ENSG00000225953_7 (sequence is synthesized)
aggaagatgctggggacgctctgagcatcggcctttctttacccccgactccctggagcttggtctcgggatgccaacttggggcacggaggcgacgggctgctccgaagctggagggtt

SEQ ID NO: 847278 - DNA, 120 bp, Artificial Sequence
  ENSG00000225953_8 (sequence is synthesized)
tctgcttgggtcagagggatcacgacctcagcagagccaggagaggttgggtgacacccactgcgtattgcacttgactcaaaactgccctcggcctgcggaagaggcgagggcaagaag

SEQ ID NO: 847279 - DNA, 120 bp, Artificial Sequence
  ENSG00000225953_9 (sequence is synthesized)
cctggtggcgggtcaaaccttcaccctattattttctatcattttttatgcccatatatttgttaaatgtatggctgctatacaccaacagcttattctacaagaagtgcccccgaggag

SEQ ID NO: 847280 - DNA, 120 bp, Artificial Sequence
  ENSG00000225953_10 (sequence is synthesized)
gattgggttaagctttgcaaatttggcttcccaggtaatgcgcttcattattctgctcccgacttacccaccacaccagtgggtacccggagcagcacccacttggcagaactgatgact

SEQ ID NO: 847281 - DNA, 120 bp, Artificial Sequence
  ENSG00000225953_11 (sequence is synthesized)
gcttgggcccagcggagtgcgcattgcgctaacacgcgcacgggaattgcacccttgccggagcctccgcaccgtgcgcccttcaaagagctggcgaccccgctcacgtgtaagcaacct

SEQ ID NO: 847282 - DNA, 120 bp, Artificial Sequence
  ENSG00000225953_12 (sequence is synthesized)
cccactttgaaactaattcgcacccgggtctttcaccccaaaggactttgctgcggacgctgctctgacccaagacgcgggagagaagtcccaaaggctacagccaggggctgggggact

SEQ ID NO: 847283 - DNA, 120 bp, Artificial Sequence
  ENSG00000225953_13 (sequence is synthesized)
gtagctgcgccccgctgacgcgctctctcctgggtccgggtatcccagggcatccggagctggggagggttgtgcggactacccaaggcacgcgcagataccgggcagggaagaagggct

SEQ ID NO: 847284 - DNA, 120 bp, Artificial Sequence
  ENSG00000225953_14 (sequence is synthesized)
ccgtgttccaaggatggtcgtttacctctcctgagatcagccctaatcccttggtaacttaagcgcctctgaactcggggagcgcttggtggggcgcctccctgcatccacccctacccc

SEQ ID NO: 847285 - DNA, 120 bp, Artificial Sequence
  ENSG00000225953_15 (sequence is synthesized)
tggctccttcccaggcccagcatctttcccaccattctcacccccaccacccccacggccccgcccgtttagaggcgtgcggtgggcacttggtttacagaaccggcgtttcagatgttt

SEQ ID NO: 847286 - DNA, 120 bp, Artificial Sequence
  ENSG00000225953_16 (sequence is synthesized)
atttgcaactaatttcttgtgctggaaaatgcttgttacccgggcggagcgcttccgctctgcgcggtccggcccggcgggcggtagctcgctgatccctccggcgaagcctccaaggag

SEQ ID NO: 847287 - DNA, 120 bp, Artificial Sequence
  ENSG00000225953_17 (sequence is synthesized)
cgggcggctgggagaggttgtgccacccgggaccaagccatcggcgctgctccggactcccggtagggggagccgccgcgggcgccaggccggattgtgttctggcctcggggcggccct

SEQ ID NO: 847288 - DNA, 120 bp, Artificial Sequence
  ENSG00000225953_18 (sequence is synthesized)
gctgccagcggccgggactctcagcacagagctcgggaggactccacctgctctccagataaggcgccatgagcagagaagggaacagacggccaagctccctcctaattccccgttgtt

SEQ ID NO: 847289 - DNA, 120 bp, Artificial Sequence
  ENSG00000225953_19 (sequence is synthesized)
gcagagcaaagaagatgggggagaactaattatattctctaggtctaaatattgttgaaaaatttgtaggtgagatcacctcctttgcccatatccatatataatatatccattacatgt

SEQ ID NO: 847290 - DNA, 120 bp, Artificial Sequence
  ENSG00000225953_20 (sequence is synthesized)
gtttgcccatatatatacgtatgccatatgtaaatatgtacgagtgtgtatgtatgtgtatagcagtggtttagaattagtctcagttccacaaattttgagcccttttaatattttagg

SEQ ID NO: 847291 - DNA, 120 bp, Artificial Sequence
  ENSG00000225953_21 (sequence is synthesized)
tgacctaataccttctcactgtattttccaagtcacttatttccaagagttttaggtgatcccagcataggagctgagcataggagctcagatgagacttgccagttttgctgcagtaat

SEQ ID NO: 847292 - DNA, 120 bp, Artificial Sequence
  ENSG00000225953_22 (sequence is synthesized)
gtcagcaaaagagtctctctctttctgactctatagacttaagtaagggtttacaggctttcattttaaggtatgactgatatttagagaacaagactaaaccaaggtcaaggggaaaac

SEQ ID NO: 847293 - DNA, 120 bp, Artificial Sequence
  ENSG00000225953_23 (sequence is synthesized)
agttagactgtgaacctgcagaccactccactgcacccagtgtggccgtacacctgtgctgaacggccagagacttcctggtcaatactcccacagataaaagactgcaggatctgctta

SEQ ID NO: 847294 - DNA, 120 bp, Artificial Sequence
  ENSG00000225953_24 (sequence is synthesized)
tacacaaatccatctttcgctgggaacccacaactcataacaactctcctaatgccaagtcatcaaggcctcttgaaagagaatcataaaaaacaaagaatttcaaacttggaaggaaac

SEQ ID NO: 847295 - DNA, 120 bp, Artificial Sequence
  ENSG00000225953_25 (sequence is synthesized)
ctaaagtttactggtgaggagcttgaactgagtagaagcaaagaatcatactccagatgagaaacgccccatgcactgagctgagactggaactctcctcttcttactctcagtccagta

SEQ ID NO: 847296 - DNA, 120 bp, Artificial Sequence
  ENSG00000225953_26 (sequence is synthesized)
agtttgactacagagcactcattatcattgtgattattatgttcccgcatattttgtcgttcttagttaggcatactcctttaacactattgtaataaaagcaaaatctggaagatcttt

SEQ ID NO: 847297 - DNA, 120 bp, Artificial Sequence
  ENSG00000225953_27 (sequence is synthesized)
gggagcagttctgtaaatccctgctgggagcagagactgcgaaaagctgagtccgccgatcgtgcccgggacaaggctgccttccactcgccctcgccgcatctacctggtaggcggcat

SEQ ID NO: 847298 - DNA, 120 bp, Artificial Sequence
  ENSG00000225953_28 (sequence is synthesized)
gcgcacgggcttagaggcttgagagcctctggaagagaaagggtcccaggaaggaaacctgcccccggcctaagtgtcggcgcccagatcaccacgaaccccgcacctaggcgccgccca

SEQ ID NO: 847299 - DNA, 120 bp, Artificial Sequence
  ENSG00000225953_29 (sequence is synthesized)
ccaagttccaaagaagtccgaggcgacctgggagtcggtcggatcccagccgagaaaagaaacaagcaggatagcaattcttaggggagccaccctgggagttttaggcagcgtttgcct

SEQ ID NO: 847300 - DNA, 120 bp, Artificial Sequence
  ENSG00000225953_30 (sequence is synthesized)
ttccctggttttcttcaccaagccccatcctccccccgcataccacccccagtcaaaagagtgggagaaaatgcacagttcgaagtcggtgagagcaaaaatgggtctagtaaatcaacc

SEQ ID NO: 847301 - DNA, 120 bp, Artificial Sequence
  ENSG00000225953_31 (sequence is synthesized)
cgtggtggtagctaaaaggtttggggctgcaaagaaacaaactgtaagttttgagcaacaaactttttcttcaatctgtaatatgtcgaaatgggaagggggtgttgcaaaagccaacta

SEQ ID NO: 847302 - DNA, 120 bp, Artificial Sequence
  ENSG00000225953_32 (sequence is synthesized)
ccactgtcaaacttagcccgtttacaacatggggaaaggcgtatttcttactaatatctcaacaacgataacaatgctgtatccttccttaccttgatgttgaactgcgaatcctcctcc

SEQ ID NO: 847303 - DNA, 120 bp, Artificial Sequence
  ENSG00000225953_33 (sequence is synthesized)
cactattattatatctgatgatgcgaatggttggagcgattcaatcctaagtcattaatgagctattttataaacaccactgtctgaagatcttcatttacattttgctaaggatcactt

SEQ ID NO: 847304 - DNA, 120 bp, Artificial Sequence
  ENSG00000225953_34 (sequence is synthesized)
cgctaacctcacaggcttgtgtcaacagcatgatttgcaggacttcagttacactcttataaacaacacggctgtattgttaatcggttaatattttataaagtgtaaatattttattat

SEQ ID NO: 847305 - DNA, 120 bp, Artificial Sequence
  ENSG00000225953_35 (sequence is synthesized)
gttttgaagggaactattgattctaaattattaaacccctgagaaggactatttaaatgaaatatacaattaagtacaattaaatgtacattgtggttagtttgttttcagattctgcac

SEQ ID NO: 847306 - DNA, 120 bp, Artificial Sequence
  ENSG00000225953_36 (sequence is synthesized)
ccttttaaattcattgcttttctctttactggagtttcctcttgtccatttctgatactgaaaaaaatctatcatgttaggaaaaagcctaaattatttaaagttgcattaaacttagag

SEQ ID NO: 847307 - DNA, 120 bp, Artificial Sequence
  ENSG00000225953_37 (sequence is synthesized)
gaaaatgtcaaatacgattaattatgaccagaaatgtattttggatgtttgtagagttgtatttcatatcacattttacaaatttcttccgatttaaaggagagttctaggaagttttgt

SEQ ID NO: 847308 - DNA, 120 bp, Artificial Sequence
  ENSG00000225953_38 (sequence is synthesized)
gatctatgtccggtgtgggtttttgtcctctcgagttttgtctctaataaaggccttttttgtttcaaattacatacgctttttactgcacaatttttgtattgaccttatttcaactga

SEQ ID NO: 847309 - DNA, 120 bp, Artificial Sequence
  ENSG00000225953_39 (sequence is synthesized)
agcgattatttccagcaggtttaatttcgacaataagatatattttaatagttttacctttcgctagaattttgtattgtttaaaacagtaaatgaataaatttgctgatgattcaagaa

SEQ ID NO: 847310 - DNA, 120 bp, Artificial Sequence
  ENSG00000225953_40 (sequence is synthesized)
cctgtcttcctgtacaccagaggctcctcagctgggtaaggtgagccaacgttaccaggagtatatgctgagaggccatttcaaagtctttcatagaaggctgtgcttgggcaagtagaa

SEQ ID NO: 847311 - DNA, 120 bp, Artificial Sequence
  ENSG00000225953_41 (sequence is synthesized)
cttttcatcatacagtcccagagatgtgaagttatcaaggtcagagaagaggaaaagagactcagagaaactgtgttctctagtctttcattcgggaacaaatggtgtcgtaccaaatgg

SEQ ID NO: 847312 - DNA, 120 bp, Artificial Sequence
  ENSG00000225953_42 (sequence is synthesized)
ctgaaaagatcccaggcttactctgagaaacatctctctcttctgaattaaacttgcacagtggctaacagtgttttgtttggtgttgacaaagtaataaaacgttaccgtttctctttc

SEQ ID NO: 847313 - DNA, 120 bp, Artificial Sequence
  ENSG00000225953_43 (sequence is synthesized)
gcggccagagcggtgggaccggtaacaccaagagccgagaagacgcagggacccgggaccgcgcgcgggaggaaacgcggcggccgcccaagctgtcacctccagcctctcccctctcgg

SEQ ID NO: 847314 - DNA, 120 bp, Artificial Sequence
  ENSG00000225953_44 (sequence is synthesized)
ccgcctctgccagcagccagagccggactcactgacaagccgcagagagagacacactgagagggagatgattattagttgcgttgagtcatcaggcaaagaccccgagggctctcccac

SEQ ID NO: 847315 - DNA, 120 bp, Artificial Sequence
  ENSG00000250948_0 (sequence is synthesized)
gagaaagatactctgctagcttcagattcattagtactaggaaatggagagataggaggtataatgtattagggaagcaagggattcagaaccaggtgcccactgactctgagaagcact

SEQ ID NO: 847316 - DNA, 120 bp, Artificial Sequence
  ENSG00000250948_1 (sequence is synthesized)
cacagagggtagcagacaagcaagagggtggaatttgcagcatctcatcttggtgagacagttggaagacttttctgccaattatagtggttaaacactgactcaacatcaaacaacggc

SEQ ID NO: 847317 - DNA, 120 bp, Artificial Sequence
  ENSG00000178722_0 (sequence is synthesized)
aaactgccctcagggcaaagaagcctgcagaataattgggaggagtctggcaggaaggaagccaagagctgcctcctgcccctgaggggaggagtccatcctcttctataggatacacct

SEQ ID NO: 847318 - DNA, 120 bp, Artificial Sequence
  ENSG00000178722_1 (sequence is synthesized)
gttggcttgtttgtccttccttcccctttctgggaattgttctccatcaacatgtttatggggacagccatttctatacaatgtgacctgtattgatctattttgtgttgctataaataa

SEQ ID NO: 847319 - DNA, 120 bp, Artificial Sequence
  ENSG00000178722_2 (sequence is synthesized)
cactcatggtggaaggtggaggaggagcaggcgtgttatatggcaagagcgagagcaagagagagagcagaaggtgtcaggcaaccagctctcatgtgaactaatgagcaaggactcact

SEQ ID NO: 847320 - DNA, 120 bp, Artificial Sequence
  ENSG00000178722_3 (sequence is synthesized)
catcaccaaggggatggccccagccattcctgagagatccgccccctaacccaaacacctcccaccaagccccacctccaagactggcggtcaaattttaacatgagaccttcattatca

SEQ ID NO: 847321 - DNA, 120 bp, Artificial Sequence
  ENSG00000178722_4 (sequence is synthesized)
catccaaagtagatcatcatctttggtctttgggagatacaccagagaaaaacaactcctctggcctgggagattttgactttctgcttttcatgtgtgtttgcttttatcgaagaggga

SEQ ID NO: 847322 - DNA, 120 bp, Artificial Sequence
  ENSG00000178722_5 (sequence is synthesized)
atctgctacttgcctgatgcaactgcatttggatactgaactggggcccaaagagtctcaaatcactgcctgggaatgccaatttctcatcatgaattagaaatcaattctagcagcctc

SEQ ID NO: 847323 - DNA, 120 bp, Artificial Sequence
  ENSG00000178722_6 (sequence is synthesized)
cctgctaagtaaaaaaattacataattctttctgcactactgcattaggctgattttttttttccttttcctgaatgtacagtaaatctctagtggtttaagccatggtgcctctgctta

SEQ ID NO: 847324 - DNA, 120 bp, Artificial Sequence
  ENSG00000178722_7 (sequence is synthesized)
aacacaatatgaaatcgctaccaaatttaaataaaaaataaattctgtgttgtgttaggagtctctcctgccaaaaactctcacacaattaacacactaacagaatgtgttgctaatttc

SEQ ID NO: 847325 - DNA, 120 bp, Artificial Sequence
  ENSG00000178722_8 (sequence is synthesized)
atgccactggagtcttttctgcttcagaatatagaaacaaaatcaggtcagagctccaataataacaggattttgttaaaatatacagccctgtgttgtagatacgttgtaagaatgggt

SEQ ID NO: 847326 - DNA, 120 bp, Artificial Sequence
  ENSG00000178722_9 (sequence is synthesized)
gaaaaggggactcacagtgatgcacgaaatagctcactactgcaaatagaagtgggagaacttgtctccagcttctttgcagagagagagagggggagagaggagagagagggtggagag

SEQ ID NO: 847327 - DNA, 120 bp, Artificial Sequence
  ENSG00000178722_10 (sequence is synthesized)
agattaggggagagaggtagagagagagagaggaagagagactgagagagagggagacgggtagagggagaggagagagagaggatgggagaaagggaaagaggagagagagagggagac

SEQ ID NO: 847328 - DNA, 120 bp, Artificial Sequence
  ENSG00000178722_11 (sequence is synthesized)
aagaagagagagggagaaaggagagagaggatagagagagagaaagagagaggagagagagttaggagaaagatagggagagagaagagagggatagggacagagaggcagcgaggagag

SEQ ID NO: 847329 - DNA, 120 bp, Artificial Sequence
  ENSG00000178722_12 (sequence is synthesized)
agagaagcaagagacagggagagaggagagagagaaggagggagagagaaaaggagggacagagagagaaggaggtagagagggagaaagaagaggacggagaaagataaaaagagagag

SEQ ID NO: 847330 - DNA, 120 bp, Artificial Sequence
  ENSG00000178722_13 (sequence is synthesized)
ggtagagagaaagagagagaggagagagaggtggggggagagaagtagagaaagagggaagaaagagaggctaggagagagacagggagaagagagaggaaagagggacagagggagaga

SEQ ID NO: 847331 - DNA, 120 bp, Artificial Sequence
  ENSG00000178722_14 (sequence is synthesized)
gagaaagagagagagaagagaggcagagagagagagttagttcagctcggtccaagcccagacccaccaggttctgtgggaaagggtttcattatcaatgttagtccatccagacatccg

SEQ ID NO: 847332 - DNA, 120 bp, Artificial Sequence
  ENSG00000178722_15 (sequence is synthesized)
catacttttacagggggaggcaaacgccaggcaaagaaactagggaaacacaagcccaataaatcacagctaggattctgattcccctggttcattctgaggcttcctccctccacctct

SEQ ID NO: 847333 - DNA, 120 bp, Artificial Sequence
  ENSG00000178722_16 (sequence is synthesized)
tagccttcttacactgggcctcttcttttccataacaaaaacagcgataatgaaaatattttggcagcattgaaggcctttcacattgtgaccctgacctccaaatcaattttctttatt

SEQ ID NO: 847334 - DNA, 120 bp, Artificial Sequence
  ENSG00000178722_17 (sequence is synthesized)
cttaacctgaccttggcatccattctccctggcgttcaatattagttacaaaatcttgaactccccgagaccttccctcctccccagataaccaaggcaggccacactggggaagctctg

SEQ ID NO: 847335 - DNA, 120 bp, Artificial Sequence
  ENSG00000178722_18 (sequence is synthesized)
acgaggacagagagagaaggcttctcgacaaagaaaaatcataacgagatgaacaagcccgatgccttctataggagtctcatttgcaccaaatgctattagccccattatttactcaga

SEQ ID NO: 847336 - DNA, 120 bp, Artificial Sequence
  ENSG00000178722_19 (sequence is synthesized)
caacggtgcaggcagcctgggctccctgcttgcgcggggcgctgtggagagcaccatgcatcaccagccggcccgggcgcttcccttaaatagtaatatgtaaggtagagcatgttacat

SEQ ID NO: 847337 - DNA, 120 bp, Artificial Sequence
  ENSG00000178722_20 (sequence is synthesized)
ttcatccatcacccatgggctcaccgagcgcagagactggagaaattgcgcacatttctccgttgctgcattaatactagaaagggagtgaactgaacagagaaagtgccaatttcagca

SEQ ID NO: 847338 - DNA, 120 bp, Artificial Sequence
  ENSG00000178722_21 (sequence is synthesized)
cacatgttaaaaagagaagcaaagaatagcagaaaaagaaagcatctcccgtactgagatgctggggtgtgggggaggtttttaaaggagaagactgcttttcagaactcctgtgcattg

SEQ ID NO: 847339 - DNA, 120 bp, Artificial Sequence
  ENSG00000178722_22 (sequence is synthesized)
actatgagaataaggacccactgagacaagagttcggggtcagcatacatttaggagaagaagttggctggcaggggctatttttctgcaaattagttttctctcaagggtaacggtggg

SEQ ID NO: 847340 - DNA, 120 bp, Artificial Sequence
  ENSG00000178722_23 (sequence is synthesized)
ggaggagcagaggaaaatgaattggagcccgttgaataatcgcgtattgttcggccggttgcggtgacctatgaactgatgctccgagaagtgttttcaggccttccttttatatgggcg

SEQ ID NO: 847341 - DNA, 120 bp, Artificial Sequence
  ENSG00000178722_24 (sequence is synthesized)
aggatgggaagcctcttacagctgttgacgagtgtcctgaaggggcaacgatggggatggcagtgtggccccacgaacaatggtcacagagcatcggctccacttggcaagagaggcacc

SEQ ID NO: 847342 - DNA, 120 bp, Artificial Sequence
  ENSG00000178722_25 (sequence is synthesized)
gtctgctggtcggtacagctgaccgcagggctggacaggtggccaggcaggaaggcgagaagaggcacggttcaaactttatgctgatcacaaagaattgagaaaaggggcaaagtgaag

SEQ ID NO: 847343 - DNA, 120 bp, Artificial Sequence
  ENSG00000178722_26 (sequence is synthesized)
aaatacagtgtagcaggacgcgatggatcgactttccttggggattagaaggagcaagagctctgcagtgattcaaacagttcagtgcaaatggaattcttctaggatgtttacaaaata

SEQ ID NO: 847344 - DNA, 120 bp, Artificial Sequence
  ENSG00000178722_27 (sequence is synthesized)
ggagctgcaaactgccctcagggcaaagaagcctgcagaataattgggaggagtctggcaggaaggaagccaagaaagcacaagcaagaatgtgtgagaagatcacagagacctaaagaa

SEQ ID NO: 847345 - DNA, 120 bp, Artificial Sequence
  ENSG00000178722_28 (sequence is synthesized)
ggggaagggaagaacccacatgtgagagagaagagattgtctgacttggtctcttagggctcctcatctcaagaagccagcaggcaagggaaggacaaaccatccttgcaggaataattc

SEQ ID NO: 847346 - DNA, 120 bp, Artificial Sequence
  ENSG00000178722_29 (sequence is synthesized)
gtactgatcatttggaggagattcggctagtatagctgctgttacataatgaagaaaaggaagaatatgtttcaaactcagatgaaccactggggagtctcttgatactctgttgcctaa

SEQ ID NO: 847347 - DNA, 120 bp, Artificial Sequence
  ENSG00000178722_30 (sequence is synthesized)
tttggatggttaatggtcagtgttcctaattgcactgcccctggaaaacgcacggagaagaaatacagcaaaatacatgagatggtgaaacactctggcaactgcaagcggacagatggg

SEQ ID NO: 847348 - DNA, 120 bp, Artificial Sequence
  ENSG00000178722_31 (sequence is synthesized)
atctgggagggactcccatcttctgcatggcatcagcacaagggtgaagagggaagataaaggatcatgcagggagtttcatggactaggcctggaagtgccatattccactgctgcttg

SEQ ID NO: 847349 - DNA, 120 bp, Artificial Sequence
  ENSG00000178722_32 (sequence is synthesized)
tgttccagaaggcagccgcacagccacaagggattgtaaaggaagctgaaaaatatgatcgagcattgtgtctgggaagagagggaaatgggtatggtgcatgactaaccagtgtttgtc

SEQ ID NO: 847350 - DNA, 120 bp, Artificial Sequence
  ENSG00000178722_33 (sequence is synthesized)
acagcacagaaagtaaggtataaaggaaacaactcactctgtattccctaagacagttgtgctaatagcattagcagaattgttaatgttagcagaaataacagttaattgttcaggtgt

SEQ ID NO: 847351 - DNA, 120 bp, Artificial Sequence
  ENSG00000178722_34 (sequence is synthesized)
cattttgtctcttcttcttagtcttttctgccattgcctttgttcagatcttttctaccttgtgtccagcttgctggaacctccaccttcctggcctgaaagaactagcttgtgaacatg

SEQ ID NO: 847352 - DNA, 120 bp, Artificial Sequence
  ENSG00000178722_35 (sequence is synthesized)
tatcatgtttgctttcttctgcaagttggctcatacattttattattacctaatgctgcgtaaaaactcattccaaaactcagtggcttaaaacagcagtaaatttttatatctctcctg

SEQ ID NO: 847353 - DNA, 120 bp, Artificial Sequence
  ENSG00000178722_36 (sequence is synthesized)
gtttctgtgggtcaggaatttggggagcagcttagctgggtggttttggtttggggtttctcttggggttgaactgagatatctgctgggctctgcagtcatctgaaaacttactggggg

SEQ ID NO: 847354 - DNA, 120 bp, Artificial Sequence
  ENSG00000178722_37 (sequence is synthesized)
ctcaaggtggttcacacatgtggatggcaagttggtactggctgttggcaagatgtctcagtatctctctaagcaggcctctcttcacggctgcttgagtgacttcatggaatggtggct

SEQ ID NO: 847355 - DNA, 120 bp, Artificial Sequence
  ENSG00000178722_38 (sequence is synthesized)
gaattctcccagaataaatgattcaagagccaaggtaaagccatatgccctttataaccgggcctcggaaatccctcactgtcacctctgccatactctactgttcatgtgaatgaccct

SEQ ID NO: 847356 - DNA, 120 bp, Artificial Sequence
  ENSG00000178722_39 (sequence is synthesized)
gattcagtgtgggaagagactatgcagggcataataccagaaggcaaaaatcactgggggcaatttgggaggctggccaccacacagactgcatttcaactatgcacctccctcaatctc

SEQ ID NO: 847357 - DNA, 120 bp, Artificial Sequence
  ENSG00000178722_40 (sequence is synthesized)
aactttttccatactctctcactttctcttccactttctgtattcagatcaaagcccatcgcttcatgaagtatgccctgaccactcagcaactagcactcccattgcaattcattgttc

SEQ ID NO: 847358 - DNA, 120 bp, Artificial Sequence
  ENSG00000178722_41 (sequence is synthesized)
ttgccacatatatggtctttataatttaacaccctgctttgaagatgtacacgtgtgtcttttctttcagatggaatttaaagaatcgtacactatactccctgtcatatagtaggcact

SEQ ID NO: 847359 - DNA, 120 bp, Artificial Sequence
  ENSG00000178722_42 (sequence is synthesized)
agtccctggagctgcaaactgccctcagggcaaagaagcctgcagaataattgggaggagtctggcaggaaggaagccaagtttcctgaggccctcaccagaagctcatcagaagcagat

SEQ ID NO: 847360 - DNA, 120 bp, Artificial Sequence
  ENSG00000178722_43 (sequence is synthesized)
gctggcaccactcttcttatgctgtctgcgtaactaatcagtatttcaagcatccaaaatgtgtaggagaatatggacccaagaacggagcagagagacaaatagaggaacggaaagttt

SEQ ID NO: 847361 - DNA, 120 bp, Artificial Sequence
  ENSG00000178722_44 (sequence is synthesized)
tgcctacaaccatgatgttctcaatgttagctgactgtgttctaaaatccactccaattcccattttgggagttgctatgtgatgaaggtctgcccctgtggtgttgggacaacttgctc

SEQ ID NO: 847362 - DNA, 120 bp, Artificial Sequence
  ENSG00000178722_45 (sequence is synthesized)
ccagcccatgcagagatgacacacccaggtgctccagtcaacagccccaggtgacagccagcatcgattagcagccttgtgaatgagtcatcttggactttcagcccaactgaaccttca

SEQ ID NO: 847363 - DNA, 120 bp, Artificial Sequence
  ENSG00000178722_46 (sequence is synthesized)
gatgactccaaccccagccaccatctgcccacaacagggtgagacagcctgagtgaacactgctcagctgagccatggaactgtcagaaaaattaatacagtaagtctctaagctttgac

SEQ ID NO: 847364 - DNA, 120 bp, Artificial Sequence
  ENSG00000178722_47 (sequence is synthesized)
atagtttattagatcgccatagataaccaaaccaccactctcaacatttgagtagatgctgctctagaaagcatagtctagcctccttggaacagctgttgcagacaggaatctctaaac

SEQ ID NO: 847365 - DNA, 120 bp, Artificial Sequence
  ENSG00000178722_48 (sequence is synthesized)
aaggtttccttggtgccttttggagaggtcttccgtgttgtttctcctagccccggacttccttactcacttgcttcagaaaaggcgaatctcctgtctatgggaaggcagcatagtggt

SEQ ID NO: 847366 - DNA, 120 bp, Artificial Sequence
  ENSG00000178722_49 (sequence is synthesized)
ggtcgggaggtagtgaaagtaaagtgggaaataagtggcaactttctcaggtaaatccctaatgggccccattttcagctaatgtgtacaaactcaaatgcccacaagggctagacaggc

SEQ ID NO: 847367 - DNA, 120 bp, Artificial Sequence
  ENSG00000178722_50 (sequence is synthesized)
aaggcgacagaatgacgacagcacgaggcactcgggagtagtgaagactgtgttgaatcagtgagcacgagactgtctacaaggggcagctgctatggccccaggtggccattgtggcca

SEQ ID NO: 847368 - DNA, 120 bp, Artificial Sequence
  ENSG00000178722_51 (sequence is synthesized)
ctattgccaggtcttctaatttttgaagtgaagttagaaatctattttttaatataaaattttggcaacaaatgttatatgttttaaaacaccatgttaatacagcatacttggaggtca

SEQ ID NO: 847369 - DNA, 120 bp, Artificial Sequence
  ENSG00000178722_52 (sequence is synthesized)
aggagaataataatactctcgtctgtgtagtatgttgtgatttacaaagtgcattcatgtccacatttgaattgaacttctcaataaggagaaataggtgagccaggcatctttttgaag

SEQ ID NO: 847370 - DNA, 120 bp, Artificial Sequence
  ENSG00000178722_53 (sequence is synthesized)
tccctcacttaagaaaacaggctcagggagtgagcctgcctgagtgggcactgctgaggcagaggactacagctcacaccatttctactctatctggacagagggataggggtggggggc

SEQ ID NO: 847371 - DNA, 120 bp, Artificial Sequence
  ENSG00000178722_54 (sequence is synthesized)
agttgagccctgcgaatgtattgaaactgtgatagtgaaagcaattctaggcagctaagagacagagaggaggagagctgaacaaggtgagaagctgctttaagaaccatctgaagtccc

SEQ ID NO: 847372 - DNA, 120 bp, Artificial Sequence
  ENSG00000178722_55 (sequence is synthesized)
ctggatcttatgttccatagtcaggattgacagccttgactttctccagaaaaaagagatgagtgctggtgtcttcaagcttggctgagggctgggctatggcagatgccctccttgttg

SEQ ID NO: 847373 - DNA, 120 bp, Artificial Sequence
  ENSG00000178722_56 (sequence is synthesized)
tgtgtgatcactgaatctgaatagctatgacctcaggtttaaggctcttgagggaacctggagagataaagggacctgaatccattcccttccacaggcatagcaagggactccattctg

SEQ ID NO: 847374 - DNA, 120 bp, Artificial Sequence
  ENSG00000178722_57 (sequence is synthesized)
gctccttgtggctcccatcccatctttctctgggctaaagcaggctatgggaggcctctgaaggtcaacaggtcccttatggccaacatgtgtgggtggataggagggaacgggcttctt

SEQ ID NO: 847375 - DNA, 120 bp, Artificial Sequence
  ENSG00000178722_58 (sequence is synthesized)
catcccaacaaaatatctaagactgaacccagaagattctgaatcctagatttctgatgaggacaaggaggccactctggggccagactctgaccttccagtttccaaacctctggagag

SEQ ID NO: 847376 - DNA, 120 bp, Artificial Sequence
  ENSG00000178722_59 (sequence is synthesized)
gactttttcccggtgcccgctgccccaccacacagtgcgcccttcaaagtccggcccgttaccttatctctcgtgggtccctgttggacacaatgctacaaacgacaaacaaaacaagga

SEQ ID NO: 847377 - DNA, 120 bp, Artificial Sequence
  ENSG00000178722_60 (sequence is synthesized)
aaagtagcacagaaaatgtcacatatgtagaaatagagacttcaaattattgtactttattctcccattcccaaccaacattcctctcccggagagtacaagcaggacatataccctccc

SEQ ID NO: 847378 - DNA, 120 bp, Artificial Sequence
  ENSG00000178722_61 (sequence is synthesized)
ctacctcagcctcctccccactcacctactgtccaggcttcccagccatcttccttcatgagctgcagtgagctggctttgatgcaaacagcaaatatatgagaaaacaccttttgtttt

SEQ ID NO: 847379 - DNA, 74 bp, Artificial Sequence
  ENSG00000178722_62 (sequence is synthesized)
gatgcaaacagcaaatatatgagaaaacaccttttgttttttaaaaattttactttaagttctgggatacatga

SEQ ID NO: 847380 - DNA, 61 bp, Artificial Sequence
  ENSG00000178722_63 (sequence is synthesized)
ctttgttagtttgctgagaatgatgacttccagtatggtgtatatgtgccacattttcttt

SEQ ID NO: 847381 - DNA, 120 bp, Artificial Sequence
  ENSG00000178722_64 (sequence is synthesized)
gttgcagttcttgcctaacaggaacccaccatgctcaacaggggttgctctggatgcatggtcacttgatgtcccatgtgcagaagattcatctctgtcagagctcaggatggagctaat

SEQ ID NO: 847382 - DNA, 120 bp, Artificial Sequence
  ENSG00000178722_65 (sequence is synthesized)
acttccatactgattagaagtgcttgagatacatcataacagtgtcagtgcagtgtttatgggggaaattgtcgctgtctctcgcttgtggaaggtgacataatgggatttcttcccttt

SEQ ID NO: 847383 - DNA, 120 bp, Artificial Sequence
  ENSG00000178722_66 (sequence is synthesized)
gtcctggtgacaggatgatgagcactgtctgggctccagttcggcgggctttgccattcaggcatccggcgcagctgacaagcccgaggatcgatggagaagagtttgattactcagtca

SEQ ID NO: 847384 - DNA, 120 bp, Artificial Sequence
  ENSG00000178722_67 (sequence is synthesized)
aaacctaagtatcctgttgggagaagaacactcattttagtggcactgttctattctttggatgaattgaatagttactaatccagccacagaagaaagacacaggagaggctgaaacat

SEQ ID NO: 847385 - DNA, 120 bp, Artificial Sequence
  ENSG00000178722_68 (sequence is synthesized)
cacctcttgagggtctcctttctggtgatttattcagatattggcacatgtgactcaataatggccaatactatgtgaagggacatcttctggggagtcttcctccttttcttccggatt

SEQ ID NO: 847386 - DNA, 120 bp, Artificial Sequence
  ENSG00000178722_69 (sequence is synthesized)
ctttgtgtctgaatgtgatgcctggagatgcaacagcagtctcactaccagcacgaggatgaagctgatacccagtgttcagaaaactcattagcttccaacctcctcaattaggcagaa

SEQ ID NO: 847387 - DNA, 120 bp, Artificial Sequence
  ENSG00000178722_70 (sequence is synthesized)
caaacatgcattactccaaattgccccgcactgcgatagagacagagttcaagcagaatgttggcccaccacccaaggatctgaccgctgaagtttacttcccttcaatcaaatcgagat

SEQ ID NO: 847388 - DNA, 120 bp, Artificial Sequence
  ENSG00000178722_71 (sequence is synthesized)
ttcttgcctaacaggaacccaccatggtaagaaaaagactcaagctggtttatttgtttttaaggttgcaaggtaatcaagtccataaccacacttgctctcacatttaccaaaataggc

SEQ ID NO: 847389 - DNA, 120 bp, Artificial Sequence
  ENSG00000178722_72 (sequence is synthesized)
caatctcagaactaaatgataaaaatgaaaattaatcagggactcccatgggcctcacatatatggcagttttgaatctgttctttttttcactatcataattgtttttttaaactcatt

SEQ ID NO: 847390 - DNA, 120 bp, Artificial Sequence
  ENSG00000178722_73 (sequence is synthesized)
ttctctgcttgaatacacaactgtaaaaaaaagtgggggtagtggtggtgatagaaatgaataaacccatggaaacagtgagacatctacagagacaaaattaggaaggaaggaaacaaa

SEQ ID NO: 847391 - DNA, 120 bp, Artificial Sequence
  ENSG00000178722_74 (sequence is synthesized)
agcaatttcagtatctctgtgcaaggcctgcatacctttccttgccaatacccgtggattgggcttgtctcaggaggtagcaggtgtttccttgactcacacagaaaacaagcccttggg

SEQ ID NO: 847392 - DNA, 120 bp, Artificial Sequence
  ENSG00000178722_75 (sequence is synthesized)
cttcttgtgctgttagggcaagttacgttcagcacatgaacactggaccctgctttgcctgtccgtccttcccagaagagacacagatcacagatgatcaagtagttgagaaaacagttc

SEQ ID NO: 847393 - DNA, 86 bp, Artificial Sequence
  ENSG00000178722_76 (sequence is synthesized)
cggccctgtgtcttttcttaatttgagcgaacttaaagtaaaaacgcttcttaacattataaagtaggactatgtcccctccattg

SEQ ID NO: 847394 - DNA, 120 bp, Artificial Sequence
  ENSG00000178722_77 (sequence is synthesized)
cttcttaacattataaagtaggactatgtcccctccattgaatttttgtaaaaaagtcgaatagggatagaaagcaagcaaccagatagaatatcatgccccagaacatcatttaccttg

SEQ ID NO: 847395 - DNA, 120 bp, Artificial Sequence
  ENSG00000178722_78 (sequence is synthesized)
gtagaacattaccactttaacacatagaaaccttttcacactagttaacaaatagcattaagcatgattcaagtcaagattttaaaaacttggctgatgcctctcattaagagttgaaaa

SEQ ID NO: 847396 - DNA, 120 bp, Artificial Sequence
  ENSG00000178722_79 (sequence is synthesized)
ctatataagactcttgctccaggaaactgtgttctgacattttaatagtattgcgttagcaagagcagaaaatccatgaacttagattcacagaaagtaaatcaagaatccatccaaaat

SEQ ID NO: 847397 - DNA, 120 bp, Artificial Sequence
  ENSG00000178722_80 (sequence is synthesized)
ggagtgcctcttgctgagtgatgggatggttttcatgtgagatgtcagtgcagcttctatacttgacataaaagttcccattaaaaaaaacggaactgctgctcaatttttttttcatca

SEQ ID NO: 847398 - DNA, 120 bp, Artificial Sequence
  ENSG00000178722_81 (sequence is synthesized)
agcagagttacctaaagtgctttttagaagagactattaggaaaggaatggaaagtagtcattatgactaatctgctttaggagttggggtaaccagtattacaggagggactttcagag

SEQ ID NO: 847399 - DNA, 120 bp, Artificial Sequence
  ENSG00000178722_82 (sequence is synthesized)
ccatggggaccttttaggcaactcaaattccttcaattgtttgcagtggtcctctcgaggggatgtaatgagttgacatgcaccagaacagatagaatgcactgccagctggtagtttac

SEQ ID NO: 847400 - DNA, 120 bp, Artificial Sequence
  ENSG00000178722_83 (sequence is synthesized)
tcttgtacaggaaggctgcttttctaacacacaactctttgttgtgttaaagagaaataaatatataaaagcctaaaagtaagctttcaattctttatgtctggcaaaattgtcagtaca

SEQ ID NO: 847401 - DNA, 120 bp, Artificial Sequence
  ENSG00000178722_84 (sequence is synthesized)
atgtgccttgaggatatatccatggtgctgtcttacaaggttattacgaaagaataagctcatactataataaccaccccatacactttacagtttatgaagaacttacatatacatttt

SEQ ID NO: 847402 - DNA, 120 bp, Artificial Sequence
  ENSG00000178722_85 (sequence is synthesized)
ctcagttgaacctcacaacatcagtgggaggcaggggaggcagatattattatctcttgagagggagtgaccctgctgctgctgctgtatatgtgtggcttttggtttaggaagactaag

SEQ ID NO: 847403 - DNA, 120 bp, Artificial Sequence
  ENSG00000178722_86 (sequence is synthesized)
ttgattgtgttgtattttcaagtattttatatcgtacaaggatgtttattgcagcactgtttataacaaggaaaaattggaacctactcgaatgcttgctaataggggactcattaaact

SEQ ID NO: 847404 - DNA, 120 bp, Artificial Sequence
  ENSG00000178722_87 (sequence is synthesized)
atggtacaagcttagatatgactctgtagtcattaagaattttgatgaggtattagaaagaaatgtattgatgttgaagtatatttattgatgaaggaaattgttcacaatatttcagcc

SEQ ID NO: 847405 - DNA, 120 bp, Artificial Sequence
  ENSG00000178722_88 (sequence is synthesized)
aataaacaatagtatatgcatttttttgtaataggaaaaaatgcacacagtaaaatagtggttatctttgtgtgcggtgaatatgtatgatacttgttttctttttcatgctcacctatc

SEQ ID NO: 847406 - DNA, 120 bp, Artificial Sequence
  ENSG00000178722_89 (sequence is synthesized)
agacttaaatcctcagtttccatagttaagctactaagatcatgagaggtgcttcctaggagtgaagagaatcggaatgtctaggaaggacatcatgaaaactagttgtgctcttaaacc

SEQ ID NO: 847407 - DNA, 120 bp, Artificial Sequence
  ENSG00000178722_90 (sequence is synthesized)
taactacagttgatcctcaaggacttgagagttaggagctctgacctctgagtaggcaaaaattcacatataacttttggctttccaaaaccttaactcataatagactactgtagagaa

SEQ ID NO: 847408 - DNA, 120 bp, Artificial Sequence
  ENSG00000178722_91 (sequence is synthesized)
ggtttacctataatgtaaacagttgattaacacatatgttacgttatatgcactgtattcttataacaaagcaagctacggaaaagaaaatgttattaagaaaatcatgaagaaaagaaa

SEQ ID NO: 847409 - DNA, 120 bp, Artificial Sequence
  ENSG00000178722_92 (sequence is synthesized)
atacatttacagctcattaagtagaagtggatcatcataaaggccttcagccttgtcatcttcatgctaagtgggctgaggaggagaaggaagaagaggagttgatcttgctgtcttaaa

SEQ ID NO: 847410 - DNA, 120 bp, Artificial Sequence
  ENSG00000178722_93 (sequence is synthesized)
ggtgacagaagtggaggaaaagccacacgaattggccctgcacatttcagacctgtgttgttcaagagtcaacagcagttgcagcagcaggaatagctaactttctccactaactcctta

SEQ ID NO: 847411 - DNA, 120 bp, Artificial Sequence
  ENSG00000178722_94 (sequence is synthesized)
ttcaagagggcagtctgcagtggatgttgttccttgctgcttggagtccccaactcctagacccctttcaggaccaaggcactcatttccccactgctgtgtgcattggctgctgatagc

SEQ ID NO: 847412 - DNA, 120 bp, Artificial Sequence
  ENSG00000178722_95 (sequence is synthesized)
ccacttctgcctccctctggaaattgtctttggccaaaaggggctatctttcccaagttgttgacctctttccaggggcaacttgcattcaataactggctaatgttgaggtacaaaagc

SEQ ID NO: 847413 - DNA, 120 bp, Artificial Sequence
  ENSG00000178722_96 (sequence is synthesized)
ccagtctaattgtttcaatttgggatgattcttaaggtccatcccagctccacagatccttgaaggatcaactgaggtctctgttgcaactgtatcactgtatcgtcttgttactaatcc

SEQ ID NO: 847414 - DNA, 120 bp, Artificial Sequence
  ENSG00000178722_97 (sequence is synthesized)
catttctttcatgtcctcaaggtgttgcgccttaaagcactatccaataaacctcctacatgcaaatctccatctcagaatctgtatccaagagattctactcaagacatcatcttttcc

SEQ ID NO: 847415 - DNA, 120 bp, Artificial Sequence
  ENSG00000178722_98 (sequence is synthesized)
gcagggtcacagggcagttacaccaggatatttggttctttcctactctcctttccccaccctcaatgctatatacataactgctagtgaatcaatttatgtacatatcccagatatcta

SEQ ID NO: 847416 - DNA, 120 bp, Artificial Sequence
  ENSG00000178722_99 (sequence is synthesized)
ggactggttgaggcgggttatccaagagagtcacagtgtattaccattttttattaagtacaaccagaccaacagagaactgattaactcaaccactgaactttatgttttcccccatca

SEQ ID NO: 847417 - DNA, 120 bp, Artificial Sequence
  ENSG00000178722_100 (sequence is synthesized)
tctatagaattgattttactggattttgacatgtcagtttatcacttactttatccttcagtgaaggacacactaaggaatggagttattaagcttgttctactggctgtgaggatgttg

SEQ ID NO: 847418 - DNA, 120 bp, Artificial Sequence
  ENSG00000178722_101 (sequence is synthesized)
ttgagggacattgttcatgacgttatgttgtgtcatttttatgaggactcaatggaaggacttctgtctgatttcagtactggaagtagtcatacttctcctgagcaaccattttctttc

SEQ ID NO: 847419 - DNA, 120 bp, Artificial Sequence
  ENSG00000178722_102 (sequence is synthesized)
aataacaacaggagaccacagttactgctgaatggcatctttcaggctcaagagcttccgcagtctctccacttccatactgattagaagtgcttgagatacatcataacagtgatgatg

SEQ ID NO: 847420 - DNA, 120 bp, Artificial Sequence
  ENSG00000178722_103 (sequence is synthesized)
gaatgagtgaatgaagagtacaagccagaatccctgtgtccctacctgtgggcttttcccttgctgcttgaccttagtgaagtcactccacctctcagtctgctaactccttcataaaat

SEQ ID NO: 847421 - DNA, 120 bp, Artificial Sequence
  ENSG00000178722_104 (sequence is synthesized)
gaagataattatacccaccccagctgtcacagacatgctttgacatttgaaagaggcagcacttataaaagtgttttcgagtgtataaagaacagggcaaggtggtgttagttacctggt

SEQ ID NO: 847422 - DNA, 120 bp, Artificial Sequence
  ENSG00000178722_105 (sequence is synthesized)
tcacaagtgatggctgacatgtatggcactgtcatgggattcagatcagtcaatccctctgactcccgcctcaagaaacagttcacacctacaccaagctacacaaagagtctttgttca

SEQ ID NO: 847423 - DNA, 120 bp, Artificial Sequence
  ENSG00000178722_106 (sequence is synthesized)
gtcaaagcccaaaggcaaagtttatttctctagtagaattctcaggtttcctttcccttcgtacactctggttttataatgtttttattatagataattgtctagggataattttttttt

SEQ ID NO: 847424 - DNA, 120 bp, Artificial Sequence
  ENSG00000178722_107 (sequence is synthesized)
actaccagcacgaggatgaagctgatacccagaaagcacaagcaagaatgtgtgagaagatcacagagacctaaagaaggggaagggaagaacccacatgtgagagagaagagattgtct

SEQ ID NO: 847425 - DNA, 120 bp, Artificial Sequence
  ENSG00000178722_108 (sequence is synthesized)
attagtgtctttttttggtgtacagttccatgaattttaatccatgggtcaatttatgtagctaccgccagcacaatcaggacccagagcagctccatcaccctcagcaaagtcccacat

SEQ ID NO: 847426 - DNA, 120 bp, Artificial Sequence
  ENSG00000178722_109 (sequence is synthesized)
tctttcctgttgtagtcacacccctgtccccacccacactgatgtcaatcactgatatgtcctccatcacagttttgtctttttcagaatatcacgcacatgcaatcatacagtatgcac

SEQ ID NO: 847427 - DNA, 120 bp, Artificial Sequence
  ENSG00000178722_110 (sequence is synthesized)
cctttagaaattttttttttcacttgacatacccttgagattcatccaagcctgtttctctttattacaaagtaatattcctttgtaaggaagtacctctatttgtttattcacccacct

SEQ ID NO: 847428 - DNA, 120 bp, Artificial Sequence
  ENSG00000178722_111 (sequence is synthesized)
gttgaaggacatttggagtgggattgttggcatatatggtaaatgtatgtttaactttccaaaatctgccaaactattttccagagtggctttaatgttttcattcccaaaagcattgtg

SEQ ID NO: 847429 - DNA, 120 bp, Artificial Sequence
  ENSG00000178722_112 (sequence is synthesized)
tgagatatcccagttgctcctcatcctcaccaacacttggtattgcatttgatttttgagccattcttatagacatgttgtggtatgtcatgggtttaattggcatctccctcaaaagta

SEQ ID NO: 847430 - DNA, 120 bp, Artificial Sequence
  ENSG00000178722_113 (sequence is synthesized)
aagtgtttgttcaagtctgtgcacactttttaattgcttgttttcttattgttgaattttgagacttatttatgtgttctgaatacatgtcctctgtcggatacatgatttacaaatatt

SEQ ID NO: 847431 - DNA, 120 bp, Artificial Sequence
  ENSG00000178722_114 (sequence is synthesized)
ttcattccaatctgtgagttgtcttttcattctctcaacaaggtctttgtagaaagaaatttttaattttgatgaagttcaatttattaatttttaatgttactgattatgcttttggta

SEQ ID NO: 847432 - DNA, 120 bp, Artificial Sequence
  ENSG00000178722_115 (sequence is synthesized)
agatgtctaagaattctttgcctaaccacagttcgtaatacagaaaagtttgtaatatgggaaaatacaggctgctttctcctacatttacttttaacatttgtatttttttaattttac

SEQ ID NO: 847433 - DNA, 120 bp, Artificial Sequence
  ENSG00000178722_116 (sequence is synthesized)
atttagacctatgatccatttggagttaatttttgaataaggtgtgaggttgtgagaatttcaaggttcttttttcttttcatttttttgtatatggttgcccaatagtttcaacactat

SEQ ID NO: 847434 - DNA, 120 bp, Artificial Sequence
  ENSG00000178722_117 (sequence is synthesized)
ttattggtttcagaagttttcctctagattttctgggaatttccacataagcaatcatgtcgtctggactagagacagttttatttattcctttctaatctgtatgactctttttatctt

SEQ ID NO: 847435 - DNA, 120 bp, Artificial Sequence
  ENSG00000178722_118 (sequence is synthesized)
cttcttgatgcattgaactagctaggacttccagtacaattccagtaataaaagtaatgtaagtggaaccgcttctcttgtatccagtcttaagtggagggcattcagtgcttcaccaat

SEQ ID NO: 847436 - DNA, 120 bp, Artificial Sequence
  ENSG00000178722_119 (sequence is synthesized)
gagtgtgatgctagctgtatgttttttaattttgtaaagtgctttgtctgcatcaattaatatgatcatatgttttttcttctttagactttcagtatggtggattgaattacagtttta

SEQ ID NO: 847437 - DNA, 81 bp, Artificial Sequence
  ENSG00000178722_120 (sequence is synthesized)
ctatttctgaaacagctaaaagcagatctatcttttgacccagcaactccattactgggtatatacctagaggaatataaa

SEQ ID NO: 847438 - DNA, 88 bp, Artificial Sequence
  ENSG00000178722_121 (sequence is synthesized)
aatcattgcagcactgttcgcaatggcaaagtcatggaatcaatcgaaatgcccatcaatggtagattggataaagaaaatgtgatac

SEQ ID NO: 847439 - DNA, 89 bp, Artificial Sequence
  ENSG00000178722_122 (sequence is synthesized)
gcaataatgagatcatgtcttttgcaggaatatggatggagctggaggctattatctttagcaaattaactcaggaacagaaaaccaaa

SEQ ID NO: 847440 - DNA, 120 bp, Artificial Sequence
  ENSG00000178722_123 (sequence is synthesized)
tattatctttagcaaattaactcaggaacagaaaaccaaatactgcattttctcaattgtaagtgggagctaagtgatgagaacttaactaacacaaagatgggaacaacagacactggg

SEQ ID NO: 847441 - DNA, 120 bp, Artificial Sequence
  ENSG00000178722_124 (sequence is synthesized)
aggagggagaggagcagaaaagataactgttgggtactgggcttaatacctgggggatgaaataatctgtacaacaaactcccgtgatatgagtttacctatgtaacaaatcttcacatg

SEQ ID NO: 847442 - DNA, 120 bp, Artificial Sequence
  ENSG00000178722_125 (sequence is synthesized)
acctatgtaacaaatcttcacatgtacccccaaacttaaaagtttttaaaaaaattatcagcttagattagtgatttgagatcttgcttcttttccaatataaccatttagattagcgat

SEQ ID NO: 847443 - DNA, 120 bp, Artificial Sequence
  ENSG00000178722_126 (sequence is synthesized)
cgatttgagatcttcttttcaaatatgaccatttattgtattaaaagccttttaaatgttttgtttcattgacaaattttgacatgttgtatttttatttatatttagttaaaaatattt

SEQ ID NO: 847444 - DNA, 120 bp, Artificial Sequence
  ENSG00000178722_127 (sequence is synthesized)
attattcttgagatttcccctttgaattatgaataattttgaaatgtgtggtttaatttctcactgaacaatttgctattcttgttctgttattgattttgagtctaattccatactttt

SEQ ID NO: 847445 - DNA, 120 bp, Artificial Sequence
  ENSG00000178722_128 (sequence is synthesized)
aaagacttcaattcttttaaattttttattatttgctttatgacaaaagatatgatttattttgatgaacatttcatgtgcacgtgaaaagatttgtatttgctgtttttggtagagtag

SEQ ID NO: 847446 - DNA, 120 bp, Artificial Sequence
  ENSG00000178722_129 (sequence is synthesized)
tctgtaagtgtcagacctacttaatggtgctgttcttttcttccatatcctggctgatcaaatgtctactagttctgttgatactgaaaaagaagtgttgaagtctccaactatgatttt

SEQ ID NO: 847447 - DNA, 120 bp, Artificial Sequence
  ENSG00000178722_130 (sequence is synthesized)
gaatttgtctatttctgttttcagttttgtgaatttttgcttaatctaatttgaaactctgttgttaaatgcaaatacattagttagatggtatttcttcttggtgaattgatcaattat

SEQ ID NO: 847448 - DNA, 120 bp, Artificial Sequence
  ENSG00000178722_131 (sequence is synthesized)
aattatgtaatgttcctctttatttctagtaagttttttcctttgaagtctactttgtctgatattaatattgccctttcagctgtcttttgatttgtgtgtgcataatatttctctttc

SEQ ID NO: 847449 - DNA, 120 bp, Artificial Sequence
  ENSG00000178722_132 (sequence is synthesized)
cactccctaattacagccggcagttgattgggacagttgaacatggaggctgatggggccagccatggtgttgccatctaagcaaaacacaaacaatacataaactctctgtatgcatta

SEQ ID NO: 847450 - DNA, 120 bp, Artificial Sequence
  ENSG00000178722_133 (sequence is synthesized)
agtccctggagctgcaaactgccctcagggcaaagaagcctgcagaataattgggaggagtctggcaggaaggaagccaaggccaccgtattacagaggcccatatggaaccagctggtc

SEQ ID NO: 847451 - DNA, 120 bp, Artificial Sequence
  ENSG00000178722_134 (sequence is synthesized)
tgagacaagcccaggttctgggccaaagcaaaacaggcaggtgtttgctcaacctctgctaaaggtctatttttaaggctagatgctgaattaggagaagaagcttatgaattgaataaa

SEQ ID NO: 847452 - DNA, 120 bp, Artificial Sequence
  ENSG00000178722_135 (sequence is synthesized)
atactatttgccatcaaaacccctttgaattttagctagtaattcacccataaagtgccacccaccagggagcctcatacggtttcataaatacatatgagagctgctgtggagagagat

SEQ ID NO: 847453 - DNA, 120 bp, Artificial Sequence
  ENSG00000178722_136 (sequence is synthesized)
ggagcccgacgcaggcaccggacacaacatcccacagcttccccatggctttcagaaagcttgcagatatttctctcttctgttctgaactctccacagagaaatctgtcaagggagaaa

SEQ ID NO: 847454 - DNA, 120 bp, Artificial Sequence
  ENSG00000178722_137 (sequence is synthesized)
gcaatgactttgctctcactgggccagaaattccatggctgaaatgacccaggggtagcaggcgggtttgacaatctgtcagtttctggatagtgttactcgtcagtcactcatttttgc

SEQ ID NO: 847455 - DNA, 120 bp, Artificial Sequence
  ENSG00000178722_138 (sequence is synthesized)
taaattgcagaaactcttttctttaaatgaaactttatttgctcatgatgcaggttaagcccagtttctggcatgtgtccagggaattgggtgtgccaccctgtccacttggtcatgggg

SEQ ID NO: 847456 - DNA, 120 bp, Artificial Sequence
  ENSG00000178722_139 (sequence is synthesized)
aaaccgttaagtcagccttcagtctggacatctctgctcaaggctttagttaatttttcttcccatctgagacttaaccgctgggactgttttacatatgaagataagaaaacaaccgaa

SEQ ID NO: 847457 - DNA, 120 bp, Artificial Sequence
  ENSG00000178722_140 (sequence is synthesized)
acttgattttgctctatggagataaaaataaggtagcattttattcaagaagaatgtgtgtaataacagtaatctgaaaataatgatatctataaggtctttggcaaagccacccaggaa

SEQ ID NO: 847458 - DNA, 120 bp, Artificial Sequence
  ENSG00000178722_141 (sequence is synthesized)
aagaaaaacaatagatgtgaaagcttcagtgagtcataacaccacctttcagcatcaaaatgccctggaatcagattcagataaactggtttcatcagctctagactcagctgtatgcgt

SEQ ID NO: 847459 - DNA, 120 bp, Artificial Sequence
  ENSG00000178722_142 (sequence is synthesized)
ccctttttattccttgtgccgattgcacattctccagataatggcaaggtattggctctccttcaaaacactcaattgtgcagcagaggaaagaaaaggattccttgtaagctttttcat

SEQ ID NO: 847460 - DNA, 120 bp, Artificial Sequence
  ENSG00000178722_143 (sequence is synthesized)
gtctaaacacaaaaatagctctcttcctgggcctgcccagtgggcttcctttccctctggacatctacagagtactgctgactggactagtgttcatcaaaggtggtctgtggaccacgt

SEQ ID NO: 847461 - DNA, 120 bp, Artificial Sequence
  ENSG00000178722_144 (sequence is synthesized)
gtattcgaatagtttaaaagcttatttaaaatgcagatttctgggactcactggagacctagtgaatctgatctcctaggtagagccaaggactgtgcatttttaacggctccacacccc

SEQ ID NO: 847462 - DNA, 120 bp, Artificial Sequence
  ENSG00000178722_145 (sequence is synthesized)
aaggattctaaggcatcctagggtttaggggccactgggtttgtccagccatacagccctcaccttatcctgctgcctgcgttgtcacttggcttcctacatttgagtgtctcttcttcc

SEQ ID NO: 847463 - DNA, 120 bp, Artificial Sequence
  ENSG00000178722_146 (sequence is synthesized)
cagtgcaattctaagcacaagggatgcgtttgaaattctttctttgtccctgttagtgcctagttcgctgtaggtgtttaaaaaatttttttgttgaatgaaggacctgaaataatttct

SEQ ID NO: 847464 - DNA, 120 bp, Artificial Sequence
  ENSG00000178722_147 (sequence is synthesized)
ctttgcttacaatttgttcaaagaaactcttttgcctacagaagattggatcatgaatttgccaatttgatttcaaaacaaacggatctctctctctatagacgtgtctgtgtgtatgag

SEQ ID NO: 847465 - DNA, 120 bp, Artificial Sequence
  ENSG00000178722_148 (sequence is synthesized)
tgttttgagtcaaaggtccgcctttgtccagaagaggacaacaaaggatataccgttgggaaaaaaattgtataactcaaaacgtgtaagcagtctttgccctttctgagaaccactgtc

SEQ ID NO: 847466 - DNA, 120 bp, Artificial Sequence
  ENSG00000178722_149 (sequence is synthesized)
agaaaagctctgtgaagattttagggtaaggggtgtcctaggggaataggggagtgtgtgtgtggtgtggttgaggggatactaaaagcccatctgactagctgcacctggctctttggt

SEQ ID NO: 847467 - DNA, 120 bp, Artificial Sequence
  ENSG00000178722_150 (sequence is synthesized)
ctgtctccatgtgtacaaataaagtcacttttcttcaagtcaagggcacagctcagtgtattagagtgtctaaccccagagatcaggaaagatatgttttgccagagttagagagcctgg

SEQ ID NO: 847468 - DNA, 120 bp, Artificial Sequence
  ENSG00000178722_151 (sequence is synthesized)
ggctgcagcagtgctggtggcaggtctggatggggagtgaggatcgagttgggctcctggtggggaggagaaaagatccctggagagggcagtgggtgcagggcacgtagagccagcgcc

SEQ ID NO: 847469 - DNA, 120 bp, Artificial Sequence
  ENSG00000178722_152 (sequence is synthesized)
tcctctttcccagtcttgttcagagttgcccctgaggcaaaacccaagatgaggctgcacaacacatgtgaagacgggagcatcaggaatgagagggagggaaatggaagtgagagaaca

SEQ ID NO: 847470 - DNA, 120 bp, Artificial Sequence
  ENSG00000178722_153 (sequence is synthesized)
actccagactctccgagttggatctaacctcacttggctagacctgcccttgggattttggaatctgatctgcaacctcctgaacatcttgtttgaggagtcctagggtagggatgcaca

SEQ ID NO: 847471 - DNA, 120 bp, Artificial Sequence
  ENSG00000178722_154 (sequence is synthesized)
ctccctcacagctacagtagggatgagaaagtacgttcatagactgagctgtgatccacctgctggtgatttctgcccttagctcatacccttctctttccttccttttctggactctac

SEQ ID NO: 847472 - DNA, 120 bp, Artificial Sequence
  ENSG00000178722_155 (sequence is synthesized)
ttcctgagagaaggctctttgtcctctctaagtttcctcttctgtaggttgaatttccctagctacttccacttctcctatggtgtgcctccctgccgctcttttttccatgcatggact

SEQ ID NO: 847473 - DNA, 120 bp, Artificial Sequence
  ENSG00000178722_156 (sequence is synthesized)
ttctaaccccaggctgcctctgtcttccagtggggccctcactgtttctgtcagcagcacctgcaatttctcagtcagccaggcttggacaattgaacttagccttgcctccttcttctc

SEQ ID NO: 847474 - DNA, 120 bp, Artificial Sequence
  ENSG00000178722_157 (sequence is synthesized)
tcttatcctgaagctgttgggaattgcgtgtgcacacgcatgtgtgtgtacacgtgtgtgtgcacagttctccataggaggtttgcacatttgtgactgtttttgtcctggagaagtccc

SEQ ID NO: 847475 - DNA, 120 bp, Artificial Sequence
  ENSG00000178722_158 (sequence is synthesized)
caaggcagaaagcaaaaatgtagctggtctaagcttgaggtgggtcatgcctgtggctggactctctcaaggagagcctgaaagcatgtggaactgcccaccacagccgaggctgaagcc

SEQ ID NO: 847476 - DNA, 120 bp, Artificial Sequence
  ENSG00000178722_159 (sequence is synthesized)
agaggagagctgcggccaggggatgtgtatagcaccaaaagtggctactatacagaaccccacacctgcttaaagccttgccaagatgtgttttccattgctgtcaggatgagttgtgtg

SEQ ID NO: 847477 - DNA, 120 bp, Artificial Sequence
  ENSG00000178722_160 (sequence is synthesized)
tcttatttttgcagacaaggcctttcctgaatgatacagtttggacatttgtcccttccaaatctcatgttgaaatatgaccccctgtgttggaggtggggcctggtgggaggtaatggg

SEQ ID NO: 847478 - DNA, 120 bp, Artificial Sequence
  ENSG00000178722_161 (sequence is synthesized)
atcatgggagcagacccctcatggatggcttggtgcagtccttgcaatagtgagttctcatgagatttgcttgtttaaaagtgtgtgacgtctccctcttctctctcttgctcctgctct

SEQ ID NO: 847479 - DNA, 76 bp, Artificial Sequence
  ENSG00000178722_162 (sequence is synthesized)
cttcatgcgacacacctgtcaccagaagctcatcagaagcagatgctggcaccactcttcttatgctgtctgcgta

SEQ ID NO: 847480 - DNA, 120 bp, Artificial Sequence
  ENSG00000178722_163 (sequence is synthesized)
agccacccaatcagtcaacccctaagcttccctgctgctctactttctgttatacaggataggacgtttccttaaatgtttaaaccactttgaatcagggtttctgttgcctcatggccc

SEQ ID NO: 847481 - DNA, 120 bp, Artificial Sequence
  ENSG00000178722_164 (sequence is synthesized)
aaagcatctgaagcgatggagagaattttaagtccaatttctcatttcacagaagatgtaacagagtgtgctcaatgttatgttgcaggtgacagcagaacacaggaatagagaggctga

SEQ ID NO: 847482 - DNA, 120 bp, Artificial Sequence
  ENSG00000178722_165 (sequence is synthesized)
atcttctgctttagagccatttttagtcagatgctgcccctcttacaatttacttaattataaattaaagatggtttaagagtgtatctctcaagtcactgtccttgtatttgacaaaat

SEQ ID NO: 847483 - DNA, 120 bp, Artificial Sequence
  ENSG00000178722_166 (sequence is synthesized)
aaacgctttgttcctaatgactagggagcagtgacctgggagacttgatctgtttggtaactgtgggcgagaaagacgaaatatatctctttgggtcaagacttagcatttgtaaagtaa

SEQ ID NO: 847484 - DNA, 120 bp, Artificial Sequence
  ENSG00000178722_167 (sequence is synthesized)
ggaagaccacaggatgttattcaaagcctttgccaaggctttggttggaagatttaatggaatccacaggcagagaatagggtgagggtaggaggtggggatacaggttaggaaggttgg

SEQ ID NO: 847485 - DNA, 120 bp, Artificial Sequence
  ENSG00000178722_168 (sequence is synthesized)
tttatcctttctgttcccaggggcatttcttctatcaggtcattccctcagctgcaaggcctcctgtttgcctctaatgctacttccaatctgtccatgctgcagggcccaggttatact

SEQ ID NO: 847486 - DNA, 120 bp, Artificial Sequence
  ENSG00000178722_169 (sequence is synthesized)
atattgcctctatcaagtcttcccggatcactttagcatgcaccagtaactcattttcagaactcactcatttcctgaactctttactcattcattaaacatgtcatgttacagaatatt

SEQ ID NO: 847487 - DNA, 120 bp, Artificial Sequence
  ENSG00000178722_170 (sequence is synthesized)
tctcttctggtatttcactcattttgctcctaaattttatcttgaggaagcagatcagaaaaaaagaaacgacatagactttaagggcacattgacttcacttgaatcctgctctagggc

SEQ ID NO: 847488 - DNA, 120 bp, Artificial Sequence
  ENSG00000178722_171 (sequence is synthesized)
ccctgccttgcagaactccaggggccagttagatagcatgcagtcctgactggttctaccactctggagcaactgtctatgaccacctcaaatccattgtggaatgcaaatggggcatac

SEQ ID NO: 847489 - DNA, 120 bp, Artificial Sequence
  ENSG00000178722_172 (sequence is synthesized)
tgtattagtttctattgctgttccaacaaatgactacaaactcagtggcttaaaataacacaaatgtataactgctatagtttaatatcccctccaaaacttaggttgaaatttagttgc

SEQ ID NO: 847490 - DNA, 120 bp, Artificial Sequence
  ENSG00000178722_173 (sequence is synthesized)
cattgtaacaatgttgaaacatggtcttacaggaggtgattaggtcatgagggctctgccctcatgaatggatcaaggctgttaatcacaggagtgtgttagttatcaaaggagtgggct

SEQ ID NO: 847491 - DNA, 120 bp, Artificial Sequence
  ENSG00000178722_174 (sequence is synthesized)
ccacatagaagaatgaagttctggttcccttcctctctctctctcgcatgctctcttgtcaggtaatgccttctgcatgttatgacacagcaagaaggccctcaccagatgcagcccctt

SEQ ID NO: 847492 - DNA, 120 bp, Artificial Sequence
  ENSG00000277151_0 (sequence is synthesized)
attctcatgtctgagattgctttataatttatcatactagcattattccagtattgatgtaaggagttttgctagccttctagaatgagttggagagttgtttgtatttttctatgaacg

SEQ ID NO: 847493 - DNA, 120 bp, Artificial Sequence
  ENSG00000277151_1 (sequence is synthesized)
tttatgtagtgtaggagttatttgcttcctgaaattataatagaatttttaaaagttttatttggtgctttctaaaattttaagtaaaaaagtgtttcagacatgcaggaaataatacag

SEQ ID NO: 847494 - DNA, 120 bp, Artificial Sequence
  ENSG00000277151_2 (sequence is synthesized)
cagacattgattatctcattaatagatattcatgatctcatttcccaaatttaaaagataccaacgttgctgtgtttcagttagcattaagttctccccctcaacacacacacacagatg

SEQ ID NO: 847495 - DNA, 120 bp, Artificial Sequence
  ENSG00000277151_3 (sequence is synthesized)
cacacctacccacttcctgtgagtaaggaataagatctcagaaacgtttagcaagctgcgtttcttgggtttgaagaatgttgtataattgtgtgtgtcacaggcactgtggagtgactg

SEQ ID NO: 847496 - DNA, 120 bp, Artificial Sequence
  ENSG00000277151_4 (sequence is synthesized)
atttgtctctgtcccttggtggagaagataagctcacttttaacatataaaaaagctgtgcacaagctgcattcccttttttgtcttatcctaataatgtgtatcattctcatgcatgtg

SEQ ID NO: 847497 - DNA, 120 bp, Artificial Sequence
  ENSG00000277151_5 (sequence is synthesized)
ttcatcttcattttacttatgtgtatttaaaatacataggactatttcgtgtttttaaaattttttggaaaaaagacatcatagttatcattttgaaacctatttttcacccaacaccgt

SEQ ID NO: 847498 - DNA, 120 bp, Artificial Sequence
  ENSG00000277151_6 (sequence is synthesized)
gtctttgaaatatagccatattgacatttgttgatctccatttcttcacaatataacatcttttaaaattgggatgcttcctaaatcagtggtgtcttaaaattggcagcattttcttaa

SEQ ID NO: 847499 - DNA, 120 bp, Artificial Sequence
  ENSG00000277151_7 (sequence is synthesized)
tgacagaataatgctgtaccttataatcgatgttatcttagatttgattacatccagtagttaattcctcttaattgctgtaaagcattctgttgtttgaatatacaacagttaatccat

SEQ ID NO: 847500 - DNA, 120 bp, Artificial Sequence
  ENSG00000277151_8 (sequence is synthesized)
ttctctatcatagttaatcatttttcttattggtagataatcaggttgtttgcactttcacttttataagcagttcgaaagtaagcattcttcctgtctcataaacaattattctgaatg

SEQ ID NO: 847501 - DNA, 120 bp, Artificial Sequence
  ENSG00000277151_9 (sequence is synthesized)
aaaatgttgaatttagtaaatatggatattctgctttctaggtattgccaaattgcattcctaagtagttatattactttatacttccgccagcaatgtataagagctcctgtttgcttt

SEQ ID NO: 847502 - DNA, 120 bp, Artificial Sequence
  ENSG00000277151_10 (sequence is synthesized)
tcatttttagatttgtatcagtttgaaactgtatttatgttgtgagctaaggatcttattttctccttttcaaatggatagccattcgcctcagtatcattagttattgaatagtttatt

SEQ ID NO: 847503 - DNA, 120 bp, Artificial Sequence
  ENSG00000277151_11 (sequence is synthesized)
ctctacttgacttacagtgctctatccgccatatactaaatgcaggcagttacagattaagatctgtttctaggcttccttttctattgcattagcttatgtatgtagtatatttactgt

SEQ ID NO: 847504 - DNA, 120 bp, Artificial Sequence
  ENSG00000277151_12 (sequence is synthesized)
agttttatagtaaggcatctccttattaatactcttcaaaattgtcctgactattgtctttttataactacaagaatttttaaatcatgttgcctgattctggggaaaaatctttaggat

SEQ ID NO: 847505 - DNA, 120 bp, Artificial Sequence
  ENSG00000277151_13 (sequence is synthesized)
ttttattagaactacttcgaatttaaaaatatatatttggagaaaatggccatctttatgatgttgaatcttcccatttatgaatatggctggttagttggtcagtctctttgtaatcga

SEQ ID NO: 847506 - DNA, 120 bp, Artificial Sequence
  ENSG00000277151_14 (sequence is synthesized)
tcttgcttctttttctatcaataaagttttacaattttcttcataacagtcttgcacattgtaactttctttaaaagtacctttctaattgtttgttgttggtggataagaacactagtt

SEQ ID NO: 847507 - DNA, 120 bp, Artificial Sequence
  ENSG00000277151_15 (sequence is synthesized)
tagtctccatttcatcttattaaaaactgtgtgactcctttggtgcttagtagatttttttaggagctgaaacttttattgtctttttagctgctccatggttggttaagccagattgtt

SEQ ID NO: 847508 - DNA, 120 bp, Artificial Sequence
  ENSG00000277151_16 (sequence is synthesized)
ccttctacctggctcaattttggtaatcttttccttggaaatcatgcatttctaggtttgaaaatttgttaggaaaagttttaacataggctgttttattttgtaaatctctgcagcatc

SEQ ID NO: 847509 - DNA, 120 bp, Artificial Sequence
  ENSG00000277151_17 (sequence is synthesized)
tctctctatttttttttcttgagtctaagttttttgtcaacattttttcctttatcattggaatcattaaaaatttccaagaagcagcttttggttttatttattgagtatttatttcta

SEQ ID NO: 847510 - DNA, 120 bp, Artificial Sequence
  ENSG00000277151_18 (sequence is synthesized)
taatttttgcagtgatcctcatttcttttttcaacttcacttgcacttagtagttcttttagtctcttgggttgaatgcttagttcacgtatatcttggtctttcttgttttctaatata

SEQ ID NO: 847511 - DNA, 120 bp, Artificial Sequence
  ENSG00000277151_19 (sequence is synthesized)
tgcattcctcttataagtacttcttgattatatcacataggtcttgtttggtggtgttccactttttgctcatttccaaatagtttgtcgttttagttttgattattaagcctagtgttt

SEQ ID NO: 847512 - DNA, 120 bp, Artificial Sequence
  ENSG00000277151_20 (sequence is synthesized)
ttttttttcctcccaaaagaggaaaaaaatgtggggataggcttgaagggaggggcgtattttttattttattatccttttgttattcttacgtagctaaatttatgggccaagaatgtc

SEQ ID NO: 847513 - DNA, 120 bp, Artificial Sequence
  ENSG00000277151_21 (sequence is synthesized)
acttgtataatttcggttgtctgtattactgagagatttttctgtgtctttatgtatgctgaaaagaaggtttattcacagtttgtgtgtatctgtattttagattgagcttgttaattt

SEQ ID NO: 847514 - DNA, 120 bp, Artificial Sequence
  ENSG00000277151_22 (sequence is synthesized)
ttttgtctgtcaaactttctggtttagggtagatggttttgttaatgtctcccataaagattatgaatatttctccttgtatttgtatcagtttttactttatgtatttcaaagttttga

SEQ ID NO: 847515 - DNA, 120 bp, Artificial Sequence
  ENSG00000277151_23 (sequence is synthesized)
tgtgaggagtcctatgactgatatgtattcttgatgcattgtatcatgtcagcagtattaaatacctgtttttttctccttaatgctttttgattgaattctatggtcttaatcttgcta

SEQ ID NO: 847516 - DNA, 120 bp, Artificial Sequence
  ENSG00000277151_24 (sequence is synthesized)
tgctttttattagtatatgatactcctttttatcaacttccctgtgtcattttgtgttccatctgattcaaaaacagcatttagctatttttattacttattttttcctccattttctct

SEQ ID NO: 847517 - DNA, 120 bp, Artificial Sequence
  ENSG00000277151_25 (sequence is synthesized)
attcttcttcaggaagtcttagagtttttgagattttagagccagctgtcttccacatctcagctttaccctggcaacacttttctccagcatgtgctttgggctataattctttctcaa

SEQ ID NO: 847518 - DNA, 120 bp, Artificial Sequence
  ENSG00000277151_26 (sequence is synthesized)
gatatacttttttccccagaatttgtcaagatttgtacgtttctttttctcatcattgcggatttatctagtatgtttctgtgtttttatattatctcccatcattttatgagggagggt

SEQ ID NO: 847519 - DNA, 120 bp, Artificial Sequence
  ENSG00000277151_27 (sequence is synthesized)
agttgccagtaatcattgttctgtcttgatcctgtggtgtccctccctgattccagcacttaggttttattcttaacctgtttggtttggggcacaagagtttcataaacctgtattcaa

SEQ ID NO: 847520 - DNA, 120 bp, Artificial Sequence
  ENSG00000277151_28 (sequence is synthesized)
tccatcatctttgagccttcctgagctgcttcttaaaaggctgttatcttacagcgtgtcattattttactactgttcatctcataagttggagtcacttcagttcctcagggcttctgc

SEQ ID NO: 847521 - DNA, 120 bp, Artificial Sequence
  ENSG00000277151_29 (sequence is synthesized)
tagccaccccagatggagagcagctcattttttggacctattattggagagtgtcagtgactatatcccgtccttttttgtaggtcctattcatgacttctgtatatcccttccttttta

SEQ ID NO: 847522 - DNA, 120 bp, Artificial Sequence
  ENSG00000277151_30 (sequence is synthesized)
ctggcctctgtgacactattctaatagggttttcttcctacctttctctatcccccttattttcactggtggtttttcttcactcattacttaattggcattgcaacttaatgtaagagt

SEQ ID NO: 847523 - DNA, 120 bp, Artificial Sequence
  ENSG00000277151_31 (sequence is synthesized)
cattggctttttgtcctctttttaaaggtaaaaaataattgtactgacttttatacaatagtaattgtacttttattatcccttgagaaaatatgtatgtatatagataacagacatatt

SEQ ID NO: 847524 - DNA, 120 bp, Artificial Sequence
  ENSG00000277151_32 (sequence is synthesized)
actttggtagagccatatcattaatatacactgattttaaaaacacttgctttgaaagatctcactttactatcttctttaatcatcacaacaacatatagtatgattggataagtatga

SEQ ID NO: 847525 - DNA, 120 bp, Artificial Sequence
  ENSG00000277151_33 (sequence is synthesized)
ggcagataaaatgaagtaaatcttgcaaggaagcaataatattttataaatttacctgttctgaagggtacttttttttttttgaaatggactcttgctgtatcactgctggagtgcagt

SEQ ID NO: 847526 - DNA, 65 bp, Artificial Sequence
  ENSG00000277151_34 (sequence is synthesized)
gttggccagctggtctcgaactcctgaccagttgtcaggagttgtcaggagctgatgaggtgtca

SEQ ID NO: 847527 - DNA, 120 bp, Artificial Sequence
  ENSG00000277151_35 (sequence is synthesized)
acaggcgtgagcccctgtgcccggcctcaagggtacttctgaccatacctaaacttaggcagtaactttagatttgccatgctctataagtttttactcctccccatgtacatttgaatg

SEQ ID NO: 847528 - DNA, 120 bp, Artificial Sequence
  ENSG00000277151_36 (sequence is synthesized)
tttgaatgatattacatttatagggaaaatagtcgccactttattttggtgtagatgtgtttattacttgtgttaactccagatgtaaagccaagtgtaaaatagctgatggagccttca

SEQ ID NO: 847529 - DNA, 120 bp, Artificial Sequence
  ENSG00000277151_37 (sequence is synthesized)
ttctgctggctctgtaaatgtaatagatgtgtgatcacaggcaagtcatttatctgtctgcagtatggtttcctcatctatcaaataggcaaaaaatagctcttaaaaacgagtgtcatc

SEQ ID NO: 847530 - DNA, 120 bp, Artificial Sequence
  ENSG00000277151_38 (sequence is synthesized)
aatcaaataaaatatggtgtgtgtgaaaaatctttgtaaagcataaagaacccatgacaggcttcactgtcagccatgcctacctcatataacaaataacagttaaaattgttagccttt

SEQ ID NO: 847531 - DNA, 120 bp, Artificial Sequence
  ENSG00000277151_39 (sequence is synthesized)
agttatcaaagcatatgtcacgaattcagttcatggggatccttgcccacttatggataagagggtaatagttggtatttaaagaaaacattaactgcagagatatgatacagatatgta

SEQ ID NO: 847532 - DNA, 120 bp, Artificial Sequence
  ENSG00000277151_40 (sequence is synthesized)
gctatagatatatctcactgaaatttatatgagtcagaggtggagaatatccaagccatgttaccatcttccagtatccacttcttatgggctctcaaatatcggacctttgcccattgc

SEQ ID NO: 847533 - DNA, 120 bp, Artificial Sequence
  ENSG00000277151_41 (sequence is synthesized)
ctaaactgcagttcatcttgccaactggttttgttttgattcctatttattatgtcttaggctgtaatctcatccagacctgattctgagaccaagctctgtgtcttcttgccttacttg

SEQ ID NO: 847534 - DNA, 120 bp, Artificial Sequence
  ENSG00000277151_42 (sequence is synthesized)
ctgcttttgacctcttaaactagagcttatcattttaaatggcccaacttgattacactgtagataagactaaatactgtgactctgagaaaaaataaactttatttgtgcgacaaatta

SEQ ID NO: 847535 - DNA, 120 bp, Artificial Sequence
  ENSG00000272304_0 (sequence is synthesized)
ataggttagccattatacacagtactgcaatgaacatgggagtgtaaacatctctttgacacactgatttcaaatctttcagttcaaaaattcatgttgcactgaagctcattgtttgca

SEQ ID NO: 847536 - DNA, 120 bp, Artificial Sequence
  ENSG00000272304_1 (sequence is synthesized)
aactcattcagcatattggcattagatctaaaaagaggatgtacaacatgaaaacaaacatctttcttagttggctctttcatcttttatataactatgcaactcagtaaccattaggac

SEQ ID NO: 847537 - DNA, 120 bp, Artificial Sequence
  ENSG00000272304_2 (sequence is synthesized)
cagagtttgtgatgtcaacaaacttttttcagtagtgactacggtactactgcccatagttagttatcactgcagttttgctggcagcctgagatctacaaacccttgaaattatggagc

SEQ ID NO: 847538 - DNA, 120 bp, Artificial Sequence
  ENSG00000272304_3 (sequence is synthesized)
actaatttgtttaaatagccgtttttttaagttggcctaagaccaggaataacaatgagttctctaaatttattggatattttatttatttttgaactttattttgtgatcgtatagctt

SEQ ID NO: 847539 - DNA, 86 bp, Artificial Sequence
  ENSG00000272308_0 (sequence is synthesized)
tccggcctggaaaggggacagaaaactggaatagaaaattattaaggttcattcctgctctaaaatcacaaatcatcatattttct

SEQ ID NO: 847540 - DNA, 120 bp, Artificial Sequence
  ENSG00000272308_1 (sequence is synthesized)
gaggtagagtgtcattataaaagttttatgaattgtcttaatactgagtgaacactcaaattctaatggaatgaattttgcctgaattacacttttaaagcaaagtttccatgtgaatta

SEQ ID NO: 847541 - DNA, 120 bp, Artificial Sequence
  ENSG00000272308_2 (sequence is synthesized)
ttatggagccatcattgattacctatttgattttgcaagtttattcatttgtagaacgggaataaaatacaccttacaaagttgtaagaataaatgaaataaagttctgaaatataagaa

SEQ ID NO: 847542 - DNA, 120 bp, Artificial Sequence
  ENSG00000277159_0 (sequence is synthesized)
ttccgcgcttctgtttccctagaggaaggaaagaagttgagaaaattcagagccaaatgtagattttctcgagtgcctcattccccacagcgatcttgctggtaaccgggagtgtgtttt

SEQ ID NO: 847543 - DNA, 120 bp, Artificial Sequence
  ENSG00000277159_1 (sequence is synthesized)
ttctgcatcaaatgctcaaatgcggtcttccaaaatgtttccgactgcggcaggaatttcaaacgaaatcctcggagctagaagaagagttacagaaaatcgcgaatttccaggcaacac

SEQ ID NO: 847544 - DNA, 120 bp, Artificial Sequence
  ENSG00000277159_2 (sequence is synthesized)
gccagggatttggggaagagaacagtaaaacgtaacagaaatagcagcttcctgacacggtggaagtcatctggtgaagattttttatacattttatatcgactttttaatctcctaatt

SEQ ID NO: 847545 - DNA, 120 bp, Artificial Sequence
  ENSG00000277159_3 (sequence is synthesized)
tatgagtaaagtgttaacctaagaagtaagaatgcattttgtagctcatcattgtttaaatagaggctttgaaattcagcccgtctcggtgattgtagccgccattacaaagtggctgcg

SEQ ID NO: 847546 - DNA, 120 bp, Artificial Sequence
  ENSG00000277159_4 (sequence is synthesized)
ggaggggtctggcctctgctcagccactcactgctgtgtgatcttgggcagagcacttgatgtctctgagcccgtctcctgaagcccaaagccaggctgtaatatctgtgtcggctgttc

SEQ ID NO: 847547 - DNA, 120 bp, Artificial Sequence
  ENSG00000277159_5 (sequence is synthesized)
cgtgaggaaagatgcctcatctctagctcttcctcaaggctatgaatataatcaaaggcggatgctcagggctgtgaataagagttcagtgacgcagcgttttatccagtgcattcctct

SEQ ID NO: 847548 - DNA, 120 bp, Artificial Sequence
  ENSG00000277159_6 (sequence is synthesized)
tcccaggcgtctgtgacatcgtcttaccgaccagctgccccactctgggacatttacatcgctttgcagtggccgcactgacggtcgacagctgcgccaggacttaaggctccagcctgg

SEQ ID NO: 847549 - DNA, 120 bp, Artificial Sequence
  ENSG00000277159_7 (sequence is synthesized)
tcccctccttgcttcccagcactgcctggtcaaatggtggaggacaaagtggaggcagaagacggaggcgcagctgacacgtggactaagggctctccaggcattccgacttctgaagag

SEQ ID NO: 847550 - DNA, 120 bp, Artificial Sequence
  ENSG00000277159_8 (sequence is synthesized)
gtggctgacagcctgagctccatggaaaggttgggataaagagcctgtgtgattgtctactccaaattcatgactttacagatgggcttcagccaatggtttgggtcccaagctgttgtt

SEQ ID NO: 847551 - DNA, 71 bp, Artificial Sequence
  ENSG00000277159_9 (sequence is synthesized)
gatgggcttcagccaatggtttgggtcccaagctgttgttattattattattattattatcattatcattt

SEQ ID NO: 847552 - DNA, 86 bp, Artificial Sequence
  ENSG00000277159_10 (sequence is synthesized)
caagctgcttttagaatggcttttactttcttatatgtaatagcgaagaatttaaaaatgtaaagacaagccagatgtcatgtttg

SEQ ID NO: 847553 - DNA, 120 bp, Artificial Sequence
  ENSG00000277159_11 (sequence is synthesized)
agaatttaaaaatgtaaagacaagccagatgtcatgtttgaagagggaaattaatcccataaagagcagcacatccatgtgatggggtattaggaggccctcaatagccaagggttagcc

SEQ ID NO: 847554 - DNA, 120 bp, Artificial Sequence
  ENSG00000277159_12 (sequence is synthesized)
tttttgatgacatagaaaaatatgagatatgatattgagtgaaaagggaggttataaaatatcatgtgtagtgcaatcacaagtgtatgcacacacgcggtggagagagactgggtggac

SEQ ID NO: 847555 - DNA, 120 bp, Artificial Sequence
  ENSG00000277159_13 (sequence is synthesized)
atttttgccaatgaaataaaaataaatttgggccaggcatggtagctcacttctgtaattacagcactttgggagtctgaggtgggtgggttgcttgagcccaggagttcgagaccagtc

SEQ ID NO: 847556 - DNA, 120 bp, Artificial Sequence
  ENSG00000277159_14 (sequence is synthesized)
ggtgggtgggttgcttgagcccaggagttcgagaccagtctaggcaacatgtcaagacctcatctctacaaaaaattaaaacatgagctgggtatggtggcatatgcctgtagtcccagc

SEQ ID NO: 847557 - DNA, 86 bp, Artificial Sequence
  ENSG00000277159_15 (sequence is synthesized)
caacaaaacaaacaagtgtgttggtgaatatttgaagatagtttctcaaactaaaagatacccaaagaaaaccttggaaatataaa

SEQ ID NO: 847558 - DNA, 120 bp, Artificial Sequence
  ENSG00000277159_16 (sequence is synthesized)
caaactaaaagatacccaaagaaaaccttggaaatataaaaagaatgcatgaattgaaaacaaaaagccataatacaagactctaaagatctggaatgaaacctaataagagactggtag

SEQ ID NO: 847559 - DNA, 120 bp, Artificial Sequence
  ENSG00000277159_17 (sequence is synthesized)
gtcaaatgagagcaaagcatttgaatttgactggattgttttctcactggaaatagtgattctatgagttcaccattaacacattttttgactggaaaactgctataggatcccagggag

SEQ ID NO: 847560 - DNA, 120 bp, Artificial Sequence
  ENSG00000277159_18 (sequence is synthesized)
gactaaatttgaacagaggaagtggacagtgttgcagtctctgttctagctcttgcttctagaataggagagttaagagcaccaatttgggatgaagaaagcagaaagcaattatcgata

SEQ ID NO: 847561 - DNA, 120 bp, Artificial Sequence
  ENSG00000277159_19 (sequence is synthesized)
tcaatcaagagagcagaacagcctctctccctccatcctccctctgccctcttctcccttcctccttctctgctttcctttcactctgtgtatgttagctttggccccattccataagcc

SEQ ID NO: 847562 - DNA, 120 bp, Artificial Sequence
  ENSG00000277159_20 (sequence is synthesized)
tcactctgtgtatgttagctttggccccattccataagccgagataaaaatgctaggcatgataaatttgtgactgttactaacatttaggattttttttttgagatggagtttcactca

SEQ ID NO: 847563 - DNA, 80 bp, Artificial Sequence
  ENSG00000277159_21 (sequence is synthesized)
agcaattctcctgccacagcctcgcaagtacttttgtatttttagcagagacaaggtttcaccgtgttggccaggatggt

SEQ ID NO: 847564 - DNA, 75 bp, Artificial Sequence
  ENSG00000277159_22 (sequence is synthesized)
tgcgatctgcccacctcagacatttaggaccgttatatggaattcttcatatcttctaagttttaaaaaaacaaa

SEQ ID NO: 847565 - DNA, 120 bp, Artificial Sequence
  ENSG00000277159_23 (sequence is synthesized)
tatggaattcttcatatcttctaagttttaaaaaaacaaaatctaccaaatattagagatttagtagttaaataaaatcattaggaaagagcaaagacttgcccagttttaggtggagta

SEQ ID NO: 847566 - DNA, 120 bp, Artificial Sequence
  ENSG00000277159_24 (sequence is synthesized)
aattctggaacttttaatacaaagataggctgggaaactgcaaagataactttgcggttcttcttgtatgcaaatctgtgatcatggatggagaagcctggaggagaatcggaaggcaag

SEQ ID NO: 847567 - DNA, 120 bp, Artificial Sequence
  ENSG00000277159_25 (sequence is synthesized)
gtcaaactttatgggttgtgatccatttggttctttcagtaagaatccacaattgataaaatactagagtttgtgtttcttagctgagaatgcaggcgcgaggaagtaaaatgatttctt

SEQ ID NO: 847568 - DNA, 120 bp, Artificial Sequence
  ENSG00000277159_26 (sequence is synthesized)
ctcgtcagtagtagagccacctaaccccagtcttcggcctcaagctctttctgtgctttattaaatcagctgctttttaacagaaaaccgactttgcacaccagactataatgcaggtct

SEQ ID NO: 847569 - DNA, 120 bp, Artificial Sequence
  ENSG00000277159_27 (sequence is synthesized)
tgctttgggaatatttacatggtaatcttatagtcacattatacactaaataaatgttagctgggccatttgtgtagaaatataacttgtgcaaaataaaaccgttaatgtgtaaaacac

SEQ ID NO: 847570 - DNA, 120 bp, Artificial Sequence
  ENSG00000285821_0 (sequence is synthesized)
agagattccatttcttcctgggattaggaagcacgaagtgtccagatctgcttctgaaatctcttcctcccttaagggtcaaagctgcctcatgcagacggagaggagaagctgcgttcc

SEQ ID NO: 847571 - DNA, 120 bp, Artificial Sequence
  ENSG00000285821_1 (sequence is synthesized)
ctgcctttcccgaattgtttgtggactgtgagtgatgcatgtcctgtggcaccatgggagcaccagggaacaccatgctgtctctccccggagcccccactggcgtcctggccatttcca

SEQ ID NO: 847572 - DNA, 120 bp, Artificial Sequence
  ENSG00000285821_2 (sequence is synthesized)
gcttgtctcccaaagacaggcttctttgtgctttggtcacacggagaattatcagtgcagtctctgtctctctctctcatttccccctaaattgccacatgttgcaactcccaggcgtgc

SEQ ID NO: 847573 - DNA, 120 bp, Artificial Sequence
  ENSG00000285821_3 (sequence is synthesized)
ccccagctctcctgaggctggtttgcagtggccgggcccagctaaagcaactgaacctccagagcagaggacagtgtcctgcctgcacgtcttgacatggccccacaggagggttccctg

SEQ ID NO: 847574 - DNA, 120 bp, Artificial Sequence
  ENSG00000285821_4 (sequence is synthesized)
tctttcacgtgctgatagaccaaacacaccaaacgcattcccgggcaggtgtgtacatcagaacagtgatgaatcagggacccttcttagtgctactataagtaacaacagtgagtcaga

SEQ ID NO: 847575 - DNA, 120 bp, Artificial Sequence
  ENSG00000285821_5 (sequence is synthesized)
cgggtgcaaaccctttggaagactcagtctgcaagccccagggagcacaggggggctggagggaaccgggggagggatgcacaggcgagaaatgcccatgacccggtccacaggtcatgc

SEQ ID NO: 847576 - DNA, 120 bp, Artificial Sequence
  ENSG00000285821_6 (sequence is synthesized)
cacctacaagaaaggggttgtttcctggcccccagtggggtgcagaatgtcagtgctgggctgcaccctgggcagggctgctctgggcagcatcgccacacccgtgtcccattcttgggg

SEQ ID NO: 847577 - DNA, 120 bp, Artificial Sequence
  ENSG00000285821_7 (sequence is synthesized)
tgcatccccttctcacatctgtgtctaaagccaggaatgggcagtgtgacctgaggaaaatcagggacaccctctgtgtcctcatatgcaaacatgtctctttcatgccagttaaatgaa

SEQ ID NO: 847578 - DNA, 120 bp, Artificial Sequence
  ENSG00000285821_8 (sequence is synthesized)
gaaaaaggcaagacctaaatcctgaactcctaccgctataacacattcctctgcgctaaggaactgacattctaaaggtgcagatacccccgggctggaggctgaatgggcaagaagatc

SEQ ID NO: 847579 - DNA, 77 bp, Artificial Sequence
  ENSG00000285821_9 (sequence is synthesized)
cagatacccccgggctggaggctgaatgggcaagaagatcccggcacagctcaggctgagtcgaaagaccgtggttt

SEQ ID NO: 847580 - DNA, 85 bp, Artificial Sequence
  ENSG00000285821_10 (sequence is synthesized)
aactctgtctctactaaaaatataaaagttaagctaggcgtggtggcgcatgcctgcagcctgagcccaggaggtctaagctgca

SEQ ID NO: 847581 - DNA, 64 bp, Artificial Sequence
  ENSG00000285821_11 (sequence is synthesized)
gctactcgagaggctgaggtgggaggatcgcctgagcccaggaggtctaagacaccttagaaaa

SEQ ID NO: 847582 - DNA, 76 bp, Artificial Sequence
  ENSG00000285820_0 (sequence is synthesized)
caatctcggctcactacaagctctgcctcccaggttcacgcgattctcctgccctggctaattctgtatttttagt

SEQ ID NO: 847583 - DNA, 120 bp, Artificial Sequence
  ENSG00000285820_1 (sequence is synthesized)
aggtgatccgcccgcctcagcactcccaaagtactgggattacagctgtgaggcaccgcacccagccaaaaatttccagttgctttcttttctttttgagatagagtttcactcttgttg

SEQ ID NO: 847584 - DNA, 81 bp, Artificial Sequence
  ENSG00000285820_2 (sequence is synthesized)
taccatgcccagcaattttttttttttttttttcagtagagatggagtttcaccaggccaggctgatctcgaactcctgac

SEQ ID NO: 847585 - DNA, 88 bp, Artificial Sequence
  ENSG00000285820_3 (sequence is synthesized)
atccacccgcctcagcctcccaaagtgataggattatggctgtggtctttaactggctgagagccttcagatgagaacactctgagcc

SEQ ID NO: 847586 - DNA, 120 bp, Artificial Sequence
  ENSG00000285820_4 (sequence is synthesized)
ttaactggctgagagccttcagatgagaacactctgagcctcagtctccttcaatggaggcactggacagcaggaagtcagagaagactttcagtgctaactgctcagtttttatcaaag

SEQ ID NO: 847587 - DNA, 120 bp, Artificial Sequence
  ENSG00000285820_5 (sequence is synthesized)
caactgtgaattgtagaaaggggaaaattagctctgaagtatttaagaggaaaatggggaattttcttggaattgattgaacatgttttaagacatcacaaggatgcctccaaacctgct

SEQ ID NO: 847588 - DNA, 120 bp, Artificial Sequence
  ENSG00000285820_6 (sequence is synthesized)
tgactatgaacaatgacttgttctcctccaaggactaggtaagtatttgatttctttaagtctcatggccagagaaagcataataacagtatcacctcctactaatagtactcctctcaa

SEQ ID NO: 847589 - DNA, 120 bp, Artificial Sequence
  ENSG00000285820_7 (sequence is synthesized)
actctgtcacccaggctggagtgcaggcagtggtgcaatcatagctcactgcagtcttgaaatcctgggctcaagggatcctcttgcctcagcctctcgaatagctgggactacagatat

SEQ ID NO: 847590 - DNA, 90 bp, Artificial Sequence
  ENSG00000285820_8 (sequence is synthesized)
ctcactgcagtcttgaaatcctgggctcaagggatcctcttgcctcagcctctcgaatagctgggactacagatatggagtcttatgcca

SEQ ID NO: 847591 - DNA, 120 bp, Artificial Sequence
  ENSG00000285820_9 (sequence is synthesized)
ggcaaggttattgaagatcacacaggctgaagaagggctgctgaattcttcaatatgaaccatccctttgataagaaactgagtgggcctggttcttctcatcccaggagagctctggtg

SEQ ID NO: 847592 - DNA, 120 bp, Artificial Sequence
  ENSG00000285820_10 (sequence is synthesized)
tgcttcctggcatataagtgtgaaaaccctgaagtcagtgttggagttaggagttgaacccagaaattgccacagccacttcagccttcagtaactaccaccctgatcagtgagcagctg

SEQ ID NO: 847593 - DNA, 120 bp, Artificial Sequence
  ENSG00000285820_11 (sequence is synthesized)
tcaacactgaagcaataccctgcaccagcaaaatgattatggctcactgaagattcagatgaccattagcttttttttaagcaataaaatatttcttaattaaggtatgtacattatttt

SEQ ID NO: 847594 - DNA, 120 bp, Artificial Sequence
  ENSG00000285820_12 (sequence is synthesized)
ttaaacatgatgcaattgtacacttaataaactatagagtaaaaaataacttttatatgcactaggaaacaaaagtatttgtgcaattcactttattgtgatatttgctttattacggtg

SEQ ID NO: 847595 - DNA, 120 bp, Artificial Sequence
  ENSG00000285820_13 (sequence is synthesized)
ttctggtacctaacacacaatatctctgaggtgtgcctgtatacagaaaagagcaaaacaaacatgtgctttgtccctctggggcttacagttgttgggacaagtaagttcctcttcaaa

SEQ ID NO: 847596 - DNA, 120 bp, Artificial Sequence
  ENSG00000285820_14 (sequence is synthesized)
gactcaaatttctggtcataaattgtaaaccaaacctatcccctccttttttcacaaatcgcacatttaccctatttggaaaagtttaagtcttagccaacgggatctgcttagattgtg

SEQ ID NO: 847597 - DNA, 120 bp, Artificial Sequence
  ENSG00000285820_15 (sequence is synthesized)
cggtctaaccccagccaataggggaaggacacagaaacaggaactgcattagggttaaaaaccccttccctcctttgttaggtgtgctcttgctattgtaaccagtgcaagcagcaccct

SEQ ID NO: 847598 - DNA, 120 bp, Artificial Sequence
  ENSG00000285823_0 (sequence is synthesized)
aggtaagtgcttgtggagatgagagaactgcaacattgcctgttgtcctgcaggcagtagtcccgcagcaagccagcatgctttcctggggacatgatacctgagctgggcgtttaagga

SEQ ID NO: 847599 - DNA, 120 bp, Artificial Sequence
  ENSG00000285823_1 (sequence is synthesized)
tgcactggagttgtccaggtggtgaataagagaatgcactccaggcagaaggaagagcaggtgcaaaggcttagagacacgaaagagggtgttgtatttaaggaatgccggaaagcaatg

SEQ ID NO: 847600 - DNA, 120 bp, Artificial Sequence
  ENSG00000285823_2 (sequence is synthesized)
aagattctagaggcacctgcattccttggcttgtggcctcttcctccatctcaaagtgcatcgctccaatttctgcttctgtcatcacatcgccttttcctccagctccgactcctcctg

SEQ ID NO: 847601 - DNA, 120 bp, Artificial Sequence
  ENSG00000285823_3 (sequence is synthesized)
tatctcaagatccttcatcacatctgcaaagtctcaggtatgggtggggctgaggatataatcagttctgggcaaaattcctctggatgtgcagatttgtgaaactagaaaacaagcttt

SEQ ID NO: 847602 - DNA, 120 bp, Artificial Sequence
  ENSG00000285823_4 (sequence is synthesized)
ctgctcccaaaatacagtggtgggacagcataagacaacagttatagacatttccattcaaatagggagaaaatggaaggaaaaaaggagtcaccagtcccaagcaatttcaaaatccaa

SEQ ID NO: 847603 - DNA, 120 bp, Artificial Sequence
  ENSG00000285823_5 (sequence is synthesized)
tcagacaaactccatcaggtttcaaggcctgggaaaaatcctctgccctctgtatgcaaaacagcaacaacagcagcaactttggaccttacctcacaccatctataaaaatgaactcaa

SEQ ID NO: 847604 - DNA, 120 bp, Artificial Sequence
  ENSG00000285823_6 (sequence is synthesized)
catccatctgaaaaggataatccaggatattctccctatctcaagatccttcatcacatctgcaaagtctcaggctgctaccaaaggggccacgcaggacgtcctctggggaatgctggc

SEQ ID NO: 847605 - DNA, 120 bp, Artificial Sequence
  ENSG00000285823_7 (sequence is synthesized)
ccaaggttttgccttgatctgtccatcccactgcacatggcttcaaggaggcattcatgggaatccctgctcaggtcaggcagcatcgtgtcaaggtcatggccccttgaagattctttg

SEQ ID NO: 847606 - DNA, 120 bp, Artificial Sequence
  ENSG00000285823_8 (sequence is synthesized)
aggaagtggctgttgagctcccaaccccagggctggagcaggaggatcagacaccccggcctcagccccagagcatgaaagccctccccactcacccagctgctctgcagacccacactt

SEQ ID NO: 847607 - DNA, 120 bp, Artificial Sequence
  ENSG00000285823_9 (sequence is synthesized)
gcacacaactccatgtgccactgaccagctctgacctcgtcctgggcaaggctggcggggcctagacccaaacccacaacagtgtgtggctcccagggaggcagcgtttcctgggcacca

SEQ ID NO: 847608 - DNA, 120 bp, Artificial Sequence
  ENSG00000285823_10 (sequence is synthesized)
gctctttagagaatgccttcagaagtccccatccagcctctcccctcatgaaatcctgtccttgaatcatccagcctagccccctgagtagctgtgcatttccgagaccccgaatccata

SEQ ID NO: 847609 - DNA, 120 bp, Artificial Sequence
  ENSG00000285823_11 (sequence is synthesized)
atattcatatgaatgaggtggagggcagggagaatcgctgccatttattcaacccttaataaatgctgggggctgcacaaagcactttaaataaatacagcctctcattttaatcctaaa

SEQ ID NO: 847610 - DNA, 120 bp, Artificial Sequence
  ENSG00000285822_0 (sequence is synthesized)
atttcaggctctgctgtgtcaagtcggggagcggctctttgctcagcttagagaactggaagaggccgcaaccttctgcctgctggaggctggaggatggatggagcctggagcctggga

SEQ ID NO: 847611 - DNA, 120 bp, Artificial Sequence
  ENSG00000285822_1 (sequence is synthesized)
cactaccttgctgtggttggtggtggcgacagagcagtaagagggtggccggcagcaggagcttgtcctgctgggctggaggactaggagaaggaagaggcaccaccacatgctggaggc

SEQ ID NO: 847612 - DNA, 120 bp, Artificial Sequence
  ENSG00000285822_2 (sequence is synthesized)
tgaagcctggagtctgtgccaccatggctcgcctcgctgtggttggtggtgacgctggagactgcagctgggccacagtggtagaaatgtgatggggtaggtttttggggaacaggtggc

SEQ ID NO: 847613 - DNA, 120 bp, Artificial Sequence
  ENSG00000285822_3 (sequence is synthesized)
gtttgattgtaagagtaagttccttagaggttggaaacactctctttacggaatctgcaaatggacatttcagagcctattgaggcctacactgaaaaaccaaatatcctgcaataaaaa

SEQ ID NO: 847614 - DNA, 120 bp, Artificial Sequence
  ENSG00000285822_4 (sequence is synthesized)
gcaggttggaaatactcttgttgtagaatctatgaagggacatttcagagctcattgaggcctatagagaaaaatcaaatatcctgcgataaaaactgtaaagaagctacctctgaaaat

SEQ ID NO: 847615 - DNA, 120 bp, Artificial Sequence
  ENSG00000285822_5 (sequence is synthesized)
actttgtgatgtgtgattttatctcagaagttgaacttttcatttgattctgcaggttggaaactctttttttgtagaatctacaaggagacatttcatagcccattgaggcctatagtg

SEQ ID NO: 847616 - DNA, 120 bp, Artificial Sequence
  ENSG00000285822_6 (sequence is synthesized)
aaaaatcgaatatcccttgataaagactagaaacaacctatctgtaaaaatgctttgtgatgtgtagattcattttacaaatttaaacctttgttttgcttcatcaggttggaaactctt

SEQ ID NO: 847617 - DNA, 120 bp, Artificial Sequence
  ENSG00000285822_7 (sequence is synthesized)
tctttgaatctacaaagggacaattcagggcccattgaggcctttagtgaaaaaccaattaccctcagtaaaaactagatataagctatgggtgaaaatgctttgtgatgtgtggattca

SEQ ID NO: 847618 - DNA, 80 bp, Artificial Sequence
  ENSG00000285822_8 (sequence is synthesized)
acaagttaatagagtttatgagggaaaatttcagagcccattgaagcctcttaataaaaactgataagaaatagaaacaa

SEQ ID NO: 847619 - DNA, 120 bp, Artificial Sequence
  ENSG00000277482_0 (sequence is synthesized)
gcgcagacgtttagcttccggcaactgcaggtttagaggtttgtgttgcaatttcattttgtacttttgagattggactaaagctaataacttctgttgctgaaataaattcagtgaaat

SEQ ID NO: 847620 - DNA, 120 bp, Artificial Sequence
  ENSG00000285824_0 (sequence is synthesized)
ttatttcaactcaactttattttcccttctcctttatggtaactgaaggtgaatgagataattacacacagttttcctataacgtttcaggctaatcgttatttcctagaaagtctctgg

SEQ ID NO: 847621 - DNA, 120 bp, Artificial Sequence
  ENSG00000285824_1 (sequence is synthesized)
ctaattctcaaattttctaaagatggataatagctccaggaattatactagtgggctatagctgaaatcgttttgatctgggtagtctcctatcaaaattactttcacatacttagtaaa

SEQ ID NO: 847622 - DNA, 120 bp, Artificial Sequence
  ENSG00000285824_2 (sequence is synthesized)
actcattacaggtgaaagctactgaatgaaagcctagtaatagttatagaagaaaaaaacttgaaaaaagttttacttaacattgcaattatttttaattaagaaacagcaatgacaaat

SEQ ID NO: 847623 - DNA, 120 bp, Artificial Sequence
  ENSG00000285824_3 (sequence is synthesized)
aattgctagttatcactatcacgtaataaaaatattttaaaaatctgggttgtgatacactaaagttatgagaaaatatatttgtctgtagtctatattcagttgaacagactttaaaac

SEQ ID NO: 847624 - DNA, 64 bp, Artificial Sequence
  ENSG00000285824_4 (sequence is synthesized)
tgggagggaaaaccccatctctactaaaaatagaaaacttagccaggtgtggtggcatgcacct

SEQ ID NO: 847625 - DNA, 89 bp, Artificial Sequence
  ENSG00000285824_5 (sequence is synthesized)
ccagttacttgggaggctggggcagcaagcagtccttgtgcctcggcctcccaagtacctgggactacaggcatgtgccgctatgccca

SEQ ID NO: 847626 - DNA, 120 bp, Artificial Sequence
  ENSG00000285824_6 (sequence is synthesized)
gtgcctcggcctcccaagtacctgggactacaggcatgtgccgctatgcccaggccttacttgcttcttaaatagaaagttactccacagaagccaggtgcagtggctcacgcctgtaat

SEQ ID NO: 847627 - DNA, 120 bp, Artificial Sequence
  ENSG00000249409_0 (sequence is synthesized)
aatcagactgagatttccaaagtgggagttaggactgccagtggtgcatggaagagtctgagaaaatgctgtcctcttaccttagataaacatgtctgtgacgtgtaatgggatccatcc

SEQ ID NO: 847628 - DNA, 120 bp, Artificial Sequence
  ENSG00000249409_1 (sequence is synthesized)
tgataatatgaaggagtatgggcagtttattctagaaatcaaggtctgggcttcccaaatagagtgagcagtatggaagcttctggaggactgctccttctatcaccataaagcagcata

SEQ ID NO: 847629 - DNA, 120 bp, Artificial Sequence
  ENSG00000249403_0 (sequence is synthesized)
gactcctcaaaatatcacttgttaaataactgaataaatttgttaaataaggtgatgtgaacatattcagtgacagaaactaagaggccagagcataaaacagaagttccaggtctttaa

SEQ ID NO: 847630 - DNA, 120 bp, Artificial Sequence
  ENSG00000249403_1 (sequence is synthesized)
acagaggcggaggacagccacctgcaagccaaggaagagaccttcaaaaaaaccaaatgtactgatactttgtgcttgaacttccaacctccaggactgtgagaaaataaatttctgctc

SEQ ID NO: 847631 - DNA, 120 bp, Artificial Sequence
  ENSG00000249407_0 (sequence is synthesized)
gatccagatgtggctcgtgtacaggctctcgtactccctgtcaaagagaggagggcacagagttacaccagcccctctgacacaggctcagttatggttgcaagtaactgacttcgttca

SEQ ID NO: 847632 - DNA, 120 bp, Artificial Sequence
  ENSG00000249407_1 (sequence is synthesized)
cctactttgtacagcttagtggacggatgttttcttggcaacatttctgttccaacaactaaataaccaacaactaactaaccaaacaaccagcatgcttagcctgtgctaggagatgtg

SEQ ID NO: 847633 - DNA, 120 bp, Artificial Sequence
  ENSG00000249407_2 (sequence is synthesized)
ggggtcaaagagaggtcttggaaagacgtagaaggaaatactgaagatgctgcttctggtgggaaattataacaataaaggccaggaggaggaaatgaaggtataatatgctgactgtta

SEQ ID NO: 847634 - DNA, 120 bp, Artificial Sequence
  ENSG00000249407_3 (sequence is synthesized)
agccagcagctgcttgtagtccatattcgttttcaaggagtagtgagaaatagggttaaataaatatagggtggggcctgaatatgctgggtgatgagagacaacagaatttggacacca

SEQ ID NO: 847635 - DNA, 120 bp, Artificial Sequence
  ENSG00000249406_0 (sequence is synthesized)
ggcagggctcgggtttccacacgtctcggtcatggtacctgaggccgttctgtacgcagattagaaaactgaggcccagagaaggaaagtagctgccagaggtcacacagctaggattga

SEQ ID NO: 847636 - DNA, 120 bp, Artificial Sequence
  ENSG00000249406_1 (sequence is synthesized)
gggatcagaggttgcacccttctaggaacttccgcctgagggagactggtcagagctcaggagggactgttccaggggatgagatatctgctggccaggaaaggcatgggaactgggcag

SEQ ID NO: 847637 - DNA, 120 bp, Artificial Sequence
  ENSG00000249406_2 (sequence is synthesized)
cggagcacaccctccggacctggcccaacttcagaataacaacaaatgattgtgccaggctctgccagttcctcctcccccacaagctggcacatgtggatattggctctgttttgcctt

SEQ ID NO: 847638 - DNA, 82 bp, Artificial Sequence
  ENSG00000249406_3 (sequence is synthesized)
cacaagctggcacatgtggatattggctctgttttgcctttgacccctagtgaaagaaaataaagcggctagatctcagctc

SEQ ID NO: 847639 - DNA, 67 bp, Artificial Sequence
  ENSG00000249406_4 (sequence is synthesized)
ggactacaggcgcatgccaccatgccctactaattttttgtatttttaggagagacaggcggcttca

SEQ ID NO: 847640 - DNA, 120 bp, Artificial Sequence
  ENSG00000249406_5 (sequence is synthesized)
gtgtgtctcctgtccttccctgtctcctcactgcttttcagctggtagacccctgtggggacaacagatcagagcttggtcaccaatatggacatctaggtctgagcagggcccactccc

SEQ ID NO: 847641 - DNA, 120 bp, Artificial Sequence
  ENSG00000249406_6 (sequence is synthesized)
cgggggcgcatcagctccatcccggcaccctttacactggccttctcttcacaaaggaccacaggtcatcctcaagccttcctcccaggctatccttgtccctgaatactaatgtctaaa

SEQ ID NO: 847642 - DNA, 120 bp, Artificial Sequence
  ENSG00000249406_7 (sequence is synthesized)
ggtcagcccagctaccagcagtgtgcatgtgatgtgtcccatctccccttcggattggaggaagaagctgtgtccctcccatcagacagacggtctccttaaagattctcctggtctcca

SEQ ID NO: 847643 - DNA, 120 bp, Artificial Sequence
  ENSG00000249406_8 (sequence is synthesized)
gcttgggctctgctggaaagaagaggaagtatttagcaagggtgaagatgggttcttacttccctgaggcaaccagagataagaaaagaccagaatatgaatatccagcattccacaaag

SEQ ID NO: 847644 - DNA, 120 bp, Artificial Sequence
  ENSG00000249406_9 (sequence is synthesized)
aatcctacaggcagggatattgcccaatcaccagtgcctcgcatcccagttctatccaagatccaagcttgatatcctcctgaaagacttcctgaatcaggtcaccaacatggacatctg

SEQ ID NO: 847645 - DNA, 120 bp, Artificial Sequence
  ENSG00000249406_10 (sequence is synthesized)
aacttccagaatcaggtcaccgtctttcttctcatctctggatgtatttggagctcatttgtctgacggtttttgaatgctatcttttaaaaataaacttttacaatttgggtttaataa

SEQ ID NO: 847646 - DNA, 120 bp, Artificial Sequence
  ENSG00000249406_11 (sequence is synthesized)
ctgggggaaggagttatactcagtggtggccatagagagttggtgactgcctttgagaggagaatggttgtgatccttttgccgagaactcacccagaggacttataccttggtgacagc

SEQ ID NO: 847647 - DNA, 120 bp, Artificial Sequence
  ENSG00000249406_12 (sequence is synthesized)
agaaggactcaaattagaaaactgaggcccagagaaggaaagtagctgccagaggtcacacagctaggattgagggatcagagagttcctcctcccccacaagctggcacatgtggatat

SEQ ID NO: 847648 - DNA, 120 bp, Artificial Sequence
  ENSG00000249406_13 (sequence is synthesized)
aaagttcccatatatcccttatccagttctcttaatgttaacctcctacatcatcatggaacatttgccaaaatgaagatgtcaacactggtgctttgctgtgaactaaactccagactt

SEQ ID NO: 847649 - DNA, 120 bp, Artificial Sequence
  ENSG00000249406_14 (sequence is synthesized)
ctcaaggcgttccggggctgtgagtcatcgggaatgtctgttctgactgcggcttccctctcctgacgtggaccctctttctcctcctcccccacactcagggagagggtgcccctccca

SEQ ID NO: 847650 - DNA, 120 bp, Artificial Sequence
  ENSG00000249406_15 (sequence is synthesized)
ggcagggggctctgaagtgggggaggaagccacaggcaggcctgggatgaggtcttgctccccgattgccatcggaaggaggcttcgaagacttgcacgcccctcacccagattctacct

SEQ ID NO: 847651 - DNA, 120 bp, Artificial Sequence
  ENSG00000249406_16 (sequence is synthesized)
tgagagtttctcagtctctccttgtttttcgtgactgaagtttcaaggagtactggtcaggtattccatagaatgtcctactgttagctttcagcagtaaaagcctttccacaaacaaaa

SEQ ID NO: 847652 - DNA, 120 bp, Artificial Sequence
  ENSG00000249406_17 (sequence is synthesized)
gggattctgggggaaggagttatactcagtggtggccatagagagttggtgactgcctttgagaggagaatggttgtgatccttttgccgagaactcacccagaggacttataccttgat

SEQ ID NO: 847653 - DNA, 120 bp, Artificial Sequence
  ENSG00000249404_0 (sequence is synthesized)
gtgaaagtgtggtgtgagcttcattttctttcaaaagtgccgaactgcaatcaagagtaatttacataaaagacagcagttatttttgtaaaattacttcctaagaagagaccctgtaga

SEQ ID NO: 847654 - DNA, 120 bp, Artificial Sequence
  ENSG00000249404_1 (sequence is synthesized)
tgcagaagttatggtgagaaatcaagtatgcagaagcatctatcatcacctgcttggtagatctgaagatgacaggtaacttgtcaacatattgtcaacatacactttcctttccttccg

SEQ ID NO: 847655 - DNA, 120 bp, Artificial Sequence
  ENSG00000249404_2 (sequence is synthesized)
ctgtagcagcctggcagcttctgtacacactttattgtgcaggtgctttcttttggcagacatgttcagataatagagcaatccaatcaaaacatcagtgagactccctgacagaacatt

SEQ ID NO: 847656 - DNA, 120 bp, Artificial Sequence
  ENSG00000241679_0 (sequence is synthesized)
ggttcagaaaaaggatttttaaaaaaagtatgtaatttttaaaagttctgatgattagaacacagacctcaggaaagtagcgtgaacatactgctggcgatggtagcagcttcgttggtt

SEQ ID NO: 847657 - DNA, 120 bp, Artificial Sequence
  ENSG00000241679_1 (sequence is synthesized)
gtttttctgaccctgacacggtatgtggaggtggatgaaagcagcgaagtttcatctgagaaccattgagtatggaagtggggcctctaccttgtgactgagagggagccagggagtaaa

SEQ ID NO: 847658 - DNA, 120 bp, Artificial Sequence
  ENSG00000241679_2 (sequence is synthesized)
agctgcttgcagaaagaggagccagggatattgatgacatcatgaagccacttcatcagcgtggaccactggtctccagaatacctatgatgtgggaacaataaacacttacttgtttaa

SEQ ID NO: 847659 - DNA, 120 bp, Artificial Sequence
  ENSG00000241679_3 (sequence is synthesized)
taaataagaccattcacttacttagccttaagtaatgcagataaatgggacaccagatggaattcatgtagtgaaattcatgcagatactgtattttatgatatgccttctttcagggtt

SEQ ID NO: 847660 - DNA, 120 bp, Artificial Sequence
  ENSG00000241679_4 (sequence is synthesized)
taatgatcatgccgccttatacttttataatgcttcgtaagtttaacaagtacagcagatattgctgatttcccacccactgcccattctccccttctttcttattcgtagaaccttgat

SEQ ID NO: 847661 - DNA, 120 bp, Artificial Sequence
  ENSG00000241679_5 (sequence is synthesized)
ttgtaggtaggaatgatcatgtgacagccaatgagatgtaaatggaattctgctggggatatctggattgagtatggaagtggggcctctaccttgtgactgagagggagccagggagta

SEQ ID NO: 847662 - DNA, 120 bp, Artificial Sequence
  ENSG00000278177_0 (sequence is synthesized)
acgagcagcgcagccctctggactgcgctcagcaaacttttataagccagatggacgatggcaagccaacaagggctggctgggaaggctgctgccttgctcctctagcccccagatgga

SEQ ID NO: 847663 - DNA, 120 bp, Artificial Sequence
  ENSG00000278177_1 (sequence is synthesized)
aacggtgcaatcaaaacgaggaagagaaggaaaagaagtgtttaaaaaaccaccatgggggttcagagctgcaatccgagttccgagccgcagaatcctggagcgctgcgggctcggctc

SEQ ID NO: 847664 - DNA, 120 bp, Artificial Sequence
  ENSG00000278177_2 (sequence is synthesized)
gaggttcttggggatgtgtgtgcgtggaggtatgtgttggggatatacgagatctaggggaaacctcagcttaacacaggctgtgggagcctgtgagagtcctcctgaaataggaagaga

SEQ ID NO: 847665 - DNA, 120 bp, Artificial Sequence
  ENSG00000278177_3 (sequence is synthesized)
gaaatcctggagacagtcactggaggcaagagggaaggagaaaggaggggggagaaagaaacgtgctacacattgcacagccgaaattcacaggccgagtcaaaggcaaaacctggactg

SEQ ID NO: 847666 - DNA, 120 bp, Artificial Sequence
  ENSG00000278177_4 (sequence is synthesized)
gatctcttcctagtcggtagaaaggggaaaaaaagaaaaagaaacgtacctattttcttattcacttcacatcctttataccgatctgaaatgacatcaataaacaatctagaaagacaa

SEQ ID NO: 847667 - DNA, 120 bp, Artificial Sequence
  ENSG00000245954_0 (sequence is synthesized)
aatgcttggaaagtgtctcaggtgtgagttggtggagcctgcactcccagcagctaaggtagaagcatatgggaaactgcattccgatccagggaagtataggaagcagtaataaaagtg

SEQ ID NO: 847668 - DNA, 120 bp, Artificial Sequence
  ENSG00000245954_1 (sequence is synthesized)
ggaagacctattataagttcgttgcagtcatccaggtaagaggggatactggctgaaaacaaggtttcagctatgtgggccctagcttggaagggatgggattctacatatgttttgtag

SEQ ID NO: 847669 - DNA, 120 bp, Artificial Sequence
  ENSG00000245954_2 (sequence is synthesized)
acctgagaatagaatgattttaggtgttaggcctgagagatgagggcacattagggaggagcatgtgcagcgggggcagggcatccagaatgctctttggacatcttatattttaagtgc

SEQ ID NO: 847670 - DNA, 120 bp, Artificial Sequence
  ENSG00000245954_3 (sequence is synthesized)
ctgtcagacacccaagtagagacgcctgatgtgaagacatgaatatctgcagcttgaggtccttcgtaagatcatttgaaaataagagttgtgctactaaaataaaatgtgcaaaaaaaa

SEQ ID NO: 847671 - DNA, 120 bp, Artificial Sequence
  ENSG00000245954_4 (sequence is synthesized)
ggctcacccccctggactctgggtggtcctgggaggatgtgaaccctgtaccctgactcccatcactgaggccaagagtctggacccctcctcctcctcctgccccagcacagcagggaa

SEQ ID NO: 847672 - DNA, 120 bp, Artificial Sequence
  ENSG00000245954_5 (sequence is synthesized)
cccggcaggacagctgtcctctaggactcttgagttcactcacttcagccaccaagcgctgactgtgtttccaccaaagggcagttcctgcggcttctactccccctctccaaggtgcca

SEQ ID NO: 847673 - DNA, 120 bp, Artificial Sequence
  ENSG00000245954_6 (sequence is synthesized)
gggttactgcctgtcctccagccttccatggcatcactgtctctccagatcatctcattcaattctctcattgctccagtgagcctggatggttttctgttgccgacaacaaaaaacccc

SEQ ID NO: 847674 - DNA, 120 bp, Artificial Sequence
  ENSG00000245954_7 (sequence is synthesized)
ctccaggttcattcctaacccctgagacctcagaatgggacagtatttggacacacggtctttcttgagctaatacaggttaaatagtttactgaggggatcctcatccaatacaactgg

SEQ ID NO: 847675 - DNA, 120 bp, Artificial Sequence
  ENSG00000245954_8 (sequence is synthesized)
tgtccttataagaggaaattgggacacacattagtgtgcagtgggaagtccatgtgaggacggacaaagaagcttggccatccacaagcccaggagagagactcagaacaaatcaatctg

SEQ ID NO: 847676 - DNA, 120 bp, Artificial Sequence
  ENSG00000245954_9 (sequence is synthesized)
cggacaccttgatcttgggcttctagcctccagaactgtgagaaaatacatttctgttgggtaagcggcccagcctgtggtcctttgtcacggcagccctggcagacgaatgcaggccgc

SEQ ID NO: 847677 - DNA, 120 bp, Artificial Sequence
  ENSG00000245954_10 (sequence is synthesized)
acttcccaccgccatggtgccactgtctgtggacagcatgccagcctcatcgcacgagttatccctgaagatgctcaaattagcaggctgttcttagaaccaaatttcctggacaggctt

SEQ ID NO: 847678 - DNA, 120 bp, Artificial Sequence
  ENSG00000245954_11 (sequence is synthesized)
cagaaaacattctccctggtgatacagacatctgaaaacacacacacacacacacacacccaagaaaacaaaaaacaaacaaaaatgccaaaaacaaataaaaaacccatgaccaaaaaa

SEQ ID NO: 847679 - DNA, 120 bp, Artificial Sequence
  ENSG00000245954_12 (sequence is synthesized)
gtgacaagcgtttttcggttctgccaggggatctgagtggcacacaacaacatccactatgaaatgtggtgtgtgctgggtgggggctgactgaggagctcgagagtaggagtgaggcag

SEQ ID NO: 847680 - DNA, 120 bp, Artificial Sequence
  ENSG00000245954_13 (sequence is synthesized)
gctattttaaagaggtggcaagggaaggcctctctgagcaaaggcagagactttaggcaaagacttgattggtgtgaggaagtgagccattcaaagtcaagggcaccagaggttctaagc

SEQ ID NO: 847681 - DNA, 120 bp, Artificial Sequence
  ENSG00000245954_14 (sequence is synthesized)
agaggaaacagcaaatgcaaagcagagaacaagcttggcacatttgagaaccaacaataagtccagtgtgtctggagccacaggagtcaaggagacagcagctggcagttcagccaatgg

SEQ ID NO: 847682 - DNA, 120 bp, Artificial Sequence
  ENSG00000278175_0 (sequence is synthesized)
acagccctggcccgtcttgacgggcgagggttactgtacttgtcccaaccgtacagatgagaaagctgagactcagggccagcaacccgggtcccagcggagcgcccggcacacgccgac

SEQ ID NO: 847683 - DNA, 120 bp, Artificial Sequence
  ENSG00000278175_1 (sequence is synthesized)
acttcagcaccagtggcggtggccaccactgtgggcggagatggctgcgacgcgtgcgcagatacctgggagagaggatttttcatgttaccaacacaaagaaatgataaaggtgaaatg

SEQ ID NO: 847684 - DNA, 120 bp, Artificial Sequence
  ENSG00000278175_2 (sequence is synthesized)
gccaccagacccaggctttctggaatgcattcattttctgcagttgaaagggacaatcccggatctgaaagaaagagccacagtgactccaagagtggagccagggcatgctggacactg

SEQ ID NO: 847685 - DNA, 120 bp, Artificial Sequence
  ENSG00000278175_3 (sequence is synthesized)
catagctatggccacgtgtgtcacctccgagggagatgtgagagaaacgcagagggatcgcttgtgactgtgccttctcgatgtatgatggactgttctgctcaaatagtaagtgtgacc

SEQ ID NO: 847686 - DNA, 120 bp, Artificial Sequence
  ENSG00000278175_4 (sequence is synthesized)
aaggagccggtgaacataggaaacaaagaatatttcatttgacattataaggaatgcgacaattctagtcacttgaaagtgaactatatctgtcgagaattcctagttttaattgggaag

SEQ ID NO: 847687 - DNA, 120 bp, Artificial Sequence
  ENSG00000278175_5 (sequence is synthesized)
aaatgtgcttctcttcttgaaaagccacaggttattgctgttatgtctaatatcagtcctctctggatttctcaaaagattttctgtatatcctaccattttccttctgttgctgcagtt

SEQ ID NO: 847688 - DNA, 120 bp, Artificial Sequence
  ENSG00000278175_6 (sequence is synthesized)
tggaagtagtttgttatcaggattatcaaagcatcattgctatttatgacaatgactttaagaaatgcaagaatatttggaacactgtagaaaaaatattttagcctggaaggcaaatac

SEQ ID NO: 847689 - DNA, 120 bp, Artificial Sequence
  ENSG00000278175_7 (sequence is synthesized)
taatttcaggaactattgatctgttataaaacaggaccactcagacatttagctctaagactttcacatatccgttgttagaggcgtatagtggggggcatgactcagcttctgcttaag

SEQ ID NO: 847690 - DNA, 120 bp, Artificial Sequence
  ENSG00000278175_8 (sequence is synthesized)
ataattatatatcttggaaactgactcatcaaagctattagattacatggcatcatttaagcatcactgggctctgtacttttcattatctgtacttttcattatggagtataataggct

SEQ ID NO: 847691 - DNA, 120 bp, Artificial Sequence
  ENSG00000278175_9 (sequence is synthesized)
ttatttggtacagaaattgggtctaagatgaaacaacttgtgatttttgaataaacttttggggattagttactttgatgttgtcaagatagcaccatagtaagtcctctgtctttcctc

SEQ ID NO: 847692 - DNA, 120 bp, Artificial Sequence
  ENSG00000278175_10 (sequence is synthesized)
ttgatttatttataatttagaatcagtttatgattttaaaaaatgtgacagacacagtggcatgcaccagtagtaccagccacatgggaaactgaggcagaaggatcacttgatcccaga

SEQ ID NO: 847693 - DNA, 120 bp, Artificial Sequence
  ENSG00000278175_11 (sequence is synthesized)
agatagagaccaccctgggcaacatagtgagagccccatctcaaaaaaaaaaaaaaatcaattcccaataccattccagaacacttttaatataaccagatgaaattgtgatcactactt

SEQ ID NO: 847694 - DNA, 120 bp, Artificial Sequence
  ENSG00000278175_12 (sequence is synthesized)
tactgtaatgtttaaaatggtcctcagtccatatttaagtacaatcttagtgtttctgtgcaacctaatatattagaaacaaaaattgtattgcatttgaataggaaatactctgaattg

SEQ ID NO: 847695 - DNA, 120 bp, Artificial Sequence
  ENSG00000278175_13 (sequence is synthesized)
agggttatttcttttaacagttgcaattagattggttagtgacaattatctgtaattttcaggcaatgcctaggcaagtgcccaaggcacagtagcctcctccttgcctccgtgtgtgtg

SEQ ID NO: 847696 - DNA, 120 bp, Artificial Sequence
  ENSG00000278175_14 (sequence is synthesized)
tgtgtgtgtgtgtgtgtgtgtagggtggtaacatttctgggaatttgtcttaacataaaatgataccacctttcacaaaacgacctagaggaagttggaaatcccactatcctggcttcc

SEQ ID NO: 847697 - DNA, 120 bp, Artificial Sequence
  ENSG00000278175_15 (sequence is synthesized)
ttcctgctgagcaatatctgcttctctttctgactcaggctgatgcatctgtatacttagcttcacttctccagtaaataagggagagctttattataaaagacaacttctattgatttt

SEQ ID NO: 847698 - DNA, 120 bp, Artificial Sequence
  ENSG00000278175_16 (sequence is synthesized)
caagggggtgggtggttgtcaagctcactcctttctatgcactgagggaaaattattgtaagcgatctgtaaaacaatagatgaaaaaagaggagataaaaattaaataaaatttaaata

SEQ ID NO: 847699 - DNA, 120 bp, Artificial Sequence
  ENSG00000278175_17 (sequence is synthesized)
aattatatttaattacaagtgtgcccctggtagtctttaactgaagggcactgactgggtcactggtgaagttccccgcaggaactgagtcagaccccatctcagggccctgcacaagat

SEQ ID NO: 847700 - DNA, 120 bp, Artificial Sequence
  ENSG00000278175_18 (sequence is synthesized)
atttgtgcacagagataacacaggggatatgccatatgaagatgaaggcagaattctacaagcccagggatgccaaagattgccagcaaaccaccagaagctaggagagaagtgtggatt

SEQ ID NO: 847701 - DNA, 120 bp, Artificial Sequence
  ENSG00000278175_19 (sequence is synthesized)
agattcttcctcacagccctcagaaggatccagccctgccaagaacttgatctcagacttctagtctccagaactgtgagacagtgcattttgttttgtaagtcagccatatggtttgtg

SEQ ID NO: 847702 - DNA, 120 bp, Artificial Sequence
  ENSG00000278175_20 (sequence is synthesized)
gcacttttttatggcagccctaggagatgaagacaatatgcaacatggtatgtccattataggacactgtgggccataaatgtgttctttggcctgaagaaataaaacttggtggtccaa

SEQ ID NO: 847703 - DNA, 120 bp, Artificial Sequence
  ENSG00000278175_21 (sequence is synthesized)
atgggagccattgtacagtgacaggaacataccaggacactgagaatagcgtcatgtcataaggactcagagcaggtggaccctgctgtgatgcacaaaggtgagggtgcagctgcccag

SEQ ID NO: 847704 - DNA, 120 bp, Artificial Sequence
  ENSG00000278175_22 (sequence is synthesized)
tggggcagagggtgcgcatgagtactcgcctgtaagtcatgttgtagaatcacctcgcacagccgctgtatcttcccaccagcatcaccagataactcctttatcgtcacttcagtaatg

SEQ ID NO: 847705 - DNA, 120 bp, Artificial Sequence
  ENSG00000278175_23 (sequence is synthesized)
cttgattttgtctgacttttttatgtttaccagttcagataaagagaattgcactctcatcattgctataatgtacacttttttgactactaatgagtctgagaatctttagatacattt

SEQ ID NO: 847706 - DNA, 77 bp, Artificial Sequence
  ENSG00000278175_24 (sequence is synthesized)
ttttgactactaatgagtctgagaatctttagatacatttgttagtcattaatgttttttctctctctttttttctg

SEQ ID NO: 847707 - DNA, 120 bp, Artificial Sequence
  ENSG00000278175_25 (sequence is synthesized)
tttttctttcttttttaataagaggtttttattttggatatcaatctttatatcttcaatgatgttgtgaatatctttttgttcccactagcttttcttacaaacttttattcctagtgt

SEQ ID NO: 847708 - DNA, 120 bp, Artificial Sequence
  ENSG00000278175_26 (sequence is synthesized)
ctcctgccagaatctggacccgaatccacccattgcccgttttccgctgccgctggagagaatctctgaggtccccaggagagcctgcctgcacggaagagacgcctcctcggtatggcc

SEQ ID NO: 847709 - DNA, 120 bp, Artificial Sequence
  ENSG00000278175_27 (sequence is synthesized)
gcccccggagaggagcgattaagtgcagacctccttgttgctcttgagcctgagcggcttcagggagccatgtttgttactggcgggcgccgacctcactgagcatgtgcagccctggcc

SEQ ID NO: 847710 - DNA, 120 bp, Artificial Sequence
  ENSG00000278175_28 (sequence is synthesized)
tgcctctgggatcagggactctaatctggaaataggtagtcggagaggtcggtgatgcagtctctggatcagagacctgagctatatggggttagagaggggccctgggcaggcgagtct

SEQ ID NO: 847711 - DNA, 120 bp, Artificial Sequence
  ENSG00000278175_29 (sequence is synthesized)
ctggggagtgtggtgagaatccttgtgtaagatgctgggaggaggtggggtcagggctggggtccgtgggccgacgggttgggggatggccagcgtcagggatcagtagtagagattcta

SEQ ID NO: 847712 - DNA, 120 bp, Artificial Sequence
  ENSG00000278175_30 (sequence is synthesized)
tgtgccctgatcgccagtggaggttttaaatacagagtattcatgagtttagcaatgtttttcgcctctcattatttaaataatttgaagttttccccaataactagtgtcttagaagtc

SEQ ID NO: 847713 - DNA, 120 bp, Artificial Sequence
  ENSG00000278175_31 (sequence is synthesized)
atgaaaatttcagaaaatgacaggtcttctgagttcgtgatgggagttgggcagcagtcgcatacgagcacctggagagtccttgccagttctttggggatggggagctcttaagactgc

SEQ ID NO: 847714 - DNA, 120 bp, Artificial Sequence
  ENSG00000278175_32 (sequence is synthesized)
cctgagaccgccctttgacctcattgtggtcctttctagattaaatgctgttttccatgaccgtctctgttcttcccatacgggaatggcaggcattcagatctccaagaatagaggatt

SEQ ID NO: 847715 - DNA, 120 bp, Artificial Sequence
  ENSG00000278175_33 (sequence is synthesized)
aggagagactccaccacctatgtcctcacagttaattatcgatttgtgtcagttgcccattttctcacttcctgtttgtgtgtcaaggggtattaataaatctttgcctatttaaagata

SEQ ID NO: 847716 - DNA, 120 bp, Artificial Sequence
  ENSG00000278175_34 (sequence is synthesized)
tacctgggagagaggatttttcatgttaccaacacaaagaaatgataaaggtttgaggtcatgggcatgctaattaccctgatttgatcattatacattttatacatctactgaaatatc

SEQ ID NO: 847717 - DNA, 120 bp, Artificial Sequence
  ENSG00000278175_35 (sequence is synthesized)
ccactgtaccccataaatatgtacaattattatgtgtcaagtaaaatatgaatatatatagtaaataaataaatgaagtaatttgccattacttaacatttcattaaatgtatgtttcca

SEQ ID NO: 847718 - DNA, 120 bp, Artificial Sequence
  ENSG00000278175_36 (sequence is synthesized)
aaattatatttgttcttgagaccttttgagtgatcacagtttctgctattctccataaggcctcagtttgacagggtgatgaaatcttgaataaaacacaaaggaatgtgtttgtatttg

SEQ ID NO: 847719 - DNA, 120 bp, Artificial Sequence
  ENSG00000278175_37 (sequence is synthesized)
gtggaaaaatagctttaaattagaaattgataccaaaaaataatgatatgtaatctaaggtgaaaatattttgaagactatcacgatatctcccttaaatgttatttagttctgaaaaat

SEQ ID NO: 847720 - DNA, 120 bp, Artificial Sequence
  ENSG00000278175_38 (sequence is synthesized)
atgtattgaagaactgttatattttactttatgtcatattaagtgtggtaaaattaaagagaaacaagtagataaaagtaaagattgtattattattttatcactcaggttatttcaaga

SEQ ID NO: 847721 - DNA, 120 bp, Artificial Sequence
  ENSG00000278175_39 (sequence is synthesized)
gcggagcgcccggcacacgccgacacttcagcaccagtggcggtggccaccactgtgggcggagatggctgcgacgcgtgcgcaggtaaagtctatgcgcgccttgcctcccaccggcgc

SEQ ID NO: 847722 - DNA, 120 bp, Artificial Sequence
  ENSG00000278175_40 (sequence is synthesized)
ttgacatgtaaaaatttgttagttttattttttcaaccgatctgacctgtatagttgggcttgaggaagcttcctcattctacatgttactatggattttctaatattaacacagggttg

SEQ ID NO: 847723 - DNA, 120 bp, Artificial Sequence
  ENSG00000278175_41 (sequence is synthesized)
taggtggtgaaggtttagcccagtaaagcagagaggttaagaggttagattgggggctctggagccagacctgtgtagatctgagtcgtggctctggcacttgaaagccgtgtgaccttg

SEQ ID NO: 847724 - DNA, 120 bp, Artificial Sequence
  ENSG00000278175_42 (sequence is synthesized)
gttaagatacttagtccctctctgccaaatggagaaataagggcacctaccccatagggtagttgtgtgattacacaagttaatacacttcaatcagtagcaagaaagtgaatgtcaagc

SEQ ID NO: 847725 - DNA, 120 bp, Artificial Sequence
  ENSG00000278175_43 (sequence is synthesized)
tgtatttgttcaggcagccatatggtagccccacgtccttagtaaactgaggtattgaagtatcttctttttctttcagaaaatatttgtcaagcaccttctgtgttcaaagaactgttc

SEQ ID NO: 847726 - DNA, 120 bp, Artificial Sequence
  ENSG00000278175_44 (sequence is synthesized)
tagagctttgcatgctatggaggtctagaaattcacattatggtggcaggtgacagacaatacaaagagataaagcaatttcatatagtgataagctagggaggagtgctaaaaggagcc

SEQ ID NO: 847727 - DNA, 120 bp, Artificial Sequence
  ENSG00000278175_45 (sequence is synthesized)
aaggtgtagtggtgactggaaggtgaccagggaaaccactgtagggtttctaagtgatgagatctgtgacaaatccctgtggtcagcagcaggcattggatatgtaactttattctgtcc

SEQ ID NO: 847728 - DNA, 120 bp, Artificial Sequence
  ENSG00000278175_46 (sequence is synthesized)
cattgatcttgtagtcaaccctggtctgttctgtattgttttaattacataatctttgtaataatctttaatacctggtggagtgctctgtttacttatttctgcgtaattaaccacccc

SEQ ID NO: 847729 - DNA, 120 bp, Artificial Sequence
  ENSG00000278175_47 (sequence is synthesized)
taagcttaacttactcatggttctgcagggtgactgctctccatgtttctaggtggttctgcatggggcctctcacatgtgctacagtcaaacattagccggggccacagtcatctgaaa

SEQ ID NO: 847730 - DNA, 120 bp, Artificial Sequence
  ENSG00000278175_48 (sequence is synthesized)
ctcacttacatggctgacaatagatgttggctgttgcctggagaagacatatgtggcgtggtggaatggaatggtgactagattcaagaaagagcttcccaggaggaaggctaccaagag

SEQ ID NO: 847731 - DNA, 120 bp, Artificial Sequence
  ENSG00000278175_49 (sequence is synthesized)
gagggtgcgcatgagtactcgcctaggaccatgcaagatatgataaagatctatgtcactgaattttgtttctgtatttgtatctcagcttcccagaaataaaaaagaattctaacattc

SEQ ID NO: 847732 - DNA, 120 bp, Artificial Sequence
  ENSG00000271653_0 (sequence is synthesized)
ttttttctttcctagttagaggcatggagctttacatatgacaagtgttctctcatttgttaccctgcccactaagttcaataagtctctacatgattggattctctttacaaagcaact

SEQ ID NO: 847733 - DNA, 120 bp, Artificial Sequence
  ENSG00000271653_1 (sequence is synthesized)
taaacgaattgcagttatgatatcaaggaaagattccagtgctgaagaacagcctgttttggaatttactcccccaaatgcaggcacaaggcgaatttcatactgggatggcttaactaa

SEQ ID NO: 847734 - DNA, 120 bp, Artificial Sequence
  ENSG00000271653_2 (sequence is synthesized)
cctgtcttgattttagagtcactatatctgtctacatttaaaatagataattatcttttaactaggccaaagcattcaggttacaaaaagtcacagtgaaaagttaagttcttgtctctg

SEQ ID NO: 847735 - DNA, 120 bp, Artificial Sequence
  ENSG00000271653_3 (sequence is synthesized)
caggaagcaggcaagagccccaccctcctgggcgcagccgcagctgcccaaactgcagctgcagacccaggcatctctgcactctctggggccaggaagggcccccctgcccctgcagac

SEQ ID NO: 847736 - DNA, 120 bp, Artificial Sequence
  ENSG00000271653_4 (sequence is synthesized)
tcagaggtgtctgttcccacttcctggactctctctgctcctggcacccactccgatcttggagcaaggttggggtcaagcctgggtgctgtcacagcccagccaggttgtgacacagca

SEQ ID NO: 847737 - DNA, 120 bp, Artificial Sequence
  ENSG00000271653_5 (sequence is synthesized)
gccttggccccctctggactttgggcactgatcagtacgagagggaggctgaggtgggggctgagggcagctcattgctggtctgcaggcgcccttccgcacaaacagcctggcatgcca

SEQ ID NO: 847738 - DNA, 120 bp, Artificial Sequence
  ENSG00000271653_6 (sequence is synthesized)
tgagctgcagcaagaggcagagaggctcctgggcggaagagggcaggtctccagtgaagctccaccttcaagctggggagagcctgaagcctgatggccaggctgttggtcccatggacc

SEQ ID NO: 847739 - DNA, 120 bp, Artificial Sequence
  ENSG00000271653_7 (sequence is synthesized)
agagtggaaacttgtggtgcttttcctgggcctgcccatggctgcccatggaccaatcagcatgcacgtcctctgctctgaagcccataaaaaccccagactcaggcagacttggggaga

SEQ ID NO: 847740 - DNA, 120 bp, Artificial Sequence
  ENSG00000271653_8 (sequence is synthesized)
tgacaggactaccagtggtggagaggagctaccgaccccagggactcctgttggctgagagctgaagatacaatgggacgactagctgcagagaggagctacccactccaggttctcctc

SEQ ID NO: 847741 - DNA, 120 bp, Artificial Sequence
  ENSG00000271653_9 (sequence is synthesized)
tctgctgtgagctgaatgctcatcaggacatcttgcctgtggagaggagctacccaatgccggtctcctctgagctatactgtcactcaataaagctcctttttgccttgctcaccctcc

SEQ ID NO: 847742 - DNA, 120 bp, Artificial Sequence
  ENSG00000276687_0 (sequence is synthesized)
gtggccctccacagcagccgaactccttgtagttgtcaccgtggacgcgggctgcagggaggcccggacgcccatcccaggtttcggcctcaccctcaggctgatgcagcgtgcccagcg

SEQ ID NO: 847743 - DNA, 120 bp, Artificial Sequence
  ENSG00000276687_1 (sequence is synthesized)
gggagcagcaggacgggatctccttgctggcgtgcctgcatccagctgtttactgcacgttaatcctgaatctggggggccatctgtttgaaagatgctattccaaggtggcccccttgt

SEQ ID NO: 847744 - DNA, 120 bp, Artificial Sequence
  ENSG00000276687_2 (sequence is synthesized)
gtggcggcccagggatggtgactcaaggctttggttcgggcagatctgaaggacctatcggttattttgtctacacagaaggaaggttacaataagctgatgtcattgtgacggccattg

SEQ ID NO: 847745 - DNA, 120 bp, Artificial Sequence
  ENSG00000276687_3 (sequence is synthesized)
gtctgttcccgtccgaaagaattcattttcagcagtggggggtatctgttagttctttgtttatcttgcagctgaattctcagccaggtccatggaattttgagtcaccaacttgtgtgc

SEQ ID NO: 847746 - DNA, 120 bp, Artificial Sequence
  ENSG00000276687_4 (sequence is synthesized)
aataatccagaggattaaagaattctttttttcttcttgatacaaaaaggtattttttttaaattcacagaggagaaacataatttaatttttgaatattttctttaacattttcaaata

SEQ ID NO: 847747 - DNA, 120 bp, Artificial Sequence
  ENSG00000276687_5 (sequence is synthesized)
catgtgaaagagagagggcttggctggcttcaacaattgaaacaaatgcagcatctctcatattaaaagtgttacataaaatgtaagcacaatactacaaatgctaatgtaatttattct

SEQ ID NO: 847748 - DNA, 120 bp, Artificial Sequence
  ENSG00000276687_6 (sequence is synthesized)
aagcacaatactacaaatgctaatgtaatttattctaattgaggaattactctgattcactataactgtgtataactatatataaattaatggtatttttaaaagagtgtggtaaaaaga

SEQ ID NO: 847749 - DNA, 120 bp, Artificial Sequence
  ENSG00000276687_7 (sequence is synthesized)
aaacactagaaatgataatatgatatttatttaatgactatttgatgtgtcggaacattttgattctgaataaatatgagtttagtgtatcagtaatatataaatatagcatcatcaaat

SEQ ID NO: 847750 - DNA, 120 bp, Artificial Sequence
  ENSG00000276687_8 (sequence is synthesized)
ttataattcaaatatagttcaaattaaatatagtcaaattaatactttgataacaaactaattaaaaataaaaacaagtctcagaggcttaaaatacaaaagaatatttctctgccacgt

SEQ ID NO: 847751 - DNA, 120 bp, Artificial Sequence
  ENSG00000276687_9 (sequence is synthesized)
tcagaggcttaaaatacaaaagaatatttctctgccacgtttggtgagcagaatcaattactaccttaatagcattatatttattaataaagagcctaaataattttctttcattttaga

SEQ ID NO: 847752 - DNA, 120 bp, Artificial Sequence
  ENSG00000276687_10 (sequence is synthesized)
attactattgcatttcaactttcttattcagaaacaataaattagcatggcagagatggctaattgcctcctggtttgggggcattggtctgaacattttccattttcttaataacaaga

SEQ ID NO: 847753 - DNA, 120 bp, Artificial Sequence
  ENSG00000276687_11 (sequence is synthesized)
ccccaattttattaacatttatttattaagggctaagcatgactgtgtgctcagctacatttcctgcctctcttgcagttcacagtggccacatgatacagttctggtcaagtgagactt

SEQ ID NO: 847754 - DNA, 120 bp, Artificial Sequence
  ENSG00000276687_12 (sequence is synthesized)
ctgggaaagcctttacaagtgaacagatttgtctagattgtcccttttgccctttgccatagtctttctttgagccaggaatgtggatgtgatggcttgagtgccagtagccatcttgca

SEQ ID NO: 847755 - DNA, 120 bp, Artificial Sequence
  ENSG00000276687_13 (sequence is synthesized)
cacatgacacaaaagctcacaccctgtggactatggatggctacaaaatccctagaaaggagatttagaatgaactagagtccctaataacatctattgcttattttcttgttagtgaga

SEQ ID NO: 847756 - DNA, 120 bp, Artificial Sequence
  ENSG00000276687_14 (sequence is synthesized)
catgaacatgtatcttctatgaacaactgttatggaattttctgttaaatacagccaaacgcaatttccacatgatacaattaagacaaggaataaactactaagatgataaaaaaaaca

SEQ ID NO: 847757 - DNA, 120 bp, Artificial Sequence
  ENSG00000162947_0 (sequence is synthesized)
tttttttttttttttttttttgcagaaacctagacctataagtttagtacctgaatctcttgctgattcatgcatttctattaatcttctcagtcagatgtttagctcagatctgtcctc

SEQ ID NO: 847758 - DNA, 120 bp, Artificial Sequence
  ENSG00000162947_1 (sequence is synthesized)
cctcttatccaagcttttccaagagtctcctagctacacttctggcatcatgttacaccctacaatccagctcttcacagtctcctgacttctttttaaaagttgcatactatatataca

SEQ ID NO: 847759 - DNA, 120 bp, Artificial Sequence
  ENSG00000162947_2 (sequence is synthesized)
tctctctcttgcttaacattcctcagttattccctagtggacacagaataaagtctagcttcttagcatgttacttgggctccttcagtgccagtccccacaaattcctcactcatcttg

SEQ ID NO: 847760 - DNA, 120 bp, Artificial Sequence
  ENSG00000162947_3 (sequence is synthesized)
cagaagctcccagttttcaatattctcctaaatgctgtggaacctctgtctatgcaggattctaaagatgaggaaaattagtcccttaagactcagcttaagcattgccccttgtgcctt

SEQ ID NO: 847761 - DNA, 120 bp, Artificial Sequence
  ENSG00000162947_4 (sequence is synthesized)
tactgttagtttgcccctctgttcttaagagtttattcctggcattgctcttaagggaaggaagtttggcagggccaagagtcctaaacgttagacctttctctctaaacactaacaaca

SEQ ID NO: 847762 - DNA, 120 bp, Artificial Sequence
  ENSG00000162947_5 (sequence is synthesized)
ttaaaactccattcaagaaggagcaaaagaagccatcatctagaaacaatgttgataaccacagttcctgaacttgggcttgttaaaagactttatctccatgagtatactgaaacacat

SEQ ID NO: 847763 - DNA, 120 bp, Artificial Sequence
  ENSG00000162947_6 (sequence is synthesized)
atcaatcaggtctcgagatctagaaattagtataagtactgagtgctaggggaaaaaaattatactcttcaaactacatccctgggagtgttagtgatgtcataattcactgaggatcta

SEQ ID NO: 847764 - DNA, 120 bp, Artificial Sequence
  ENSG00000162947_7 (sequence is synthesized)
gaaactacaggatggatacttataaaagataagggaagtatagtgcataggttgctgagaggtggagagaaagttgcttacttttcctgagcctcaactttctgaaaacatagaaacaca

SEQ ID NO: 847765 - DNA, 120 bp, Artificial Sequence
  ENSG00000162947_8 (sequence is synthesized)
attagatgatgagttatgaggtgaaggaggggatgactcagcagcaatgtgccagctccatagtgacttctccaccaagctggagaaggatttgcagcaatggttccagaaccaactgtg

SEQ ID NO: 847766 - DNA, 120 bp, Artificial Sequence
  ENSG00000162947_9 (sequence is synthesized)
tgtatctacaggatgaagaaactaaggcaacaagcaggatacatccagctgtgctacctgggaggagtcctctcttctataatcaaactcaacagaaacaggcccttgcttctgggacat

SEQ ID NO: 847767 - DNA, 120 bp, Artificial Sequence
  ENSG00000162947_10 (sequence is synthesized)
caaacatgaagaggctcctgttctgcagaaaataaataaggcgatatcaaagatttgtagaaattttgattaagacactttctcagtctttccacatagcagacactgaactactgacat

SEQ ID NO: 847768 - DNA, 120 bp, Artificial Sequence
  ENSG00000162947_11 (sequence is synthesized)
gtgctgtagctagaattgagcctgtggacttttatctttgcctttgaattctgttatattgacattaatttggacactcaataaaaaattaacaaaatagggatccttgcatgaacctaa

SEQ ID NO: 847769 - DNA, 120 bp, Artificial Sequence
  ENSG00000162947_12 (sequence is synthesized)
gcaattaatgctgaaacacagctagcatacatagcaataacttaggcaaaaaggcaacactcaagcaaaatccttcctggaattaaaatcctgttattaggtcaaccaacttttctttta

SEQ ID NO: 847770 - DNA, 120 bp, Artificial Sequence
  ENSG00000162947_13 (sequence is synthesized)
gttgcccaggctgatctcagattcctgggctgaagtgatcctcctgcttcagcctccagagcagctgggattacagcagcttcagtgctgaggctaatggcaaaggaaacaccaggggat

SEQ ID NO: 847771 - DNA, 120 bp, Artificial Sequence
  ENSG00000162947_14 (sequence is synthesized)
cagtgagtaagaacttgtcaagggaacaaagtctgaagatggaacggaggaagaggagaaaatcttccaccaaaaaaaatattaaaatctgatcttcaaggaaatactgaatccacatag

SEQ ID NO: 847772 - DNA, 120 bp, Artificial Sequence
  ENSG00000162947_15 (sequence is synthesized)
cactcccctccgctcccttcttaggcacagcattactcaccatctcacagaggagaaacagaaatataaaataaaaagtggaaacaatcattaaaaatacttagccactcccacgtgtcc

SEQ ID NO: 847773 - DNA, 120 bp, Artificial Sequence
  ENSG00000162947_16 (sequence is synthesized)
tgggaaactgagaacacagtaactaccaaacaaattacatgatgtcacatgccagatacctaaaggataacatcaccccatcttcagaaacagaagaaaataaaatagcaaaagcaagag

SEQ ID NO: 847774 - DNA, 120 bp, Artificial Sequence
  ENSG00000162947_17 (sequence is synthesized)
aggatgaagtgtcaccaacctgaggcttctctgttgtaactcagttgtctcaggaacttccatggttactcagtgttctcccagcccctgtgaggtcacatatgtctgtgcccgtgtctg

SEQ ID NO: 847775 - DNA, 120 bp, Artificial Sequence
  ENSG00000162947_18 (sequence is synthesized)
tgatgagtatatttaacctcagggtcaagacagaagatattggaagagaaggagaagccactggctcatttcccagtttttccatttttattgaaaaaataaaagtatttcctgtaagaa

SEQ ID NO: 847776 - DNA, 120 bp, Artificial Sequence
  ENSG00000271659_0 (sequence is synthesized)
tctccacattgattactccaggtctaaatactagcttgaaaggggaattagactttatgtattgccaaaagctattggtattctcttgctaagcatgtcaccaactgctgaatgttcaga

SEQ ID NO: 847777 - DNA, 120 bp, Artificial Sequence
  ENSG00000271659_1 (sequence is synthesized)
cacccagactttgaacatgttttgcatccttccctctcctcgcctctccctgtctaatatatctctatcaagctttgcgtttgctaggaggcacaccattcatttcagtgatctctgcta

SEQ ID NO: 847778 - DNA, 120 bp, Artificial Sequence
  ENSG00000271659_2 (sequence is synthesized)
ttgggtcctgcatgaaaaagaagctgagcaacatgatccctttgacccactgctggagcaacaaatttatcagaaatataggcatgagaaatgaaagggaagtaaaacaattccagctta

SEQ ID NO: 847779 - DNA, 120 bp, Artificial Sequence
  ENSG00000276688_0 (sequence is synthesized)
cttcctgtaaggtcttgagcaggtcatttaactgcacctgaaaatgaaaataactgtccccacctcaaccagttgttgtaaggattaatgagataatagatataaaagcatttgataagc

SEQ ID NO: 847780 - DNA, 120 bp, Artificial Sequence
  ENSG00000276688_1 (sequence is synthesized)
tttgcttcattaggcaaggtgatcaaaaatatttgtcaaatgaatgcataaattaatgaatgaatgagaagtgagtgagtgaatggacaagtgaaaaaatcaataaatgcctaaatgcaa

SEQ ID NO: 847781 - DNA, 120 bp, Artificial Sequence
  ENSG00000279463_0 (sequence is synthesized)
atgactatgtgtaatcatcactagttatttcattaaatttgatagttatgcagctggtcatgaagttattttcttcttctaagttcttttttttccctgaattttactagaagaaattgc

SEQ ID NO: 847782 - DNA, 120 bp, Artificial Sequence
  ENSG00000279463_1 (sequence is synthesized)
atcattgacttattcccttttaaagtaaataatatgtatgtactttgccttcagagcctagaaataatgatggattaagatttatgttgtattactttttgctttgacactatattacta

SEQ ID NO: 847783 - DNA, 120 bp, Artificial Sequence
  ENSG00000279463_2 (sequence is synthesized)
ctgaggcctgtaattaaaatatgatcgatgagtacataaaacactgccttctcataaaatgctagtaaatatggttgttttggttcttgtatgaggtgggaataaatacatttgattgat

SEQ ID NO: 847784 - DNA, 120 bp, Artificial Sequence
  ENSG00000227550_0 (sequence is synthesized)
atgggcaccaggctcctctgctgggtggtcctgggtttcctagggacagatcacacaggtgctggagtctcccagtccccaaggtacgaagtcacacagaggggacaggatgtagctccc

SEQ ID NO: 847785 - DNA, 120 bp, Artificial Sequence
  ENSG00000227550_1 (sequence is synthesized)
aaatcagggctgctcagtgatcaattctccacagagaggtctgaggatctttctccacctgaagatccagcgcacagagcaagggcgactcggctgtgtatctctgtgtcagaagcttag

SEQ ID NO: 847786 - DNA, 120 bp, Artificial Sequence
  ENSG00000259267_0 (sequence is synthesized)
atgaagaagtgggattcaacagagagaaatgtgaagtctgccagctagccctgagaagcaggcatgacaagagaggatgcccgtgttacagatgagaaaaacagaggccctgggaggaag

SEQ ID NO: 847787 - DNA, 120 bp, Artificial Sequence
  ENSG00000259267_1 (sequence is synthesized)
ggtccccagactgcccctctggaactccacatgcagccacctggctgtcctgcccgggatgccatccgcaggctaggctggcgctcatgcccatgccctgctgtccactgacaccccgca

SEQ ID NO: 847788 - DNA, 120 bp, Artificial Sequence
  ENSG00000259267_2 (sequence is synthesized)
gagcttaacaccccgctgagcctgccctgcagcccttgccaagtctgtccgagtggcctcagtcattggcaagtcacattgctgacatcgcaactgcataaaattaatttatttagttaa

SEQ ID NO: 847789 - DNA, 120 bp, Artificial Sequence
  ENSG00000259267_3 (sequence is synthesized)
agtctgccagctagggaatgaaatgaaagaacgaagaggaaaatcttaacctgtacagcctcttggatgatggggtgggaagtaaagacctgtcccccagtttcctgctgcctggagaaa

SEQ ID NO: 847790 - DNA, 120 bp, Artificial Sequence
  ENSG00000259267_4 (sequence is synthesized)
tctggaagatctcctagggctttggagaatgaaggcacccttgtctggatgccaccacagcctcctccctctcaccccggcctcctcctcctcatcttcagcccaccaaggccagatttg

SEQ ID NO: 847791 - DNA, 120 bp, Artificial Sequence
  ENSG00000259267_5 (sequence is synthesized)
tcttgcaaagtggcatcattataaacgcatcagcctcctctggacgcctgtgcctgctcccgccagcccatccaggctcgattacatctgaggctgtctggggtaattaagtgacattag

SEQ ID NO: 847792 - DNA, 120 bp, Artificial Sequence
  ENSG00000259267_6 (sequence is synthesized)
gacgcatcccctgttgtaatgcagtgttcaaagccctgggctcttgcttcccaagagctgctgccgctgcactgaggctgtgtctgcctaatgcaccccactgtgattgtggctaattac

SEQ ID NO: 847793 - DNA, 120 bp, Artificial Sequence
  ENSG00000259267_7 (sequence is synthesized)
tccacagacaggcctcattagtggtgggttcgggatggaaggtgagaagcaggctgtctcccctgcctcccccagcccacgggctttccctctccctccgtgaccaagcttgccttactt

SEQ ID NO: 847794 - DNA, 120 bp, Artificial Sequence
  ENSG00000259267_8 (sequence is synthesized)
tgctgttgaggcaggattagaatagggcaaaggaattcccaaaagacgtctcatctgggcaaggtcatctactgagctacagggccttcaggaactttccaactgctttattcaactaat

SEQ ID NO: 847795 - DNA, 120 bp, Artificial Sequence
  ENSG00000259267_9 (sequence is synthesized)
gccacctttcctaactgcccagcttggaggggtaggggcaggccaagtgggatcatgcacagccaggacccacctgggtccagagctagtgggagaaagggctcatgggcacccaggaaa

SEQ ID NO: 847796 - DNA, 120 bp, Artificial Sequence
  ENSG00000259267_10 (sequence is synthesized)
agagctggatggctacgctaccccagaggctctttctggtctctaggcctttgcaactgttgcctggaatcctcttctgatgccctccacctgccaccttgcacctggctgactcctttc

SEQ ID NO: 847797 - DNA, 120 bp, Artificial Sequence
  ENSG00000259267_11 (sequence is synthesized)
atccttcaggtctcgctttctccaggaagcctcccctaactcctgagttttgtgctcctcatccatgcttccatgatactctgtacttccccatcttggcagtcatcactctgaattgtc

SEQ ID NO: 847798 - DNA, 120 bp, Artificial Sequence
  ENSG00000259267_12 (sequence is synthesized)
aacacctaataccccacatgctatacccataggaggagcaagctctgagacactcttgttcatgtagtaggcactggcctagctcacagatggcctttgataagaattagtagaaggaaa

SEQ ID NO: 847799 - DNA, 120 bp, Artificial Sequence
  ENSG00000259267_13 (sequence is synthesized)
gatgtaatgattgatggctgcttgaccagtacaatgagtaccatggtaaggctgttggtgttcactcacatctgagagtttctttatacttctcagcctcccttgctcttaggttggtca

SEQ ID NO: 847800 - DNA, 120 bp, Artificial Sequence
  ENSG00000259267_14 (sequence is synthesized)
catgactcactccagcaaatgggatgtgagcagaaggtatatatgttacctggaatgaggtgaataattacctggtgtgcttttctacaatccttgttgcctgagtgatgccaagatcat

SEQ ID NO: 847801 - DNA, 120 bp, Artificial Sequence
  ENSG00000259267_15 (sequence is synthesized)
tttgaagctgcaagatggtggagccacaagatgaaaggaacctgtatctctgagtcaccacacagaagagagacatctaggaaagctgcttgacatgggtcatatgagtaagaaatcaac

SEQ ID NO: 847802 - DNA, 120 bp, Artificial Sequence
  ENSG00000259267_16 (sequence is synthesized)
ctcactgcgcaaagccactgagaaatcaaccttcctgcacaaagccaccgagatgttggggctacttattagagtggctagtgggaattactctgactaatataaaggggttaaacttga

SEQ ID NO: 847803 - DNA, 120 bp, Artificial Sequence
  ENSG00000241098_0 (sequence is synthesized)
aggagaagcttaaggactggagtcgggtagatatgtatatgctggtgctatggagtaaatacatccagggtgtgtttacttttcaccagccaaatactcactacctgaacaccatctccc

SEQ ID NO: 847804 - DNA, 120 bp, Artificial Sequence
  ENSG00000241098_1 (sequence is synthesized)
tgagtacctcgcttcttaaatgactccgcttactgcataacatatggaaattgaaagcagcactcctctgggtatcaggacctctgaatcctataaaacctaaaggtgcagggacaagaa

SEQ ID NO: 847805 - DNA, 120 bp, Artificial Sequence
  ENSG00000241098_2 (sequence is synthesized)
gcacacattctaaagaagctagattctcatatctgcccctgtattcaatctcctgtggcattatataccatgcagcctctggaaaacttcactgtgccttcatgccagaatgagaataaa

SEQ ID NO: 847806 - DNA, 120 bp, Artificial Sequence
  ENSG00000241098_3 (sequence is synthesized)
aagatgaggaagctgaagcagaaagaagccaagcaacttaatgacactcttcagggtgtttgtccccactgctggttttctagaccactccctgcctacagttcctctctgttctcatct

SEQ ID NO: 847807 - DNA, 120 bp, Artificial Sequence
  ENSG00000241098_4 (sequence is synthesized)
cacgccatcctgcaaaaagatggccatgtgccggacagctctgtatgccgccccactgctgtgctttacaggatctgtctgtgcatgcaggtaggcttatttatcagaaagaacccaatc

SEQ ID NO: 847808 - DNA, 120 bp, Artificial Sequence
  ENSG00000241098_5 (sequence is synthesized)
tcacatgccatagagtatgagaaggcaacatttggaggatgttggaaaacatacttttagagttcagtgcattgtcaccttttggatcctcagatcaacctcagatgggtgcacaagaat

SEQ ID NO: 847809 - DNA, 120 bp, Artificial Sequence
  ENSG00000241098_6 (sequence is synthesized)
ctctcttctcttggcctccctgctgtctgctttccttttatcgtccacccctcccatcgcttcccagtatcctggttgcagggatcctgcccctgctcttgtgtcagtctaagccagtga

SEQ ID NO: 847810 - DNA, 120 bp, Artificial Sequence
  ENSG00000241098_7 (sequence is synthesized)
cacgctagagaatttattcatggtggagaacagaagtgagctattaagtttttcagaatggagcacccaccagaaaagcaaacctcttgcttgctaattttaaaccattttcctaaaagc

SEQ ID NO: 847811 - DNA, 120 bp, Artificial Sequence
  ENSG00000241098_8 (sequence is synthesized)
acgagcctaatgtgtttcaaagtaaaatttactttaaaattaacaaagttcagaagattattttaatatttgaaataattcttgcctgctatagtttatctgtcatctgtatttccaaga

SEQ ID NO: 847812 - DNA, 120 bp, Artificial Sequence
  ENSG00000241098_9 (sequence is synthesized)
aactttacttttaaactcttttaaaaatatgccgttattgctcctttttatgactgagagtatatggaaagattggcgatacatctgcaaaacctttcctgtgcctgtaataaaacatat

SEQ ID NO: 847813 - DNA, 120 bp, Artificial Sequence
  ENSG00000241098_10 (sequence is synthesized)
ggtttagacctctgttctctccctcctccacctctagttttagtcacctagaaatagcttctctatttgtccaaattaccaagtatttaccttctctgttctcctctagagcctgattta

SEQ ID NO: 847814 - DNA, 120 bp, Artificial Sequence
  ENSG00000241098_11 (sequence is synthesized)
gttacaatatatttatatcagttttttttttctgaggatattaaccttagactttaggaagtatgcttctaatctcccctgcttatacacacatgctttaggagggcaagaaaagtgttt

SEQ ID NO: 847815 - DNA, 120 bp, Artificial Sequence
  ENSG00000241098_12 (sequence is synthesized)
tattcagatttataacacttgtgcctagaggggcctggcatgtagtaatatactcaataaaaacatgttgagttgactctaatagaaataattcttaaaattcctttcttcttttcttcc

SEQ ID NO: 847816 - DNA, 120 bp, Artificial Sequence
  ENSG00000241098_13 (sequence is synthesized)
ttccttctttccttcctttcatcatgcaataaacatttattgaatttctcttatgagccagacgccatgttaagtaagtcccaagtttgtagatattatcaactctgacctcaagaagcc

SEQ ID NO: 847817 - DNA, 120 bp, Artificial Sequence
  ENSG00000241098_14 (sequence is synthesized)
tagaacgggcaaagccgtacagttggaaaggtaggtagtgttcccaccttttgggttttcaagacaatttggggaggttttattaaggttgtatcctgagcacacatttctcttgttgcc

SEQ ID NO: 847818 - DNA, 120 bp, Artificial Sequence
  ENSG00000233729_0 (sequence is synthesized)
aatacagcccactggttggggcatcagaattcctgtgggggtgccccgagtagcagtcacagagaggggccttcgctaagctgctttcaatccagattagggtgagccacaagaaaaatt

SEQ ID NO: 847819 - DNA, 120 bp, Artificial Sequence
  ENSG00000233729_1 (sequence is synthesized)
cttcagagatacgagtcgtgggcgtaaaacagcagctgttgtgtagctcacacaagttcttgctaatctgctggtttttaaactcgtgatctgacttgtctgagagcatgccttgtggac

SEQ ID NO: 847820 - DNA, 120 bp, Artificial Sequence
  ENSG00000233729_2 (sequence is synthesized)
ttcaagccccagcatgagatccagtgataacagccttgcagagactacttccaacctccacaattgtataagccaggtccccgtaacaaatctcatactggttctgcttccctggttgaa

SEQ ID NO: 847821 - DNA, 120 bp, Artificial Sequence
  ENSG00000233729_3 (sequence is synthesized)
atttgaatacagtcactctattgaccaggacgaccctgttgcagtacatggttgtctgcagtcacctggctggtagattcctccaaatctagggggaaggactaaagggcccccaagagg

SEQ ID NO: 847822 - DNA, 120 bp, Artificial Sequence
  ENSG00000233729_4 (sequence is synthesized)
ctatagtgatgatgtgataattaattttatgtgtcaacttgagtgggctgaaggatgcccagaaaggtggtaaaacattatttgggagggtatctatgaaggtgtttcaagaagaaatta

SEQ ID NO: 847823 - DNA, 120 bp, Artificial Sequence
  ENSG00000233729_5 (sequence is synthesized)
gcatcaaaatctgtagacagagtaaagaagatctgccctccccagtgtgggtaggcatcattccatcacttgatggtgcagaaaaggtaaaaaggtggaagaagggcaaattctctctct

SEQ ID NO: 847824 - DNA, 120 bp, Artificial Sequence
  ENSG00000233729_6 (sequence is synthesized)
ttttcagctgagacatccaccttctgcagaaaggcataggagctcccggctctcaagccttcagactctggaacttttaccagtggcctcccagttctcaggactgtggacttgatctga

SEQ ID NO: 847825 - DNA, 120 bp, Artificial Sequence
  ENSG00000233729_7 (sequence is synthesized)
tgcagatggcagatcatgggacttattcccatgtgagccaattcccatattaaacctcctctcctgcctctctatatatcctatagtttctgtttttctgaagaatcctgactataccaa

SEQ ID NO: 847826 - DNA, 120 bp, Artificial Sequence
  ENSG00000233729_8 (sequence is synthesized)
caacttggaaacttagaagtaacaggtaataacaatgatgctgcggatacaaacatgacaggtacacagcatgtactaaatgtagggtcccagtactacagactcatttttttctcacca

SEQ ID NO: 847827 - DNA, 120 bp, Artificial Sequence
  ENSG00000233729_9 (sequence is synthesized)
accaccctataaaataggtactgttattttatctccctctatactctgaggcacacatagctgaaataactcgccagtaagtagaaagccaaaattaaactcaggtactctggctccaga

SEQ ID NO: 847828 - DNA, 120 bp, Artificial Sequence
  ENSG00000233729_10 (sequence is synthesized)
atctgtgctcttcaatactattgcaccattccaaatcaacctaaatgtaatgctttccatcctctggctaccctgacttttagaaatttttcacaacagaaaaatagtgtgctagcctgt

SEQ ID NO: 847829 - DNA, 120 bp, Artificial Sequence
  ENSG00000233729_11 (sequence is synthesized)
gacagtgcagccaggaaacttctgttctggtcctgatttcaccactgactggctgttgttaaagcaaactaagtatggcctgagaaggaccgcatacttctgtatctgagtgattgtgga

SEQ ID NO: 847830 - DNA, 120 bp, Artificial Sequence
  ENSG00000233729_12 (sequence is synthesized)
tgaactgtaacctagcttaacaggcagactaataggcctaataacaggcgaatagactaataggccaagctctaaccaatccagccatctgttcctcacttccaatttctgtacgtcact

SEQ ID NO: 847831 - DNA, 88 bp, Artificial Sequence
  ENSG00000233729_13 (sequence is synthesized)
ccagccatctgttcctcacttccaatttctgtacgtcacttccctttttttttcccttctaccatgtggagtgggggctgcccgattc

SEQ ID NO: 847832 - DNA, 120 bp, Artificial Sequence
  ENSG00000233728_0 (sequence is synthesized)
acaaggccacaccagaaaaggaaagctgggtcctggaagcttcaggacaggaactcttccttggtcaagttttccccagcacctagcacataggaaggtgcttgatgagtgagtgttaaa

SEQ ID NO: 847833 - DNA, 120 bp, Artificial Sequence
  ENSG00000233728_1 (sequence is synthesized)
tgaacctgtgagtgctcaggatgatttcctgataattgggttcaggaatctactgggaggagcttaaacctagaagttccctttttgaaagtctcaaatatggttccctaacttagagaa

SEQ ID NO: 847834 - DNA, 120 bp, Artificial Sequence
  ENSG00000233728_2 (sequence is synthesized)
atggccttctcaatctgggtgccctcgtgccactcattgaaggaggtaatggaaacgatctcgggcctcactgtcagggccgcctgcagggccgtctcatagtacttgccattgaccctg

SEQ ID NO: 847835 - DNA, 120 bp, Artificial Sequence
  ENSG00000233728_3 (sequence is synthesized)
ttgcgcgtattgtggttgttccagggccgaatgctggtgtctatgtagccaggccccacactggggatgaacatgaggttgttggcatcacaaaagttcttcacagctttccagttctga

SEQ ID NO: 847836 - DNA, 120 bp, Artificial Sequence
  ENSG00000233728_4 (sequence is synthesized)
tgggaagaaccaaaggagaaaccattggaggcaaagtaggtgtacatgccgtcaaatccggcggccaggatatcgtgggtgtggccctcctccaccagcagcgctatgaagaccccatcg

SEQ ID NO: 847837 - DNA, 120 bp, Artificial Sequence
  ENSG00000233723_0 (sequence is synthesized)
acggtctctgtctcctgatcacgctcccgttcccgatatctctcccgctccttgtcccaaggtgtcttgattgtggagggtgtataatccccaatgtcttcgaaaatactcctgtcagcc

SEQ ID NO: 847838 - DNA, 120 bp, Artificial Sequence
  ENSG00000233723_1 (sequence is synthesized)
tcagcaggtttcttctcttccagcttccctttatccttcttcttaagcttcttgttacgggttccctgcctcagctgggtcttcatcctcattgtactcccttggcatctcatggtgacg

SEQ ID NO: 847839 - DNA, 120 bp, Artificial Sequence
  ENSG00000233723_2 (sequence is synthesized)
tgacttagaaggtggtgcagagacgtttgaaactattgctttgctgaaaacatctgactgccaggctaggatgtgacacttaagggaccagggatcatttacatactgtggtcttgcatt

SEQ ID NO: 847840 - DNA, 120 bp, Artificial Sequence
  ENSG00000233723_3 (sequence is synthesized)
actgcgatgaaatcttccaccactcccaccacccactacaagagatggaattaattgaaactacagccttcaagagacatttggagcaatactcttccagttctttcttccacattttat

SEQ ID NO: 847841 - DNA, 120 bp, Artificial Sequence
  ENSG00000233723_4 (sequence is synthesized)
ttgtgggtacagcgtctcccaggatgtagtgtgctgtaattattcttccacccttttattttctgggagtttctctatctgaatagcacagaaatattagtggataggaagggaatataa

SEQ ID NO: 847842 - DNA, 120 bp, Artificial Sequence
  ENSG00000233723_5 (sequence is synthesized)
tattctatccatctgaaaattaacacccatgttgaacagaatcccttttcagtttcctgtttactacagggtccaaatctctgagctgagctgtgcagcagataataggagaagaaaaaa

SEQ ID NO: 847843 - DNA, 120 bp, Artificial Sequence
  ENSG00000233723_6 (sequence is synthesized)
agatacctgctcctctttcaaggacgtggacttttctgttttgtgaagtgatacttggataggctactggatattttctcattcttgactcatcaaccttataattggtctaagtttttc

SEQ ID NO: 847844 - DNA, 120 bp, Artificial Sequence
  ENSG00000233723_7 (sequence is synthesized)
cctgtcactcctagttttctgtgttaaagttttccattttgatatgtatgatattgacaactgggagaggcagtgcccaggggatggtagccagatgccattttgtaccagaagtctttt

SEQ ID NO: 847845 - DNA, 120 bp, Artificial Sequence
  ENSG00000233723_8 (sequence is synthesized)
attatctacatttaatggttataaataatgaatgcctttgttgggagtactttcatttactcattccaacaaactcttagaccaattttccttgagatcaattaaattcaatccctcctg

SEQ ID NO: 847846 - DNA, 120 bp, Artificial Sequence
  ENSG00000233723_9 (sequence is synthesized)
tatgccagactttaaaaaaatgcccaatactaagtagaataaaaaatgtcttttgcttcagagtagtatgattaggactataacagagttgggttgaaaggtctatagtacaccagagtc

SEQ ID NO: 847847 - DNA, 120 bp, Artificial Sequence
  ENSG00000233723_10 (sequence is synthesized)
aagactacgtttgtccttgggaaattggaaaggctactggagaatatgaaacttcagtgaatcttggggtatcactggatatttagaagctgggttgaggggccaggggatccttggcag

SEQ ID NO: 847848 - DNA, 120 bp, Artificial Sequence
  ENSG00000233723_11 (sequence is synthesized)
aaagaaaagcatagtgacatgagagtgcatcatgagatcaggaagtcatgataggttgtaggcaattaagctgaagaggtttatgaggcccttatttgtgtggatagtggacaggtgctg

SEQ ID NO: 847849 - DNA, 120 bp, Artificial Sequence
  ENSG00000233723_12 (sequence is synthesized)
ggaatgatggatggcaggaagatctgatactagagcagttaaaattatctaggcaagtgagatggggaaatgaagtcaaacagcagcagcagggatggagggaaagtgacaagtttatga

SEQ ID NO: 847850 - DNA, 120 bp, Artificial Sequence
  ENSG00000233723_13 (sequence is synthesized)
gtctaaactggagagagagaggatgagggaagaagaatgtagaatttgaagattgtttggttcttctggtcttccaattatgttcaagtatatgtgagatgcaatggtcaaagtaatagg

SEQ ID NO: 847851 - DNA, 120 bp, Artificial Sequence
  ENSG00000233723_14 (sequence is synthesized)
tacataataaataaaccatttctgttttcagcatctgtagatcaaactttagcttgccttagtttatcattcgtgtgtttagactatgatcaaataaatatattcattttcacactctat

SEQ ID NO: 847852 - DNA, 120 bp, Artificial Sequence
  ENSG00000233723_15 (sequence is synthesized)
aattagctaaacaaagaaatcatggcggattgtttacatttggcagcgcccgggctgcgccgaccgccggccccgagccgccgcgggctccgaggagtcggccgagctgctcccgcgccc

SEQ ID NO: 847853 - DNA, 120 bp, Artificial Sequence
  ENSG00000233723_16 (sequence is synthesized)
gaaacagatttcactacaggacttgaaccctacattaaaaaacaacaagctccccaaaataattgaaaaagatcttcaccaaagagtagctgcaatgtgaatggcaggatatgaagcaag

SEQ ID NO: 847854 - DNA, 120 bp, Artificial Sequence
  ENSG00000233723_17 (sequence is synthesized)
taagagatggtgaaaagattatcttaagcttggaattaagtgatgaaagggaccttcgaaattatcaactctaaatacttctttacaggaaaattgaaagcagttaagaacctgccccct

SEQ ID NO: 847855 - DNA, 120 bp, Artificial Sequence
  ENSG00000233723_18 (sequence is synthesized)
accgtggagttcttggtgccgtgagttggagttcttggtgcctgggtgcgtccccaaggccactggtcttcagatctttcttacttgagaagaacgcctccgcctcctggctctcccacc

SEQ ID NO: 847856 - DNA, 120 bp, Artificial Sequence
  ENSG00000233723_19 (sequence is synthesized)
agtgcatttgtcaggaattgaaaagttttggagccagttcgaggactttctcctgcacaaagtgttggctggaagcatgaagcaataacacatggtttgccaaagaatctgcattgaata

SEQ ID NO: 847857 - DNA, 120 bp, Artificial Sequence
  ENSG00000233723_20 (sequence is synthesized)
atactggtggtgaccacaagaacatgcctctctgactgcaaggaacaagagtgacccagggtttcagctgctgccttggaaattcatcacagtgcaagtctatgcttcccacgggctgct

SEQ ID NO: 847858 - DNA, 120 bp, Artificial Sequence
  ENSG00000233723_21 (sequence is synthesized)
cccagcctgtgaataagcctggcatctttgttgaggcaggcctatttctggagatgcaggatcctccgatgggcgaatttggctctaggactgcttgatggccttgacagactttcctta

SEQ ID NO: 847859 - DNA, 120 bp, Artificial Sequence
  ENSG00000233723_22 (sequence is synthesized)
gaaatgcatggcaatttagggttcctccacccttccctctttctctccttcacctagggtcggacttgcatcatggcctgaaagctccaccagcctctcctgccctcctcctcattttct

SEQ ID NO: 847860 - DNA, 120 bp, Artificial Sequence
  ENSG00000233723_23 (sequence is synthesized)
ttcacaggcatatcctctaataaatttcttgcacattgaatctcatcttggcatctacttattggaggatctgaaaattcacatttttaacacaataataaaattcacattttttcatca

SEQ ID NO: 847861 - DNA, 120 bp, Artificial Sequence
  ENSG00000233723_24 (sequence is synthesized)
tactgactacaatgtggggaatcctggaagagcccttctgtgaaacaacttgactgactagcaaggagcctgttttgttttccagcttgaaagtcactttttgatttgttctacacactt

SEQ ID NO: 847862 - DNA, 120 bp, Artificial Sequence
  ENSG00000233723_25 (sequence is synthesized)
ggctggaagcatggagagcagcatcaaggcagctgtgtgggacttggagtactggcaaagactgcaaagtggaaaataaacagtgtgtctatcaccaagctacaagaacacagcactcag

SEQ ID NO: 847863 - DNA, 120 bp, Artificial Sequence
  ENSG00000233723_26 (sequence is synthesized)
tgaaatgacagtccatggcaagcaactaattggtcaccagctttggaggaaatacattattccagacctctgtcatttaccatgttctttaaactagagaaaaatctgccaggttgaagt

SEQ ID NO: 847864 - DNA, 120 bp, Artificial Sequence
  ENSG00000233723_27 (sequence is synthesized)
gttggctgcaacccccaaaagaaaggaaatagagagttaagactgcgaggctgggcaggcactttggagactgagtaattgaagacatccattgctagagaaagagtcagtttcctgaga

SEQ ID NO: 847865 - DNA, 120 bp, Artificial Sequence
  ENSG00000233723_28 (sequence is synthesized)
cataatgaattcaccccattgcgcacaggtattgtgtgggtccagcaccagttatgtgatgaacgttgtatttcacatagcttctgcctgagaatacaggctcaagtgaattcagcatgt

SEQ ID NO: 847866 - DNA, 120 bp, Artificial Sequence
  ENSG00000233723_29 (sequence is synthesized)
gaccacatttttatgagagctgtcccttttttttcacagtttgtctctctaatttatcgtttcacttggaaaggttgatacattgatgagctacgaaaagcaagagggaacatgcccatc

SEQ ID NO: 847867 - DNA, 120 bp, Artificial Sequence
  ENSG00000233723_30 (sequence is synthesized)
tactaagaggagaagagagcctaaaacatacacattcactaaggaagagaaagccaaatgtgaggtaacagacactcacagggctacacctacaactggtcaatttaaaaatgttaaaag

SEQ ID NO: 847868 - DNA, 120 bp, Artificial Sequence
  ENSG00000233723_31 (sequence is synthesized)
taaggacctaatgcataatcagattgacttaagcatgtgcacctctgtcccaaactggacatatcatatgcagaagagaaggaataagaagaaacttctcacacaaatacgcattttatt

SEQ ID NO: 847869 - DNA, 120 bp, Artificial Sequence
  ENSG00000233723_32 (sequence is synthesized)
tatgtatttaaatgtgcagccacatagactctccccattcaggttagcttggatgaatgaggccttagtgtgcactgagattgtgaatttaaaaacccagaggtctcgatagcaataact

SEQ ID NO: 847870 - DNA, 120 bp, Artificial Sequence
  ENSG00000233723_33 (sequence is synthesized)
ggttgtttatcttaatccacagaagtatgtagtccaaaaattataaaatagtttaaaatcatgtaggttaatagctttataaatgtaagcactgtttctttgatgggccttaaagggccc

SEQ ID NO: 847871 - DNA, 120 bp, Artificial Sequence
  ENSG00000233723_34 (sequence is synthesized)
ataaactctttggaattgtaccctttaatgtgtatggatatatgtacattttagagacgaagaaggtcagtggttttcctcggattctctaacaagtacaagaccaaaaagaagccaaaa

SEQ ID NO: 847872 - DNA, 120 bp, Artificial Sequence
  ENSG00000233723_35 (sequence is synthesized)
aaattttcttctctaaacactcttatcccaagggcatcctaaagttcctctggaatgcattgggtgggagagaaagttctatgtcaactcttctggcagagggaaaagctgaccgaggaa

SEQ ID NO: 847873 - DNA, 120 bp, Artificial Sequence
  ENSG00000233723_36 (sequence is synthesized)
agcaagggcgtacactgaagagactggaaagtgaagatgcactatttgtcaagatgtgccacagcagaagcaagttgtgttggcagtaggaaacaagataaagagaagaactcaaagaat

SEQ ID NO: 847874 - DNA, 120 bp, Artificial Sequence
  ENSG00000233723_37 (sequence is synthesized)
tgagagaaggctttgaacatgatgatggagaaataacactcttgggagaaatgaagatactttctcctccctggtttacctgagtttccagcacccagtgataagaaaggatggcattag

SEQ ID NO: 847875 - DNA, 120 bp, Artificial Sequence
  ENSG00000233723_38 (sequence is synthesized)
tgatgtgtacacctgcagtgatagcttcacctttctaaagcagatgccgtggtagacattttgccagccctcctttcactatacacacagcttggtgtacgctggcagacttttgaccta

SEQ ID NO: 847876 - DNA, 120 bp, Artificial Sequence
  ENSG00000233723_39 (sequence is synthesized)
gtacgctggcagacttttgacctaatttcttaaccctcaaatattccaagacagaacaaagcacacaacaaaaccagaatgaggccgggcaaagtggctcatgcccgtaatcccagcact

SEQ ID NO: 847877 - DNA, 120 bp, Artificial Sequence
  ENSG00000233723_40 (sequence is synthesized)
tgcagtgagccgagattgtgccactgcatgccagtctgaacaacagagcaagactctgtcacaaaaacaaacaaaaaactgaatgaatggaagcagataagtgcagagagaaacactgat

SEQ ID NO: 847878 - DNA, 120 bp, Artificial Sequence
  ENSG00000233723_41 (sequence is synthesized)
gaatgaatggaagcagataagtgcagagagaaacactgatttaccttcagaaagataaaaaagtagtatattgatatacttgtatattgctatctactagtatagcttcagttggtgtat

SEQ ID NO: 847879 - DNA, 120 bp, Artificial Sequence
  ENSG00000233723_42 (sequence is synthesized)
gagtatagaactattgggttgttctttatgtgattactccttcccagttttagtaaagtattccaatttgagggaaattctttcatttgtcaataaaataaaaagaggtaagttttaaaa

SEQ ID NO: 847880 - DNA, 120 bp, Artificial Sequence
  ENSG00000233723_43 (sequence is synthesized)
tggccggctgggtcttcatcctcattgtactcccttggcatctcatggtgacgtgacttagaaggtggtgcagagggacttaccaatttgggattcttccaggagctgaaaactgattgc

SEQ ID NO: 847881 - DNA, 120 bp, Artificial Sequence
  ENSG00000233723_44 (sequence is synthesized)
tttcattgtatagatcatgaaggaaccatagtgattatcaaagatcagccgataagttcaaggcagagttccacctttccccatgaagcccttccagacttgtttacatgtaacaccctt

SEQ ID NO: 847882 - DNA, 120 bp, Artificial Sequence
  ENSG00000233723_45 (sequence is synthesized)
gaaggcaagactcatgtctatgctatctttgctgctatttggcacgtattaggtgtaagggcaattagaccatatcaattaatgatcagtaagaatggataaagtagatgtttttgtgag

SEQ ID NO: 847883 - DNA, 120 bp, Artificial Sequence
  ENSG00000233723_46 (sequence is synthesized)
cctctcaaagaagatgtatagaatattttggaaatgggcccaatttgtttctaaaggaaaatttactttcaaattaaaaaaaaaaaatcactcaaatgagattttgggggatttcatatg

SEQ ID NO: 847884 - DNA, 120 bp, Artificial Sequence
  ENSG00000233723_47 (sequence is synthesized)
attaactctttacattatcttgtggtaattatacagaaatctgtatttatgtaaacacagtaaatgcatcataacactagaataagtatacaaatactgcatgtcaaattaggttataat

SEQ ID NO: 847885 - DNA, 120 bp, Artificial Sequence
  ENSG00000233723_48 (sequence is synthesized)
cactttcaagggacgtgatttcctagctaaacagattcgtttacattttgcaaaataaaaaataagtgaaaataactatataaaatcaggcttacagctggacagatcttcttggcaatg

SEQ ID NO: 847886 - DNA, 120 bp, Artificial Sequence
  ENSG00000233723_49 (sequence is synthesized)
gtccagacactgagtagggaaaagcccctccagctgaggaacgttcaggacgctcaggacgactttgcaggcgcggccgggagagaggccatttttggggttgccttgactgtgcaccct

SEQ ID NO: 847887 - DNA, 120 bp, Artificial Sequence
  ENSG00000233723_50 (sequence is synthesized)
gttcctggctacctatggggagataagctgcattcacatatcagatgagactctttttgtgagaggtctggggtgggatgtgggaagtggagtgaaaacctgcttagtaggggaggaaaa

SEQ ID NO: 847888 - DNA, 120 bp, Artificial Sequence
  ENSG00000233723_51 (sequence is synthesized)
aaacaagcaatccaacacttcacctttaggtaataaacataatagaaaaagtcaggaattctctaactaaaaagcagacagtggaagctagcatcggactcactgaattttagaatcagg

SEQ ID NO: 847889 - DNA, 120 bp, Artificial Sequence
  ENSG00000233723_52 (sequence is synthesized)
gtctgtgtaccatggattatctggccctgcccttgtcactggatgagaagattctggctatagggcaagaagcagtgcttggaccgagatccagaatgttaccctcaaatctgaagctta

SEQ ID NO: 847890 - DNA, 120 bp, Artificial Sequence
  ENSG00000233723_53 (sequence is synthesized)
tttatgagataaataaagctcatattttcaagagagataattattttaaaacttctcatttcaatgtgtaccttaaaaaaataaatacattttgggccaggtgcgatggttcatgcctgt

SEQ ID NO: 847891 - DNA, 63 bp, Artificial Sequence
  ENSG00000233723_54 (sequence is synthesized)
atgaggttaaaaaaattagctgggcatagtggcacgtacctgtagtcccagctacttaggagg

SEQ ID NO: 847892 - DNA, 120 bp, Artificial Sequence
  ENSG00000233723_55 (sequence is synthesized)
gagcaagactccatctcaaaaaaccaatcaaccaaccaaccaacaaaaaacatttcacatctccctgacgtagccaacattttctccaacattctcttattttgatggcagaagggcata

SEQ ID NO: 847893 - DNA, 120 bp, Artificial Sequence
  ENSG00000233723_56 (sequence is synthesized)
actgtaaatctcagtttttatatggtattgtataatatagtggcatcctttgcggccagttgattgtgaagagcagtttgcctttacttagcttccatgaacattagctttaaatgctca

SEQ ID NO: 847894 - DNA, 120 bp, Artificial Sequence
  ENSG00000233723_57 (sequence is synthesized)
ttgacattaatgagagccagtttgctaaatctgtgtctccttcatgttcatttgctacttagttttgttgattccaagaagtcactaatttttttaaatcatagattctgatttcgaggt

SEQ ID NO: 847895 - DNA, 120 bp, Artificial Sequence
  ENSG00000233723_58 (sequence is synthesized)
agcttcatttttctagtgttgagtaaaatgtgtgtgtgtgtgtgctttagtttaattaatactaatttttattcaaaatatatttgttgagcacttactctctgctgtggctgggcatac

SEQ ID NO: 847896 - DNA, 120 bp, Artificial Sequence
  ENSG00000233723_59 (sequence is synthesized)
attactttctttccacagtccgttggttgaattgtcctgagcaggggttgacaaatgatggcctgtgagccaaatctaccccactgcctgtttttgtaaataaagctttatcagaacata

SEQ ID NO: 847897 - DNA, 120 bp, Artificial Sequence
  ENSG00000233723_60 (sequence is synthesized)
actgaaggatctgaactatttacaaagaggtctgttgggtttggagccaccagtgccctttcaaactggaaatgattttaaaagatgcagtagttgagaaaccacaacaactgggatgaa

SEQ ID NO: 847898 - DNA, 120 bp, Artificial Sequence
  ENSG00000233723_61 (sequence is synthesized)
gttatatttcaggctttcaaagtaaacgacgaactcagcactttggcagagtccaaaatccgccagcgaacttgggtgctagagttcggcgggaagaaaagcgcccgggctgcgccgacc

SEQ ID NO: 847899 - DNA, 120 bp, Artificial Sequence
  ENSG00000233723_62 (sequence is synthesized)
acagacattaaagaagaattaagaatgaagacaagaatattgatctccctcaccaatctcctctaaccgatacctcttaatcacagaacaaattggagtcccgattgttgtgaggcacct

SEQ ID NO: 847900 - DNA, 120 bp, Artificial Sequence
  ENSG00000233723_63 (sequence is synthesized)
ctctcaaatccaagagataagaattacatttattttacaagaagaaaagcagtcactctgagaggtaaaataatgtatatggcagtagattgcagagttagcatttgaagaatgttcggt

SEQ ID NO: 847901 - DNA, 120 bp, Artificial Sequence
  ENSG00000233723_64 (sequence is synthesized)
tgtactccaaagcccaccacaaaactccaccactaaaccacagcacctttggagcaattggaatgacgattctgttcaaatcatattaataccaatcactgtatttgactttttcgttta

SEQ ID NO: 847902 - DNA, 120 bp, Artificial Sequence
  ENSG00000233723_65 (sequence is synthesized)
gatgtggctgtgattgaaaaatcatggtctttgtatatagtcacctgttctatctgcctttgttttgggggactgccacctgaaattcctgacttttaccctgggaggggcttgtgcaga

SEQ ID NO: 847903 - DNA, 120 bp, Artificial Sequence
  ENSG00000233723_66 (sequence is synthesized)
ggatctgagttactcatctgaacggactgcctaaagacacctcagtttgtgttgtctgtgcattcactcagcctccatagctaaactaagatgctgggaatgagagactgttcaaggagt

SEQ ID NO: 847904 - DNA, 120 bp, Artificial Sequence
  ENSG00000233723_67 (sequence is synthesized)
agaagccttgcttctagcttctatattcctcctaccacctatgacttttagcgttgtcagggaagtcatgaggttagagctgattttttttttaagaaaatgagaaacataaatgttctc

SEQ ID NO: 847905 - DNA, 120 bp, Artificial Sequence
  ENSG00000233723_68 (sequence is synthesized)
ttttcaaggtttctgtttgatagtgtttgctagacaaagtagaattttcacagtacaagtccttagctcaagagctccactcagtcagcagttatttcatctgccttttatccagccttt

SEQ ID NO: 847906 - DNA, 120 bp, Artificial Sequence
  ENSG00000233723_69 (sequence is synthesized)
ctcgtttaaaaaaaggaaaaagagaaatttatccactcaaagtgagctttttgctaaacttgtgtctttcccttgtttgtcatgttaattacatcccaaacaaccctattgcagagaatt

SEQ ID NO: 847907 - DNA, 120 bp, Artificial Sequence
  ENSG00000233723_70 (sequence is synthesized)
ctgcaatcaaaccccaaagtcccatcagatgtacagtggcttttaaagtggactgattttttatgtaataataaatttagtgttatgcttacctctaaataaatgcagattctgcttctt

SEQ ID NO: 847908 - DNA, 120 bp, Artificial Sequence
  ENSG00000233723_71 (sequence is synthesized)
atttccatcattccactgtgctctccctgaaccagctacattctagaggaccctctttgtgtaactgcaagacctgcaggactgtgctctcttcccagagtgacaatgatggagcctgaa

SEQ ID NO: 847909 - DNA, 120 bp, Artificial Sequence
  ENSG00000233723_72 (sequence is synthesized)
cttcatctgaaaggttcttgggtccccacttggtgtaaagttttggccatctcttgaactgtttcctcctcagtataaagcctttgtgaaggtgtgtgggagctgcaaggcaagcagttt

SEQ ID NO: 847910 - DNA, 120 bp, Artificial Sequence
  ENSG00000233723_73 (sequence is synthesized)
tctgaggagttgggggtagggatgtaatgttaatgttcaggaatccttctctgtgcccactttggaaatacttcctcttatctttcattcaggatgcaggggataaggcaaaagtgcagg

SEQ ID NO: 847911 - DNA, 120 bp, Artificial Sequence
  ENSG00000233723_74 (sequence is synthesized)
tgcaagcttatgtcaataaataactaggctggcaggaggaaggcagtcaccttaccagtgcggagggtaccacatagggagagaactagaggaagacgaggtgaagggtgaaaggcgctc

SEQ ID NO: 847912 - DNA, 120 bp, Artificial Sequence
  ENSG00000233723_75 (sequence is synthesized)
acatcctgttagcttgctctgatgaagaagcaagaagagtaagttaatattgaaattactgtctaatgcctatctgcttttaaatggatttagccaaggtaacaagacaatctctaaggt

SEQ ID NO: 847913 - DNA, 120 bp, Artificial Sequence
  ENSG00000233723_76 (sequence is synthesized)
gggccctgtgtgttcaaggatgcatgtgtggcggggttagcccttctgtggagctgtatgtaaagaaattctgtctgcagagaaattcatgaattccttaatgggacccatacattcttt

SEQ ID NO: 847914 - DNA, 120 bp, Artificial Sequence
  ENSG00000233723_77 (sequence is synthesized)
aaaagggcaagaattttggtggcaaaatttggcaaaattcataatgggacactcaaggttttgtttcaccaggtattcttttctgattatgccgtagaatagcagtaaaagttaagcaag

SEQ ID NO: 847915 - DNA, 120 bp, Artificial Sequence
  ENSG00000233723_78 (sequence is synthesized)
tggaagaagcaggattaaaagaatgccaaaaattgtgtccctggcacatgatacaggactacccaatgctgatgagaaatgattctttaatctttgtgttatttctcttgccttagtaaa

SEQ ID NO: 847916 - DNA, 120 bp, Artificial Sequence
  ENSG00000233723_79 (sequence is synthesized)
atgcatcaataaacgtgactatcttctgtgagaaatgaacagtggtgcacacgccagcatatacctgcacacacacacacacgatgtttaaaaaaaaattagtcctgtttctcaaggaaa

SEQ ID NO: 847917 - DNA, 120 bp, Artificial Sequence
  ENSG00000233723_80 (sequence is synthesized)
agaatgtctctgaaatgagatgagtggaaaatgccttaaacaggtggatgtggaacaggtcggggactttaaggacttcagtggaggaggggtgggttggggaagggaaacaaatgaaga

SEQ ID NO: 847918 - DNA, 120 bp, Artificial Sequence
  ENSG00000233723_81 (sequence is synthesized)
tgtcttagaagtcactgcaatttatatggaatctgttcaacgccgacactgaaccatatgagaagacgtttgaaactattgctttgctgaaaacatctgactgccaggctaggatgtgac

SEQ ID NO: 847919 - DNA, 120 bp, Artificial Sequence
  ENSG00000233723_82 (sequence is synthesized)
ctgaaacatgcctcctctttcctggccccaccaagcagagtttaggcttcaagaagactgaatgcatctgtacagagcacaatcccttctccaagaaggaaaccatggggcttatcaaga

SEQ ID NO: 847920 - DNA, 120 bp, Artificial Sequence
  ENSG00000233723_83 (sequence is synthesized)
aaatgtatacaccaactaacattgcctctgatggttgagaaactgaatgaatctattcctccttaaaggaaaaagaatcacatgatttaataaagactactactgaagattaatgttaga

SEQ ID NO: 847921 - DNA, 120 bp, Artificial Sequence
  ENSG00000233723_84 (sequence is synthesized)
gagccgccgcgggctccgaggagtcggccgagctgctcccgcgccctggccggacgtttgaaactattgctttgctgaaaacatctgactgccaggctaggatgtgacacttaagaagtg

SEQ ID NO: 847922 - DNA, 120 bp, Artificial Sequence
  ENSG00000233723_85 (sequence is synthesized)
aagatccttagagggagaattgcaaaatggaagtatcctaagtccctgagtccctgagccacccagtggaggattatccaaaacacaaagcctgtgtgtgcataggtatacagggactta

SEQ ID NO: 847923 - DNA, 120 bp, Artificial Sequence
  ENSG00000233723_86 (sequence is synthesized)
gcctgctgtttttctgagccactggcaagatctcccttaacaatatgtttcctatttgctaacatgagatctgatgctattttgtttctttaaattttaaatcttctgaaggaaaagtgt

SEQ ID NO: 847924 - DNA, 120 bp, Artificial Sequence
  ENSG00000233723_87 (sequence is synthesized)
aggaacacgcagcctctgtctactatgcaagagtggaaggctaccggagagtccagaagatatgttagctcacttttcatcatttagatcaagtcaaaaagccttgtttgtaactgcaac

SEQ ID NO: 847925 - DNA, 120 bp, Artificial Sequence
  ENSG00000233723_88 (sequence is synthesized)
ccagaagaagaaaagaatatgaacactatctttaccattgcccactaatgggagaaatttttaaagtggcataatgaatatcatctttcaatcctgccaatgtttctctatgactgcatg

SEQ ID NO: 847926 - DNA, 120 bp, Artificial Sequence
  ENSG00000233723_89 (sequence is synthesized)
tatgatgttggctgaaatttgaggtcctttgtgaatgtgaggtcaaggccaactgaccctatattcctcttgccaaatctgtccctggtagaccaagataaagtgcaggaggtccaggat

SEQ ID NO: 847927 - DNA, 120 bp, Artificial Sequence
  ENSG00000233723_90 (sequence is synthesized)
taccatcaaatagcaacaaccaacatgccttgtatatgtgagtttctgagactgctatgtcagttgtcaagcacacacttaatatgtaattttgaataaatgttggatggaggagtgact

SEQ ID NO: 847928 - DNA, 120 bp, Artificial Sequence
  ENSG00000233721_0 (sequence is synthesized)
gctgaagcaactacagccccttagggctcagctgggagggatttattggagaatttcaatcatggggtcttggctcaaacttgttgcttcctcaaaaatctccccagaagttggctacat

SEQ ID NO: 847929 - DNA, 120 bp, Artificial Sequence
  ENSG00000233721_1 (sequence is synthesized)
gtgaaactgaggcatgaaggaaggactcggatgatctcacggttcggaactccacctgggcctgtcagagaattcatagaccctcacttggaggaagagagcacagaacagcaagaaaga

SEQ ID NO: 847930 - DNA, 120 bp, Artificial Sequence
  ENSG00000233721_2 (sequence is synthesized)
cccaatgggaccactccaggactttgacttctgggtgtcagagcttaattaaaatattcatccagctgctctccactcgccaagggggcccagaggaattaaaccaataagcttaattct

SEQ ID NO: 847931 - DNA, 120 bp, Artificial Sequence
  ENSG00000233721_3 (sequence is synthesized)
attagttcacctgcctgtgtacatagacatgcggaagaccatttactgattcagaaaaaaatcatcagacccaccctataaattcagcgtgggcagccatcactgcaacagcaacacggt

SEQ ID NO: 847932 - DNA, 120 bp, Artificial Sequence
  ENSG00000233721_4 (sequence is synthesized)
ccccccagcaaacgtaacactcagcaatctcgactcctgtctccgaacacacacagctatttttaagactcttccaagaaaaccaaaatgctaaacgggtcaatgtaaggattgatgtgc

SEQ ID NO: 847933 - DNA, 120 bp, Artificial Sequence
  ENSG00000233725_0 (sequence is synthesized)
attcttcaaaagtttcactgacatgaacctcacttgtgggtgccaggttatgaccacatgcatagtttcatcttcatcttatgcaacatttggggtaaaaggaaggttatgtggtaacca

SEQ ID NO: 847934 - DNA, 120 bp, Artificial Sequence
  ENSG00000233725_1 (sequence is synthesized)
gtttatgacttgaactataggcaaagattgaccagaccaagccctgagacacagtgttgagagccaagacataaagttgtgaagattcagacccagagcccagcagggcacaggctggag

SEQ ID NO: 847935 - DNA, 120 bp, Artificial Sequence
  ENSG00000233725_2 (sequence is synthesized)
atgatcagccaatgcagaaagaaatctaaaggtgaaggaaaggcagcgttcagcactgagcaagtccatgttggagaaaggataaatattctcaaagattcaagctatgaagaccaaatc

SEQ ID NO: 847936 - DNA, 120 bp, Artificial Sequence
  ENSG00000233725_3 (sequence is synthesized)
tacagaagatagcaactcattcacagggaattggaaatccttgtcttcgtggttcctggctcagcaggacccctgtggggcctctccctctcttgggaaagagattgctctagaaggttt

SEQ ID NO: 847937 - DNA, 120 bp, Artificial Sequence
  ENSG00000233725_4 (sequence is synthesized)
actacaccagtgaggagaagatgagcgcaagggggattggccggctgagggcgaaatcaagactggagccaagtgcgctgagctctcacatgaggtcctttgctcctgttccctggaggc

SEQ ID NO: 847938 - DNA, 120 bp, Artificial Sequence
  ENSG00000233725_5 (sequence is synthesized)
tagagagaagcaggggtatttcttctgtcctttcttgcttagggattgggggtggaaatctccccgcatctaaggaaatttgaaaagacaaactatggctgcttcttcaagcaaaccacc

SEQ ID NO: 847939 - DNA, 120 bp, Artificial Sequence
  ENSG00000233725_6 (sequence is synthesized)
tcaccacactatccaggggataaaacccgcttgctgctgctaaattatgccaagagagaacattctgatatttctcctcaattctaggcatgacagcgtgacttggtgcttaaaggcatg

SEQ ID NO: 847940 - DNA, 120 bp, Artificial Sequence
  ENSG00000233725_7 (sequence is synthesized)
gagttttgagttgcagacctaggtttgagtgctgaatctactagcttcagggtgttaaaaaagtttcttaatctctctaaaccttatttttctcaaagataaaaaactgggtgtagttgt

SEQ ID NO: 847941 - DNA, 120 bp, Artificial Sequence
  ENSG00000233725_8 (sequence is synthesized)
gagtatagtgaatgcacatagtatgtgcctttggcatgttaattcactattattctggacataatttctcctaagaaaaaggatgaactaattgcagggcctagcctaagctctgagaag

SEQ ID NO: 847942 - DNA, 120 bp, Artificial Sequence
  ENSG00000233725_9 (sequence is synthesized)
tcattcgttatagcatttcagtccatagtaaacaagaagaaatgaggtaaagagtttaaaccagggaaggcatagctgtggtcaccaaacaacctgttaaaggcgagctgtaggcaccaa

SEQ ID NO: 847943 - DNA, 120 bp, Artificial Sequence
  ENSG00000233725_10 (sequence is synthesized)
aaacctattatggactgaattgtgttcctcaaattcatatgttgaagtgctaaccccaagtaccaaatgtgactgtatttggggatagggtccctgaagaagtcactcagctggaaggag

SEQ ID NO: 847944 - DNA, 120 bp, Artificial Sequence
  ENSG00000233725_11 (sequence is synthesized)
tcatattggattaggtgttgggaattggctggccaagggagaaatcaaggctggaaccaagtgctgaactctcacatcaggtcctttgctcctgttccctggaccctaatccaatatgac

SEQ ID NO: 847945 - DNA, 120 bp, Artificial Sequence
  ENSG00000233725_12 (sequence is synthesized)
tggcatctttatatgaagaggaagaggcaccagagggtacacacgcagagaaaaggccatgtgtggacacagtaagatgacggacatctgtaagccaaggagggaaacctcagaagaaac

SEQ ID NO: 847946 - DNA, 120 bp, Artificial Sequence
  ENSG00000233725_13 (sequence is synthesized)
cagccttgcctgcaccttgatcttggaggtccagtctccagaactgtgaaaaaaatgaactggtgttgtttaaatcccccagtcgtggtattttgtcatggtggccctagaagacaatat

SEQ ID NO: 847947 - DNA, 120 bp, Artificial Sequence
  ENSG00000233725_14 (sequence is synthesized)
acaacccaaaggaatattctttccactttctccctcttccactttatagttttttctccttcgtttctttctttttctcttttactttccttttcttctcttctctttcctctggttttt

SEQ ID NO: 847948 - DNA, 120 bp, Artificial Sequence
  ENSG00000233725_15 (sequence is synthesized)
aattttaattttaatttttggccttcctatacctccatttgcctctccaggaagctgaattccagacaattaatcattcatctcatcagttcagcaaagcaaatgccctcaatggtttct

SEQ ID NO: 847949 - DNA, 120 bp, Artificial Sequence
  ENSG00000233725_16 (sequence is synthesized)
tttgtgattcgattattatgggatcagaatgtatcttattcctctgggaaaaatgaaacataaaaatttcagaaataaggttttgggccagcttcattggttttaagagaaggaagggag

SEQ ID NO: 847950 - DNA, 120 bp, Artificial Sequence
  ENSG00000233725_17 (sequence is synthesized)
gagactcatgcaggtttgacgctgagcagcaccatgtggttgggcctggcaggcactcgaggctttaggtcttggtttgaatccagactagaaaatcattacttattaaaagccttgagg

SEQ ID NO: 847951 - DNA, 120 bp, Artificial Sequence
  ENSG00000233725_18 (sequence is synthesized)
atatgggtctaggaaagtctatgtgaagagataatagtttggaaaaagttttgcagaactaaagaaaagtttccacagttaccttttctgtcctaatgtagagcatctttgttaactagg

SEQ ID NO: 847952 - DNA, 120 bp, Artificial Sequence
  ENSG00000233725_19 (sequence is synthesized)
tcttggatcaatccaagctgtgtctgagaataaccatttataatttctcactggccagcactaacaccctttagaaaaggaactcaaagcagccctagcagccagagtcatgcgatcatg

SEQ ID NO: 847953 - DNA, 120 bp, Artificial Sequence
  ENSG00000233725_20 (sequence is synthesized)
gtgggagtacagctcctcaccaaggtcagctcctcagtgaaatccatgccttctggaggactgcttgtaaataaatattaagcacaaccattaaaaaataatttggctgtgaccatcaaa

SEQ ID NO: 847954 - DNA, 120 bp, Artificial Sequence
  ENSG00000233725_21 (sequence is synthesized)
tacaaagcaaaccaggagaattttcataatacctgataactatgtaagacttggaatatttgaatttctaggacatgggattgtgcaaccattcattttatcccataatattgaaatctc

SEQ ID NO: 847955 - DNA, 120 bp, Artificial Sequence
  ENSG00000233725_22 (sequence is synthesized)
cctcagataagcctctcggcacctaatagagttttcttagtgaagggctacctttctgtgggtaacagggaagggcaaaataaacaaccaaataatatcataatcacgagtgtcaatgat

SEQ ID NO: 847956 - DNA, 120 bp, Artificial Sequence
  ENSG00000233725_23 (sequence is synthesized)
tgctggaacaggtgggggttggtcattaaattctagttgtttccactattccagtaggagttgtgtgaatgttagcaaaagaccagggtgttacgatctgactgtgtttcatcaattgcc

SEQ ID NO: 847957 - DNA, 120 bp, Artificial Sequence
  ENSG00000233725_24 (sequence is synthesized)
ttgacttttggatgaaatgcgatttgaggacatatcattattagatttgccacagattccaatttttttctctaatatgaggctaaccatgatgtcctttcccaggaaggacaatctctc

SEQ ID NO: 847958 - DNA, 120 bp, Artificial Sequence
  ENSG00000233725_25 (sequence is synthesized)
ctttatcagggaaaaatcagtaggggcttcctcaattttctccttcatccccaccacagagtcatagaggtcaagtccttttcttgtgaaacctaaaaaatgcaaattccaaggttgctg

SEQ ID NO: 847959 - DNA, 120 bp, Artificial Sequence
  ENSG00000233725_26 (sequence is synthesized)
ctatggtgtactaattttgtcacagtgacatgccctgtcacagggcgtatgtgttctgttatacagttgaaatattggttatactattgaaatgtttttgtactattgaaatcccaaata

SEQ ID NO: 847960 - DNA, 120 bp, Artificial Sequence
  ENSG00000233725_27 (sequence is synthesized)
aacttaattctaaaagaagcatgacctcaacagcctcacacctacttatatcttgtagttctttctgtctaatgctggcaatctaagcatgttccaggcaagcaacattcaatagcgttt

SEQ ID NO: 847961 - DNA, 120 bp, Artificial Sequence
  ENSG00000233725_28 (sequence is synthesized)
tactgctccaataagttggttcaattagcaatgtcaaaggcagtcactaaatagatagtgtataaccttcatacaatctcgtattattttccactaattactatagaaaaatcgatgaag

SEQ ID NO: 847962 - DNA, 120 bp, Artificial Sequence
  ENSG00000233725_29 (sequence is synthesized)
tttcattacaatggaataacttcaatcacacttcaaaaactacatacggaagatagccacaacttgctgctctcaaaaaacacagagatggcatctttactttgtttcaaatccccaacc

SEQ ID NO: 847963 - DNA, 120 bp, Artificial Sequence
  ENSG00000233725_30 (sequence is synthesized)
ctggtggcggtccaaagttatggcagttataaccccttatgtcattataaggaggaagggtaaatattaagtcaacatcctttaaagctaagagtatgactacagtggggtggaatttgg

SEQ ID NO: 847964 - DNA, 120 bp, Artificial Sequence
  ENSG00000233725_31 (sequence is synthesized)
gacttcatgcccactccctgtttctgttctattttacctttcctgacctctaagccaacaggagagggggaagggccacacttttgtgacccttgttaaagaattgtgagtttaggaaac

SEQ ID NO: 847965 - DNA, 120 bp, Artificial Sequence
  ENSG00000233725_32 (sequence is synthesized)
aaagatggacttctgagggggtagttgaggatgggctgaaggcacagaagaaaccagctggtgtgcccctctccccactagcagacccttcttcctcattggttcagggcaaacaatccc

SEQ ID NO: 847966 - DNA, 120 bp, Artificial Sequence
  ENSG00000233725_33 (sequence is synthesized)
ccaaaaattcaagaaaactaacttagagttattttctgttatttctcttttccttgatctggagccaatgcagaaagaaatctaaaggtgaaggaaaggcagcgttcagcactgagcaag

SEQ ID NO: 847967 - DNA, 120 bp, Artificial Sequence
  ENSG00000233725_34 (sequence is synthesized)
agagaagagtggaggctgagaagtcagcatgggcacagtcacaggtccatgagaggactgggtttttctgtaagaatggcaagtcatccagctggaaggcgatgaaaggcaaagattgac

SEQ ID NO: 847968 - DNA, 120 bp, Artificial Sequence
  ENSG00000233725_35 (sequence is synthesized)
ctggatgatgctcagcatcacctgggactatgactgtcccctgtcatcattagcattgctgagctcaagctttgagccaggaattaggccaaaatctccatggatctgtctaacttagcc

SEQ ID NO: 847969 - DNA, 120 bp, Artificial Sequence
  ENSG00000233725_36 (sequence is synthesized)
tttgcctccatgacagcttgttacatcccgaggtagaatctttgtaaaccctgtgttcaaagggccctgttaaggcacatcttctgccttggaccagaaaattgcttaagcacagagcct

SEQ ID NO: 847970 - DNA, 120 bp, Artificial Sequence
  ENSG00000233725_37 (sequence is synthesized)
ctttttcaaattcagatggtgagaactggtctgaatgtacaattcagtcttactgttttccatcaaggtgtcaccaatcttccagtctcccaggcagaagtttttgagagacaaatggat

SEQ ID NO: 847971 - DNA, 120 bp, Artificial Sequence
  ENSG00000233725_38 (sequence is synthesized)
ggaaaaactttttggccctcttccttaggatcagaagagcttcaaccagcactactacttgaggacctatgcagtgtttgtccatgagcatggaatgactcatactggcctcagagttag

SEQ ID NO: 847972 - DNA, 120 bp, Artificial Sequence
  ENSG00000233725_39 (sequence is synthesized)
agtacaaatcttttttatgatattgggcatttatgctcaatctcttttctgttaataatttttcttatttgattatttttaaaaagaaaaagaaaacaaatgtctctttgtccagtgtct

SEQ ID NO: 847973 - DNA, 120 bp, Artificial Sequence
  ENSG00000233725_40 (sequence is synthesized)
ggttccagatattttacttttaaatgtttacctaaggaaaaaagaatgagattgctatttgccaagcctggaaggatggaatttgctatttgtttacggaagtcattggtgctactgcct

SEQ ID NO: 847974 - DNA, 120 bp, Artificial Sequence
  ENSG00000174365_0 (sequence is synthesized)
gagagagcgtcttgtggctgcggcctgcccctcagcctcctccgcgcggttacccctgtacccgccgccatccgtcctggcgctccggatgagtcaatgaggggcagggcccgaggagtg

SEQ ID NO: 847975 - DNA, 120 bp, Artificial Sequence
  ENSG00000174365_1 (sequence is synthesized)
gtcttcccaagaacccctggtggcctcccaaggccggtgctgtgtacctcctccccgacaaaaggggaaactgaggccccgaggggagtgggaagagccggctggacgtcaggcccagcc

SEQ ID NO: 847976 - DNA, 120 bp, Artificial Sequence
  ENSG00000174365_2 (sequence is synthesized)
gctggtgcagtggtccgtcccctctgccggggtgggcccctcgggtttcgcgtgtcctcgggaaagagactggcgggtgagccgcgccctcggccttcgctgggctaagccgaccccatg

SEQ ID NO: 847977 - DNA, 120 bp, Artificial Sequence
  ENSG00000174365_3 (sequence is synthesized)
cagacgtcaaacccccctaggtcggcacagcctctctgcggggaggcttagtgcccccttgagaaacggcttggcaacgctgtgcccggggccttgcacgcgggctgagggggctagaga

SEQ ID NO: 847978 - DNA, 120 bp, Artificial Sequence
  ENSG00000174365_4 (sequence is synthesized)
cctcgcgacttttactcccccgaccccgatctccgactcctgactttggaagcccccaaagctgcttttcggttgcctacaaagtgtcggtcattgtgccacgtccttggaaccgtgaac

SEQ ID NO: 847979 - DNA, 120 bp, Artificial Sequence
  ENSG00000174365_5 (sequence is synthesized)
tcattttctcctcaataacctttaaaaagtagctgtaaaacctccattttacagaccagttggctgaggtttaaatggaggacgctcccagggccccagaggggcgaattccagactcct

SEQ ID NO: 847980 - DNA, 120 bp, Artificial Sequence
  ENSG00000174365_6 (sequence is synthesized)
ttgccaggaccttgtactaagccccttccctacgcttttccctgcctaggcctcgtgggctgtgcggctatcctggagacagatgacagctctcccttggatggctttgctggttccgca

SEQ ID NO: 847981 - DNA, 120 bp, Artificial Sequence
  ENSG00000174365_7 (sequence is synthesized)
ccagccagcgcccccatttttcctgcagcaccctgatctgcactccctgaggggctcccactgtccgcggtgtgaggatgtccctgggtaagtggtgctggtcatgagcactttggggga

SEQ ID NO: 847982 - DNA, 120 bp, Artificial Sequence
  ENSG00000174365_8 (sequence is synthesized)
ctttcattctcctgagcttgactttctgtaatgtagggaaactgcgaaagctctgtaagtggggagatcttgcacgtttttcttgcttttgaacccatgatgtctggctacttgtagata

SEQ ID NO: 847983 - DNA, 120 bp, Artificial Sequence
  ENSG00000174365_9 (sequence is synthesized)
ctcaatatttgtgggatgaatgaacaatttaagccttttttttttttaaccagaaattggtcttctgtgactttcttgatgggggcagatgagatctttgtactgcattaagtggatagc

SEQ ID NO: 847984 - DNA, 120 bp, Artificial Sequence
  ENSG00000174365_10 (sequence is synthesized)
gctcaggtcctttgggcttggcgctttggcaatctccaggcagctcactttggcctctgttcctggatcccctttgctcttttctgcgcctgcattcatagtccactgtgtgcagaggca

SEQ ID NO: 847985 - DNA, 120 bp, Artificial Sequence
  ENSG00000174365_11 (sequence is synthesized)
tgggagttgtcatgttgggaacatgctagacctcagtatccttgagcttgaagaaagacgacagaacactggagaccaagtacttacagccttctgctctgtggcccctcctcactccag

SEQ ID NO: 847986 - DNA, 120 bp, Artificial Sequence
  ENSG00000174365_12 (sequence is synthesized)
ggatgctgccttgggtctggaaactgttagaggaaaccccaagaggtgcaggcactgagcctctcaggacaatgacctggggtcccagctcccctggaggggcctcctcatgattgtttg

SEQ ID NO: 847987 - DNA, 120 bp, Artificial Sequence
  ENSG00000174365_13 (sequence is synthesized)
ggggttgatcacagaccaagagtgacgagtgatgtcaccctgtgactcatggctggaccttcttgcccctattgtctcagcacaacattattcgacttttccctcagcgtgggtgggcag

SEQ ID NO: 847988 - DNA, 120 bp, Artificial Sequence
  ENSG00000174365_14 (sequence is synthesized)
aggaaaagccctgtggctctggggacttgggatccagagttgaagacccttcagctggctctgccctgccagtgccacagagtgccatggcccaggaagacaggttttcttccatctagg

SEQ ID NO: 847989 - DNA, 120 bp, Artificial Sequence
  ENSG00000174365_15 (sequence is synthesized)
ccaggccatccagtggccatcctccgtgtcctcccgcctcctcctggtgtgacttctgaaaaccaagaatttgttcctgttgactttttctgtgctatggaccattgtcctctcacccac

SEQ ID NO: 847990 - DNA, 120 bp, Artificial Sequence
  ENSG00000174365_16 (sequence is synthesized)
gttgggaacatgctagacctcagtatccttgaggtaagatctctggttcattctctggaatgttggttccttgtatctagtacagttctgtacatgttcccaggggctttggggttggtg

SEQ ID NO: 847991 - DNA, 120 bp, Artificial Sequence
  ENSG00000174365_17 (sequence is synthesized)
taggggagctgagaggtgagatgagaatggcactgtgggtccccagatccgctgtccacccagccaacccagatcacctctggcctttcctgtgccttccgggcttgctgctggggggaa

SEQ ID NO: 847992 - DNA, 120 bp, Artificial Sequence
  ENSG00000174365_18 (sequence is synthesized)
acctccagagtcccactttggtaataagaggtctctgccctttctccctgggcagcaggatgttgtaatggaaaatgagtggacctaggcttcagagactctggtcccctggctttgaat

SEQ ID NO: 847993 - DNA, 120 bp, Artificial Sequence
  ENSG00000174365_19 (sequence is synthesized)
ccccttctgccactatcccagtcaaggactgattcagaacctaattttcttcatttggaaaataatgttctgatagaggtgacttttgtggtacttgagaccatatgattcctatcatta

SEQ ID NO: 847994 - DNA, 120 bp, Artificial Sequence
  ENSG00000174365_20 (sequence is synthesized)
ttcctggactggacctagtccacaagctgctggcatctgtttctcctcatggatctctctctgcccttgtatacacctgcattcaaaaatgatcacgggctgcctgtgctctggtcatca

SEQ ID NO: 847995 - DNA, 120 bp, Artificial Sequence
  ENSG00000174365_21 (sequence is synthesized)
ataacgcagggagaggaattgctgaaagccgtttcccgtgtttggagggttcacacctgtccctttcaaatgctggcgctttcacacactccttctctcctgccagcaccttctggtctc

SEQ ID NO: 847996 - DNA, 120 bp, Artificial Sequence
  ENSG00000174365_22 (sequence is synthesized)
aggagcattgcaggatgttgtgtgagtgagtgatgggagacactttagtatggcttttttcagcttagcctcctgttatcagagagcagtctctttcagtgtcaaggtttgagtactaga

SEQ ID NO: 847997 - DNA, 120 bp, Artificial Sequence
  ENSG00000174365_23 (sequence is synthesized)
tggtggagaaagcctgtgtgaattatttttaatgaataagtgtgatgatgggtggcatacagtcactgccttaagattttcaaagagaagcagccttttggaggtggtgggcctgggcag

SEQ ID NO: 847998 - DNA, 120 bp, Artificial Sequence
  ENSG00000174365_24 (sequence is synthesized)
gtctttcaaggagtgggatgtgatgggcagtagaaaggtattccagggaggggtagcaacatgagaaggtctttcaaggattgggatgtgatgggcagtagaaaggtattccagggaggg

SEQ ID NO: 847999 - DNA, 120 bp, Artificial Sequence
  ENSG00000174365_25 (sequence is synthesized)
gtagcagcatgagaaggtctttgagtctgggatgagcaagagtgtctagtcccaccagggagacagatgtgtaggcaagtaatgacagcatggagggatggctgctggggtgatccttgg

SEQ ID NO: 848000 - DNA, 120 bp, Artificial Sequence
  ENSG00000174365_26 (sequence is synthesized)
ctcccagcacggcgaggtggacatctatgggaggggccctgagaggtctcttgagctgtctttctgccagttgcacatctgctcagttgcctgttaagactcttaagacagttttgctgg

SEQ ID NO: 848001 - DNA, 120 bp, Artificial Sequence
  ENSG00000174365_27 (sequence is synthesized)
actcttaagtttttattttgatattctttgggagcattgagattcctttttgagatgagtttggtatgaaagaaactggcaactcatacctgattgattaactgggggcattcccattga

SEQ ID NO: 848002 - DNA, 120 bp, Artificial Sequence
  ENSG00000174365_28 (sequence is synthesized)
gcagaggaaatgcgggaaaggttgctgtgtttggagggtccacatcttcaccctcctgtcccaggagctttcctacactcctccttctcaaagctgcacacacctggggcctccagggga

SEQ ID NO: 848003 - DNA, 120 bp, Artificial Sequence
  ENSG00000174365_29 (sequence is synthesized)
ttgggggctgccgtgtgtgttatatcatgattagagctttcacttcctgctccctgctgttgggaaccaggctgtgtgtgttgcttaaattccccttgatgaccagcagagtcactgcca

SEQ ID NO: 848004 - DNA, 120 bp, Artificial Sequence
  ENSG00000174365_30 (sequence is synthesized)
ctcagccatggcacactgctgtaaacctggttttgatctcctttcaatcttttgctgattaactacacattgatcagtgttggccaccctcaccctgccatagaccatccgctgtcttcc

SEQ ID NO: 848005 - DNA, 120 bp, Artificial Sequence
  ENSG00000174365_31 (sequence is synthesized)
tctgtagagttaactattttctcttttatgaggaaatagtgtgtttgcttaggagtgtttactgtctggtaactactgtgctaagccctttcctgttgcctgccatccctgctgcgagca

SEQ ID NO: 848006 - DNA, 120 bp, Artificial Sequence
  ENSG00000174365_32 (sequence is synthesized)
agttctggaggctaaaagtccaagatcaaaggcaccagtagatttggtaaactaggaagcggtgagggcccacttcctggtttatagactgatggctgtcttctcactgtgtcctcaaat

SEQ ID NO: 848007 - DNA, 120 bp, Artificial Sequence
  ENSG00000273496_0 (sequence is synthesized)
tactcactatcagaagttctctgttttgaaaaaagaataactgatgtgataaatttatgtaatttaacaattaatctacctcacgtgcttgtaggtatgtattcatttcctaccaccgta

SEQ ID NO: 848008 - DNA, 120 bp, Artificial Sequence
  ENSG00000273496_1 (sequence is synthesized)
gtggaagagagactatccctatcaatacacctggtaacattcccaacagtaagccgtgagattctgcttgaaatcacctctcagacaaataaaaaacagtcctgggaaatgtacgacact

SEQ ID NO: 848009 - DNA, 120 bp, Artificial Sequence
  ENSG00000273496_2 (sequence is synthesized)
cattctgctaaagaaataggcatcatagctggggaacagattcaaaagacccaggctgttccctacatatgtttcctcctcagacatcagttaatcagtcaatcaagtcaagtgagagtg

SEQ ID NO: 848010 - DNA, 120 bp, Artificial Sequence
  ENSG00000273496_3 (sequence is synthesized)
gaggccatgtattccctcttattcttgggcactctcctccaaggaggaaaaggccaggaggtcctgttagaggatgcactcagagcccgggctccctaaggtatgagagttctaaccagc

SEQ ID NO: 848011 - DNA, 120 bp, Artificial Sequence
  ENSG00000273496_4 (sequence is synthesized)
aggtgtagacttttcaggagtgaggaatgaggcaggcattccaaacctggagcttcatcaccttttgtttcatctcaagacaattctgaggggctgttttggagcgtgtctggaaggtga

SEQ ID NO: 848012 - DNA, 120 bp, Artificial Sequence
  ENSG00000273496_5 (sequence is synthesized)
acgttgaagaagagtgtgggctttgatgtgactcagatgagatctttcatggggaggcaggaattcaatgcccagaatctgggctggtgtctttgaggtcagtaggttgcctctttgtat

SEQ ID NO: 848013 - DNA, 120 bp, Artificial Sequence
  ENSG00000273496_6 (sequence is synthesized)
tggagattctaaatggcttccagaccatctctctgattctctttgggagattgggtctgaaaaagacaatgtcagtatttttgggaaattctagaaagtctgcttggaaacctgggaaga

SEQ ID NO: 848014 - DNA, 120 bp, Artificial Sequence
  ENSG00000273496_7 (sequence is synthesized)
cctcttgcctagtgcctaaatattcaatgtgcagctctagccatgtagatgcttggtaggtatagagctgggttttcatttatatcagcaaaacctatgtcagagttgaagaagtagtca

SEQ ID NO: 848015 - DNA, 120 bp, Artificial Sequence
  ENSG00000273496_8 (sequence is synthesized)
agacaaagtgtcttggtcgcaggccggggaacatcttaaaagcaaacttctagcctgatgactcttggcaatgagtgttgggtcctggctaaagtgccttgaatgcagcatgaggccaat

SEQ ID NO: 848016 - DNA, 120 bp, Artificial Sequence
  ENSG00000273496_9 (sequence is synthesized)
ccatgaatccaacttccaatggagaaatgttaatattttttcagtttgaatcaatcagggtgaaattaccttgctattggtttgcttactttttattatttcatataaaatctaagacaa

SEQ ID NO: 848017 - DNA, 120 bp, Artificial Sequence
  ENSG00000273496_10 (sequence is synthesized)
aatacattaaatgcttattgatatatgtatttattcttcacctggctcataatatttgcctaattttaaactttcttctattttgtaggtttcaacttatttcattgtaagatattgtta

SEQ ID NO: 848018 - DNA, 120 bp, Artificial Sequence
  ENSG00000273496_11 (sequence is synthesized)
aatctaatacgggcattgtcacttttacaaataattttattttatttcatgtatttcctattcactttttacatttaaattatggaccatttcatcatataaaaagctccatttctattt

SEQ ID NO: 848019 - DNA, 120 bp, Artificial Sequence
  ENSG00000273493_0 (sequence is synthesized)
tattttcttctggtgtttgtcctgtagatatgttgggattatacggatgctaaattgcttttttcatttactattatatcaagagcatttctcaagatcataaaatattttttaatcatg

SEQ ID NO: 848020 - DNA, 120 bp, Artificial Sequence
  ENSG00000273492_0 (sequence is synthesized)
cgcgcccacaggtgcacgcgcccttggcgccgcctgcaccccacgcgccccctccgctccccggccgacggcccacctgggcttcgtgaacagtgggagggagagtctggggccaggaga

SEQ ID NO: 848021 - DNA, 120 bp, Artificial Sequence
  ENSG00000273492_1 (sequence is synthesized)
gtgggagggagagtctggggccaggagagggacggtgcaggatcagggaaaggtggaaatcagaagtacatgcaataggaattaacttgaatatgatgcataaagtttgaagcaaaggct

SEQ ID NO: 848022 - DNA, 73 bp, Artificial Sequence
  ENSG00000273492_2 (sequence is synthesized)
tgcagtggcatgatcttggctcactgcagacttcgcctccgaattcaagggtctcactctgttgcccaggctg

SEQ ID NO: 848023 - DNA, 120 bp, Artificial Sequence
  ENSG00000273492_3 (sequence is synthesized)
ggtctcactctgttgcccaggctggagaacagtggcacgatcatgcgttattcactgcagacttgaactcctggcctcaagcaatctttctaccttgacctcccaaagtgctgggattac

SEQ ID NO: 848024 - DNA, 120 bp, Artificial Sequence
  ENSG00000273492_4 (sequence is synthesized)
aggtgtgagccactgtgtttagcctagacttacctttaatagcttttgataagttattttttaatgtaattttgataaaataattgtacctaaaatgtactaatgtgttggtattgtcta

SEQ ID NO: 848025 - DNA, 120 bp, Artificial Sequence
  ENSG00000273492_5 (sequence is synthesized)
ctatccaatctacgaacaaattttactgattcattcgtaactgaccccagagttggtttgtttgaatcactgtaactgagcctctattataaagatcatacgatgtttgttttacctact

SEQ ID NO: 848026 - DNA, 120 bp, Artificial Sequence
  ENSG00000273492_6 (sequence is synthesized)
ttccctttccccttgtccttttcttgctctatgcgtgcttgcttgcatgtcattatttcagtagagggtagtcactaataattgattaacttcatatcctaacctacaggggtgcctggc

SEQ ID NO: 848027 - DNA, 120 bp, Artificial Sequence
  ENSG00000273492_7 (sequence is synthesized)
agattgatgaacttgtttttcttttaaagaaccatgatccttaggttatgcagacctccttgatggtgtccagaaatttgggtagagggatgccaacagctttgatcactgggggagttt

SEQ ID NO: 848028 - DNA, 120 bp, Artificial Sequence
  ENSG00000273492_8 (sequence is synthesized)
ttgaataaacctttctctgttcctgagtgctgatgtgtcagtgtttggcttaccatgcatcaggtgcacagacctaaatttggagattctgtaacatcaagacccatatgacgttcacat

SEQ ID NO: 848029 - DNA, 120 bp, Artificial Sequence
  ENSG00000273492_9 (sequence is synthesized)
actggattaggctgatgactcatatatctctcttttaatgtgtgaccatttacatctctttctctctctcctcccttttttttttttttttggcaatttctttgttattaatggtcttgt

SEQ ID NO: 848030 - DNA, 120 bp, Artificial Sequence
  ENSG00000273492_10 (sequence is synthesized)
tttaaagtgaagtattgtcatttaagtttatatatcaatgttatcattatttgtttatttacaacaaagttttatgccaaggcagtcatgccattacccacctgacctgcttttccacca

SEQ ID NO: 848031 - DNA, 120 bp, Artificial Sequence
  ENSG00000273492_11 (sequence is synthesized)
tcagttttacctgtgtgtgtccctggatcatcaggaagcattgattgagaatctttttctcttaatctgccttactattttctaatgtagttactgatcaaacttagcagtaacccactc

SEQ ID NO: 848032 - DNA, 120 bp, Artificial Sequence
  ENSG00000273492_12 (sequence is synthesized)
attttgtgtgtaggcaaaagcaactatgaataaacagaagaagtctcccacagtgggtaaatgtgtggacctgggtttgaaacctgatgaaacttgctggctgtgaccccttgggccagg

SEQ ID NO: 848033 - DNA, 120 bp, Artificial Sequence
  ENSG00000273492_13 (sequence is synthesized)
gaaacttgctggctgtgaccccttgggccagggattaactgctgtcactcttagttccctcaaccctcaggtgcatgtgattatattcactgcctgatatggtttggctctgtgtcccca

SEQ ID NO: 848034 - DNA, 78 bp, Artificial Sequence
  ENSG00000273492_14 (sequence is synthesized)
gtgtctcatgagatctgatggttttaaaaacgggagtcctcctgcacaagttctctctttgcctgctgccatccacat

SEQ ID NO: 848035 - DNA, 85 bp, Artificial Sequence
  ENSG00000273492_15 (sequence is synthesized)
ctcctgcacaagaacttcctcctcctttccttctgctgtgattgtgtatcctccccagccacatggaactgtaagttcaataaac

SEQ ID NO: 848036 - DNA, 120 bp, Artificial Sequence
  ENSG00000273492_16 (sequence is synthesized)
tgatgtaactccggaagttgtctgtcataactgatgacttatccccatcatatgtgctgaaaactactcagatgaagttaacaacctgatattacaaaataagcatatatattttgtgtt

SEQ ID NO: 848037 - DNA, 120 bp, Artificial Sequence
  ENSG00000273492_17 (sequence is synthesized)
tataagaacctaataatcatctggagacttagtacttggggggtgagctatagatagccctgtgtatcagggttttccaaacaaacagaaccaatgggatatatatagatatataaagac

SEQ ID NO: 848038 - DNA, 120 bp, Artificial Sequence
  ENSG00000273492_18 (sequence is synthesized)
acttcttataggaattggctcaggagattataaaggccaagaagttccaatatgtgccccctgcaagccgaagaaccaggaaatccagtgtaattcttgcatgtgaagctgaagggctga

SEQ ID NO: 848039 - DNA, 120 bp, Artificial Sequence
  ENSG00000273492_19 (sequence is synthesized)
agagtgtctgctggtattgaaggctcaagaacctggagctctgaagtcaagggcaggagcagatgatggatgtcccagcttcagaagagagagcaaatttgccttcctccacctctttta

SEQ ID NO: 848040 - DNA, 120 bp, Artificial Sequence
  ENSG00000273492_20 (sequence is synthesized)
tgattcctatgctcagttaattgaatgatgcccactcacattagtgaggatgggtttttgatacccagtctattgattcaaatgctaatctcttccagaaatactctcacagactctccc

SEQ ID NO: 848041 - DNA, 120 bp, Artificial Sequence
  ENSG00000273492_21 (sequence is synthesized)
agaaataatattttaccagctgtctgggcatcccttaacccaggatgggctaagagacaagtggacacataaagttaaccaccataccctgtaaatatggtatgagaagggatcgagtca

SEQ ID NO: 848042 - DNA, 120 bp, Artificial Sequence
  ENSG00000273492_22 (sequence is synthesized)
tatttcatatcaagattattttccaatgcatagatgccttggaataatacttcttataaaataatgagtaacattttctagcacaagttccaaactgtgtaccatggaaccctagctcgg

SEQ ID NO: 848043 - DNA, 120 bp, Artificial Sequence
  ENSG00000273492_23 (sequence is synthesized)
tcatatgttgctcggtattgcatgcatacccgaaaagaattctgtaatcaagtaactttgagaaataagaggttaaacaaaattaaacaaataccttcactttaaaatgcatacaattct

SEQ ID NO: 848044 - DNA, 120 bp, Artificial Sequence
  ENSG00000273492_24 (sequence is synthesized)
aaaatgcatacaattctttaagatgataatctgcattttgaattttaaagagggtaggtagcttcagtatgtagcatcactccctctccctatttcttttttcttttttttttttttgag

SEQ ID NO: 848045 - DNA, 120 bp, Artificial Sequence
  ENSG00000273492_25 (sequence is synthesized)
cacctctccccattccttgtttttgtttgctgcaccaactcctagtgttgcacaaagcatgctttagggaatgtggtttggaagcattcgaatcaaacccttgaatttttttagaccctt

SEQ ID NO: 848046 - DNA, 120 bp, Artificial Sequence
  ENSG00000273492_26 (sequence is synthesized)
gtagaagtgaaggtttatagtgtacatttttgtcaaagcagatgggttcttttcactgaaagttgttttcacacatgaccttgaaaataaattaataaaaaaaaagtagaaatattaggc

SEQ ID NO: 848047 - DNA, 120 bp, Artificial Sequence
  ENSG00000273492_27 (sequence is synthesized)
tgacagacattttaaagtagggcataagatgccataaaaagccttttgaaagtttaaaataggagttaaagtgtgtgttatatggaagataccagattagagtctttgaatatttattat

SEQ ID NO: 848048 - DNA, 120 bp, Artificial Sequence
  ENSG00000273492_28 (sequence is synthesized)
ataaatgtgcaagtatatgaccagcttcttcccagtttgggggagtaatgggacggcattcagttcacatttgagactgcttctctttaaattttcgtaagtgaaaaggaagaaggatca

SEQ ID NO: 848049 - DNA, 120 bp, Artificial Sequence
  ENSG00000273492_29 (sequence is synthesized)
ctaagtttacaaagacaagtctcggaataagactttcgttcactgtattgcctttaatcatctggtgggagggccctcaagaagtggccaaggccctatgaagattggtgaagagtttca

SEQ ID NO: 848050 - DNA, 120 bp, Artificial Sequence
  ENSG00000273492_30 (sequence is synthesized)
aggaggagaattgaaggagacagctatgggattaattttgagagatgcctttgctgaaatgtctcataaaatatacatggagagcaagggcacaaggagacagagaactctctcggccaa

SEQ ID NO: 848051 - DNA, 120 bp, Artificial Sequence
  ENSG00000232093_0 (sequence is synthesized)
aacaaatgtccacacagttaggaagcccaagggccctctgccctttcctctctgccttcctggagcatgaacccacacagggcacacagcagcaaggcatccccgggcagtgccgtgccc

SEQ ID NO: 848052 - DNA, 120 bp, Artificial Sequence
  ENSG00000232093_1 (sequence is synthesized)
actcaccagcttcttcctgcggtcatcgatctggcagaagttctcctcatctatccccaaacatgggcttccttgaggcacagtcattcaaccaaccagccagcattcattgagcaccat

SEQ ID NO: 848053 - DNA, 120 bp, Artificial Sequence
  ENSG00000232093_2 (sequence is synthesized)
ctatgtcctgggcactgctaggggatggtgataacagggagaagactctgtccctgccttccaattgtgtagaggaagacatccccctacatgatgggtgagacatagcagaagtgagta

SEQ ID NO: 848054 - DNA, 120 bp, Artificial Sequence
  ENSG00000232093_3 (sequence is synthesized)
atatcgagcagagttacagagagggggaaactccttgaggtttcaggaatcacctaatccactgtgactcacaaattcctgcctcttggctttgcctgcagcatatctcctggaagtgtg

SEQ ID NO: 848055 - DNA, 120 bp, Artificial Sequence
  ENSG00000232093_4 (sequence is synthesized)
ctggggcaaaactcatcccagaccaccatctccatcctcccccaatacaccctggctctccctggctacccttgagcacggtgcacgtgtgcatgggtgcatgcctgcatatatagctat

SEQ ID NO: 848056 - DNA, 120 bp, Artificial Sequence
  ENSG00000232093_5 (sequence is synthesized)
cccccatgtatttcccaaagccctacataatgcttcagtttgctaaggaaaaaatgttaattactgcaaatgtgtttaaaactgtaaaagtacattaaacaaactctgtaaagtgtgaaa

SEQ ID NO: 848057 - DNA, 120 bp, Artificial Sequence
  ENSG00000254153_0 (sequence is synthesized)
cagaagtgaggcgcccagagaagtgttcacttgtggctcgaagtccaggtgtgatactgcatgaaaaccccccgatttggccatccagagcatggtaatcaagaaacgcctagatgtttc

SEQ ID NO: 848058 - DNA, 120 bp, Artificial Sequence
  ENSG00000254153_1 (sequence is synthesized)
caaaaatggattgggtgtccctccaagtgttcatgaaaaggttgaatttcctcttggtggggagttacagaggagattagcagatcaggctgaattagggcctcactgtgttacccaggc

SEQ ID NO: 848059 - DNA, 81 bp, Artificial Sequence
  ENSG00000254153_2 (sequence is synthesized)
ttcgcaggcttaagcacatctcccacctcagtttcccaagtatctgggaccacagggacatggatgaagctggaaaccatc

SEQ ID NO: 848060 - DNA, 120 bp, Artificial Sequence
  ENSG00000244620_0 (sequence is synthesized)
ggctggagcagccttagatgccaggtcagggtggccctggggccactgcctccagctgtgtctagtgctgcagggatctgggcatgaggccccttctcccaggaggggaggcacggccac

SEQ ID NO: 848061 - DNA, 120 bp, Artificial Sequence
  ENSG00000244620_1 (sequence is synthesized)
agatgcctccacccagaaaggtcagatgtgggagagttccagagtcattccccaaccctggatgagcttctgcagcctcagtgctactcaggttccagcaagacctggagcaggtgcagg

SEQ ID NO: 848062 - DNA, 120 bp, Artificial Sequence
  ENSG00000244620_2 (sequence is synthesized)
cctttctgaatcttccccgcctgccatcgagggcagatgtgggtgcctgctgtgatgcgaccgaggaatgtcctggaagaaggtgcccactggggagtgagacagggatttctggaaggt

SEQ ID NO: 848063 - DNA, 120 bp, Artificial Sequence
  ENSG00000206567_0 (sequence is synthesized)
atgtctgccatatggaggctgctggcagcaaagggagatgaacaagccaaggttgcccggcctgcatgccggcccagggctgctgctgtgtcttgccatcaaccctcccctgacacccag

SEQ ID NO: 848064 - DNA, 120 bp, Artificial Sequence
  ENSG00000206567_1 (sequence is synthesized)
ccaggagcccagcagaacaagtggccccctaaggcactttggggaccacaccccgccactgaccccagcacagtctggttcccagggcttcaggatcctcctggggacctctcagcatga

SEQ ID NO: 848065 - DNA, 120 bp, Artificial Sequence
  ENSG00000206567_2 (sequence is synthesized)
acaggcgggcactctctgcgggtcccgcggctcccgcggcttccggcccactcagcgcctccagaggcctcaggtgagggtcaccccccgcagcttggggtcactcccctgagcccccgg

SEQ ID NO: 848066 - DNA, 120 bp, Artificial Sequence
  ENSG00000206567_3 (sequence is synthesized)
atcttcccatgggtcctttggaggcctgggttttggagtttgtccttcgttaagtgccgcccgccgggcgcggctgctccaggaccacagacgagtctcgctctgttgcccaggatggag

SEQ ID NO: 848067 - DNA, 74 bp, Artificial Sequence
  ENSG00000206567_4 (sequence is synthesized)
cgctggggatgctacttgatctctcttcagcctcagtttcctcacctggacagtggagctgaacccacccccca

SEQ ID NO: 848068 - DNA, 120 bp, Artificial Sequence
  ENSG00000206567_5 (sequence is synthesized)
agtttcctcacctggacagtggagctgaacccaccccccactatctgaccctgctctctgggctgtcttttgggaacccgccctgctgaggcctgctccccaccctccatggctgtcagc

SEQ ID NO: 848069 - DNA, 120 bp, Artificial Sequence
  ENSG00000206567_6 (sequence is synthesized)
cctgctcagagcctcagcccttcagagccactactaatgatttgctgtgggtggggtcaccctgatacttctctgaggtggctttttcttgcagtttttctgagtaactgacaggaatcc

SEQ ID NO: 848070 - DNA, 120 bp, Artificial Sequence
  ENSG00000206567_7 (sequence is synthesized)
ttgactgcatgccgcctaaactagggtgtgcacagccctcgttctgtgcaaagagggtgcaaagcagcagagtgtctgtgacccatttgccacctaatgttactacaagatttgcaagaa

SEQ ID NO: 848071 - DNA, 120 bp, Artificial Sequence
  ENSG00000206567_8 (sequence is synthesized)
ccggtcacttatcagtaaccatttttatttaaaaagataaaatagagctttgcaggaaagtgctgcaggctcccacgttgccgggcagacgacaacctgggcgcctcgcccagctcctcc

SEQ ID NO: 848072 - DNA, 120 bp, Artificial Sequence
  ENSG00000206567_9 (sequence is synthesized)
ccacagccattggcatccactgtcaggtttcaatgttcttggacctcagggccttcgtcctctccaatctaaatgcagagagacatttgacatggactctctcaggtgttttgcaaaatg

SEQ ID NO: 848073 - DNA, 120 bp, Artificial Sequence
  ENSG00000206567_10 (sequence is synthesized)
caacacattctcattgactctggtcactctgctgtgcactacatgtcaaaacctcttcctcctccctgagactttggtcctttaactgacaacccccctcccattccctccctctgccac

SEQ ID NO: 848074 - DNA, 120 bp, Artificial Sequence
  ENSG00000206567_11 (sequence is synthesized)
tctctgacccctggtcaccatcgatctacttgctacttctatggggtcaacttgtttagatcaacacttctgggacctcacgtggaattggtctctctgaggtagtggagatgctaagta

SEQ ID NO: 848075 - DNA, 120 bp, Artificial Sequence
  ENSG00000206567_12 (sequence is synthesized)
gtgggatttcctcattccacattgtaccccatgaatgaatacaagcatgatttgccaattgaagcaatacaataaagacagaagaaatgtaaaatgcaggaattgtggcttgaccaccac

SEQ ID NO: 848076 - DNA, 120 bp, Artificial Sequence
  ENSG00000206567_13 (sequence is synthesized)
aacgacttgatttttgtcttcagccatgcaactatgttggggcgatcttattcctccttttctttggtagagacaggcaaaaatattttaatagtatgcaaaggcatctatctcctggca

SEQ ID NO: 848077 - DNA, 120 bp, Artificial Sequence
  ENSG00000206567_14 (sequence is synthesized)
tggtgtatcagggacgtttctaagacttcaccagttgctggtgctctgggtgaaaggggagacaatagggtcatgctgggggcttcactaaaacttcctggcttccccgatctggcttcc

SEQ ID NO: 848078 - DNA, 120 bp, Artificial Sequence
  ENSG00000206567_15 (sequence is synthesized)
tctgtaggctggcaggtgtactggcaagaatggcggtcttctgccctgacatctggctttcttcgggaggctgaacgttaaaagctggctccctatgagcccgcatcagtgagagaggga

SEQ ID NO: 848079 - DNA, 120 bp, Artificial Sequence
  ENSG00000206567_16 (sequence is synthesized)
aggtggaaagttcagtggatggggaaggagaggtgggaaccccgggaggaagggacagttctctgatggtggagcacttcctctcttgttttgtgtgctctaaaatgaggtagctggatt

SEQ ID NO: 848080 - DNA, 120 bp, Artificial Sequence
  ENSG00000206567_17 (sequence is synthesized)
gtttggggtggtccaggagtggctcttcgtatggtatcagtggcatcttctggctacttttcacccatggatttttcatcagttacagtgaaggacacttcctggcgttcagcattagta

SEQ ID NO: 848081 - DNA, 120 bp, Artificial Sequence
  ENSG00000206567_18 (sequence is synthesized)
attttttaatgagtcaagttgaagggcaagaagtggtggggcatggtatcttcctgtgagaattttttcttgaagtttggaggcttccctgagtaaaagggcaaagtcctggcccttcta

SEQ ID NO: 848082 - DNA, 120 bp, Artificial Sequence
  ENSG00000206567_19 (sequence is synthesized)
cctactgtattcctgaaatacagtatgacactgaggctttgtatgtccctggcgggtcactggcatgcctggcccagggagcgttctggggccacgtaggggtacatgccacaaaaagct

SEQ ID NO: 848083 - DNA, 120 bp, Artificial Sequence
  ENSG00000206567_20 (sequence is synthesized)
gtcagcatctgcccctctctgaatgttgtactgaagccaaagtccacaatgtatgttgcctcattctttgaataggatgttttgtggctttaggtctggatgtgtgattttttttttttt

SEQ ID NO: 848084 - DNA, 120 bp, Artificial Sequence
  ENSG00000206567_21 (sequence is synthesized)
tttaagtggcagtactgcagggctgacagaatctgcctgaacatggtccgggcctcctcttcctcctcgatgtggccatagtggtatatctggtggtgcaactctcctcctctggtttac

SEQ ID NO: 848085 - DNA, 120 bp, Artificial Sequence
  ENSG00000206567_22 (sequence is synthesized)
tccctcaccacctggaagagctgaatgatatttgggtgatggaaagtcttcaagatggcaacctgggtcccagttggcctatgctgagccagttccctatcagatggtgtctatgaactg

SEQ ID NO: 848086 - DNA, 120 bp, Artificial Sequence
  ENSG00000206567_23 (sequence is synthesized)
atagttttgtatctccttgtcaagtgaggtggagggtgatccctgctccatggtgcctcccaactatactgactacaaatcctgcctctaaaagctatgctgtgatgcacagcactaact

SEQ ID NO: 848087 - DNA, 120 bp, Artificial Sequence
  ENSG00000206567_24 (sequence is synthesized)
gtgctagctaggctaaggccactgtcggtgacaataccccaggctccaaaccctctgggtctgagggccgttcccttccacggttacacagattcccacccctccctgcccatctaccca

SEQ ID NO: 848088 - DNA, 120 bp, Artificial Sequence
  ENSG00000206567_25 (sequence is synthesized)
ccatgcggggaaggtgccaaggagtagacacatggacagtcgttctggtgtctcctggtggggccagactgggcaccatggctgcaagcacagacagggcagagaagaggccagggccac

SEQ ID NO: 848089 - DNA, 120 bp, Artificial Sequence
  ENSG00000206567_26 (sequence is synthesized)
gtggtggagctgggtctaaaacaggactcccaagggcaaaggccctgcccagacttggcacccacagtcttctgctgaatgctatgagcccgcttcagtgaaagagggaaggtggaaact

SEQ ID NO: 848090 - DNA, 120 bp, Artificial Sequence
  ENSG00000206567_27 (sequence is synthesized)
tcaatgtagagaggacaagtgggatccccaggaggaagggtctgtggtctgatagtggaccgcttcttctgttttgtttgttccaaaacaaggtaggtggccatgggataactgaataat

SEQ ID NO: 848091 - DNA, 120 bp, Artificial Sequence
  ENSG00000206567_28 (sequence is synthesized)
ttttctttgattgccacagataggttctcagcctggaatcccatggccaccaaaagctgggttgttttgggattcaggtggtccaggatttgttcttcatgttgtcagaggcaactcctg

SEQ ID NO: 848092 - DNA, 120 bp, Artificial Sequence
  ENSG00000206567_29 (sequence is synthesized)
accactgttcacccacgggtccctcataacttcttctagtgtggtctgctccctggggtctactgttaatagttttttaatgaggcttttaagacctcaggaaaagtagactggggaaaa

SEQ ID NO: 848093 - DNA, 120 bp, Artificial Sequence
  ENSG00000206567_30 (sequence is synthesized)
atagcttccactttaaatttttgctgagaggaccctaatgctgcatgagcagaagggcagaaccccagccaccatgtggtataaaattactctgaggctctgaatatccatggtggcaca

SEQ ID NO: 848094 - DNA, 120 bp, Artificial Sequence
  ENSG00000206567_31 (sequence is synthesized)
gcttttaacggccatcggcccctcccagcctggacaaagacacagagcgcggcctgggaggcggagctctgcgggcggccggggccgcctccttccaggcgctgctgccccaacacaggc

SEQ ID NO: 848095 - DNA, 120 bp, Artificial Sequence
  ENSG00000206567_32 (sequence is synthesized)
ggcctgcatgccggcccaggtagacacttgaaaggaccttctctgtttgtgggtttttgccctggtgcctggagccccttccctatagtcccttgacccagcccagctctatgggctgga

SEQ ID NO: 848096 - DNA, 120 bp, Artificial Sequence
  ENSG00000206567_33 (sequence is synthesized)
ggaactgggaggtagagccagagacccgtaagcggagccgaacccctatgagcttgcccagtagggagctcaggatccccaagattggacaggcaaataagcttagtgatagtcccacca

SEQ ID NO: 848097 - DNA, 120 bp, Artificial Sequence
  ENSG00000206567_34 (sequence is synthesized)
agcagtgcccagtggggtgtcccagggataaaaatagggcagtaggtgaaggcggggggtgtgagccaggcaggcaggggggaccagacaccatgtgatgggtgcaggggtgggacccac

SEQ ID NO: 848098 - DNA, 120 bp, Artificial Sequence
  ENSG00000206567_35 (sequence is synthesized)
ggaggctctgaaaaaggcctgggccttagaagatggggaagcaggaggacccacttagaggccttcacaaccttctagggcacaggccagaatgcggtataggtttcagaagggggctgg

SEQ ID NO: 848099 - DNA, 120 bp, Artificial Sequence
  ENSG00000264458_0 (sequence is synthesized)
cttcagaccaaacacatcatgactcaacaacaaaagaagggtaagaagaattctagctgaggcatatccaaagctttggcccagtggattcaggcatggcccaaaccttttggagcggag

SEQ ID NO: 848100 - DNA, 120 bp, Artificial Sequence
  ENSG00000264458_1 (sequence is synthesized)
gtcatgagaggcagtggaaaatatgacaacagaagagaaggcactgtgaccatggaggcagccacaagccatgggatgctggcagctaccagaagctgggagaagcaaggaatagatttt

SEQ ID NO: 848101 - DNA, 120 bp, Artificial Sequence
  ENSG00000264458_2 (sequence is synthesized)
cccctgtaacctttggaagaaatgtggtcctgttgacattctgattttggcccagtgaaactgatttcaaaccttcctccagaactgtgaaagaataaatttctgtgttttaagctgcca

SEQ ID NO: 848102 - DNA, 120 bp, Artificial Sequence
  ENSG00000270212_0 (sequence is synthesized)
gtgcatagagccgtgacttggcctctctgccacaggcttcatttcttcttgcctttcctttgtctttcctccccttccaccccacttctgcgctgacactggcttcacttcactttccct

SEQ ID NO: 848103 - DNA, 120 bp, Artificial Sequence
  ENSG00000270212_1 (sequence is synthesized)
ttgaagacacgtgctgggcacacaagcacctactcggaggatgacagaagcttgggagctgtgccctgaaattcagtgctcactccctgcctgcctgcatagagtccagggcaatgagga

SEQ ID NO: 848104 - DNA, 86 bp, Artificial Sequence
  ENSG00000270212_2 (sequence is synthesized)
cagaaaagagttctttggggtctcactctctcgccctggctggagtgcatgatgcgatcttggctcaactgcaacctcgacctcct

SEQ ID NO: 848105 - DNA, 120 bp, Artificial Sequence
  ENSG00000270210_0 (sequence is synthesized)
ctctgttttccagtagaacaccaatagcaggagtgcaagaatgacgttctgtctgctgggagcctcgttaggtcatcattatccctagcctggattagacagatgtgtttctaaaacgta

SEQ ID NO: 848106 - DNA, 120 bp, Artificial Sequence
  ENSG00000270210_1 (sequence is synthesized)
catctgcgcaaaacccttcagtggtccctctttttactcaggtcgctctttttactcagtcaaactcctttatgtcgcttccaaggccctgcatgatctggccccaacttcttctgtcct

SEQ ID NO: 848107 - DNA, 120 bp, Artificial Sequence
  ENSG00000270210_2 (sequence is synthesized)
taccccccatcttcttcaaccttcatctagaccgaaataccactcagtgtaataaaagggctgaccctcttgcctacaagtctccagatatgctctacccattttttctggtagagacaa

SEQ ID NO: 848108 - DNA, 120 bp, Artificial Sequence
  ENSG00000270210_3 (sequence is synthesized)
tgttcactcatccccgttctagttgccaggaactaccctgagtgctgaggaacagtgaacaagacagacccggcctgccctcccccgccccgcatctgtctcctccgtgttgtcttccct

SEQ ID NO: 848109 - DNA, 120 bp, Artificial Sequence
  ENSG00000270210_4 (sequence is synthesized)
caccagcctcacctccaggctgaattagttgtctctcctctgggtcccctggctctctgtaaaactgctagtgttgccttatcacagttttaatgacacttaacctgtctctccccgctg

SEQ ID NO: 848110 - DNA, 120 bp, Artificial Sequence
  ENSG00000270210_5 (sequence is synthesized)
ctagcctatgggctatttgttgaatgcatctatgactcctcaaagtactctgctaagggtaattaaaaggaataggatgttatgaattagatgaaaaataaaaatcaaacactattggaa

SEQ ID NO: 848111 - DNA, 80 bp, Artificial Sequence
  ENSG00000265618_0 (sequence is synthesized)
ctggaggatagggcatttggttctcccctcccagtgccccctgctttttcaatagcatgatcttggcttactcagcttac

SEQ ID NO: 848112 - DNA, 69 bp, Artificial Sequence
  ENSG00000265618_1 (sequence is synthesized)
taccatgtcagctaatttctgcgtttttttgtagagatgggcttttgccatgttgcccaggctggtctc

SEQ ID NO: 848113 - DNA, 120 bp, Artificial Sequence
  ENSG00000265618_2 (sequence is synthesized)
ctggtctcaaactcctgaactcaagcatcctcccaccttgcctcccaaaatgctacgattacaggtgtgagccacctcacctggcccagtgtagctttttaacacaaattttatatagct

SEQ ID NO: 848114 - DNA, 120 bp, Artificial Sequence
  ENSG00000265618_3 (sequence is synthesized)
caaattttatatagctcaggttactggaaacactgtaaaatgccacctactttttcttttcacagctgacacttctcccaactaacagaaactggcaaacattgtagaggaagtgtccac

SEQ ID NO: 848115 - DNA, 120 bp, Artificial Sequence
  ENSG00000265618_4 (sequence is synthesized)
ttggaaaaaaaaaaaaagacaacaggagtacatacagtgaaccaaaaagagtgtaccaggaggagcagaccctgaacagttagaactatggaaatcgctatgctttgtgttgtcacagga

SEQ ID NO: 848116 - DNA, 120 bp, Artificial Sequence
  ENSG00000265618_5 (sequence is synthesized)
gttaaaataggaataccctgcatacaataaatatttattggataaataactaagcctgatacccttttcaatgcgttatacagactctatcatcacaccactaatctaagttctcagaag

SEQ ID NO: 848117 - DNA, 120 bp, Artificial Sequence
  ENSG00000265618_6 (sequence is synthesized)
ttaaacattacaagacttcagaacaacataggcgtctttggctccatttaacagaagaaggaccatagtgatcatttaatctctatgagtctgtcttatcttctggaaaaggggcctaac

SEQ ID NO: 848118 - DNA, 120 bp, Artificial Sequence
  ENSG00000265618_7 (sequence is synthesized)
accatttccttttgcaaaaaggtagctgccttgcttccagttctaccatcctctagcaacccatctttctcttatttgatgtctctgatcagctcctcttccagcacaaactggagaaag

SEQ ID NO: 848119 - DNA, 120 bp, Artificial Sequence
  ENSG00000265618_8 (sequence is synthesized)
gggatcctttctgttttcttggaggcttctgaactcaattacaggtctgcattaaaaatgtatggagaaagctggtgatcagtttgtacatatggacaagttcaaggcagtatggtctac

SEQ ID NO: 848120 - DNA, 120 bp, Artificial Sequence
  ENSG00000277978_0 (sequence is synthesized)
tcttttttttcatgcacaggctttttctggtaaggaccgctgggattgaacagaagcttccggtaaataagggccccgtcggcaagacagcatactgctgtcacaagtgcaaacacctgg

SEQ ID NO: 848121 - DNA, 120 bp, Artificial Sequence
  ENSG00000277978_1 (sequence is synthesized)
cctaaccatggtccccactcctgtcattcacacaagttttaagtggtctgcccaccagattcctctcttgctagggtactcggattgctccctgtgcttcatctaatactaacatggaga

SEQ ID NO: 848122 - DNA, 120 bp, Artificial Sequence
  ENSG00000277978_2 (sequence is synthesized)
gacttcagagatcatcttattctcctcattgctaagttttctaaatacttgcctatagaaagagaaaagataatttaagtgagcagaaaaataataaagcagtgtgggctctgaaatcca

SEQ ID NO: 848123 - DNA, 120 bp, Artificial Sequence
  ENSG00000231013_0 (sequence is synthesized)
gagaagaaactgcagcagagtcggcacaggaccccagcttccatcctcacgttgtgtggacatggtccagcttcctgccgcggaccatgagcaatccaagggtaggggagcctcaagagg

SEQ ID NO: 848124 - DNA, 120 bp, Artificial Sequence
  ENSG00000231013_1 (sequence is synthesized)
gagacactgagcctttacgtaatgaggcagggaggggttcaagcaattaattgagaaaggatgtgacaggactggcacctggtcactttgtggccgtgagcaccagctccgcctatcccc

SEQ ID NO: 848125 - DNA, 120 bp, Artificial Sequence
  ENSG00000231013_2 (sequence is synthesized)
tctgcagggcagaagggacagtgctgcgggaggcggaggtgctgtggctctgggaaggctgaaaagggacggctgcaaaggagaagagcttcgagtcctttccatcaggagaaaaacccg

SEQ ID NO: 848126 - DNA, 120 bp, Artificial Sequence
  ENSG00000231013_3 (sequence is synthesized)
gtcagctgtggaggagcactgcacaggagtcagaaagtggagtctgggcgtgaccttgcacctgaccagcctggggctctaggtccgccacatctggactaatctcctgtgtcctgagct

SEQ ID NO: 848127 - DNA, 120 bp, Artificial Sequence
  ENSG00000231013_4 (sequence is synthesized)
cccaggaccccagaggcaagcatggaggggccacgctggcagattgaagtcacagagaaaggcaggaaaacttcctggcttaggtttccaaaggcctctgggggatgaagagaacccaca

SEQ ID NO: 848128 - DNA, 120 bp, Artificial Sequence
  ENSG00000231013_5 (sequence is synthesized)
gtggcttaggacgagctcctgcacagcggcctgtttcccaattgcatcgtgtatctctttgcctctcttggctcagccatggccccagccccaggccatccaaggggcagcctggtgagg

SEQ ID NO: 848129 - DNA, 120 bp, Artificial Sequence
  ENSG00000231013_6 (sequence is synthesized)
tttcttcaactttgctaatgacttgacctacagtcttaagtcaagaaggtgtcgctctcctttgtgatggctggacgcacaggagctgtggtcaggatggggctagaggagctgaaatcc

SEQ ID NO: 848130 - DNA, 120 bp, Artificial Sequence
  ENSG00000231013_7 (sequence is synthesized)
cagggcaacaagggtatttaaaaacacatcgcaggagaaacagctaaagagtcttggaaccaggaatcataagctgtttgatgggatgaactatcttgggagtgatgaggtccccatcac

SEQ ID NO: 848131 - DNA, 120 bp, Artificial Sequence
  ENSG00000231013_8 (sequence is synthesized)
gagcatcagacactgaatgaagtctgcactacatgagatgaagaacccttccagccctgaggccgagcagccacttctctggagcaggctggcccatctatgtccaggaggccagcccca

SEQ ID NO: 848132 - DNA, 120 bp, Artificial Sequence
  ENSG00000231013_9 (sequence is synthesized)
ggctagcttctgagcacggggagctaagtccttcgccttccagagactgcacaaagtgtgtgccacctccacagaaccctcctcatccacccgagaactcttcctcacctgacctaaagc

SEQ ID NO: 848133 - DNA, 120 bp, Artificial Sequence
  ENSG00000231013_10 (sequence is synthesized)
tcttcatttcataccacctttcaagcgaattaaggattaattgccagcagcaatctctgtctttgtttgttttctctaatggaaaacctttctctcgggagggtaaggttatcagtcatt

SEQ ID NO: 848134 - DNA, 120 bp, Artificial Sequence
  ENSG00000231013_11 (sequence is synthesized)
cacagctcagttgtgctgtgtttgattagactggacggcaaagctgagtcctgtttcggctctgtgcgatcctgggccccttggagcctgttttctcatctatgaaatgggagtaataat

SEQ ID NO: 848135 - DNA, 120 bp, Artificial Sequence
  ENSG00000231013_12 (sequence is synthesized)
agtgcttattgcacagttgttttaagaactaaaaatttaaattgcctagaatgttatacaaacataagctgccatattttggaaaaatgagccaagatcagtggtgccaagggaagaatg

SEQ ID NO: 848136 - DNA, 120 bp, Artificial Sequence
  ENSG00000231013_13 (sequence is synthesized)
ggcagaggtgagctgtgggcagccgtggaggatggtccacggtgtggctgccagagggcatcgggggccaggcaactccagaaaggagctaggaatgttagagaaaactgcactaacagc

SEQ ID NO: 848137 - DNA, 120 bp, Artificial Sequence
  ENSG00000231013_14 (sequence is synthesized)
cagcatgcgtgaagaactgattcatactacaccgtggatgaacctcaagaacattattctcggcaaaagcagacagacacaaaaggtcacatagcaaatgcttccgttgatatgaaatgt

SEQ ID NO: 848138 - DNA, 120 bp, Artificial Sequence
  ENSG00000231013_15 (sequence is synthesized)
ccagcactggcaaatccacagagacagaaagtagattagtaatagccagcggctgcagacagggaaggaggggagtgatgacttaatgggtacagggattttattttggggtaatgaaga

SEQ ID NO: 848139 - DNA, 120 bp, Artificial Sequence
  ENSG00000231013_16 (sequence is synthesized)
tattttggaatgagacagagctggtggctgcatagagcactatgaaagtgctaattgccattgaattattcacttcaaaacagttaatttaacgctatgtgaatttcacctcaataaaaa

SEQ ID NO: 848140 - DNA, 120 bp, Artificial Sequence
  ENSG00000231013_17 (sequence is synthesized)
tcccagagactggggagagatggaggggaagtgatgagctgggacatggagggttccagaagaggtgcaaataccctgctgcccagccagccctgaggaggtgggatggcccagaggaga

SEQ ID NO: 848141 - DNA, 120 bp, Artificial Sequence
  ENSG00000231013_18 (sequence is synthesized)
aacagctgtgggggcaggtctagatgggcagaccacacacagccttgccgagcccatgcctcccggcaaagcacaggaggggccagtggcccaggatagacagggctctgccagtcacca

SEQ ID NO: 848142 - DNA, 120 bp, Artificial Sequence
  ENSG00000231013_19 (sequence is synthesized)
cctgtgactaacaccatcatcagctgcaggcgagatccccctgaacgtggtggtgctacgtgaatctctagccacctgggaaaattgcaggggaagatccagaaatgtctgccatcccag

SEQ ID NO: 848143 - DNA, 120 bp, Artificial Sequence
  ENSG00000231013_20 (sequence is synthesized)
gagaatgcaatcagaattaaagtcagaaaacggagaaagttctatttttgcccaaaggggtttatagataaagattcctggtctttatatttgtggagcccctggccctgggccaggtct

SEQ ID NO: 848144 - DNA, 120 bp, Artificial Sequence
  ENSG00000231013_21 (sequence is synthesized)
gaagcagacccagcaatgtcagcttcctctgtcctgcccacagggatagagaggtggccccagaggcaggtctgggtgggttgggggaggactgagagaggggaaagggccatctcagag

SEQ ID NO: 848145 - DNA, 120 bp, Artificial Sequence
  ENSG00000231013_22 (sequence is synthesized)
ggcaggacagtgcctgggagtttgccctgcattcacctggcatggagcctctatcctccagtcctctatttataaataagctcagatggcctgataaaaacctgggactatttctggagc

SEQ ID NO: 848146 - DNA, 120 bp, Artificial Sequence
  ENSG00000231013_23 (sequence is synthesized)
aatgtgtcaggctgcagtggcagggggccaggaacagcccggcccccggggccatgctgaactgggccactcacacccctccatgtccctggtgctcacttcatcggctgatggggtcac

SEQ ID NO: 848147 - DNA, 120 bp, Artificial Sequence
  ENSG00000231013_24 (sequence is synthesized)
cagggaagccacagctcctctttgtcttggccttgtgtctgtcctctcctaccttctgcttctgccggtgtttgctctttcctctgcccgcggaccgccacatccatctctcaggcactt

SEQ ID NO: 848148 - DNA, 120 bp, Artificial Sequence
  ENSG00000231010_0 (sequence is synthesized)
cccatgtctctactgtagcttccaggccgtttcccctggggatccaatgtgtttcctgttgtccccaatcttttaaatttttttccattattagagttagtaccagcagccagggtggaa

SEQ ID NO: 848149 - DNA, 120 bp, Artificial Sequence
  ENSG00000231010_1 (sequence is synthesized)
ctgcaattcgtgaagattgcattggcttgctttaaaagaatggtatctgtacgggtcccttaaccattcgaggggcaccatcgggcttgtgggtcatgctgggaagtggcccggctgcct

SEQ ID NO: 848150 - DNA, 120 bp, Artificial Sequence
  ENSG00000231010_2 (sequence is synthesized)
gtgacagtttctcagccaggcagggactcttttccacacgatgacactggaactgaatgccacactccttctccttggaagaaaaaatggtgtgtaggacaaggactcaggacatgggtg

SEQ ID NO: 848151 - DNA, 120 bp, Artificial Sequence
  ENSG00000231010_3 (sequence is synthesized)
tggaagaatctctgtggtacgagcccagcctggaagaactcttaggctgcgtggacgctgcccggccacggtgacggagctgttccaatgcctgcttcccgagacaggcccatgaaatca

SEQ ID NO: 848152 - DNA, 120 bp, Artificial Sequence
  ENSG00000231010_4 (sequence is synthesized)
gcagcaggcggcagggggttaatgtggggagcgggcaggggtggggtgggaagccagctggggaaatgggggctgcagggcccagcccgaccaggcacagacacagggggctctgtctgc

SEQ ID NO: 848153 - DNA, 120 bp, Artificial Sequence
  ENSG00000231010_5 (sequence is synthesized)
ttgcccgctgccctggcactgtgactaaccgccccactattgtgagtctgaagtcagccctttgtgtcgtcccctggcgtctgggagcacagccgaagaaccctttccagcagcccccct

SEQ ID NO: 848154 - DNA, 120 bp, Artificial Sequence
  ENSG00000231010_6 (sequence is synthesized)
cattctggaacctgcagccccaacatccattctttcagctctcagggttgctgggggctgatgagccagtggaagtatccctttccctggccaggaagggccaccagcaaaaaagaagca

SEQ ID NO: 848155 - DNA, 120 bp, Artificial Sequence
  ENSG00000231010_7 (sequence is synthesized)
gaaaaccagtctcccctactctgggtggggaagtggggggcacagggacctactaaacctacgtgaccgccgtggtagctgctccacacgcagcaaaggagccattgaaatggggagagg

SEQ ID NO: 848156 - DNA, 120 bp, Artificial Sequence
  ENSG00000231010_8 (sequence is synthesized)
ccaaatcgaatatggaaaaaatggcaaaatatcccgttcacagtttcatacgagcaacacactgaaataggattttggaaatttatattagattaaaatgaattttagtactaaagtgaa

SEQ ID NO: 848157 - DNA, 120 bp, Artificial Sequence
  ENSG00000234026_0 (sequence is synthesized)
gcgcgtgcgcggcagagtcacaatggcagccagattcaggtgcggccatttgtgtgtccccgaggttcctcgcgggccggcatcccacgccgagggtggtggtggcaggctttccagaaa

SEQ ID NO: 848158 - DNA, 120 bp, Artificial Sequence
  ENSG00000234026_1 (sequence is synthesized)
ggcagcacaccaggctcagctctgctggcgagcaggaggcgacggcagaggaaacttcaacccgatgaacttcctggttgcggggacatttgcctcctcctgccactcaccacctctgct

SEQ ID NO: 848159 - DNA, 120 bp, Artificial Sequence
  ENSG00000234026_2 (sequence is synthesized)
tcccatatttgccccagcttggctcagggccacagttctgcactcttcagccggcggcgccaccagcagttgtttctacgcgggaaatagggcaacagcatcccagcacagctgagtgcc

SEQ ID NO: 848160 - DNA, 120 bp, Artificial Sequence
  ENSG00000234026_3 (sequence is synthesized)
caaggatggtcagccgggtagggcaagaagcttctttcagggattctgatctcacgaaacaagagtaatgatggcacttcactcagaggtttgtcctgaggcttaaatgaggcaacatgg

SEQ ID NO: 848161 - DNA, 120 bp, Artificial Sequence
  ENSG00000234026_4 (sequence is synthesized)
acacagcattttagcacaaggccaggtacagtatgtgtaaggagtgttggctgctattttctcaggctcatcatccatcagatgcaatcactgttccctgtctttgaattgtgcctttaa

SEQ ID NO: 848162 - DNA, 120 bp, Artificial Sequence
  ENSG00000234028_0 (sequence is synthesized)
cgcctccttaggaacgggaaggagccccggcccagtgcactgacgtagttagcctaagatcacgtagctggttggtcacagaatcatgactttaattcatgtcttctgactctgacctgg

SEQ ID NO: 848163 - DNA, 120 bp, Artificial Sequence
  ENSG00000234028_1 (sequence is synthesized)
cacgctttgtacctcaccaaagacagtgatgaaattgcaaaagggcagagtggagaagactggaatgttcagccaaggcatttgaacttttaatgctgcaagtcaagacttcctgaagat

SEQ ID NO: 848164 - DNA, 120 bp, Artificial Sequence
  ENSG00000234028_2 (sequence is synthesized)
ttttgagcagatgagtgaagtgataagaaaatgcatcttcagcagtgacagcatcaacgaggaggagactggccgggaggctattacccgcatcaaaaccagtgaacattaaaaaaaatt

SEQ ID NO: 848165 - DNA, 120 bp, Artificial Sequence
  ENSG00000234028_3 (sequence is synthesized)
tcttttgcccaggctggagtgcagtggcttgaccatagttctctataaccttgaattcctgcgttcaagcgatcttccttcctcagcttccggagtagctgggactacagatgcgtgcca

SEQ ID NO: 848166 - DNA, 120 bp, Artificial Sequence
  ENSG00000234028_4 (sequence is synthesized)
agctgggactacagatgcgtgccaccatgccaggccaatttttaattttgttttgtaaagatggggtttctgtgttgcccaggttggtctcaaattcctggcctcaagccatcctcccgc

SEQ ID NO: 848167 - DNA, 120 bp, Artificial Sequence
  ENSG00000234028_5 (sequence is synthesized)
ctcagcctcccaaagtgctgcaatttacgggcattagccaccgcacctggtccaaaaccggtgaagatttgttaaggtgttggcaatatgggtatacctagattatccttcatctgctaa

SEQ ID NO: 848168 - DNA, 120 bp, Artificial Sequence
  ENSG00000234028_6 (sequence is synthesized)
aaacatgctctaatctctccccagcccaaaacaaacaagaaacctctcttccccttccagctcctaccacgtgtctttgctcctctgtatggcaaaactcaagtgttcaaaattccttat

SEQ ID NO: 848169 - DNA, 120 bp, Artificial Sequence
  ENSG00000234028_7 (sequence is synthesized)
cttcaattcctcttctcccattcccaagtacactacagtcaggcattcacaccaccaaaactgctctcgctgaggccaccagtgctgtattcaaaggataatctttgttttatcagctgt

SEQ ID NO: 848170 - DNA, 120 bp, Artificial Sequence
  ENSG00000234028_8 (sequence is synthesized)
atttgatccagcaactcaagtttttcctgtctagaacacctttcaccggtcttcttgcttctccatagtgctggtcgtaaccctcaaaaggtcccccagttcactcaggataaaagtcaa

SEQ ID NO: 848171 - DNA, 120 bp, Artificial Sequence
  ENSG00000234028_9 (sequence is synthesized)
gtccttaaaatagactacagggtgctacagcatctggttcctatggcttttctgatctcatttcatactgtctttgctcactccactgggccaatcaagacccacctggggggttttcct

SEQ ID NO: 848172 - DNA, 120 bp, Artificial Sequence
  ENSG00000234028_10 (sequence is synthesized)
ttgttgttttgcctgcctaggaaacttcccaggtatatgagtttgctagagttgccctaacaaataccacagaccaggtggcctgaacaaaactagtttattttctcgaagttctggagg

SEQ ID NO: 848173 - DNA, 120 bp, Artificial Sequence
  ENSG00000234028_11 (sequence is synthesized)
ctagaagtccaagatcaaggtgggattctgaggcctctctccttggcttgccgatgacagccctcttacttcctcttccctctgatgtctcttcctattcttctaacaccagtcagattg

SEQ ID NO: 848174 - DNA, 120 bp, Artificial Sequence
  ENSG00000234028_12 (sequence is synthesized)
gagtgtggggctacctttaacagcctcattttaacttaatcactgctttaaagatcttatctccaaatacagtatagttatattctgaagcactaaaggttgggacttcaacatgtaaat

SEQ ID NO: 848175 - DNA, 120 bp, Artificial Sequence
  ENSG00000234028_13 (sequence is synthesized)
tttggagggacacaatttagcacataatacccaggtacccacaagatatgttccctcactttatttgaggctttgctaatcccagtgaagtccctcctcactaccttatttaaaattaaa

SEQ ID NO: 848176 - DNA, 120 bp, Artificial Sequence
  ENSG00000234028_14 (sequence is synthesized)
acctccaccaccttccttcctttatttctctcctgctttatttctgcttagccgatacatacattacaaatatgtaaatactgtaatttacatatttgttttgtttattgtctgctgtgt

SEQ ID NO: 848177 - DNA, 120 bp, Artificial Sequence
  ENSG00000234028_15 (sequence is synthesized)
gaagacataaaacagtgcaaagtgtttagcaagcatttaataaatgtttgttgaatgaatgaatgaatgaatgaatacctgaggacagaaggaaagagacaactggaaaggaagagactg

SEQ ID NO: 848178 - DNA, 120 bp, Artificial Sequence
  ENSG00000234028_16 (sequence is synthesized)
cagttgctgtagacagagggggttgattacgagagcaagattccagagtatctggaggaaaaggggcagctctgccttccatgttgaaagtagagcgtaggaggtattcctagagagtaa

SEQ ID NO: 848179 - DNA, 120 bp, Artificial Sequence
  ENSG00000234028_17 (sequence is synthesized)
gttattttgaaaagtagagaaaatagatgagcgaactcaaaccaattgaccattatctactcaacaaaataggagataaaattgcccacctaaaagggattatactagttggtatgagga

SEQ ID NO: 848180 - DNA, 120 bp, Artificial Sequence
  ENSG00000234028_18 (sequence is synthesized)
aggtgtcagaaaattaacataagatgaaaaatgattgttaactacctgtttgaaattagtgtatatattttagtgggcctggtcttcatggttttgtaattttttcaaaaaatgatcatg

SEQ ID NO: 848181 - DNA, 120 bp, Artificial Sequence
  ENSG00000234028_19 (sequence is synthesized)
gcatgaacaaggctattaatctgaactaatgaattaggagtctacttgccacctgtaaatactgtggaagttttatttattcatttaacattcagggattccacatgaccacctgcaaat

SEQ ID NO: 848182 - DNA, 120 bp, Artificial Sequence
  ENSG00000234028_20 (sequence is synthesized)
aatgagaataaagatatgaacaaaatagatgtggttcccgcccttctgaaggttaacacctatctagttagggagacagacattaacaatcacacatatattattaaaactgagataagt

SEQ ID NO: 848183 - DNA, 120 bp, Artificial Sequence
  ENSG00000234028_21 (sequence is synthesized)
gctatgatgaaaaaggcgcgggcagaagagcacagtggtggaaaatgccagtaaggagagtcaagctttatacttgggaacaaaacacaaattttccattttggaaaaaaagcctgagtc

SEQ ID NO: 848184 - DNA, 120 bp, Artificial Sequence
  ENSG00000234028_22 (sequence is synthesized)
gaagtgtgctgactgggaaaataaattaaggagagaaaagagagtctacctgctttaggacagcatggagcttcacagtgactttgtgggaactctggaacctgggtgcctcagggaaat

SEQ ID NO: 848185 - DNA, 120 bp, Artificial Sequence
  ENSG00000234028_23 (sequence is synthesized)
gtaagaaagtggggaccgggcatgagagctggcccgtgaggctgggccaggaaaagaagctggtgctcaggtaccctgagccagggttgcccaaaacaaccaagattctacaactgagtg

SEQ ID NO: 848186 - DNA, 120 bp, Artificial Sequence
  ENSG00000234028_24 (sequence is synthesized)
tggcccaaaaaatcagcaaaataggtctgagatttagaaacagtgagttcaatcccttaacagagagagactgcatctgttgaaatgatatttgattgtgaataacaaaaacgttgccat

SEQ ID NO: 848187 - DNA, 120 bp, Artificial Sequence
  ENSG00000234028_25 (sequence is synthesized)
atagtgggtgaagcaagaagtgggttttttttttttactgacaccacagctctacagtgatgttttatttaaacttatgctccttctgtttctccatgcttcatgggtgactttgttcct

SEQ ID NO: 848188 - DNA, 120 bp, Artificial Sequence
  ENSG00000234028_26 (sequence is synthesized)
tttgcctgtcgtctcactgttttgggatggcaactccagtatcatttctttattataggtaggacaaagaggaatgacaaaaggcatgtaaccacctgaatttgcccctatcaaagagct

SEQ ID NO: 848189 - DNA, 120 bp, Artificial Sequence
  ENSG00000234028_27 (sequence is synthesized)
ctccaggaagcaccaccaaggaattttcactgacatttcccaggccagaccatgctgctgctaagcaaaatgaggattctgctagtgaggatgaaaggaagaatgtgtaatcagttttct

SEQ ID NO: 848190 - DNA, 120 bp, Artificial Sequence
  ENSG00000234028_28 (sequence is synthesized)
tgaagtataatacatgtacaataaactgaacctattggaaatatacatttggatgagttttgacagatgtatataccacagtcaagatacagaacattcccatcactccaagagattctt

SEQ ID NO: 848191 - DNA, 120 bp, Artificial Sequence
  ENSG00000234028_29 (sequence is synthesized)
tgtgtccctttgtggtcaatccctcctacacgaggcccctaggtaaccgctgatctgttttccatcacaatagattagtctgcatattctagcatctttaataaatgcagtcatacagta

SEQ ID NO: 848192 - DNA, 120 bp, Artificial Sequence
  ENSG00000234028_30 (sequence is synthesized)
gttcccaggctggccttgttggggaaggtggactttccctggtggtcaacatcgcacctaccaatcaaatcgtaatttcgtcgttcgaggcccgtccctcttccggacgcaattaccaat

SEQ ID NO: 848193 - DNA, 120 bp, Artificial Sequence
  ENSG00000234028_31 (sequence is synthesized)
gagaaatgcccttccccgacgtctttttacctgattggtgcgctcatcagttcccggaatacctttcctacaacagattggccatcgcggtggttggcctcgccccacaaagcgaggcgc

SEQ ID NO: 848194 - DNA, 120 bp, Artificial Sequence
  ENSG00000234028_32 (sequence is synthesized)
tggagaagacttgaagatcattggtggaagtggatgtccctcaaaggtctgcgctaactgcctcttgattggttggaagcggcacttactacgtggcggattctgactgtgaagaggact

SEQ ID NO: 848195 - DNA, 120 bp, Artificial Sequence
  ENSG00000234028_33 (sequence is synthesized)
gtcccaagtgaagagtgggaggcaagtgccttgtgaccgggaggaggtcgaccttaaaggagctggtattgtagctcttctaaagcctagtctacttaggaaggcaaaagcgaagcagca

SEQ ID NO: 848196 - DNA, 120 bp, Artificial Sequence
  ENSG00000234028_34 (sequence is synthesized)
agaagtggccacagaagccgtgtggtccctagaagtagaagggtaaggaggatgcaggagatggtcctacttgtggccgcaacggggctcagaagtccgcttgttagagatggcagtgac

SEQ ID NO: 848197 - DNA, 120 bp, Artificial Sequence
  ENSG00000274441_0 (sequence is synthesized)
ttttgcttttgttgcccaggctggagaggcagggcaagagacgggtgcatcgttccttccctaagttgttccttcattgagatgatactacccatgtcactgataccatgaatactgcaa

SEQ ID NO: 848198 - DNA, 120 bp, Artificial Sequence
  ENSG00000274441_1 (sequence is synthesized)
gaacgccttgagggcagaaatcttgtcttctccattttggtatcctcagctcctagagaagcacctggcatataaagatcctcaacaaatgcttactgaatgaatcatctgtaatggaaa

SEQ ID NO: 848199 - DNA, 120 bp, Artificial Sequence
  ENSG00000274441_2 (sequence is synthesized)
ctcaacaaatgcttactgaatgaatcatctgtaatggaaaggtaaattctttttggtatagctagacttaaatggctttatacctcaccaaaacctaaatacacacacacacacacacac

SEQ ID NO: 848200 - DNA, 120 bp, Artificial Sequence
  ENSG00000274447_0 (sequence is synthesized)
taggaggcagaccccaccatcacccccattctgcaaagaacggagccgagaaagagagagaaacggctgcccacggccgggaagagcaggaattggaaccagggtttgggtccagaggag

SEQ ID NO: 848201 - DNA, 120 bp, Artificial Sequence
  ENSG00000274447_1 (sequence is synthesized)
tacagggccatcctgaagacagacgccccactctctagaagccattactcagtggggcaaaggacgtgggctttgatgggagacacacaggcggctgtgagagcccagcagaaacaattc

SEQ ID NO: 848202 - DNA, 120 bp, Artificial Sequence
  ENSG00000274447_2 (sequence is synthesized)
cgctcccacggctcccgtccatgccctcccactgctacctcagtggctggctcccatctccttcaaacatcgaataaatgcctccctcactgggggataccacactgcccccttccctta

SEQ ID NO: 848203 - DNA, 120 bp, Artificial Sequence
  ENSG00000274444_0 (sequence is synthesized)
ttagcttgttttaaaaaaaatctcgccgccatgtatgacaagtgttactgcaagaaattcatcagccttctacagatacttccagttttgctgtaatgatctgcagaagagaactgccat

SEQ ID NO: 848204 - DNA, 120 bp, Artificial Sequence
  ENSG00000274444_1 (sequence is synthesized)
agaggggagagtggctgaaacgcttaattaccggaggcgaaggaggggcgcgcgggggaccgaaggagaggggagtgaagaaggaaggtcctttaccaggcttgtacctggagaaagctt

SEQ ID NO: 848205 - DNA, 120 bp, Artificial Sequence
  ENSG00000274444_2 (sequence is synthesized)
tgaatcgcttctctgctatatttggaaaaggtatgcttgctttttaaaaaaatgcctttagggcaaagtgatacccttgtgtaataattaactcagacaataaaaataattggaaaatca

SEQ ID NO: 848206 - DNA, 120 bp, Artificial Sequence
  ENSG00000284703_0 (sequence is synthesized)
aagagatcagggctggaaaaccaggaaaccaggactttcacaagcaaatcatttagaaaacatagactcactcacggatggactgcgatgcacgagggctgagtagatctaggctgagcg

SEQ ID NO: 848207 - DNA, 120 bp, Artificial Sequence
  ENSG00000284703_1 (sequence is synthesized)
agcaaggggaggagtgggagtgtgagatggggcgggagaggaacgggaaggagggcgtgtgaacagaaggctcacgatgggcgccaggagctcaaggaggcagctgggaggggcatgggc

SEQ ID NO: 848208 - DNA, 120 bp, Artificial Sequence
  ENSG00000284703_2 (sequence is synthesized)
gatgggcagcgggggtgatgaggccggtttgtgggaggaaccgcactgtgaggaggggagaggatccttccagaaaccctcccagagaggcttgccaggtggacagtggtgggcaaatgt

SEQ ID NO: 848209 - DNA, 120 bp, Artificial Sequence
  ENSG00000284703_3 (sequence is synthesized)
tcgtgagaagcacggatgtactgtagcagggaagaatgggagcactccaggacacagcaggatggcggccacgtgctggccgcacccgtgactcgcacacaagggcatggtgccatctgc

SEQ ID NO: 848210 - DNA, 120 bp, Artificial Sequence
  ENSG00000284703_4 (sequence is synthesized)
ccaatcctgcccttggcctgacatccaatggggaatgtggacgtggatgtgccccggtcttctcagctcaaggagtcgccacgaatccactggaacagacgctgttggccatccctgaaa

SEQ ID NO: 848211 - DNA, 120 bp, Artificial Sequence
  ENSG00000284703_5 (sequence is synthesized)
catgcgggtgtcatgctccggctcctgctgactcagggcaaacctgatcctagccagaggtggagcatgcagccaggaagaacatggacacggtatgttcacacacacggcgctcggccc

SEQ ID NO: 848212 - DNA, 120 bp, Artificial Sequence
  ENSG00000284703_6 (sequence is synthesized)
accactcgcccacgaacatttttcacgccactcagccaaaggcaaatgcctgccctacgcaagaccagctcagaaatccatgacttccaaagttggctctgtgattatcagtgcgtgcca

SEQ ID NO: 848213 - DNA, 120 bp, Artificial Sequence
  ENSG00000284703_7 (sequence is synthesized)
aggagcctgtgtctccctgagatctgaaaccttggcaggaagctgagatgagagattgttgcagggatggtgaagaactggtatcctttgcaagaaaaatactaactggtggctccgccg

SEQ ID NO: 848214 - DNA, 120 bp, Artificial Sequence
  ENSG00000284703_8 (sequence is synthesized)
tgcttcatttctggcagagccctgacttggatgcactctgactgtcgaacaatagccctaaatgatagaaggttctgaagtctcacccgtgtggcaggggcacatttgatccaggttccc

SEQ ID NO: 848215 - DNA, 120 bp, Artificial Sequence
  ENSG00000284703_9 (sequence is synthesized)
atggctgcacgtggctccagcatgatcagccacgtttcacctgcacattctttctctgatggccggcacccggctgcctccaatgctctcccacgtacgttctccacacggaacagcctc

SEQ ID NO: 848216 - DNA, 120 bp, Artificial Sequence
  ENSG00000284703_10 (sequence is synthesized)
aaacccgtggaccgcggcagatcccatggaatgcctctgggttgtatactcagcagcgtaacctctggatcatagcatcaggagccccagatccttctggaaaggctgaagcatccacac

SEQ ID NO: 848217 - DNA, 120 bp, Artificial Sequence
  ENSG00000284703_11 (sequence is synthesized)
tccatcagccaccatgaacttgcctgcagaacccatccaggccaacatttggcttaaccagctttttaactgtttgccagtccaacagctggactgtttgccagtccaacagctggaaag

SEQ ID NO: 848218 - DNA, 120 bp, Artificial Sequence
  ENSG00000284703_12 (sequence is synthesized)
tggcattgtgttctagttctcatgtgtgtgattactaatgaccttgagcttctctttatatgcatactagctttggggtttttctttctgtcatctgtccgtatcccttgcccattcttc

SEQ ID NO: 848219 - DNA, 120 bp, Artificial Sequence
  ENSG00000284703_13 (sequence is synthesized)
tgctgcggttgctctccttgtctttttgattggctggagtcccttgttaatccctcatcaactattaacattgcaaatatcttttctcatttgttcagctgtgcattaactttgtccatc

SEQ ID NO: 848220 - DNA, 120 bp, Artificial Sequence
  ENSG00000284703_14 (sequence is synthesized)
ttgtctttcatttaacaaaaatctctaactctgacataatgaaatgtgtcaatgtgttaccctatggtttgtgctttcagatttttatttaagacattcctgcttataagtaacaaagat

SEQ ID NO: 848221 - DNA, 120 bp, Artificial Sequence
  ENSG00000284703_15 (sequence is synthesized)
ttttctcctgtatattcttttaactttttcttttgctactaggactttaatttaactagaatccagctgtgtatatggtgttaggtagaattcacggtttttaaaaaaaatgttttatca

SEQ ID NO: 848222 - DNA, 120 bp, Artificial Sequence
  ENSG00000284703_16 (sequence is synthesized)
ttaggtagaattcacggtttttaaaaaaaatgttttatcacagattagtactgctatggtttgaatgattatccacttcaaaactcatattgaaattcaggctgggcgcagtggctcaca

SEQ ID NO: 848223 - DNA, 60 bp, Artificial Sequence
  ENSG00000284703_17 (sequence is synthesized)
aaaaaagaaaaaaaaaaagggaaggaaggaagaaatttaattgtcatggacacagtatta

SEQ ID NO: 848224 - DNA, 120 bp, Artificial Sequence
  ENSG00000284703_18 (sequence is synthesized)
ttctgtcaaaaaaagaaaaaaaaaaagggaaggaaggaagaaatttaattgtcatggacacagtattaagacgtaggaccaggttaggcattgtggctcacacctgtaatcttagcactt

SEQ ID NO: 848225 - DNA, 120 bp, Artificial Sequence
  ENSG00000284703_19 (sequence is synthesized)
gcctgggcaacacagtgaaaccccatcttcaccaaaacaataaaaaattagctgggtgtggtagagcacacctgtggtcccggctactccagaagctgagatggaaggatcacttgaacc

SEQ ID NO: 848226 - DNA, 85 bp, Artificial Sequence
  ENSG00000284703_20 (sequence is synthesized)
atctttaaaaaaaaaaaaaaaaaaaggtctgggacctttggaggtgattaggcaatgagtgctcatccctcttgagtgggattcg

SEQ ID NO: 848227 - DNA, 120 bp, Artificial Sequence
  ENSG00000284703_21 (sequence is synthesized)
gattaggcaatgagtgctcatccctcttgagtgggattcgtgtttttataaaaggacaagttcatccccttcttgccctcctgccttctgccatgggacaatgcagcaagaaggccctca

SEQ ID NO: 848228 - DNA, 120 bp, Artificial Sequence
  ENSG00000284703_22 (sequence is synthesized)
ccagatgtcagcaccttgaccttagactttccagcgtccagaactgtgagaaaatacatttctgtttgtcataaattacctaatctcaagtattctgttgtagagcacaaaacagatgaa

SEQ ID NO: 848229 - DNA, 120 bp, Artificial Sequence
  ENSG00000284703_23 (sequence is synthesized)
gattgatactgagatttatcaaatgctttttctgcattgattgagataaaatatatttctttaatctattacaatagtgaattatattgagagattgttagatattcctggatgaactct

SEQ ID NO: 848230 - DNA, 80 bp, Artificial Sequence
  ENSG00000284703_24 (sequence is synthesized)
actccatttataaataaatgggtctatatattttttaattcctgttgtccctatttgattttgaaatccagattacatga

SEQ ID NO: 848231 - DNA, 120 bp, Artificial Sequence
  ENSG00000284703_25 (sequence is synthesized)
cctgttgtccctatttgattttgaaatccagattacatgagcctcacaaaatgagccagacagtttccattcattttctaattttccaaatatcttgtataaaatagaaattaaccattc

SEQ ID NO: 848232 - DNA, 120 bp, Artificial Sequence
  ENSG00000284703_26 (sequence is synthesized)
ctagaaaatattatagaaatctccgaaaacaattatccagacttggatttttttggtgcctttgactgccatttaacttctttcacatgcattcatctattcaagttatctgtcttgtct

SEQ ID NO: 848233 - DNA, 81 bp, Artificial Sequence
  ENSG00000284703_27 (sequence is synthesized)
tttcacatgcattcatctattcaagttatctgtcttgtctttcacaagtttggcattttatgctttttataagaatttgtc

SEQ ID NO: 848234 - DNA, 85 bp, Artificial Sequence
  ENSG00000284703_28 (sequence is synthesized)
acccggaaggcggaggttgcggtgagcagagattgtgccattttgcactccagcctgggtaacaggaattcatccatgtcatcta

SEQ ID NO: 848235 - DNA, 120 bp, Artificial Sequence
  ENSG00000284703_29 (sequence is synthesized)
tctaagtatcaaatttgttaaatatgcctatgcataataccaattaattatcttatttattccccctcttgccctcctgccttctgccatgggataatgcagcaagaaggccctcaccag

SEQ ID NO: 848236 - DNA, 120 bp, Artificial Sequence
  ENSG00000284703_30 (sequence is synthesized)
atcccatttttattggtctttccagaagtctgtctagcatattaaattttttaaaccagattttgattttgttcatcctctgtaggttttattcattctatctgtttctactcttatatt

SEQ ID NO: 848237 - DNA, 120 bp, Artificial Sequence
  ENSG00000284703_31 (sequence is synthesized)
tttcagctcctttcttatgttttctgggagtggagttggataggtgttgctctcttgctctttttccagctgcttgtgctaaatagctggctcatttgtttttcccatttgttgtttcct

SEQ ID NO: 848238 - DNA, 120 bp, Artificial Sequence
  ENSG00000284703_32 (sequence is synthesized)
gatgaacgcattataatctttcaatatccctttaagagctaccttggctttgcccgaaggcatgtcactgatttgggcaggtcacattgcgtatacatagaggaagtgctcacataagta

SEQ ID NO: 848239 - DNA, 61 bp, Artificial Sequence
  ENSG00000284703_33 (sequence is synthesized)
gtcacattgcgtatacatagaggaagtgctcacataagtagagtactcactctaagctgga

SEQ ID NO: 848240 - DNA, 120 bp, Artificial Sequence
  ENSG00000284703_34 (sequence is synthesized)
tctatgtacttcctaatttccttgatcatttccaagggctatccataaatatattaattactttccaaaatattggagttgttaaaaaaaattgttttgttaattttaatgtcattgatt

SEQ ID NO: 848241 - DNA, 120 bp, Artificial Sequence
  ENSG00000284703_35 (sequence is synthesized)
tgtgattagagaatgcagtttattttgtattaattattagaactttattgagacttccttcatggctcagtgtctggcctattttggtaaatggtgtgtgcgtgcatgggggaaaggcat

SEQ ID NO: 848242 - DNA, 120 bp, Artificial Sequence
  ENSG00000284703_36 (sequence is synthesized)
agcctctgtctgatgaatggtaagttctctacatatctcatatcttcagcttactcattgtattgatcaagacttcagtatctgttttctctgttcgatcattaaaagctccaactacaa

SEQ ID NO: 848243 - DNA, 120 bp, Artificial Sequence
  ENSG00000284702_0 (sequence is synthesized)
agggctgaggcagtgaagacagcaggagctactgcttttacatctctctccaggacaagaaagagggcatcttcaccctgccctgggtggggaatgtgcaggaactgtgtgagccaggcc

SEQ ID NO: 848244 - DNA, 120 bp, Artificial Sequence
  ENSG00000284702_1 (sequence is synthesized)
ggcctgggcggcacacacagatggagctgagctgttctctcctttctctggaagaatcaaaacccagatggagtctctctctgtagcccagactggaatgcaatggcatgatctcggctc

SEQ ID NO: 848245 - DNA, 90 bp, Artificial Sequence
  ENSG00000284702_2 (sequence is synthesized)
ctcaaacccctgggctcaagtgatcctccaatttcagcttcccaaagtgtgctgggatttacagatgtgagccactgcacccagcctgta

SEQ ID NO: 848246 - DNA, 90 bp, Artificial Sequence
  ENSG00000284702_3 (sequence is synthesized)
tttggttttgttttttgtttttgagacagagtctctctgtactgactcactgcaacctcccatctcctgggttcaagcgattcttgtgcc

SEQ ID NO: 848247 - DNA, 120 bp, Artificial Sequence
  ENSG00000284702_4 (sequence is synthesized)
gtctggcctgtatgtttaattgaacttaataatagtcataattttttcagagcctccggtgaaccactgacttaactaatcatcaagtttaatcctcacaacaaccttgtatcatagcta

SEQ ID NO: 848248 - DNA, 120 bp, Artificial Sequence
  ENSG00000284702_5 (sequence is synthesized)
ctgtttttctttctacttaatataagagggaagtgtgactggtgtaaggtcatggggctagcaagtggctaaatggtaagctgaaaagcagcttggacctctcttttaaactcgagactt

SEQ ID NO: 848249 - DNA, 120 bp, Artificial Sequence
  ENSG00000284702_6 (sequence is synthesized)
gtatgaccagctgattatttgacacgtccccttaaatgtccaatgggcacctcaaacttaacatgtccaggaccaagttcctgctatccactccctgacccctaacctgttcagttaatt

SEQ ID NO: 848250 - DNA, 120 bp, Artificial Sequence
  ENSG00000284702_7 (sequence is synthesized)
gccactgcatctttcaactgctcaggccaaaaatcttgagctatccttaacttctctttctcatacaccctagcttcaatccatcaacacacttagtgaggtctaccttcaaaatatctc

SEQ ID NO: 848251 - DNA, 120 bp, Artificial Sequence
  ENSG00000284702_8 (sequence is synthesized)
cagcattgaccccttccaactctctccgctgttcatgttctggcctaagccaccaacagcctcctcactgctcttcaggtttctgcctttgcttcccctaatctctcaacagattcagat

SEQ ID NO: 848252 - DNA, 120 bp, Artificial Sequence
  ENSG00000284702_9 (sequence is synthesized)
atgtcacccttctgcctgagcactgcattgggtaaatggatgagtaaaagtccaagtgtttaccctgagctacaaggcgttatctgaactggctttttttgagatggagtctcactctgc

SEQ ID NO: 848253 - DNA, 87 bp, Artificial Sequence
  ENSG00000284702_10 (sequence is synthesized)
cagtctagactggctggacaacaggtgcatgccaccatgctaatttttaaaatgtatttgtacaaacaaggctgcactatgttgcct

SEQ ID NO: 848254 - DNA, 120 bp, Artificial Sequence
  ENSG00000284702_11 (sequence is synthesized)
ccaccatgctaatttttaaaatgtatttgtacaaacaaggctgcactatgttgcctagggtggtcttgagcccctgggctcaagtgaacctcccaccttgggctcccaaagtgctgggat

SEQ ID NO: 848255 - DNA, 120 bp, Artificial Sequence
  ENSG00000284700_0 (sequence is synthesized)
aaaagctccactgcgtgcctctgggaggggagggggcgcgccaggaaaggagtggaaaaaagtgggcgaggaggagcgttgaaaatttcctgacaagtagtttccgtgcgcccgagagcg

SEQ ID NO: 848256 - DNA, 120 bp, Artificial Sequence
  ENSG00000284700_1 (sequence is synthesized)
tgtgaattgctcctaattaccgtgtccggtgcgcctctctgcgtagacttgtgtaacctctcggcttctggggcgccggctcggctgcaccgctcttactggcctggggcgcttggcaaa

SEQ ID NO: 848257 - DNA, 120 bp, Artificial Sequence
  ENSG00000284700_2 (sequence is synthesized)
gccgagcttcccaagtggctctggagccctgaggcgggatggggggcagattctcttaaactcaggacgcgcatcggtctgtccgaccttcccggcaagagacaaagtcactgctgggag

SEQ ID NO: 848258 - DNA, 120 bp, Artificial Sequence
  ENSG00000284700_3 (sequence is synthesized)
gagaataaagaaaattcgtttaaataatgaggaaaatgagcgttcctgtcgttctccctccactcttgaccgtgcgtctctgcgttgctctttcgaacctccaggccggcgggaatctgg

SEQ ID NO: 848259 - DNA, 120 bp, Artificial Sequence
  ENSG00000284700_4 (sequence is synthesized)
gcgcgcagactcggcccgggtcgtcgcggcctcaggacgcagcccattccgcctggcacgactactgggccgcgtcttgtcagtctatcagcttctgagcccaggaatgggggtggggga

SEQ ID NO: 848260 - DNA, 120 bp, Artificial Sequence
  ENSG00000284700_5 (sequence is synthesized)
aggacggtgcgactaacgggcccccacccgaagaccgcagaacctggcgccccggaagagccctggaagatgcccaccgggaggctgaggctggagggaggagtgggtgggggtgattcg

SEQ ID NO: 848261 - DNA, 120 bp, Artificial Sequence
  ENSG00000284700_6 (sequence is synthesized)
ctggaggaccgggcggagagcttccagaaagttcaccaggccccggcgcgagggcgctccgacacggacaaggtctatgatagcgataaaaagctggttactcgctcccagaaaatgcca

SEQ ID NO: 848262 - DNA, 78 bp, Artificial Sequence
  ENSG00000284707_0 (sequence is synthesized)
agatcgcttgagcctgggacccgggtgacaaagcgagatcctgtctctaaattaaattaaaaacaataccaccaaaac

SEQ ID NO: 848263 - DNA, 120 bp, Artificial Sequence
  ENSG00000284707_1 (sequence is synthesized)
tcctgtctctaaattaaattaaaaacaataccaccaaaacaacaacaggttgggcggtggtgtctcacgcctataatcggagcactttgggaggtcgaaatgggagaccatgtgaagcca

SEQ ID NO: 848264 - DNA, 120 bp, Artificial Sequence
  ENSG00000284707_2 (sequence is synthesized)
tgggagaccatgtgaagccaggagttcgagagcagcctgggcaacacagaccccacctctacaaaaaataaaactggccttgatggcgcgccctgtaatcctagctacttgggaggctga

SEQ ID NO: 848265 - DNA, 120 bp, Artificial Sequence
  ENSG00000284707_3 (sequence is synthesized)
cccagaggttgaggctgcagtgagctgagatcccgccgctacactccagactggatgacaaactgagatcctatcaaaaaacaaacaaacaaacaaacagtgccccactcagtttttcct

SEQ ID NO: 848266 - DNA, 120 bp, Artificial Sequence
  ENSG00000284707_4 (sequence is synthesized)
gaaacgcgcaaccctcgcccgtagccaggagaaaactccgcgagccagcaaaacacaaactcggccgggaaacagacaacaaggccaccctggggtgccagaagaggacgctgcgaggcg

SEQ ID NO: 848267 - DNA, 120 bp, Artificial Sequence
  ENSG00000284707_5 (sequence is synthesized)
ggttcttcttcctggtcggcggcgagcgcttccggggtggtggcgagggaggcggaagtgcggtgttctagcaggtggctgctttctctgggctggctgtgggaggctcccgaggtgggg

SEQ ID NO: 848268 - DNA, 120 bp, Artificial Sequence
  ENSG00000284707_6 (sequence is synthesized)
acccggccgggatggctgcagcggcggccggggctgggagcgggccctcggcggcccaggagaagcagttcctgccggcgctgctgagtttcttcatctacaacccgcgcttctggccgc

SEQ ID NO: 848269 - DNA, 120 bp, Artificial Sequence
  ENSG00000284707_7 (sequence is synthesized)
ctgctgagtttcttcatctacaacccgcgcttctggccgcgggaaggagagacctcccagtgccaagtgtataagcgtgtccagaattggtgggtctcactgacttcaagaatgaagccg

SEQ ID NO: 848270 - DNA, 120 bp, Artificial Sequence
  ENSG00000284707_8 (sequence is synthesized)
gttttgagcagcctcggttttcccaccacctccaaatcatgcaagacacagggcagagcccccggagccatggccagcccttccggcagctccaaagccactggcaagccccgaggcagg

SEQ ID NO: 848271 - DNA, 120 bp, Artificial Sequence
  ENSG00000284707_9 (sequence is synthesized)
gggaggaggacgacgtccctcccgaagagaagaggctgcggctcttgctggaggggggaagcgcacagccccaggactgcgaggacggggaggacgcgccgcggccgggcagggaggaga

SEQ ID NO: 848272 - DNA, 120 bp, Artificial Sequence
  ENSG00000284707_10 (sequence is synthesized)
cacccagacaggtggcgacggcagaggacctctgcctcagtctcctcttctggaaagtgggattggaaaccacatctgcttctctcccaggactgctaggcagacaagattagatggcag

SEQ ID NO: 848273 - DNA, 120 bp, Artificial Sequence
  ENSG00000284707_11 (sequence is synthesized)
gatggcaggagccaggtcggtataagcgccagcggcctcgccgcccgtcaagctgtccacatccctggcctcagcccgccacatcaccctgacctgcttacgcccagattttcttcaatc

SEQ ID NO: 848274 - DNA, 120 bp, Artificial Sequence
  ENSG00000284707_12 (sequence is synthesized)
acatctgaataaatcacttgaagaaagcttatagcttcattgcaccatgtgtggcatttgggcgctgtttggcagtgatgattgcctttctgttcagtgtctgagtgctatgaagattgc

SEQ ID NO: 848275 - DNA, 120 bp, Artificial Sequence
  ENSG00000284707_13 (sequence is synthesized)
acacagaggtccagatgcattccgttttgagaatgtcaatggatacaccaactgctgctttggatttcaccggttggcggtagttgacccgctgtttggaatgcagccaattcgagtgaa

SEQ ID NO: 848276 - DNA, 120 bp, Artificial Sequence
  ENSG00000284707_14 (sequence is synthesized)
gaaatatccgtatttgtggctctgttacaatggtgaaatctacaaccataagaagatgcaacagcattttgaatttgaataccagaccaaagtggatggtgagataatccttcatcttta

SEQ ID NO: 848277 - DNA, 120 bp, Artificial Sequence
  ENSG00000284707_15 (sequence is synthesized)
caatttgtatgttggatggtgtgtttgcatttgttttactggatactgccaataagaaagtgttcctgggtagagatacatatggagtcagacctttgtttaaagcaatgacagaagatg

SEQ ID NO: 848278 - DNA, 120 bp, Artificial Sequence
  ENSG00000284707_16 (sequence is synthesized)
gatttttggctgtatgttcagaagctaaaggtcttgttacattgaagcactccgcgactccctttttaaaagtggagccttttcttcctggacactatgaagttttggatttaaagccaa

SEQ ID NO: 848279 - DNA, 120 bp, Artificial Sequence
  ENSG00000284707_17 (sequence is synthesized)
atggcaaagttgcatccgtggaaatggttaaatatcatcactgtcgggatgtacccctgcacgccctctatgacaatgtggagaaactctttccaggttttgagatagaaactgtgaaga

SEQ ID NO: 848280 - DNA, 120 bp, Artificial Sequence
  ENSG00000284707_18 (sequence is synthesized)
acaacctcaggatcctttttaataatgctgtaaagaaacgtttgatgacagacagaaggattggctgccttttatcagggggcttggactccagcttggttgctgccactctgttgaagc

SEQ ID NO: 848281 - DNA, 120 bp, Artificial Sequence
  ENSG00000284707_19 (sequence is synthesized)
agctgaaagaagcccaagtacagtatcctctccagacatttgcaattggcatggaagacagccccgatttactggctgctagaaaggtggcagatcatattggaagtgaacattatgaag

SEQ ID NO: 848282 - DNA, 120 bp, Artificial Sequence
  ENSG00000284707_20 (sequence is synthesized)
tcctttttaactctgaggaaggcattcaggctctggatgaagtcatattttccttggaaacttatgacattacaacagttcgtgcttcagtaggtatgtatttaatttccaagtatattc

SEQ ID NO: 848283 - DNA, 120 bp, Artificial Sequence
  ENSG00000284707_21 (sequence is synthesized)
ggaagaacacagatagcgtggtgatcttctctggagaaggatcagatgaacttacgcagggttacatatattttcacaaggctccttctcctgaaaaagccgaggaggagagtgagaggc

SEQ ID NO: 848284 - DNA, 120 bp, Artificial Sequence
  ENSG00000284707_22 (sequence is synthesized)
ttctgagggaactctatttgtttgatgttctccgcgcagatcgaactactgctgcccatggtcttgaactgagagtcccatttctagatcatcgattttcttcctattacttgtctctgc

SEQ ID NO: 848285 - DNA, 120 bp, Artificial Sequence
  ENSG00000284707_23 (sequence is synthesized)
caccagaaatgagaattccaaagaatgggatagaaaaacatctcctgagagagacgtttgaggattccaatctgatacccaaagagattctctggcgaccaaaagaagccttcagtgatg

SEQ ID NO: 848286 - DNA, 120 bp, Artificial Sequence
  ENSG00000284707_24 (sequence is synthesized)
gaataacttcagttaagaattcctggtttaagattttacaggaatacgttgaacatcaggttgatgatgcaatgatggcaaatgcagcccagaaatttcccttcaatactcctaaaacca

SEQ ID NO: 848287 - DNA, 120 bp, Artificial Sequence
  ENSG00000284707_25 (sequence is synthesized)
aagaaggatattactaccgtcaagtctttgaacgccattacccaggccgggctgactggctgagccattactggatgcccaagtggatcaatgccactgacccttctgcccgcacgctga

SEQ ID NO: 848288 - DNA, 120 bp, Artificial Sequence
  ENSG00000284707_26 (sequence is synthesized)
cccactacaagtcagctgtcaaagcttaggtggtctttatgctgtaatgtgaaagcaaatatttcttcgtgttggatggggactgtgggtagataggggaacaatgagagtcaactcagg

SEQ ID NO: 848289 - DNA, 120 bp, Artificial Sequence
  ENSG00000284707_27 (sequence is synthesized)
ctaacttgggtgtgaaaaaaataaaagtcctaaatctaaaccattgctgtagtcatttatgttcatgcagtctcttcataagaggtaactagaactgttttgctgtatcacagtaaagtg

SEQ ID NO: 848290 - DNA, 120 bp, Artificial Sequence
  ENSG00000284707_28 (sequence is synthesized)
gagggtaagctaggaaaagggaaaatgatcagatgtctgcaagaactcacagccctctcctggcagagctgctttagatgacatttgcatcttgtgcccgtgtggcttccttccagtcct

SEQ ID NO: 848291 - DNA, 120 bp, Artificial Sequence
  ENSG00000284707_29 (sequence is synthesized)
tgcctcatcttagggacgtcatcaaaggactacactatttttgttctgcctacattcctaacagctgcctaggcagactcagacttgaatcttctataggagttcatcacagctctattt

SEQ ID NO: 848292 - DNA, 120 bp, Artificial Sequence
  ENSG00000284707_30 (sequence is synthesized)
tgcaagatagtagttcatttttttctcttttatgttgagccaaagccacttctggagacttgtcctagagcaggggtcaggctttttttgaatttttaatttgtttttaataaagagcca

SEQ ID NO: 848293 - DNA, 86 bp, Artificial Sequence
  ENSG00000284707_31 (sequence is synthesized)
gaaaacacaaacaatgagccgggcatggtgacgcatgcctgtagtctcagctactcagagggctgaggcccaagaagtgcttgaac

SEQ ID NO: 848294 - DNA, 120 bp, Artificial Sequence
  ENSG00000284707_32 (sequence is synthesized)
ggtgacgcatgcctgtagtctcagctactcagagggctgaggcccaagaagtgcttgaactcgggagacagagcttgcagtgagcccggattttgcctgtgtactccaacctgggcaaca

SEQ ID NO: 848295 - DNA, 120 bp, Artificial Sequence
  ENSG00000284707_33 (sequence is synthesized)
atcacccacctacacacaataggaatctcaggaaggtggaaagtataaagacctcccagtgccaagtgtataagcgtgtccagaattggtgggtctcactgacttcaagaatgaagccgc

SEQ ID NO: 848296 - DNA, 120 bp, Artificial Sequence
  ENSG00000284707_34 (sequence is synthesized)
gaatgaagccgcggaccctcctggtgagtgttacacttcttaaagttggcgtgtctggagttttttccttctgatgttcggatgtgttcgaagcttcttccttctggtggggttcgtggt

SEQ ID NO: 848297 - DNA, 65 bp, Artificial Sequence
  ENSG00000284707_35 (sequence is synthesized)
cctgctgattggtccattttacagagatcctgaatggtgctccccacgtccccactagattagct

SEQ ID NO: 848298 - DNA, 61 bp, Artificial Sequence
  ENSG00000284707_36 (sequence is synthesized)
agagtgtcgattgctctagatacagagtgtcgagtggtgtatttacaatcccttagctaga

SEQ ID NO: 848299 - DNA, 120 bp, Artificial Sequence
  ENSG00000284707_37 (sequence is synthesized)
gccccagctccgccgagaggccgcttgcgccgggtccttcttccccaaatgcaggcagagcccccggagccatggccagcccttccggcagctccaaagccactggcaagccccgaggca

SEQ ID NO: 848300 - DNA, 120 bp, Artificial Sequence
  ENSG00000284707_38 (sequence is synthesized)
cttcacgcctctgcctcagtctcctcttctggaaagtgggattggaaaccacatctgcttctctcccaggactgctaggcagacaagattagatggcaggaaggaaaatacatgtacagc

SEQ ID NO: 848301 - DNA, 120 bp, Artificial Sequence
  ENSG00000284707_39 (sequence is synthesized)
caacttccttgagggttcgttcttttgcatcagggtgtctcaaactgctgcccttaaaacacctgtaagagaatcatccaggcggcttgctcactctgcatgcaggccctttagaatgag

SEQ ID NO: 848302 - DNA, 120 bp, Artificial Sequence
  ENSG00000284705_0 (sequence is synthesized)
gcagtgagaggccctgggtggaacgcgtggccactgggtctgctctgccccagatctccaggccacactttctggactggcctggattagacagcaaagacgtgggaactgcttccagaa

SEQ ID NO: 848303 - DNA, 120 bp, Artificial Sequence
  ENSG00000284705_1 (sequence is synthesized)
ggccagtggagagaacatgtcggtaacagtgtgacaacatggtggttccaagtgacagactcaatttgaaccagacaaggcaaaaagaagactatggctcacggagcccgggtttcaggg

SEQ ID NO: 848304 - DNA, 120 bp, Artificial Sequence
  ENSG00000284705_2 (sequence is synthesized)
acagttgcaaccaggaactccaatgctatcaggaccatctccctcctctctccgtgttggatttatcctttccgcctgcagatttgttccttccagggaccggaaccactgccaccagca

SEQ ID NO: 848305 - DNA, 120 bp, Artificial Sequence
  ENSG00000284705_3 (sequence is synthesized)
acttttggctcagatgttctgtgatctgttgttttccctcagttctgatgggacaaacctcaggggaggaccttccatagtctcagcgtagtgcagtcatgctctcccctgtggctgggg

SEQ ID NO: 848306 - DNA, 120 bp, Artificial Sequence
  ENSG00000284705_4 (sequence is synthesized)
gtggcgtcctctgactggcagccagggctgcatccggagcactctccaggtgaagggctctctctgtggaggaatagatgggcgccattcacatcaacacagcctgcggcggtgtccaac

SEQ ID NO: 848307 - DNA, 120 bp, Artificial Sequence
  ENSG00000284705_5 (sequence is synthesized)
accttcccttcggcacaacggcaccagcctatgtctctgatttgtgaactgactttcagaaatcagggtggcaacttcacccacccctactcttcctgaaatgaagggacagtgtcctag

SEQ ID NO: 848308 - DNA, 65 bp, Artificial Sequence
  ENSG00000284705_6 (sequence is synthesized)
ccacccctactcttcctgaaatgaagggacagtgtcctaggaggaccgcagcgtgtctctccatc

SEQ ID NO: 848309 - DNA, 82 bp, Artificial Sequence
  ENSG00000284705_7 (sequence is synthesized)
cctcctgagtagctgggatgacaggcgcgcgcctccacgcccggctaatttttggagtttctcctgacctcaggtgatctgc

SEQ ID NO: 848310 - DNA, 77 bp, Artificial Sequence
  ENSG00000284705_8 (sequence is synthesized)
gtgcctctccatcttaaattcacctctctgccggttgccttggtgaaagtggattcaaggaaggggtcatcatgaga

SEQ ID NO: 848311 - DNA, 120 bp, Artificial Sequence
  ENSG00000284705_9 (sequence is synthesized)
ccttggtgaaagtggattcaaggaaggggtcatcatgagagagtgcctgagctgaagggcaggagaggagaggaggggtctgagcacctcagcgaggcctcaattaggatcagcaaataa

SEQ ID NO: 848312 - DNA, 120 bp, Artificial Sequence
  ENSG00000284705_10 (sequence is synthesized)
gagattgttgcaaatgttctgcaagatgcattgtatagagcgattcactgtgtgcctgacatttcctgatagccctgaaagctaagcaggggctgcttagcattgcaataaatgtcacca

SEQ ID NO: 848313 - DNA, 120 bp, Artificial Sequence
  ENSG00000284705_11 (sequence is synthesized)
caagactcagagaggggcaggggcattagtgctccacagcgaattggacagctcagaactgggatccatggctcccgattcctccaattccagaggcctcgaatgcccagctaaagcact

SEQ ID NO: 848314 - DNA, 120 bp, Artificial Sequence
  ENSG00000284705_12 (sequence is synthesized)
ggatttgatcctgctgcccctgggaaggattggatgccttctgagtggggaggcattgctgagagacaatagtggacagatgggttgtctttgcctcgtgtcttgttgcccctgggtgag

SEQ ID NO: 848315 - DNA, 120 bp, Artificial Sequence
  ENSG00000284705_13 (sequence is synthesized)
cacgggccctttcggcctatgacacagacatcccggggtctgctcggtgttgtgccctcctcaagtctggatactgaggtgaaccgtgggcccgcctctagattggatgtccccagtcct

SEQ ID NO: 848316 - DNA, 120 bp, Artificial Sequence
  ENSG00000284705_14 (sequence is synthesized)
ggctgcatgtcagagtcaccggagagcagaacaaaagaaagatgcccagcccagctcagggctgtgaaacccactctctacaggcgactccctccgggccagcctggtcctcagggttcc

SEQ ID NO: 848317 - DNA, 120 bp, Artificial Sequence
  ENSG00000284705_15 (sequence is synthesized)
atgaggagatcacaaagtcctcctggaggaggagtctgagaagaacatgctggaagtgtgacttgttatagctgtatttgaggaagcacatgacgagggcagggatgggccacgtgtgtc

SEQ ID NO: 848318 - DNA, 120 bp, Artificial Sequence
  ENSG00000284705_16 (sequence is synthesized)
aaacaccccagcccagacctgctgagctgcacatttccatcccatcccatgccctgtcggaggctcctcacccttcggcagattctaatgatacagcaggccctgccatctccatctgcc

SEQ ID NO: 848319 - DNA, 120 bp, Artificial Sequence
  ENSG00000284705_17 (sequence is synthesized)
atgaattgctaactattgctgcctctgttatagtcattagcaactcaacattaatatcccccacgtccatcactgcagtgattaggatcctggacttgcggggtgcctcactggcggggg

SEQ ID NO: 848320 - DNA, 120 bp, Artificial Sequence
  ENSG00000284705_18 (sequence is synthesized)
ggtgtgagctggatccccagggcctggctgccctgccctgagtgggtggggaaggaaggggacaggccagcttgttaaatctaattacctggctccagacagccggcccgagctcttctg

SEQ ID NO: 848321 - DNA, 120 bp, Artificial Sequence
  ENSG00000284705_19 (sequence is synthesized)
agagccggctctgcccaccgtgtaatcctctgcctgcctctccgccataacgagccggcccgccaccagctgccacgcggctagatggggctgagtttaattgctaccccaaatgtcagc

SEQ ID NO: 848322 - DNA, 120 bp, Artificial Sequence
  ENSG00000284705_20 (sequence is synthesized)
cctttcaaacccacagtatttcatcacttacctttaaagaagaggggaaaaaaatcaatttggatcgtgagttttggcagcaaagcctgcagaaagggctgcccagttcttcaggggagc

SEQ ID NO: 848323 - DNA, 120 bp, Artificial Sequence
  ENSG00000284705_21 (sequence is synthesized)
ggctcttttcattaaaatagctatttttaaaactctctctctccctctctctctctctttaacacgagatgaaaaatcccagctacaagaagaaaccctttcatgaaggaataataatat

SEQ ID NO: 848324 - DNA, 64 bp, Artificial Sequence
  ENSG00000284708_0 (sequence is synthesized)
ttctgtctctaaacccaagctgttaacactggacaaatggcctccctgattcctaggagaggaa

SEQ ID NO: 848325 - DNA, 120 bp, Artificial Sequence
  ENSG00000284708_1 (sequence is synthesized)
aacactggacaaatggcctccctgattcctaggagaggaagggaggaaaaaaagcagagtggggaggaagccagagacccctgaatgcagcttcattcatcaaaggtgaccgcagaaagg

SEQ ID NO: 848326 - DNA, 120 bp, Artificial Sequence
  ENSG00000284708_2 (sequence is synthesized)
caggggaaggtcccagggggcctcggatggacatggtcaggggaaggtcccagggggcctcggatggacatggtcaggtggctgggaacttccacagcgttcccctccacgccttagaaa

SEQ ID NO: 848327 - DNA, 120 bp, Artificial Sequence
  ENSG00000284708_3 (sequence is synthesized)
catcacctctgtgagtgattccaagctctttgcaccctcctccttggtgccagccccctccttcattctggcagttctccctaacatctacctgcaatatttcctgctgcatgaccagca

SEQ ID NO: 848328 - DNA, 120 bp, Artificial Sequence
  ENSG00000284708_4 (sequence is synthesized)
gaccccagtggcaaccctagcgaatggccctcagccctgttccatcctgtctgcagagctcctagcaagcagctcctggctccaggcagtaatcctactgacaattaattggcttttgtt

SEQ ID NO: 848329 - DNA, 120 bp, Artificial Sequence
  ENSG00000284708_5 (sequence is synthesized)
ggaggagaatgaataccatctcatcttaatcttcttcattattctccttgttcagcagagtcaacacaagattaggtttaatttacggtggtgggaaatagcaaagtcattatgcaccag

SEQ ID NO: 848330 - DNA, 120 bp, Artificial Sequence
  ENSG00000284708_6 (sequence is synthesized)
gaactcaggattggatctgtctgggtgttctgtgttcactgcaggcctggcaccatcaagcaaggcccagggctctgccgaggtggagatggacttgggggggttctagactcccagacc

SEQ ID NO: 848331 - DNA, 120 bp, Artificial Sequence
  ENSG00000284708_7 (sequence is synthesized)
agctctggaggggagtccagccatccaaagcccttgctatgtggcctggggtgagacccaggggcctcccaggccttggagacctagcctcctaaatgtttctcatacagcctctggggt

SEQ ID NO: 848332 - DNA, 120 bp, Artificial Sequence
  ENSG00000284708_8 (sequence is synthesized)
cagagcagcaccaaatcccagcccctgaagagccaggctcagccccaaacaatgggaagagaccaggacttggattcaaattcgacttttcctccgcagagaaatgggcaggacagacac

SEQ ID NO: 848333 - DNA, 120 bp, Artificial Sequence
  ENSG00000284708_9 (sequence is synthesized)
agcttggggacagccttgacaatgctgacacctagtggtacttggaggaactggcccttccctccctctatgtgcacaattgaatataccatgtccacaactgaatacaccgcgtacaca

SEQ ID NO: 848334 - DNA, 69 bp, Artificial Sequence
  ENSG00000284708_10 (sequence is synthesized)
tgaatataccatgtccacaactgaatacaccgcgtacacaaaaatccagatttttaaggtaaagaaacc

SEQ ID NO: 848335 - DNA, 77 bp, Artificial Sequence
  ENSG00000284708_11 (sequence is synthesized)
gaaatcagaaaggggaagagggacttttccattaccaaattgttaaacatatgtttccactgagaaatctaagagga

SEQ ID NO: 848336 - DNA, 120 bp, Artificial Sequence
  ENSG00000284708_12 (sequence is synthesized)
aattgttaaacatatgtttccactgagaaatctaagaggaaattcattttaccttccctgaccacttagccaaaatagcccccaaacacctagcatccctcctactgcctggggtaatgg

SEQ ID NO: 848337 - DNA, 120 bp, Artificial Sequence
  ENSG00000284708_13 (sequence is synthesized)
tacgcacagacactctggagcccagtgtcctcgtcatctccaactctttctgctcttcctcacctgggagcccccagcttctgtccttgctctgtcccccagcatgtggccccttctgat

SEQ ID NO: 848338 - DNA, 73 bp, Artificial Sequence
  ENSG00000284708_14 (sequence is synthesized)
ctgtccttgctctgtcccccagcatgtggccccttctgattctgtaccccagcaaagtcattaaaacttaagc

SEQ ID NO: 848339 - DNA, 120 bp, Artificial Sequence
  ENSG00000189419_0 (sequence is synthesized)
atgccggccgccccctgctggaggggatgtggcatctcacgggctgccagggagcggggttggctactcctgcaaccagcgtgaagagggtctcaggggaggctgtggtgggatccccca

SEQ ID NO: 848340 - DNA, 120 bp, Artificial Sequence
  ENSG00000189419_1 (sequence is synthesized)
cgtgcccttgttcctctcaccgttacctctggatgcctcggggcaaaggccttcttccacctatagacagagtctacgcaggggtcttggaacccgggcacaccagtccccagctaacga

SEQ ID NO: 848341 - DNA, 120 bp, Artificial Sequence
  ENSG00000189419_2 (sequence is synthesized)
aatccccgagttgggggatttgagagggtcacgtttggcccaagaacccgcagtcctctttggtcttcggccctctatttctaagcgtgggcttctggcacggcggctctgggcacagcc

SEQ ID NO: 848342 - DNA, 120 bp, Artificial Sequence
  ENSG00000189419_3 (sequence is synthesized)
catgctgctttcgggctgggtggtttcaacgacgacaacaattatcacagtgacggtgaccttcaccccaacaggactgctgtgtgtgaagcactcaagagggcccctacaaccaacctg

SEQ ID NO: 848343 - DNA, 120 bp, Artificial Sequence
  ENSG00000189419_4 (sequence is synthesized)
ccaggagtcggctcctgaaaacagggtcggaaaaggtcagtgcccatcagaatcgagctgtcggcaaaaagctggagaggttaggagctttgtctatctcaagggtaacaaactgctttg

SEQ ID NO: 848344 - DNA, 120 bp, Artificial Sequence
  ENSG00000189419_5 (sequence is synthesized)
accctgagggctctgaagacgactttccctcaccgcagctctcaagacaacagggatcagactcagaaagacactgcctgtataaggctcttgtttgtcttgtttttaattcctgccctc

SEQ ID NO: 848345 - DNA, 120 bp, Artificial Sequence
  ENSG00000189419_6 (sequence is synthesized)
tgcctccagatctcagtcctctatctgtgaaacggaattcggccttgcctgtccacgaaatgaagacaaggcatctcgtgtgtgttaagatgaaacaagatcttagcaagagagtaatga

SEQ ID NO: 848346 - DNA, 120 bp, Artificial Sequence
  ENSG00000189419_7 (sequence is synthesized)
tcttagcaagagagtaatgatttcttttttaaaacattttttactgtagtaaaatgtactataacgtaaaattaccatttcaatcatttgtaagttcagtggcattaagtacattcacat

SEQ ID NO: 848347 - DNA, 80 bp, Artificial Sequence
  ENSG00000189419_8 (sequence is synthesized)
ggcattaagtacattcacattgtcgggcagctgtcagaggtgttcgaaccagagcgactccatcttgaacaggtgctgcg

SEQ ID NO: 848348 - DNA, 120 bp, Artificial Sequence
  ENSG00000189419_9 (sequence is synthesized)
gggaggcaggttggttaccccaggaaccaatgaattgcatctcaggggaggttttgccagatacaggtcacaaagaccctgctgataaaacaagatgcggtaaagaagctggccaaaacc

SEQ ID NO: 848349 - DNA, 90 bp, Artificial Sequence
  ENSG00000189419_10 (sequence is synthesized)
tattagcatggcaaaagacactcccgctagtgccatggcagcttacaaatgccatgacaacatctacttagttaaatttgcatactatga

SEQ ID NO: 848350 - DNA, 120 bp, Artificial Sequence
  ENSG00000189419_11 (sequence is synthesized)
gccatgacaacatctacttagttaaatttgcatactatgaatatgagtatgcaaatacctgttggagtccccgctttcaaagctttggggtacacatccagaaacggaattgctggatca

SEQ ID NO: 848351 - DNA, 120 bp, Artificial Sequence
  ENSG00000189419_12 (sequence is synthesized)
tagggtaaatctattttggaggaatagtcgtactgttttccacagtgactgtaccattttacattcccacaaaattatttctttctatctgccttcccccactagatagaacacagggaa

SEQ ID NO: 848352 - DNA, 120 bp, Artificial Sequence
  ENSG00000189419_13 (sequence is synthesized)
gttactttttcgtttctaaatccccagcaccaggaacagtgtctagttcataacagagctctatagagaactgtggggaaagaagtgcaatttatatgctgctgcctcttcatttggcat

SEQ ID NO: 848353 - DNA, 120 bp, Artificial Sequence
  ENSG00000189419_14 (sequence is synthesized)
ctcagtacgtggcacacagaaagtaggcactgaagaagggttgaaggacctaatgagtacataaatgaatgcagttaccattgctttttccttggtctagactgaggacagacatttttg

SEQ ID NO: 848354 - DNA, 120 bp, Artificial Sequence
  ENSG00000189419_15 (sequence is synthesized)
taaattaagctacttagttaaatgtagacctctggccagttttgctcatccagaagtttcactttaatgccacttcaaagatactgttttctgtaaatcagatcataattgtgatgagaa

SEQ ID NO: 848355 - DNA, 120 bp, Artificial Sequence
  ENSG00000189419_16 (sequence is synthesized)
tgatgtggggatgtgtcctggactctccccatcccccacctcacagcctaatgtataacgcacattttattcaggaccattttggatgtgtaggatctgctccagaacacaggataatgg

SEQ ID NO: 848356 - DNA, 120 bp, Artificial Sequence
  ENSG00000189419_17 (sequence is synthesized)
gcctcttttctggggatggtgtggttccatcattagatagcaggtgtgtcatctgcaggtactggtctcactattcaaccactggttgaaagattggttcaagatcaactctttgaaaaa

SEQ ID NO: 848357 - DNA, 120 bp, Artificial Sequence
  ENSG00000189419_18 (sequence is synthesized)
tcaaagtattacttttacaaatgcttttttgatatttctcaaccaattaaccttgaaaagttcaccatgaagttgaattgcctaaacttatacattgtatgggcactgagatgcaatttt

SEQ ID NO: 848358 - DNA, 120 bp, Artificial Sequence
  ENSG00000189419_19 (sequence is synthesized)
tagggctgtgtgggcatcagcgatgcctgttttcaatacattgtagctatgctcagtgtcatgggccttgtagggctgacctctttttgtccaagcattgaagccaatctaaaactcttt

SEQ ID NO: 848359 - DNA, 120 bp, Artificial Sequence
  ENSG00000189419_20 (sequence is synthesized)
gaagcacatgccagcctggctctgttttgtgcttgttcacagtatatggctttggccttgttcagcatcagggagtagctgttccttgggtcatgcatggagttggatttaaccctggct

SEQ ID NO: 848360 - DNA, 120 bp, Artificial Sequence
  ENSG00000189419_21 (sequence is synthesized)
ttcagctggccagtcctcatcaggagcttgggcaggagaaatagtactctggtgaatggtctgaagacattagatcatagatgaccttggctgcaagcaactaaatccagaccacaacag

SEQ ID NO: 848361 - DNA, 120 bp, Artificial Sequence
  ENSG00000189419_22 (sequence is synthesized)
tttatccaaatagggttaaccaaacaagtacaatgtgtacccaaatgatatcagtgtcccatgatccttccatcatccactggatgatttcttaattcaaagtcaaacaaaaacaaaagc

SEQ ID NO: 848362 - DNA, 120 bp, Artificial Sequence
  ENSG00000189419_23 (sequence is synthesized)
agatttgaaacattctcatccatccttgaaactggatcacatgccatggtctcgctctttgaagtggtcaactgaacagctggatacatggtctggagctgggaggaggagtgccttagt

SEQ ID NO: 848363 - DNA, 120 bp, Artificial Sequence
  ENSG00000189419_24 (sequence is synthesized)
ccattcctgctgctatgacaaaatagcttagacttggtaatttataaataatagacatttatttctcattgttctggtggctgggaagtccaaggtcaaggtgccggcagattcagtgtc

SEQ ID NO: 848364 - DNA, 120 bp, Artificial Sequence
  ENSG00000189419_25 (sequence is synthesized)
tggtaagctctctgtgtccaggatgacaccttgttgctgcatcttctgaagaggacaaatgctgtgtcctcatatggcagaagagatgcagggcaaaagggccaagaagccctcttgagc

SEQ ID NO: 848365 - DNA, 120 bp, Artificial Sequence
  ENSG00000189419_26 (sequence is synthesized)
ctctttaatgagggcattaattccattcatgagggcagagccctcatgactttgggccttaacccaaaaggctccacctcttaataccagcacaatgaggggtctggcactcttcctcat

SEQ ID NO: 848366 - DNA, 120 bp, Artificial Sequence
  ENSG00000189419_27 (sequence is synthesized)
gcttacgagatggctgctggaattccaggaatcacatgcaaattctagtcaggagcaaagaggaagagacacagtgaaaaggggtatacagcggcagaaggaagctcctcaaatgaactc

SEQ ID NO: 848367 - DNA, 120 bp, Artificial Sequence
  ENSG00000189419_28 (sequence is synthesized)
tgctagaactctagccagtagcttctccttctatcacagtggccagaactgtgacaagtgaccatccttaggggaaaaaagatgctgagaaatgtgaattttgttgccaccttacatttt

SEQ ID NO: 848368 - DNA, 120 bp, Artificial Sequence
  ENSG00000189419_29 (sequence is synthesized)
caaaggagttccattcgtaagtacagaacgctcagagaagaggcagcagatctaggatatggagcagcagctcttaagggcacagtgggaaggtttcaagactgaggaggatcttggatt

SEQ ID NO: 848369 - DNA, 120 bp, Artificial Sequence
  ENSG00000189419_30 (sequence is synthesized)
tgggtaggggaaggcagttcacagtattgtggaggaaatgctgtgaaagagaaagtggaaggcatggaagcttaaacttttaatatgactggtgaatacaaggatgaagggcaaagggaa

SEQ ID NO: 848370 - DNA, 120 bp, Artificial Sequence
  ENSG00000189419_31 (sequence is synthesized)
ttcagactcatggtggtcagattaagaccttcagcggctctgtctcccagccccacatacccacttccatgttctgctctttactgaagctgaaagtctgcaaccttcattctctgactc

SEQ ID NO: 848371 - DNA, 120 bp, Artificial Sequence
  ENSG00000189419_32 (sequence is synthesized)
ccttacattttcttaggcttcttgctagcttctgccaaaaagaggccctggcaggagattagatggcaggaggcagaggtaaggattccatgttaacaggtgctggaagttgctggtgtg

SEQ ID NO: 848372 - DNA, 120 bp, Artificial Sequence
  ENSG00000189419_33 (sequence is synthesized)
gcaatgagaactgggccccggtcaaggcagcactactttggtagatccagaatcaaccatgataaccgtgacagtgtcttcaacagtgcagcagtagacacaggcccctggtgctggaat

SEQ ID NO: 848373 - DNA, 120 bp, Artificial Sequence
  ENSG00000189419_34 (sequence is synthesized)
ccaatacagggacaggagcagcacggagtcacggaacaccgtcttgccttcatgtcactttaccatttcttctttctccctcttactctaccagctacctgtggagatgttgaacctttt

SEQ ID NO: 848374 - DNA, 120 bp, Artificial Sequence
  ENSG00000189419_35 (sequence is synthesized)
atctgtcgctgtctgcttaggaacagaagaaaaggcagctgattgcttgactcagctttcagcttgatttttttcctttggcagagtgaattggggtcccaggtgttcattttccttttg

SEQ ID NO: 848375 - DNA, 120 bp, Artificial Sequence
  ENSG00000189419_36 (sequence is synthesized)
tagtacctttcctcagcatgcaattaatacaaaaagaacaataaaccttaacaaagtttggcttgtattattccagactttcctcttggattttatgtacacttatctgaatccatgcag

SEQ ID NO: 848376 - DNA, 120 bp, Artificial Sequence
  ENSG00000189419_37 (sequence is synthesized)
atcatgtcatgtgtgtctgtgtgtttatacacatttttttttcggtgtgcctcattctgcaacttgattttttaaaaaattcgataactgatcttggagatctgtccatgttgttacata

SEQ ID NO: 848377 - DNA, 120 bp, Artificial Sequence
  ENSG00000189419_38 (sequence is synthesized)
tatgagatttttgtatttcctttaattaatggtgttcaagtagccgtttatgtaacgatgaacattcaggtttttgcaattttttgctcttaataaggtgccctggtgaacaaacattct

SEQ ID NO: 848378 - DNA, 120 bp, Artificial Sequence
  ENSG00000189419_39 (sequence is synthesized)
tgtacatgtgccagagtttctctggagtaattaaccagcgtggaattacagagttgtagaatgtgtgcatttttagttttattaaaactaaaaagtaaaactttaattttacagtttgcc

SEQ ID NO: 848379 - DNA, 120 bp, Artificial Sequence
  ENSG00000189419_40 (sequence is synthesized)
gtttttcagtctgtactggcagcgaatcatacatagcttagtttatcagacaagctgcttttcttgagcaaagaaagaactaggagagaaacggggctttggaaccctgatgcggcaatg

SEQ ID NO: 848380 - DNA, 120 bp, Artificial Sequence
  ENSG00000189419_41 (sequence is synthesized)
ctgaaagaggagaaatatcccaaggaagggaaaggtgtgttgcagaacgatgaaaaataggcggcttctcacagctgttctcaggggacgagacggggtgggatgcagctccgccggtgc

SEQ ID NO: 848381 - DNA, 120 bp, Artificial Sequence
  ENSG00000189419_42 (sequence is synthesized)
ctaacactaagggccctcatcctgccgattcagttgtgtcgggaccgccagtgctgtctcctcgtcagatgctgcttctggtctccccgcagaagatgccactggagttgccttttcaag

SEQ ID NO: 848382 - DNA, 120 bp, Artificial Sequence
  ENSG00000189419_43 (sequence is synthesized)
gatggggacatttgaaggccctggacgctcagctctgaggctggctgggatctcactagcaccccctggtggaggccggagccaggctgacgcgggaaagtggggcacggaagcgctgcg

SEQ ID NO: 848383 - DNA, 120 bp, Artificial Sequence
  ENSG00000189419_44 (sequence is synthesized)
gattggaccggcggcagctaggccgaaacgcctgtatttaaagggatagtaactcggactcgttctgcaatatccccacaagggcctgactgagcgagcgagcatggacggccgcggggc

SEQ ID NO: 848384 - DNA, 120 bp, Artificial Sequence
  ENSG00000189419_45 (sequence is synthesized)
tttctggacagtggccattcccagagccaggcaggaaggcctcgggaggctggggctcccgttcccggtgaagcggacgccgccagcgccccagaacccaggaggaagcacacaggcccc

SEQ ID NO: 848385 - DNA, 120 bp, Artificial Sequence
  ENSG00000189419_46 (sequence is synthesized)
acagagagtggttggcaagagtcactcggggattaggatgccggccaaatcgcggaatttgaggctggaatccaagctcaacaggaaagtagtgaaatacaaatggggaaaacagggctc

SEQ ID NO: 848386 - DNA, 120 bp, Artificial Sequence
  ENSG00000231652_0 (sequence is synthesized)
ttttttttccctcttaattcgagtttagtaatctgaaatgggcgcgcctaacagcagagtgagagatctaaattgagacaggacttggaggctccacccctcccatccccattacaatgg

SEQ ID NO: 848387 - DNA, 120 bp, Artificial Sequence
  ENSG00000231652_1 (sequence is synthesized)
cgcttctcgctgctgtggcaaacatcgcaaatccagggggtgagaaagcagttgctaaacgcaggcggccccacctggcccggcgtcccagctggccgcggagaacagagcgcgcccact

SEQ ID NO: 848388 - DNA, 120 bp, Artificial Sequence
  ENSG00000231652_2 (sequence is synthesized)
tccccggcccaccgggttcctcaggctgtttacactagcgctctaccaacgatgcccagggaaaatgttatgatttatcaccttaaaaaaaaaaagaagaagagaactcgcactgcagac

SEQ ID NO: 848389 - DNA, 120 bp, Artificial Sequence
  ENSG00000231652_3 (sequence is synthesized)
gttaggtgttgctacttggaaccctgaaaaaaaattacctaagaagatgcctttatatttttgctacagaaagaatttggtagaactgtaaagcttggagcaatctctgaacacagttag

SEQ ID NO: 848390 - DNA, 120 bp, Artificial Sequence
  ENSG00000231652_4 (sequence is synthesized)
ggttgggttggctctcctgtcagaatgaaggccagtggccggtggtgcccaggagttattgatgcccaacgctgtctggcttctttgcagctcctctctcctgctctctggcactgccac

SEQ ID NO: 848391 - DNA, 120 bp, Artificial Sequence
  ENSG00000231652_5 (sequence is synthesized)
catcttcagatgactcaggtttcaccatgactacaccataaaagcagggaactgccagaaactgttggaaaacagacacattcagtccctgacaacttaaactttctaattcatggagcg

SEQ ID NO: 848392 - DNA, 120 bp, Artificial Sequence
  ENSG00000231652_6 (sequence is synthesized)
gttttagatggtagcattctaatatggggcaaaatgcaaacggaaaagaggtcagcaaaaagatgtctcatgacaaagctatgtgctaaataaggaaaagtgagaaagtagcacctagac

SEQ ID NO: 848393 - DNA, 120 bp, Artificial Sequence
  ENSG00000231652_7 (sequence is synthesized)
aaactgtggtttggggaatccagaaacttgctttcctccctttcctgttccaccctttttctccctgctgaacagcttgcaaaggtccttatgtcctttccttcaggcagcctatcttta

SEQ ID NO: 848394 - DNA, 120 bp, Artificial Sequence
  ENSG00000231652_8 (sequence is synthesized)
ggatccctgggtgctgacctgttcctgacacagctgttactactggtctcctcacctccgttgttcagagaggaggaccatggtcaagggtgggccaagcaccaaggtctaactcagtgc

SEQ ID NO: 848395 - DNA, 120 bp, Artificial Sequence
  ENSG00000231652_9 (sequence is synthesized)
ttctcacatgccaatgtgtgtgagaatcacatgaaaacagactctgacttggcaggtctggaacgaggactgggattctgctttactttagcagacagtaggccatggagactctacaag

SEQ ID NO: 848396 - DNA, 120 bp, Artificial Sequence
  ENSG00000231652_10 (sequence is synthesized)
tgggggcaatttgggggcaatttgatgagcaaaggcaattaagaacacagaaaattcttctcaatctttcacttcataaaggtggattaataaattcaggttcattctagaggtaggcaa

SEQ ID NO: 848397 - DNA, 120 bp, Artificial Sequence
  ENSG00000231652_11 (sequence is synthesized)
acataagagggactgcaaaagattagatgataatgttgcctcccgagaagacttacagaaagtcttagaaccacattgtataaatctgtgtggattttaaagtgatgccaccttcctgtt

SEQ ID NO: 848398 - DNA, 120 bp, Artificial Sequence
  ENSG00000231652_12 (sequence is synthesized)
tatgccctccttcccacaatacacacttgtcgaaaggcgtagtcatgcaaaaatttaggcatatggatttgcatagagatgaggctattacatgcctggcacagagtagctattcaataa

SEQ ID NO: 848399 - DNA, 120 bp, Artificial Sequence
  ENSG00000231652_13 (sequence is synthesized)
acagagtagctattcaataaaaatgtgttaaaaggattaatgaaaaatgttcatctcagaagtgggattttttattaagaaaaactgaaaatgaggccaggcgtggtggttcacacctgt

SEQ ID NO: 848400 - DNA, 82 bp, Artificial Sequence
  ENSG00000231652_14 (sequence is synthesized)
gcgtggtggttcacacctgtaatcccagtaatttgggagaccgaggcgggtggatcacctaaggtcacgagttcgagaccaa

SEQ ID NO: 848401 - DNA, 80 bp, Artificial Sequence
  ENSG00000231652_15 (sequence is synthesized)
gcctgtaatcctgggcgttggaggttgcagtgagccgagatcgcagaattgctctccagcctgggcaacaagagcaaaac

SEQ ID NO: 848402 - DNA, 120 bp, Artificial Sequence
  ENSG00000235815_0 (sequence is synthesized)
gttgcacgcacaagctggagactccaacctcacggagctgcccctccagtggaaagaggcaggagccacaccacccacaggacggggatggaatgtacagcacctgacatgaagactggg

SEQ ID NO: 848403 - DNA, 120 bp, Artificial Sequence
  ENSG00000235815_1 (sequence is synthesized)
ctgtcacatttacacatcagtctcaggcatatttttatcagcagcatgaaaacggaatagtacctctagtgagtgggtgcttcccatggaatgaccaagtggagatggaccaacaggtcc

SEQ ID NO: 848404 - DNA, 120 bp, Artificial Sequence
  ENSG00000235815_2 (sequence is synthesized)
tagcctcctttactgaacaactgttgcaccaaagtgttccaggtagtgaaccaatagaaagcccagaaaatggaaaatcacccatttggagtaaatgtgcacattatttgattgcagcac

SEQ ID NO: 848405 - DNA, 120 bp, Artificial Sequence
  ENSG00000235815_3 (sequence is synthesized)
tgaaaacctgttttactcaagccgcaaatgaacctctgcacttccgtcttgccctgggtcccttggaataagcttgatttaattatcaaattacatggaaagaaataaggcatctaaaaa

SEQ ID NO: 848406 - DNA, 80 bp, Artificial Sequence
  ENSG00000235813_0 (sequence is synthesized)
agacatgtttgcttccccttccgccatgaacatggtcacccaggctggagcacggtggtgcaatcacagctcactgcagc

SEQ ID NO: 848407 - DNA, 120 bp, Artificial Sequence
  ENSG00000235813_1 (sequence is synthesized)
cagcctcaaacttcaaaggatcctcacatctcagcctgctgagtagggcctctcagcttgtggcatgattcactgaaatacatcaaacatgacagaagatgcaagcatttggaaacttac

SEQ ID NO: 848408 - DNA, 120 bp, Artificial Sequence
  ENSG00000235813_2 (sequence is synthesized)
atcagccatcatcaaattaaaaagctaaaaagtgctatcagctggcttgctcatcattgagtgacctgaagtgatggatgatggagaggaggttgctgtgagggtagaggtggctcagta

SEQ ID NO: 848409 - DNA, 120 bp, Artificial Sequence
  ENSG00000235813_3 (sequence is synthesized)
gtgccatgcactgggatgacagagatgactcagatgtgcccttgtcctcaatgtgttcatggttggatgaggagaacaccagtcttactctagtgactgaaggctaagacaaagactcca

SEQ ID NO: 848410 - DNA, 120 bp, Artificial Sequence
  ENSG00000235813_4 (sequence is synthesized)
gtgactgaaggctaagacaaagactccagcctcaaacttgaggaaggaagttcatgtttcttcctgggttggccaatagaaagtggtatttgtggccgggcatggtggctcacgcttgta

SEQ ID NO: 848411 - DNA, 120 bp, Artificial Sequence
  ENSG00000235819_0 (sequence is synthesized)
agggtcgctgggaaaactaagccttactgtccatcttgccttcaggataatgtgaaatatggcctaatttttgaagtttttttcttagaaattttactgaatccaaaataaaacaagaag

SEQ ID NO: 848412 - DNA, 120 bp, Artificial Sequence
  ENSG00000235819_1 (sequence is synthesized)
atcatggtggatatagcttccaaatttattctgcaataaaacagatggcagtagagttaaagaaaaaaatcccagcagttctttgtacagggatttggtgatttttcccataaagctgcg

SEQ ID NO: 848413 - DNA, 120 bp, Artificial Sequence
  ENSG00000235819_2 (sequence is synthesized)
atgaggatgaactcagagcaaaatctatggggagttttatacctggtatactatttgtagccttcgtagagggttctccattctagtcacaccgatttcctctctgctgcagacattgga

SEQ ID NO: 848414 - DNA, 120 bp, Artificial Sequence
  ENSG00000235819_3 (sequence is synthesized)
cagaagctctgagttcagagtcctcatgtactaatgccagcaacagtcagtttcacagtgcctctggccagctgcactcttatgcaactcaacaatttctcaccttttctccttttaaaa

SEQ ID NO: 848415 - DNA, 120 bp, Artificial Sequence
  ENSG00000235819_4 (sequence is synthesized)
acaatataagcaacaaaaccacccagctcccactgctgcataacccagaagtattggaaagatcacttcatacaattcttgaggcaatcctgcaggatcaagcaattaggtccttggagt

SEQ ID NO: 848416 - DNA, 120 bp, Artificial Sequence
  ENSG00000235819_5 (sequence is synthesized)
ggtggccagctcatcaaagcctctttgtactggtgcttcccctgatcctgttttgttcccttgtccctctttcctgctcctagctaggatcacactccccaataaagtttttgaacaatg
